United States Patent Application Publication US 2023/0026259 A1 - sequence listing, part 5

SEQ ID NO: 18900 - protein, 172 aa, Homo sapiens
  Payload ID: 3793
  Gene Symbol: CIRBP
  Gene Name: cold inducible RNA binding protein
  Uniprot ID: Q14011
  ENSP ID: ENSP00000322887
MASDEGKLFVGGLSFDTNEQSLEQVFSKYGQISEVVVVKDRETQRSRGFGFVTFENIDDAKDAMMAMNGKSVDGRQIRVDQAGKSSDNRSRGYRGGSAGGRGFFRGGRGRGRGFSRGGGDRGYGGNRFESRSGGYGGSRDYYSSRSQSGGYSDRSSGGSYRDSYDSYATHNE

SEQ ID NO: 18901 - protein, 58 aa, Homo sapiens
  Payload ID: 3793
  Gene Symbol: CIRBP
  Gene Name: cold inducible RNA binding protein
  ENSP ID: ENSP00000407512
RSQSGGYSDRSSGGSYRDSYDSYEAGQRAEARGIPGRPQTASRLASSAVASRVLSILC

SEQ ID NO: 18902 - protein, 263 aa, Homo sapiens
  Payload ID: 3793
  Gene Symbol: CIRBP
  Gene Name: cold inducible RNA binding protein
  Uniprot ID: Q14011
  ENSP ID: ENSP00000412831
MASDEGKLFVGGLSFDTNEQSLEQVFSKYGQISEVVVVKDRETQRSRGFGFVTFENIDDAKDAMMAMNGKSVDGRQIRVDQAGGGDRGYGGNRFESRSGGYGGSRDYYSSRSQSGGYSDRSSGGSYRDSYDSYGKSHSEGATLLWPAVGARFTLVPSPSTLGWTLRPCHCACPEEAHLSSQSHFYRRTQKPNETDQKGKGERGPAGQSARCMCGRRPASLGCGGWLLPGRRPRPGLASGVKLPLVASVPLHCACFLSSATHNE

SEQ ID NO: 18903 - protein, 60 aa, Homo sapiens
  Payload ID: 3793
  Gene Symbol: CIRBP
  Gene Name: cold inducible RNA binding protein
  ENSP ID: ENSP00000464728
MASDEGKLFVGGLSFDTNEQSLEQVFSKYGQISEDLSPLHSGGCERQGDPEISGIWVCHL

SEQ ID NO: 18904 - protein, 79 aa, Homo sapiens
  Payload ID: 3793
  Gene Symbol: CIRBP
  Gene Name: cold inducible RNA binding protein
  ENSP ID: ENSP00000464830
MASDEGKLFVGGLSFDTNEQSLEQVFSKYGQISEVCRWTADPSRPGRQVVRQPIPWVPWWLCRGPGLLPWGPRTGPWVL

SEQ ID NO: 18905 - protein, 168 aa, Homo sapiens
  Payload ID: 3793
  Gene Symbol: CIRBP
  Gene Name: cold inducible RNA binding protein
  ENSP ID: ENSP00000464906
MASDEGKLFVGGLSFDTNEQSLEQVFSKYGQISEVVVVKDRETQRSRGFGFVTFENIDDAKDAMMAMNGKSVDGRQIRVDQAGKSSDNRSRGYRGGSAGGRGFFRGGRGRGRGFSRGGGDRGYGGNRFESRSGGYGGSRDYYSSRSQSGGYSDRSSGGSYRDSYDSYG

SEQ ID NO: 18906 - protein, 297 aa, Homo sapiens
  Payload ID: 3793
  Gene Symbol: CIRBP
  Gene Name: cold inducible RNA binding protein
  ENSP ID: ENSP00000465077
MASDEGKLFVGGLSFDTNEQSLEQVFSKYGQISEVVVVKDRETQRSRGFGFVTFENIDDAKDAMMAMNGKSVDGRQIRVDQAGKSSDNRSRGYRGGSAGGRGFFRGGRGRGRGFSRGGGDRGYGGNRFESRSGGYGGSRDYYSSRSQSGGYSDRSSGGSYRDSYDSYGKSHSEGATLLWPAVGARFTLVPSPSTLGWTLRPCHCACPEEAHLSSQSHFYRRTQKPNETDQKGKGERGPAGQSARCMCGRRPASLGCGGWLLPGRRPRPGLASGVKLPLVASVPLHCACFLSSATHNE

SEQ ID NO: 18907 - protein, 79 aa, Homo sapiens; identical to SEQ ID NO: 18904
  Payload ID: 3793
  Gene Symbol: CIRBP
  Gene Name: cold inducible RNA binding protein
  ENSP ID: ENSP00000465114

SEQ ID NO: 18908 - protein, 148 aa, Homo sapiens
  Payload ID: 3793
  Gene Symbol: CIRBP
  Gene Name: cold inducible RNA binding protein
  ENSP ID: ENSP00000465334
MASDEGKLFVGGLSFDTNEQSLEQVFSKYGQISEVVVVKDRETQRSRGFGFVTFENIDDAKDAMMAMNGKSVDGRQIRVDQAGKSSDNRSRGYRGGSAGGRGFFRGGRGRGRGFSRGGGDRGYGGNRFESRSGGYGGSRDYYSSRSQS

SEQ ID NO: 18909 - protein, 105 aa, Homo sapiens
  Payload ID: 3793
  Gene Symbol: CIRBP
  Gene Name: cold inducible RNA binding protein
  ENSP ID: ENSP00000465338
MASDEGKLFVGGLSFDTNEQSLEQVFSKYGQISEVVVVKDRETQRSRGFGFVTFENIDDAKDAMMAMNGKSVDGRQIRVDQAGKSSDNRSRGYRGGSAGGRGFFR

SEQ ID NO: 18910 - protein, 297 aa, Homo sapiens; identical to SEQ ID NO: 18906
  Payload ID: 3793
  Gene Symbol: CIRBP
  Gene Name: cold inducible RNA binding protein
  ENSP ID: ENSP00000465558

SEQ ID NO: 18911 - protein, 172 aa, Homo sapiens; identical to SEQ ID NO: 18900
  Payload ID: 3793
  Gene Symbol: CIRBP
  Gene Name: cold inducible RNA binding protein
  Uniprot ID: Q14011
  ENSP ID: ENSP00000465779

SEQ ID NO: 18912 - protein, 297 aa, Homo sapiens; identical to SEQ ID NO: 18906
  Payload ID: 3793
  Gene Symbol: CIRBP
  Gene Name: cold inducible RNA binding protein
  ENSP ID: ENSP00000466025

SEQ ID NO: 18913 - protein, 172 aa, Homo sapiens; identical to SEQ ID NO: 18900
  Payload ID: 3793
  Gene Symbol: CIRBP
  Gene Name: cold inducible RNA binding protein
  Uniprot ID: Q14011
  ENSP ID: ENSP00000466110

SEQ ID NO: 18914 - protein, 73 aa, Homo sapiens
  Payload ID: 3793
  Gene Symbol: CIRBP
  Gene Name: cold inducible RNA binding protein
  ENSP ID: ENSP00000466131
  MOD_RES (1)..(1): Any amino acid
XLKEEGTEAMGGTGSSPGVGATEAPETTIAAGVRVVATVTGARAGPTETVMTVTPMEAAALGGQKCCAPNRTL

SEQ ID NO: 18915 - protein, 172 aa, Homo sapiens; identical to SEQ ID NO: 18900
  Payload ID: 3793
  Gene Symbol: CIRBP
  Gene Name: cold inducible RNA binding protein
  Uniprot ID: Q14011
  ENSP ID: ENSP00000466207

SEQ ID NO: 18916 - protein, 135 aa, Homo sapiens
  Payload ID: 3793
  Gene Symbol: CIRBP
  Gene Name: cold inducible RNA binding protein
  ENSP ID: ENSP00000466216
MASDEGKLFVGGLSFDTNEQSLEQVFSKYGQISEVVVVKDRETQRSRGFGFVTFENIDDAKDAMMAMNGKVRIRVLSRSPVSRMGHPPANPSRPLSPVCRWTADPSRPGRRRGPRLWGEPVRVQEWGLRRLQRLL

SEQ ID NO: 18917 - protein, 89 aa, Homo sapiens
  Payload ID: 3793
  Gene Symbol: CIRBP
  Gene Name: cold inducible RNA binding protein
  ENSP ID: ENSP00000466238
DEGKLFVGGLSFDTNEQSLEQVFSKYGQISEVVVVKDRETQRSRGFGFVTFENIDDAKDAMMAMNGKSVDGRQIRVDQPLRPSVLCAPQ

SEQ ID NO: 18918 - protein, 159 aa, Homo sapiens
  Payload ID: 3793
  Gene Symbol: CIRBP
  Gene Name: cold inducible RNA binding protein
  ENSP ID: ENSP00000466712
MASDEGKLFVGGLSFDTNEQSLEQVFSKYGQISEVVVVKDRETQRSRGFGFVTFENIDDAKDAMMAMNGKSVDGRQIRVDQAGKSSDNRSRGYRGGSAGGRGFFRGGRGRGRGFSRGGGDRGYGGNRFESRSGGYGGSRDYYSSRSQSGGYSDRSSGGS

SEQ ID NO: 18919 - protein, 297 aa, Homo sapiens; identical to SEQ ID NO: 18906
  Payload ID: 3793
  Gene Symbol: CIRBP
  Gene Name: cold inducible RNA binding protein
  ENSP ID: ENSP00000466897

SEQ ID NO: 18920 - protein, 38 aa, Homo sapiens
  Payload ID: 3793
  Gene Symbol: CIRBP
  Gene Name: cold inducible RNA binding protein
  ENSP ID: ENSP00000467028
MASDEGKLFVGGLSFDTNEQSLEQVFSKYGQISEVVVV

SEQ ID NO: 18921 - protein, 80 aa, Homo sapiens
  Payload ID: 3793
  Gene Symbol: CIRBP
  Gene Name: cold inducible RNA binding protein
  ENSP ID: ENSP00000467138
MASDEGKLFVGGLSFDTNEQSLEQVFSKYGQISEVVVVKDRETQRSRGFGFVTFENIDDAKDAMMAMNGKSVDGRQIRVD

SEQ ID NO: 18922 - protein, 135 aa, Homo sapiens; identical to SEQ ID NO: 18916
  Payload ID: 3793
  Gene Symbol: CIRBP
  Gene Name: cold inducible RNA binding protein
  ENSP ID: ENSP00000467307

SEQ ID NO: 18923 - protein, 168 aa, Homo sapiens; identical to SEQ ID NO: 18905
  Payload ID: 3793
  Gene Symbol: CIRBP
  Gene Name: cold inducible RNA binding protein
  ENSP ID: ENSP00000467449

SEQ ID NO: 18924 - protein, 168 aa, Homo sapiens; identical to SEQ ID NO: 18905
  Payload ID: 3793
  Gene Symbol: CIRBP
  Gene Name: cold inducible RNA binding protein
  ENSP ID: ENSP00000467734

SEQ ID NO: 18925 - protein, 79 aa, Homo sapiens; identical to SEQ ID NO: 18904
  Payload ID: 3793
  Gene Symbol: CIRBP
  Gene Name: cold inducible RNA binding protein
  ENSP ID: ENSP00000467791

SEQ ID NO: 18926 - protein, 168 aa, Homo sapiens; identical to SEQ ID NO: 18905
  Payload ID: 3793
  Gene Symbol: CIRBP
  Gene Name: cold inducible RNA binding protein
  ENSP ID: ENSP00000467848

SEQ ID NO: 18927 - protein, 79 aa, Homo sapiens; identical to SEQ ID NO: 18904
  Payload ID: 3793
  Gene Symbol: CIRBP
  Gene Name: cold inducible RNA binding protein
  ENSP ID: ENSP00000467876

SEQ ID NO: 18928 - protein, 202 aa, Homo sapiens
  Payload ID: 3793
  Gene Symbol: CIRBP
  Gene Name: cold inducible RNA binding protein
  ENSP ID: ENSP00000467948
MASDEGKLFVGGLSFDTNEQSLEQVFSKYGQISEVVVVKDRETQRSRGFGFVTFENIDDAKDAMMAMNGKSVDGRQIRVDQAGKSSDNRSRGYRGGSAGGRGFFRGGRGRGRGFSRGGGDRGYGGNRFESRSGGYGGSRDYYSSRSQSGGYSDRSSGGSYRDSYDSYEAGQRAEARGIPGRPQTASRLASSAVASRVLSILC

SEQ ID NO: 18929 - protein, 32 aa, Homo sapiens
  Payload ID: 3793
  Gene Symbol: CIRBP
  Gene Name: cold inducible RNA binding protein
  ENSP ID: ENSP00000468016
MASDEGKLFVGGLSFDTNEQSLEQVFSKYGQI

SEQ ID NO: 18930 - protein, 173 aa, Homo sapiens
  Payload ID: 3793
  Gene Symbol: CIRBP
  Gene Name: cold inducible RNA binding protein
  ENSP ID: ENSP00000468097
MASDEGKLFVGGLSFDTNEQSLEQVFSKYGQISEVVVVKDRETQRSRGFGFVTFENIDDAKDAMMAMNGKSVDGRQIRVDQAGKSSDNRSRGYRGGSAGGRGFFRGGRGRGRGFSRGECHEWVPWGCCEVLLVGAGTHFFLYVQEEGTEAMGGTGSSPGVGATEAPETTIAGE

SEQ ID NO: 18931 - protein, 60 aa, Homo sapiens; identical to SEQ ID NO: 18903
  Payload ID: 3793
  Gene Symbol: CIRBP
  Gene Name: cold inducible RNA binding protein
  ENSP ID: ENSP00000468229

SEQ ID NO: 18932 - protein, 168 aa, Homo sapiens; identical to SEQ ID NO: 18905
  Payload ID: 3793
  Gene Symbol: CIRBP
  Gene Name: cold inducible RNA binding protein
  ENSP ID: ENSP00000468645

SEQ ID NO: 18933 - protein, 172 aa, Homo sapiens; identical to SEQ ID NO: 18900
  Payload ID: 3793
  Gene Symbol: CIRBP
  Gene Name: cold inducible RNA binding protein
  Uniprot ID: Q14011
  ENSP ID: ENSP00000468788

SEQ ID NO: 18934 - protein, 297 aa, Homo sapiens; identical to SEQ ID NO: 18906
  Payload ID: 3793
  Gene Symbol: CIRBP
  Gene Name: cold inducible RNA binding protein
  ENSP ID: ENSP00000486590

SEQ ID NO: 18935 - protein, 153 aa, Homo sapiens
  Payload ID: 3794
  Gene Symbol: CSDC2
  Gene Name: cold shock domain containing C2, RNA binding
  Uniprot ID: Q9Y534
  ENSP ID: ENSP00000302485
MTSESTSPPVVPPLHSPKSPVWPTFPFHREGSRVWERGGVPPRDLPSPLPTKRTRTYSATARASAGPVFKGVCKQFSRSQGHGFITPENGSEDIFVHVSDIEGEYVPVEGDEVTYKMCPIPPKNQKFQAVEVVLTQLAPHTPHETWSGQVVGS

SEQ ID NO: 18936 - protein, 151 aa, Homo sapiens
  Payload ID: 3794
  Gene Symbol: CSDC2
  Gene Name: cold shock domain containing C2, RNA binding
  ENSP ID: ENSP00000417127
KSPVWPTFPFHREGSRVWERGGVPPRDLPSPLPTKRTRTYSATARASAGPVFKGVCKQFSRSQGHGFITPENGSEDIFVHVSEPRPNSSEVTTHRCGPRSRLMSCLWEENLPASLHRVLRRHHAVANSPGVGKDLKVVPTLHTEDGQRRDI

SEQ ID NO: 18937 - protein, 767 aa, Homo sapiens
  Payload ID: 3795
  Gene Symbol: CSDE1
  Gene Name: cold shock domain containing E1, RNA-binding
  Uniprot ID: O75534
  ENSP ID: ENSP00000261443
MSFDPNLLHNNGHNGYPNGTSAALRETGVIEKLLTSYGFIQCSERQARLFFHCSQYNGNLQDLKVGDDVEFEVSSDRRTGKPIAVKLVKIKQEILPEERMNGQEVFYLTYTPEDVEGNVQLETGDKINFVIDNNKHTGAVSARNIMLLKKKQARCQGVVCAMKEAFGFIERGDVVKEIFFHYSEFKGDLETLQPGDDVEFTIKDRNGKEVATDVRLLPQGTVIFEDISIEHFEGTVTKVIPKVPSKNQNDPLPGRIKVDFVIPKELPFGDKDTKSKVTLLEGDHVRFNISTDRRDKLERATNIEVLSNTFQFTNEAREMGVIAAMRDGFGFIKCVDRDVRMFFHFSEILDGNQLHIADEVEFTVVPDMLSAQRNHAIRIKKLPKGTVSFHSHSDHRFLGTVEKEATFSNPKTTSPNKGKEKEAEDGIIAYDDCGVKLTIAFQAKDVEGSTSPQIGDKVEFSISDKQRPGQQVATCVRLLGRNSNSKRLLGYVATLKDNFGFIETANHDKEIFFHYSEFSGDVDSLELGDMVEYSLSKGKGNKVSAEKVNKTHSVNGITEEADPTIYSGKVIRPLRSVDPTQTEYQGMIEIVEEGDMKGEVYPFGIVGMANKGDCLQKGESVKFQLCVLGQNAQTMAYNITPLRRATVECVKDQFGFINYEVGDSKKLFFHVKEVQDGIELQAGDEVEFSVILNQRTGKCSACNVWRVCEGPKAVAAPRPDRLVNRLKNITLDDASAPRLMVLRQPRGPDNSMGFGAERKIRQAGVID

SEQ ID NO: 18938 - protein, 767 aa, Homo sapiens; identical to SEQ ID NO: 18937
  Payload ID: 3795
  Gene Symbol: CSDE1
  Gene Name: cold shock domain containing E1, RNA-binding
  Uniprot ID: O75534
  ENSP ID: ENSP00000342408

SEQ ID NO: 18939 - protein, 798 aa, Homo sapiens
  Payload ID: 3795
  Gene Symbol: CSDE1
  Gene Name: cold shock domain containing E1, RNA-binding
  Uniprot ID: O75534
  ENSP ID: ENSP00000351329
MSFDPNLLHNNGHNGYPNGTSAALRETGVIEKLLTSYGFIQCSERQARLFFHCSQYNGNLQDLKVGDDVEFEVSSDRRTGKPIAVKLVKIKQEILPEERMNGQVVCAVPHNLESKSPAAPGQSPTGSVCYERNGEVFYLTYTPEDVEGNVQLETGDKINFVIDNNKHTGAVSARNIMLLKKKQARCQGVVCAMKEAFGFIERGDVVKEIFFHYSEFKGDLETLQPGDDVEFTIKDRNGKEVATDVRLLPQGTVIFEDISIEHFEGTVTKVIPKVPSKNQNDPLPGRIKVDFVIPKELPFGDKDTKSKVTLLEGDHVRFNISTDRRDKLERATNIEVLSNTFQFTNEAREMGVIAAMRDGFGFIKCVDRDVRMFFHFSEILDGNQLHIADEVEFTVVPDMLSAQRNHAIRIKKLPKGTVSFHSHSDHRFLGTVEKEATFSNPKTTSPNKGKEKEAEDGIIAYDDCGVKLTIAFQAKDVEGSTSPQIGDKVEFSISDKQRPGQQVATCVRLLGRNSNSKRLLGYVATLKDNFGFIETANHDKEIFFHYSEFSGDVDSLELGDMVEYSLSKGKGNKVSAEKVNKTHSVNGITEEADPTIYSGKVIRPLRSVDPTQTEYQGMIEIVEEGDMKGEVYPFGIVGMANKGDCLQKGESVKFQLCVLGQNAQTMAYNITPLRRATVECVKDQFGFINYEVGDSKKLFFHVKEVQDGIELQAGDEVEFSVILNQRTGKCSACNVWRVCEGPKAVAAPRPDRLVNRLKNITLDDASAPRLMVLRQPRGPDNSMGFGAERKIRQAGVID

SEQ ID NO: 18940 - protein, 813 aa, Homo sapiens
  Payload ID: 3795
  Gene Symbol: CSDE1
  Gene Name: cold shock domain containing E1, RNA-binding
  Uniprot ID: O75534
  ENSP ID: ENSP00000358543
MENVFTVSSDPHPSPAAPPSLSLPLSSSSTSSGTKKQKRTPTYQRSMSFDPNLLHNNGHNGYPNGTSAALRETGVIEKLLTSYGFIQCSERQARLFFHCSQYNGNLQDLKVGDDVEFEVSSDRRTGKPIAVKLVKIKQEILPEERMNGQEVFYLTYTPEDVEGNVQLETGDKINFVIDNNKHTGAVSARNIMLLKKKQARCQGVVCAMKEAFGFIERGDVVKEIFFHYSEFKGDLETLQPGDDVEFTIKDRNGKEVATDVRLLPQGTVIFEDISIEHFEGTVTKVIPKVPSKNQNDPLPGRIKVDFVIPKELPFGDKDTKSKVTLLEGDHVRFNISTDRRDKLERATNIEVLSNTFQFTNEAREMGVIAAMRDGFGFIKCVDRDVRMFFHFSEILDGNQLHIADEVEFTVVPDMLSAQRNHAIRIKKLPKGTVSFHSHSDHRFLGTVEKEATFSNPKTTSPNKGKEKEAEDGIIAYDDCGVKLTIAFQAKDVEGSTSPQIGDKVEFSISDKQRPGQQVATCVRLLGRNSNSKRLLGYVATLKDNFGFIETANHDKEIFFHYSEFSGDVDSLELGDMVEYSLSKGKGNKVSAEKVNKTHSVNGITEEADPTIYSGKVIRPLRSVDPTQTEYQGMIEIVEEGDMKGEVYPFGIVGMANKGDCLQKGESVKFQLCVLGQNAQTMAYNITPLRRATVECVKDQFGFINYEVGDSKKLFFHVKEVQDGIELQAGDEVEFSVILNQRTGKCSACNVWRVCEGPKAVAAPRPDRLVNRLKNITLDDASAPRLMVLRQPRGPDNSMGFGAERKIRQAGVID

SEQ ID NO: 18941 - protein, 844 aa, Homo sapiens
  Payload ID: 3795
  Gene Symbol: CSDE1
  Gene Name: cold shock domain containing E1, RNA-binding
  Uniprot ID: O75534
  ENSP ID: ENSP00000407724
MENVFTVSSDPHPSPAAPPSLSLPLSSSSTSSGTKKQKRTPTYQRSMSFDPNLLHNNGHNGYPNGTSAALRETGVIEKLLTSYGFIQCSERQARLFFHCSQYNGNLQDLKVGDDVEFEVSSDRRTGKPIAVKLVKIKQEILPEERMNGQVVCAVPHNLESKSPAAPGQSPTGSVCYERNGEVFYLTYTPEDVEGNVQLETGDKINFVIDNNKHTGAVSARNIMLLKKKQARCQGVVCAMKEAFGFIERGDVVKEIFFHYSEFKGDLETLQPGDDVEFTIKDRNGKEVATDVRLLPQGTVIFEDISIEHFEGTVTKVIPKVPSKNQNDPLPGRIKVDFVIPKELPFGDKDTKSKVTLLEGDHVRFNISTDRRDKLERATNIEVLSNTFQFTNEAREMGVIAAMRDGFGFIKCVDRDVRMFFHFSEILDGNQLHIADEVEFTVVPDMLSAQRNHAIRIKKLPKGTVSFHSHSDHRFLGTVEKEATFSNPKTTSPNKGKEKEAEDGIIAYDDCGVKLTIAFQAKDVEGSTSPQIGDKVEFSISDKQRPGQQVATCVRLLGRNSNSKRLLGYVATLKDNFGFIETANHDKEIFFHYSEFSGDVDSLELGDMVEYSLSKGKGNKVSAEKVNKTHSVNGITEEADPTIYSGKVIRPLRSVDPTQTEYQGMIEIVEEGDMKGEVYPFGIVGMANKGDCLQKGESVKFQLCVLGQNAQTMAYNITPLRRATVECVKDQFGFINYEVGDSKKLFFHVKEVQDGIELQAGDEVEFSVILNQRTGKCSACNVWRVCEGPKAVAAPRPDRLVNRLKNITLDDASAPRLMVLRQPRGPDNSMGFGAERKIRQAGVID

SEQ ID NO: 18942 - protein, 668 aa, Homo sapiens
  Payload ID: 3795
  Gene Symbol: CSDE1
  Gene Name: cold shock domain containing E1, RNA-binding
  ENSP ID: ENSP00000431297
MNGQEVFYLTYTPEDVEGNVQLETGDKINFVIDNNKHTGAVSARNIMLLKKKQARCQGVVCAMKEAFGFIERGDVVKEIFFHYSEFKGDLETLQPGDDVEFTIKDRNGKEVATDVRLLPQGTVIFEDISIEHFEGTVTKVIPKVPSKNQNDPLPGRIKVDFVIPKELPFGDKDTKSKVTLLEGDHVRFNISTDRRDKLERATNIEVLSNTFQFTNEAREMGVIAAMRDGFGFIKCVDRDVRMFFHFSEILDGNQLHIADEVEFTVVPDMLSAQRNHAIRIKKLPKGTVSFHSHSDHRFLGTVEKEATFSNPKTTSPNKGKEKEAEDGIIAYDDCGVKLTIAFQAKDVEGSTSPQIGDKVEFSISDKQRPGQQVATCVRLLGRNSNSKRLLGYVATLKDNFGFIETANHDKEIFFHYSEFSGDVDSLELGDMVEYSLSKGKGNKVSAEKVNKTHSVNGITEEADPTIYSGKVIRPLRSVDPTQTEYQGMIEIVEEGDMKGEVYPFGIVGMANKGDCLQKGESVKFQLCVLGQNAQTMAYNITPLRRATVECVKDQFGFINYEVGDSKKLFFHVKEVQDGIELQAGDEVEFSVILNQRTGKCSACNVWRVCEGPKAVAAPRPDRLVNRLKNITLDDASAPRLMVLRQPRGPDNSMGFGAERKIRQAGVID

SEQ ID NO: 18943 - protein, 46 aa, Homo sapiens
  Payload ID: 3795
  Gene Symbol: CSDE1
  Gene Name: cold shock domain containing E1, RNA-binding
  ENSP ID: ENSP00000431562
MSFDPNLLHNNGHNGYPNGTSAALRETGVIEKLLTSYGFIQCSERQ

SEQ ID NO: 18944 - protein, 36 aa, Homo sapiens
  Payload ID: 3795
  Gene Symbol: CSDE1
  Gene Name: cold shock domain containing E1, RNA-binding
  ENSP ID: ENSP00000431770
MNGQEVFYLTYTPEDVEGNVQLETGDKINFVIDNNK

SEQ ID NO: 18945 - protein, 7 aa, Homo sapiens
  Payload ID: 3795
  Gene Symbol: CSDE1
  Gene Name: cold shock domain containing E1, RNA-binding
  ENSP ID: ENSP00000432805
MSFDPNL

SEQ ID NO: 18946 - protein, 798 aa, Homo sapiens; identical to SEQ ID NO: 18939
  Payload ID: 3795
  Gene Symbol: CSDE1
  Gene Name: cold shock domain containing E1, RNA-binding
  Uniprot ID: O75534
  ENSP ID: ENSP00000432958

SEQ ID NO: 18947 - protein, 94 aa, Homo sapiens
  Payload ID: 3795
  Gene Symbol: CSDE1
  Gene Name: cold shock domain containing E1, RNA-binding
  ENSP ID: ENSP00000435185
MSFDPNLLHNNGHNGYPNGTSAALRETGVIEKLLTSYGFIQCSERQARLFFHCSQYNGNLQDLKVGDDVEFEVSSDRRTGKPIAVKLVKIKQEI

SEQ ID NO: 18948 - protein, 136 aa, Homo sapiens
  Payload ID: 3795
  Gene Symbol: CSDE1
  Gene Name: cold shock domain containing E1, RNA-binding
  ENSP ID: ENSP00000437159
MNGQEVFYLTYTPEDVEGNVQLETGDKINFVIDNNKHTGAVSARNIMLLKKKQARCQGVVCAMKEAFGFIERGDVVKEIFFHYSEFKGDLETLQPGDDVEFTIKDRNGKEVATDVRLLPQGTVIFEDISIEHFEGT

SEQ ID NO: 18949 - protein, 844 aa, Homo sapiens; identical to SEQ ID NO: 18941
  Payload ID: 3795
  Gene Symbol: CSDE1
  Gene Name: cold shock domain containing E1, RNA-binding
  Uniprot ID: O75534
  ENSP ID: ENSP00000481762

SEQ ID NO: 18950 - protein, 112 aa, Homo sapiens
  Payload ID: 3796
  Gene Symbol: CLPS
  Gene Name: colipase, pancreatic
  Uniprot ID: P04118
  ENSP ID: ENSP00000259938
MEKILILLLVALSVAYAAPGPRGIIINLENGELCMNSAQCKSNCCQHSSALGLARCTSMASENSECSVKTLYGIYYKCPCERGLTCEGDKTIVGSITNTNFGICHDAGRSKQ

SEQ ID NO: 18951 - protein, 98 aa, Homo sapiens
  Payload ID: 3796
  Gene Symbol: CLPS
  Gene Name: colipase, pancreatic
  ENSP ID: ENSP00000482919
MILLPQPPKKLGLQENGELCMNSAQCKSNCCQHSSALGLARCTSMASENSECSVKTLYGIYYKCPCERGLTCEGDKTIVGSITNTNFGICHDAGRSKQ

SEQ ID NO: 18952 - protein, 71 aa, Homo sapiens
  Payload ID: 3796
  Gene Symbol: CLPS
  Gene Name: colipase, pancreatic
  ENSP ID: ENSP00000483589
MEKILILLLVALSVAYAAPGPRGIIINLTLYGIYYKCPCERGLTCEGDKTIVGSITNTNFGICHDAGRSKQ

SEQ ID NO: 18953 - protein, 121 aa, Homo sapiens
  Payload ID: 3797
  Gene Symbol: CLPSL1
  Gene Name: colipase-like 1
  Uniprot ID: A2RUU4
  ENSP ID: ENSP00000362968
MMLPQWLLLLFLLFFFLFLLTRGSLSPTKYNLLELKESCIRNQDCETGCCQRAPDNCESHCAEKGSEGSLCQTQVFFGQYRACPCLRNLTCIYSKNEKWLSIAYGRCQKIGRQKLAKKMFF

SEQ ID NO: 18954 - protein, 42 aa, Homo sapiens
  Payload ID: 3797
  Gene Symbol: CLPSL1
  Gene Name: colipase-like 1
  ENSP ID: ENSP00000396556
GCCQRAPDNCESHCAEKGSEGSLCQTQLPATPCFLPSNTVRT

SEQ ID NO: 18955 - protein, 153 aa, Homo sapiens
  Payload ID: 3798
  Gene Symbol: CLPSL2
  Gene Name: colipase-like 2
  Uniprot ID: Q6UWE3
  ENSP ID: ENSP00000353639
MAAALALVAGVLSGAVLPLWSALPQYKKKITDRCFHHSECYSGCCLMDLDSGGAFCAPRARITMICLPQWLELFKGRDRIIFIYEAPTPSLVSAHNQGSYQHHLPLPDGLDVHIQGLDVFPPVPYDLEEDAGWSLLPWGHRPWLPPTCSKSSS

SEQ ID NO: 18956 - protein, 100 aa, Homo sapiens
  Payload ID: 3798
  Gene Symbol: CLPSL2
  Gene Name: colipase-like 2
  Uniprot ID: Q6UWE3
  ENSP ID: ENSP00000385898
MAAALALVAGVLSGAVLPLWSALPQYKKKITDRCFHHSECYSGCCLMDLDSGGAFCAPRARITMICLPQTKGATNIICPCRMGLTCISKDLMCSRRCHMI

SEQ ID NO: 18957 - protein, 336 aa, Homo sapiens
  Payload ID: 3799
  Gene Symbol: CCBE1
  Gene Name: collagen and calcium binding EGF domains 1
  ENSP ID: ENSP00000381241
RKKCCKGYKFVLGQCIPEDYDVCAEAPCEQQCTDNFGRVLCTCYPGYRYDRERHRKREKPYCLDIDECASSNGTLCAHICINTLGSYRCECREGYIREDDGKTCTRGDKYPNDTGHEKSENMVKAGTCCATCKEFYQMKQTVLQLKQKIALLPNNAADLGKYITGDKVLASNTYLPGPPGLPGGQGPPGSPGPKGSPGFPGMPGPPGQPGPRGSMGPMGPSPDLSHIKQGRRGPVGPPGAPGRDGSKGERGAPGPRGSPGPPGSFDFLLLMLADIRNDITELQEKVFGHRTHSSAEEFPLPQEFPSYPEAMDLGSGDDHPRRTETRDLRAPRDFYP

SEQ ID NO: 18958 - protein, 406 aa, Homo sapiens
  Payload ID: 3799
  Gene Symbol: CCBE1
  Gene Name: collagen and calcium binding EGF domains 1
  Uniprot ID: Q6UXH8
  ENSP ID: ENSP00000404464
MVPPPPSRGGAARGQLGRSLGPLLLLLALGHTWTYREEPEDGDREICSESKIATTKYPCLKSSGELTTCYRKKCCKGYKFVLGQCIPEDYDVCAEAPCEQQCTDNFGRVLCTCYPGYRYDRERHRKREKPYCLDIDECASSNGTLCAHICINTLGSYRCECREGYIREDDGKTCTRGDKYPNDTGHEKSENMVKAGTCCATCKEFYQMKQTVLQLKQKIALLPNNAADLGKYITGDKVLASNTYLPGPPGLPGGQGPPGSPGPKGSPGFPGMPGPPGQPGPRGSMGPMGPSPDLSHIKQGRRGPVGPPGAPGRDGSKGERGAPGPRGSPGPPGSFDFLLLMLADIRNDITELQEKVFGHRTHSSAEEFPLPQEFPSYPEAMDLGSGDDHPRRTETRDLRAPRDFYP

SEQ ID NO: 18959 - protein, 46 aa, Homo sapiens
  Payload ID: 3799
  Gene Symbol: CCBE1
  Gene Name: collagen and calcium binding EGF domains 1
  ENSP ID: ENSP00000467710
MVKAGTCCATCKEFYQMKQTVLQLKQKIALLPNNAADLGKYITGDK

SEQ ID NO: 18960 - protein, 622 aa, Homo sapiens
  Payload ID: 3800
  Gene Symbol: COLGALT1
  Gene Name: collagen beta(1-O)galactosyltransferase 1
  Uniprot ID: Q8NBJ5
  ENSP ID: ENSP00000252599
MAAAPRAGRRRGQPLLALLLLLLAPLPPGAPPGADAYFPEERWSPESPLQAPRVLIALLARNAAHALPTTLGALERLRHPRERTALWVATDHNMDNTSTVLREWLVAVKSLYHSVEWRPAEEPRSYPDEEGPKHWSDSRYEHVMKLRQAALKSARDMWADYILFVDADNLILNPDTLSLLIAENKTVVAPMLDSRAAYSNFWCGMTSQGYYKRTPAYIPIRKRDRRGCFAVPMVHSTFLIDLRKAASRNLAFYPPHPDYTWSFDDIIVFAFSCKQAEVQMYVCNKEEYGFLPVPLRAHSTLQDEAESFMHVQLEVMVKHPPAEPSRFISAPTKTPDKMGFDEVFMINLRRRQDRRERMLRALQAQEIECRLVEAVDGKAMNTSQVEALGIQMLPGYRDPYHGRPLTKGELGCFLSHYNIWKEVVDRGLQKSLVFEDDLRFEIFFKRRLMNLMRDVEREGLDWDLIYVGRKRMQVEHPEKAVPRVRNLVEADYSYWTLAYVISLQGARKLLAAEPLSKMLPVDEFLPVMFDKHPVSEYKAHFSLRNLHAFSVEPLLIYPTHYTGDDGYVSDTETSVVWNNEHVKTDWDRAKSQKMREQQALSREAKNSDVLQSPLDSAARDEL

SEQ ID NO: 18961 - protein, 218 aa, Homo sapiens
  Payload ID: 3800
  Gene Symbol: COLGALT1
  Gene Name: collagen beta(1-O)galactosyltransferase 1
  ENSP ID: ENSP00000468947
  MOD_RES (1)..(1): Any amino acid
XKAASRNLAFYPPHPDYTWSFDDIIVFAFSCKQAVKHPPAEPSRFISAPTKTPDKMGFDEVFMINLRRRQDRRERMLRALQAQEIECRLVEAVDGKAMNTSQVEALGIQMLPGYRDPYHGRPLTKGELGCFLSHYNIWKEVVDRGLQKSLVFEDDLRFEIFFKRRLMNLMRDVEREGLDWDLIYVGRKRMQVEHPEKAVPRVRNLVEADYSYWTLAYV

SEQ ID NO: 18962 - protein, 138 aa, Homo sapiens
  Payload ID: 3800
  Gene Symbol: COLGALT1
  Gene Name: collagen beta(1-O)galactosyltransferase 1
  ENSP ID: ENSP00000469817
MDNTSTVLREWLVAVKSLYHSVEWRPAEEPRSYPDEEGPKHWSDSRYEHVMKLRQAALKSARDMWADYILFVDADNLILNPDTLSLLIAENKTVVAPMLDSRAAYSNFWCGMTSQGYYKRTPAYIPIRKRDRRGCFAV

SEQ ID NO: 18963 - protein, 626 aa, Homo sapiens
  Payload ID: 3801
  Gene Symbol: COLGALT2
  Gene Name: collagen beta(1-O)galactosyltransferase 2
  Uniprot ID: Q8IYK4
  ENSP ID: ENSP00000354960
MAARPAATLAWSLLLLSSALLREGCRARFVAERDSEDDGEEPVVFPESPLQSPTVLVAVLARNAAHTLPHFLGCLERLDYPKSRMAIWAATDHNVDNTTEIFREWLKNVQRLYHYVEWRPMDEPESYPDEIGPKHWPTSRFAHVMKLRQAALRTAREKWSDYILFIDVDNFLTNPQTLNLLIAENKTIVAPMLESRGLYSNFWCGITPKGFYKRTPDYVQIREWKRTGCFPVPMVHSTFLIDLRKEASDKLTFYPPHQDYTWTFDDIIVFAFSSRQAGIQMYLCNREHYGYLPIPLKPHQTLQEDIENLIHVQIEAMIDRPPMEPSQYVSVVPKYPDKMGFDEIFMINLKRRKDRRDRMLRTLYEQEIEVKIVEAVDGKALNTSQLKALNIEMLPGYRDPYSSRPLTRGEIGCFLSHYSVWKEVIDRELEKTLVIEDDVRFEHQFKKKLMKLMDNIDQAQLDWELIYIGRKRMQVKEPEKAVPNVANLVEADYSYWTLGYVISLEGAQKLVGANPFGKMLPVDEFLPVMYNKHPVAEYKEYYESRDLKAFSAEPLLIYPTHYTGQPGYLSDTETSTIWDNETVATDWDRTHAWKSRKQSRIYSNAKNTEALPPPTSLDTVPSRDEL

SEQ ID NO: 18964 - protein, 363 aa, Homo sapiens
  Payload ID: 3801
  Gene Symbol: COLGALT2
  Gene Name: collagen beta(1-O)galactosyltransferase 2
  ENSP ID: ENSP00000356490
MFSDCWLCPSLGSSGIQMYLCNREHYGYLPIPLKPHQTLQEDIENLIHVQIEAMIDRPPMEPSQYVSVVPKYPDKMGFDEIFMINLKRRKDRRDRMLRTLYEQEIEVKIVEAVDGKALNTSQLKALNIEMLPGYRDPYSSRPLTRGEIGCFLSHYSVWKEVIDRELEKTLVIEDDVRFEHQFKKKLMKLMDNIDQAQLDWELIYIGRKRMQVKEPEKAVPNVANLVEADYSYWTLGYVISLEGAQKLVGANPFGKMLPVDEFLPVMYNKHPVAEYKEYYESRDLKAFSAEPLLIYPTHYTGQPGYLSDTETSTIWDNETVATDWDRTHAWKSRKQSRIYSNAKNTEALPPPTSLDTVPSRDEL

SEQ ID NO: 18965 - protein, 234 aa, Homo sapiens
  Payload ID: 3801
  Gene Symbol: COLGALT2
  Gene Name: collagen beta(1-O)galactosyltransferase 2
  ENSP ID: ENSP00000356491
MLPGYRDPYSSRPLTRGEIGCFLSHYSVWKEVIDRELEKTLVIEDDVRFEHQFKKKLMKLMDNIDQAQLDWELIYIGRKRMQVKEPEKAVPNVANLVEADYSYWTLGYVISLEGAQKLVGANPFGKMLPVDEFLPVMYNKHPVAEYKEYYESRDLKAFSAEPLLIYPTHYTGQPGYLSDTETSTIWDNETVATDWDRTHAWKSRKQSRIYSNAKNTEALPPPTSLDTVPSRDEL

SEQ ID NO: 18966 - protein, 243 aa, Homo sapiens
  Payload ID: 3802
  Gene Symbol: CTHRC1
  Gene Name: collagen triple helix repeat containing 1
  Uniprot ID: Q96CG8
  ENSP ID: ENSP00000330523
MRPQGPAASPQRLRGLLLLLLLQLPAPSSASEIPKGKQKAQLRQREVVDLYNGMCLQGPAGVPGRDGSPGANGIPGTPGIPGRDGFKGEKGECLRESFEESWTPNYKQCSWSSLNYGIDLGKIAECTFTKMRSNSALRVLFSGSLRLKCRNACCQRWYFTFNGAECSGPLPIEAIIYLDQGSPEMNSTINIHRTSSVEGLCEGIGAGLVDVAIWVGTCSDYPKGDASTGWNSVSRIIIEELPK

SEQ ID NO: 18967 - protein, 147 aa, Homo sapiens
  Payload ID: 3802
  Gene Symbol: CTHRC1
  Gene Name: collagen triple helix repeat containing 1
  ENSP ID: ENSP00000416045
MRPQGPAASPQRLRGLLLLLLLQLPAPSSASEIPKGKQKAQLRQREVVDLYNGMCLQGPAGVPGRDGSPGANGIPGTPGIPGRDGFKGEKGECLRESFEESWTPNYKQCSWSSLNYGIDLGKIAVSLNYFKIEARFKGFHILVLIFR

SEQ ID NO: 18968 - protein, 113 aa, Homo sapiens
  Payload ID: 3802
  Gene Symbol: CTHRC1
  Gene Name: collagen triple helix repeat containing 1
  ENSP ID: ENSP00000430399
MRSNSALRVLFSGSLRLKCRNACCQRWYFTFNGAECSGPLPIEAIIYLDQGSPEMNSTINIHRTSSVEGLCEGIGAGLVDVAIWVGTCSDYPKGDASTGWNSVSRIIIEELPK

SEQ ID NO: 18969 - protein, 229 aa, Homo sapiens
  Payload ID: 3802
  Gene Symbol: CTHRC1
  Gene Name: collagen triple helix repeat containing 1
  Uniprot ID: Q96CG8
  ENSP ID: ENSP00000430550
MWPPGRSITVKLREKTVSRKLEMNGPSAFQGLICGKYNGMCLQGPAGVPGRDGSPGANGIPGTPGIPGRDGFKGEKGECLRESFEESWTPNYKQCSWSSLNYGIDLGKIAECTFTKMRSNSALRVLFSGSLRLKCRNACCQRWYFTFNGAECSGPLPIEAIIYLDQGSPEMNSTINIHRTSSVEGLCEGIGAGLVDVAIWVGTCSDYPKGDASTGWNSVSRIIIEELPK

SEQ ID NO: 18970 - protein, 1464 aa, Homo sapiens
  Payload ID: 3803
  Gene Symbol: COL1A1
  Gene Name: collagen, type I, alpha 1
  Uniprot ID: P02452
  ENSP ID: ENSP00000225964
MFSFVDLRLLLLLAATALLTHGQEEGQVEGQDEDIPPITCVQNGLRYHDRDVWKPEPCRICVCDNGKVLCDDVICDETKNCPGAEVPEGECCPVCPDGSESPTDQETTGVEGPKGDTGPRGPRGPAGPPGRDGIPGQPGLPGPPGPPGPPGPPGLGGNFAPQLSYGYDEKSTGGISVPGPMGPSGPRGLPGPPGAPGPQGFQGPPGEPGEPGASGPMGPRGPPGPPGKNGDDGEAGKPGRPGERGPPGPQGARGLPGTAGLPGMKGHRGFSGLDGAKGDAGPAGPKGEPGSPGENGAPGQMGPRGLPGERGRPGAPGPAGARGNDGATGAAGPPGPTGPAGPPGFPGAVGAKGEAGPQGPRGSEGPQGVRGEPGPPGPAGAAGPAGNPGADGQPGAKGANGAPGIAGAPGFPGARGPSGPQGPGGPPGPKGNSGEPGAPGSKGDTGAKGEPGPVGVQGPPGPAGEEGKRGARGEPGPTGLPGPPGERGGPGSRGFPGADGVAGPKGPAGERGSPGPAGPKGSPGEAGRPGEAGLPGAKGLTGSPGSPGPDGKTGPPGPAGQDGRPGPPGPPGARGQAGVMGFPGPKGAAGEPGKAGERGVPGPPGAVGPAGKDGEAGAQGPPGPAGPAGERGEQGPAGSPGFQGLPGPAGPPGEAGKPGEQGVPGDLGAPGPSGARGERGFPGERGVQGPPGPAGPRGANGAPGNDGAKGDAGAPGAPGSQGAPGLQGMPGERGAAGLPGPKGDRGDAGPKGADGSPGKDGVRGLTGPIGPPGPAGAPGDKGESGPSGPAGPTGARGAPGDRGEPGPPGPAGFAGPPGADGQPGAKGEPGDAGAKGDAGPPGPAGPAGPPGPIGNVGAPGAKGARGSAGPPGATGFPGAAGRVGPPGPSGNAGPPGPPGPAGKEGGKGPRGETGPAGRPGEVGPPGPPGPAGEKGSPGADGPAGAPGTPGPQGIAGQRGVVGLPGQRGERGFPGLPGPSGEPGKQGPSGASGERGPPGPMGPPGLAGPPGESGREGAPGAEGSPGRDGSPGAKGDRGETGPAGPPGAPGAPGAPGPVGPAGKSGDRGETGPAGPAGPVGPVGARGPAGPQGPRGDKGETGEQGDRGIKGHRGFSGLQGPPGPPGSPGEQGPSGASGPAGPRGPPGSAGAPGKDGLNGLPGPIGPPGPRGRTGDAGPVGPPGPPGPPGPPGPPSAGFDFSFLPQPPQEKAHDGGRYYRADDANVVRDRDLEVDTTLKSLSQQIENIRSPEGSRKNPARTCRDLKMCHSDWKSGEYWIDPNQGCNLDAIKVFCNMETGETCVYPTQPSVAQKNWYISKNPKDKRHVWFGESMTDGFQFEYGGQGSDPADVAIQLTFLRLMSTEASQNITYHCKNSVAYMDQQTGNLKKALLLQGSNEIEIRAEGNSRFTYSVTVDGCTSHTGAWGKTVIEYKTTKTSRLPIIDVAPLDVGAPDQEFGFDVGPVCFL

SEQ ID NO: 18971 - protein, 154 aa, Homo sapiens
  Payload ID: 3803
  Gene Symbol: COL1A1
  Gene Name: collagen, type I, alpha 1
  ENSP ID: ENSP00000460459
MRSRRAFKDLRKEERGEGREVKNPSVPLRPGGKVVKLGVAVTTDNAPLPPVPVPPITCVQNGLRYHDRDVWKPEPCRICVCDNGKVLCDDVICDETKNCPGAEVPEGECCPVCPDGSESPTDQETTGVEGPKGDTGPRGPRGPAGPPGRDGIPG

SEQ ID NO: 18972 - protein, 1366 aa, Homo sapiens
  Payload ID: 3804
  Gene Symbol: COL1A2
  Gene Name: collagen, type I, alpha 2
  Uniprot ID: P08123
  ENSP ID: ENSP00000297268
MLSFVDTRTLLLLAVTLCLATCQSLQEETVRKGPAGDRGPRGERGPPGPPGRDGEDGPTGPPGPPGPPGPPGLGGNFAAQYDGKGVGLGPGPMGLMGPRGPPGAAGAPGPQGFQGPAGEPGEPGQTGPAGARGPAGPPGKAGEDGHPGKPGRPGERGVVGPQGARGFPGTPGLPGFKGIRGHNGLDGLKGQPGAPGVKGEPGAPGENGTPGQTGARGLPGERGRVGAPGPAGARGSDGSVGPVGPAGPIGSAGPPGFPGAPGPKGEIGAVGNAGPAGPAGPRGEVGLPGLSGPVGPPGNPGANGLTGAKGAAGLPGVAGAPGLPGPRGIPGPVGAAGATGARGLVGEPGPAGSKGESGNKGEPGSAGPQGPPGPSGEEGKRGPNGEAGSAGPPGPPGLRGSPGSRGLPGADGRAGVMGPPGSRGASGPAGVRGPNGDAGRPGEPGLMGPRGLPGSPGNIGPAGKEGPVGLPGIDGRPGPIGPAGARGEPGNIGFPGPKGPTGDPGKNGDKGHAGLAGARGAPGPDGNNGAQGPPGPQGVQGGKGEQGPPGPPGFQGLPGPSGPAGEVGKPGERGLHGEFGLPGPAGPRGERGPPGESGAAGPTGPIGSRGPSGPPGPDGNKGEPGVVGAVGTAGPSGPSGLPGERGAAGIPGGKGEKGEPGLRGEIGNPGRDGARGAPGAVGAPGPAGATGDRGEAGAAGPAGPAGPRGSPGERGEVGPAGPNGFAGPAGAAGQPGAKGERGAKGPKGENGVVGPTGPVGAAGPAGPNGPPGPAGSRGDGGPPGMTGFPGAAGRTGPPGPSGISGPPGPPGPAGKEGLRGPRGDQGPVGRTGEVGAVGPPGFAGEKGPSGEAGTAGPPGTPGPQGLLGAPGILGLPGSRGERGLPGVAGAVGEPGPLGIAGPPGARGPPGAVGSPGVNGAPGEAGRDGNPGNDGPPGRDGQPGHKGERGYPGNIGPVGAAGAPGPHGPVGPAGKHGNRGETGPSGPVGPAGAVGPRGPSGPQGIRGDKGEPGEKGPRGLPGLKGHNGLQGLPGIAGHHGDQGAPGSVGPAGPRGPAGPSGPAGKDGRTGHPGTVGPAGIRGPQGHQGPAGPPGPPGPPGPPGVSGGGYDFGYDGDFYRADQPRSAPSLRPKDYEVDATLKSLNNQIETLLTPEGSRKNPARTCRDLRLSHPEWSSGYYWIDPNQGCTMDAIKVYCDFSTGETCIRAQPENIPAKNWYRSSKDKKHVWLGETINAGSQFEYNVEGVTSKEMATQLAFMRLLANYASQNITYHCKNSIAYMDEETGNLKKAVILQGSNDVELVAEGNSRFTYTVLVDGCSKKTNEWGKTIIEYKTNKPSRLPFLDIAPLDIGGADQEFFVDIGPVCFK

SEQ ID NO: 18973 - protein, 1364 aa, Homo sapiens
  Payload ID: 3804
  Gene Symbol: COL1A2
  Gene Name: collagen, type I, alpha 2
  ENSP ID: ENSP00000477719
MLSFVDTRTLLLLAVTLCLATCQFFETVRKGPAGDRGPRGERGPPGPPGRDGEDGPTGPPGPPGPPGPPGLGGNFAAQYDGKGVGLGPGPMGLMGPRGPPGAAGAPGPQGFQGPAGEPGEPGQTGPAGARGPAGPPGKAGEDGHPGKPGRPGERGVVGPQGARGFPGTPGLPGFKGIRGHNGLDGLKGQPGAPGVKGEPGAPGENGTPGQTGARGLPGERGRVGAPGPAGARGSDGSVGPVGPAGPIGSAGPPGFPGAPGPKGEIGAVGNAGPAGPAGPRGEVGLPGLSGPVGPPGNPGANGLTGAKGAAGLPGVAGAPGLPGPRGIPGPVGAAGATGARGLVGEPGPAGSKGESGNKGEPGSAGPQGPPGPSGEEGKRGPNGEAGSAGPPGPPGLRGSPGSRGLPGADGRAGVMGPPGSRGASGPAGVRGPNGDAGRPGEPGLMGPRGLPGSPGNIGPAGKEGPVGLPGIDGRPGPIGPAGARGEPGNIGFPGPKGPTGDPGKNGDKGHAGLAGARGAPGPDGNNGAQGPPGPQGVQGGKGEQGPPGPPGFQGLPGPSGPAGEVGKPGERGLHGEFGLPGPAGPRGERGPPGESGAAGPTGPIGSRGPSGPPGPDGNKGEPGVVGAVGTAGPSGPSGLPGERGAAGIPGGKGEKGEPGLRGEIGNPGRDGARGAPGAVGAPGPAGATGDRGEAGAAGPAGPAGPRGSPGERGEVGPAGPNGFAGPAGAAGQPGAKGERGAKGPKGENGVVGPTGPVGAAGPAGPNGPPGPAGSRGDGGPPGMTGFPGAAGRTGPPGPSGISGPPGPPGPAGKEGLRGPRGDQGPVGRTGEVGAVGPPGFAGEKGPSGEAGTAGPPGTPGPQGLLGAPGILGLPGSRGERGLPGVAGAVGEPGPLGIAGPPGARGPPGAVGSPGVNGAPGEAGRDGNPGNDGPPGRDGQPGHKGERGYPGNIGPVGAAGAPGPHGPVGPAGKHGNRGETGPSGPVGPAGAVGPRGPSGPQGIRGDKGEPGEKGPRGLPGLKGHNGLQGLPGIAGHHGDQGAPGSVGPAGPRGPAGPSGPAGKDGRTGHPGTVGPAGIRGPQGHQGPAGPPGPPGPPGPPGVSGGGYDFGYDGDFYRADQPRSAPSLRPKDYEVDATLKSLNNQIETLLTPEGSRKNPARTCRDLRLSHPEWSSGYYWIDPNQGCTMDAIKVYCDFSTGETCIRAQPENIPAKNWYRSSKDKKHVWLGETINAGSQFEYNVEGVTSKEMATQLAFMRLLANYASQNITYHCKNSIAYMDEETGNLKKAVILQGSNDVELVAEGNSRFTYTVLVDGCSKKTNEWGKTIIEYKTNKPSRLPFLDIAPLDIGGADQEFFVDIGPVCFK

SEQ ID NO: 18974 - protein, 1418 aa, Homo sapiens
  Payload ID: 3805
  Gene Symbol: COL2A1
  Gene Name: collagen, type II, alpha 1
  Uniprot ID: P02458
  ENSP ID: ENSP00000338213
MIRLGAPQTLVLLTLLVAAVLRCQGQDVRQPGPKGQKGEPGDIKDIVGPKGPPGPQGPAGEQGPRGDRGDKGEKGAPGPRGRDGEPGTPGNPGPPGPPGPPGPPGLGGNFAAQMAGGFDEKAGGAQLGVMQGPMGPMGPRGPPGPAGAPGPQGFQGNPGEPGEPGVSGPMGPRGPPGPPGKPGDDGEAGKPGKAGERGPPGPQGARGFPGTPGLPGVKGHRGYPGLDGAKGEAGAPGVKGESGSPGENGSPGPMGPRGLPGERGRTGPAGAAGARGNDGQPGPAGPPGPVGPAGGPGFPGAPGAKGEAGPTGARGPEGAQGPRGEPGTPGSPGPAGASGNPGTDGIPGAKGSAGAPGIAGAPGFPGPRGPPGPQGATGPLGPKGQTGEPGIAGFKGEQGPKGEPGPAGPQGAPGPAGEEGKRGARGEPGGVGPIGPPGERGAPGNRGFPGQDGLAGPKGAPGERGPSGLAGPKGANGDPGRPGEPGLPGARGLTGRPGDAGPQGKVGPSGAPGEDGRPGPPGPQGARGQPGVMGFPGPKGANGEPGKAGEKGLPGAPGLRGLPGKDGETGAAGPPGPAGPAGERGEQGAPGPSGFQGLPGPPGPPGEGGKPGDQGVPGEAGAPGLVGPRGERGFPGERGSPGAQGLQGPRGLPGTPGTDGPKGASGPAGPPGAQGPPGLQGMPGERGAAGIAGPKGDRGDVGEKGPEGAPGKDGGRGLTGPIGPPGPAGANGEKGEVGPPGPAGSAGARGAPGERGETGPPGPAGFAGPPGADGQPGAKGEQGEAGQKGDAGAPGPQGPSGAPGPQGPTGVTGPKGARGAQGPPGATGFPGAAGRVGPPGSNGNPGPPGPPGPSGKDGPKGARGDSGPPGRAGEPGLQGPAGPPGEKGEPGDDGPSGAEGPPGPQGLAGQRGIVGLPGQRGERGFPGLPGPSGEPGKQGAPGASGDRGPPGPVGPPGLTGPAGEPGREGSPGADGPPGRDGAAGVKGDRGETGAVGAPGAPGPPGSPGPAGPTGKQGDRGEAGAQGPMGPSGPAGARGIQGPQGPRGDKGEAGEPGERGLKGHRGFTGLQGLPGPPGPSGDQGASGPAGPSGPRGPPGPVGPSGKDGANGIPGPIGPPGPRGRSGETGPAGPPGNPGPPGPPGPPGPGIDMSAFAGLGPREKGPDPLQYMRADQAAGGLRQHDAEVDATLKSLNNQIESIRSPEGSRKNPARTCRDLKLCHPEWKSGDYWIDPNQGCTLDAMKVFCNMETGETCVYPNPANVPKKNWWSSKSKEKKHIWFGETINGGFHFSYGDDNLAPNTANVQMTFLRLLSTEGSQNITYHCKNSIAYLDEAAGNLKKALLIQGSNDVEIRAEGNSRFTYTALKDGCTKHTGKWGKTVIEYRSQKTSRLPIIDIAPMDIGGPEQEFGVDIGPVCFL

SEQ ID NO: 18975 - protein, 1487 aa, Homo sapiens
  Payload ID: 3805
  Gene Symbol: COL2A1
  Gene Name: collagen, type II, alpha 1
  Uniprot ID: P02458
  ENSP ID: ENSP00000369889
MIRLGAPQTLVLLTLLVAAVLRCQGQDVQEAGSCVQDGQRYNDKDVWKPEPCRICVCDTGTVLCDDIICEDVKDCLSPEIPFGECCPICPTDLATASGQPGPKGQKGEPGDIKDIVGPKGPPGPQGPAGEQGPRGDRGDKGEKGAPGPRGRDGEPGTPGNPGPPGPPGPPGPPGLGGNFAAQMAGGFDEKAGGAQLGVMQGPMGPMGPRGPPGPAGAPGPQGFQGNPGEPGEPGVSGPMGPRGPPGPPGKPGDDGEAGKPGKAGERGPPGPQGARGFPGTPGLPGVKGHRGYPGLDGAKGEAGAPGVKGESGSPGENGSPGPMGPRGLPGERGRTGPAGAAGARGNDGQPGPAGPPGPVGPAGGPGFPGAPGAKGEAGPTGARGPEGAQGPRGEPGTPGSPGPAGASGNPGTDGIPGAKGSAGAPGIAGAPGFPGPRGPPGPQGATGPLGPKGQTGEPGIAGFKGEQGPKGEPGPAGPQGAPGPAGEEGKRGARGEPGGVGPIGPPGERGAPGNRGFPGQDGLAGPKGAPGERGPSGLAGPKGANGDPGRPGEPGLPGARGLTGRPGDAGPQGKVGPSGAPGEDGRPGPPGPQGARGQPGVMGFPGPKGANGEPGKAGEKGLPGAPGLRGLPGKDGETGAAGPPGPAGPAGERGEQGAPGPSGFQGLPGPPGPPGEGGKPGDQGVPGEAGAPGLVGPRGERGFPGERGSPGAQGLQGPRGLPGTPGTDGPKGASGPAGPPGAQGPPGLQGMPGERGAAGIAGPKGDRGDVGEKGPEGAPGKDGGRGLTGPIGPPGPAGANGEKGEVGPPGPAGSAGARGAPGERGETGPPGPAGFAGPPGADGQPGAKGEQGEAGQKGDAGAPGPQGPSGAPGPQGPTGVTGPKGARGAQGPPGATGFPGAAGRVGPPGSNGNPGPPGPPGPSGKDGPKGARGDSGPPGRAGEPGLQGPAGPPGEKGEPGDDGPSGAEGPPGPQGLAGQRGIVGLPGQRGERGFPGLPGPSGEPGKQGAPGASGDRGPPGPVGPPGLTGPAGEPGREGSPGADGPPGRDGAAGVKGDRGETGAVGAPGAPGPPGSPGPAGPTGKQGDRGEAGAQGPMGPSGPAGARGIQGPQGPRGDKGEAGEPGERGLKGHRGFTGLQGLPGPPGPSGDQGASGPAGPSGPRGPPGPVGPSGKDGANGIPGPIGPPGPRGRSGETGPAGPPGNPGPPGPPGPPGPGIDMSAFAGLGPREKGPDPLQYMRADQAAGGLRQHDAEVDATLKSLNNQIESIRSPEGSRKNPARTCRDLKLCHPEWKSGDYWIDPNQGCTLDAMKVFCNMETGETCVYPNPANVPKKNWWSSKSKEKKHIWFGETINGGFHFSYGDDNLAPNTANVQMTFLRLLSTEGSQNITYHCKNSIAYLDEAAGNLKKALLIQGSNDVEIRAEGNSRFTYTALKDGCTKHTGKWGKTVIEYRSQKTSRLPIIDIAPMDIGGPEQEFGVDIGPVCFL

SEQ ID NO: 18976 - protein, 1466 aa, Homo sapiens
  Payload ID: 3806
  Gene Symbol: COL3A1
  Gene Name: collagen, type III, alpha 1
  Uniprot ID: P02461
  ENSP ID: ENSP00000304408
MMSFVQKGSWLLLALLHPTIILAQQEAVEGGCSHLGQSYADRDVWKPEPCQICVCDSGSVLCDDIICDDQELDCPNPEIPFGECCAVCPQPPTAPTRPPNGQGPQGPKGDPGPPGIPGRNGDPGIPGQPGSPGSPGPPGICESCPTGPQNYSPQYDSYDVKSGVAVGGLAGYPGPAGPPGPPGPPGTSGHPGSPGSPGYQGPPGEPGQAGPSGPPGPPGAIGPSGPAGKDGESGRPGRPGERGLPGPPGIKGPAGIPGFPGMKGHRGFDGRNGEKGETGAPGLKGENGLPGENGAPGPMGPRGAPGERGRPGLPGAAGARGNDGARGSDGQPGPPGPPGTAGFPGSPGAKGEVGPAGSPGSNGAPGQRGEPGPQGHAGAQGPPGPPGINGSPGGKGEMGPAGIPGAPGLMGARGPPGPAGANGAPGLRGGAGEPGKNGAKGEPGPRGERGEAGIPGVPGAKGEDGKDGSPGEPGANGLPGAAGERGAPGFRGPAGPNGIPGEKGPAGERGAPGPAGPRGAAGEPGRDGVPGGPGMRGMPGSPGGPGSDGKPGPPGSQGESGRPGPPGPSGPRGQPGVMGFPGPKGNDGAPGKNGERGGPGGPGPQGPPGKNGETGPQGPPGPTGPGGDKGDTGPPGPQGLQGLPGTGGPPGENGKPGEPGPKGDAGAPGAPGGKGDAGAPGERGPPGLAGAPGLRGGAGPPGPEGGKGAAGPPGPPGAAGTPGLQGMPGERGGLGSPGPKGDKGEPGGPGADGVPGKDGPRGPTGPIGPPGPAGQPGDKGEGGAPGLPGIAGPRGSPGERGETGPPGPAGFPGAPGQNGEPGGKGERGAPGEKGEGGPPGVAGPPGGSGPAGPPGPQGVKGERGSPGGPGAAGFPGARGLPGPPGSNGNPGPPGPSGSPGKDGPPGPAGNTGAPGSPGVSGPKGDAGQPGEKGSPGAQGPPGAPGPLGIAGITGARGLAGPPGMPGPRGSPGPQGVKGESGKPGANGLSGERGPPGPQGLPGLAGTAGEPGRDGNPGSDGLPGRDGSPGGKGDRGENGSPGAPGAPGHPGPPGPVGPAGKSGDRGESGPAGPAGAPGPAGSRGAPGPQGPRGDKGETGERGAAGIKGHRGFPGNPGAPGSPGPAGQQGAIGSPGPAGPRGPVGPSGPPGKDGTSGHPGPIGPPGPRGNRGERGSEGSPGHPGQPGPPGPPGAPGPCCGGVGAAAIAGIGGEKAGGFAPYYGDEPMDFKINTDEIMTSLKSVNGQIESLISPDGSRKNPARNCRDLKFCHPELKSGEYWVDPNQGCKLDAIKVFCNMETGETCISANPLNVPRKHWWTDSSAEKKHVWFGESMDGGFQFSYGNPELPEDVLDVHLAFLRLLSSRASQNITYHCKNSIAYMDQASGNVKKALKLMGSNEGEFKAEGNSKFTYTVLEDGCTKHTGEWSKTVFEYRTRKAVRLPIVDIAPYDIGGPDQEFGVDVGPVCFL

SEQ ID NO: 18977 - protein, 1163 aa, Homo sapiens
  Payload ID: 3806
  Gene Symbol: COL3A1
  Gene Name: collagen, type III, alpha 1
  Uniprot ID: P02461
  ENSP ID: ENSP00000315243
MMSFVQKGSWLLLALLHPTIILAQQEAVEGGCSHLGQSYADRDVWKPEPCQICVCDSGSVLCDDIICDDQELDCPNPEIPFGECCAVCPQPPTAPTRPPNGQGPQGPKGDPGPPGIPGRNGDPGIPGQPGSPGSPGPPGICESCPTGPQNYSPQYDSYDVKSGVAVGGLAGYPGPAGPPGPPGPPGTSGHPGSPGSPGYQGPPGEPGQAGPSGPPGPPGAIGPSGPAGKDGESGRPGRPGERGLPGPPGIKGPAGIPGFPGMKGHRGFDGRNGEKGETGAPGLKGENGLPGENGAPGPMGPRGAPGERGRPGLPGAAGARGNDGARGSDGQPGPPGPPGTAGFPGSPGAKGEVGPAGSPGSNGAPGQRGEPGPQGHAGAQGPPGPPGINGSPGGKGEMGPAGIPGAPGLMGARGPPGPAGANGAPGLRGGAGEPGKNGAKGEPGPRGERGEAGIPGVPGAKGEDGKDGSPGEPGANGLPGAAGERGAPGFRGPAGPNGIPGEKGPAGERGAPGPAGPRGAAGEPGRDGVPGGPGMRGMPGSPGGPGSDGKPGPPGSQGESGRPGPPGPSGPRGQPGVMGFPGPKGNDGAPGKNGERGGPGGPGPQGPPGKNGETGPQGPPGPTGPGGDKGDTGPPGPQGLQGLPGTGGPPGENGKPGEPGPKGDAGAPGAPGGKGDAGAPGERGPPGLAGAPGLRGGAGPPGPEGGKGAAGPPGPPGAAGTPGLQGMPGERGGLGSPGPKGDKGEPGGPGADGVPGKDGPRGPTGPIGPPGPAGQPGDKGEGGAPGLPGIAGPRGSPGERGETGPPGPAGFPGAPGQNGEPGGKGERGAPGEKGEGGPPGVAGPPGKDGTSGHPGPIGPPGPRGNRGERGSEGSPGHPGQPGPPGPPGAPGPCCGGVGAAAIAGIGGEKAGGFAPYYGDEPMDFKINTDEIMTSLKSVNGQIESLISPDGSRKNPARNCRDLKFCHPELKSGEYWVDPNQGCKLDAIKVFCNMETGETCISANPLNVPRKHWWTDSSAEKKHVWFGESMDGGFQFSYGNPELPEDVLDVHLAFLRLLSSRASQNITYHCKNSIAYMDQASGNVKKALKLMGSNEGEFKAEGNSKFTYTVLEDGCTKHTGEWSKTVFEYRTRKAVRLPIVDIAPYDIGGPDQEFGVDVGPVCFL

SEQ ID NO: 18978 - protein, 90 aa, Homo sapiens
  Payload ID: 3806
  Gene Symbol: COL3A1
  Gene Name: collagen, type III, alpha 1
  ENSP ID: ENSP00000415346
  MOD_RES (1)..(1): Any amino acid
XRGAPGERGRPGLPGAAGARGNDGARGSDGQPGPPGPPGTAGFPGSPGAKGPPGINGSPGGKGEMGPAGIPGAPGLMGARGPPGPAGANG

SEQ ID NO: 18979 - protein, 1669 aa, Homo sapiens
  Payload ID: 3807
  Gene Symbol: COL4A1
  Gene Name: collagen, type IV, alpha 1
  Uniprot ID: P02462
  ENSP ID: ENSP00000364979
MGPRLSVWLLLLPAALLLHEEHSRAAAKGGCAGSGCGKCDCHGVKGQKGERGLPGLQGVIGFPGMQGPEGPQGPPGQKGDTGEPGLPGTKGTRGPPGASGYPGNPGLPGIPGQDGPPGPPGIPGCNGTKGERGPLGPPGLPGFAGNPGPPGLPGMKGDPGEILGHVPGMLLKGERGFPGIPGTPGPPGLPGLQGPVGPPGFTGPPGPPGPPGPPGEKGQMGLSFQGPKGDKGDQGVSGPPGVPGQAQVQEKGDFATKGEKGQKGEPGFQGMPGVGEKGEPGKPGPRGKPGKDGDKGEKGSPGFPGEPGYPGLIGRQGPQGEKGEAGPPGPPGIVIGTGPLGEKGERGYPGTPGPRGEPGPKGFPGLPGQPGPPGLPVPGQAGAPGFPGERGEKGDRGFPGTSLPGPSGRDGLPGPPGSPGPPGQPGYTNGIVECQPGPPGDQGPPGIPGQPGFIGEIGEKGQKGESCLICDIDGYRGPPGPQGPPGEIGFPGQPGAKGDRGLPGRDGVAGVPGPQGTPGLIGQPGAKGEPGEFYFDLRLKGDKGDPGFPGQPGMPGRAGSPGRDGHPGLPGPKGSPGSVGLKGERGPPGGVGFPGSRGDTGPPGPPGYGPAGPIGDKGQAGFPGGPGSPGLPGPKGEPGKIVPLPGPPGAEGLPGSPGFPGPQGDRGFPGTPGRPGLPGEKGAVGQPGIGFPGPPGPKGVDGLPGDMGPPGTPGRPGFNGLPGNPGVQGQKGEPGVGLPGLKGLPGLPGIPGTPGEKGSIGVPGVPGEHGAIGPPGLQGIRGEPGPPGLPGSVGSPGVPGIGPPGARGPPGGQGPPGLSGPPGIKGEKGFPGFPGLDMPGPKGDKGAQGLPGITGQSGLPGLPGQQGAPGIPGFPGSKGEMGVMGTPGQPGSPGPVGAPGLPGEKGDHGFPGSSGPRGDPGLKGDKGDVGLPGKPGSMDKVDMGSMKGQKGDQGEKGQIGPIGEKGSRGDPGTPGVPGKDGQAGQPGQPGPKGDPGISGTPGAPGLPGPKGSVGGMGLPGTPGEKGVPGIPGPQGSPGLPGDKGAKGEKGQAGPPGIGIPGLRGEKGDQGIAGFPGSPGEKGEKGSIGIPGMPGSPGLKGSPGSVGYPGSPGLPGEKGDKGLPGLDGIPGVKGEAGLPGTPGPTGPAGQKGEPGSDGIPGSAGEKGEPGLPGRGFPGFPGAKGDKGSKGEVGFPGLAGSPGIPGSKGEQGFMGPPGPQGQPGLPGSPGHATEGPKGDRGPQGQPGLPGLPGPMGPPGLPGIDGVKGDKGNPGWPGAPGVPGPKGDPGFQGMPGIGGSPGITGSKGDMGPPGVPGFQGPKGLPGLQGIKGDQGDQGVPGAKGLPGPPGPPGPYDIIKGEPGLPGPEGPPGLKGLQGLPGPKGQQGVTGLVGIPGPPGIPGFDGAPGQKGEMGPAGPTGPRGFPGPPGPDGLPGSMGPPGTPSVDHGFLVTRHSQTIDDPQCPSGTKILYHGYSLLYVQGNERAHGQDLGTAGSCLRKFSTMPFLFCNINNVCNFASRNDYSYWLSTPEPMPMSMAPITGENIRPFISRCAVCEAPAMVMAVHSQTIQIPPCPSGWSSLWIGYSFVMHTSAGAEGSGQALASPGSCLEEFRSAPFIECHGRGTCNYYANAYSFWLATIERSEMFKKPTPSTLKAGELRTHVSRCQVCMRRT

SEQ ID NO: 18980 - protein, 519 aa, Homo sapiens
  Payload ID: 3807
  Gene Symbol: COL4A1
  Gene Name: collagen, type IV, alpha 1
  ENSP ID: ENSP00000443348
MGPRLSVWLLLLPAALLLHEEHSRAAAKGGCAGSGCGKCDCHGVKGQKGERGLPGLQGVIGFPGMQGPEGPQGPPGQKGDTGEPGLPGTKGTRGPPGASGYPGNPGLPGIPGQDGPPGPPGIPGCNGTKGERGPLGPPGLPGFAGNPGPPGLPGMKGDPGEILGHVPGMLLKGERGFPGIPGTPGPPGLPGLQGPVGPPGFTGPPGPPGPPGPPGEKGQMGLSFQGPKGDKGDQGVSGPPGVPGQAQVQEKGDFATKGEKGQKGEPGFQGMPGVGEKGEPGKPGPRGKPGKDGDKGEKGSPGFPGEPGYPGLIGRQGPQGEKGEAGPPGPPGIVIGTGPLGEKGERGYPGTPGPRGEPGPKGFPGLPGQPGPPGLPVPGQAGAPGFPGERGEKGDRGFPGTSLPGPSGRDGLPGPPGSPGPPGQPGYTNGIVECQPGPPGDQGPPGIPGQPGFIGEIGEKGQKGESCLICDIDGYRGPPGPQGPPGEIGFPGQPGAKGDRGLPGRDGVAGVPLLFQIHK

SEQ ID NO: 18981 - protein, 223 aa, Homo sapiens
  Payload ID: 3807
  Gene Symbol: COL4A1
  Gene Name: collagen, type IV, alpha 1
  ENSP ID: ENSP00000478222
MQGPEGPQGPPGQKGDTGEPGLPGTKGTRGPPGASGYPGNPGLPGIPGQDGPPGPPGIPGCNGTKGERGPLGPPGLPGFAGNPGPPGLPGMKGDPGEILGHVPGMLLKGERGFPGIPGTPGPPGLPGLQGPVGPPGFTGPPGPPGPPGPPGEKGQMGLSFQGPKGDKGDQGVSGPPGVPGQAQVQEKGDFATKGEKGQKGEPGFQGMPGVGEKGEPGKPGPRV

SEQ ID NO: 18982 - protein, 1712 aa, Homo sapiens
  Payload ID: 3808
  Gene Symbol: COL4A2
  Gene Name: collagen, type IV, alpha 2
  Uniprot ID: P08572
  ENSP ID: ENSP00000353654
MGRDQRAVAGPALRRWLLLGTVTVGFLAQSVLAGVKKFDVPCGGRDCSGGCQCYPEKGGRGQPGPVGPQGYNGPPGLQGFPGLQGRKGDKGERGAPGVTGPKGDVGARGVSGFPGADGIPGHPGQGGPRGRPGYDGCNGTQGDSGPQGPPGSEGFTGPPGPQGPKGQKGEPYALPKEERDRYRGEPGEPGLVGFQGPPGRPGHVGQMGPVGAPGRPGPPGPPGPKGQQGNRGLGFYGVKGEKGDVGQPGPNGIPSDTLHPIIAPTGVTFHPDQYKGEKGSEGEPGIRGISLKGEEGIMGFPGLRGYPGLSGEKGSPGQKGSRGLDGYQGPDGPRGPKGEAGDPGPPGLPAYSPHPSLAKGARGDPGFPGAQGEPGSQGEPGDPGLPGPPGLSIGDGDQRRGLPGEMGPKGFIGDPGIPALYGGPPGPDGKRGPPGPPGLPGPPGPDGFLFGLKGAKGRAGFPGLPGSPGARGPKGWKGDAGECRCTEGDEAIKGLPGLPGPKGFAGINGEPGRKGDRGDPGQHGLPGFPGLKGVPGNIGAPGPKGAKGDSRTITTKGERGQPGVPGVPGMKGDDGSPGRDGLDGFPGLPGPPGDGIKGPPGDPGYPGIPGTKGTPGEMGPPGLGLPGLKGQRGFPGDAGLPGPPGFLGPPGPAGTPGQIDCDTDVKRAVGGDRQEAIQPGCIGGPKGLPGLPGPPGPTGAKGLRGIPGFAGADGGPGPRGLPGDAGREGFPGPPGFIGPRGSKGAVGLPGPDGSPGPIGLPGPDGPPGERGLPGEVLGAQPGPRGDAGVPGQPGLKGLPGDRGPPGFRGSQGMPGMPGLKGQPGLPGPSGQPGLYGPPGLHGFPGAPGQEGPLGLPGIPGREGLPGDRGDPGDTGAPGPVGMKGLSGDRGDAGFTGEQGHPGSPGFKGIDGMPGTPGLKGDRGSPGMDGFQGMPGLKGRPGFPGSKGEAGFFGIPGLKGLAGEPGFKGSRGDPGPPGPPPVILPGMKDIKGEKGDEGPMGLKGYLGAKGIQGMPGIPGLSGIPGLPGRPGHIKGVKGDIGVPGIPGLPGFPGVAGPPGITGFPGFIGSRGDKGAPGRAGLYGEIGATGDFGDIGDTINLPGRPGLKGERGTTGIPGLKGFFGEKGTEGDIGFPGITGVTGVQGPPGLKGQTGFPGLTGPPGSQGELGRIGLPGGKGDDGWPGAPGLPGFPGLRGIRGLHGLPGTKGFPGSPGSDIHGDPGFPGPPGERGDPGEANTLPGPVGVPGQKGDQGAPGERGPPGSPGLQGFPGITPPSNISGAPGDKGAPGIFGLKGYRGPPGPPGSAALPGSKGDTGNPGAPGTPGTKGWAGDSGPQGRPGVFGLPGEKGPRGEQGFMGNTGPTGAVGDRGPKGPKGDPGFPGAPGTVGAPGIAGIPQKIAVQPGTVGPQGRRGPPGAPGEMGPQGPPGEPGFRGAPGKAGPQGRGGVSAVPGFRGDEGPIGHQGPIGQEGAPGRPGSPGLPGMPGRSVSIGYLLVKHSQTDQEPMCPVGMNKLWSGYSLLYFEGQEKAHNQDLGLAGSCLARFSTMPFLYCNPGDVCYYASRNDKSYWLSTTAPLPMMPVAEDEIKPYISRCSVCEAPAIAIAVHSQDVSIPHCPAGWRSLWIGYSFLMHTAAGDEGGGQSLVSPGSCLEDFRATPFIECNGGRGTCHYYANKYSFWLTTIPEQSFQGSPSADTLKAGLIRTHISRCQVCMKNL

SEQ ID NO: 18983 - protein, 105 aa, Homo sapiens
  Payload ID: 3808
  Gene Symbol: COL4A2
  Gene Name: collagen, type IV, alpha 2
  ENSP ID: ENSP00000383027
MGRDQRAVAGPALRRWLLLGTVTVGFLAQSVLAGVKKFDVPCGGRDCSGGCQCYPEKGGRGQPGPVGPQGYNGPPGLQGFPGLQGRKGDKGERGAPGVTGPKGDV

SEQ ID NO: 18984 - protein, 42 aa, Homo sapiens
  Payload ID: 3808
  Gene Symbol: COL4A2
  Gene Name: collagen, type IV, alpha 2
  ENSP ID: ENSP00000481492
  MOD_RES (1)..(1): Any amino acid
XGDPGQHGLPGFPGLKVRSNFIMKLARHSEASPGVPFLPFIS

SEQ ID NO: 18985 - protein, 156 aa, Homo sapiens
  Payload ID: 3809
  Gene Symbol: COL4A3
  Gene Name: collagen, type IV, alpha 3 (Goodpasture antigen)
  ENSP ID: ENSP00000302781
GNPGEKGNRGVPGMPGLKGLKGLPGPAGPPGPRGDLGSTGNPGEPGLRGIPGSMGNMGMPGSKGKRGTLGFPGRAGRPGLPGIHGLQGDKGEPGYSEGTRPGPPGPTGDPGLPGDMGKKGEMGQPGPPGHLGPAGPEGAPGSPGSPGLPVPAAPSL

SEQ ID NO: 18986 - protein, 1670 aa, Homo sapiens
  Payload ID: 3809
  Gene Symbol: COL4A3
  Gene Name: collagen, type IV, alpha 3 (Goodpasture antigen)
  Uniprot ID: Q01955
  ENSP ID: ENSP00000379823
MSARTAPRPQVLLLPLLLVLLAAAPAASKGCVCKDKGQCFCDGAKGEKGEKGFPGPPGSPGQKGFTGPEGLPGPQGPKGFPGLPGLTGSKGVRGISGLPGFSGSPGLPGTPGNTGPYGLVGVPGCSGSKGEQGFPGLPGTLGYPGIPGAAGLKGQKGAPAKEEDIELDAKGDPGLPGAPGPQGLPGPPGFPGPVGPPGPPGFFGFPGAMGPRGPKGHMGERVIGHKGERGVKGLTGPPGPPGTVIVTLTGPDNRTDLKGEKGDKGAMGEPGPPGPSGLPGESYGSEKGAPGDPGLQGKPGKDGVPGFPGSEGVKGNRGFPGLMGEDGIKGQKGDIGPPGFRGPTEYYDTYQEKGDEGTPGPPGPRGARGPQGPSGPPGVPGSPGSSRPGLRGAPGWPGLKGSKGERGRPGKDAMGTPGSPGCAGSPGLPGSPGPPGPPGDIVFRKGPPGDHGLPGYLGSPGIPGVDGPKGEPGLLCTQCPYIPGPPGLPGLPGLHGVKGIPGRQGAAGLKGSPGSPGNTGLPGFPGFPGAQGDPGLKGEKGETLQPEGQVGVPGDPGLRGQPGRKGLDGIPGTPGVKGLPGPKGELALSGEKGDQGPPGDPGSPGSPGPAGPAGPPGYGPQGEPGLQGTQGVPGAPGPPGEAGPRGELSVSTPVPGPPGPPGPPGHPGPQGPPGIPGSLGKCGDPGLPGPDGEPGIPGIGFPGPPGPKGDQGFPGTKGSLGCPGKMGEPGLPGKPGLPGAKGEPAVAMPGGPGTPGFPGERGNSGEHGEIGLPGLPGLPGTPGNEGLDGPRGDPGQPGPPGEQGPPGRCIEGPRGAQGLPGLNGLKGQQGRRGKTGPKGDPGIPGLDRSGFPGETGSPGIPGHQGEMGPLGQRGYPGNPGILGPPGEDGVIGMMGFPGAIGPPGPPGNPGTPGQRGSPGIPGVKGQRGTPGAKGEQGDKGNPGPSEISHVIGDKGEPGLKGFAGNPGEKGNRGVPGMPGLKGLKGLPGPAGPPGPRGDLGSTGNPGEPGLRGIPGSMGNMGMPGSKGKRGTLGFPGRAGRPGLPGIHGLQGDKGEPGYSEGTRPGPPGPTGDPGLPGDMGKKGEMGQPGPPGHLGPAGPEGAPGSPGSPGLPGKPGPHGDLGFKGIKGLLGPPGIRGPPGLPGFPGSPGPMGIRGDQGRDGIPGPAGEKGETGLLRAPPGPRGNPGAQGAKGDRGAPGFPGLPGRKGAMGDAGPRGPTGIEGFPGPPGLPGAIIPGQTGNRGPPGSRGSPGAPGPPGPPGSHVIGIKGDKGSMGHPGPKGPPGTAGDMGPPGRLGAPGTPGLPGPRGDPGFQGFPGVKGEKGNPGFLGSIGPPGPIGPKGPPGVRGDPGTLKIISLPGSPGPPGTPGEPGMQGEPGPPGPPGNLGPCGPRGKPGKDGKPGTPGPAGEKGNKGSKGEPGPAGSDGLPGLKGKRGDSGSPATWTTRGFVFTRHSQTTAIPSCPEGTVPLYSGFSFLFVQGNQRAHGQDLGTLGSCLQRFTTMPFLFCNVNDVCNFASRNDYSYWLSTPALMPMNMAPITGRALEPYISRCTVCEGPAIAIAVHSQTTDIPPCPHGWISLWKGFSFIMFTSAGSEGTGQALASPGSCLEEFRASPFLECHGRGTCNYYSNSYSFWLASLNPERMFRKPIPSTVKAGELEKIISRCQVCMKKRH

SEQ ID NO: 18987 - protein, 598 aa, Homo sapiens
  Payload ID: 3810
  Gene Symbol: COL4A3BP
  Gene Name: collagen, type IV, alpha 3 (Goodpasture antigen) binding protein
  Uniprot ID: Q9Y5P4
  ENSP ID: ENSP00000261415
MSDNQSWNSSGSEEDPETESGPPVERCGVLSKWTNYIHGWQDRWVVLKNNALSYYKSEDETEYGCRGSICLSKAVITPHDFDECRFDISVNDSVWYLRAQDPDHRQQWIDAIEQHKTESGYGSESSLRRHGSMVSLVSGASGYSATSTSSFKKGHSLREKLAEMETFRDILCRQVDTLQKYFDACADAVSKDELQRDKVVEDDEDDFPTTRSDGDFLHSTNGNKEKLFPHVTPKGINGIDFKGEAITFKATTAGILATLSHCIELMVKREDSWQKRLDKETEKKRRTEEAYKNAMTELKKKSHFGGPDYEEGPNSLINEEEFFDAVEAALDRQDKIEEQSQSEKVRLHWPTSLPSGDAFSSVGTHRFVQKVEEMVQNHMTYSLQDVGGDANWQLVVEEGEMKVYRREVEENGIVLDPLKATHAVKGVTGHEVCNYFWNVDVRNDWETTIENFHVVETLADNAIIIYQTHKRVWPASQRDVLYLSVIRKIPALTENDPETWIVCNFSVDHDSAPLNNRCVRAKINVAMICQTLVSPPEGNQEISRDNILCKITYVANVNPGGWAPASVLRAVAKREYPKFLKRFTSYVQEKTAGKPILF

SEQ ID NO: 18988 - protein, 234 aa, Homo sapiens
  Payload ID: 3810
  Gene Symbol: COL4A3BP
  Gene Name: collagen, type IV, alpha 3 (Goodpasture antigen) binding protein
  ENSP ID: ENSP00000350046
  MOD_RES (1)..(1): Any amino acid
XRFVQKVEEMVQNHMTYSLQDVGGDANWQLVVEEGEMKVYRREVEENGIVLDPLKATHAVKGVTGHEVCNYFWNVDVRNDWETTIENFHVVETLADNAIIIYQTHKRVWPASQRDVLYLSVIRKIPALTENDPETWIVCNFSVDHDSAPLNNRCVRAKINVAMICQTLVSPPEGNQEISRDNILCKITYVANVNPGGWAPASVLRAVAKREYPKFLKRFTSYVQEKTAGKPILF

SEQ ID NO: 18989 - protein, 752 aa, Homo sapiens
  Payload ID: 3810
  Gene Symbol: COL4A3BP
  Gene Name: collagen, type IV, alpha 3 (Goodpasture antigen) binding protein
  Uniprot ID: Q9Y5P4
  ENSP ID: ENSP00000369862
MQHSCIPTPPSPFSAPPAFLPVVTRESRRGLSSGGSAGRNAGVTATAAAADGWKGRLPSPLVLLPRSARCQARRRRGGRTSSLLLLPPTPERALFASPSPDPSPRGLGASSGAAEGAGAGLLLGCRASMSDNQSWNSSGSEEDPETESGPPVERCGVLSKWTNYIHGWQDRWVVLKNNALSYYKSEDETEYGCRGSICLSKAVITPHDFDECRFDISVNDSVWYLRAQDPDHRQQWIDAIEQHKTESGYGSESSLRRHGSMVSLVSGASGYSATSTSSFKKGHSLREKLAEMETFRDILCRQVDTLQKYFDACADAVSKDELQRDKVVEDDEDDFPTTRSDGDFLHSTNGNKEKLFPHVTPKGINGIDFKGEAITFKATTAGILATLSHCIELMVKREDSWQKRLDKETEKKRRTEEAYKNAMTELKKKSHFGGPDYEEGPNSLINEEEFFDAVEAALDRQDKIEEQSQSEKVRLHWPTSLPSGDAFSSVGTHRFVQKPYSRSSSMSSIDLVSASDDVHRFSSQVEEMVQNHMTYSLQDVGGDANWQLVVEEGEMKVYRREVEENGIVLDPLKATHAVKGVTGHEVCNYFWNVDVRNDWETTIENFHVVETLADNAIIIYQTHKRVWPASQRDVLYLSVIRKIPALTENDPETWIVCNFSVDHDSAPLNNRCVRAKINVAMICQTLVSPPEGNQEISRDNILCKITYVANVNPGGWAPASVLRAVAKREYPKFLKRFTSYVQEKTAGKPILF

SEQ ID NO: 18990 - protein, 624 aa, Homo sapiens
  Payload ID: 3810
  Gene Symbol: COL4A3BP
  Gene Name: collagen, type IV, alpha 3 (Goodpasture antigen) binding protein
  Uniprot ID: Q9Y5P4
  ENSP ID: ENSP00000383996
MSDNQSWNSSGSEEDPETESGPPVERCGVLSKWTNYIHGWQDRWVVLKNNALSYYKSEDETEYGCRGSICLSKAVITPHDFDECRFDISVNDSVWYLRAQDPDHRQQWIDAIEQHKTESGYGSESSLRRHGSMVSLVSGASGYSATSTSSFKKGHSLREKLAEMETFRDILCRQVDTLQKYFDACADAVSKDELQRDKVVEDDEDDFPTTRSDGDFLHSTNGNKEKLFPHVTPKGINGIDFKGEAITFKATTAGILATLSHCIELMVKREDSWQKRLDKETEKKRRTEEAYKNAMTELKKKSHFGGPDYEEGPNSLINEEEFFDAVEAALDRQDKIEEQSQSEKVRLHWPTSLPSGDAFSSVGTHRFVQKPYSRSSSMSSIDLVSASDDVHRFSSQVEEMVQNHMTYSLQDVGGDANWQLVVEEGEMKVYRREVEENGIVLDPLKATHAVKGVTGHEVCNYFWNVDVRNDWETTIENFHVVETLADNAIIIYQTHKRVWPASQRDVLYLSVIRKIPALTENDPETWIVCNFSVDHDSAPLNNRCVRAKINVAMICQTLVSPPEGNQEISRDNILCKITYVANVNPGGWAPASVLRAVAKREYPKFLKRFTSYVQEKTAGKPILF

SEQ ID NO: 18991 - protein, 126 aa, Homo sapiens
  Payload ID: 3810
  Gene Symbol: COL4A3BP
  Gene Name: collagen, type IV, alpha 3 (Goodpasture antigen) binding protein
  ENSP ID: ENSP00000424244
  MOD_RES (1)..(1): Any amino acid
XPASQRDVLYLSVIRKIPALTENDPETWIVCNFSVDHDSAPLNNRCVRAKINVAMICQTLVSPPEGNQEISRDNILCKITYVANVNPGGWAPASVLRAVAKREYPKFLKRFTSYVQEKTAGKPILF

SEQ ID NO: 18992 - protein, 1690 aa, Homo sapiens
  Payload ID: 3811
  Gene Symbol: COL4A4
  Gene Name: collagen, type IV, alpha 4
  Uniprot ID: P53420
  ENSP ID: ENSP00000379866
MWSLHIVLMRCSFRLTKSLATGPWSLILILFSVQYVYGSGKKYIGPCGGRDCSVCHCVPEKGSRGPPGPPGPQGPIGPLGAPGPIGLSGEKGMRGDRGPPGAAGDKGDKGPTGVPGFPGLDGIPGHPGPPGPRGKPGMSGHNGSRGDPGFPGGRGALGPGGPLGHPGEKGEKGNSVFILGAVKGIQGDRGDPGLPGLPGSWGAGGPAGPTGYPGEPGLVGPPGQPGRPGLKGNPGVGVKGQMGDPGEVGQQGSPGPTLLVEPPDFCLYKGEKGIKGIPGMVGLPGPPGRKGESGIGAKGEKGIPGFPGPRGDPGSYGSPGFPGLKGELGLVGDPGLFGLIGPKGDPGNRGHPGPPGVLVTPPLPLKGPPGDPGFPGRYGETGDVGPPGPPGLLGRPGEACAGMIGPPGPQGFPGLPGLPGEAGIPGRPDSAPGKPGKPGSPGLPGAPGLQGLPGSSVIYCSVGNPGPQGIKGKVGPPGGRGPKGEKGNEGLCACEPGPMGPPGPPGLPGRQGSKGDLGLPGWLGTKGDPGPPGAEGPPGLPGKHGASGPPGNKGAKGDMVVSRVKGHKGERGPDGPPGFPGQPGSHGRDGHAGEKGDPGPPGDHEDATPGGKGFPGPLGPPGKAGPVGPPGLGFPGPPGERGHPGVPGHPGVRGPDGLKGQKGDTISCNVTYPGRHGPPGFDGPPGPKGFPGPQGAPGLSGSDGHKGRPGTPGTAEIPGPPGFRGDMGDPGFGGEKGSSPVGPPGPPGSPGVNGQKGIPGDPAFGHLGPPGKRGLSGVPGIKGPRGDPGCPGAEGPAGIPGFLGLKGPKGREGHAGFPGVPGPPGHSCERGAPGIPGQPGLPGYPGSPGAPGGKGQPGDVGPPGPAGMKGLPGLPGRPGAHGPPGLPGIPGPFGDDGLPGPPGPKGPRGLPGFPGFPGERGKPGAEGCPGAKGEPGEKGMSGLPGDRGLRGAKGAIGPPGDEGEMAIISQKGTPGEPGPPGDDGFPGERGDKGTPGMQGRRGEPGRYGPPGFHRGEPGEKGQPGPPGPPGPPGSTGLRGFIGFPGLPGDQGEPGSPGPPGFSGIDGARGPKGNKGDPASHFGPPGPKGEPGSPGCPGHFGASGEQGLPGIQGPRGSPGRPGPPGSSGPPGCPGDHGMPGLRGQPGEMGDPGPRGLQGDPGIPGPPGIKGPSGSPGLNGLHGLKGQKGTKGASGLHDVGPPGPVGIPGLKGERGDPGSPGISPPGPRGKKGPPGPPGSSGPPGPAGATGRAPKDIPDPGPPGDQGPPGPDGPRGAPGPPGLPGSVDLLRGEPGDCGLPGPPGPPGPPGPPGYKGFPGCDGKDGQKGPVGFPGPQGPHGFPGPPGEKGLPGPPGRKGPTGLPGPRGEPGPPADVDDCPRIPGLPGAPGMRGPEGAMGLPGMRGPSGPGCKGEPGLDGRRGVDGVPGSPGPPGRKGDTGEDGYPGGPGPPGPIGDPGPKGFGPGYLGGFLLVLHSQTDQEPTCPLGMPRLWTGYSLLYLEGQEKAHNQDLGLAGSCLPVFSTLPFAYCNIHQVCHYAQRNDRSYWLASAAPLPMMPLSEEAIRPYVSRCAVCEAPAQAVAVHSQDQSIPPCPQTWRSLWIGYSFLMHTGAGDQGGGQALMSPGSCLEDFRAAPFLECQGRQGTCHFFANKYSFWLTTVKADLQFSSAPAPDTLKESQAQRQKISRCQVCVKYS

SEQ ID NO: 18993 - protein, 1691 aa, Homo sapiens
  Payload ID: 3812
  Gene Symbol: COL4A5
  Gene Name: collagen, type IV, alpha 5
  Uniprot ID: P29400
  ENSP ID: ENSP00000331902
MKLRGVSLAAGLFLLALSLWGQPAEAAACYGCSPGSKCDCSGIKGEKGERGFPGLEGHPGLPGFPGPEGPPGPRGQKGDDGIPGPPGPKGIRGPPGLPGFPGTPGLPGMPGHDGAPGPQGIPGCNGTKGERGFPGSPGFPGLQGPPGPPGIPGMKGEPGSIIMSSLPGPKGNPGYPGPPGIQGLPGPTGIPGPIGPPGPPGLMGPPGPPGLPGPKGNMGLNFQGPKGEKGEQGLQGPPGPPGQISEQKRPIDVEFQKGDQGLPGDRGPPGPPGIRGPPGPPGGEKGEKGEQGEPGKRGKPGKDGENGQPGIPGLPGDPGYPGEPGRDGEKGQKGDTGPPGPPGLVIPRPGTGITIGEKGNIGLPGLPGEKGERGFPGIQGPPGLPGPPGAAVMGPPGPPGFPGERGQKGDEGPPGISIPGPPGLDGQPGAPGLPGPPGPAGPHIPPSDEICEPGPPGPPGSPGDKGLQGEQGVKGDKGDTCFNCIGTGISGPPGQPGLPGLPGPPGSLGFPGQKGEKGQAGATGPKGLPGIPGAPGAPGFPGSKGEPGDILTFPGMKGDKGELGSPGAPGLPGLPGTPGQDGLPGLPGPKGEPGGITFKGERGPPGNPGLPGLPGNIGPMGPPGFGPPGPVGEKGIQGVAGNPGQPGIPGPKGDPGQTITQPGKPGLPGNPGRDGDVGLPGDPGLPGQPGLPGIPGSKGEPGIPGIGLPGPPGPKGFPGIPGPPGAPGTPGRIGLEGPPGPPGFPGPKGEPGFALPGPPGPPGLPGFKGALGPKGDRGFPGPPGPPGRTGLDGLPGPKGDVGPNGQPGPMGPPGLPGIGVQGPPGPPGIPGPIGQPGLHGIPGEKGDPGPPGLDVPGPPGERGSPGIPGAPGPIGPPGSPGLPGKAGASGFPGTKGEMGMMGPPGPPGPLGIPGRSGVPGLKGDDGLQGQPGLPGPTGEKGSKGEPGLPGPPGPMDPNLLGSKGEKGEPGLPGIPGVSGPKGYQGLPGDPGQPGLSGQPGLPGPPGPKGNPGLPGQPGLIGPPGLKGTIGDMGFPGPQGVEGPPGPSGVPGQPGSPGLPGQKGDKGDPGISSIGLPGLPGPKGEPGLPGYPGNPGIKGSVGDPGLPGLPGTPGAKGQPGLPGFPGTPGPPGPKGISGPPGNPGLPGEPGPVGGGGHPGQPGPPGEKGKPGQDGIPGPAGQKGEPGQPGFGNPGPPGLPGLSGQKGDGGLPGIPGNPGLPGPKGEPGFHGFPGVQGPPGPPGSPGPALEGPKGNPGPQGPPGRPGPTGFQGLPGPEGPPGLPGNGGIKGEKGNPGQPGLPGLPGLKGDQGPPGLQGNPGRPGLNGMKGDPGLPGVPGFPGMKGPSGVPGSAGPEGEPGLIGPPGPPGLPGPSGQSIIIKGDAGPPGIPGQPGLKGLPGPQGPQGLPGPTGPPGDPGRNGLPGFDGAGGRKGDPGLPGQPGTRGLDGPPGPDGLQGPPGPPGTSSVAHGFLITRHSQTTDAPQCPQGTLQVYEGFSLLYVQGNKRAHGQDLGTAGSCLRRFSTMPFMFCNINNVCNFASRNDYSYWLSTPEPMPMSMQPLKGQSIQPFISRCAVCEAPAVVIAVHSQTIQIPHCPQGWDSLWIGYSFMMHTSAGAEGSGQALASPGSCLEEFRSAPFIECHGRGTCNYYANSYSFWLATVDVSDMFSKPQSETLKAGDLRTRISRCQVCMKRT

SEQ ID NO: 18994 - protein, 1685 aa, Homo sapiens
  Payload ID: 3812
  Gene Symbol: COL4A5
  Gene Name: collagen, type IV, alpha 5
  Uniprot ID: P29400
  ENSP ID: ENSP00000354505
MKLRGVSLAAGLFLLALSLWGQPAEAAACYGCSPGSKCDCSGIKGEKGERGFPGLEGHPGLPGFPGPEGPPGPRGQKGDDGIPGPPGPKGIRGPPGLPGFPGTPGLPGMPGHDGAPGPQGIPGCNGTKGERGFPGSPGFPGLQGPPGPPGIPGMKGEPGSIIMSSLPGPKGNPGYPGPPGIQGLPGPTGIPGPIGPPGPPGLMGPPGPPGLPGPKGNMGLNFQGPKGEKGEQGLQGPPGPPGQISEQKRPIDVEFQKGDQGLPGDRGPPGPPGIRGPPGPPGGEKGEKGEQGEPGKRGKPGKDGENGQPGIPGLPGDPGYPGEPGRDGEKGQKGDTGPPGPPGLVIPRPGTGITIGEKGNIGLPGLPGEKGERGFPGIQGPPGLPGPPGAAVMGPPGPPGFPGERGQKGDEGPPGISIPGPPGLDGQPGAPGLPGPPGPAGPHIPPSDEICEPGPPGPPGSPGDKGLQGEQGVKGDKGDTCFNCIGTGISGPPGQPGLPGLPGPPGSLGFPGQKGEKGQAGATGPKGLPGIPGAPGAPGFPGSKGEPGDILTFPGMKGDKGELGSPGAPGLPGLPGTPGQDGLPGLPGPKGEPGGITFKGERGPPGNPGLPGLPGNIGPMGPPGFGPPGPVGEKGIQGVAGNPGQPGIPGPKGDPGQTITQPGKPGLPGNPGRDGDVGLPGDPGLPGQPGLPGIPGSKGEPGIPGIGLPGPPGPKGFPGIPGPPGAPGTPGRIGLEGPPGPPGFPGPKGEPGFALPGPPGPPGLPGFKGALGPKGDRGFPGPPGPPGRTGLDGLPGPKGDVGPNGQPGPMGPPGLPGIGVQGPPGPPGIPGPIGQPGLHGIPGEKGDPGPPGLDVPGPPGERGSPGIPGAPGPIGPPGSPGLPGKAGASGFPGTKGEMGMMGPPGPPGPLGIPGRSGVPGLKGDDGLQGQPGLPGPTGEKGSKGEPGLPGPPGPMDPNLLGSKGEKGEPGLPGIPGVSGPKGYQGLPGDPGQPGLSGQPGLPGPPGPKGNPGLPGQPGLIGPPGLKGTIGDMGFPGPQGVEGPPGPSGVPGQPGSPGLPGQKGDKGDPGISSIGLPGLPGPKGEPGLPGYPGNPGIKGSVGDPGLPGLPGTPGAKGQPGLPGFPGTPGPPGPKGISGPPGNPGLPGEPGPVGGGGHPGQPGPPGEKGKPGQDGIPGPAGQKGEPGQPGFGNPGPPGLPGLSGQKGDGGLPGIPGNPGLPGPKGEPGFHGFPGVQGPPGPPGSPGPALEGPKGNPGPQGPPGRPGLPGPEGPPGLPGNGGIKGEKGNPGQPGLPGLPGLKGDQGPPGLQGNPGRPGLNGMKGDPGLPGVPGFPGMKGPSGVPGSAGPEGEPGLIGPPGPPGLPGPSGQSIIIKGDAGPPGIPGQPGLKGLPGPQGPQGLPGPTGPPGDPGRNGLPGFDGAGGRKGDPGLPGQPGTRGLDGPPGPDGLQGPPGPPGTSSVAHGFLITRHSQTTDAPQCPQGTLQVYEGFSLLYVQGNKRAHGQDLGTAGSCLRRFSTMPFMFCNINNVCNFASRNDYSYWLSTPEPMPMSMQPLKGQSIQPFISRCAVCEAPAVVIAVHSQTIQIPHCPQGWDSLWIGYSFMMHTSAGAEGSGQALASPGSCLEEFRSAPFIECHGRGTCNYYANSYSFWLATVDVSDMFSKPQSETLKAGDLRTRISRCQVCMKRT

SEQ ID NO: 18995 - protein, 115 aa, Homo sapiens
  Payload ID: 3812
  Gene Symbol: COL4A5
  Gene Name: collagen, type IV, alpha 5
  ENSP ID: ENSP00000423520
  MOD_RES (1)..(1): Any amino acid
XGLPGPTGPPGDPGRNGLPGFDGAGGRKGDPGLPGQPGTRGLDGPPGPDGLQGPPGPPGTSSVAHGFLITRHSQTTDAPQCPQGTLQVYEGFSLLYVQGNKRAHGQDLVNLSQKR

SEQ ID NO: 18996 - protein, 174 aa, Homo sapiens
  Payload ID: 3812
  Gene Symbol: COL4A5
  Gene Name: collagen, type IV, alpha 5
  ENSP ID: ENSP00000424137
  MOD_RES (1)..(1): Any amino acid
XDDGLQGQPGLPGPTGEKGSKGEPGLPGPPGPMDPNLLGSKGEKGEPGLPGIPGVSGPKGYQGLPGDPGQPGLSGQPGLPGPPGPKGNPGLPGQPGLIGPPGLKGTIGDMGFPGPQGVEGPPGPSGVPGQPGSPGLPGQKGDKGDPGISSIGLPGLPGPKMIRRYVLGFVASPK

SEQ ID NO: 18997 - protein, 73 aa, Homo sapiens
  Payload ID: 3812
  Gene Symbol: COL4A5
  Gene Name: collagen, type IV, alpha 5
  ENSP ID: ENSP00000424845
FASRNDYSYWLSTPEPMPMSMQPLKGQSIQPFISRCAVCEAPAVVIAVHSQTIQIPHCPQGWDSLWIGYSFMM

SEQ ID NO: 18998 - protein, 1690 aa, Homo sapiens
  Payload ID: 3813
  Gene Symbol: COL4A6
  Gene Name: collagen, type IV, alpha 6
  Uniprot ID: Q14031
  ENSP ID: ENSP00000334733
MHPGLWLLLVTLCLTEELAAAGEKSYGKPCGGQDCSGSCQCFPEKGARGRPGPIGIQGPTGPQGFTGSTGLSGLKGERGFPGLLGPYGPKGDKGPMGVPGFLGINGIPGHPGQPGPRGPPGLDGCNGTQGAVGFPGPDGYPGLLGPPGLPGQKGSKGDPVLAPGSFKGMKGDPGLPGLDGITGPQGAPGFPGAVGPAGPPGLQGPPGPPGPLGPDGNMGLGFQGEKGVKGDVGLPGPAGPPPSTGELEFMGFPKGKKGSKGEPGPKGFPGISGPPGFPGLGTTGEKGEKGEKGIPGLPGPRGPMGSEGVQGPPGQQGKKGTLGFPGLNGFQGIEGQKGDIGLPGPDVFIDIDGAVISGNPGDPGVPGLPGLKGDEGIQGLRGPSGVPGLPALSGVPGALGPQGFPGLKGDQGNPGRTTIGAAGLPGRDGLPGPPGPPGPPSPEFETETLHNKESGFPGLRGEQGPKGNLGLKGIKGDSGFCACDGGVPNTGPPGEPGPPGPWGLIGLPGLKGARGDRGSGGAQGPAGAPGLVGPLGPSGPKGKKGEPILSTIQGMPGDRGDSGSQGFRGVIGEPGKDGVPGLPGLPGLPGDGGQGFPGEKGLPGLPGEKGHPGPPGLPGNGLPGLPGPRGLPGDKGKDGLPGQQGLPGSKGITLPCIIPGSYGPSGFPGTPGFPGPKGSRGLPGTPGQPGSSGSKGEPGSPGLVHLPELPGFPGPRGEKGLPGFPGLPGKDGLPGMIGSPGLPGSKGATGDIFGAENGAPGEQGLQGLTGHKGFLGDSGLPGLKGVHGKPGLLGPKGERGSPGTPGQVGQPGTPGSSGPYGIKGKSGLPGAPGFPGISGHPGKKGTRGKKGPPGSIVKKGLPGLKGLPGNPGLVGLKGSPGSPGVAGLPALSGPKGEKGSVGFVGFPGIPGLPGIPGTRGLKGIPGSTGKMGPSGRAGTPGEKGDRGNPGPVGIPSPRRPMSNLWLKGDKGSQGSAGSNGFPGPRGDKGEAGRPGPPGLPGAPGLPGIIKGVSGKPGPPGFMGIRGLPGLKGSSGITGFPGMPGESGSQGIRGSPGLPGASGLPGLKGDNGQTVEISGSPGPKGQPGESGFKGTKGRDGLIGNIGFPGNKGEDGKVGVSGDVGLPGAPGFPGVAGMRGEPGLPGSSGHQGAIGPLGSPGLIGPKGFPGFPGLHGLNGLPGTKGTHGTPGPSITGVPGPAGLPGPKGEKGYPGIGIGAPGKPGLRGQKGDRGFPGLQGPAGLPGAPGISLPSLIAGQPGDPGRPGLDGERGRPGPAGPPGPPGPSSNQGDTGDPGFPGIPGPKGPKGDQGIPGFSGLPGELGLKGMRGEPGFMGTPGKVGPPGDPGFPGMKGKAGPRGSSGLQGDPGQTPTAEAVQVPPGPLGLPGIDGIPGLTGDPGAQGPVGLQGSKGLPGIPGKDGPSGLPGPPGALGDPGLPGLQGPPGFEGAPGQQGPFGMPGMPGQSMRVGYTLVKHSQSEQVPPCPIGMSQLWVGYSLLFVEGQEKAHNQDLGFAGSCLPRFSTMPFIYCNINEVCHYARRNDKSYWLSTTAPIPMMPVSQTQIPQYISRCSVCEAPSQAIAVHSQDITIPQCPLGWRSLWIGYSFLMHTAAGAEGGGQSLVSPGSCLEDFRATPFIECSGARGTCHYFANKYSFWLTTVEERQQFGELPVSETLKAGQLHTRVSRCQVCMKSL

SEQ ID NO: 18999 - protein, 1691 aa, Homo sapiens
  Payload ID: 3813
  Gene Symbol: COL4A6
  Gene Name: collagen, type IV, alpha 6
  Uniprot ID: Q14031
  ENSP ID: ENSP00000361290
MLINKLWLLLVTLCLTEELAAAGEKSYGKPCGGQDCSGSCQCFPEKGARGRPGPIGIQGPTGPQGFTGSTGLSGLKGERGFPGLLGPYGPKGDKGPMGVPGFLGINGIPGHPGQPGPRGPPGLDGCNGTQGAVGFPGPDGYPGLLGPPGLPGQKGSKGDPVLAPGSFKGMKGDPGLPGLDGITGPQGAPGFPGAVGPAGPPGLQGPPGPPGPLGPDGNMGLGFQGEKGVKGDVGLPGPAGPPPSTGELEFMGFPKGKKGSKGEPGPKGFPGISGPPGFPGLGTTGEKGEKGEKGIPGLPGPRGPMGSEGVQGPPGQQGKKGTLGFPGLNGFQGIEGQKGDIGLPGPDVFIDIDGAVISGNPGDPGVPGLPGLKGDEGIQGLRGPSGVPGLPALSGVPGALGPQGFPGLKGDQGNPGRTTIGAAGLPGRDGLPGPPGPPGPPSPEFETETLHNKESGFPGLRGEQGPKGNLGLKGIKGDSGFCACDGGVPNTGPPGEPGPPGPWGLIGLPGLKGARGDRGSGGAQGPAGAPGLVGPLGPSGPKGKKGEPILSTIQGMPGDRGDSGSQGFRGVIGEPGKDGVPGLPGLPGLPGDGGQGFPGEKGLPGLPGEKGHPGPPGLPGNGLPGLPGPRGLPGDKGKDGLPGQQGLPGSKGITLPCIIPGSYGPSGFPGTPGFPGPKGSRGLPGTPGQPGSSGSKGEPGSPGLVHLPELPGFPGPRGEKGLPGFPGLPGKDGLPGMIGSPGLPGSKGATGDIFGAENGAPGEQGLQGLTGHKGFLGDSGLPGLKGVHGKPGLLGPKGERGSPGTPGQVGQPGTPGSSGPYGIKGKSGLPGAPGFPGISGHPGKKGTRGKKGPPGSIVKKGLPGLKGLPGNPGLVGLKGSPGSPGVAGLPALSGPKGEKGSVGFVGFPGIPGLPGIPGTRGLKGIPGSTGKMGPSGRAGTPGEKGDRGNPGPVGIPSPRRPMSNLWLKGDKGSQGSAGSNGFPGPRGDKGEAGRPGPPGLPGAPGLPGIIKGVSGKPGPPGFMGIRGLPGLKGSSGITGFPGMPGESGSQGIRGSPGLPGASGLPGLKGDNGQTVEISGSPGPKGQPGESGFKGTKGRDGLIGNIGFPGNKGEDGKVGVSGDVGLPGAPGFPGVAGMRGEPGLPGSSGHQGAIGPLGSPGLIGPKGFPGFPGLHGLNGLPGTKGTHGTPGPSITGVPGPAGLPGPKGEKGYPGIGIGAPGKPGLRGQKGDRGFPGLQGPAGLPGAPGISLPSLIAGQPGDPGRPGLDGERGRPGPAGPPGPPGPSSNQGDTGDPGFPGIPGPKGPKGDQGIPGFSGLPGELGLKGMRGEPGFMGTPGKVGPPGDPGFPGMKGKAGPRGSSGLQGDPGQTPTAEAVQVPPGPLGLPGIDGIPGLTGDPGAQGPVGLQGSKGLPGIPGKDGPSGLPGPPGALGDPGLPGLQGPPGFEGAPGQQGPFGMPGMPGQSMRVGYTLVKHSQSEQVPPCPIGMSQLWVGYSLLFVEGQEKAHNQDLGFAGSCLPRFSTMPFIYCNINEVCHYARRNDKSYWLSTTAPIPMMPVSQTQIPQYISRCSVCEAPSQAIAVHSQDITIPQCPLGWRSLWIGYSFLMHTAAGAEGGGQSLVSPGSCLEDFRATPFIECSGARGTCHYFANKYSFWLTTVEERQQFGELPVSETLKAGQLHTRVSRCQVCMKSL

SEQ ID NO: 19000 - protein, 1707 aa, Homo sapiens
  Payload ID: 3813
  Gene Symbol: COL4A6
  Gene Name: collagen, type IV, alpha 6
  ENSP ID: ENSP00000378340
MHPGLWLLLVTLCLTEELAAAGEKSYGKPCGGQDCSGSCQCFPEKGARGRPGPIGIQGPTGPQGFTGSTGLSGLKGERGFPGLLGPYGPKGDKGPMGVPGFLGINGIPGHPGQPGPRGPPGLDGCNGTQGAVGFPGPDGYPGLLGPPGLPGQKGSKGDPVLAPGSFKGMKGDPGLPGLDGITGPQGAPGFPGAVGPAGPPGLQGPPGPPGPLGPDGNMGLGFQGEKGVKGDVGLPGPAGPPPSTGELEFMGFPKGKKGSKGEPGPKGFPGISGPPGFPGLGTTGEKGEKGEKGIPGLPGPRGPMGSEGVQGPPGQQGKKGTLGFPGLNGFQGIEGQKGDIGLPGPDVFIDIDGAVISGNPGDPGVPGLPGLKGDEGIQGLRGPSGVPGLPALSGVPGALGPQGFPGLKGDQGNPGRTTIGAAGLPGRDGLPGPPGPPGPPSPEFETETLHNKESGFPGLRGEQGPKGNLGLKGIKGDSGFCACDGGVPNTGPPGEPGPPGPWGLIGLPGLKGARGDRGSGGAQGPAGAPGLVGPLGPSGPKGKKGEPILSTIQGMPGDRGDSGSQGFRGVIGEPGKDGVPGLPGLPGLPGDGGQGFPGEKGLPGLPGEKGHPGPPGLPGNGLPGLPGPRGLPGDKGKDGLPGQQGLPGSKGDCCCREVGKGDLDTERGITLPCIIPGSYGPSGFPGTPGFPGPKGSRGLPGTPGQPGSSGSKGEPGSPGLVHLPELPGFPGPRGEKGLPGFPGLPGKDGLPGMIGSPGLPGSKGATGDIFGAENGAPGEQGLQGLTGHKGFLGDSGLPGLKGVHGKPGLLGPKGERGSPGTPGQVGQPGTPGSSGPYGIKGKSGLPGAPGFPGISGHPGKKGTRGKKGPPGSIVKKGLPGLKGLPGNPGLVGLKGSPGSPGVAGLPALSGPKGEKGSVGFVGFPGIPGLPGIPGTRGLKGIPGSTGKMGPSGRAGTPGEKGDRGNPGPVGIPSPRRPMSNLWLKGDKGSQGSAGSNGFPGPRGDKGEAGRPGPPGLPGAPGLPGIIKGVSGKPGPPGFMGIRGLPGLKGSSGITGFPGMPGESGSQGIRGSPGLPGASGLPGLKGDNGQTVEISGSPGPKGQPGESGFKGTKGRDGLIGNIGFPGNKGEDGKVGVSGDVGLPGAPGFPGVAGMRGEPGLPGSSGHQGAIGPLGSPGLIGPKGFPGFPGLHGLNGLPGTKGTHGTPGPSITGVPGPAGLPGPKGEKGYPGIGIGAPGKPGLRGQKGDRGFPGLQGPAGLPGAPGISLPSLIAGQPGDPGRPGLDGERGRPGPAGPPGPPGPSSNQGDTGDPGFPGIPGPKGPKGDQGIPGFSGLPGELGLKGMRGEPGFMGTPGKVGPPGDPGFPGMKGKAGPRGSSGLQGDPGQTPTAEAVQVPPGPLGLPGIDGIPGLTGDPGAQGPVGLQGSKGLPGIPGKDGPSGLPGPPGALGDPGLPGLQGPPGFEGAPGQQGPFGMPGMPGQSMRVGYTLVKHSQSEQVPPCPIGMSQLWVGYSLLFVEGQEKAHNQDLGFAGSCLPRFSTMPFIYCNINEVCHYARRNDKSYWLSTTAPIPMMPVSQTQIPQYISRCSVCEAPSQAIAVHSQDITIPQCPLGWRSLWIGYSFLMHTAAGAEGGGQSLVSPGSCLEDFRATPFIECSGARGTCHYFANKYSFWLTTVEERQQFGELPVSETLKAGQLHTRVSRCQVCMKSL

SEQ ID NO: 19001 - protein, 1678 aa, Homo sapiens
  Payload ID: 3813
  Gene Symbol: COL4A6
  Gene Name: collagen, type IV, alpha 6
  ENSP ID: ENSP00000443707
MHPGLWLLLVTLCLTEELAAAGEKSYGKPCGGQDCSGSCQCFPEKGARGRPGPIGIQGPTGPQGFTGSTGLSGLKGERGFPGLLGPYGPKGDKGPMGVPGFLGINGIPGHPGQPGPRGPPGLDGCNGTQGAVGFPGPDGYPGLLGPPGLPGQKGSKGDPVLAPGSFKGMKGDPGLPGLDGITGPQGAPGFPGAVGPAGPPGLQGPPGPPGPLGPDGNMGLGFQGEKGVKGDVGLPGPAGPPPSTGELEFMGFPKGKKGSKGEPGPKGFPGISGPPGFPGLGTTGEKGEKGEKGIPGLPGPRGPMGSEGVQGPPGQQGKKGTLGFPGLNGFQGIEGQKGDIGLPGPDVFIDIDGAVISGNPGDPGVPGLPGLKGDEGIQGLRGPSGVPGLPALSGVPGALGPQGFPGLKGDQGNPGRTTIGAAGLPGRDGLPGPPGPPGPPSPEFETETLHNKESGFPGLRGEQGPKGNLGLKGIKGDSGFCACDGGVPNTGPPGEPGPPGPWGLIGLPGLKGARGDRGSGGAQGPAGAPGLVGPLGPSGPKGKKGEPILSTIQGMPGDRGDSGSQGFRGVIGEPGKDGVPGLPGLPGLPGDGGQGFPGEKGLPGLPGEKGHPGPPGLPGNGLPGLPGPRGLPGDKGKDGLPGQQGLPGSKGITLPCIIPGSYGPSGFPGTPGFPGPKGSRGLPGTPGQPGSSGSKGEPGSPGLVHLPELPGFPGPRGEKGLPGFPGLPGKDGLPGMIGSPGLPGSKGATGDIFGAENGAPGEQGLQGLTGHKGFLGDSGLPGLKGVHGKPGLLGPKGERGSPGTPGQVGQPGTPGSSGPYGIKGKSGLPGAPGFPGISGHPGKKGTRGKKGPPGSIVKKGLPGLKGLPGNPGLVGLKGSPGSPGVAGLPALSGPKGEKGSVGFVGFPGIPGLPGIPGTRGLKGIPGSTGKMGPSGRAGTPGEKGDRGNPGPVGIPSPRRPMSNLWLKGDKGSQGSAGSNGFPGPRGDKGEAGRPGPPGLPGAPGLPGIIKGVSGKPGPPGFMGIRGLPGLKGSSGITGFPGMPGESGSQGIRGSPGLPGASGLPGLKGDNGQTVEISGSPGPKGQPGESGFKGTKGRDGLIGNIGFPGNKGEDGKVGVSGDVGLPGAPGFPGVAGMRGEPGLPGSSGHQGAIGPLGSPGLIGPKGFPGFPGLHGLNGLPGTKGTHGTPGPSITGVPGPAGLPGPKGEKGYPGIGIGAPGKPGLRGQKGDRGFPGLQGPAGLPGAPGISLPSLIAGQPGDPGRPGLDGERGRPGPAGPPGPPGPSSNQGDTGDPGFPGIPGFSGLPGELGLKGMRGEPGFMGTPGKVGPPGDPGFPGMKGKAGPRGSSGLQGDPGQTPTAEAVQVPPGPLGLPGIDGIPGLTGDPGAQGPVGLQGSKGLPGIPGKDGPSGLPGPPGALGDPGLPGLQGPPGFEGAPGQQGPFGMPGMPGQSMRVGYTLVKHSQSEQVPPCPIGMSQLWVGYSLLFVEGQEKAHNQDLGFAGSCLPRFSTMPFIYCNINEVCHYARRNDKSYWLSTTAPIPMMPVSQTQIPQYISRCSVCEAPSQAIAVHSQDITIPQCPLGWRSLWIGYSFLMHTAAGAEGGGQSLVSPGSCLEDFRATPFIECSGARGTCHYFANKYSFWLTTVEERQQFGELPVSETLKAGQLHTRVSRCQVCMKSL

SEQ ID NO: 19002 - protein, 1633 aa, Homo sapiens
  Payload ID: 3813
  Gene Symbol: COL4A6
  Gene Name: collagen, type IV, alpha 6
  ENSP ID: ENSP00000445236
MHPGLWLLLVTLCLTEELAAAGEKSYGKPCGGQDCSGSCQCFPEKGARGRPGPIGIQGPTGPQGFTGSTGLSGLKGERGFPGLLGPYGPKGDKGPMGVPGFLGINGIPGHPGQPGPRGPPGLDGCNGTQGAVGFPGPDGYPGLLGPPGLPGQKGSKGDPVLAPGSFKGMKGDPGLPGLDGITGPQGAPGFPGAVGPAGPPGLQGPPGPPGPLGPDGNMGLGFQGEKGVKGDVGLPGPAGPPPSTGELEFMGFPKGKKGSKGEPGPKGFPGISGPPGFPGLGTTGEKGEKGEKGIPGLPGPRGPMGSEGVQGPPGQQGKKGTLGFPGLNGFQGIEGQKGDIGLPGPDVFIDIDGAVISGNPGDPGVPGLPGLKGDEGIQGLRGPSGVPGLPALSGVPGALGPQGFPGLKGDQGNPGRTTIGAAGLPGRDGLPGPPGPPGPPSPEFETETLHNKESGFPGLRGEQGPKGNLGLKGIKGDSGFCACDGGVPNTGPPGEPGPPGPWGLIGLPGLKGARGDRGSGGAQGPAGAPGLVGPLGPSGPKGKKGEPILSTIQGMPGDRGDSGSQGFRGVIGEPGKDGVPGLPGLPGLPGDGGQGFPGEKGLPGLPGEKGHPGPPGLPGNGLPGLPGPRGLPGDKGKDGLPGQQGLPGSKGITLPCIIPGSYGPSGFPGTPGFPGPKGSRGLPGTPGQPGSSGSKGEPGSPGLVHLPELPGFPGPRGEKGLPGFPGLPGKDGLPGMIGSPGLPGSKGATGDIFGAENGAPGEQGLQGLTGHKGFLGDSGLPGLKGVHGKPGLLGPKGERGSPGTPGQVGQPGTPGSSGPYGIKGKSGLPGAPGFPGISGHPGKKGTRGKKGPPGSIVKKGLPGLKGLPGNPGLVGLKGSPGSPGVAGLPALSGPKGEKGSVGFVGFPGIPGLPGIPGTRGLKGIPGSTGKMGPSGRAGTPGEKGDRGNPGPVGIPSPRRPMSNLWLKGDKGSQGSAGSNGFPGPRGDKGEAGRPGPPGLPGAPGLPGIIKGVSGKPGPPGFMGIRGLPGLKGSSGITGFPGMPGESGSQGIRGSPGLPGASGLPGLKGDNGQTVEISGSPGPKGQPGESGFKGTKGRDGLIGNIGFPGNKGEDGKVGVSGDVGLPGAPGFPGVAGMRGEPGLPGSSGHQGAIGPLGSPGLIGPKGPSITGVPGPAGLPGPKGEKGYPGIGIGAPGKPGLRGQKGDRGFPGLQGPAGLPGAPGISLPSLIAGQPGDPGRPGLDGERGRPGPAGPPGPPGPSSNQGDTGDPGFPGIPGPKGPKGDQGIPGFSGLPGELGLKGSSGLQGDPGQTPTAEAVQVPPGPLGLPGIDGIPGLTGDPGAQGPVGLQGSKGLPGIPGKDGPSGLPGPPGALGDPGLPGLQGPPGFEGAPGQQGPFGMPGMPGQSMRVGYTLVKHSQSEQVPPCPIGMSQLWVGYSLLFVEGQEKAHNQDLGFAGSCLPRFSTMPFIYCNINEVCHYARRNDKSYWLSTTAPIPMMPVSQTQIPQYISRCSVCEAPSQAIAVHSQDITIPQCPLGWRSLWIGYSFLMHTAAGAEGGGQSLVSPGSCLEDFRATPFIECSGARGTCHYFANKYSFWLTTVEERQQFGELPVSETLKAGQLHTRVSRCQVCMKSL

SEQ ID NO: 19003 - protein, 1666 aa, Homo sapiens
  Payload ID: 3813
  Gene Symbol: COL4A6
  Gene Name: collagen, type IV, alpha 6
  ENSP ID: ENSP00000482970
MHPGLWLLLVTLCLTEELAAAGEKSYGKPCGGQDCSGSCQCFPEKGARGRPGPIGIQGPTGPQGFTGSTGLSGLKGERGFPGLLGPYGPKGDKGPMGVPGFLGINGIPGHPGQPGPRGPPGLDGCNGTQGAVGFPGPDGYPGLLGPPGLPGQKGSKGDPVLAPGSFKGMKGDPGLPGLDGITGPQGAPGFPGAVGPAGPPGLQGPPGPPGPLGPDGNMGLGFQGEKGVKGDVGLPGPAGPPPSTGELEFMGFPKGKKGSKGEPGPKGFPGISGPPGFPGLGTTGEKGEKGEKGIPGLPGPRGPMGSEGVQGPPGQQGKKGTLGFPGLNGFQGIEGQKGDIGLPGPDVFIDIDGAVISGNPGDPGVPGLPGLKGDEGIQGLRGPSGVPGLPALSGVPGALGPQGFPGLKGDQGNPGRTTIGAAGLPGRDGLPGPPGPPGPPSPEFETETLHNKESGFPGLRGEQGPKGNLGLKGIKGDSGFCACDGGVPNTGPPGEPGPPGPWGLIGLPGLKGARGDRGSGGAQGPAGAPGLVGPLGPSGPKGKKGEPILSTIQGMPGDRGDSGSQGFRGVIGEPGKDGVPGLPGLPGLPGDGGQGFPGEKGLPGLPGEKGHPGPPGLPGNGLPGLPGPRGLPGDKGKDGLPGQQGLPGSKGITLPCIIPGSYGPSGFPGTPGFPGPKGSRGLPGTPGQPGSSGSKGEPGSPGLVHLPELPGFPGPRGEKGLPGFPGLPGKDGLPGMIGSPGLPGSKGATGDIFGAENGAPGEQGLQGLTGHKGFLGDSGLPGLKGVHGKPGLLGPKGERGSPGTPGQVGQPGTPGSSGPYGIKGKSGLPGAPGFPGISGHPGKKGTRGKKGPPGSIVKKGLPGLKGLPGNPGLVGLKGSPGSPGVAGLPALSGPKGEKGSVGFVGFPGIPGLPGIPGTRGLKGIPGSTGKMGPSGRAGTPGEKGDRGNPGPVGIPSPRRPMSNLWLKGDKGSQGSAGSNGFPGPRGDKGEAGRPGPPGLPGAPGLPGIIKGVSGKPGPPGFMGIRGLPGLKGSSGITGFPGMPGESGSQGIRGSPGLPGASGLPGLKGDNGQTVEISGSPGPKGQPGESGFKGTKGRDGLIGNIGFPGNKGEDGKVGVSGDVGLPGAPGFPGVAGMRGEPGLPGSSGHQGAIGPLGSPGLIGPKGPSITGVPGPAGLPGPKGEKGYPGIGIGAPGKPGLRGQKGDRGFPGLQGPAGLPGAPGISLPSLIAGQPGDPGRPGLDGERGRPGPAGPPGPPGPSSNQGDTGDPGFPGIPGPKGPKGDQGIPGFSGLPGELGLKGMRGEPGFMGTPGKVGPPGDPGFPGMKGKAGPRGSSGLQGDPGQTPTAEAVQVPPGPLGLPGIDGIPGLTGDPGAQGPVGLQGSKGLPGIPGKDGPSGLPGPPGALGDPGLPGLQGPPGFEGAPGQQGPFGMPGMPGQSMRVGYTLVKHSQSEQVPPCPIGMSQLWVGYSLLFVEGQEKAHNQDLGFAGSCLPRFSTMPFIYCNINEVCHYARRNDKSYWLSTTAPIPMMPVSQTQIPQYISRCSVCEAPSQAIAVHSQDITIPQCPLGWRSLWIGYSFLMHTAAGAEGGGQSLVSPGSCLEDFRATPFIECSGARGTCHYFANKYSFWLTTVEERQQFGELPVSETLKAGQLHTRVSRCQVCMKSL

SEQ ID NO: 19004 - protein, 678 aa, Homo sapiens
  Payload ID: 3814
  Gene Symbol: COL9A1
  Gene Name: collagen, type IX, alpha 1
  Uniprot ID: P20849
  ENSP ID: ENSP00000315252
MAWTARDRGALGLLLLGLCLCAAQRGPPGEQGPPGPPGPPGVPGIDGIDGDRGPKGPPGPPGPAGEPGKPGAPGKPGTPGADGLTGPDGSPGSIGSKGQKGEPGVPGSRGFPGRGIPGPPGPPGTAGLPGELGRVGPVGDPGRRGPPGPPGPPGPRGTIGFHDGDPLCPNACPPGRSGYPGLPGMRGHKGAKGEIGEPGRQGHKGEEGDQGELGEVGAQGPPGAQGLRGITGIVGDKGEKGARGLDGEPGPQGLPGAPGDQGQRGPPGEAGPKGDRGAEGARGIPGLPGPKGDTGLPGVDGRDGIPGMPGTKGEPGKPGPPGDAGLQGLPGVPGIPGAKGVAGEKGSTGAPGKPGQMGNSGKPGQQGPPGEVGPRGPQGLPGSRGELGPVGSPGLPGKLGSLGSPGLPGLPGPPGLPGMKGDRGVVGEPGPKGEQGASGEEGEAGERGELGDIGLPGPKGSAGNPGEPGLRGPEGSRGLPGVEGPRGPPGPRGVQGEQGATGLPGVQGPPGRAPTDQHIKQVCMRVIQEHFAEMAASLKRPDSGATGLPGRPGPPGPPGPPGENGFPGQMGIRGLPGIKGPPGALGLRGPKGDLGEKGERGPPGRGPNGLPGAIGLPGDPGPASYGRNGRDGERGPPGVAGIPGVPGPPGPPGLPGFCEPASCTMQAGQRAFNKGPDP

SEQ ID NO: 19005 - protein, 921 aa, Homo sapiens
  Payload ID: 3814
  Gene Symbol: COL9A1
  Gene Name: collagen, type IX, alpha 1
  Uniprot ID: P20849
  ENSP ID: ENSP00000349790
MKTCWKIPVFFFVCSFLEPWASAAVKRRPRFPVNSNSNGGNELCPKIRIGQDDLPGFDLISQFQVDKAASRRAIQRVVGSATLQVAYKLGNNVDFRIPTRNLYPSGLPEEYSFLTTFRMTGSTLKKNWNIWQIQDSSGKEQVGIKINGQTQSVVFSYKGLDGSLQTAAFSNLSSLFDSQWHKIMIGVERSSATLFVDCNRIESLPIKPRGPIDIDGFAVLGKLADNPQVSVPFELQWMLIHCDPLRPRRETCHELPARITPSQTTDERGPPGEQGPPGPPGPPGVPGIDGIDGDRGPKGPPGPPGPAGEPGKPGAPGKPGTPGADGLTGPDGSPGSIGSKGQKGEPGVPGSRGFPGRGIPGPPGPPGTAGLPGELGRVGPVGDPGRRGPPGPPGPPGPRGTIGFHDGDPLCPNACPPGRSGYPGLPGMRGHKGAKGEIGEPGRQGHKGEEGDQGELGEVGAQGPPGAQGLRGITGIVGDKGEKGARGLDGEPGPQGLPGAPGDQGQRGPPGEAGPKGDRGAEGARGIPGLPGPKGDTGLPGVDGRDGIPGMPGTKGEPGKPGPPGDAGLQGLPGVPGIPGAKGVAGEKGSTGAPGKPGQMGNSGKPGQQGPPGEVGPRGPQGLPGSRGELGPVGSPGLPGKLGSLGSPGLPGLPGPPGLPGMKGDRGVVGEPGPKGEQGASGEEGEAGERGELGDIGLPGPKGSAGNPGEPGLRGPEGSRGLPGVEGPRGPPGPRGVQGEQGATGLPGVQGPPGRAPTDQHIKQVCMRVIQEHFAEMAASLKRPDSGATGLPGRPGPPGPPGPPGENGFPGQMGIRGLPGIKGPPGALGLRGPKGDLGEKGERGPPGRGPNGLPGAIGLPGDPGPASYGRNGRDGERGPPGVAGIPGVPGPPGPPGLPGFCEPASCTMQAGQRAFNKGPDP

SEQ ID NO: 19006 - protein, 328 aa, Homo sapiens
  Payload ID: 3814
  Gene Symbol: COL9A1
  Gene Name: collagen, type IX, alpha 1
  Uniprot ID: P20849
  ENSP ID: ENSP00000359527
MKTCWKIPVFFFVCSFLEPWASAAVKRRPRFPVNSNSNGGNELCPKIRIGQDDLPGFDLISQFQVDKAASRRAIQRVVGSATLQVAYKLGNNVDFRIPTRNLYPSGLPEEYSFLTTFRMTGSTLKKNWNIWQIQDSSGKEQVGIKINGQTQSVVFSYKGLDGSLQTAAFSNLSSLFDSQWHKIMIGVERSSATLFVDCNRIESLPIKPRGPIDIDGFAVLGKLADNPQVSVPFELQWMLIHCDPLRPRRETCHELPARITPSQTTDERGPPGEQGPPGPPGPPGVPGIDGIDGDRGPKGPPGPPGPAGEPGKPGAPGKPGTPGADTSP

SEQ ID NO: 19007 - protein, 83 aa, Homo sapiens
  Payload ID: 3815
  Gene Symbol: COL9A2
  Gene Name: collagen, type IX, alpha 2
  ENSP ID: ENSP00000361821
MAAATASPRSLLVLLQVVVLALAQIRGPPGERGPPGPPGPPGVPGSDGIDGPPGPVGLPGEIGIRGPKGDPGPDGPSGPPGPP

SEQ ID NO: 19008 - protein, 689 aa, Homo sapiens
  Payload ID: 3815
  Gene Symbol: COL9A2
  Gene Name: collagen, type IX, alpha 2
  Uniprot ID: Q14055
  ENSP ID: ENSP00000361834
MAAATASPRSLLVLLQVVVLALAQIRGPPGERGPPGPPGPPGVPGSDGIDGDNGPPGKAGPPGPKGEPGKAGPDGPDGKPGIDGLTGAKGEPGPMGIPGVKGQPGLPGPPGLPGPGFAGPPGPPGPVGLPGEIGIRGPKGDPGPDGPSGPPGPPGKPGRPGTIQGLEGSADFLCPTNCPPGMKGPPGLQGVKGHAGKRGILGDPGHQGKPGPKGDVGASGEQGIPGPPGPQGIRGYPGMAGPKGETGPHGYKGMVGAIGATGPPGEEGPRGPPGRAGEKGDEGSPGIRGPQGITGPKGATGPPGINGKDGTPGTPGMKGSAGQAGQPGSPGHQGLAGVPGQPGTKGGPGDQGEPGPQGLPGFSGPPGKEGEPGPRGEIGPQGIMGQKGDQGERGPVGQPGPQGRQGPKGEQGPPGIPGPQGLPGVKGDKGSPGKTGPRGKVGDPGVAGLPGEKGEKGESGEPGPKGQQGVRGEPGYPGPSGDAGAPGVQGYPGPPGPRGLAGNRGVPGQPGRQGVEGRDATDQHIVDVALKMLQEQLAEVAVSAKREALGAVGMMGPPGPPGPPGYPGKQGPHGHPGPRGVPGIVGAVGQIGNTGPKGKRGEKGDPGEVGRGHPGMPGPPGIPGLPGRPGQAINGKDGDRGSPGAPGEAGRPGLPGPVGLPGFCEPAACLGASAYASARLTEPGSIKGP

SEQ ID NO: 19009 - protein, 226 aa, Homo sapiens
  Payload ID: 3815
  Gene Symbol: COL9A2
  Gene Name: collagen, type IX, alpha 2
  ENSP ID: ENSP00000388493
  MOD_RES (1)..(1): Any amino acid
XSPFRGPPGAAGARRGPPGERGPPGPPGPPGVPGSDGIDGDNGPPGKAGPPGPKGEPGKAGPDGPDGKPGIDGLTGAKGEPGPMGIPGVKGQPGLPGPPGLPGPGFAGPPGPPGPVGLPGEIGIRGPKGDPGPDGPSGPPGPPGKPGRPGTIQGLEGSADFLCPTNCPPGMKGPPGLQGVKGHAGKRGILGDPGHQGKPGPKGDVGASGEQGIPGPPGPQGIRGYP

SEQ ID NO: 19010 - protein, 182 aa, Homo sapiens
  Payload ID: 3815
  Gene Symbol: COL9A2
  Gene Name: collagen, type IX, alpha 2
  ENSP ID: ENSP00000407377
GNQALREGRALRGSRAPPEFQGPKACQASKETRAPQGRPGPAAKWVTQGWPASPERKARRASPASRGPRDSKEYVENPATLAPAGMRAPQGFRATLVPPALEDWPGTEACQDSPGDRAWRATGRGRRECQAGSPGCGGHDGSSRTSWAPWVPRQAGPPWAPWPSGRSWHRGSRGSDRQHGAQ

SEQ ID NO: 19011 - protein, 684 aa, Homo sapiens
  Payload ID: 3816
  Gene Symbol: COL9A3
  Gene Name: collagen, type IX, alpha 3
  Uniprot ID: Q14050
  ENSP ID: ENSP00000341640
MAGPRACAPLLLLLLLGELLAAAGAQRVGLPGPPGPPGPPGKPGQDGIDGEAGPPGLPGPPGPKGAPGKPGKPGEAGLPGLPGVDGLTGRDGPPGPKGAPGERGSLGPPGPPGLGGKGLPGPPGEAGVSGPPGGIGLRGPPGPSGLPGLPGPPGPPGPPGHPGVLPEGATDLQCPSICPPGPPGPPGMPGFKGPTGYKGEQGEVGKDGEKGDPGPPGPAGLPGSVGLQGPRGLRGLPGPLGPPGDRGPIGFRGPPGIPGAPGKAGDRGERGPEGFRGPKGDLGRPGPKGTPGVAGPSGEPGMPGKDGQNGVPGLDGQKGEAGRNGAPGEKGPNGLPGLPGRAGSKGEKGERGRAGELGEAGPSGEPGVPGDAGMPGERGEAGHRGSAGALGPQGPPGAPGVRGFQGQKGSMGDPGLPGPQGLRGDVGDRGPGGAAGPKGDQGIAGSDGLPGDKGELGPSGLVGPKGESGSRGELGPKGTQGPNGTSGVQGVPGPPGPLGLQGVPGVPGITGKPGVPGKEASEQRIRELCGGMISEQIAQLAAHLRKPLAPGSIGRPGPAGPPGPPGPPGSIGHPGARGPPGYRGPTGELGDPGPRGNQGDRGDKGAAGAGLDGPEGDQGPQGPQGVPGTSKDGQDGAPGEPGPPGDPGLPGAIGAQGTPGICDTSACQGAVLGGVGEKSGSRSS

SEQ ID NO: 19012 - protein, 191 aa, Homo sapiens
  Payload ID: 3816
  Gene Symbol: COL9A3
  Gene Name: collagen, type IX, alpha 3
  ENSP ID: ENSP00000394280
MWWSSTQNAGTEGEAGPPGLPGPPGPKGAPGKPGKPGEAGLPGLPGVDGLTGRDGPPGPKGAPGERGSLGPPGPPGLGGKGLPGPPGEAGVSGPPGGIGLRGPPGPSGLPGLPGPPGPPGPPGHPGVLPEGATDLQCPSICPPGPPGPPGMPGFKGPTGYKGEQGEVGKDGEKGDPGPPGPAGLPGSVGLQ

SEQ ID NO: 19013 - protein, 1838 aa, Homo sapiens
  Payload ID: 3817
  Gene Symbol: COL5A1
  Gene Name: collagen, type V, alpha 1
  Uniprot ID: P20908
  ENSP ID: ENSP00000360882
MDVHTRWKARSALRPGAPLLPPLLLLLLWAPPPSRAAQPADLLKVLDFHNLPDGITKTTGFCATRRSSKGPDVAYRVTKDAQLSAPTKQLYPASAFPEDFSILTTVKAKKGSQAFLVSIYNEQGIQQIGLELGRSPVFLYEDHTGKPGPEDYPLFRGINLSDGKWHRIALSVHKKNVTLILDCKKKTTKFLDRSDHPMIDINGIIVFGTRILDEEVFEGDIQQLLFVSDHRAAYDYCEHYSPDCDTAVPDTPQSQDPNPDEYYTEGDGEGETYYYEYPYYEDPEDLGKEPTPSKKPVEAAKETTEVPEELTPTPTEAAPMPETSEGAGKEEDVGIGDYDYVPSEDYYTPSPYDDLTYGEGEENPDQPTDPGAGAEIPTSTADTSNSSNPAPPPGEGADDLEGEFTEETIRNLDENYYDPYYDPTSSPSEIGPGMPANQDTIYEGIGGPRGEKGQKGEPAIIEPGMLIEGPPGPEGPAGLPGPPGTMGPTGQVGDPGERGPPGRPGLPGADGLPGPPGTMLMLPFRFGGGGDAGSKGPMVSAQESQAQAILQQARLALRGPAGPMGLTGRPGPVGPPGSGGLKGEPGDVGPQGPRGVQGPPGPAGKPGRRGRAGSDGARGMPGQTGPKGDRGFDGLAGLPGEKGHRGDPGPSGPPGPPGDDGERGDDGEVGPRGLPGEPGPRGLLGPKGPPGPPGPPGVTGMDGQPGPKGNVGPQGEPGPPGQQGNPGAQGLPGPQGAIGPPGEKGPLGKPGLPGMPGADGPPGHPGKEGPPGEKGGQGPPGPQGPIGYPGPRGVKGADGIRGLKGTKGEKGEDGFPGFKGDMGIKGDRGEIGPPGPRGEDGPEGPKGRGGPNGDPGPLGPPGEKGKLGVPGLPGYPGRQGPKGSIGFPGFPGANGEKGGRGTPGKPGPRGQRGPTGPRGERGPRGITGKPGPKGNSGGDGPAGPPGERGPNGPQGPTGFPGPKGPPGPPGKDGLPGHPGQRGETGFQGKTGPPGPPGVVGPQGPTGETGPMGERGHPGPPGPPGEQGLPGLAGKEGTKGDPGPAGLPGKDGPPGLRGFPGDRGLPGPVGALGLKGNEGPPGPPGPAGSPGERGPAGAAGPIGIPGRPGPQGPPGPAGEKGAPGEKGPQGPAGRDGLQGPVGLPGPAGPVGPPGEDGDKGEIGEPGQKGSKGDKGEQGPPGPTGPQGPIGQPGPSGADGEPGPRGQQGLFGQKGDEGPRGFPGPPGPVGLQGLPGPPGEKGETGDVGQMGPPGPPGPRGPSGAPGADGPQGPPGGIGNPGAVGEKGEPGEAGEPGLPGEGGPPGPKGERGEKGESGPSGAAGPPGPKGPPGDDGPKGSPGPVGFPGDPGPPGEPGPAGQDGPPGDKGDDGEPGQTGSPGPTGEPGPSGPPGKRGPPGPAGPEGRQGEKGAKGEAGLEGPPGKTGPIGPQGAPGKPGPDGLRGIPGPVGEQGLPGSPGPDGPPGPMGPPGLPGLKGDSGPKGEKGHPGLIGLIGPPGEQGEKGDRGLPGPQGSSGPKGEQGITGPSGPIGPPGPPGLPGPPGPKGAKGSSGPTGPKGEAGHPGPPGPPGPPGEVIQPLPIQASRTRRNIDASQLLDDGNGENYVDYADGMEEIFGSLNSLKLEIEQMKRPLGTQQNPARTCKDLQLCHPDFPDGEYWVDPNQGCSRDSFKVYCNFTAGGSTCVFPDKKSEGARITSWPKENPGSWFSEFKRGKLLSYVDAEGNPVGVVQMTFLRLLSASAHQNVTYHCYQSVAWQDAATGSYDKALRFLGSNDEEMSYDNNPYIRALVDGCATKKGYQKTVLEIDTPKVEQVPIVDIMFNDFGEASQKFGFEVGPACFMG

SEQ ID NO: 19014 - protein, 210 aa, Homo sapiens
  Payload ID: 3817
  Gene Symbol: COL5A1
  Gene Name: collagen, type V, alpha 1
  ENSP ID: ENSP00000360885
  MOD_RES (1)..(1): Any amino acid
XRTRRNIDASQLLDDGNGENYVDYADGMEEIFGSLNSLKLEIEQMKRPLGTQQNPARTCKDLQLCHPDFPDGEYWVDPNQGCSRDSFKVYCNFTAGGSTCVFPDKKSEGSKMARWPKEQPSTWYSQYKRGSLLSYVDAEGNPVGVVQMTFLRLLSASAHQNVTYHCYQSVAWQDAATGSYDKALRFLGSNDEEMSYDNNPYIRALVDGCA

SEQ ID NO: 19015 - protein, 1838 aa, Homo sapiens
  Payload ID: 3817
  Gene Symbol: COL5A1
  Gene Name: collagen, type V, alpha 1
  ENSP ID: ENSP00000481360
MDVHTRWKARSALRPGAPLLPPLLLLLLWAPPPSRAAQPADLLKVLDFHNLPDGITKTTGFCATRRSSKGPDVAYRVTKDAQLSAPTKQLYPASAFPEDFSILTTVKAKKGSQAFLVSIYNEQGIQQIGLELGRSPVFLYEDHTGKPGPEDYPLFRGINLSDGKWHRIALSVHKKNVTLILDCKKKTTKFLDRSDHPMIDINGIIVFGTRILDEEVFEGDIQQLLFVSDHRAAYDYCEHYSPDCDTAVPDTPQSQDPNPDEYYTEGDGEGETYYYEYPYYEDPEDLGKEPTPSKKPVEAAKETTEVPEELTPTPTEAAPMPETSEGAGKEEDVGIGDYDYVPSEDYYTPSPYDDLTYGEGEENPDQPTDPGAGAEIPTSTADTSNSSNPAPPPGEGADDLEGEFTEETIRNLDENYYDPYYDPTSSPSEIGPGMPANQDTIYEGIGGPRGEKGQKGEPAIIEPGMLIEGPPGPEGPAGLPGPPGTMGPTGQVGDPGERGPPGRPGLPGADGLPGPPGTMLMLPFRFGGGGDAGSKGPMVSAQESQAQAILQQARLALRGPAGPMGLTGRPGPVGPPGSGGLKGEPGDVGPQGPRGVQGPPGPAGKPGRRGRAGSDGARGMPGQTGPKGDRGFDGLAGLPGEKGHRGDPGPSGPPGPPGDDGERGDDGEVGPRGLPGEPGPRGLLGPKGPPGPPGPPGVTGMDGQPGPKGNVGPQGEPGPPGQQGNPGAQGLPGPQGAIGPPGEKGPLGKPGLPGMPGADGPPGHPGKEGPPGEKGGQGPPGPQGPIGYPGPRGVKGADGIRGLKGTKGEKGEDGFPGFKGDMGIKGDRGEIGPPGPRGEDGPEGPKGRGGPNGDPGPLGPPGEKGKLGVPGLPGYPGRQGPKGSIGFPGFPGANGEKGGRGTPGKPGPRGQRGPTGPRGERGPRGITGKPGPKGNSGGDGPAGPPGERGPNGPQGPTGFPGPKGPPGPPGKDGLPGHPGQRGETGFQGKTGPPGPPGVVGPQGPTGETGPMGERGHPGPPGPPGEQGLPGLAGKEGTKGDPGPAGLPGKDGPPGLRGFPGDRGLPGPVGALGLKGNEGPPGPPGPAGSPGERGPAGAAGPIGIPGRPGPQGPPGPAGEKGAPGEKGPQGPAGRDGLQGPVGLPGPAGPVGPPGEDGDKGEIGEPGQKGSKGDKGEQGPPGPTGPQGPIGQPGPSGADGEPGPRGQQGLFGQKGDEGPRGFPGPPGPVGLQGLPGPPGEKGETGDVGQMGPPGPPGPRGPSGAPGADGPQGPPGGIGNPGAVGEKGEPGEAGEPGLPGEGGPPGPKGERGEKGESGPSGAAGPPGPKGPPGDDGPKGSPGPVGFPGDPGPPGEPGPAGQDGPPGDKGDDGEPGQTGSPGPTGEPGPSGPPGKRGPPGPAGPEGRQGEKGAKGEAGLEGPPGKTGPIGPQGAPGKPGPDGLRGIPGPVGEQGLPGSPGPDGPPGPMGPPGLPGLKGDSGPKGEKGHPGLIGLIGPPGEQGEKGDRGLPGPQGSSGPKGEQGITGPSGPIGPPGPPGLPGPPGPKGAKGSSGPTGPKGEAGHPGPPGPPGPPGEVIQPLPIQASRTRRNIDASQLLDDGNGENYVDYADGMEEIFGSLNSLKLEIEQMKRPLGTQQNPARTCKDLQLCHPDFPDGEYWVDPNQGCSRDSFKVYCNFTAGGSTCVFPDKKSEGSKMARWPKEQPSTWYSQYKRGSLLSYVDAEGNPVGVVQMTFLRLLSASAHQNVTYHCYQSVAWQDAATGSYDKALRFLGSNDEEMSYDNNPYIRALVDGCATKKGYQKTVLEIDTPKVEQVPIVDIMFNDFGEASQKFGFEVGPACFMG

SEQ ID NO: 19016 - protein, 1499 aa, Homo sapiens
  Payload ID: 3818
  Gene Symbol: COL5A2
  Gene Name: collagen, type V, alpha 2
  Uniprot ID: P05997
  ENSP ID: ENSP00000364000
MMANWAEARPLLILIVLLGQFVSIKAQEEDEDEGYGEEIACTQNGQMYLNRDIWKPAPCQICVCDNGAILCDKIECQDVLDCADPVTPPGECCPVCSQTPGGGNTNFGRGRKGQKGEPGLVPVVTGIRGRPGPAGPPGSQGPRGERGPKGRPGPRGPQGIDGEPGVPGQPGAPGPPGHPSHPGPDGLSRPFSAQMAGLDEKSGLGSQVGLMPGSVGPVGPRGPQGLQGQQGGAGPTGPPGEPGDPGPMGPIGSRGPEGPPGKPGEDGEPGRNGNPGEVGFAGSPGARGFPGAPGLPGLKGHRGHKGLEGPKGEVGAPGSKGEAGPTGPMGAMGPLGPRGMPGERGRLGPQGAPGQRGAHGMPGKPGPMGPLGIPGSSGFPGNPGMKGEAGPTGARGPEGPQGQRGETGPPGPVGSPGLPGAIGTDGTPGAKGPTGSPGTSGPPGSAGPPGSPGPQGSTGPQGIRGQPGDPGVPGFKGEAGPKGEPGPHGIQGPIGPPGEEGKRGPRGDPGTVGPPGPVGERGAPGNRGFPGSDGLPGPKGAQGERGPVGSSGPKGSQGDPGRPGEPGLPGARGLTGNPGVQGPEGKLGPLGAPGEDGRPGPPGSIGIRGQPGSMGLPGPKGSSGDPGKPGEAGNAGVPGQRGAPGKDGEVGPSGPVGPPGLAGERGEQGPPGPTGFQGLPGPPGPPGEGGKPGDQGVPGDPGAVGPLGPRGERGNPGERGEPGITGLPGEKGMAGGHGPDGPKGSPGPSGTPGDTGPPGLQGMPGERGIAGTPGPKGDRGGIGEKGAEGTAGNDGARGLPGPLGPPGPAGPTGEKGEPGPRGLVGPPGSRGNPGSRGENGPTGAVGFAGPQGPDGQPGVKGEPGEPGQKGDAGSPGPQGLAGSPGPHGPNGVPGLKGGRGTQGPPGATGFPGSAGRVGPPGPAGAPGPAGPLGEPGKEGPPGLRGDPGSHGRVGDRGPAGPPGGPGDKGDPGEDGQPGPDGPPGPAGTTGQRGIVGMPGQRGERGMPGLPGPAGTPGKVGPTGATGDKGPPGPVGPPGSNGPVGEPGPEGPAGNDGTPGRDGAVGERGDRGDPGPAGLPGSQGAPGTPGPVGAPGDAGQRGDPGSRGPIGPPGRAGKRGLPGPQGPRGDKGDHGDRGDRGQKGHRGFTGLQGLPGPPGPNGEQGSAGIPGPFGPRGPPGPVGPSGKEGNPGPLGPIGPPGVRGSVGEAGPEGPPGEPGPPGPPGPPGHLTAALGDIMGHYDESMPDPLPEFTEDQAAPDDKNKTDPGVHATLKSLSSQIETMRSPDGSKKHPARTCDDLKLCHSAKQSGEYWIDPNQGSVEDAIKVYCNMETGETCISANPSSVPRKTWWASKSPDNKPVWYGLDMNRGSQFAYGDHQSPNTAITQMTFLRLLSKEASQNITYICKNSVGYMDDQAKNLKKAVVLKGANDLDIKAEGNIRFRYIVLQDTCSKRNGNVGKTVFEYRTQNVARLPIIDLAPVDVGGTDQEFGVEIGPVCFV

SEQ ID NO: 19017 - protein, 1112 aa, Homo sapiens
  Payload ID: 3818
  Gene Symbol: COL5A2
  Gene Name: collagen, type V, alpha 2
  ENSP ID: ENSP00000482184
MPGSVGPVGPRGPQGLQGQQGGAGPTGPPGEPGDPGPMGPIGSRGPEGPPGKPGEDGEPGRNGNPGEVGFAGSPGARGFPGAPGLPGLKGHRGHKGLEGPKGEVGAPGSKGEAGPTGPMGDPGTVGPPGPVGERGAPGNRGFPGSDGLPGPKGAQGERGPVGSSGPKGSQGDPGRPGEPGLPGARGLTGNPGVQGPEGKLGPLGAPGEDGRPGPPGSIGIRGQPGSMGLPGPKGSSGDPGKPGEAGNAGVPGQRGAPGKDGEVGPSGPVGPPGLAGERGEQGPPGPTGFQGLPGPPGPPGEGGKPGDQGVPGDPGAVGPLGPRGERGNPGERGEPGITGLPGEKGMAGGHGPDGPKGSPGPSGTPGDTGPPGLQGMPGERGIAGTPGPKGDRGGIGEKGAEGTAGNDGARGLPGPLGPPGPAGPTGEKGEPGPRGLVGPPGSRGNPGSRGENGPTGAVGFAGPQGPDGQPGVKGEPGEPGQKGDAGSPGPQGLAGSPGPHGPNGVPGLKGGRGTQGPPGATGFPGSAGRVGPPGPAGAPGPAGPLGEPGKEGPPGLRGDPGSHGRVGDRGPAGPPGGPGDKGDPGEDGQPGPDGPPGPAGTTGQRGIVGMPGQRGERGMPGLPGPAGTPGKVGPTGATGDKGPPGPVGPPGSNGPVGEPGPEGPAGNDGTPGRDGAVGERGDRGDPGPAGLPGSQGAPGTPGPVGAPGDAGQRGDPGSRGPIGPPGRAGKRGLPGPQGPRGDKGDHGDRGDRGQKGHRGFTGLQGLPGPPGPNGEQGSAGIPGPFGPRGPPGPVGPSGKEGNPGPLGPIGPPGVRGSVGEAGPEGPPGEPGPPGPPGPPGHLTAALGDIMGHYDESMPDPLPEFTEDQAAPDDKNKTDPGVHATLKSLSSQIETMRSPDGSKKHPARTCDDLKLCHSAKQSGEYWIDPNQGSVEDAIKVYCNMETGETCISANPSSVPRKTWWASKSPDNKPVWYGLDMNRGSQFAYGDHQSPNTAITQMTFLRLLSKEASQNITYICKNSVGYMDDQAKNLKKAVVLKGANDLDIKAEGNIRFRYIVLQDTCSKRNGNVGKTVFEYRTQNVARLPIIDLAPVDVGGTDQEFGVEIGPVCFV

SEQ ID NO: 19018 - protein, 1745 aa, Homo sapiens
  Payload ID: 3819
  Gene Symbol: COL5A3
  Gene Name: collagen, type V, alpha 3
  Uniprot ID: P25940
  ENSP ID: ENSP00000264828
MGNRRDLGQPRAGLCLLLAALQLLPGTQADPVDVLKALGVQGGQAGVPEGPGFCPQRTPEGDRAFRIGQASTLGIPTWELFPEGHFPENFSLLITLRGQPANQSVLLSIYDERGARQLGLALGPALGLLGDPFRPLPQQVNLTDGRWHRVAVSIDGEMVTLVADCEAQPPVLGHGPRFISIAGLTVLGTQDLGEKTFEGDIQELLISPDPQAAFQACERYLPDCDNLAPAATVAPQGEPETPRPRRKGKGKGRKKGRGRKGKGRKKNKEIWTSSPPPDSAENQTSTDIPKTETPAPNLPPTPTPLVVTSTVTTGLNATILERSLDPDSGTELGTLETKAAREDEEGDDSTMGPDFRAAEYPSRTQFQIFPGAGEKGAKGEPAVIEKGQQFEGPPGAPGPQGVVGPSGPPGPPGFPGDPGPPGPAGLPGIPGIDGIRGPPGTVIMMPFQFAGGSFKGPPVSFQQAQAQAVLQQTQLSMKGPPGPVGLTGRPGPVGLPGHPGLKGEEGAEGPQGPRGLQGPHGPPGRVGKMGRPGADGARGLPGDTGPKGDRGFDGLPGLPGEKGQRGDFGHVGQPGPPGEDGERGAEGPPGPTGQAGEPGPRGLLGPRGSPGPTGRPGVTGIDGAPGAKGNVGPPGEPGPPGQQGNHGSQGLPGPQGLIGTPGEKGPPGNPGIPGLPGSDGPLGHPGHEGPTGEKGAQGPPGSAGPPGYPGPRGVKGTSGNRGLQGEKGEKGEDGFPGFKGDVGLKGDQGKPGAPGPRGEDGPEGPKGQAGQAGEEGPPGSAGEKGKLGVPGLPGYPGRPGPKGSIGFPGPLGPIGEKGKSGKTGQPGLEGERGPPGSRGERGQPGATGQPGPKGDVGQDGAPGIPGEKGLPGLQGPPGFPGPKGPPGHQGKDGRPGHPGQRGELGFQGQTGPPGPAGVLGPQGKTGEVGPLGERGPPGPPGPPGEQGLPGLEGREGAKGELGPPGPLGKEGPAGLRGFPGPKGGPGDPGPTGLKGDKGPPGPVGANGSPGERGPLGPAGGIGLPGQSGSEGPVGPAGKKGSRGERGPPGPTGKDGIPGPLGPLGPPGAAGPSGEEGDKGDVGAPGHKGSKGDKGDAGPPGQPGIRGPAGHPGPPGADGAQGRRGPPGLFGQKGDDGVRGFVGVIGPPGLQGLPGPPGEKGEVGDVGSMGPHGAPGPRGPQGPTGSEGTPGLPGGVGQPGAVGEKGERGDAGDPGPPGAPGIPGPKGDIGEKGDSGPSGAAGPPGKKGPPGEDGAKGSVGPTGLPGDLGPPGDPGVSGIDGSPGEKGDPGDVGGPGPPGASGEPGAPGPPGKRGPSGHMGREGREGEKGAKGEPGPDGPPGRTGPMGARGPPGRVGPEGLRGIPGPVGEPGLLGAPGQMGPPGPLGPSGLPGLKGDTGPKGEKGHIGLIGLIGPPGEAGEKGDQGLPGVQGPPGPKGDPGPPGPIGSLGHPGPPGVAGPLGQKGSKGSPGSMGPRGDTGPAGPPGPPGAPAELHGLRRRRRFVPVPLPVVEGGLEEVLASLTSLSLELEQLRRPPGTAERPGLVCHELHRNHPHLPDGEYWIDPNQGCARDSFRVFCNFTAGGETCLYPDKKFEIVKLASWSKEKPGGWYSTFRRGKKFSYVDADGSPVNVVQLNFLKLLSATARQNFTYSCQNAAAWLDEATGDYSHSARFLGTNGEELSFNQTTAATVSVPQDGCRLRKGQTKTLFEFSSSRAGFLPLWDVAATDFGQTNQKFGFELGPVCFSS

SEQ ID NO: 19019 - protein, 1028 aa, Homo sapiens
  Payload ID: 3820
  Gene Symbol: COL6A1
  Gene Name: collagen, type VI, alpha 1
  Uniprot ID: P12109
  ENSP ID: ENSP00000355180
MRAARALLPLLLQACWTAAQDEPETPRAVAFQDCPVDLFFVLDTSESVALRLKPYGALVDKVKSFTKRFIDNLRDRYYRCDRNLVWNAGALHYSDEVEIIQGLTRMPGGRDALKSSVDAVKYFGKGTYTDCAIKKGLEQLLVGGSHLKENKYLIVVTDGHPLEGYKEPCGGLEDAVNEAKHLGVKVFSVAITPDHLEPRLSIIATDHTYRRNFTAADWGQSRDAEEAISQTIDTIVDMIKNNVEQVCCSFECQPARGPPGLRGDPGFEGERGKPGLPGEKGEAGDPGRPGDLGPVGYQGMKGEKGSRGEKGSRGPKGYKGEKGKRGIDGVDGVKGEMGYPGLPGCKGSPGFDGIQGPPGPKGDPGAFGLKGEKGEPGADGEAGRPGSSGPSGDEGQPGEPGPPGEKGEAGDEGNPGPDGAPGERGGPGERGPRGTPGTRGPRGDPGEAGPQGDQGREGPVGVPGDPGEAGPIGPKGYRGDEGPPGSEGARGAPGPAGPPGDPGLMGERGEDGPAGNGTEGFPGFPGYPGNRGAPGINGTKGYPGLKGDEGEAGDPGDDNNDIAPRGVKGAKGYRGPEGPQGPPGHQGPPGPDECEILDIIMKMCSCCECKCGPIDLLFVLDSSESIGLQNFEIAKDFVVKVIDRLSRDELVKFEPGQSYAGVVQYSHSQMQEHVSLRSPSIRNVQELKEAIKSLQWMAGGTFTGEALQYTRDQLLPPSPNNRIALVITDGRSDTQRDTTPLNVLCSPGIQVVSVGIKDVFDFIPGSDQLNVISCQGLAPSQGRPGLSLVKENYAELLEDAFLKNVTAQICIDKKCPDYTCPITFSSPADITILLDGSASVGSHNFDTTKRFAKRLAERFLTAGRTDPAHDVRVAVVQYSGTGQQRPERASLQFLQNYTALASAVDAMDFINDATDVNDALGYVTRFYREASSGAAKKRLLLFSDGNSQGATPAAIEKAVQEAQRAGIEIFVVVVGRQVNEPHIRVLVTGKTAEYDVAYGESHLFRVPSYQALLRGVFHQTVSRKVALG

SEQ ID NO: 19020 - protein, 1026 aa, Homo sapiens [sequence omitted]

SEQ ID NO: 19021 - protein, 1019 aa, Homo sapiens
  Payload ID: 3821
  Gene Symbol: COL6A2
  Gene Name: collagen, type VI, alpha 2
  Uniprot ID: P12110
  ENSP ID: ENSP00000300527
MLQGTCSVLLLWGILGAIQAQQQEVISPDTTERNNNCPEKTDCPIHVYFVLDTSESVTMQSPTDILLFHMKQFVPQFISQLQNEFYLDQVALSWRYGGLHFSDQVEVFSPPGSDRASFIKNLQGISSFRRGTFTDCALANMTEQIRQDRSKGTVHFAVVITDGHVTGSPCGGIKLQAERAREEGIRLFAVAPNQNLKEQGLRDIASTPHELYRNDYATMLPDSTEIDQDTINRIIKVMKHEAYGECYKVSCLEIPGPSGPKGYRGQKGAKGNMGEPGEPGQKGRQGDPGIEGPIGFPGPKGVPGFKGEKGEFGADGRKGAPGLAGKNGTDGQKGKLGRIGPPGCKGDPGNRGPDGYPGEAGSPGERGDQGGKGDPGRPGRRGPPGEIGAKGSKGYQGNSGAPGSPGVKGAKGGPGPRGPKGEPGRRGDPGTKGSPGSDGPKGEKGDPGPEGPRGLAGEVGNKGAKGDRGLPGPRGPQGALGEPGKQGSRGDPGDAGPRGDSGQPGPKGDPGRPGFSYPGPRGAPGEKGEPGPRGPEGGRGDFGLKGEPGRKGEKGEPADPGPPGEPGPRGPRGVPGPEGEPGPPGDPGLTECDVMTYVRETCGCCDCEKRCGALDVVFVIDSSESIGYTNFTLEKNFVINVVNRLGAIAKDPKSETGTRVGVVQYSHEGTFEAIQLDDERIDSLSSFKEAVKNLEWIAGGTWTPSALKFAYDRLIKESRRQKTRVFAVVITDGRHDPRDDDLNLRALCDRDVTVTAIGIGDMFHEKHESENLYSIACDKPQQVRNMTLFSDLVAEKFIDDMEDVLCPDPQIVCPDLPCQTELSVAQCTQRPVDIVFLLDGSERLGEQNFHKARRFVEQVARRLTLARRDDDPLNARVALLQFGGPGEQQVAFPLSHNLTAIHEALETTQYLNSFSHVGAGVVHAINAIVRSPRGGARRHAELSFVFLTDGVTGNDSLHESAHSMRKQNVVPTVLALGSDVDMDVLTTLSLGDRAAVFHEKDYDSLAQPGFFDRFIRWIC

SEQ ID NO: 19022 - protein, 828 aa, Homo sapiens
  Payload ID: 3821
  Gene Symbol: COL6A2
  Gene Name: collagen, type VI, alpha 2
  Uniprot ID: P12110
  ENSP ID: ENSP00000312529
MLQGTCSVLLLWGILGAIQAQQQEVISPDTTERNNNCPEKTDCPIHVYFVLDTSESVTMQSPTDILLFHMKQFVPQFISQLQNEFYLDQVALSWRYGGLHFSDQVEVFSPPGSDRASFIKNLQGISSFRRGTFTDCALANMTEQIRQDRSKGTVHFAVVITDGHVTGSPCGGIKLQAERAREEGIRLFAVAPNQNLKEQGLRDIASTPHELYRNDYATMLPDSTEIDQDTINRIIKVMKHEAYGECYKVSCLEIPGPSGPKGYRGQKGAKGNMGEPGEPGQKGRQGDPGIEGPIGFPGPKGVPGFKGEKGEFGADGRKGAPGLAGKNGTDGQKGKLGRIGPPGCKGDPGNRGPDGYPGEAGSPGERGDQGGKGDPGRPGRRGPPGEIGAKGSKGYQGNSGAPGSPGVKGAKGGPGPRGPKGEPGRRGDPGTKGSPGSDGPKGEKGDPGPEGPRGLAGEVGNKGAKGDRGLPGPRGPQGALGEPGKQGSRGDPGDAGPRGDSGQPGPKGDPGRPGFSYPGPRGAPGEKGEPGPRGPEGGRGDFGLKGEPGRKGEKGEPADPGPPGEPGPRGPRGVPGPEGEPGPPGDPGLTECDVMTYVRETCGCCDCEKRCGALDVVFVIDSSESIGYTNFTLEKNFVINVVNRLGAIAKDPKSETGTRVGVVQYSHEGTFEAIQLDDERIDSLSSFKEAVKNLEWIAGGTWTPSALKFAYDRLIKESRRQKTRVFAVVITDGRHDPRDDDLNLRALCDRDVTVTAIGIGDMFHEKHESENLYSIACDKPQQVRNMTLFSDLVAEKFIDDMEDVLCPDPQIVCPDLPCQTGLDGAVLC

SEQ ID NO: 19023 - protein, 918 aa, Homo sapiens
  Payload ID: 3821
  Gene Symbol: COL6A2
  Gene Name: collagen, type VI, alpha 2
  Uniprot ID: P12110
  ENSP ID: ENSP00000380870
MLQGTCSVLLLWGILGAIQAQQQEVISPDTTERNNNCPEKTDCPIHVYFVLDTSESVTMQSPTDILLFHMKQFVPQFISQLQNEFYLDQVALSWRYGGLHFSDQVEVFSPPGSDRASFIKNLQGISSFRRGTFTDCALANMTEQIRQDRSKGTVHFAVVITDGHVTGSPCGGIKLQAERAREEGIRLFAVAPNQNLKEQGLRDIASTPHELYRNDYATMLPDSTEIDQDTINRIIKVMKHEAYGECYKVSCLEIPGPSGPKGYRGQKGAKGNMGEPGEPGQKGRQGDPGIEGPIGFPGPKGVPGFKGEKGEFGADGRKGAPGLAGKNGTDGQKGKLGRIGPPGCKGDPGNRGPDGYPGEAGSPGERGDQGGKGDPGRPGRRGPPGEIGAKGSKGYQGNSGAPGSPGVKGAKGGPGPRGPKGEPGRRGDPGTKGSPGSDGPKGEKGDPGPEGPRGLAGEVGNKGAKGDRGLPGPRGPQGALGEPGKQGSRGDPGDAGPRGDSGQPGPKGDPGRPGFSYPGPRGAPGEKGEPGPRGPEGGRGDFGLKGEPGRKGEKGEPADPGPPGEPGPRGPRGVPGPEGEPGPPGDPGLTECDVMTYVRETCGCCDCEKRCGALDVVFVIDSSESIGYTNFTLEKNFVINVVNRLGAIAKDPKSETGTRVGVVQYSHEGTFEAIQLDDERIDSLSSFKEAVKNLEWIAGGTWTPSALKFAYDRLIKESRRQKTRVFAVVITDGRHDPRDDDLNLRALCDRDVTVTAIGIGDMFHEKHESENLYSIACDKPQQVRNMTLFSDLVAEKFIDDMEDVLCPDPQIVCPDLPCQTDAPWPGGEPPVTFLRTEEGPDATFPRTIPLIQQLLNATELTQDPAAYSQLVAVLVYTAERAKFATGVERQDWMELFIDTFKLVHRDIVGDPETALALC

SEQ ID NO: 19024 - protein, 828 aa, Homo sapiens; identical to SEQ ID NO: 19022
  Payload ID: 3821
  Gene Symbol: COL6A2
  Gene Name: collagen, type VI, alpha 2
  Uniprot ID: P12110
  ENSP ID: ENSP00000387115

SEQ ID NO: 19025 - protein, 180 aa, Homo sapiens
  Payload ID: 3821
  Gene Symbol: COL6A2
  Gene Name: collagen, type VI, alpha 2
  ENSP ID: ENSP00000390418
MLQGTCSVLLLWGILGAIQAQQQEVISPDTTERNNNCPEKTDCPIHVYFVLDTSESVTMQSPTDILLFHMKQFVPQFISQLQNEFYLDQVALSWRYGGLHFSDQVEVFSPPGSDRASFIKNLQGISSFRRGTFTDCALANMTEQIRQDRSKGTVHFAVVITDGHVTGSPCGGIKLQAERA

SEQ ID NO: 19026 - protein, 250 aa, Homo sapiens
  Payload ID: 3821
  Gene Symbol: COL6A2
  Gene Name: collagen, type VI, alpha 2
  ENSP ID: ENSP00000395751
GNKGAKGDRGLPGPRGPQGALGEPGKQGSRGDPGDAGPRGDSGQPGPKGDPGRPGFSYPGPRGAPGEKGEPGPRGPEGGRGDFGLKGEPGRKGEKGEPADPGPPGEPGPRGPRGVPGPEGEPGPPGDPGLTECDVMTYVRETCGCCGSEVSPVPPDDPATPPDCEKRCGALDVVFVIDSSESIGYTNFTLEKNFVINVVNRLGAIAKDPKSETGTRVGVVQYSHEGTFEAIQLDDERIDSLSSFKEAVKN

SEQ ID NO: 19027 - protein, 3177 aa, Homo sapiens
  Payload ID: 3822
  Gene Symbol: COL6A3
  Gene Name: collagen, type VI, alpha 3
  Uniprot ID: P12111
  ENSP ID: ENSP00000295550
MRKHRHLPLVAVFCLFLSGFPTTHAQQQQADVKNGAAADIIFLVDSSWTIGEEHFQLVREFLYDVVKSLAVGENDFHFALVQFNGNPHTEFLLNTYRTKQEVLSHISNMSYIGGTNQTGKGLEYIMQSHLTKAAGSRAGDGVPQVIVVLTDGHSKDGLALPSAELKSADVNVFAIGVEDADEGALKEIASEPLNMHMFNLENFTSLHDIVGNLVSCVHSSVSPERAGDTETLKDITAQDSADIIFLIDGSNNTGSVNFAVILDFLVNLLEKLPIGTQQIRVGVVQFSDEPRTMFSLDTYSTKAQVLGAVKALGFAGGELANIGLALDFVVENHFTRAGGSRVEEGVPQVLVLISAGPSSDEIRYGVVALKQASVFSFGLGAQAASRAELQHIATDDNLVFTVPEFRSFGDLQEKLLPYIVGVAQRHIVLKPPTIVTQVIEVNKRDIVFLVDGSSALGLANFNAIRDFIAKVIQRLEIGQDLIQVAVAQYADTVRPEFYFNTHPTKREVITAVRKMKPLDGSALYTGSALDFVRNNLFTSSAGYRAAEGIPKLLVLITGGKSLDEISQPAQELKRSSIMAFAIGNKGADQAELEEIAFDSSLVFIPAEFRAAPLQGMLPGLLAPLRTLSGTPEVHSNKRDIIFLLDGSANVGKTNFPYVRDFVMNLVNSLDIGNDNIRVGLVQFSDTPVTEFSLNTYQTKSDILGHLRQLQLQGGSGLNTGSALSYVYANHFTEAGGSRIREHVPQLLLLLTAGQSEDSYLQAANALTRAGILTFCVGASQANKAELEQIAFNPSLVYLMDDFSSLPALPQQLIQPLTTYVSGGVEEVPLAQPESKRDILFLFDGSANLVGQFPVVRDFLYKIIDELNVKPEGTRIAVAQYSDDVKVESRFDEHQSKPEILNLVKRMKIKTGKALNLGYALDYAQRYIFVKSAGSRIEDGVLQFLVLLVAGRSSDRVDGPASNLKQSGVVPFIFQAKNADPAELEQIVLSPAFILAAESLPKIGDLHPQIVNLLKSVHNGAPAPVSGEKDVVFLLDGSEGVRSGFPLLKEFVQRVVESLDVGQDRVRVAVVQYSDRTRPEFYLNSYMNKQDVVNAVRQLTLLGGPTPNTGAALEFVLRNILVSSAGSRITEGVPQLLIVLTADRSGDDVRNPSVVVKRGGAVPIGIGIGNADITEMQTISFIPDFAVAIPTFRQLGTVQQVISERVTQLTREELSRLQPVLQPLPSPGVGGKRDVVFLIDGSQSAGPEFQYVRTLIERLVDYLDVGFDTTRVAVIQFSDDPKVEFLLNAHSSKDEVQNAVQRLRPKGGRQINVGNALEYVSRNIFKRPLGSRIEEGVPQFLVLISSGKSDDEVDDPAVELKQFGVAPFTIARNADQEELVKISLSPEYVFSVSTFRELPSLEQKLLTPITTLTSEQIQKLLASTRYPPPAVESDAADIVFLIDSSEGVRPDGFAHIRDFVSRIVRRLNIGPSKVRVGVVQFSNDVFPEFYLKTYRSQAPVLDAIRRLRLRGGSPLNTGKALEFVARNLFVKSAGSRIEDGVPQHLVLVLGGKSQDDVSRFAQVIRSSGIVSLGVGDRNIDRTELQTITNDPRLVFTVREFRELPNIEERIMNSFGPSAATPAPPGVDTPPPSRPEKKKADIVFLLDGSINFRRDSFQEVLRFVSEIVDTVYEDGDSIQVGLVQYNSDPTDEFFLKDFSTKRQIIDAINKVVYKGGRHANTKVGLEHLRVNHFVPEAGSRLDQRVPQIAFVITGGKSVEDAQDVSLALTQRGVKVFAVGVRNIDSEEVGKIASNSATAFRVGNVQELSELSEQVLETLHDAMHETLCPGVTDAAKACNLDVILGFDGSRDQNVFVAQKGFESKVDAILNRISQMHRVSCSGGRSPTVRVSVVANTPSGPVEAFDFDEYQPEMLEKFRNMRSQHPYVLTEDTLKVYLNKFRQSSPDSVKVVIHFTDGADGDLADLHRASENLRQEGVRALILVGLERVVNLERLMHLEFGRGFMYDRPLRLNLLDLDYELAEQLDNIAEKACCGVPCKCSGQRGDRGPIGSIGPKGIPGEDGYRGYPGDEGGPGERGPPGVNGTQGFQGCPGQRGVKGSRGFPGEKGEVGEIGLDGLDGEDGDKGLPGSSGEKGNPGRRGDKGPRGEKGERGDVGIRGDPGNPGQDSQERGPKGETGDLGPMGVPGRDGVPGGPGETGKNGGFGRRGPPGAKGNKGGPGQPGFEGEQGTRGAQGPAGPAGPPGLIGEQGISGPRGSGGAAGAPGERGRTGPLGRKGEPGEPGPKGGIGNRGPRGETGDDGRDGVGSEGRRGKKGERGFPGYPGPKGNPGEPGLNGTTGPKGIRGRRGNSGPPGIVGQKGDPGYPGPAGPKGNRGDSIDQCALIQSIKDKCPCCYGPLECPVFPTELAFALDTSEGVNQDTFGRMRDVVLSIVNDLTIAESNCPRGARVAVVTYNNEVTTEIRFADSKRKSVLLDKIKNLQVALTSKQQSLETAMSFVARNTFKRVRNGFLMRKVAVFFSNTPTRASPQLREAVLKLSDAGITPLFLTRQEDRQLINALQINNTAVGHALVLPAGRDLTDFLENVLTCHVCLDICNIDPSCGFGSWRPSFRDRRAAGSDVDIDMAFILDSAETTTLFQFNEMKKYIAYLVRQLDMSPDPKASQHFARVAVVQHAPSESVDNASMPPVKVEFSLTDYGSKEKLVDFLSRGMTQLQGTRALGSAIEYTIENVFESAPNPRDLKIVVLMLTGEVPEQQLEEAQRVILQAKCKGYFFVVLGIGRKVNIKEVYTFASEPNDVFFKLVDKSTELNEEPLMRFGRLLPSFVSSENAFYLSPDIRKQCDWFQGDQPTKNLVKFGHKQVNVPNNVTSSPTSNPVTTTKPVTTTKPVTTTTKPVTTTTKPVTIINQPSVKPAAAKPAPAKPVAAKPVATKMATVRPPVAVKPATAAKPVAAKPAAVRPPAAAAAKPVATKPEVPRPQAAKPAATKPATTKPMVKMSREVQVFEITENSAKLHWERAEPPGPYFYDLTVTSAHDQSLVLKQNLTVTDRVIGGLLAGQTYHVAVVCYLRSQVRATYHGSFSTKKSQPPPPQPARSASSSTINLMVSTEPLALTETDICKLPKDEGTCRDFILKWYYDPNTKSCARFWYGGCGGNENKFGSQKECEKVCAPVLAKPGVISVMGT

SEQ ID NO: 19028 - protein, 2569 aa, Homo sapiens
  Payload ID: 3822
  Gene Symbol: COL6A3
  Gene Name: collagen, type VI, alpha 3
  ENSP ID: ENSP00000315609
MRKHRHLPLVAVFCLFLSGFPTTHAQQQQAVIEVNKRDIVFLVDGSSALGLANFNAIRDFIAKVIQRLEIGQDLIQVAVAQYADTVRPEFYFNTHPTKREVITAVRKMKPLDGSALYTGSALDFVRNNLFTSSAGYRAAEGIPKLLVLITGGKSLDEISQPAQELKRSSIMAFAIGNKGADQAELEEIAFDSSLVFIPAEFRAAPLQGMLPGLLAPLRTLSGTPEESKRDILFLFDGSANLVGQFPVVRDFLYKIIDELNVKPEGTRIAVAQYSDDVKVESRFDEHQSKPEILNLVKRMKIKTGKALNLGYALDYAQRYIFVKSAGSRIEDGVLQFLVLLVAGRSSDRVDGPASNLKQSGVVPFIFQAKNADPAELEQIVLSPAFILAAESLPKIGDLHPQIVNLLKSVHNGAPAPVSGEKDVVFLLDGSEGVRSGFPLLKEFVQRVVESLDVGQDRVRVAVVQYSDRTRPEFYLNSYMNKQDVVNAVRQLTLLGGPTPNTGAALEFVLRNILVSSAGSRITEGVPQLLIVLTADRSGDDVRNPSVVVKRGGAVPIGIGIGNADITEMQTISFIPDFAVAIPTFRQLGTVQQVISERVTQLTREELSRLQPVLQPLPSPGVGGKRDVVFLIDGSQSAGPEFQYVRTLIERLVDYLDVGFDTTRVAVIQFSDDPKVEFLLNAHSSKDEVQNAVQRLRPKGGRQINVGNALEYVSRNIFKRPLGSRIEEGVPQFLVLISSGKSDDEVDDPAVELKQFGVAPFTIARNADQEELVKISLSPEYVFSVSTFRELPSLEQKLLTPITTLTSEQIQKLLASTRYPPPAVESDAADIVFLIDSSEGVRPDGFAHIRDFVSRIVRRLNIGPSKVRVGVVQFSNDVFPEFYLKTYRSQAPVLDAIRRLRLRGGSPLNTGKALEFVARNLFVKSAGSRIEDGVPQHLVLVLGGKSQDDVSRFAQVIRSSGIVSLGVGDRNIDRTELQTITNDPRLVFTVREFRELPNIEERIMNSFGPSAATPAPPGVDTPPPSRPEKKKADIVFLLDGSINFRRDSFQEVLRFVSEIVDTVYEDGDSIQVGLVQYNSDPTDEFFLKDFSTKRQIIDAINKVVYKGGRHANTKVGLEHLRVNHFVPEAGSRLDQRVPQIAFVITGGKSVEDAQDVSLALTQRGVKVFAVGVRNIDSEEVGKIASNSATAFRVGNVQELSELSEQVLETLHDAMHETLCPGVTDAAKACNLDVILGFDGSRDQNVFVAQKGFESKVDAILNRISQMHRVSCSGGRSPTVRVSVVANTPSGPVEAFDFDEYQPEMLEKFRNMRSQHPYVLTEDTLKVYLNKFRQSSPDSVKVVIHFTDGADGDLADLHRASENLRQEGVRALILVGLERVVNLERLMHLEFGRGFMYDRPLRLNLLDLDYELAEQLDNIAEKACCGVPCKCSGQRGDRGPIGSIGPKGIPGEDGYRGYPGDEGGPGERGPPGVNGTQGFQGCPGQRGVKGSRGFPGEKGEVGEIGLDGLDGEDGDKGLPGSSGEKGNPGRRGDKGPRGEKGERGDVGIRGDPGNPGQDSQERGPKGETGDLGPMGVPGRDGVPGGPGETGKNGGFGRRGPPGAKGNKGGPGQPGFEGEQGTRGAQGPAGPAGPPGLIGEQGISGPRGSGGAAGAPGERGRTGPLGRKGEPGEPGPKGGIGNRGPRGETGDDGRDGVGSEGRRGKKGERGFPGYPGPKGNPGEPGLNGTTGPKGIRGRRGNSGPPGIVGQKGDPGYPGPAGPKGNRGDSIDQCALIQSIKDKCPFHGPLECPVFPTELAFALDTSEGVNQDTFGRMRDVVLSIVNDLTIAESNCPRGARVAVVTYNNEVTTEIRFADSKRKSVLLDKIKNLQVALTSKQQSLETAMSFVARNTFKRVRNGFLMRKVAVFFSNTPTRASPQLREAVLKLSDAGITPLFLTRQEDRQLINALQINNTAVGHALVLPAGRDLTDFLENVLTCHVCLDICNIDPSCGFGSWRPSFRDRRAAGSDVDIDMAFILDSAETTTLFQFNEMKKYIAYLVRQLDMSPDPKASQHFARVAVVQHAPSESVDNASMPPVKVEFSLTDYGSKEKLVDFLSRGMTQLQGTRALGSAIEYTIENVFESAPNPRDLKIVVLMLTGEVPEQQLEEAQRVILQAKCKGYFFVVLGIGRKVNIKEVYTFASEPNDVFFKLVDKSTELNEEPLMRFGRLLPSFVSSENAFYLSPDIRKQCDWFQGDQPTKNLVKFGHKQVNVPNNVTSSPTSNPVTTTKPVTTTKPVTTTTKPVTTTTKPVTIINQPSVKPAAAKPAPAKPVAAKPVATKMATVRPPVAVKPATAAKPVAAKPAAVRPPAAAAAKPVATKPEVPRPQAAKPAATKPATTKPMVKMSREVQVFEITENSAKLHWERAEPPGPYFYDLTVTSAHDQSLVLKQNLTVTDRVIGGLLAGQTYHVAVVCYLRSQVRATYHGSFSTKKSQPPPPQPARSASSSTINLMVSTEPLALTETDICKLPKDEGTCRDFILKWYYDPNTKSCARFWYGGCGGNENKFGSQKECEKVCAPVLAKPGVISVMGT

SEQ ID NO: 19029 - protein, 2971 aa, Homo sapiens
  Payload ID: 3822
  Gene Symbol: COL6A3
  Gene Name: collagen, type VI, alpha 3
  Uniprot ID: P12111
  ENSP ID: ENSP00000315873
MRKHRHLPLVAVFCLFLSGFPTTHAQQQQAAQDSADIIFLIDGSNNTGSVNFAVILDFLVNLLEKLPIGTQQIRVGVVQFSDEPRTMFSLDTYSTKAQVLGAVKALGFAGGELANIGLALDFVVENHFTRAGGSRVEEGVPQVLVLISAGPSSDEIRYGVVALKQASVFSFGLGAQAASRAELQHIATDDNLVFTVPEFRSFGDLQEKLLPYIVGVAQRHIVLKPPTIVTQVIEVNKRDIVFLVDGSSALGLANFNAIRDFIAKVIQRLEIGQDLIQVAVAQYADTVRPEFYFNTHPTKREVITAVRKMKPLDGSALYTGSALDFVRNNLFTSSAGYRAAEGIPKLLVLITGGKSLDEISQPAQELKRSSIMAFAIGNKGADQAELEEIAFDSSLVFIPAEFRAAPLQGMLPGLLAPLRTLSGTPEVHSNKRDIIFLLDGSANVGKTNFPYVRDFVMNLVNSLDIGNDNIRVGLVQFSDTPVTEFSLNTYQTKSDILGHLRQLQLQGGSGLNTGSALSYVYANHFTEAGGSRIREHVPQLLLLLTAGQSEDSYLQAANALTRAGILTFCVGASQANKAELEQIAFNPSLVYLMDDFSSLPALPQQLIQPLTTYVSGGVEEVPLAQPESKRDILFLFDGSANLVGQFPVVRDFLYKIIDELNVKPEGTRIAVAQYSDDVKVESRFDEHQSKPEILNLVKRMKIKTGKALNLGYALDYAQRYIFVKSAGSRIEDGVLQFLVLLVAGRSSDRVDGPASNLKQSGVVPFIFQAKNADPAELEQIVLSPAFILAAESLPKIGDLHPQIVNLLKSVHNGAPAPVSGEKDVVFLLDGSEGVRSGFPLLKEFVQRVVESLDVGQDRVRVAVVQYSDRTRPEFYLNSYMNKQDVVNAVRQLTLLGGPTPNTGAALEFVLRNILVSSAGSRITEGVPQLLIVLTADRSGDDVRNPSVVVKRGGAVPIGIGIGNADITEMQTISFIPDFAVAIPTFRQLGTVQQVISERVTQLTREELSRLQPVLQPLPSPGVGGKRDVVFLIDGSQSAGPEFQYVRTLIERLVDYLDVGFDTTRVAVIQFSDDPKVEFLLNAHSSKDEVQNAVQRLRPKGGRQINVGNALEYVSRNIFKRPLGSRIEEGVPQFLVLISSGKSDDEVDDPAVELKQFGVAPFTIARNADQEELVKISLSPEYVFSVSTFRELPSLEQKLLTPITTLTSEQIQKLLASTRYPPPAVESDAADIVFLIDSSEGVRPDGFAHIRDFVSRIVRRLNIGPSKVRVGVVQFSNDVFPEFYLKTYRSQAPVLDAIRRLRLRGGSPLNTGKALEFVARNLFVKSAGSRIEDGVPQHLVLVLGGKSQDDVSRFAQVIRSSGIVSLGVGDRNIDRTELQTITNDPRLVFTVREFRELPNIEERIMNSFGPSAATPAPPGVDTPPPSRPEKKKADIVFLLDGSINFRRDSFQEVLRFVSEIVDTVYEDGDSIQVGLVQYNSDPTDEFFLKDFSTKRQIIDAINKVVYKGGRHANTKVGLEHLRVNHFVPEAGSRLDQRVPQIAFVITGGKSVEDAQDVSLALTQRGVKVFAVGVRNIDSEEVGKIASNSATAFRVGNVQELSELSEQVLETLHDAMHETLCPGVTDAAKACNLDVILGFDGSRDQNVFVAQKGFESKVDAILNRISQMHRVSCSGGRSPTVRVSVVANTPSGPVEAFDFDEYQPEMLEKFRNMRSQHPYVLTEDTLKVYLNKFRQSSPDSVKVVIHFTDGADGDLADLHRASENLRQEGVRALILVGLERVVNLERLMHLEFGRGFMYDRPLRLNLLDLDYELAEQLDNIAEKACCGVPCKCSGQRGDRGPIGSIGPKGIPGEDGYRGYPGDEGGPGERGPPGVNGTQGFQGCPGQRGVKGSRGFPGEKGEVGEIGLDGLDGEDGDKGLPGSSGEKGNPGRRGDKGPRGEKGERGDVGIRGDPGNPGQDSQERGPKGETGDLGPMGVPGRDGVPGGPGETGKNGGFGRRGPPGAKGNKGGPGQPGFEGEQGTRGAQGPAGPAGPPGLIGEQGISGPRGSGGAAGAPGERGRTGPLGRKGEPGEPGPKGGIGNRGPRGETGDDGRDGVGSEGRRGKKGERGFPGYPGPKGNPGEPGLNGTTGPKGIRGRRGNSGPPGIVGQKGDPGYPGPAGPKGNRGDSIDQCALIQSIKDKCPCCYGPLECPVFPTELAFALDTSEGVNQDTFGRMRDVVLSIVNDLTIAESNCPRGARVAVVTYNNEVTTEIRFADSKRKSVLLDKIKNLQVALTSKQQSLETAMSFVARNTFKRVRNGFLMRKVAVFFSNTPTRASPQLREAVLKLSDAGITPLFLTRQEDRQLINALQINNTAVGHALVLPAGRDLTDFLENVLTCHVCLDICNIDPSCGFGSWRPSFRDRRAAGSDVDIDMAFILDSAETTTLFQFNEMKKYIAYLVRQLDMSPDPKASQHFARVAVVQHAPSESVDNASMPPVKVEFSLTDYGSKEKLVDFLSRGMTQLQGTRALGSAIEYTIENVFESAPNPRDLKIVVLMLTGEVPEQQLEEAQRVILQAKCKGYFFVVLGIGRKVNIKEVYTFASEPNDVFFKLVDKSTELNEEPLMRFGRLLPSFVSSENAFYLSPDIRKQCDWFQGDQPTKNLVKFGHKQVNVPNNVTSSPTSNPVTTTKPVTTTKPVTTTTKPVTTTTKPVTIINQPSVKPAAAKPAPAKPVAAKPVATKMATVRPPVAVKPATAAKPVAAKPAAVRPPAAAAAKPVATKPEVPRPQAAKPAATKPATTKPMVKMSREVQVFEITENSAKLHWERAEPPGPYFYDLTVTSAHDQSLVLKQNLTVTDRVIGGLLAGQTYHVAVVCYLRSQVRATYHGSFSTKKSQPPPPQPARSASSSTINLMVSTEPLALTETDICKLPKDEGTCRDFILKWYYDPNTKSCARFWYGGCGGNENKFGSQKECEKVCAPVLAKPGVISVMGT

SEQ ID NO: 19030 - protein, 1036 aa, Homo sapiens
  Payload ID: 3822
  Gene Symbol: COL6A3
  Gene Name: collagen, type VI, alpha 3
  Uniprot ID: P12111
  ENSP ID: ENSP00000375860
MRKHRHLPLVAVFCLFLSGFPTTHAQQQQAVIEVNKRDIVFLVDGSSALGLANFNAIRDFIAKVIQRLEIGQDLIQVAVAQYADTVRPEFYFNTHPTKREVITAVRKMKPLDGSALYTGSALDFVRNNLFTSSAGYRAAEGIPKLLVLITGGKSLDEISQPAQELKRSSIMAFAIGNKGADQAELEEIAFDSSLVFIPAEFRAAPLQGMLPGLLAPLRTLSGTPEVHSNKRDIIFLLDGSANVGKTNFPYVRDFVMNLVNSLDIGNDNIRVGLVQFSDTPVTEFSLNTYQTKSDILGHLRQLQLQGGSGLNTGSALSYVYANHFTEAGGSRIREHVPQLLLLLTAGQSEDSYLQAANALTRAGILTFCVGASQANKAELEQIAFNPSLVYLMDDFSSLPALPQQLIQPLTTYVSGGVEEVPLAQPESKRDILFLFDGSANLVGQFPVVRDFLYKIIDELNVKPEGTRIAVAQYSDDVKVESRFDEHQSKPEILNLVKRMKIKTGKALNLGYALDYAQRYIFVKSAGSRIEDGVLQFLVLLVAGRSSDRVDGPASNLKQSGVVPFIFQAKNADPAELEQIVLSPAFILAAESLPKIGDLHPQIVNLLKSVHNGAPAPVSGEKDVVFLLDGSEGVRSGFPLLKEFVQRVVESLDVGQDRVRVAVVQYSDRTRPEFYLNSYMNKQDVVNAVRQLTLLGGPTPNTGAALEFVLRNILVSSAGSRITEGVPQLLIVLTADRSGDDVRNPSVVVKRGGAVPIGIGIGNADITEMQTISFIPDFAVAIPTFRQLGTVQQVISERVTQLTREELSRLQPVLQPLPSPGVGGKRDVVFLIDGSQSAGPEFQYVRTLIERLVDYLDVGFDTTRVAVIQFSDDPKVEFLLNAHSSKDEVQNAVQRLRPKGGRQINVGNALEYVSRNIFKRPLGSRIEEGVPQFLVLISSGKSDDEVDDPAVELKQFGVAPFTIARNADQEELVKISLSPEYVFSVSTFRELPSLEQKLLTPITTLTSEQIQKLLASTRYPPPGEMGASEVLLGAFSI

SEQ ID NO: 19031 - protein, 1237 aa, Homo sapiens
  Payload ID: 3822
  Gene Symbol: COL6A3
  Gene Name: collagen, type VI, alpha 3
  Uniprot ID: P12111
  ENSP ID: ENSP00000375861
MRKHRHLPLVAVFCLFLSGFPTTHAQQQQAAQDSADIIFLIDGSNNTGSVNFAVILDFLVNLLEKLPIGTQQIRVGVVQFSDEPRTMFSLDTYSTKAQVLGAVKALGFAGGELANIGLALDFVVENHFTRAGGSRVEEGVPQVLVLISAGPSSDEIRYGVVALKQASVFSFGLGAQAASRAELQHIATDDNLVFTVPEFRSFGDLQEKLLPYIVGVAQRHIVLKPPTIVTQVIEVNKRDIVFLVDGSSALGLANFNAIRDFIAKVIQRLEIGQDLIQVAVAQYADTVRPEFYFNTHPTKREVITAVRKMKPLDGSALYTGSALDFVRNNLFTSSAGYRAAEGIPKLLVLITGGKSLDEISQPAQELKRSSIMAFAIGNKGADQAELEEIAFDSSLVFIPAEFRAAPLQGMLPGLLAPLRTLSGTPEVHSNKRDIIFLLDGSANVGKTNFPYVRDFVMNLVNSLDIGNDNIRVGLVQFSDTPVTEFSLNTYQTKSDILGHLRQLQLQGGSGLNTGSALSYVYANHFTEAGGSRIREHVPQLLLLLTAGQSEDSYLQAANALTRAGILTFCVGASQANKAELEQIAFNPSLVYLMDDFSSLPALPQQLIQPLTTYVSGGVEEVPLAQPESKRDILFLFDGSANLVGQFPVVRDFLYKIIDELNVKPEGTRIAVAQYSDDVKVESRFDEHQSKPEILNLVKRMKIKTGKALNLGYALDYAQRYIFVKSAGSRIEDGVLQFLVLLVAGRSSDRVDGPASNLKQSGVVPFIFQAKNADPAELEQIVLSPAFILAAESLPKIGDLHPQIVNLLKSVHNGAPAPVSGEKDVVFLLDGSEGVRSGFPLLKEFVQRVVESLDVGQDRVRVAVVQYSDRTRPEFYLNSYMNKQDVVNAVRQLTLLGGPTPNTGAALEFVLRNILVSSAGSRITEGVPQLLIVLTADRSGDDVRNPSVVVKRGGAVPIGIGIGNADITEMQTISFIPDFAVAIPTFRQLGTVQQVISERVTQLTREELSRLQPVLQPLPSPGVGGKRDVVFLIDGSQSAGPEFQYVRTLIERLVDYLDVGFDTTRVAVIQFSDDPKVEFLLNAHSSKDEVQNAVQRLRPKGGRQINVGNALEYVSRNIFKRPLGSRIEEGVPQFLVLISSGKSDDEVDDPAVELKQFGVAPFTIARNADQEELVKISLSPEYVFSVSTFRELPSLEQKLLTPITTLTSEQIQKLLASTRYPPPGEMGASEVLLGAFSI

SEQ ID NO: 19032 - protein, 2971 aa, Homo sapiens; identical to SEQ ID NO: 19029
  Payload ID: 3822
  Gene Symbol: COL6A3
  Gene Name: collagen, type VI, alpha 3
  Uniprot ID: P12111
  ENSP ID: ENSP00000386844

SEQ ID NO: 19033 - protein, 708 aa, Homo sapiens
  Payload ID: 3822
  Gene Symbol: COL6A3
  Gene Name: collagen, type VI, alpha 3
  ENSP ID: ENSP00000389539
MRKHRHLPLVAVFCLFLSGFPTTHAQQQQADVKNGAAADIIFLVDSSWTIGEEHFQLVREFLYDVVKSLAVGENDFHFALVQFNGNPHTEFLLNTYRTKQEVLSHISNMSYIGGTNQTGKGLEYIMQSHLTKAAGSRAGDGVPQVIVVLTDGHSKDGLALPSAELKSADVNVFAIGVEDADEGALKEIASEPLNMHMFNLENFTSLHDIVGNLVSCVHSSVSPERAGDTETLKDITAQDSADIIFLIDGSNNTGSVNFAVILDFLVNLLEKLPIGTQQIRVGVVQFSDEPRTMFSLDTYSTKAQVLGAVKALGFAGGELANIGLALDFVVENHFTRAGGSRVEEGVPQVLVLISAGPSSDEIRYGVVALKQASVFSFGLGAQAASRAELQHIATDDNLVFTVPEFRSFGDLQEKLLPYIVGVAQRHIVLKPPTIVTQVIEVNKRDIVFLVDGSSALGLANFNAIRDFIAKVIQRLEIGQDLIQVAVAQYADTVRPEFYFNTHPTKREVITAVRKMKPLDGSALYTGSALDFVRNNLFTSSAGYRAAEGIPKLLVLITGGKSLDEISQPAQELKRSSIMAFAIGNKGADQAELEEIAFDSSLVFIPAEFRAAPLQGMLPGLLAPLRTLSGTPEESKRDILFLFDGSANLVGQFPVVRDFLYKIIDELNVKPEGTRIAVAQYSDDVKVESRFDEHQSKPEILNLVKRMKI

SEQ ID NO: 19034 - protein, 2570 aa, Homo sapiens
  Payload ID: 3822
  Gene Symbol: COL6A3
  Gene Name: collagen, type VI, alpha 3
  Uniprot ID: P12111
  ENSP ID: ENSP00000418285
MRKHRHLPLVAVFCLFLSGFPTTHAQQQQAVIEVNKRDIVFLVDGSSALGLANFNAIRDFIAKVIQRLEIGQDLIQVAVAQYADTVRPEFYFNTHPTKREVITAVRKMKPLDGSALYTGSALDFVRNNLFTSSAGYRAAEGIPKLLVLITGGKSLDEISQPAQELKRSSIMAFAIGNKGADQAELEEIAFDSSLVFIPAEFRAAPLQGMLPGLLAPLRTLSGTPEESKRDILFLFDGSANLVGQFPVVRDFLYKIIDELNVKPEGTRIAVAQYSDDVKVESRFDEHQSKPEILNLVKRMKIKTGKALNLGYALDYAQRYIFVKSAGSRIEDGVLQFLVLLVAGRSSDRVDGPASNLKQSGVVPFIFQAKNADPAELEQIVLSPAFILAAESLPKIGDLHPQIVNLLKSVHNGAPAPVSGEKDVVFLLDGSEGVRSGFPLLKEFVQRVVESLDVGQDRVRVAVVQYSDRTRPEFYLNSYMNKQDVVNAVRQLTLLGGPTPNTGAALEFVLRNILVSSAGSRITEGVPQLLIVLTADRSGDDVRNPSVVVKRGGAVPIGIGIGNADITEMQTISFIPDFAVAIPTFRQLGTVQQVISERVTQLTREELSRLQPVLQPLPSPGVGGKRDVVFLIDGSQSAGPEFQYVRTLIERLVDYLDVGFDTTRVAVIQFSDDPKVEFLLNAHSSKDEVQNAVQRLRPKGGRQINVGNALEYVSRNIFKRPLGSRIEEGVPQFLVLISSGKSDDEVDDPAVELKQFGVAPFTIARNADQEELVKISLSPEYVFSVSTFRELPSLEQKLLTPITTLTSEQIQKLLASTRYPPPAVESDAADIVFLIDSSEGVRPDGFAHIRDFVSRIVRRLNIGPSKVRVGVVQFSNDVFPEFYLKTYRSQAPVLDAIRRLRLRGGSPLNTGKALEFVARNLFVKSAGSRIEDGVPQHLVLVLGGKSQDDVSRFAQVIRSSGIVSLGVGDRNIDRTELQTITNDPRLVFTVREFRELPNIEERIMNSFGPSAATPAPPGVDTPPPSRPEKKKADIVFLLDGSINFRRDSFQEVLRFVSEIVDTVYEDGDSIQVGLVQYNSDPTDEFFLKDFSTKRQIIDAINKVVYKGGRHANTKVGLEHLRVNHFVPEAGSRLDQRVPQIAFVITGGKSVEDAQDVSLALTQRGVKVFAVGVRNIDSEEVGKIASNSATAFRVGNVQELSELSEQVLETLHDAMHETLCPGVTDAAKACNLDVILGFDGSRDQNVFVAQKGFESKVDAILNRISQMHRVSCSGGRSPTVRVSVVANTPSGPVEAFDFDEYQPEMLEKFRNMRSQHPYVLTEDTLKVYLNKFRQSSPDSVKVVIHFTDGADGDLADLHRASENLRQEGVRALILVGLERVVNLERLMHLEFGRGFMYDRPLRLNLLDLDYELAEQLDNIAEKACCGVPCKCSGQRGDRGPIGSIGPKGIPGEDGYRGYPGDEGGPGERGPPGVNGTQGFQGCPGQRGVKGSRGFPGEKGEVGEIGLDGLDGEDGDKGLPGSSGEKGNPGRRGDKGPRGEKGERGDVGIRGDPGNPGQDSQERGPKGETGDLGPMGVPGRDGVPGGPGETGKNGGFGRRGPPGAKGNKGGPGQPGFEGEQGTRGAQGPAGPAGPPGLIGEQGISGPRGSGGAAGAPGERGRTGPLGRKGEPGEPGPKGGIGNRGPRGETGDDGRDGVGSEGRRGKKGERGFPGYPGPKGNPGEPGLNGTTGPKGIRGRRGNSGPPGIVGQKGDPGYPGPAGPKGNRGDSIDQCALIQSIKDKCPCCYGPLECPVFPTELAFALDTSEGVNQDTFGRMRDVVLSIVNDLTIAESNCPRGARVAVVTYNNEVTTEIRFADSKRKSVLLDKIKNLQVALTSKQQSLETAMSFVARNTFKRVRNGFLMRKVAVFFSNTPTRASPQLREAVLKLSDAGITPLFLTRQEDRQLINALQINNTAVGHALVLPAGRDLTDFLENVLTCHVCLDICNIDPSCGFGSWRPSFRDRRAAGSDVDIDMAFILDSAETTTLFQFNEMKKYIAYLVRQLDMSPDPKASQHFARVAVVQHAPSESVDNASMPPVKVEFSLTDYGSKEKLVDFLSRGMTQLQGTRALGSAIEYTIENVFESAPNPRDLKIVVLMLTGEVPEQQLEEAQRVILQAKCKGYFFVVLGIGRKVNIKEVYTFASEPNDVFFKLVDKSTELNEEPLMRFGRLLPSFVSSENAFYLSPDIRKQCDWFQGDQPTKNLVKFGHKQVNVPNNVTSSPTSNPVTTTKPVTTTKPVTTTTKPVTTTTKPVTIINQPSVKPAAAKPAPAKPVAAKPVATKMATVRPPVAVKPATAAKPVAAKPAAVRPPAAAAAKPVATKPEVPRPQAAKPAATKPATTKPMVKMSREVQVFEITENSAKLHWERAEPPGPYFYDLTVTSAHDQSLVLKQNLTVTDRVIGGLLAGQTYHVAVVCYLRSQVRATYHGSFSTKKSQPPPPQPARSASSSTINLMVSTEPLALTETDICKLPKDEGTCRDFILKWYYDPNTKSCARFWYGGCGGNENKFGSQKECEKVCAPVLAKPGVISVMGT

SEQ ID NO: 19035 - protein, 173 aa, Homo sapiens
  Payload ID: 3822
  Gene Symbol: COL6A3
  Gene Name: collagen, type VI, alpha 3
  ENSP ID: ENSP00000460277
PIGTQQIRVGVVQFSDEPRTMFSLDTYSTKAQVLGAVKALGFAGGELANIGLALDFVVENHFTRAGGSRVEEGVPQVLVLISAGPSSDEIRYGVVALKQASVFSFGLGAQAASRAELQHIATDDNLVFTVPEFRSFGDLQEKLLPYIVGVAQRHIVLKPPTIVTQEYGLNENW

SEQ ID NO: 19036 - protein, 2611 aa, Homo sapiens
  Payload ID: 3823
  Gene Symbol: COL6A5
  Gene Name: collagen, type VI, alpha 5
  ENSP ID: ENSP00000265379
MKILLIIFVLIIWTETLADQSPGPGPVYADVVFLVDSSDHLGPKSFPFVKTFINKMINSLPIEANKYRVALAQYSDEFHSEFHLSTFKGRSPMLNHLKKNFQFIGGSLQIGKALQEAHRTYFSAPINGRDRKQFPPILVVLASAESEDEVEEASKALQKDGVKIISVGVQKASEENLKAMATSHFHFNLRTIRDLSTFSQNMTQIIKDVTKYKEGAVDADMQVHFPISCQKDSLADLVFLVDESLGTGGNLRHLQTFLENITSSMDVKENCMRLGLMSYSNSAKTISFLKSSTTQSEFQQQIKNLSIQVGKSNTGAAIDQMRRDGFSESYGSRRAQGVPQIAVLVTHRPSDDEVHDAALNLRLEDVNVFALSIQGANNTQLEEIVSYPPEQTISTLKSYADLETYSTKFLKKLQNEIWSQISTYAEQRNLDKTGCVDTKEADIHFLIDGSSSIQEKQFEQIKRFMLEVTEMFSIGPDKVRVGVVQYSDDTEVEFYITDYSNDIDLRKAIFNIKQLTGGTYTGKALDYILQIIKNGMKDRMSKVPCYLIVLTDGMSTDRVVEPAKRLRAEQITVHAVGIGAANKIELQEIAGKEERVSFGQNFDALKSIKNEVVREICAEKGCEDMKADIMFLVDSSWSIGNENFRKMKIFMKNLLTKIQIGADKTQIGVVQFSDKTKEEFQLNRYFTQQEISDAIDRMSLINEGTLTGKALNFVGQYFTHSKGARLGAKKFLILITDGVAQDDVRDPARILRGKDVTIFSVGVYNANRSQLEEISGDSSLVFHVENFDHLKALERKLIFRVCALHDCKRITLLDVVFVLDHSGSIKKQYQDHMINLTIHLVKKADVGRDRVQFGALKYSDQPNILFYLNTYSNRSAIIENLRKRRDTGGNTYTAKALKHANALFTEEHGSRIKQNVKQMLIVITDGESHDHDQLNDTALELRNKGITIFAVGVGKANQKELEGMAGNKNNTIYVDNFDKLKDVFTLVQERMCTEAPEVCHLQEADVIFLCDGSDRVSNSDFVTMTTFLSDLIDNFDIQSQRMKIGMAQFGSNYQSIIELKNSLTKTQWKTQIQNVSKSGGFPRIDFALKKVSNMFNLHAGGRRNAGVPQTLVVITSGDPRYDVADAVKTLKDLGICVLVLGIGDVYKEHLLPITGNSEKIITFQDFDKLKNVDVKKRIIREICQSCGKTNCFMDIVVGFDISTHVQGQPLFQGHPQLESYLPGILEDISSIKGVSCGAGTEAQVSLAFKVNSDQGFPAKFQIYQKAVFDSLLQVNVSGPTHLNAQFLRSLWDTFKDKSASRGQVLLIFSDGLQSESNIMLENQSDRLREAGLDALLVVSLNTTAHHEFSSFEFGKRFDYRTHLTIGMRELGKKLSQYLGNIAERTCCCTFCKCPGIPGPHGTRGLQAMKGSQGLKGSRGHRGEDGNPGVRGDTGPQGDKGIAGCPGAWGQKGLKGFSGPKGGHGDDGIDGLDGEEGCHGFPGIKGEKGDPGSQGSPGSRGAPGQYGEKGFPGDPGNPGQNNNIKGQKGSKGEQGRQGRSGQKGVQGSPSSRGSRGREGQRGLRGVSGEPGNPGPTGTLGAEGLQGPQGSQGNPGRKGEKGSQGQKGPQGSPGLMGAKGSTGRPGLLGKKGEPGLPGDLGPVGQTGQRGRQGDSGIPGYGQMGRKGVKGPRGFPGDAGQKGDIGNPGIPGGPGPKGFRGLALTVGLKGEEGSRGLPGPPGQRGIKGMAGQPVYSQCDLIRFLREHSLFKNAYPTELVFALDNSYDVTEESFNKTRDIITSIVNDLNIRENNCPVGARVAMVSYNSGTSYLIRWSDYNRKKQLLQQLSQIKYQDTTEPRDVGNAMRFVTRNVFKRTYAGANVRRVAVFFSNGQTASRSSIITATMEFSALDISPTVFAFDERVFLEAFGFDNTGTFQVIPVPPNGENQTLERLRRCALCYDKCFPNACIREAFLPEDSYMDVVFLIDNSRNIAKDEFKAVKALVSSVIDNFNIASDPLISDSGDRIALLSYSPWESSRRKMGTVKTEFDFITYDNQLLMKNHIQTSFQQLNGEATIGRALLWTTENLFPETPYLRKHKVIFVVSAGENYERKEFVKMMALRAKCQGYVIFVISLGSTRKDDMEELASYPLDQHLIQLGRIHKPDLNYIAKFLKPFLYSVRRGFNQYPPPMLEDACRLINLGGENIQNDGFQFVTELQEDFLGGNGFIGQELNSGRESPFVKTEDNGSDYLVYLPSQMFEPQKLMINYEKDQKSAEIASLTSGHENYGRKEEPDHTYEPGDVSLQEYYMDVAFLIDASQRVGSDEFKEVKAFITSVLDYFHIAPTPLTSTLGDRVAVLSYSPPGYMPNTEECPVYLEFDLVTYNSIHQMKHHLQDSQQLNGDVFIGHALQWTIDNVFVGTPNLRKNKVIFVISAGETNSLDKDVLRNVSLRAKCQGYSIFVFSFGPKHNDKELEELASHPLDHHLVQLGRTHKPDWNYIIKFVKPFVHLIRRAINKYPTEDMKATCVNMTSPNPENGGTENTVLLLPGIYEIKTENGDLFDEFDSQAQHLLVLGNNHSSGSETATDLMQKLYLLFSTEKLAMKDKEKAHLEEISALVVDKQQEKEDKEMEATDI

SEQ ID NO: 19037 - protein, 2615 aa, Homo sapiens
  Payload ID: 3823
  Gene Symbol: COL6A5
  Gene Name: collagen, type VI, alpha 5
  Uniprot ID: A8TX70
  ENSP ID: ENSP00000309762
MKILLIIFVLIIWTETLADQSPGPGPVYADVVFLVDSSDHLGPKSFPFVKTFINKMINSLPIEANKYRVALAQYSDEFHSEFHLSTFKGRSPMLNHLKKNFQFIGGSLQIGKALQEAHRTYFSAPINGRDRKQFPPILVVLASAESEDEVEEASKALQKDGVKIISVGVQKASEENLKAMATSHFHFNLRTIRDLSTFSQNMTQIIKDVTKYKEGAVDADMQVHFPISCQKDSLADLVFLVDESLGTGGNLRHLQTFLENITSSMDVKENCMRLGLMSYSNSAKTISFLKSSTTQSEFQQQIKNLSIQVGKSNTGAAIDQMRRDGFSESYGSRRAQGVPQIAVLVTHRPSDDEVHDAALNLRLEDVNVFALSIQGANNTQLEEIVSYPPEQTISTLKSYADLETYSTKFLKKLQNEIWSQISTYAEQRNLDKTGCVDTKEADIHFLIDGSSSIQEKQFEQIKRFMLEVTEMFSIGPDKVRVGVVQYSDDTEVEFYITDYSNDIDLRKAIFNIKQLTGGTYTGKALDYILQIIKNGMKDRMSKVPCYLIVLTDGMSTDRVVEPAKRLRAEQITVHAVGIGAANKIELQEIAGKEERVSFGQNFDALKSIKNEVVREICAEKGCEDMKADIMFLVDSSWSIGNENFRKMKIFMKNLLTKIQIGADKTQIGVVQFSDKTKEEFQLNRYFTQQEISDAIDRMSLINEGTLTGKALNFVGQYFTHSKGARLGAKKFLILITDGVAQDDVRDPARILRGKDVTIFSVGVYNANRSQLEEISGDSSLVFHVENFDHLKALERKLIFRVCALHDCKRITLLDVVFVLDHSGSIKKQYQDHMINLTIHLVKKADVGRDRVQFGALKYSDQPNILFYLNTYSNRSAIIENLRKRRDTGGNTYTAKALKHANALFTEEHGSRIKQNVKQMLIVITDGESHDHDQLNDTALELRNKGITIFAVGVGKANQKELEGMAGNKNNTIYVDNFDKLKDVFTLVQERMCTEAPEVCHLQEADVIFLCDGSDRVSNSDFVTMTTFLSDLIDNFDIQSQRMKIGMAQFGSNYQSIIELKNSLTKTQWKTQIQNVSKSGGFPRIDFALKKVSNMFNLHAGGRRNAGVPQTLVVITSGDPRYDVADAVKTLKDLGICVLVLGIGDVYKEHLLPITGNSEKIITFQDFDKLKNVDVKKRIIREICQSCGKTNCFMDIVVGFDISTHVQGQPLFQGHPQLESYLPGILEDISSIKGVSCGAGTEAQVSLAFKVNSDQGFPAKFQIYQKAVFDSLLQVNVSGPTHLNAQFLRSLWDTFKDKSASRGQVLLIFSDGLQSESNIMLENQSDRLREAGLDALLVVSLNTTAHHEFSSFEFGKRFDYRTHLTIGMRELGKKLSQYLGNIAERTCCCTFCKCPGIPGPHGTRGLQAMKGSQGLKGSRGHRGEDGNPGVRGDTGPQGDKGIAGCPGAWGQKGLKGFSGPKGGHGDDGIDGLDGEEGCHGFPGIKGEKGDPGSQGSPGSRGAPGQYGEKGFPGDPGNPGQNNNIKGQKGSKGEQGRQGRSGQKGVQGSPSSRGSRGREGQRGLRGVSGEPGNPGPTGTLGAEGLQGPQGSQGNPGRKGEKGSQGQKGPQGSPGLMGAKGSTGRPGLLGKKGEPGLPGDLGPVGQTGQRGRQGDSGIPGYGQMGRKGVKGPRGFPGDAGQKGDIGNPGIPGGPGPKGFRGLALTVGLKGEEGSRGLPGPPGQRGIKGMAGQPVYSQCDLIRFLREHSPCWKEKCPAYPTELVFALDNSYDVTEESFNKTRDIITSIVNDLNIRENNCPVGARVAMVSYNSGTSYLIRWSDYNRKKQLLQQLSQIKYQDTTEPRDVGNAMRFVTRNVFKRTYAGANVRRVAVFFSNGQTASRSSIITATMEFSALDISPTVFAFDERVFLEAFGFDNTGTFQVIPVPPNGENQTLERLRRCALCYDKCFPNACIREAFLPEDSYMDVVFLIDNSRNIAKDEFKAVKALVSSVIDNFNIASDPLISDSGDRIALLSYSPWESSRRKMGTVKTEFDFITYDNQLLMKNHIQTSFQQLNGEATIGRALLWTTENLFPETPYLRKHKVIFVVSAGENYERKEFVKMMALRAKCQGYVIFVISLGSTRKDDMEELASYPLDQHLIQLGRIHKPDLNYIAKFLKPFLYSVRRGFNQYPPPMLEDACRLINLGGENIQNDGFQFVTELQEDFLGGNGFIGQELNSGRESPFVKTEDNGSDYLVYLPSQMFEPQKLMINYEKDQKSAEIASLTSGHENYGRKEEPDHTYEPGDVSLQEYYMDVAFLIDASQRVGSDEFKEVKAFITSVLDYFHIAPTPLTSTLGDRVAVLSYSPPGYMPNTEECPVYLEFDLVTYNSIHQMKHHLQDSQQLNGDVFIGHALQWTIDNVFVGTPNLRKNKVIFVISAGETNSLDKDVLRNVSLRAKCQGYSIFVFSFGPKHNDKELEELASHPLDHHLVQLGRTHKPDWNYIIKFVKPFVHLIRRAINKYPTEDMKATCVNMTSPNPENGGTENTVLLLPGIYEIKTENGDLFDEFDSQAQHLLVLGNNHSSGSETATDLMQKLYLLFSTEKLAMKDKEKAHLEEISALVVDKQQEKEDKEMEATDI

SEQ ID NO: 19038 - protein, 557 aa, Homo sapiens
  Payload ID: 3823
  Gene Symbol: COL6A5
  Gene Name: collagen, type VI, alpha 5
  ENSP ID: ENSP00000362250
IGRALLWTTENLFPETPYLRKHKVIFVVSAGENYERKEFVKMMALRAKCQGYVIFVISLGSTRKDDMEELASYPLDQHLIQLGRIHKPDLNYIAKFLKPFLYSVRRGFNQYPPPMLEDACRLINLGGENIQNDGFQFVTELQEDFLGGNGFIGQELNSGRESPFVKTEDNGSDYLVYLPSQMFEPQKLMINYEKDQKSAEIASLTSGHENYGRKEEPDHTYEPGDVSLQEYYMDVAFLIDASQRVGSDEFKEVKAFITSVLDYFHIAPTPLTSTLGDRVAVLSYSPPGYMPNTEECPVYLEFDLVTYNSIHQMKHHLQDSQQLNGDVFIGHALQWTIDNVFVGTPNLRKNKVIFVISAGETNSLDKDVLRNVSLRAKCQGYSIFVFSFGPKHNDKELEELASHPLDHHLVQLGRTHKPDWNYIIKFVKPFVHLIRRAINKYPTEDMKATCVNMTSPNPENGGTENTVLLLPGIYEIKTENGDLFDEFDSQAQHLLVLGNNHSSGSETATDLMQKLYLLFSTEKLAMKDKEKAHLEEISALVVDKQQEKEDGEDTRSS

SEQ ID NO: 19039 - protein, 778 aa, Homo sapiens
  Payload ID: 3823
  Gene Symbol: COL6A5
  Gene Name: collagen, type VI, alpha 5
  ENSP ID: ENSP00000422898
  MOD_RES (1)..(1): Any amino acid
XEKCPAYPTELVFALDNSYDVTEESFNKTRDIITSIVNDLNIRENNCPVGARVAMVSYNSGTSYLIRWSDYNRKKQLLQQLSQIKYQDTTEPRDVGNAMRFVTRNVFKRTYAGANVRRVAVFFSNGQTASRSSIITATMEFSALDISPTVFAFDERVFLEAFGFDNTGTFQVIPVPPNGENQTLERLRRCALCYDKCFPNACIREAFLPEDSYMDVVFLIDNSRNIAKDEFKAVKALVSSVIDNFNIASDPLISDSGDRIALLSYSPWESSRRKMGTVKTEFDFITYDNQLLMKNHIQTSFQQLNGEATIGRALLWTTENLFPETPYLRKHKVIFVVSAGENYERKEFVKMMALRAKCQGYVIFVISLGSTRKDDMEELASYPLDQHLIQLGRIHKPDLNYIAKFLKPFLYSVRRGFNQYPPPMLEDACRLINLGGENIQNDGFQFVTELQEDFLGGNGFIGQELNSGRESPFVKTEDNGSDYLVYLPSQMFEPQKLMINYEKDQKSAEIASLTSGHENYGRKEEPDHTYEPGDVSLQEYYMDVAFLIDASQRVGSDEFKEVKAFITSVLDYFHIAPTPLTSTLGDRVAVLSYSPPGYMPNTEECPVYLEFDLVTYNSIHQMKHHLQDSQQLNGDVFIGHALQWTIDNVFVGTPNLRKNKVIFVISAGETNSLDKDVLRNVSLRAKCQGYSIFVFSFGPKHNDKELEELASHPLDHHLVQLGRTHKPDWNYIIKFVKPFVHLIRRAINKYPTEDMKATCVNMTSPNPENGGTENTVLW

SEQ ID NO: 19040 - protein, 443 aa, Homo sapiens
  Payload ID: 3823
  Gene Symbol: COL6A5
  Gene Name: collagen, type VI, alpha 5
  ENSP ID: ENSP00000424968
NQYPPPMLEDACRLINLGGENIQNDGFQFVTELQEDFLGGNGFIGQELNSGRESPFVKTEDNGSDYLVYLPSQMFEPQKLMINYEKDQKSAEIASLTSGHENYGRKEEPDHTYEPGDVSLQEYYMDVAFLIDASQRVGSDEFKEVKAFITSVLDYFHIAPTPLTSTLGDRVAVLSYSPPGYMPNTEECPVYLEFDLVTYNSIHQMKHHLQDSQQLNGDVFIGHALQWTIDNVFVGTPNLRKNKVIFVISAGETNSLDKDVLRNVSLRAKCQGYSIFVFSFGPKHNDKELEELASHPLDHHLVQLGRTHKPDWNYIIKFVKPFVHLIRRAINKYPTEDMKATCVNMTSPNPENGGTENTVLLLPGIYEIKTENGDLFDEFDSQAQHLLVLGNNHSSGSETATDLMQKLYLLFSTEKLAMKDKEKAHLEEISALVVDKQQEKEDL

SEQ ID NO: 19041 - protein, 2263 aa, Homo sapiens
  Payload ID: 3824
  Gene Symbol: COL6A6
  Gene Name: collagen, type VI, alpha 6
  Uniprot ID: A6NMZ7
  ENSP ID: ENSP00000351310
MMLLILFLVIICSHISVNQDSGPEYADVVFLVDSSDRLGSKSFPFVKMFITKMISSLPIEADKYRVALAQYSDKLHSEFHLSTFKGRSPMLNHLRKNFGFIGGSLQIGKALQEAHRTYFSAPANGRDKKQFPPILVVLASSESEDNVEEASKALRKDGVKIISVGVQKASEENLKAMATSQFHFNLRTVRDLSMFSQNMTHIIKDVIKYKEGAVDDIFVEACQGPSMADVVFLLDMSINGSEENFDYLKGFLEESVSALDIKENCMRVGLVAYSNETKVINSLSMGINKSEVLQHIQNLSPRTGKAYTGAAIKKLRKEVFSARNGSRKNQGVPQIAVLVTHRDSEDNVTKAAVNLRREGVTIFTLGIEGASDTQLEKIASHPAEQYVSKLKTFADLAAHNQTFLKKLRNQITHTVSVFSERTETLKSGCVDTEEADIYLLIDGSGSTQATDFHEMKTFLSEVVGMFNIAPHKVRVGAVQYADSWDLEFEINKYSNKQDLGKAIENIRQMGGNTNTGAALNFTLSLLQKAKKQRGNKVPCHLVVLTNGMSKDSILEPANRLREEHIRVYAIGIKEANQTQLREIAGEEKRVYYVHDFDALKDIRNQVVQEICTEEACKEMKADIMFLVDSSGSIGPENFSKMKTFMKNLVSKSQIGPDRVQIGVVQFSDINKEEFQLNRFMSQSDISNAIDQMAHIGQTTLTGSALSFVSQYFSPTKGARPNIRKFLILITDGEAQDIVKEPAVVLRQEGVIIYSVGVFGSNVTQLEEISGRPEMVFYVENFDILQRIEDDLVFGICSPREECKRIEVLDVVFVIDSSGSIDYDEYNIMKDFMIGLVKKADVGKNQVRFGALKYADDPEVLFYLDDFGTKLEVISVLQNDQAMGGSTYTAEALGFSDHMFTEARGSRLNKGVPQVLIVITDGESHDADKLNATAKALRDKGILVLAVGIDGANPVELLAMAGSSDKYFFVETFGGLKGIFSDVTASVCNSSKVDCEIDKVDLVFLMDGSTSIQPNDFKKMKEFLASVVQDFDVSLNRVRIGAAQFSDTYHPEFPLGTFIGEKEISFQIENIKQIFGNTHIGAALREVEHYFRPDMGSRINTGTPQVLLVLTDGQSQDEVAQAAEALRHRGIDIYSVGIGDVDDQQLIQITGTAEKKLTVHNFDELKKVNKRIVRNICTTAGESNCFVDVVVGFDVSTQEKGQTLLEGQPWMETYLQDILRAISSLNGVSCEVGTETQVSVAFQVTNAMEKYSPKFEIYSENILNSLKDITVKGPSLLNANLLDSLWDTFQNKSAARGKVVLLFSDGLDDDVEKLEQKSDELRKEGLNALITVALDGPADSSDLADLPYIEFGKGFEYRTQLSIGMRELGSRLSKQLVNVAERTCCCLFCKCIGGDGTMGDPGPPGKRGPPGFKGSEGYLGEEGIAGERGAPGPVGEQGTKGCYGTKGPKGNRGLNGQEGEVGENGIDGLNGEQGDNGLPGRKGEKGDEGSQGSPGKRGTPGDRGAKGLRGDPGAPGVDSSIEGPTGLKGERGRQGRRGWPGPPGTPGSRRKTAAHGRRGHTGPQGTAGIPGPDGLEGSLGLKGPQGPRGEAGVKGEKGGVGSKGPQGPPGPGGEAGNQGRLGSQGNKGEPGDLGEKGAVGFPGPRGLQGNDGSPGYGSVGRKGAKGQEGFPGESGPKGEIGDPGGPGETGLKGARGKMISAGLPGEMGSPGEPGPPGRKGVKGAKGLASFSTCELIQYVRDRSPGRHGKPECPVHPTELVFALDHSRDVTEQEFERMKEMMAFLVRDIKVRENSCPVGAHIAILSYNSHARHLVRFSDAYKKSQLLREIETIPYERSSASREIGRAMRFISRNVFKRTLPGAHTRKIATFFSSGQSADAHSITTAAMEFGALEIIPVVITFSNVPSVRRAFAIDDTGTFQVIVVPSGADYIPALERLQRCTFCYDVCKPDASCDQARPPPVQSYMDAAFLLDASRNMGSAEFEDIRAFLGALLDHFEITPEPETSVTGDRVALLSHAPPDFLPNTQKSPVRAEFNLTTYRSKRLMKRHVHESVKQLNGDAFIGHALQWTLDNVFLSTPNLRRNKVIFVISAGETSHLDGEILKKESLRAKCQGYALFVFSLGPIWDDKELEDLASHPLDHHLVQLGRIHKPDHSYGVKFVKSFINSIRRAINKYPPINLKIKCNRLNSIDPKQPPRPFRSFVPGPLKATLKEDVLQKAKFFQDKKYLSRVARSGRDDAIQNFMRSTSHTFKNGRMIESAPKQHD

SEQ ID NO: 19042 - protein, 259 aa, Homo sapiens
  Payload ID: 3824
  Gene Symbol: COL6A6
  Gene Name: collagen, type VI, alpha 6
  ENSP ID: ENSP00000422921
  MOD_RES (1)..(1): Any amino acid
XTNAMEKYSPKFEIYSENILNSLKDITVKGPSLLNANLLDSLWDTFQNKSAARGKVVLLFSDGLDDDVEKLEQKSDELRKEGLNALITVALDGPADSSDLADLPYIEFGKGFEYRTQLSIGMRELGSRLSKQLVNVAERTCCCLFCKCIGGDGTMGDPGPPGKRLHVKRVVDFFKKQGSERMERKGPPGFKGSEGYLGEEGIAGERGAPGPVGEQGTKGCYGTKGPKGNRGLNGQEGEVGENGIDGLNGEQGDNGLPGR

SEQ ID NO: 19043 - protein, 298 aa, Homo sapiens
  Payload ID: 3824
  Gene Symbol: COL6A6
  Gene Name: collagen, type VI, alpha 6
  ENSP ID: ENSP00000426006
  MOD_RES (1)..(1): Any amino acid
XLNGVSCEVGTETQVSVAFQVTNAMEKYSPKFEIYSENILNSLKDITVKGPSLLNANLLDSLWDTFQNKSAARGKVVLLFSDGLDDDVEKLEQKSDELRKEGLNALITVALDGPADSSDLADLPYIEFGKGFEYRTQLSIGMRELGSRLSKQLVNVAERTCCCLFCKCIGGDGTMGDPGPPGKRGPPGFKGSEGYLGEEGIAGERGAPGPVGEQGTKGCYGTKGPKGNRGLNGQEGEVGENGIDGLNGEQGDNGLPGRKGEKGDEGSQGSPGKRGTPGDRGAKGLRGDPVSARAANWS

SEQ ID NO: 19044 - protein, 2944 aa, Homo sapiens
  Payload ID: 3825
  Gene Symbol: COL7A1
  Gene Name: collagen, type VII, alpha 1
  Uniprot ID: Q02388
  ENSP ID: ENSP00000332371
MTLRLLVAALCAGILAEAPRVRAQHRERVTCTRLYAADIVFLLDGSSSIGRSNFREVRSFLEGLVLPFSGAASAQGVRFATVQYSDDPRTEFGLDALGSGGDVIRAIRELSYKGGNTRTGAAILHVADHVFLPQLARPGVPKVCILITDGKSQDLVDTAAQRLKGQGVKLFAVGIKNADPEELKRVASQPTSDFFFFVNDFSILRTLLPLVSRRVCTTAGGVPVTRPPDDSTSAPRDLVLSEPSSQSLRVQWTAASGPVTGYKVQYTPLTGLGQPLPSERQEVNVPAGETSVRLRGLRPLTEYQVTVIALYANSIGEAVSGTARTTALEGPELTIQNTTAHSLLVAWRSVPGATGYRVTWRVLSGGPTQQQELGPGQGSVLLRDLEPGTDYEVTVSTLFGRSVGPATSLMARTDASVEQTLRPVILGPTSILLSWNLVPEARGYRLEWRRETGLEPPQKVVLPSDVTRYQLDGLQPGTEYRLTLYTLLEGHEVATPATVVPTGPELPVSPVTDLQATELPGQRVRVSWSPVPGATQYRIIVRSTQGVERTLVLPGSQTAFDLDDVQAGLSYTVRVSARVGPREGSASVLTVRREPETPLAVPGLRVVVSDATRVRVAWGPVPGASGFRISWSTGSGPESSQTLPPDSTATDITGLQPGTTYQVAVSVLRGREEGPAAVIVARTDPLGPVRTVHVTQASSSSVTITWTRVPGATGYRVSWHSAHGPEKSQLVSGEATVAELDGLEPDTEYTVHVRAHVAGVDGPPASVVVRTAPEPVGRVSRLQILNASSDVLRITWVGVTGATAYRLAWGRSEGGPMRHQILPGNTDSAEIRGLEGGVSYSVRVTALVGDREGTPVSIVVTTPPEAPPALGTLHVVQRGEHSLRLRWEPVPRAQGFLLHWQPEGGQEQSRVLGPELSSYHLDGLEPATQYRVRLSVLGPAGEGPSAEVTARTESPRVPSIELRVVDTSIDSVTLAWTPVSRASSYILSWRPLRGPGQEVPGSPQTLPGISSSQRVTGLEPGVSYIFSLTPVLDGVRGPEASVTQTPVCPRGLADVVFLPHATQDNAHRAEATRRVLERLVLALGPLGPQAVQVGLLSYSHRPSPLFPLNGSHDLGIILQRIRDMPYMDPSGNNLGTAVVTAHRYMLAPDAPGRRQHVPGVMVLLVDEPLRGDIFSPIREAQASGLNVVMLGMAGADPEQLRRLAPGMDSVQTFFAVDDGPSLDQAVSGLATALCQASFTTQPRPEPCPVYCPKGQKGEPGEMGLRGQVGPPGDPGLPGRTGAPGPQGPPGSATAKGERGFPGADGRPGSPGRAGNPGTPGAPGLKGSPGLPGPRGDPGERGPRGPKGEPGAPGQVIGGEGPGLPGRKGDPGPSGPPGPRGPLGDPGPRGPPGLPGTAMKGDKGDRGERGPPGPGEGGIAPGEPGLPGLPGSPGPQGPVGPPGKKGEKGDSEDGAPGLPGQPGSPGEQGPRGPPGAIGPKGDRGFPGPLGEAGEKGERGPPGPAGSRGLPGVAGRPGAKGPEGPPGPTGRQGEKGEPGRPGDPAVVGPAVAGPKGEKGDVGPAGPRGATGVQGERGPPGLVLPGDPGPKGDPGDRGPIGLTGRAGPPGDSGPPGEKGDPGRPGPPGPVGPRGRDGEVGEKGDEGPPGDPGLPGKAGERGLRGAPGVRGPVGEKGDQGDPGEDGRNGSPGSSGPKGDRGEPGPPGPPGRLVDTGPGAREKGEPGDRGQEGPRGPKGDPGLPGAPGERGIEGFRGPPGPQGDPGVRGPAGEKGDRGPPGLDGRSGLDGKPGAAGPSGPNGAAGKAGDPGRDGLPGLRGEQGLPGPSGPPGLPGKPGEDGKPGLNGKNGEPGDPGEDGRKGEKGDSGASGREGRDGPKGERGAPGILGPQGPPGLPGPVGPPGQGFPGVPGGTGPKGDRGETGSKGEQGLPGERGLRGEPGSVPNVDRLLETAGIKASALREIVETWDESSGSFLPVPERRRGPKGDSGEQGPPGKEGPIGFPGERGLKGDRGDPGPQGPPGLALGERGPPGPSGLAGEPGKPGIPGLPGRAGGVGEAGRPGERGERGEKGERGEQGRDGPPGLPGTPGPPGPPGPKVSVDEPGPGLSGEQGPPGLKGAKGEPGSNGDQGPKGDRGVPGIKGDRGEPGPRGQDGNPGLPGERGMAGPEGKPGLQGPRGPPGPVGGHGDPGPPGAPGLAGPAGPQGPSGLKGEPGETGPPGRGLTGPTGAVGLPGPPGPSGLVGPQGSPGLPGQVGETGKPGAPGRDGASGKDGDRGSPGVPGSPGLPGPVGPKGEPGPTGAPGQAVVGLPGAKGEKGAPGGLAGDLVGEPGAKGDRGLPGPRGEKGEAGRAGEPGDPGEDGQKGAPGPKGFKGDPGVGVPGSPGPPGPPGVKGDLGLPGLPGAPGVVGFPGQTGPRGEMGQPGPSGERGLAGPPGREGIPGPLGPPGPPGSVGPPGASGLKGDKGDPGVGLPGPRGERGEPGIRGEDGRPGQEGPRGLTGPPGSRGERGEKGDVGSAGLKGDKGDSAVILGPPGPRGAKGDMGERGPRGLDGDKGPRGDNGDPGDKGSKGEPGDKGSAGLPGLRGLLGPQGQPGAAGIPGDPGSPGKDGVPGIRGEKGDVGFMGPRGLKGERGVKGACGLDGEKGDKGEAGPPGRPGLAGHKGEMGEPGVPGQSGAPGKEGLIGPKGDRGFDGQPGPKGDQGEKGERGTPGIGGFPGPSGNDGSAGPPGPPGSVGPRGPEGLQGQKGERGPPGERVVGAPGVPGAPGERGEQGRPGPAGPRGEKGEAALTEDDIRGFVRQEMSQHCACQGQFIASGSRPLPSYAADTAGSQLHAVPVLRVSHAEEEERVPPEDDEYSEYSEYSVEEYQDPEAPWDSDDPCSLPLDEGSCTAYTLRWYHRAVTGSTEACHPFVYGGCGGNANRFGTREACERRCPPRVVQSQGTGTAQD

SEQ ID NO: 19045 - protein, 173 aa, Homo sapiens
  Payload ID: 3825
  Gene Symbol: COL7A1
  Gene Name: collagen, type VII, alpha 1
  ENSP ID: ENSP00000391608
MSALACGLPVPVPCLNSHLSMGQKGAPGPKGFKGDPGVGVPGSPGPPGPPGVKGDLGLPGLPGAPGVVGFPGQTGPRGEMGQPGPSGERGLAGPPGREGIPGPLGPPGPPGSVGPPGASGLKGDKGDPGVGLPGPRGERGEPGIRGEDGRPGQEGPRGLTGPPGSRGERGEKG

SEQ ID NO: 19046 - protein, 744 aa, Homo sapiens
  Payload ID: 3826
  Gene Symbol: COL8A1
  Gene Name: collagen, type VIII, alpha 1
  Uniprot ID: P27658
  ENSP ID: ENSP00000261037
MAVLPGPLQLLGVLLTISLSSIRLIQAGAYYGIKPLPPQIPPQMPPQIPQYQPLGQQVPHMPLAKDGLAMGKEMPHLQYGKEYPHLPQYMKEIQPAPRMGKEAVPKKGKEIPLASLRGEQGPRGEPGPRGPPGPPGLPGHGIPGIKGKPGPQGYPGVGKPGMPGMPGKPGAMGMPGAKGEIGQKGEIGPMGIPGPQGPPGPHGLPGIGKPGGPGLPGQPGPKGDRGPKGLPGPQGLRGPKGDKGFGMPGAPGVKGPPGMHGPPGPVGLPGVGKPGVTGFPGPQGPLGKPGAPGEPGPQGPIGVPGVQGPPGIPGIGKPGQDGIPGQPGFPGGKGEQGLPGLPGPPGLPGIGKPGFPGPKGDRGMGGVPGALGPRGEKGPIGAPGIGGPPGEPGLPGIPGPMGPPGAIGFPGPKGEGGIVGPQGPPGPKGEPGLQGFPGKPGFLGEVGPPGMRGLPGPIGPKGEAGQKGVPGLPGVPGLLGPKGEPGIPGDQGLQGPPGIPGIGGPSGPIGPPGIPGPKGEPGLPGPPGFPGIGKPGVAGLHGPPGKPGALGPQGQPGLPGPPGPPGPPGPPAVMPPTPPPQGEYLPDMGLGIDGVKPPHAYGAKKGKNGGPAYEMPAFTAELTAPFPPVGAPVKFNKLLYNGRQNYNPQTGIFTCEVPGVYYFAYHVHCKGGNVWVALFKNNEPVMYTYDEYKKGFLDQASGSAVLLLRPGDRVFLQMPSEQAAGLYAGQYVHSSFSGYLLYPM

SEQ ID NO: 19047 - protein, 744 aa, Homo sapiens; identical to SEQ ID NO: 19046
  Payload ID: 3826
  Gene Symbol: COL8A1
  Gene Name: collagen, type VIII, alpha 1
  Uniprot ID: P27658
  ENSP ID: ENSP00000273342

SEQ ID NO: 19048 - protein, 113 aa, Homo sapiens
  Payload ID: 3826
  Gene Symbol: COL8A1
  Gene Name: collagen, type VIII, alpha 1
  ENSP ID: ENSP00000387589
MAVLPGPLQLLGVLLTISLSSIRLIQAGAYYGIKPLPPQIPPQMPPQIPQYQPLGQQVPHMPLAKDGLAMGKEMPHLQYGKEYPHLPQYMKEIQPAPRMGKEAVPKKGKEIPL

SEQ ID NO: 19049 - protein, 202 aa, Homo sapiens
  Payload ID: 3826
  Gene Symbol: COL8A1
  Gene Name: collagen, type VIII, alpha 1
  ENSP ID: ENSP00000482679
MAVLPGPLQLLGVLLTISLSSIRLIQAGAYYGIKPLPPQIPPQMPPQIPQYQPLGQQVPHMPLAKDGLAMGKEMPHLQYGKEYPHLPQYMKEIQPAPRMGKEAVPKKGKEIPLASLRGEQGPRGEPGPRGPPGPPGLPGHGIPGIKGKPGPQGYPGVGKPGMPGMPGKPGAMGMPGAKGEIGQKGEIGPMGIPGPQGPPGPH

SEQ ID NO: 19050 - protein, 703 aa, Homo sapiens
  Payload ID: 3827
  Gene Symbol: COL8A2
  Gene Name: collagen, type VIII, alpha 2
  Uniprot ID: P25067
  ENSP ID: ENSP00000305913
MLGTLTPLSSLLLLLLVLVLGCGPRASSGGGAGGAAGYAPVKYIQPMQKGPVGPPFREGKGQYLEMPLPLLPMDLKGEPGPPGKPGPRGPPGPPGFPGKPGMGKPGLHGQPGPAGPPGFSRMGKAGPPGLPGKVGPPGQPGLRGEPGIRGDQGLRGPPGPPGLPGPSGITIPGKPGAQGVPGPPGFQGEPGPQGEPGPPGDRGLKGDNGVGQPGLPGAPGQGGAPGPPGLPGPAGLGKPGLDGLPGAPGDKGESGPPGVPGPRGEPGAVGPKGPPGVDGVGVPGAAGLPGPQGPSGAKGEPGTRGPPGLIGPTGYGMPGLPGPKGDRGPAGVPGLLGDRGEPGEDGEPGEQGPQGLGGPPGLPGSAGLPGRRGPPGPKGEAGPGGPPGVPGIRGDQGPSGLAGKPGVPGERGLPGAHGPPGPTGPKGEPGFTGRPGGPGVAGALGQKGDLGLPGQPGLRGPSGIPGLQGPAGPIGPQGLPGLKGEPGLPGPPGEGRAGEPGTAGPTGPPGVPGSPGITGPPGPPGPPGPPGAPGAFDETGIAGLHLPNGGVEGAVLGKGGKPQFGLGELSAHATPAFTAVLTSPFPASGMPVKFDRTLYNGHSGYNPATGIFTCPVGGVYYFAYHVHVKGTNVWVALYKNNVPATYTYDEYKKGYLDQASGGAVLQLRPNDQVWVQMPSDQANGLYSTEYIHSSFSGFLLCPT

SEQ ID NO: 19051 - protein, 703 aa, Homo sapiens; identical to SEQ ID NO: 19050
  Payload ID: 3827
  Gene Symbol: COL8A2
  Gene Name: collagen, type VIII, alpha 2
  Uniprot ID: P25067
  ENSP ID: ENSP00000380901

SEQ ID NO: 19052 - protein, 638 aa, Homo sapiens
  Payload ID: 3827
  Gene Symbol: COL8A2
  Gene Name: collagen, type VIII, alpha 2
  ENSP ID: ENSP00000436433
MPLPLLPMDLKGEPGPPGKPGPRGPPGPPGFPGKPGMGKPGLHGQPGPAGPPGFSRMGKAGPPGLPGKVGPPGQPGLRGEPGIRGDQGLRGPPGPPGLPGPSGITIPGKPGAQGVPGPPGFQGEPGPQGEPGPPGDRGLKGDNGVGQPGLPGAPGQGGAPGPPGLPGPAGLGKPGLDGLPGAPGDKGESGPPGVPGPRGEPGAVGPKGPPGVDGVGVPGAAGLPGPQGPSGAKGEPGTRGPPGLIGPTGYGMPGLPGPKGDRGPAGVPGLLGDRGEPGEDGEPGEQGPQGLGGPPGLPGSAGLPGRRGPPGPKGEAGPGGPPGVPGIRGDQGPSGLAGKPGVPGERGLPGAHGPPGPTGPKGEPGFTGRPGGPGVAGALGQKGDLGLPGQPGLRGPSGIPGLQGPAGPIGPQGLPGLKGEPGLPGPPGEGRAGEPGTAGPTGPPGVPGSPGITGPPGPPGPPGPPGAPGAFDETGIAGLHLPNGGVEGAVLGKGGKPQFGLGELSAHATPAFTAVLTSPFPASGMPVKFDRTLYNGHSGYNPATGIFTCPVGGVYYFAYHVHVKGTNVWVALYKNNVPATYTYDEYKKGYLDQASGGAVLQLRPNDQVWVQMPSDQANGLYSTEYIHSSFSGFLLCPT

SEQ ID NO: 19053 - protein, 427 aa, Homo sapiens
  Payload ID: 3827
  Gene Symbol: COL8A2
  Gene Name: collagen, type VIII, alpha 2
  ENSP ID: ENSP00000484406
MLGTLTPLSSLLLLLLVLVLGCGPRASSGGGAGGAAGYAPVKYIQPMQKGPVGPPFREGKGQYLEMPLPLLPMDLKGEPGPPGKPGPRGPPGPPGFPGKPGMGKPGLHGQPGPAGPPGFSRMGKAGPPGLPGKVGPPGQPGLRGEPGIRGDQGLRGPPGPPGLPGPSGITIPGKPGAQGVPGPPGFQGEPGPQGEPGPPGDRGLKGDNGVGQPGLPGAPGQGGAPGPPGLPGPAGLGKPGLDGLPGAPGDKGESGPPGAFDETGIAGLHLPNGGVEGAVLGKGGKPQFGLGELSAHATPAFTAVLTSPFPASGMPVKFDRTLYNGHSGYNPATGIFTCPVGGVYYFAYHVHVKGTNVWVALYKNNVPATYTYDEYKKGYLDQASGGAVLQLRPNDQVWVQMPSDQANGLYSTEYIHSSFSGFLLCPT

SEQ ID NO: 19054 - protein, 680 aa, Homo sapiens
  Payload ID: 3828
  Gene Symbol: COL10A1
  Gene Name: collagen, type X, alpha 1
  Uniprot ID: Q03692
  ENSP ID: ENSP00000243222
MLPQIPFLLLVSLNLVHGVFYAERYQMPTGIKGPLPNTKTQFFIPYTIKSKGIAVRGEQGTPGPPGPAGPRGHPGPSGPPGKPGYGSPGLQGEPGLPGPPGPSAVGKPGVPGLPGKPGERGPYGPKGDVGPAGLPGPRGPPGPPGIPGPAGISVPGKPGQQGPTGAPGPRGFPGEKGAPGVPGMNGQKGEMGYGAPGRPGERGLPGPQGPTGPSGPPGVGKRGENGVPGQPGIKGDRGFPGEMGPIGPPGPQGPPGERGPEGIGKPGAAGAPGQPGIPGTKGLPGAPGIAGPPGPPGFGKPGLPGLKGERGPAGLPGGPGAKGEQGPAGLPGKPGLTGPPGNMGPQGPKGIPGSHGLPGPKGETGPAGPAGYPGAKGERGSPGSDGKPGYPGKPGLDGPKGNPGLPGPKGDPGVGGPPGLPGPVGPAGAKGMPGHNGEAGPRGAPGIPGTRGPIGPPGIPGFPGSKGDPGSPGPPGPAGIATKGLNGPTGPPGPPGPRGHSGEPGLPGPPGPPGPPGQAVMPEGFIKAGQRPSLSGTPLVSANQGVTGMPVSAFTVILSKAYPAIGTPIPFDKILYNRQQHYDPRTGIFTCQIPGIYYFSYHVHVKGTHVWVGLYKNGTPVMYTYDEYTKGYLDQASGSAIIDLTENDQVWLQLPNAESNGLYSSEYVHSSFSGFLVAPM

SEQ ID NO: 19055 - protein, 680 aa, Homo sapiens; identical to SEQ ID NO: 19054
  Payload ID: 3828
  Gene Symbol: COL10A1
  Gene Name: collagen, type X, alpha 1
  Uniprot ID: Q03692
  ENSP ID: ENSP00000327368

SEQ ID NO: 19056 - protein, 51 aa, Homo sapiens
  Payload ID: 3828
  Gene Symbol: COL10A1
  Gene Name: collagen, type X, alpha 1
  ENSP ID: ENSP00000392712
MLPQIPFLLLVSLNLVHGVFYAERYQMPTGIKGPLPNTKTQFFIPYTIKSK

SEQ ID NO: 19057 - protein, 216 aa, Homo sapiens
  Payload ID: 3828
  Gene Symbol: COL10A1
  Gene Name: collagen, type X, alpha 1
  ENSP ID: ENSP00000411285
MLPQIPFLLLVSLNLVHGVFYAERYQMPTGIKGPLPNTKTQFFIPYTIKSKGIAVRGEQGTPGPPGPAGPRGHPGPSGPPGKPGYGSPGLQGEPGLPGPPGPSAVGKPGVPGLPGKPGERGPYGPKGDVGPAGLPGPRGPPGPPGIPGPAGISVPGKPGQQGPTGAPGPRGFPGEKGAPGVPGMNGQKGEMGYGAPGRPGERGLPGPQGPTGPSGP

SEQ ID NO: 19058 - protein, 1767 aa, Homo sapiens
  Payload ID: 3829
  Gene Symbol: COL11A1
  Gene Name: collagen, type XI, alpha 1
  Uniprot ID: P12107
  ENSP ID: ENSP00000302551
MEPWSSRWKTKRWLWDFTVTTLALTFLFQAREVRGAAPVDVLKALDFHNSPEGISKTTGFCTNRKNSKGSDTAYRVSKQAQLSAPTKQLFPGGTFPEDFSILFTVKPKKGIQSFLLSIYNEHGIQQIGVEVGRSPVFLFEDHTGKPAPEDYPLFRTVNIADGKWHRVAISVEKKTVTMIVDCKKKTTKPLDRSERAIVDTNGITVFGTRILDEEVFEGDIQQFLITGDPKAAYDYCEHYSPDCDSSAPKAAQAQEPQIDEANIVDDFQEYNYGTMESYQTEAPRHVSGTNEPNPVEEIFTEEYLTGEDYDSQRKNSEDTLYENKEIDGRDSDLLVDGDLGEYDFYEYKEYEDKPTSPPNEEFGPGVPAETDITETSINGHGAYGEKGQKGEPAVVEPGMLVEGPPGPAGPAGIMGPPGLQGPTGPPGDPGDRGPPGRPGLPGADGLPGPPGTMLMLPFRYGGDGSKGPTISAQEAQAQAILQQARIALRGPPGPMGLTGRPGPVGGPGSSGAKGESGDPGPQGPRGVQGPPGPTGKPGKRGRPGADGGRGMPGEPGAKGDRGFDGLPGLPGDKGHRGERGPQGPPGPPGDDGMRGEDGEIGPRGLPGEAGPRGLLGPRGTPGAPGQPGMAGVDGPPGPKGNMGPQGEPGPPGQQGNPGPQGLPGPQGPIGPPGEKGPQGKPGLAGLPGADGPPGHPGKEGQSGEKGALGPPGPQGPIGYPGPRGVKGADGVRGLKGSKGEKGEDGFPGFKGDMGLKGDRGEVGQIGPRGEDGPEGPKGRAGPTGDPGPSGQAGEKGKLGVPGLPGYPGRQGPKGSTGFPGFPGANGEKGARGVAGKPGPRGQRGPTGPRGSRGARGPTGKPGPKGTSGGDGPPGPPGERGPQGPQGPVGFPGPKGPPGPPGKDGLPGHPGQRGETGFQGKTGPPGPGGVVGPQGPTGETGPIGERGHPGPPGPPGEQGLPGAAGKEGAKGDPGPQGISGKDGPAGLRGFPGERGLPGAQGAPGLKGGEGPQGPPGPVGSPGERGSAGTAGPIGLPGRPGPQGPPGPAGEKGAPGEKGPQGPAGRDGVQGPVGLPGPAGPAGSPGEDGDKGEIGEPGQKGSKGDKGENGPPGPPGLQGPVGAPGIAGGDGEPGPRGQQGMFGQKGDEGARGFPGPPGPIGLQGLPGPPGEKGENGDVGPMGPPGPPGPRGPQGPNGADGPQGPPGSVGSVGGVGEKGEPGEAGNPGPPGEAGVGGPKGERGEKGEAGPPGAAGPPGAKGPPGDDGPKGNPGPVGFPGDPGPPGEPGPAGQDGVGGDKGEDGDPGQPGPPGPSGEAGPPGPPGKRGPPGAAGAEGRQGEKGAKGEAGAEGPPGKTGPVGPQGPAGKPGPEGLRGIPGPVGEQGLPGAAGQDGPPGPMGPPGLPGLKGDPGSKGEKGHPGLIGLIGPPGEQGEKGDRGLPGTQGSPGAKGDGGIPGPAGPLGPPGPPGLPGPQGPKGNKGSTGPAGQKGDSGLPGPPGSPGPPGEVIQPLPILSSKKTRRHTEGMQADADDNILDYSDGMEEIFGSLNSLKQDIEHMKFPMGTQTNPARTCKDLQLSHPDFPDGEYWIDPNQGCSGDSFKVYCNFTSGGETCIYPDKKSEGVRISSWPKEKPGSWFSEFKRGKLLSYLDVEGNSINMVQMTFLKLLTASARQNFTYHCHQSAAWYDVSSGSYDKALRFLGSNDEEMSYDNNPFIKTLYDGCASRKGYEKTVIEINTPKIDQVPIVDVMINDFGDQNQKFGFEVGPVCFLG

SEQ ID NO: 19059 - protein, 1818 aa, Homo sapiens
  Payload ID: 3829
  Gene Symbol: COL11A1
  Gene Name: collagen, type XI, alpha 1
  Uniprot ID: P12107
  ENSP ID: ENSP00000351163
MEPWSSRWKTKRWLWDFTVTTLALTFLFQAREVRGAAPVDVLKALDFHNSPEGISKTTGFCTNRKNSKGSDTAYRVSKQAQLSAPTKQLFPGGTFPEDFSILFTVKPKKGIQSFLLSIYNEHGIQQIGVEVGRSPVFLFEDHTGKPAPEDYPLFRTVNIADGKWHRVAISVEKKTVTMIVDCKKKTTKPLDRSERAIVDTNGITVFGTRILDEEVFEGDIQQFLITGDPKAAYDYCEHYSPDCDSSAPKAAQAQEPQIDEKKKSNFKKKMRTVATKSKEKSKKFTPPKSEKFSSKKKKSYQASAKAKLGVKANIVDDFQEYNYGTMESYQTEAPRHVSGTNEPNPVEEIFTEEYLTGEDYDSQRKNSEDTLYENKEIDGRDSDLLVDGDLGEYDFYEYKEYEDKPTSPPNEEFGPGVPAETDITETSINGHGAYGEKGQKGEPAVVEPGMLVEGPPGPAGPAGIMGPPGLQGPTGPPGDPGDRGPPGRPGLPGADGLPGPPGTMLMLPFRYGGDGSKGPTISAQEAQAQAILQQARIALRGPPGPMGLTGRPGPVGGPGSSGAKGESGDPGPQGPRGVQGPPGPTGKPGKRGRPGADGGRGMPGEPGAKGDRGFDGLPGLPGDKGHRGERGPQGPPGPPGDDGMRGEDGEIGPRGLPGEAGPRGLLGPRGTPGAPGQPGMAGVDGPPGPKGNMGPQGEPGPPGQQGNPGPQGLPGPQGPIGPPGEKGPQGKPGLAGLPGADGPPGHPGKEGQSGEKGALGPPGPQGPIGYPGPRGVKGADGVRGLKGSKGEKGEDGFPGFKGDMGLKGDRGEVGQIGPRGEDGPEGPKGRAGPTGDPGPSGQAGEKGKLGVPGLPGYPGRQGPKGSTGFPGFPGANGEKGARGVAGKPGPRGQRGPTGPRGSRGARGPTGKPGPKGTSGGDGPPGPPGERGPQGPQGPVGFPGPKGPPGPPGKDGLPGHPGQRGETGFQGKTGPPGPGGVVGPQGPTGETGPIGERGHPGPPGPPGEQGLPGAAGKEGAKGDPGPQGISGKDGPAGLRGFPGERGLPGAQGAPGLKGGEGPQGPPGPVGSPGERGSAGTAGPIGLPGRPGPQGPPGPAGEKGAPGEKGPQGPAGRDGVQGPVGLPGPAGPAGSPGEDGDKGEIGEPGQKGSKGDKGENGPPGPPGLQGPVGAPGIAGGDGEPGPRGQQGMFGQKGDEGARGFPGPPGPIGLQGLPGPPGEKGENGDVGPMGPPGPPGPRGPQGPNGADGPQGPPGSVGSVGGVGEKGEPGEAGNPGPPGEAGVGGPKGERGEKGEAGPPGAAGPPGAKGPPGDDGPKGNPGPVGFPGDPGPPGEPGPAGQDGVGGDKGEDGDPGQPGPPGPSGEAGPPGPPGKRGPPGAAGAEGRQGEKGAKGEAGAEGPPGKTGPVGPQGPAGKPGPEGLRGIPGPVGEQGLPGAAGQDGPPGPMGPPGLPGLKGDPGSKGEKGHPGLIGLIGPPGEQGEKGDRGLPGTQGSPGAKGDGGIPGPAGPLGPPGPPGLPGPQGPKGNKGSTGPAGQKGDSGLPGPPGSPGPPGEVIQPLPILSSKKTRRHTEGMQADADDNILDYSDGMEEIFGSLNSLKQDIEHMKFPMGTQTNPARTCKDLQLSHPDFPDGEYWIDPNQGCSGDSFKVYCNFTSGGETCIYPDKKSEGVRISSWPKEKPGSWFSEFKRGKLLSYLDVEGNSINMVQMTFLKLLTASARQNFTYHCHQSAAWYDVSSGSYDKALRFLGSNDEEMSYDNNPFIKTLYDGCASRKGYEKTVIEINTPKIDQVPIVDVMINDFGDQNQKFGFEVGPVCFLG

SEQ ID NO: 19060 - protein, 1806 aa, Homo sapiens
  Payload ID: 3829
  Gene Symbol: COL11A1
  Gene Name: collagen, type XI, alpha 1
  Uniprot ID: P12107
  ENSP ID: ENSP00000359114
MEPWSSRWKTKRWLWDFTVTTLALTFLFQAREVRGAAPVDVLKALDFHNSPEGISKTTGFCTNRKNSKGSDTAYRVSKQAQLSAPTKQLFPGGTFPEDFSILFTVKPKKGIQSFLLSIYNEHGIQQIGVEVGRSPVFLFEDHTGKPAPEDYPLFRTVNIADGKWHRVAISVEKKTVTMIVDCKKKTTKPLDRSERAIVDTNGITVFGTRILDEEVFEGDIQQFLITGDPKAAYDYCEHYSPDCDSSAPKAAQAQEPQIDEYAPEDIIEYDYEYGEAEYKEAESVTEGPTVTEETIAQTEANIVDDFQEYNYGTMESYQTEAPRHVSGTNEPNPVEEIFTEEYLTGEDYDSQRKNSEDTLYENKEIDGRDSDLLVDGDLGEYDFYEYKEYEDKPTSPPNEEFGPGVPAETDITETSINGHGAYGEKGQKGEPAVVEPGMLVEGPPGPAGPAGIMGPPGLQGPTGPPGDPGDRGPPGRPGLPGADGLPGPPGTMLMLPFRYGGDGSKGPTISAQEAQAQAILQQARIALRGPPGPMGLTGRPGPVGGPGSSGAKGESGDPGPQGPRGVQGPPGPTGKPGKRGRPGADGGRGMPGEPGAKGDRGFDGLPGLPGDKGHRGERGPQGPPGPPGDDGMRGEDGEIGPRGLPGEAGPRGLLGPRGTPGAPGQPGMAGVDGPPGPKGNMGPQGEPGPPGQQGNPGPQGLPGPQGPIGPPGEKGPQGKPGLAGLPGADGPPGHPGKEGQSGEKGALGPPGPQGPIGYPGPRGVKGADGVRGLKGSKGEKGEDGFPGFKGDMGLKGDRGEVGQIGPRGEDGPEGPKGRAGPTGDPGPSGQAGEKGKLGVPGLPGYPGRQGPKGSTGFPGFPGANGEKGARGVAGKPGPRGQRGPTGPRGSRGARGPTGKPGPKGTSGGDGPPGPPGERGPQGPQGPVGFPGPKGPPGPPGKDGLPGHPGQRGETGFQGKTGPPGPGGVVGPQGPTGETGPIGERGHPGPPGPPGEQGLPGAAGKEGAKGDPGPQGISGKDGPAGLRGFPGERGLPGAQGAPGLKGGEGPQGPPGPVGSPGERGSAGTAGPIGLPGRPGPQGPPGPAGEKGAPGEKGPQGPAGRDGVQGPVGLPGPAGPAGSPGEDGDKGEIGEPGQKGSKGDKGENGPPGPPGLQGPVGAPGIAGGDGEPGPRGQQGMFGQKGDEGARGFPGPPGPIGLQGLPGPPGEKGENGDVGPMGPPGPPGPRGPQGPNGADGPQGPPGSVGSVGGVGEKGEPGEAGNPGPPGEAGVGGPKGERGEKGEAGPPGAAGPPGAKGPPGDDGPKGNPGPVGFPGDPGPPGEPGPAGQDGVGGDKGEDGDPGQPGPPGPSGEAGPPGPPGKRGPPGAAGAEGRQGEKGAKGEAGAEGPPGKTGPVGPQGPAGKPGPEGLRGIPGPVGEQGLPGAAGQDGPPGPMGPPGLPGLKGDPGSKGEKGHPGLIGLIGPPGEQGEKGDRGLPGTQGSPGAKGDGGIPGPAGPLGPPGPPGLPGPQGPKGNKGSTGPAGQKGDSGLPGPPGSPGPPGEVIQPLPILSSKKTRRHTEGMQADADDNILDYSDGMEEIFGSLNSLKQDIEHMKFPMGTQTNPARTCKDLQLSHPDFPDGEYWIDPNQGCSGDSFKVYCNFTSGGETCIYPDKKSEGVRISSWPKEKPGSWFSEFKRGKLLSYLDVEGNSINMVQMTFLKLLTASARQNFTYHCHQSAAWYDVSSGSYDKALRFLGSNDEEMSYDNNPFIKTLYDGCASRKGYEKTVIEINTPKIDQVPIVDVMINDFGDQNQKFGFEVGPVCFLG

SEQ ID NO: 19061 - protein, 569 aa, Homo sapiens
  Payload ID: 3829
  Gene Symbol: COL11A1
  Gene Name: collagen, type XI, alpha 1
  ENSP ID: ENSP00000408640
MEPWSSRWKTKRWLWDFTVTTLALTFLFQAREVRGAAPVDVLKALDFHNSPEGISKTTGFCTNRKNSKGSDTAYRVSKQAQLSAPTKQLFPGGTFPEDFSILFTVKPKKGIQSFLLSIYNEHGIQQIGVEVGRSPVFLFEDHTGKPAPEDYPLFRTVNIADGKWHRVAISVEKKTVTMIVDCKKKTTKPLDRSERAIVDTNGITVFGTRILDEEVFEGDIQQFLITGDPKAAYDYCEHYSPDCDSSAPKAAQAQEPQIDEKKKSNFKKKMRTVATKSKEKSKKFTPPKSEKFSSKKKKSYQASAKAKLGVKANIVDDFQEYNYGTMESYQTEAPRHVSGTNEPNPVEEIFTEEYLTGEDYDSQRKNSEDTLYENKEIDGRDSDLLVDGDLGEYDFYEYKEYEDKPTSPPNEEFGPGVPAETDITETSINGHGAYGEKGQKGEPAVVEPGMLVEGPPGPAGPAGIMGPPGLQGPTGPPGDPGDRGPPGRPGLPGADGLPGPPGTMLMLPFRYGGDGSKGPTISAQEAQAQAILQQARIALRGPPGPMGLTGRPGPVGGPGSSGAKGESGD

SEQ ID NO: 19062 - protein, 200 aa, Homo sapiens
  Payload ID: 3829
  Gene Symbol: COL11A1
  Gene Name: collagen, type XI, alpha 1
  ENSP ID: ENSP00000410177
YRVSKQAQLSAPTKQLFPGGTFPEDFSILFTVKPKKGIQSFLLSIYNEHGIQQIGVEVGRSPVFLFEDHTGKPAPEDYPLFRTVNIADGKWHRVAISVEKKTVTMIVDCKKKTTKPLDRSERAIVDTNGITVFGTRILDEEVFEGDIQQFLITGDPKAAYDYCEHYSPDCDSSAPKAAQAQEPQIDEVRSTRPEKVFVFQ

SEQ ID NO: 19063 - protein, 1690 aa, Homo sapiens
  Payload ID: 3829
  Gene Symbol: COL11A1
  Gene Name: collagen, type XI, alpha 1
  Uniprot ID: P12107
  ENSP ID: ENSP00000426533
MEPWSSRWKTKRWLWDFTVTTLALTFLFQAREVRGAAPVDVLKALDFHNSPEGISKTTGFCTNRKNSKGSDTAYRVSKQAQLSAPTKQLFPGGTFPEDFSILFTVKPKKGIQSFLLSIYNEHGIQQIGVEVGRSPVFLFEDHTGKPAPEDYPLFRTVNIADGKWHRVAISVEKKTVTMIVDCKKKTTKPLDRSERAIVDTNGITVFGTRILDEEVFEGDIQQFLITGDPKAAYDYCEHYSPDCDSSAPKAAQAQEPQIDEYAPEDIIEYDYEYGEAEYKEAESVTEGPTVTEETIAQTEINGHGAYGEKGQKGEPAVVEPGMLVEGPPGPAGPAGIMGPPGLQGPTGPPGDPGDRGPPGRPGLPGADGLPGPPGTMLMLPFRYGGDGSKGPTISAQEAQAQAILQQARIALRGPPGPMGLTGRPGPVGGPGSSGAKGESGDPGPQGPRGVQGPPGPTGKPGKRGRPGADGGRGMPGEPGAKGDRGFDGLPGLPGDKGHRGERGPQGPPGPPGDDGMRGEDGEIGPRGLPGEAGPRGLLGPRGTPGAPGQPGMAGVDGPPGPKGNMGPQGEPGPPGQQGNPGPQGLPGPQGPIGPPGEKGPQGKPGLAGLPGADGPPGHPGKEGQSGEKGALGPPGPQGPIGYPGPRGVKGADGVRGLKGSKGEKGEDGFPGFKGDMGLKGDRGEVGQIGPRGEDGPEGPKGRAGPTGDPGPSGQAGEKGKLGVPGLPGYPGRQGPKGSTGFPGFPGANGEKGARGVAGKPGPRGQRGPTGPRGSRGARGPTGKPGPKGTSGGDGPPGPPGERGPQGPQGPVGFPGPKGPPGPPGKDGLPGHPGQRGETGFQGKTGPPGPGGVVGPQGPTGETGPIGERGHPGPPGPPGEQGLPGAAGKEGAKGDPGPQGISGKDGPAGLRGFPGERGLPGAQGAPGLKGGEGPQGPPGPVGSPGERGSAGTAGPIGLPGRPGPQGPPGPAGEKGAPGEKGPQGPAGRDGVQGPVGLPGPAGPAGSPGEDGDKGEIGEPGQKGSKGDKGENGPPGPPGLQGPVGAPGIAGGDGEPGPRGQQGMFGQKGDEGARGFPGPPGPIGLQGLPGPPGEKGENGDVGPMGPPGPPGPRGPQGPNGADGPQGPPGSVGSVGGVGEKGEPGEAGNPGPPGEAGVGGPKGERGEKGEAGPPGAAGPPGAKGPPGDDGPKGNPGPVGFPGDPGPPGEPGPAGQDGVGGDKGEDGDPGQPGPPGPSGEAGPPGPPGKRGPPGAAGAEGRQGEKGAKGEAGAEGPPGKTGPVGPQGPAGKPGPEGLRGIPGPVGEQGLPGAAGQDGPPGPMGPPGLPGLKGDPGSKGEKGHPGLIGLIGPPGEQGEKGDRGLPGTQGSPGAKGDGGIPGPAGPLGPPGPPGLPGPQGPKGNKGSTGPAGQKGDSGLPGPPGSPGPPGEVIQPLPILSSKKTRRHTEGMQADADDNILDYSDGMEEIFGSLNSLKQDIEHMKFPMGTQTNPARTCKDLQLSHPDFPDGEYWIDPNQGCSGDSFKVYCNFTSGGETCIYPDKKSEGVRISSWPKEKPGSWFSEFKRGKLLSYLDVEGNSINMVQMTFLKLLTASARQNFTYHCHQSAAWYDVSSGSYDKALRFLGSNDEEMSYDNNPFIKTLYDGCASRKGYEKTVIEINTPKIDQVPIVDVMINDFGDQNQKFGFEVGPVCFLG

SEQ ID NO: 19064 - protein, 694 aa, Homo sapiens
  Payload ID: 3829
  Gene Symbol: COL11A1
  Gene Name: collagen, type XI, alpha 1
  ENSP ID: ENSP00000489428
  MOD_RES (1)..(1): Any amino acid
XPKAAYDYCEHYSPDCDSSAPKAAQAQEPQIDEYAPEDIIEYDYEYGEAEYKEAESVTEGPTVTEETIAQTEANIVDDFQEYNYGTMESYQTEAPRHVSGTNEPNPVEEIFTEEYLTGEDYDSQRKNSEDTLYENKEIDGRDSDLLVDGDLGEYDFYEYKEYEDKPTSPPNEEFGPGVPAETDITETSINGHGAYGEKGQKGEPAVVEPGMLVEGPPGPAGPAGIMGPPGLQGPTGPPGDPGDRGPPGRPGLPGADGLPGPPGTMLMLPFRYGGDGSKGPTISAQEAQAQAILQQARIALRGPPGPMGLTGRPGPVGGPGSSGAKGESGDPGPQGPRGVQGPPGPTGKPGKRGRPGADGGRGMPGEPGAKGDRGFDGLPGLPGDKGHRGERGPQGPPGPPGDDGMRGEDGEIGPRGLPGEAGPRGLLGPRGTPGAPGQPGMAGVDGPPGPKGNMGPQGEPGPPGQQGNPGPQGLPGPQGPIGPPGEKGPQGKPGLAGLPGADGPPGHPGKEGQSGEKGALGPPGPQGPIGYPGPRGVKGADGVRGLKGSKGEKGEDGFPGFKGDMGLKGDRGEVGQIGPRGEDGPEGPKGRAGPTGDPGPSGQAGEKGKLGVPGLPGYPGRQGPKDFRCHWFHWIPWVSRCQWRERCTGSSWQTRPSGSAWSNGSSRFKRCKRSHWETWAKGHFRWRWPSWPSR

SEQ ID NO: 19065 - protein, 1736 aa, Homo sapiens
  Payload ID: 3830
  Gene Symbol: COL11A2
  Gene Name: collagen, type XI, alpha 2
  ENSP ID: ENSP00000339915
MERCSRCHRLLLLLPLVLGLSAAPGWAGAPPVDVLRALRFPSLPDGVRRAKGICPADVAYRVARPAQLSAPTRQLFPGGFPKDFSLLTVVRTRPGLQAPLLTLYSAQGVRQLGLELGRPVRFLYEDQTGRPQPPSQPVFRGLSLADGKWHRVAVAVKGQSVTLIVDCKKRVTRPLPRSARPVLDTHGVIIFGARILDEEVFEGDVQELAIVPGVQAAYESCEQKELECEGGQRERPQNQQPHRAQRSPQQQPSRLHRPQNQEPQSQPTESLYYDYEPPYYDVMTTGTTPDYQDPTPGEEEEILESSLLPPLEEEQTDLQVPPTADRFQAEEYGEGGTDPPEGPYDYTYGYGDDYREETELGPALSAETAHSGAAAHGPRGLKGEKGEPAVLEPGMLVEGPPGPEGPAGLIGPPGIQGNPGPVGDPGERGPPGRAGLPGSDGAPGPPGTSLMLPFRFGSGGGDKGPVVAAQEAQAQAILQQARLALRGPPGPMGYTGRPGPLGQPGSPGLKGESGDLGPQGPRGPQGLTGPPGKAGRRGRAGADGARGMPGDPGVKGDRGFDGLPGLPGEKGHRGDTGAQGLPGPPGEDGERGDDGEIGPRGLPGESGPRGLLGPKGPPGIPGPPGVRGMDGPQGPKGSLGPQGEPGPPGQQGTPGTQGLPGPQGAIGPHGEKGPQGKPGLPGMPGSDGPPGHPGKEGPPGTKGNQGPSGPQGPLGYPGPRGVKGVDGIRGLKGHKGEKGEDGFPGFKGDIGVKGDRGEVGVPGSRGEDGPEGPKGRTGPTGDPGPPGLMGEKGKLGVPGLPGYPGRQGPKGSLGFPGFPGASGEKGARGLSGKSGPRGERGPTGPRGQRGPRGATGKSGAKGTSGGDGPHGPPGERGLPGPQGPNGFPGPKGPPGPPGKDGLPGHPGQRGEVGFQGKTGPPGPPGVVGPQGAAGETGPMGERGHPGPPGPPGEQGLPGTAGKEGTKGDPGPPGAPGKDGPAGLRGFPGERGLPGTAGGPGLKGNEGPSGPPGPAGSPGERGAAGSGGPIGPPGRPGPQGPPGAAGEKGVPGEKGPIGPTGRDGVQGPVGLPGPAGPPGVAGEDGDKGEVGDPGQKGTKGNKGEHGPPGPPGPIGPVGQPGAAGADGEPGARGPQGHFGAKGDEGTRGFNGPPGPIGLQGLPGPSGEKGETGDVGPMGPPGPPGPRGPAGPNGADGPQGPPGGVGNLGPPGEKGEPGESGSPGIQGEPGVKGPRGERGEKGESGQPGEPGPPGPKGPTGDDGPKGNPGPVGFPGDPGPPGEGGPRGQDGAKGDRGEDGEPGQPGSPGPTGENGPPGPLGKRGPAGSPGSEGRQGGKGAKGDPGAIGAPGKTGPVGPAGPAGKPGPDGLRGLPGSVGQQGRPGATGQAGPPGPVGPPGLPGLRGDAGAKGEKGHPGLIGLIGPPGEQGEKGDRGLPGPQGSPGQKGEMGIPGASGPIGPGGPPGLPGPAGPKGAKGATGPGGPKGEKGVQGPPGHPGPPGEVIQPLPIQMPKKTRRSVDGSRLMQEDEAIPTGGAPGSPGGLEEIFGSLDSLREEIEQMRRPTGTQDSPARTCQDLKLCHPELPDGEYWVDPNQGCARDAFRVFCNFTAGGETCVTPRDDVTQFSYVDSEGSPVGVVQLTFLRLLSVSAHQDVSYPCSGAARDGPLRLRGANEDELSPETSPYVKEFRDGCQTQQGRTVLEVRTPVLEQLPVLDASFSDLGAPPRRGGVLLGPVCFMG

SEQ ID NO: 19066 - protein, 1629 aa, Homo sapiens
  Payload ID: 3830
  Gene Symbol: COL11A2
  Gene Name: collagen, type XI, alpha 2
  ENSP ID: ENSP00000355123
MERCSRCHRLLLLLPLVLGLSAAPGWAGAPPVDVLRALRFPSLPDGVRRAKGICPADVAYRVARPAQLSAPTRQLFPGGFPKDFSLLTVVRTRPGLQAPLLTLYSAQGVRQLGLELGRPVRFLYEDQTGRPQPPSQPVFRGLSLADGKWHRVAVAVKGQSVTLIVDCKKRVTRPLPRSARPVLDTHGVIIFGARILDEEVFEGDVQELAIVPGVQAAYESCEQKELECEGGQRERPQNQQPHRAQRSPQQQPSRLHRPQNQEPQSQAAHGPRGLKGEKGEPAVLEPGMLVEGPPGPEGPAGLIGPPGIQGNPGPVGDPGERGPPGRAGLPGSDGAPGPPGTSLMLPFRFGSGGGDKGPVVAAQEAQAQAILQQARLALRGPPGPMGYTGRPGPLGQPGSPGLKGESGDLGPQGPRGPQGLTGPPGKAGRRGRAGADGARGMPGDPGVKGDRGFDGLPGLPGEKGHRGDTGAQGLPGPPGEDGERGDDGEIGPRGLPGESGPRGLLGPKGPPGIPGPPGVRGMDGPQGPKGSLGPQGEPGPPGQQGTPGTQGLPGPQGAIGPHGEKGPQGKPGLPGMPGSDGPPGHPGKEGPPGTKGNQGPSGPQGPLGYPGPRGVKGVDGIRGLKGHKGEKGEDGFPGFKGDIGVKGDRGEVGVPGSRGEDGPEGPKGRTGPTGDPGPPGLMGEKGKLGVPGLPGYPGRQGPKGSLGFPGFPGASGEKGARGLSGKSGPRGERGPTGPRGQRGPRGATGKSGAKGTSGGDGPHGPPGERGLPGPQGPNGFPGPKGPPGPPGKDGLPGHPGQRGEVGFQGKTGPPGPPGVVGPQGAAGETGPMGERGHPGPPGPPGEQGLPGTAGKEGTKGDPGPPGAPGKDGPAGLRGFPGERGLPGTAGGPGLKGNEGPSGPPGPAGSPGERGAAGSGGPIGPPGRPGPQGPPGAAGEKGVPGEKGPIGPTGRDGVQGPVGLPGPAGPPGVAGEDGDKGEVGDPGQKGTKGNKGEHGPPGPPGPIGPVGQPGAAGADGEPGARGPQGHFGAKGDEGTRGFNGPPGPIGLQGLPGPSGEKGETGDVGPMGPPGPPGPRGPAGPNGADGPQGPPGGVGNLGPPGEKGEPGESGSPGIQGEPGVKGPRGERGEKGESGQPGEPGPPGPKGPTGDDGPKGNPGPVGFPGDPGPPGEGGPRGQDGAKGDRGEDGEPGQPGSPGPTGENGPPGPLGKRGPAGSPGSEGRQGGKGAKGDPGAIGAPGKTGPVGPAGPAGKPGPDGLRGLPGSVGQQGRPGATGQAGPPGPVGPPGLPGLRGDAGAKGEKGHPGLIGLIGPPGEQGEKGDRGLPGPQGSPGQKGEMGIPGASGPIGPGGPPGLPGPAGPKGAKGATGPGGPKGEKGVQGPPGHPGPPGEVIQPLPIQMPKKTRRSVDGSRLMQEDEAIPTGGAPGSPGGLEEIFGSLDSLREEIEQMRRPTGTQDSPARTCQDLKLCHPELPDGEYWVDPNQGCARDAFRVFCNFTAGGETCVTPRDDVTQFSYVDSEGSPVGVVQLTFLRLLSVSAHQDVSYPCSGAARDGPLRLRGANEDELSPETSPYVKEFRDGCQTQQGRTVLEVRTPVLEQLPVLDASFSDLGAPPRRGGVLLGPVCFMG

SEQ ID NO: 19067 - protein, 1650 aa, Homo sapiens
  Payload ID: 3830
  Gene Symbol: COL11A2
  Gene Name: collagen, type XI, alpha 2
  ENSP ID: ENSP00000363840
MERCSRCHRLLLLLPLVLGLSAAPGWAGAPPVDVLRALRFPSLPDGVRRAKGICPADVAYRVARPAQLSAPTRQLFPGGFPKDFSLLTVVRTRPGLQAPLLTLYSAQGVRQLGLELGRPVRFLYEDQTGRPQPPSQPVFRGLSLADGKWHRVAVAVKGQSVTLIVDCKKRVTRPLPRSARPVLDTHGVIIFGARILDEEVFEGDVQELAIVPGVQAAYESCEQKELECEGGQRERPQNQQPHRAQRSPQQQPSRLHRPQNQEPQSQDPTPGEEEEILESSLLPPLEEAAHGPRGLKGEKGEPAVLEPGMLVEGPPGPEGPAGLIGPPGIQGNPGPVGDPGERGPPGRAGLPGSDGAPGPPGTSLMLPFRFGSGGGDKGPVVAAQEAQAQAILQQARLALRGPPGPMGYTGRPGPLGQPGSPGLKGESGDLGPQGPRGPQGLTGPPGKAGRRGRAGADGARGMPGDPGVKGDRGFDGLPGLPGEKGHRGDTGAQGLPGPPGEDGERGDDGEIGPRGLPGESGPRGLLGPKGPPGIPGPPGVRGMDGPQGPKGSLGPQGEPGPPGQQGTPGTQGLPGPQGAIGPHGEKGPQGKPGLPGMPGSDGPPGHPGKEGPPGTKGNQGPSGPQGPLGYPGPRGVKGVDGIRGLKGHKGEKGEDGFPGFKGDIGVKGDRGEVGVPGSRGEDGPEGPKGRTGPTGDPGPPGLMGEKGKLGVPGLPGYPGRQGPKGSLGFPGFPGASGEKGARGLSGKSGPRGERGPTGPRGQRGPRGATGKSGAKGTSGGDGPHGPPGERGLPGPQGPNGFPGPKGPPGPPGKDGLPGHPGQRGEVGFQGKTGPPGPPGVVGPQGAAGETGPMGERGHPGPPGPPGEQGLPGTAGKEGTKGDPGPPGAPGKDGPAGLRGFPGERGLPGTAGGPGLKGNEGPSGPPGPAGSPGERGAAGSGGPIGPPGRPGPQGPPGAAGEKGVPGEKGPIGPTGRDGVQGPVGLPGPAGPPGVAGEDGDKGEVGDPGQKGTKGNKGEHGPPGPPGPIGPVGQPGAAGADGEPGARGPQGHFGAKGDEGTRGFNGPPGPIGLQGLPGPSGEKGETGDVGPMGPPGPPGPRGPAGPNGADGPQGPPGGVGNLGPPGEKGEPGESGSPGIQGEPGVKGPRGERGEKGESGQPGEPGPPGPKGPTGDDGPKGNPGPVGFPGDPGPPGEGGPRGQDGAKGDRGEDGEPGQPGSPGPTGENGPPGPLGKRGPAGSPGSEGRQGGKGAKGDPGAIGAPGKTGPVGPAGPAGKPGPDGLRGLPGSVGQQGRPGATGQAGPPGPVGPPGLPGLRGDAGAKGEKGHPGLIGLIGPPGEQGEKGDRGLPGPQGSPGQKGEMGIPGASGPIGPGGPPGLPGPAGPKGAKGATGPGGPKGEKGVQGPPGHPGPPGEVIQPLPIQMPKKTRRSVDGSRLMQEDEAIPTGGAPGSPGGLEEIFGSLDSLREEIEQMRRPTGTQDSPARTCQDLKLCHPELPDGEYWVDPNQGCARDAFRVFCNFTAGGETCVTPRDDVTQFSYVDSEGSPVGVVQLTFLRLLSVSAHQDVSYPCSGAARDGPLRLRGANEDELSPETSPYVKEFRDGCQTQQGRTVLEVRTPVLEQLPVLDASFSDLGAPPRRGGVLLGPVCFMG

SEQ ID NO: 19068 - protein, 1650 aa, Homo sapiens
  Payload ID: 3830
  Gene Symbol: COL11A2
  Gene Name: collagen, type XI, alpha 2
  Uniprot ID: P13942
  ENSP ID: ENSP00000372565
MERCSRCHRLLLLLPLVLGLSAAPGWAGAPPVDVLRALRFPSLPDGVRRAKGICPADVAYRVARPAQLSAPTRQLFPGGFPKDFSLLTVVRTRPGLQAPLLTLYSAQGVRQLGLELGRPVRFLYEDQTGRPQPPSQPVFRGLSLADGKWHRVAVAVKGQSVTLIVDCKKRVTRPLPRSARPVLDTHGVIIFGARILDEEVFEGDVQELAIVPGVQAAYESCEQKELECEGGQRERPQNQQPHRAQRSPQQQPSRLHRPQNQEPQSQDPTPGEEEEILESSLLPPLEEAAHGPRGLKGEKGEPAVLEPGMLVEGPPGPEGPAGLIGPPGIQGNPGPVGDPGERGPPGRAGLPGSDGAPGPPGTSLMLPFRFGSGGGDKGPVVAAQEAQAQAILQQARLALRGPPGPMGYTGRPGPLGQPGSPGLKGESGDLGPQGPRGPQGLTGPPGKAGRRGRAGADGARGMPGDPGVKGDRGFDGLPGLPGEKGHRGDTGAQGLPGPPGEDGERGDDGEIGPRGLPGESGPRGLLGPKGPPGIPGPPGVRGMDGPQGPKGSLGPQGEPGPPGQQGTPGTQGLPGPQGAIGPHGEKGPQGKPGLPGMPGSDGPPGHPGKEGPPGTKGNQGPSGPQGPLGYPGPRGVKGVDGIRGLKGHKGEKGEDGFPGFKGDIGVKGDRGEVGVPGSRGEDGPEGPKGRTGPTGDPGPPGLMGEKGKLGVPGLPGYPGRQGPKGSLGFPGFPGASGEKGARGLSGKSGPRGERGPTGPRGQRGPRGATGKSGAKGTSGGDGPHGPPGERGLPGPQGPNGFPGPKGPLGPPGKDGLPGHPGQRGEVGFQGKTGPPGPPGVVGPQGAAGETGPMGERGHPGPPGPPGEQGLPGTAGKEGTKGDPGPPGAPGKDGPAGLRGFPGERGLPGTAGGPGLKGNEGPSGPPGPAGSPGERGAAGSGGPIGPPGRPGPQGPPGAAGEKGVPGEKGPIGPTGRDGVQGPVGLPGPAGPPGVAGEDGDKGEVGDPGQKGTKGNKGEHGPPGPPGPIGPVGQPGAAGADGEPGARGPQGHFGAKGDEGTRGFNGPPGPIGLQGLPGPSGEKGETGDVGPMGPPGPPGPRGPAGPNGADGPQGPPGGVGNLGPPGEKGEPGESGSPGIQGEPGVKGPRGERGEKGESGQPGEPGPPGPKGPTGDDGPKGNPGPVGFPGDPGPPGEGGPRGQDGAKGDRGEDGEPGQPGSPGPTGENGPPGPLGKRGPAGSPGSEGRQGGKGAKGDPGAIGAPGKTGPVGPAGPAGKPGPDGLRGLPGSVGQQGRPGATGQAGPPGPVGPPGLPGLRGDAGAKGEKGHPGLIGLIGPPGEQGEKGDRGLPGPQGSPGQKGEMGIPGASGPIGPGGPPGLPGPAGPKGAKGATGPGGPKGEKGVQGPPGHPGPPGEVIQPLPIQMPKKTRRSVDGSRLMQEDEAIPTGGAPGSPGGLEEIFGSLDSLREEIEQMRRPTGTQDSPARTCQDLKLCHPELPDGEYWVDPNQGCARDAFRVFCNFTAGGETCVTPRDDVTQFSYVDSEGSPVGVVQLTFLRLLSVSAHQDVSYPCSGAARDGPLRLRGANEDELSPETSPYVKEFRDGCQTQQGRTVLEVRTPVLEQLPVLDASFSDLGAPPRRGGVLLGPVCFMG

SEQ ID NO: 19069 - protein, 290 aa, Homo sapiens
  Payload ID: 3830
  Gene Symbol: COL11A2
  Gene Name: collagen, type XI, alpha 2
  Uniprot ID: P13942
  ENSP ID: ENSP00000372566
MERCSRCHRLLLLLPLVLGLSAAPGWAGAPPVDVLRALRFPSLPDGVRRAKGICPADVAYRVARPAQLSAPTRQLFPGGFPKDFSLLTVVRTRPGLQAPLLTLYSAQGVRQLGLELGRPVRFLYEDQTGRPQPPSQPVFRGLSLADGKWHRVAVAVKGQSVTLIVDCKKRVTRPLPRSARPVLDTHGVIIFGARILDEEVFEGDVQELAIVPGVQAAYESCEQKELECEGGQRERPQNQQPHRAQRSPQQQPSRLHRPQNQEPQSQVRELGEPPSAAHPREGRHPGISPP

SEQ ID NO: 19070 - protein, 1650 aa, Homo sapiens; identical to SEQ ID NO: 19067
  Payload ID: 3830
  Gene Symbol: COL11A2
  Gene Name: collagen, type XI, alpha 2
  ENSP ID: ENSP00000372706

SEQ ID NO: 19071 - protein, 290 aa, Homo sapiens; identical to SEQ ID NO: 19069
  Payload ID: 3830
  Gene Symbol: COL11A2
  Gene Name: collagen, type XI, alpha 2
  Uniprot ID: P13942
  ENSP ID: ENSP00000378620

SEQ ID NO: 19072 - protein, 333 aa, Homo sapiens
  Payload ID: 3830
  Gene Symbol: COL11A2
  Gene Name: collagen, type XI, alpha 2
  ENSP ID: ENSP00000388108
  MOD_RES (1)..(1): Any amino acid
XNQSPQAHRSTVPHTAGLGQLCLLGFGMDWRASEAWMVPRAPKGAWDPRESQDLLDNRAPLGPRVFPGPRVPSALMERRVLKGSQGSPACLGPPGEVIQPLPIQMPKKTRRSVDGSRLMQEDEAIPTGGAPGSPGGLEEIFGSLDSLREEIEQMRRPTGTQDSPARTCQDLKLCHPELPDGEYWVDPNQGCARDAFRVFCNFTAGGETCVTPRDDVTQFSYVDSEGSPVGVVQLTFLRLLSVSAHQDVSYPCSGAARDGPLRLRGANEDELSPETSPYVKEFRDGCQTQQGRTVLEVRTPVLEQLPVLDASFSDLGAPPRRGGVLLGPVCFMG

SEQ ID NO: 19073 - protein, 1650 aa, Homo sapiens; identical to SEQ ID NO: 19067
  Payload ID: 3830
  Gene Symbol: COL11A2
  Gene Name: collagen, type XI, alpha 2
  ENSP ID: ENSP00000388309

SEQ ID NO: 19074 - protein, 624 aa, Homo sapiens
  Payload ID: 3830
  Gene Symbol: COL11A2
  Gene Name: collagen, type XI, alpha 2
  ENSP ID: ENSP00000388775
MERCSRCHRLLLLLPLVLGLSAAPGWAGAPPVDVLRALRFPSLPDGVRRAKGICPADVAYRVARPAQLSAPTRQLFPGGFPKDFSLLTVVRTRPGLQAPLLTLYSAQGVRQLGLELGRPVRFLYEDQTGRPQPPSQPVFRGLSLADGKWHRVAVAVKGQSVTLIVDCKKRVTRPLPRSARPVLDTHGVIIFGARILDEEVFEGDVQELAIVPGVQAAYESCEQKELECEGGQRERPQNQQPHRAQRSPQQQPSRLHRPQNQEPQSQPTESLYYDYKPPYYDVMTTGTTPDYQDPTPGEEEEILESSLLPPLEEEQTDLQVPPTADRFQAEEYGEGGTDPPEGPYDYTYGYGDDYREETELGPALSAETAHSGAAAHGPRGLKGEKGEPAVLEPGMLVEGPPGPEGPAGLIGPPGIQGNPGPVGDPGERGPPGRAGLPGSDGAPGPPGTSLMLPFRFGSGGGDKGPVVAAQEAQAQAILQQARLALRGPPGPMGYTGRPGPLGQPGSPGLKGESGDLGPQGPRGPQGLTGPPGKAGRRGRAGADGARGMPGDPGVKGDRGFDGLPGLPGEKGHRGDTGAQGLPGPPGEDGERGDDGEIGPRGLPGESGPRGLLGPKGPPGIPGPP

SEQ ID NO: 19075 - protein, 624 aa, Homo sapiens; identical to SEQ ID NO: 19074
  Payload ID: 3830
  Gene Symbol: COL11A2
  Gene Name: collagen, type XI, alpha 2
  ENSP ID: ENSP00000394196

SEQ ID NO: 19076 - protein, 290 aa, Homo sapiens
  Payload ID: 3830
  Gene Symbol: COL11A2
  Gene Name: collagen, type XI, alpha 2
  ENSP ID: ENSP00000396587
MERCSRCHRLLLLLPLVLGLSAAPGWAGAPPVDVLRALRFPSLPDGVRRAKGICPADVAYRVARPAQLSAPTRQLFPGGFPKDFSLLTVVRTRPGLQAPLLTLYSAQGVRQLGLELGPPVRFLYEDQTGRPQPPSQPVFRGLSLADGKWHRVAVAVKGQSVTLIVDCKKRVTRPLPRSARPVLDTHGVIIFGARILDEEVFEGDVQELAIVPGVQAAYESCEQKELECEGGQRERPQNQQPHRAQRSPQQQPSRLHRPQNQEPQSQVRELGEPPSAAHPREGRHPGISPP

SEQ ID NO: 19077 - protein, 624 aa, Homo sapiens
  Payload ID: 3830
  Gene Symbol: COL11A2
  Gene Name: collagen, type XI, alpha 2
  ENSP ID: ENSP00000398170
MERCSRCHRLLLLLPLVLGLSAAPGWAGAPPVDVLRALRFPSLPDGVRRAKGICPADVAYRVARPAQLSAPTRQLFPGGFPKDFSLLTVVRTRPGLQAPLLTLYSAQGVRQLGLELGRPVRFLYEDQTGRPQPPSQPVFRGLSLADGKWHRVAVAVKGQSVTLIVDCKKRVTRPLPRSARPVLDTHGVIIFGARILDEEVFEGDVQELAIVPGVQAAYESCEQKELECEGGQRERPQNQQPHRAQRSPQQQPSRLHRPQNQEPQSQPTESLYYDYEPPYYDVMTTGTTPDYQDPTPGEEEEILESSLLPPLEEEQTDLQVPPTADRFQAEEYGEGGTDPPEGPYDYTYGYGDDYREETELGPALSAETAHSGAAAHGPRGLKGEKGEPAVLEPGMLVEGPPGPEGPAGLIGPPGIQGNPGPVGDPGERGPPGRAGLPGSDGAPGPPGTSLMLPFRFGSGGGDKGPVVAAQEAQAQAILQQARLALRGPPGPMGYTGRPGPLGQPGSPGLKGESGDLGPQGPRGPQGLTGPPGKAGRRGRAGADGARGMPGDPGVKGDRGFDGLPGLPGEKGHRGDTGAQGLPGPPGEDGERGDDGEIGPRGLPGESGPRGLLGPKGPPGIPGPP

SEQ ID NO: 19078 - protein, 624 aa, Homo sapiens; identical to SEQ ID NO: 19077
  Payload ID: 3830
  Gene Symbol: COL11A2
  Gene Name: collagen, type XI, alpha 2
  ENSP ID: ENSP00000398256

SEQ ID NO: 19079 - protein, 290 aa, Homo sapiens; identical to SEQ ID NO: 19069
  Payload ID: 3830
  Gene Symbol: COL11A2
  Gene Name: collagen, type XI, alpha 2
  Uniprot ID: P13942
  ENSP ID: ENSP00000400813

SEQ ID NO: 19080 - protein, 333 aa, Homo sapiens; identical to SEQ ID NO: 19072
  Payload ID: 3830
  Gene Symbol: COL11A2
  Gene Name: collagen, type XI, alpha 2
  ENSP ID: ENSP00000402987
  MOD_RES (1)..(1): Any amino acid

SEQ ID NO: 19081 - protein, 1623 aa, Homo sapiens
  Payload ID: 3830
  Gene Symbol: COL11A2
  Gene Name: collagen, type XI, alpha 2
  ENSP ID: ENSP00000404513
  MOD_RES (1)..(1): Any amino acid
XAPPVDVLRALRFPSLPDGVRRAKGICPADVAYRVARPAQLSAPTRQLFPGGFPKDFSLLTVVRTRPGLQAPLLTLYSAQGVRQLGLELGRPVRFLYEDQTGRPQPPSQPVFRGLSLADGKWHRVAVAVKGQSVTLIVDCKKRVTRPLPRSARPVLDTHGVIIFGARILDEEVFEGDVQELAIVPGVQAAYESCEQKELECEGGQRERPQNQQPHRAQRSPQQQPSRLHRPQNQEPQSQDPTPGEEEEILESSLLPPLEEAAHGPRGLKGEKGEPAVLEPGMLVEGPPGPEGPAGLIGPPGIQGNPGPVGDPGERGPPGRAGLPGSDGAPGPPGTSLMLPFRFGSGGGDKGPVVAAQEAQAQAILQQARLALRGPPGPMGYTGRPGPLGQPGSPGLKGESGDLGPQGPRGPQGLTGPPGKAGRRGRAGADGARGMPGDPGVKGDRGFDGLPGLPGEKGHRGDTGAQGLPGPPGEDGERGDDGEIGPRGLPGESGPRGLLGPKGPPGIPGPPGVRGMDGPQGPKGSLGPQGEPGPPGQQGTPGTQGLPGPQGAIGPHGEKGPQGKPGLPGMPGSDGPPGHPGKEGPPGTKGNQGPSGPQGPLGYPGPRGVKGVDGIRGLKGHKGEKGEDGFPGFKGDIGVKGDRGEVGVPGSRGEDGPEGPKGRTGPTGDPGPPGLMGEKGKLGVPGLPGYPGRQGPKGSLGFPGFPGASGEKGARGLSGKSGPRGERGPTGPRGQRGPRGATGKSGAKGTSGGDGPHGPPGERGLPGPQGPNGFPGPKGPPGPPGKDGLPGHPGQRGEVGFQGKTGPPGPPGVVGPQGAAGETGPMGERGHPGPPGPPGEQGLPGTAGKEGTKGDPGPPGAPGKDGPAGLRGFPGERGLPGTAGGPGLKGNEGPSGPPGPAGSPGERGAAGSGGPIGPPGRPGPQGPPGAAGEKGVPGEKGPIGPTGRDGVQGPVGLPGPAGPPGVAGEDGDKGEVGDPGQKGTKGNKGEHGPPGPPGPIGPVGQPGAAGADGEPGARGPQGHFGAKGDEGTRGFNGPPGPIGLQGLPGPSGEKGETGDVGPMGPPGPPGPRGPAGPNGADGPQGPPGGVGNLGPPGEKGEPGESGSPGIQGEPGVKGPRGERGEKGESGQPGEPGPPGPKGPTGDDGPKGNPGPVGFPGDPGPPGEGGPRGQDGAKGDRGEDGEPGQPGSPGPTGENGPPGPLGKRGPAGSPGSEGRQGGKGAKGDPGAIGAPGKTGPVGPAGPAGKPGPDGLRGLPGSVGQQGRPGATGQAGPPGPVGPPGLPGLRGDAGAKGEKGHPGLIGLIGPPGEQGEKGDRGLPGPQGSPGQKGEMGIPGASGPIGPGGPPGLPGPAGPKGAKGATGPGGPKGEKGVQGPPGHPGPPGEVIQPLPIQMPKKTRRSVDGSRLMQEDEAIPTGGAPGSPGGLEEIFGSLDSLREEIEQMRRPTGTQDSPARTCQDLKLCHPELPDGEYWVDPNQGCARDAFRVFCNFTAGGETCVTPRDDVTQFSYVDSEGSPVGVVQLTFLRLLSVSAHQDVSYPCSGAARDGPLRLRGANEDELSPETSPYVKEFRDGCQTQQGRTVLEVRTPVLEQLPVLDASFSDLGAPPRRGGVLLGPVCFMG

SEQ ID NO: 19082 - protein, 624 aa, Homo sapiens; identical to SEQ ID NO: 19077
  Payload ID: 3830
  Gene Symbol: COL11A2
  Gene Name: collagen, type XI, alpha 2
  ENSP ID: ENSP00000405520

SEQ ID NO: 19083 - protein, 290 aa, Homo sapiens; identical to SEQ ID NO: 19069
  Payload ID: 3830
  Gene Symbol: COL11A2
  Gene Name: collagen, type XI, alpha 2
  Uniprot ID: P13942
  ENSP ID: ENSP00000406347

SEQ ID NO: 19084 - protein, 1650 aa, Homo sapiens
  Payload ID: 3830
  Gene Symbol: COL11A2
  Gene Name: collagen, type XI, alpha 2
  ENSP ID: ENSP00000408123
MERCSRCHRLLLLLPLVLGLSAAPGWAGAPPVDVLRALRFPSLPDGVRRAKGICPADVAYRVARPAQLSAPTRQLFPGGFPKDFSLLTVVRTRPGLQAPLLTLYSAQGVRQLGLELGPPVRFLYEDQTGRPQPPSQPVFRGLSLADGKWHRVAVAVKGQSVTLIVDCKKRVTRPLPRSARPVLDTHGVIIFGARILDEEVFEGDVQELAIVPGVQAAYESCEQKELECEGGQRERPQNQQPHRAQRSPQQQPSRLHRPQNQEPQSQDPTPGEEEEILESSLLPPLEEAAHGPRGLKGEKGEPAVLEPGMLVEGPPGPEGPAGLIGPPGIQGNPGPVGDPGERGPPGRAGLPGSDGAPGPPGTSLMLPFRFGSGGGDKGPVVAAQEAQAQAILQQARLALRGPPGPMGYTGRPGPLGQPGSPGLKGESGDLGPQGPRGPQGLTGPPGKAGRRGRAGADGARGMPGDPGVKGDRGFDGLPGLPGEKGHRGDTGAQGLPGPPGEDGERGDDGEIGPRGLPGESGPRGLLGPKGPPGIPGPPGVRGMDGPQGPKGSLGPQGEPGPPGQQGTPGTQGLPGPQGAIGPHGEKGPQGKPGLPGMPGSDGPPGHPGKEGPPGTKGNQGPSGPQGPLGYPGPRGVKGVDGIRGLKGHKGEKGEDGFPGFKGDIGVKGDRGEVGVPGSRGEDGPEGPKGRTGPTGDPGPPGLMGEKGKLGVPGLPGYPGRQGPKGSLGFPGFPGASGEKGARGLSGKSGPRGERGPTGPRGQRGPRGATGKSGAKGTSGGDGPHGPPGERGLPGPQGPNGFPGPKGPPGPPGKDGLPGHPGQRGEVGFQGKTGPPGPPGVVGPQGAAGETGPMGERGHPGPPGPPGEQGLPGTAGKEGTKGDPGPPGAPGKDGPAGLRGFPGERGLPGTAGGPGLKGNEGPSGPPGPAGSPGERGAAGSGGPIGPPGRPGPQGPPGAAGEKGVPGEKGPIGPTGRDGVQGPVGLPGPAGPPGVAGEDGDKGEVGDPGQKGTKGNKGEHGPPGPPGPIGPVGQPGAAGADGEPGARGPQGHFGAKGDEGTRGFNGPPGPIGLQGLPGPSGEKGETGDVGPMGPPGPPGPRGPAGPNGADGPQGPPGGVGNLGPPGEKGEPGESGSPGIQGEPGVKGPRGERGEKGESGQPGEPGPPGPKGPTGDDGPKGNPGPVGFPGDPGPPGEGGPRGQDGAKGDRGEDGEPGQPGSPGPTGENGPPGPLGKRGPAGSPGSEGRQGGKGAKGDPGAIGAPGKTGPVGPAGPAGKPGPDGLRGLPGSVGQQGRPGATGQAGPPGPVGPPGLPGLRGDAGAKGEKGHPGLIGLIGPPGEQGEKGDRGLPGPQGSPGQKGEMGIPGASGPIGPGGPPGLPGPAGPKGAKGATGPGGPKGEKGVQGPPGHPGPPGEVIQPLPIQMPKKTRRSVDGSRLMQEDEAIPTGGAPGSPGGLEEIFGSLDSLREEIEQMRRPTGTQDSPARTCQDLKLCHPELPDGEYWVDPNQGCARDAFRVFCNFTAGGETCVTPRDDVTQFSYVDSEGSPVGVVQLTFLRLLSVSAHQDVSYPCSGAARDGPLRLRGANEDELSPETSPYVKEFRDGCQTQQGRTVLEVRTPVLEQLPVLDASFSDLGAPPRRGGVLLGPVCFMG

SEQ ID NO: 19085 - protein, 263 aa, Homo sapiens
  Payload ID: 3830
  Gene Symbol: COL11A2
  Gene Name: collagen, type XI, alpha 2
  ENSP ID: ENSP00000408523
  MOD_RES (1)..(1): Any amino acid
XAPPVDVLRALRFPSLPDGVRRAKGICPADVAYRVARPAQLSAPTRQLFPGGFPKDFSLLTVVRTRPGLQAPLLTLYSAQGVRQLGLELGRPVRFLYEDQTGRPQPPSQPVFRGLSLADGKWHRVAVAVKGQSVTLIVDCKKRVTRPLPRSARPVLDTHGVIIFGARILDEEVFEGDVQELAIVPGVQAAYESCEQKELECEGGQRERPQNQQPHRAQRSPQQQPSRLHRPQNQEPQSQVRELGEPPSAAHPREGRHPGISPP

SEQ ID NO: 19086 - protein, 1650 aa, Homo sapiens; identical to SEQ ID NO: 19067
  Payload ID: 3830
  Gene Symbol: COL11A2
  Gene Name: collagen, type XI, alpha 2
  ENSP ID: ENSP00000408627

SEQ ID NO: 19087 - protein, 290 aa, Homo sapiens; identical to SEQ ID NO: 19069
  Payload ID: 3830
  Gene Symbol: COL11A2
  Gene Name: collagen, type XI, alpha 2
  Uniprot ID: P13942
  ENSP ID: ENSP00000410284

SEQ ID NO: 19088 - protein, 597 aa, Homo sapiens
  Payload ID: 3830
  Gene Symbol: COL11A2
  Gene Name: collagen, type XI, alpha 2
  ENSP ID: ENSP00000415296
  MOD_RES (1)..(1): Any amino acid
XAPPVDVLRALRFPSLPDGVRRAKGICPADVAYRVARPAQLSAPTRQLFPGGFPKDFSLLTVVRTRPGLQAPLLTLYSAQGVRQLGLELGRPVRFLYEDQTGRPQPPSQPVFRGLSLADGKWHRVAVAVKGQSVTLIVDCKKRVTRPLPRSARPVLDTHGVIIFGARILDEEVFEGDVQELAIVPGVQAAYESCEQKELECEGGQRERPQNQQPHRAQRSPQQQPSRLHRPQNQEPQSQPTESLYYDYKPPYYDVMTTGTTPDYQDPTPGEEEEILESSLLPPLEEEQTDLQVPPTADRFQAEEYGEGGTDPPEGPYDYTYGYGDDYREETELGPALSAETAHSGAAAHGPRGLKGEKGEPAVLEPGMLVEGPPGPEGPAGLIGPPGIQGNPGPVGDPGERGPPGRAGLPGSDGAPGPPGTSLMLPFRFGSGGGDKGPVVAAQEAQAQAILQQARLALRGPPGPMGYTGRPGPLGQPGSPGLKGESGDLGPQGPRGPQGLTGPPGKAGRRGRAGADGARGMPGDPGVKGDRGFDGLPGLPGEKGHRGDTGAQGLPGPPGEDGERGDDGEIGPRGLPGESGPRGLLGPKGPPGIPGPP

SEQ ID NO: 19089 - protein, 624 aa, Homo sapiens
  Payload ID: 3830
  Gene Symbol: COL11A2
  Gene Name: collagen, type XI, alpha 2
  ENSP ID: ENSP00000416619
MERCSRCHRLLLLLPLVLGLSAAPGWAGAPPVDVLRALRFPSLPDGVRRAKGICPADVAYRVARPAQLSAPTRQLFPGGFPKDFSLLTVVRTRPGLQAPLLTLYSAQGVRQLGLELGPPVRFLYEDQTGRPQPPSQPVFRGLSLADGKWHRVAVAVKGQSVTLIVDCKKRVTRPLPRSARPVLDTHGVIIFGARILDEEVFEGDVQELAIVPGVQAAYESCEQKELECEGGQRERPQNQQPHRAQRSPQQQPSRLHRPQNQEPQSQPTESLYYDYKPPYYDVMTTGTTPDYQDPTPGEEEEILESSLLPPLEEEQTDLQVPPTADRFQAEEYGEGGTDPPEGPYDYTYGYGDDYREETELGPALSAETAHSGAAAHGPRGLKGEKGEPAVLEPGMLVEGPPGPEGPAGLIGPPGIQGNPGPVGDPGERGPPGRAGLPGSDGAPGPPGTSLMLPFRFGSGGGDKGPVVAAQEAQAQAILQQARLALRGPPGPMGYTGRPGPLGQPGSPGLKGESGDLGPQGPRGPQGLTGPPGKAGRRGRAGADGARGMPGDPGVKGDRGFDGLPGLPGEKGHRGDTGAQGLPGPPGEDGERGDDGEIGPRGLPGESGPRGLLGPKGPPGIPGPP

SEQ ID NO: 19090 - protein, 1629 aa, Homo sapiens; identical to SEQ ID NO: 19066
  Payload ID: 3830
  Gene Symbol: COL11A2
  Gene Name: collagen, type XI, alpha 2
  ENSP ID: ENSP00000446870

SEQ ID NO: 19091 - protein, 1736 aa, Homo sapiens; identical to SEQ ID NO: 19065
  Payload ID: 3830
  Gene Symbol: COL11A2
  Gene Name: collagen, type XI, alpha 2
  ENSP ID: ENSP00000447062

SEQ ID NO: 19092 - protein, 1629 aa, Homo sapiens
  Payload ID: 3830
  Gene Symbol: COL11A2
  Gene Name: collagen, type XI, alpha 2
  Uniprot ID: P13942
  ENSP ID: ENSP00000447864
MERCSRCHRLLLLLPLVLGLSAAPGWAGAPPVDVLRALRFPSLPDGVRRAKGICPADVAYRVARPAQLSAPTRQLFPGGFPKDFSLLTVVRTRPGLQAPLLTLYSAQGVRQLGLELGRPVRFLYEDQTGRPQPPSQPVFRGLSLADGKWHRVAVAVKGQSVTLIVDCKKRVTRPLPRSARPVLDTHGVIIFGARILDEEVFEGDVQELAIVPGVQAAYESCEQKELECEGGQRERPQNQQPHRAQRSPQQQPSRLHRPQNQEPQSQAAHGPRGLKGEKGEPAVLEPGMLVEGPPGPEGPAGLIGPPGIQGNPGPVGDPGERGPPGRAGLPGSDGAPGPPGTSLMLPFRFGSGGGDKGPVVAAQEAQAQAILQQARLALRGPPGPMGYTGRPGPLGQPGSPGLKGESGDLGPQGPRGPQGLTGPPGKAGRRGRAGADGARGMPGDPGVKGDRGFDGLPGLPGEKGHRGDTGAQGLPGPPGEDGERGDDGEIGPRGLPGESGPRGLLGPKGPPGIPGPPGVRGMDGPQGPKGSLGPQGEPGPPGQQGTPGTQGLPGPQGAIGPHGEKGPQGKPGLPGMPGSDGPPGHPGKEGPPGTKGNQGPSGPQGPLGYPGPRGVKGVDGIRGLKGHKGEKGEDGFPGFKGDIGVKGDRGEVGVPGSRGEDGPEGPKGRTGPTGDPGPPGLMGEKGKLGVPGLPGYPGRQGPKGSLGFPGFPGASGEKGARGLSGKSGPRGERGPTGPRGQRGPRGATGKSGAKGTSGGDGPHGPPGERGLPGPQGPNGFPGPKGPLGPPGKDGLPGHPGQRGEVGFQGKTGPPGPPGVVGPQGAAGETGPMGERGHPGPPGPPGEQGLPGTAGKEGTKGDPGPPGAPGKDGPAGLRGFPGERGLPGTAGGPGLKGNEGPSGPPGPAGSPGERGAAGSGGPIGPPGRPGPQGPPGAAGEKGVPGEKGPIGPTGRDGVQGPVGLPGPAGPPGVAGEDGDKGEVGDPGQKGTKGNKGEHGPPGPPGPIGPVGQPGAAGADGEPGARGPQGHFGAKGDEGTRGFNGPPGPIGLQGLPGPSGEKGETGDVGPMGPPGPPGPRGPAGPNGADGPQGPPGGVGNLGPPGEKGEPGESGSPGIQGEPGVKGPRGERGEKGESGQPGEPGPPGPKGPTGDDGPKGNPGPVGFPGDPGPPGEGGPRGQDGAKGDRGEDGEPGQPGSPGPTGENGPPGPLGKRGPAGSPGSEGRQGGKGAKGDPGAIGAPGKTGPVGPAGPAGKPGPDGLRGLPGSVGQQGRPGATGQAGPPGPVGPPGLPGLRGDAGAKGEKGHPGLIGLIGPPGEQGEKGDRGLPGPQGSPGQKGEMGIPGASGPIGPGGPPGLPGPAGPKGAKGATGPGGPKGEKGVQGPPGHPGPPGEVIQPLPIQMPKKTRRSVDGSRLMQEDEAIPTGGAPGSPGGLEEIFGSLDSLREEIEQMRRPTGTQDSPARTCQDLKLCHPELPDGEYWVDPNQGCARDAFRVFCNFTAGGETCVTPRDDVTQFSYVDSEGSPVGVVQLTFLRLLSVSAHQDVSYPCSGAARDGPLRLRGANEDELSPETSPYVKEFRDGCQTQQGRTVLEVRTPVLEQLPVLDASFSDLGAPPRRGGVLLGPVCFMG

SEQ ID NO: 19093 - protein, 1736 aa, Homo sapiens
  Payload ID: 3830
  Gene Symbol: COL11A2
  Gene Name: collagen, type XI, alpha 2
  ENSP ID: ENSP00000448701
MERCSRCHRLLLLLPLVLGLSAAPGWAGAPPVDVLRALRFPSLPDGVRRAKGICPADVAYRVARPAQLSAPTRQLFPGGFPKDFSLLTVVRTRPGLQAPLLTLYSAQGVRQLGLELGRPVRFLYEDQTGRPQPPSQPVFRGLSLADGKWHRVAVAVKGQSVTLIVDCKKRVTRPLPRSARPVLDTHGVIIFGARILDEEVFEGDVQELAIVPGVQAAYESCEQKELECEGGQRERPQNQQPHRAQRSPQQQPSRLHRPQNQEPQSQPTESLYYDYKPPYYDVMTTGTTPDYQDPTPGEEEEILESSLLPPLEEEQTDLQVPPTADRFQAEEYGEGGTDPPEGPYDYTYGYGDDYREETELGPALSAETAHSGAAAHGPRGLKGEKGEPAVLEPGMLVEGPPGPEGPAGLIGPPGIQGNPGPVGDPGERGPPGRAGLPGSDGAPGPPGTSLMLPFRFGSGGGDKGPVVAAQEAQAQAILQQARLALRGPPGPMGYTGRPGPLGQPGSPGLKGESGDLGPQGPRGPQGLTGPPGKAGRRGRAGADGARGMPGDPGVKGDRGFDGLPGLPGEKGHRGDTGAQGLPGPPGEDGERGDDGEIGPRGLPGESGPRGLLGPKGPPGIPGPPGVRGMDGPQGPKGSLGPQGEPGPPGQQGTPGTQGLPGPQGAIGPHGEKGPQGKPGLPGMPGSDGPPGHPGKEGPPGTKGNQGPSGPQGPLGYPGPRGVKGVDGIRGLKGHKGEKGEDGFPGFKGDIGVKGDRGEVGVPGSRGEDGPEGPKGRTGPTGDPGPPGLMGEKGKLGVPGLPGYPGRQGPKGSLGFPGFPGASGEKGARGLSGKSGPRGERGPTGPRGQRGPRGATGKSGAKGTSGGDGPHGPPGERGLPGPQGPNGFPGPKGPPGPPGKDGLPGHPGQRGEVGFQGKTGPPGPPGVVGPQGAAGETGPMGERGHPGPPGPPGEQGLPGTAGKEGTKGDPGPPGAPGKDGPAGLRGFPGERGLPGTAGGPGLKGNEGPSGPPGPAGSPGERGAAGSGGPIGPPGRPGPQGPPGAAGEKGVPGEKGPIGPTGRDGVQGPVGLPGPAGPPGVAGEDGDKGEVGDPGQKGTKGNKGEHGPPGPPGPIGPVGQPGAAGADGEPGARGPQGHFGAKGDEGTRGFNGPPGPIGLQGLPGPSGEKGETGDVGPMGPPGPPGPRGPAGPNGADGPQGPPGGVGNLGPPGEKGEPGESGSPGIQGEPGVKGPRGERGEKGESGQPGEPGPPGPKGPTGDDGPKGNPGPVGFPGDPGPPGEGGPRGQDGAKGDRGEDGEPGQPGSPGPTGENGPPGPLGKRGPAGSPGSEGRQGGKGAKGDPGAIGAPGKTGPVGPAGPAGKPGPDGLRGLPGSVGQQGRPGATGQAGPPGPVGPPGLPGLRGDAGAKGEKGHPGLIGLIGPPGEQGEKGDRGLPGPQGSPGQKGEMGIPGASGPIGPGGPPGLPGPAGPKGAKGATGPGGPKGEKGVQGPPGHPGPPGEVIQPLPIQMPKKTRRSVDGSRLMQEDEAIPTGGAPGSPGGLEEIFGSLDSLREEIEQMRRPTGTQDSPARTCQDLKLCHPELPDGEYWVDPNQGCARDAFRVFCNFTAGGETCVTPRDDVTQFSYVDSEGSPVGVVQLTFLRLLSVSAHQDVSYPCSGAARDGPLRLRGANEDELSPETSPYVKEFRDGCQTQQGRTVLEVRTPVLEQLPVLDASFSDLGAPPRRGGVLLGPVCFMG

SEQ ID NO: 19094 - protein, 1736 aa, Homo sapiens
  Payload ID: 3830
  Gene Symbol: COL11A2
  Gene Name: collagen, type XI, alpha 2
  ENSP ID: ENSP00000448715
MERCSRCHRLLLLLPLVLGLSAAPGWAGAPPVDVLRALRFPSLPDGVRRAKGICPADVAYRVARPAQLSAPTRQLFPGGFPKDFSLLTVVRTRPGLQAPLLTLYSAQGVRQLGLELGPPVRFLYEDQTGRPQPPSQPVFRGLSLADGKWHRVAVAVKGQSVTLIVDCKKRVTRPLPRSARPVLDTHGVIIFGARILDEEVFEGDVQELAIVPGVQAAYESCEQKELECEGGQRERPQNQQPHRAQRSPQQQPSRLHRPQNQEPQSQPTESLYYDYKPPYYDVMTTGTTPDYQDPTPGEEEEILESSLLPPLEEEQTDLQVPPTADRFQAEEYGEGGTDPPEGPYDYTYGYGDDYREETELGPALSAETAHSGAAAHGPRGLKGEKGEPAVLEPGMLVEGPPGPEGPAGLIGPPGIQGNPGPVGDPGERGPPGRAGLPGSDGAPGPPGTSLMLPFRFGSGGGDKGPVVAAQEAQAQAILQQARLALRGPPGPMGYTGRPGPLGQPGSPGLKGESGDLGPQGPRGPQGLTGPPGKAGRRGRAGADGARGMPGDPGVKGDRGFDGLPGLPGEKGHRGDTGAQGLPGPPGEDGERGDDGEIGPRGLPGESGPRGLLGPKGPPGIPGPPGVRGMDGPQGPKGSLGPQGEPGPPGQQGTPGTQGLPGPQGAIGPHGEKGPQGKPGLPGMPGSDGPPGHPGKEGPPGTKGNQGPSGPQGPLGYPGPRGVKGVDGIRGLKGHKGEKGEDGFPGFKGDIGVKGDRGEVGVPGSRGEDGPEGPKGRTGPTGDPGPPGLMGEKGKLGVPGLPGYPGRQGPKGSLGFPGFPGASGEKGARGLSGKSGPRGERGPTGPRGQRGPRGATGKSGAKGTSGGDGPHGPPGERGLPGPQGPNGFPGPKGPPGPPGKDGLPGHPGQRGEVGFQGKTGPPGPPGVVGPQGAAGETGPMGERGHPGPPGPPGEQGLPGTAGKEGTKGDPGPPGAPGKDGPAGLRGFPGERGLPGTAGGPGLKGNEGPSGPPGPAGSPGERGAAGSGGPIGPPGRPGPQGPPGAAGEKGVPGEKGPIGPTGRDGVQGPVGLPGPAGPPGVAGEDGDKGEVGDPGQKGTKGNKGEHGPPGPPGPIGPVGQPGAAGADGEPGARGPQGHFGAKGDEGTRGFNGPPGPIGLQGLPGPSGEKGETGDVGPMGPPGPPGPRGPAGPNGADGPQGPPGGVGNLGPPGEKGEPGESGSPGIQGEPGVKGPRGERGEKGESGQPGEPGPPGPKGPTGDDGPKGNPGPVGFPGDPGPPGEGGPRGQDGAKGDRGEDGEPGQPGSPGPTGENGPPGPLGKRGPAGSPGSEGRQGGKGAKGDPGAIGAPGKTGPVGPAGPAGKPGPDGLRGLPGSVGQQGRPGATGQAGPPGPVGPPGLPGLRGDAGAKGEKGHPGLIGLIGPPGEQGEKGDRGLPGPQGSPGQKGEMGIPGASGPIGPGGPPGLPGPAGPKGAKGATGPGGPKGEKGVQGPPGHPGPPGEVIQPLPIQMPKKTRRSVDGSRLMQEDEAIPTGGAPGSPGGLEEIFGSLDSLREEIEQMRRPTGTQDSPARTCQDLKLCHPELPDGEYWVDPNQGCARDAFRVFCNFTAGGETCVTPRDDVTQFSYVDSEGSPVGVVQLTFLRLLSVSAHQDVSYPCSGAARDGPLRLRGANEDELSPETSPYVKEFRDGCQTQQGRTVLEVRTPVLEQLPVLDASFSDLGAPPRRGGVLLGPVCFMG

SEQ ID NO: 19095 - protein, 1736 aa, Homo sapiens; identical to SEQ ID NO: 19093
  Payload ID: 3830
  Gene Symbol: COL11A2
  Gene Name: collagen, type XI, alpha 2
  ENSP ID: ENSP00000448931

SEQ ID NO: 19096 - protein, 1736 aa, Homo sapiens
  Payload ID: 3830
  Gene Symbol: COL11A2
  Gene Name: collagen, type XI, alpha 2
  Uniprot ID: P13942
  ENSP ID: ENSP00000449275
MERCSRCHRLLLLLPLVLGLSAAPGWAGAPPVDVLRALRFPSLPDGVRRAKGICPADVAYRVARPAQLSAPTRQLFPGGFPKDFSLLTVVRTRPGLQAPLLTLYSAQGVRQLGLELGRPVRFLYEDQTGRPQPPSQPVFRGLSLADGKWHRVAVAVKGQSVTLIVDCKKRVTRPLPRSARPVLDTHGVIIFGARILDEEVFEGDVQELAIVPGVQAAYESCEQKELECEGGQRERPQNQQPHRAQRSPQQQPSRLHRPQNQEPQSQPTESLYYDYEPPYYDVMTTGTTPDYQDPTPGEEEEILESSLLPPLEEEQTDLQVPPTADRFQAEEYGEGGTDPPEGPYDYTYGYGDDYREETELGPALSAETAHSGAAAHGPRGLKGEKGEPAVLEPGMLVEGPPGPEGPAGLIGPPGIQGNPGPVGDPGERGPPGRAGLPGSDGAPGPPGTSLMLPFRFGSGGGDKGPVVAAQEAQAQAILQQARLALRGPPGPMGYTGRPGPLGQPGSPGLKGESGDLGPQGPRGPQGLTGPPGKAGRRGRAGADGARGMPGDPGVKGDRGFDGLPGLPGEKGHRGDTGAQGLPGPPGEDGERGDDGEIGPRGLPGESGPRGLLGPKGPPGIPGPPGVRGMDGPQGPKGSLGPQGEPGPPGQQGTPGTQGLPGPQGAIGPHGEKGPQGKPGLPGMPGSDGPPGHPGKEGPPGTKGNQGPSGPQGPLGYPGPRGVKGVDGIRGLKGHKGEKGEDGFPGFKGDIGVKGDRGEVGVPGSRGEDGPEGPKGRTGPTGDPGPPGLMGEKGKLGVPGLPGYPGRQGPKGSLGFPGFPGASGEKGARGLSGKSGPRGERGPTGPRGQRGPRGATGKSGAKGTSGGDGPHGPPGERGLPGPQGPNGFPGPKGPLGPPGKDGLPGHPGQRGEVGFQGKTGPPGPPGVVGPQGAAGETGPMGERGHPGPPGPPGEQGLPGTAGKEGTKGDPGPPGAPGKDGPAGLRGFPGERGLPGTAGGPGLKGNEGPSGPPGPAGSPGERGAAGSGGPIGPPGRPGPQGPPGAAGEKGVPGEKGPIGPTGRDGVQGPVGLPGPAGPPGVAGEDGDKGEVGDPGQKGTKGNKGEHGPPGPPGPIGPVGQPGAAGADGEPGARGPQGHFGAKGDEGTRGFNGPPGPIGLQGLPGPSGEKGETGDVGPMGPPGPPGPRGPAGPNGADGPQGPPGGVGNLGPPGEKGEPGESGSPGIQGEPGVKGPRGERGEKGESGQPGEPGPPGPKGPTGDDGPKGNPGPVGFPGDPGPPGEGGPRGQDGAKGDRGEDGEPGQPGSPGPTGENGPPGPLGKRGPAGSPGSEGRQGGKGAKGDPGAIGAPGKTGPVGPAGPAGKPGPDGLRGLPGSVGQQGRPGATGQAGPPGPVGPPGLPGLRGDAGAKGEKGHPGLIGLIGPPGEQGEKGDRGLPGPQGSPGQKGEMGIPGASGPIGPGGPPGLPGPAGPKGAKGATGPGGPKGEKGVQGPPGHPGPPGEVIQPLPIQMPKKTRRSVDGSRLMQEDEAIPTGGAPGSPGGLEEIFGSLDSLREEIEQMRRPTGTQDSPARTCQDLKLCHPELPDGEYWVDPNQGCARDAFRVFCNFTAGGETCVTPRDDVTQFSYVDSEGSPVGVVQLTFLRLLSVSAHQDVSYPCSGAARDGPLRLRGANEDELSPETSPYVKEFRDGCQTQQGRTVLEVRTPVLEQLPVLDASFSDLGAPPRRGGVLLGPVCFMG

SEQ ID NO: 19097 - protein, 1629 aa, Homo sapiens
  Payload ID: 3830
  Gene Symbol: COL11A2
  Gene Name: collagen, type XI, alpha 2
  ENSP ID: ENSP00000449320
MERCSRCHRLLLLLPLVLGLSAAPGWAGAPPVDVLRALRFPSLPDGVRRAKGICPADVAYRVARPAQLSAPTRQLFPGGFPKDFSLLTVVRTRPGLQAPLLTLYSAQGVRQLGLELGPPVRFLYEDQTGRPQPPSQPVFRGLSLADGKWHRVAVAVKGQSVTLIVDCKKRVTRPLPRSARPVLDTHGVIIFGARILDEEVFEGDVQELAIVPGVQAAYESCEQKELECEGGQRERPQNQQPHRAQRSPQQQPSRLHRPQNQEPQSQAAHGPRGLKGEKGEPAVLEPGMLVEGPPGPEGPAGLIGPPGIQGNPGPVGDPGERGPPGRAGLPGSDGAPGPPGTSLMLPFRFGSGGGDKGPVVAAQEAQAQAILQQARLALRGPPGPMGYTGRPGPLGQPGSPGLKGESGDLGPQGPRGPQGLTGPPGKAGRRGRAGADGARGMPGDPGVKGDRGFDGLPGLPGEKGHRGDTGAQGLPGPPGEDGERGDDGEIGPRGLPGESGPRGLLGPKGPPGIPGPPGVRGMDGPQGPKGSLGPQGEPGPPGQQGTPGTQGLPGPQGAIGPHGEKGPQGKPGLPGMPGSDGPPGHPGKEGPPGTKGNQGPSGPQGPLGYPGPRGVKGVDGIRGLKGHKGEKGEDGFPGFKGDIGVKGDRGEVGVPGSRGEDGPEGPKGRTGPTGDPGPPGLMGEKGKLGVPGLPGYPGRQGPKGSLGFPGFPGASGEKGARGLSGKSGPRGERGPTGPRGQRGPRGATGKSGAKGTSGGDGPHGPPGERGLPGPQGPNGFPGPKGPPGPPGKDGLPGHPGQRGEVGFQGKTGPPGPPGVVGPQGAAGETGPMGERGHPGPPGPPGEQGLPGTAGKEGTKGDPGPPGAPGKDGPAGLRGFPGERGLPGTAGGPGLKGNEGPSGPPGPAGSPGERGAAGSGGPIGPPGRPGPQGPPGAAGEKGVPGEKGPIGPTGRDGVQGPVGLPGPAGPPGVAGEDGDKGEVGDPGQKGTKGNKGEHGPPGPPGPIGPVGQPGAAGADGEPGARGPQGHFGAKGDEGTRGFNGPPGPIGLQGLPGPSGEKGETGDVGPMGPPGPPGPRGPAGPNGADGPQGPPGGVGNLGPPGEKGEPGESGSPGIQGEPGVKGPRGERGEKGESGQPGEPGPPGPKGPTGDDGPKGNPGPVGFPGDPGPPGEGGPRGQDGAKGDRGEDGEPGQPGSPGPTGENGPPGPLGKRGPAGSPGSEGRQGGKGAKGDPGAIGAPGKTGPVGPAGPAGKPGPDGLRGLPGSVGQQGRPGATGQAGPPGPVGPPGLPGLRGDAGAKGEKGHPGLIGLIGPPGEQGEKGDRGLPGPQGSPGQKGEMGIPGASGPIGPGGPPGLPGPAGPKGAKGATGPGGPKGEKGVQGPPGHPGPPGEVIQPLPIQMPKKTRRSVDGSRLMQEDEAIPTGGAPGSPGGLEEIFGSLDSLREEIEQMRRPTGTQDSPARTCQDLKLCHPELPDGEYWVDPNQGCARDAFRVFCNFTAGGETCVTPRDDVTQFSYVDSEGSPVGVVQLTFLRLLSVSAHQDVSYPCSGAARDGPLRLRGANEDELSPETSPYVKEFRDGCQTQQGRTVLEVRTPVLEQLPVLDASFSDLGAPPRRGGVLLGPVCFMG

SEQ ID NO: 19098 - protein, 1629 aa, Homo sapiens; identical to SEQ ID NO: 19066
  Payload ID: 3830
  Gene Symbol: COL11A2
  Gene Name: collagen, type XI, alpha 2
  ENSP ID: ENSP00000450046

SEQ ID NO: 19099 - protein, 1629 aa, Homo sapiens; identical to SEQ ID NO: 19066
  Payload ID: 3830
  Gene Symbol: COL11A2
  Gene Name: collagen, type XI, alpha 2
  ENSP ID: ENSP00000450084

SEQ ID NO: 19100 - protein, 1899 aa, Homo sapiens
  Payload ID: 3831
  Gene Symbol: COL12A1
  Gene Name: collagen, type XII, alpha 1
  Uniprot ID: Q99715
  ENSP ID: ENSP00000305147
MRSRLPPALAALGAALLLSSIEAEGMECLTRAEADIVLLVDGSWSIGRANFRTVRSFISRIVEVFDIGPKRVQIALAQYSGDPRTEWQLNAHRDKKSLLQAVANLPYKGGNTLTGMALNFIRQQNFRTQAGMRPRARKIGVLITDGKSQDDVEAPSKKLKDEGVELFAIGIKNADEVELKMIATDPDDTHAYNVADFESLSRIVDDLTINLCNSVKGPGDLEAPSNLVISERTHRSFRVSWTPPSDSVDRYKVEYYPVSGGKRQEFYVSRMETSTVLKDLKPETEYVVNVYSVVEDEYSEPLKGTEKTLPVPVVSLNIYDVGPTTMHVQWQPVGGATGYILSYKPVKDTEPTRPKEVRLGPTVNDMQLTDLVPNTEYAVTVQAVLHDLTSEPVTVREVTLPLPRPQDLKLRDVTHSTMNVFWEPVPGKVRKYIVRYKTPEEDVKEVEVDRSETSTSLKDLFSQTLYTVSVSAVHDEGESPPVTAQETTRPVPAPTNLKITEVTSEGFRGTWDHGASDVSLYRITWAPFGSSDKMETILNGDENTLVFENLNPNTIYEVSITAIYPDESESDDLIGSERTLPILTTQAPKSGPRNLQVYNATSNSLTVKWDPASGRVQKYRITYQPSTGEGNEQTTTIGGRQNSVVLQKLKPDTPYTITVSSLYPDGEGGRMTGRGKTKPLNTVRNLRVYDPSTSTLNVRWDHAEGNPRQYKLFYAPAAGGPEELVPIPGNTNYAILRNLQPDTSYTVTVVPVYTEGDGGRTSDTGRTLMRGLARNVQVYNPTPNSLDVRWDPAPGPVLQYRVVYSPVDGTRPSESIVVPGNTRMVHLERLIPDTLYSVNLVALYSDGEGNPSPAQGRTLPRSGPRNLRVFGETTNSLSVAWDHADGPVQQYRIIYSPTVGDPIDEYTTVPGRRNNVILQPLQPDTPYKITVIAVYEDGDGGHLTGNGRTVGLLPPQNIHISDEWYTRFRVSWDPSPSPVLGYKIVYKPVGSNEPMEAFVGEMTSYTLHNLNPSTTYDVNVYAQYDSGLSVPLTDQGTTLYLNVTDLKTYQIGWDTFCVKWSPHRAATSYRLKLSPADGTRGQEITVRGSETSHCFTGLSPDTDYGVTVFVQTPNLEGPGVSVKEHTTVKPTEAPTEPPTPPPPPTIPPARDVCKGAKADIVFLTDASWSIGDDNFNKVVKFIFNTVGGFDEISPAGIQVSFVQYSDEVKSEFKLNTYNDKALALGALQNIRYRGGNTRTGKALTFIKEKVLTWESGMRKNVPKVLVVVTDGRSQDEVKKAALVIQQSGFSVFVVGVADVDYNELANIASKPSERHVFIVDDFESFEKIEDNLITFVCETATSSCPLIYLDGYTSPGFKMLEAYNLTEKNFASVQGVSLESGSFPSYSAYRIQKNAFVNQPTADLHPNGLPPSYTIILLFRLLPETPSDPFAIWQITDRDYKPQVGVIADPSSKTLSFFNKDTRGEVQTVTFDTEEVKTLFYGSFHKVHIVVTSKSVKIYIDCYEIIEKDIKEAGNITTDGYEILGKLLKGERKSAAFQIQSFDIVCSPVWTSRDRCCDIPSRRDEGKCPAFPNSCTCTQDSVGPPGPPGPAGGPGAKGPRGERGISGAIGPPGPRGDIGPPGPQGPPGPQGPNGLSIPGEQGRQGMKGDAGEPGLPGRTGTPGLPGPPGPMGPPGDRGFTGKDGAMGPRGPPGPPGSPGSPGVTGPSGKPGKPGDHGRPGPSGLKGEKGDRGDIASQNMMRAVARQVCEQLISGQMNRFNQMLNQIPNDYQSSRNQPGPPGPPGPPGSAGARGEPGPGGRPGFPGTPGMQGPPGERGLPGEKGERGTGSSGPRGLPGPPGPQGESRTGPPGSTGSRGPPGPPGRPGNSGIRGPPGPPGYCDSSQCASIPYNGQGYPGSG

SEQ ID NO: 19101 - protein, 3063 aa, Homo sapiens
  Payload ID: 3831
  Gene Symbol: COL12A1
  Gene Name: collagen, type XII, alpha 1
  Uniprot ID: Q99715
  ENSP ID: ENSP00000325146
MRSRLPPALAALGAALLLSSIEAEVDPPSDLNFKIIDENTVHMSWAKPVDPIVGYRITVDPTTDGPTKEFTLSASTTETLLSELVPETEYVVTITSYDEVEESVPVIGQLTIQTGSSTKPVEKKPGKTEIQKCSVSAWTDLVFLVDGSWSVGRNNFKYILDFIAALVSAFDIGEEKTRVGVVQYSSDTRTEFNLNQYYQRDELLAAIKKIPYKGGNTMTGDAIDYLVKNTFTESAGARVGFPKVAIIITDGKSQDEVEIPARELRNVGVEVFSLGIKAADAKELKQIASTPSLNHVFNVANFDAIVDIQNEIISQVCSGVDEQLGELVSGEEVVEPPSNLIAMEVSSKYVKLNWNPSPSPVTGYKVILTPMTAGSRQHALSVGPQTTTLSVRDLSADTEYQISVSAMKGMTSSEPISIMEKTQPMKVQVECSRGVDIKADIVFLVDGSYSIGIANFVKVRAFLEVLVKSFEISPNRVQISLVQYSRDPHTEFTLKKFTKVEDIIEAINTFPYRGGSTNTGKAMTYVREKIFVPSKGSRSNVPKVMILITDGKSSDAFRDPAIKLRNSDVEIFAVGVKDAVRSELEAIASPPAETHVFTVEDFDAFQRISFELTQSICLRIEQELAAIKKKAYVPPKDLSFSEVTSYGFKTNWSPAGENVFSYHITYKEAAGDDEVTVVEPASSTSVVLSSLKPETLYLVNVTAEYEDGFSIPLAGEETTEEVKGAPRNLKVTDETTDSFKITWTQAPGRVLRYRIIYRPVAGGESREVTTPPNQRRRTLENLIPDTKYEVSVIPEYFSGPGTPLTGNAATEEVRGNPRDLRVSDPTTSTMKLSWSGAPGKVKQYLVTYTPVAGGETQEVTVRGDTTNTVLQGLKEGTQYALSVTALYASGAGDALFGEGTTLEERGSPQDLVTKDITDTSIGAYWTSAPGMVRGYRVSWKSLYDDVDTGEKNLPEDAIHTMIENLQPETKYRISVFATYSSGEGEPLTGDATTELSQDSKTLKVDEETENTMRVTWKPAPGKVVNYRVVYRPHGRGKQMVAKVPPTVTSTVLKRLQPQTTYDITVLPIYKMGEGKLRQGSGTTASRFKSPRNLKTSDPTMSSFRVTWEPAPGEVKGYKVTFHPTGDDRRLGELVVGPYDNTVVLEELRAGTTYKVNVFGMFDGGESSPLVGQEMTTLSDTTVMPILSSGMECLTRAEADIVLLVDGSWSIGRANFRTVRSFISRIVEVFDIGPKRVQIALAQYSGDPRTEWQLNAHRDKKSLLQAVANLPYKGGNTLTGMALNFIRQQNFRTQAGMRPRARKIGVLITDGKSQDDVEAPSKKLKDEGVELFAIGIKNADEVELKMIATDPDDTHAYNVADFESLSRIVDDLTINLCNSVKGPGDLEAPSNLVISERTHRSFRVSWTPPSDSVDRYKVEYYPVSGGKRQEFYVSRMETSTVLKDLKPETEYVVNVYSVVEDEYSEPLKGTEKTLPVPVVSLNIYDVGPTTMHVQWQPVGGATGYILSYKPVKDTEPTRPKEVRLGPTVNDMQLTDLVPNTEYAVTVQAVLHDLTSEPVTVREVTLPLPRPQDLKLRDVTHSTMNVFWEPVPGKVRKYIVRYKTPEEDVKEVEVDRSETSTSLKDLFSQTLYTVSVSAVHDEGESPPVTAQETTRPVPAPTNLKITEVTSEGFRGTWDHGASDVSLYRITWAPFGSSDKMETILNGDENTLVFENLNPNTIYEVSITAIYPDESESDDLIGSERTLPILTTQAPKSGPRNLQVYNATSNSLTVKWDPASGRVQKYRITYQPSTGEGNEQTTTIGGRQNSVVLQKLKPDTPYTITVSSLYPDGEGGRMTGRGKTKPLNTVRNLRVYDPSTSTLNVRWDHAEGNPRQYKLFYAPAAGGPEELVPIPGNTNYAILRNLQPDTSYTVTVVPVYTEGDGGRTSDTGRTLMRGLARNVQVYNPTPNSLDVRWDPAPGPVLQYRVVYSPVDGTRPSESIVVPGNTRMVHLERLIPDTLYSVNLVALYSDGEGNPSPAQGRTLPRSGPRNLRVFGETTNSLSVAWDHADGPVQQYRIIYSPTVGDPIDEYTTVPGRRNNVILQPLQPDTPYKITVIAVYEDGDGGHLTGNGRTVGLLPPQNIHISDEWYTRFRVSWDPSPSPVLGYKIVYKPVGSNEPMEAFVGEMTSYTLHNLNPSTTYDVNVYAQYDSGLSVPLTDQGTTLYLNVTDLKTYQIGWDTFCVKWSPHRAATSYRLKLSPADGTRGQEITVRGSETSHCFTGLSPDTDYGVTVFVQTPNLEGPGVSVKEHTTVKPTEAPTEPPTPPPPPTIPPARDVCKGAKADIVFLTDASWSIGDDNFNKVVKFIFNTVGGFDEISPAGIQVSFVQYSDEVKSEFKLNTYNDKALALGALQNIRYRGGNTRTGKALTFIKEKVLTWESGMRKNVPKVLVVVTDGRSQDEVKKAALVIQQSGFSVFVVGVADVDYNELANIASKPSERHVFIVDDFESFEKIEDNLITFVCETATSSCPLIYLDGYTSPGFKMLEAYNLTEKNFASVQGVSLESGSFPSYSAYRIQKNAFVNQPTADLHPNGLPPSYTIILLFRLLPETPSDPFAIWQITDRDYKPQVGVIADPSSKTLSFFNKDTRGEVQTVTFDTEEVKTLFYGSFHKVHIVVTSKSVKIYIDCYEIIEKDIKEAGNITTDGYEILGKLLKGERKSAAFQIQSFDIVCSPVWTSRDRCCDIPSRRDEGKCPAFPNSCTCTQDSVGPPGPPGPAGGPGAKGPRGERGISGAIGPPGPRGDIGPPGPQGPPGPQGPNGLSIPGEQGRQGMKGDAGEPGLPGRTGTPGLPGPPGPMGPPGDRGFTGKDGAMGPRGPPGPPGSPGSPGVTGPSGKPGKPGDHGRPGPSGLKGEKGDRGDIASQNMMRAVARQVCEQLISGQMNRFNQMLNQIPNDYQSSRNQPGPPGPPGPPGSAGARGEPGPGGRPGFPGTPGMQGPPGERGLPGEKGERGTGSSGPRGLPGPPGPQGESRTGPPGSTGSRGPPGPPGRPGNSGIRGPPGPPGYCDSSQCASIPYNGQGYPGSG

SEQ ID NO: 19102 - protein, 638 aa, Homo sapiens
  Payload ID: 3831
  Gene Symbol: COL12A1
  Gene Name: collagen, type XII, alpha 1
  ENSP ID: ENSP00000393217
  MOD_RES (1)..(1): Any amino acid
XKSLLQAVANLPYKGGNTLTGMALNFIRQQNFRTQAGMRPRARKIGVLITDGKSQDDVEAPSKKLKDEGVELFAIGIKNADEVELKMIATDPDDTHAYNVADFESLSRIVDDLTINLCNSVKGPGDLEAPSNLVISERTHRSFRVSWTPPSDSVDRYKVEYYPVSGGKRQEFYVSRMETSTVLKDLKPETEYVVNVYSVVEDEYSEPLKGTEKTLPVPVVSLNIYDVGPTTMHVQWQPVGGATGYILSYKPVKDTEPTRPKEVRLGPTVNDMQLTDLVPNTEYAVTVQAVLHDLTSEPVTVREVTLPLPRPQDLKLRDVTHSTMNVFWEPVPGKVRKYIVRYKTPEEDVKEVEVDRSETSTSLKDLFSQTLYTVSVSAVHDEGESPPVTAQETTRPVPAPTNLKITEVTSEGFRGTWDHGASDVSLYRITWAPFGSSDKMETILNGDENTLVFENLNPNTIYEVSITAIYPDESESDDLIGSERTPPKSGPRNLQVYNATSNSLTVKWDPASGRVQKYRITYQPSTGEGNEQTTTIGGRQNSVVLQKLKPDTPYTITVSSLYPDGEGGRMTGRGKTKPLNTVRNLRVYDPSTSTLNVRWDHAEGNPRQYKLFYAPAAGGPEELVPIPGNTNYAILRNL

SEQ ID NO: 19103 - protein, 756 aa, Homo sapiens
  Payload ID: 3831
  Gene Symbol: COL12A1
  Gene Name: collagen, type XII, alpha 1
  ENSP ID: ENSP00000399812
VSFVQYSDEVKSEFKLNTYNDKALALGALQNIRYRGGNTRTGKALTFIKEKVLTWESGMRKNVPKVLVVVTDGRSQDEVKKAALVIQQSGFSVFVVGVADVDYNELANIASKPSERHVFIVDDFESFEKIEDNLITFVCETATSSCPLIYLDGYTSPGFKMLEAYNLTEKNFASVQGVSLESGSFPSYSAYRIQKNAFVNQPTADLHPNGLPPSYTIILLFRLLPETPSDPFAIWQITDRDYKPQVGVIADPSSKTLSFFNKDTRGEVQTVTFDTEEVKTLFYGSFHKVHIVVTSKSVKIYIDCYEIIEKDIKEAGNITTDGYEILGKLLKGERKSAAFQIQSFDIVCSPVWTSRDRCCDIPSRRDEGKCPAFPNSCTCTQDSVGPPGPPGPAGGPGAKGPRGERGISGAIGPPGPRGDIGPPGPQGPPGPQGPNGLSIPGEQGRQGMKGDAGEPGLPGRTGTPGLPGPPGPMGPPGDRGFTGKDGAMGPRGPPGPPGSPGSPGVTGPSGKPGKPGDHGRPGPSGLKGEKGDRGDIASQNMMRAVARQVCEQLISGQMNRFNQMLNQIPNDYQSSRNQPGPPGPPGPPGSAGARGEPGPGGRPGFPGTPGMQGPPGERGLPGEKGERGTGSSGPRGLPGPPGPQGESRTGPPGSTGSRGPPGPPGRPGNSGIRGPPGPPGYCDSSQCASIPYNGQGYPEPYVPEGGAYLPEREPFIVPVEPERTAEYEDYGADEPAEEPPEPHRRWRRALPHGPGQ

SEQ ID NO: 19104 - protein, 2987 aa, Homo sapiens
  Payload ID: 3831
  Gene Symbol: COL12A1
  Gene Name: collagen, type XII, alpha 1
  Uniprot ID: Q99715
  ENSP ID: ENSP00000412864
MRSRLPPALAALGAALLLSSIEAEVDPPSDLNFKIIDENTVHMSWAKPVDPIVGYRITVDPTTDGPTKEFTLSASTTETLLSELVPETEYVVTITSYDEVEESVPVIGQLTIQTGSSTKPVEKKPGKTEIQKCSVSAWTDLVFLVDGSWSVGRNNFKYILDFIAALVSAFDIGEEKTRVGVVQYSSDTRTEFNLNQYYQRDELLAAIKKIPYKGGNTMTGDAIDYLVKNTFTESAGARVGFPKVAIIITDGKSQDEVEIPARELRNVGVEVFSLGIKAADAKELKQIASTPSLNHVFNVANFDAIVDIQNEIISQVCSGVDEQLGELVSGEEVVEPPSNLIAMEVSSKYVKLNWNPSPSPVTGYKVILTPMTAGSRQHALSVGPQTTTLSVRDLSADTEYQISVSAMKGMTSSEPISIMEKTQPMKVQVECSRGVDIKADIVFLVDGSYSIGIANFVKVRAFLEVLVKSFEISPNRVQISLVQYSRDPHTEFTLKKFTKVEDIIEAINTFPYRGGSTNTGKAMTYVREKIFVPSKGSRSNVPKVMILITDGKSSDAFRDPAIKLRNSDVEIFAVGVKDAVRSELEAIASPPAETHVFTVEDFDAFQRISFELTQSICLRIEQELAAIKKKAYVPPKDLSFSEVTSYGFKTNWSPAGENVFSYHITYKEAAGDDEVTVVEPASSTSVVLSSLKPETLYLVNVTAEYEDGFSIPLAGEETTEEVKGAPRNLKVTDETTDSFKITWTQAPGRVLRYRIIYRPVAGGESREVTTPPNQRRRTLENLIPDTKYEVSVIPEYFSGPGTPLTGNAATEEVRGNPRDLRVSDPTTSTMKLSWSGAPGKVKQYLVTYTPVAGGETQEVTVRGDTTNTVLQGLKEGTQYALSVTALYASGAGDALFGEGTTLEERGSPQDLVTKDITDTSIGAYWTSAPGMVRGYRVSWKSLYDDVDTGEKNLPEDAIHTMIENLQPETKYRISVFATYSSGEGEPLTGDATTELSQDSKTLKVDEETENTMRVTWKPAPGKVVNYRVVYRPHGRGKQMVAKVPPTVTSTVLKRLQPQTTYDITVLPIYKMGEGKLRQGSGTTASRFKSPRNLKTSDPTMSSFRVTWEPAPGEVKGYKVTFHPTGDDRRLGELVVGPYDNTVVLEELRAGTTYKVNVFGMFDGGESSPLVGQEMTTLSDTTVMPILSSGMECLTRAEADIVLLVDGSWSIGRANFRTVRSFISRIVEVFDIGPKRVQIALAQYSGDPRTEWQLNAHRDKKSLLQAVANLPYKGGNTLTGMALNFIRQQNFRTQAGMRPRARKIGVLITDGKSQDDVEAPSKKLKDEGVELFAIGIKNADEVELKMIATDPDDTHAYNVADFESLSRIVDDLTINLCNSVKGPGDLEAPSNLVISERTHRSFRVSWTPPSDSVDRYKVEYYPVSGGKRQEFYVSRMETSTVLKDLKPETEYVVNVYSVVEDEYSEPLKGTEKTLPVPVVSLNIYDVGPTTMHVQWQPVGGATGYILSYKPVKDTEPTRPKEVRLGPTVNDMQLTDLVPNTEYAVTVQAVLHDLTSEPVTVREVTLPLPRPQDLKLRDVTHSTMNVFWEPVPGKVRKYIVRYKTPEEDVKEVEVDRSETSTSLKDLFSQTLYTVSVSAVHDEGESPPVTAQETTRPVPAPTNLKITEVTSEGFRGTWDHGASDVSLYRITWAPFGSSDKMETILNGDENTLVFENLNPNTIYEVSITAIYPDESESDDLIGSERTLPILTTQAPKSGPRNLQVYNATSNSLTVKWDPASGRVQKYRITYQPSTGEGNEQTTTIGGRQNSVVLQKLKPDTPYTITVSSLYPDGEGGRMTGRGKTKPLNTVRNLRVYDPSTSTLNVRWDHAEGNPRQYKLFYAPAAGGPEELVPIPGNTNYAILRNLQPDTSYTVTVVPVYTEGDGGRTSDTGRTLMRGLARNVQVYNPTPNSLDVRWDPAPGPVLQYRVVYSPVDGTRPSESIVVPGNTRMVHLERLIPDTLYSVNLVALYSDGEGNPSPAQGRTLPRSGPRNLRVFGETTNSLSVAWDHADGPVQQYRIIYSPTVGDPIDEYTTVPGRRNNVILQPLQPDTPYKITVIAVYEDGDGGHLTGNGRTVGLLPPQNIHISDEWYTRFRVSWDPSPSPVLGYKIVYKPVGSNEPMEAFVGEMTSYTLHNLNPSTTYDVNVYAQYDSGLSVPLTDQGTTLYLNVTDLKTYQIGWDTFCVKWSPHRAATSYRLKLSPADGTRGQEITVRGSETSHCFTGLSPDTDYGVTVFVQTPNLEGPGVSVKEHTTVKPTEAPTEPPTPPPPPTIPPARDVCKGAKADIVFLTDASWSIGDDNFNKVVKFIFNTVGGFDEISPAGIQVSFVQYSDEVKSEFKLNTYNDKALALGALQNIRYRGGNTRTGKALTFIKEKVLTWESGMRKNVPKVLVVVTDGRSQDEVKKAALVIQQSGFSVFVVGVADVDYNELANIASKPSERHVFIVDDFESFEKIEDNLITFVCETATSSCPLIYLDGYTSPGFKMLEAYNLTEKNFASVQGVSLESGSFPSYSAYRIQKNAFVNQPTADLHPNGLPPSYTIILLFRLLPETPSDPFAIWQITDRDYKPQVGVIADPSSKTLSFFNKDTRGEVQTVTFDTEEVKTLFYGSFHKRDEGKCPAFPNSCTCTQDSVGPPGPPGPAGGPGAKGPRGERGISGAIGPPGPRGDIGPPGPQGPPGPQGPNGLSIPGEQGRQGMKGDAGEPGLPGRTGTPGLPGPPGPMGPPGDRGFTGKDGAMGPRGPPGPPGSPGSPGVTGPSGKPGKPGDHGRPGPSGLKGEKGDRGDIASQNMMRAVARQVCEQLISGQMNRFNQMLNQIPNDYQSSRNQPGPPGPPGPPGSAGARGEPGPGGRPGFPGTPGMQGPPGERGLPGEKGERGTGSSGPRGLPGPPGPQGESRTGPPGSTGSRGPPGPPGRPGNSGIRGPPGPPGYCDSSQCASIPYNGQGYPGSG

SEQ ID NO: 19105 - protein, 3062 aa, Homo sapiens
  Payload ID: 3831
  Gene Symbol: COL12A1
  Gene Name: collagen, type XII, alpha 1
  ENSP ID: ENSP00000421216
MRSRLPPALAALGAALLLSSIEAEVDPPSDLNFKIIDENTVHMSWAKPVDPIVGYRITVDPTTDGPTKEFTLSASTTETLLSELVPETEYVVTITSYDEVEESVPVIGQLTIQTGSSTKPVEKKPGKTEIQKCSVSAWTDLVFLVDGSWSVGRNNFKYILDFIAALVSAFDIGEEKTRVGVVQYSSDTRTEFNLNQYYQRDELLAAIKKIPYKGGNTMTGDAIDYLVKNTFTESAGARVGFPKVAIIITDGKSQDEVEIPARELRNVGVEVFSLGIKAADAKELKQIASTPSLNHVFNVANFDAIVDIQNEIISQVCSGVDEQLGELVSGEEVVEPPSNLIAMEVSSKYVKLNWNPSPSPVTGYKVILTPMTAGSRQHALSVGPQTTTLSVRDLSADTEYQISVSAMKGMTSSEPISIMEKTQPMKVQVECSRGVDIKADIVFLVDGSYSIGIANFVKVRAFLEVLVKSFEISPNRVQISLVQYSRDPHTEFTLKKFTKVEDIIEAINTFPYRGGSTNTGKAMTYVREKIFVPSKGSRSNVPKVMILITDGKSSDAFRDPAIKLRNSDVEIFAVGVKDAVRSELEAIASPPAETHVFTVEDFDAFQRISFELTQSICLRIEQELAAIKKKAYVPPKDLSFSEVTSYGFKTNWSPAGENVFSYHITYKEAAGDDEVTVVEPASSTSVVLSSLKPETLYLVNVTAEYEDGFSIPLAGEETTEEVKGAPRNLKVTDETTDSFKITWTQAPGRVLRYRIIYRPVAGGESREVTTPPNQRRRTLENLIPDTKYEVSVIPEYFSGPGTPLTGNAATEEVRGNPRDLRVSDPTTSTMKLSWSGAPGKVKQYLVTYTPVAGGETQEVTVRGDTTNTVLQGLKEGTQYALSVTALYASGAGDALFGEGTTLEERGSPQDLVTKDITDTSIGAYWTSAPGMVRGYRVSWKSLYDDVDTGEKNLPEDAIHTMIENLQPETKYRISVFATYSSGEGEPLTGDATTELSQDSKTLKVDEETENTMRVTWKPAPGKVVNYRVVYRPHGRGKQMVAKVPPTVTSTVLKRLQPQTTYDITVLPIYKMGEGKLRQGSGTTASRFKSPRNLKTSDPTMSSFRVTWEPAPGEVKGYKVTFHPTGDDRRLGELVVGPYDNTVVLEELRAGTTYKVNVFGMFDGGESSPLVGQEMTTLSDTTVMPILSSGMECLTRAEADIVLLVDGSWSIGRANFRTVRSFISRIVEVFDIGPKRVQIALAQYSGDPRTEWQLNAHRDKKSLLQAVANLPYKGGNTLTGMALNFIRQQNFRTQAGMRPRARKIGVLITDGKSQDDVEAPSKKLKDEGVELFAIGIKNADEVELKMIATDPDDTHAYNVADFESLSRIVDDLTINLCNSVKGPGDLEAPSNLVISERTHRSFRVSWTPPSDSVDRYKVEYYPVSGGKRQEFYVSRMETSTVLKDLKPETEYVVNVYSVVEDEYSEPLKGTEKTLPVPVVSLNIYDVGPTTMHVQWQPVGGATGYILSYKPVKDTEPTRPKEVRLGPTVNDMQLTDLVPNTEYAVTVQAVLHDLTSEPVTVREVTLPLPRPQDLKLRDVTHSTMNVFWEPVPGKVRKYIVRYKTPEEDVKEVEVDRSETSTSLKDLFSQTLYTVSVSAVHDEGESPPVTAQETTRPVPAPTNLKITEVTSEGFRGTWDHGASDVSLYRITWAPFGSSDKMETILNGDENTLVFENLNPNTIYEVSITAIYPDESESDDLIGSERTLPILTTQAPKSGPRNLQVYNATSNSLTVKWDPASGRVQKYRITYQPSTGEGNEQTTTIGGRQNSVVLQKLKPDTPYTITVSSLYPDGEGGRMTGRGKTKPLNTVRNLRVYDPSTSTLNVRWDHAEGNPRQYKLFYAPAAGGPEELVPIPGNTNYAILRNLQPDTSYTVTVVPVYTEGDGGRTSDTGRTLMRGLARNVQVYNPTPNSLDVRWDPAPGPVLQYRVVYSPVDGTRPSESIVVPGNTRMVHLERLIPDTLYSVNLVALYSDGEGNPSPAQGRTLPRSGPRNLRVFGETTNSLSVAWDHADGPVQQYRIIYSPTVGDPIDEYTTVPGRRNNVILQPLQPDTPYKITVIAVYEDGDGGHLTGNGRTVGLLPPQNIHISDEWYTRFRVSWDPSPSPVLGYKIVYKPVGSNEPMEAFVGEMTSYTLHNLNPSTTYDVNVYAQYDSGLSVPLTDQGTTLYLNVTDLKTYQIGWDTFCVKWSPHRAATSYRLKLSPADGTRGQEITVRGSETSHCFTGLSPDTDYGVTVFVQTPNLEGPGVSVKEHTTVKPTEAPTEPPTPPPPPTIPPARDVCKGAKADIVFLTDASWSIGDDNFNKVVKFIFNTVGGFDEISPAGIQVSFVQYSDEVKSEFKLNTYNDKALALGALQNIRYRGGNTRTGKALTFIKEKVLTWESGMRKNVPKVLVVVTDGRSQDEVKKAALVIQQSGFSVFVVGVADVDYNELANIASKPSERHVFIVDDFESFEKIEDNLITFVCETATSSCPLIYLDGYTSPGFKMLEAYNLTEKNFASVQGVSLESGSFPSYSAYRIQKNAFVNQPTADLHPNGLPPSYTIILLFRLLPETPSDPFAIWQITDRDYKPQVGVIADPSSKTLSFFNKDTRGEVQTVTFDTEEVKTLFYGSFHKVHIVVTSKSVKIYIDCYEIIEKDIKEAGNITTDGYEILGKLLKGERKSAAFQIQSFDIVCSPVWTSRDRCCDIPSRRDEGKCPAFPNSCTCTQDSVGPPGPPGPAGGPGAKGPRGERGISGAIGPPGPRGDIGPPGPQGPPGPQGPNGLSIPGEQGRQGMKGDAGEPGLPGRTGTPGLPGPPGPMGPPGDRGFTGKDGAMGPRGPPGPGSPGVTGPSGKPGKPGDHGRPGPSGLKGEKGDRGDIASQNMMRAVARQVCEQLISGQMNRFNQMLNQIPNDYQSSRNQPGPPGPPGPPGSAGARGEPGPGGRPGFPGTPGMQGPPGERGLPGEKGERGTGSSGPRGLPGPPGPQGESRTGPPGSTGSRGPPGPPGRPGNSGIRGPPGPPGYCDSSQCASIPYNGQGYPGTLLPL

SEQ ID NO: 19106 - protein, 207 aa, Homo sapiens
  Payload ID: 3831
  Gene Symbol: COL12A1
  Gene Name: collagen, type XII, alpha 1
  ENSP ID: ENSP00000423423
VIQQSGFSVFVVGVADVDYNELANIASKPSERHVFIVDDFESFEKIEDNLITFVCETATSSCPLIYLDGYTSPGFKMLEAYNLTEKNFASVQGVSLESGSFPSYSAYRIQKNAFVNQPTADLHPNGLPPSYTIILLFRLLPETPSDPFAIWQITDRDYKPQVGVIADPSSKTLSFFNKDTRGEVQTVTFDTEEVKTLFYGSFHKVKT

SEQ ID NO: 19107 - protein, 1874 aa, Homo sapiens
  Payload ID: 3831
  Gene Symbol: COL12A1
  Gene Name: collagen, type XII, alpha 1
  ENSP ID: ENSP00000483232
MECLTRAEADIVLLVDGSWSIGRANFRTVRSFISRIVEVFDIGPKRVQIALAQYSGDPRTEWQLNAHRDKKSLLQAVANLPYKGGNTLTGMALNFIRQQNFRTQAGMRPRARKIGVLITDGKSQDDVEAPSKKLKDEGVELFAIGIKNADEVELKMIATDPDDTHAYNVADFESLSRIVDDLTINLCNSVKGPGDLEAPSNLVISERTHRSFRVSWTPPSDSVDRYKVEYYPVSGGKRQEFYVSRMETSTVLKDLKPETEYVVNVYSVVEDEYSEPLKGTEKTLPVPVVSLNIYDVGPTTMHVQWQPVGGATGYILSYKPVKDTEPTRPKEVRLGPTVNDMQLTDLVPNTEYAVTVQAVLHDLTSEPVTVREVTLPLPRPQDLKLRDVTHSTMNVFWEPVPGKVRKYIVRYKTPEEDVKEVEVDRSETSTSLKDLFSQTLYTVSVSAVHDEGESPPVTAQETTRPVPAPTNLKITEVTSEGFRGTWDHGASDVSLYRITWAPFGSSDKMETILNGDENTLVFENLNPNTIYEVSITAIYPDESESDDLIGSERTLPILTTQAPKSGPRNLQVYNATSNSLTVKWDPASGRVQKYRITYQPSTGEGNEQTTTIGGRQNSVVLQKLKPDTPYTITVSSLYPDGEGGRMTGRGKTKPLNTVRNLRVYDPSTSTLNVRWDHAEGNPRQYKLFYAPAAGGPEELVPIPGNTNYAILRNLQPDTSYTVTVVPVYTEGDGGRTSDTGRTLMRGLARNVQVYNPTPNSLDVRWDPAPGPVLQYRVVYSPVDGTRPSESIVVPGNTRMVHLERLIPDTLYSVNLVALYSDGEGNPSPAQGRTLPRSGPRNLRVFGETTNSLSVAWDHADGPVQQYRIIYSPTVGDPIDEYTTVPGRRNNVILQPLQPDTPYKITVIAVYEDGDGGHLTGNGRTVGLLPPQNIHISDEWYTRFRVSWDPSPSPVLGYKIVYKPVGSNEPMEAFVGEMTSYTLHNLNPSTTYDVNVYAQYDSGLSVPLTDQGTTLYLNVTDLKTYQIGWDTFCVKWSPHRAATSYRLKLSPADGTRGQEITVRGSETSHCFTGLSPDTDYGVTVFVQTPNLEGPGVSVKEHTTVKPTEAPTEPPTPPPPPTIPPARDVCKGAKADIVFLTDASWSIGDDNFNKVVKFIFNTVGGFDEISPAGIQVSFVQYSDEVKSEFKLNTYNDKALALGALQNIRYRGGNTRTGKALTFIKEKVLTWESGMRKNVPKVLVVVTDGRSQDEVKKAALVIQHSRFSVFVVGVADVDYNELANIASKPSERHVFIVDDFESFEKIEDNLITFVCETATSSCPLIYLDGYTSPGFKMLEAYNLTEKNFASVQGVSLESGSFPSYSAYRIQKNAFVNQPTADLHPNGLPPSYTIILLFRLLPETPSDPFAIWQITDRDYKPQVGVIADPSSKTLSFFNKDTRGEVQTVTFDTEEVKTLFYGSFHKVHIVVTSKSVKIYIDCYEIIEKDIKEAGNITTDGYEILGKLLKGERKSAAFQIQSFDIVCSPVWTSRDRCCDIPSRRDEGKCPAFPNSCTCTQDSVGPPGPPGPAGGPGAKGPRGERGISGAIGPPGPRGDIGPPGPQGPPGPQGPNGLSIPGEQGRQGMKGDAGEPGLPGRTGTPGLPGPPGPMGPPGDRGFTGKDGAMGPRGPPGPPGSPGSPGVTGPSGKPGKPGDHGRPGPSGLKGEKGDRGDIASQNMMRAVARQVCEQLISGQMNRFNQMLNQIPNDYQSSRNQPGPPGPPGPPGSAGARGEPGPGGRPGFPGTPGMQGPPGERGLPGEKGERGTGSSGPRGLPGPPGPQGESRTGPPGSTGSRGPPGPPGRPGNSGIRGPPGPPGYCDSSQCASIPYNGQGYPGSG

SEQ ID NO: 19108 - protein, 695 aa, Homo sapiens
  Payload ID: 3832
  Gene Symbol: COL13A1
  Gene Name: collagen, type XIII, alpha 1
  Uniprot ID: Q5TAT6
  ENSP ID: ENSP00000346553
MVAERTHKAAATGARGPGELGAPGTVALVAARAERGARLPSPGSCGLLTLALCSLALSLLAHFRTAELQARVLRLEAERGEQQMETAILGRVNQLLDEKWKLHSRRRREAPKTSPGCNCPPGPPGPTGRPGLPGDKGAIGMPGRVGSPGDAGLSIIGPRGPPGQPGTRGFPGFPGPIGLDGKPGHPGPKGDMGLTGPPGQPGPQGQKGEKGQCGEYPHRECLSSMPAALRSSQIIALKGEQSQASIQGPPGPPGPPGPSGPLGHPGLPGPMGPPGLPGPPGPKGDPGIQGYHGRKGERGMPGMPGKHGAKGAPGIAVAGMKGEPGIPGTKGEKGAEGSPGLPGLLGQKGEKGDAGNSIGGGRGEPGPPGLPGPPGPKGEAGVDGQVGPPGQPGDKGERGAAGEQGPDGPKGSKGEPGKGEMVDYNGNINEALQEIRTLALMGPPGLPGQIGPPGAPGIPGQKGEIGLPGPPGHDGEKGPRGKPGDMGPPGPQGPPGKDGPPGVKGENGHPGSPGEKGEKGETGQAGSPGEKGEAGEKGNPGAEVPGLPGPEGPPGPPGLQGVPGPKGEAGLDGAKGEKGFQGEKGDRGPLGLPGASGLDGRPGPPGTPGPIGVPGPAGPKGERGSKGDPGMTGPTGAAGLPGLHGPPGDKGNRGERGKKGSRGPKGDKGDQGAPGLDAPCPLGEDGLPVQGCWNK

SEQ ID NO: 19109 - protein, 683 aa, Homo sapiens
  Payload ID: 3832
  Gene Symbol: COL13A1
  Gene Name: collagen, type XIII, alpha 1
  Uniprot ID: Q5TAT6
  ENSP ID: ENSP00000350463
MVAERTHKAAATGARGPGELGAPGTVALVAARAERGARLPSPGSCGLLTLALCSLALSLLAHFRTAELQARVLRLEAERGEQQMETAILGRVNQLLDEKWKLHSRRRREAPKTSPGCNCPPGPPGPTGRPGLPGDKGAIGMPGRVGSPGDAGLSIIGPRGPPGQPGTRGFPGFPGPIGLDGKPGHPGPKGDMGLTGPPGQPGPQGQKGEKGQCGEYPHRECLSSMPAALRSSQIIALKGEQSQASIQGPPGPPGPPGPSGPLGHPGLPGPMGPPGLPGPPGPKGDPGIQGYHGRKGERGMPGMPGKHGAKGAPGIAVAGMKGEPGIPGTKGEKGAEGSPGLPGLLGQKGEKGDAGNSIGGGRGEPGPPGLPGPPGPKGEAGVDGQVGPPGQPGDKGERGAAGEQGPDGPKGSKGEPGKGEMVDYNGNINEALQEIRTLALMGPPGLPGQIGPPGAPGIPGQKGEIGLPGPPGHDGEKGPRGKPGDMGPPGPQGPPGKDGPPGVKGENGHPGSPGEKGEKGETGQAGSPGEKGEAGEKGNPGAEVPGLPGPEGPPGPPGLQGVPGPKGEAGLDGAKGEKGFQGEKGDRGPLGLPGTPGPIGVPGPAGPKGERGSKGDPGMTGPTGAAGLPGLHGPPGDKGNRGERGKKGSRGPKGDKGDQGAPGLDAPCPLGEDGLPVQGCWNK

SEQ ID NO: 19110 - protein, 642 aa, Homo sapiens [sequence omitted]

SEQ ID NO: 19111 - protein, 247 aa, Homo sapiens
  Payload ID: 3832
  Gene Symbol: COL13A1
  Gene Name: collagen, type XIII, alpha 1
  ENSP ID: ENSP00000381947
  MOD_RES (1)..(1): Any amino acid
XIRTLALMGPPGLPGQIGPPGAPGIPGQKGEIGLPGPPGHDGEKGPRGKPGDMGPPGPQGPPGKDGPPGVKGENGHPGSPGEKGEKGETGQAGSPVPGLPGPEGPPGPPGLQGVPGPKGEAGLDGAKGEKGFQGEKGDRGPLGLPGASGLDGRPGPPGTPGPIGVPGPAGPKGERGSKGDPGMTGPTGAAGLPGLHGPPGDKGNRGERGKKGSRGPKGDKGDQGAPGLDAPCPLGEDGLPVQGCWNK

SEQ ID NO: 19112 - protein, 717 aa, Homo sapiens
  Payload ID: 3832
  Gene Symbol: COL13A1
  Gene Name: collagen, type XIII, alpha 1
  Uniprot ID: Q5TAT6
  ENSP ID: ENSP00000381949
MVAERTHKAAATGARGPGELGAPGTVALVAARAERGARLPSPGSCGLLTLALCSLALSLLAHFRTAELQARVLRLEAERGEQQMETAILGRVNQLLDEKWKLHSRRRREAPKTSPGCNCPPGPPGPTGRPGLPGDKGAIGMPGRVGSPGDAGLSIIGPRGPPGQPGTRGFPGFPGPIGLDGKPGHPGPKGDMGLTGPPGQPGPQGQKGEKGQCGEYPHRECLSSMPAALRSSQIIALKLLPLLNSVRLAPPPVIKRRTFQGEQSQASIQGPPGPPGPPGPSGPLGHPGLPGPMGPPGLPGPPGPKGDPGIQGYHGRKGERGMPGMPGKHGAKGAPGIAVAGMKGEPGIPGTKGEKGAEGSPGLPGLLGQKGEKGDAGNSIGGGRGEPGPPGLPGPPGPKGEAGVDGQVGPPGQPGDKGERGAAGEQGPDGPKGSKGEPGKGEMVDYNGNINEALQEIRTLALMGPPGLPGQIGPPGAPGIPGQKGEIGLPGPPGHDGEKGPRGKPGDMGPPGPQGPPGKDGPPGVKGENGHPGSPGEKGEKGETGQAGSPGEKGEAGEKGNPGAEVPGLPGPEGPPGPPGLQGVPGPKGEAGLDGAKGEKGFQGEKGDRGPLGLPGASGLDGRPGPPGTPGPIGVPGPAGPKGERGSKGDPGMTGPTGAAGLPGLHGPPGDKGNRGERGKKGSRGPKGDKGDQGAPGLDAPCPLGEDGLPVQGCWNK

SEQ ID NO: 19113 - protein, 174 aa, Homo sapiens
  Payload ID: 3832
  Gene Symbol: COL13A1
  Gene Name: collagen, type XIII, alpha 1
  ENSP ID: ENSP00000388774
  MOD_RES (1)..(1): Any amino acid
XGKDGPPGVKGENGHPGSPGEKGEKGETGQAGSPVPGLPGPEGPPGPPGLQGVPGPKGEAGLDGAKGEKGFQGEKGDRGPLGLPGTPGPIGVPGPAGPKGERGSKGDPGMTGPTGAAGLPGLHGPPGDKGNRGERGKKGSRGPKGDKGDQGAPGLDAPCPLGEDGLPVQGCWNK

SEQ ID NO: 19114 - protein, 645 aa, Homo sapiens
  Payload ID: 3832
  Gene Symbol: COL13A1
  Gene Name: collagen, type XIII, alpha 1
  Uniprot ID: Q5TAT6
  ENSP ID: ENSP00000428057
MVAERTHKAAATGARGPGELGAPGTVALVAARAERGARLPSPGSCGLLTLALCSLALSLLAHFRTAELQARVLRLEAERGEQQMETAILGRVNQLLDEKWKLHSRRRREAPKTSPGCNCPPGPPGQPGTRGFPGFPGPIGLDGKPGHPGPKGDMGLTGPPGQPGPQGQKGEKGQCGEYPHRLLPLLNSVRLAPPPVIKRRTFQGEQSQASIQGPPGPPGPPGPSGPLGHPGLPGPMGPPGLPGPPGPKGDPGIQGYHGRKGERGMPGMPGKHGAKGAPGIAVAGMKGEPGIPGTKGEKGAEGSPGLPGLLGQKGEKGDAGNSIGGGRGEPGPPGLPGPPGPKGEAGVDGQVGPPGQPGDKGERGAAGEQGPDGPKGSKGEPGKGEMVDYNGNINEALQEIRTLALMGPPGLPGQIGPPGAPGIPGQKGEIGLPGPPGHDGEKGPRGKPGDMGPPGPQGPPGKDGPPGVKGENGHPGSPGEKGEKGETGQAGSPVPGLPGPEGPPGPPGLQGVPGPKGEAGLDGAKGEKGFQGEKGDRGPLGLPGASGLDGRPGPPGTPGPIGVPGPAGPKGERGSKGDPGMTGPTGAAGLPGLHGPPGDKGNRGERGKKGSRGPKGDKGDQGAPGLDAPCPLGEDGLPVQGCWNK

SEQ ID NO: 19115 - protein, 686 aa, Homo sapiens
  Payload ID: 3832
  Gene Symbol: COL13A1
  Gene Name: collagen, type XIII, alpha 1
  Uniprot ID: Q5TAT6
  ENSP ID: ENSP00000428342
MVAERTHKAAATGARGPGELGAPGTVALVAARAERGARLPSPGSCGLLTLALCSLALSLLAHFRTAELQARVLRLEAERGEQQMETAILGRVNQLLDEKWKLHSRRRREAPKTSPGCNCPPGPPGPTGRPGLPGDKGAIGMPGRVGSPGDAGLSIIGPRGPPGQPGTRGFPGFPGPIGLDGKPGHPGPKGDMGLTGPPGQPGPQGQKGEKGQCGEYPHRLLPLLNSVRLAPPPVIKRRTFQGEQSQASIQGPPGPPGPPGPSGPLGHPGLPGPMGPPGLPGPPGPKGDPGIQGYHGRKGERGMPGMPGKHGAKGAPGIAVAGMKGEPGIPGTKGEKGAEGSPGLPGLLGQKGEKGDAGNSIGGGRGEPGPPGLPGPPGPKGEAGVDGQVGPPGQPGDKGERGAAGEQGPDGPKGSKGEPGKGEMVDYNGNINEALQEIRTLALMGPPGLPGQIGPPGAPGIPGQKGEIGLPGPPGHDGEKGPRGKPGDMGPPGPQGPPGKDGPPGVKGENGHPGSPGEKGEKGETGQAGSPGEKGEAGEKGNPGAEVPGLPGPEGPPGPPGLQGVPGPKGEAGLDGAKGEKGFQGEKGDRGPLGLPGTPGPIGVPGPAGPKGERGSKGDPGMTGPTGAAGLPGLHGPPGDKGNRGERGKKGSRGPKGDKGDQGAPGLDAPCPLGEDGLPVQGCWNK

SEQ ID NO: 19116 - protein, 668 aa, Homo sapiens
  Payload ID: 3832
  Gene Symbol: COL13A1
  Gene Name: collagen, type XIII, alpha 1
  Uniprot ID: Q5TAT6
  ENSP ID: ENSP00000430061
MVAERTHKAAATGARGPGELGAPGTVALVAARAERGARLPSPGSCGLLTLALCSLALSLLAHFRTAELQARVLRLEAERGEQQMETAILGRVNQLLDEKWKLHSRRRREAPKTSPGCNCPPGPPGPTGRPGLPGDKGAIGMPGRVGSPGDAGLSIIGPRGPPGQPGTRGFPGFPGPIGLDGKPGHPGPKGDMGLTGPPGQPGPQGQKGEKGQCGEYPHRECLSSMPAALRSSQIIALKGEQSQASIQGPPGPPGPPGPSGPLGHPGLPGPMGPPGLPGPPGPKGDPGIQGYHGRKGERGMPGMPGKHGAKGAPGIAVAGMKGEPGIPGTKGEKGAEGSPGLPGLLGQKGEKGDAGNSIGGGRGEPGPPGLPGPPGPKGEAGVDGQVGPPGQPGDKGERGAAGEQGPDGPKGSKGEPGKGEMVDYNGNINEALQEIRTLALMGPPGLPGQIGPPGAPGIPGQKGEIGLPGPPGHDGEKGPRGKPGDMGPPGPQGPPGKDGPPGVKGENGHPGSPGEKGEKGETGQAGSPVPGLPGPEGPPGPPGLQGVPGPKGEAGLDGAKGEKGFQGEKGDRGPLGLPGTPGPIGVPGPAGPKGERGSKGDPGMTGPTGAAGLPGLHGPPGDKGNRGERGKKGSRGPKGDKGDQGAPGLDAPCPLGEDGLPVQGCWNK

SEQ ID NO: 19117 - protein, 582 aa, Homo sapiens
  Payload ID: 3832
  Gene Symbol: COL13A1
  Gene Name: collagen, type XIII, alpha 1
  ENSP ID: ENSP00000430089
MVAERTHKAAATGARGPGELGAPGTVALVAARAERGARLPSPGSCGLLTLALCSLALSLLAHFRTAELQARVLRLEAERGEQQMETAILGRVNQLLDEKWKLHSRRRREAPKTSPGCNCPPGPPGPTGRPGLPGDKGAIGMPGRVGVKGQPGEKGSPGDAGLSIIGPRGPPGQPGTRGFPGFPGPIGLDGKPGHPGPKGDMGLTGPPGQPGPQGQKGEKGQCGEYPHRECLSSMPAALRSSQIIALKLLPLLNSVRLAPPPVIKRRTFQGEQSQASIQGPPGPPGPPGPSGPLGHPGLPGPMGPPGLPGPPGPKGDPGIQGYHGRKGERGMPGMPGKHGAKGAPGIAVAGMKGEPGIPGTKGEKGAEGSPGLPGLLGQKGEKGDAGNSIGGGRGEPGPPGLPGPPGPKGEAGVDGQVGPPGQPGDKGERGAAGEQGPDGPKGSKGEPGKGEMVDYNGNINEALQEIRTLALMGPPGLPGQIGPPGAPGIPGQKGEIGLPGPPGHDGEKGPRGKPGDMGPPGPQGPPGKDGPPGVKGENGHPGSPGEKGEKGETGQAGSPGLDGPTGERRTWWPEQTQSGRIA

SEQ ID NO: 19118 - protein, 610 aa, Homo sapiens
  Payload ID: 3832
  Gene Symbol: COL13A1
  Gene Name: collagen, type XIII, alpha 1
  Uniprot ID: Q5TAT6
  ENSP ID: ENSP00000430173
MVAERTHKAAATGARGPGELGAPGTVALVAARAERGARLPSPGSCGLLTLALCSLALSLLAHFRTAELQARVLRLEAERGEQQMETAILGRVNQLLDEKWKLHSRRRREAPKTSPGCNCPPGPPGPTGRPGLPGQPGTRGFPGFPGPIGLDGKPGHPGPKGDMGLTGPPGQPGPQGQKGEKGQCGEYPHRECLSSMPAALRSSQIIALKGEQSQASIQGPPGPPGPPGPSGPLGHPGLPGPMGPPGLPGPPGPKGDPGIQGYHGRKGERGMPGMPGKHGAKGAPGIAVAGMKGEPGIPGTKGEKGAEGSPGLPGLLGQKGEKGDAGNSIGGGRGEPGPPGLPGPPGPKGEAGVDGQVGPPGQPGDKGERGAAGEQGPDGPKGSKGEPGKGEMVDYNGNINEALQEIRTLALMGPPGLPGQIGPPGAPGIPGQKGEIGLPGPPGHDGEKGPRGKPGDMGPPGPQGPPGKDGPPGVKGENGHPGSPGEKGEKGETGQAGSPVPGLPGPEGPPGPPGLQGVPGPKGEAGLDGAKGEKGFQGEKGDRGPLGLPGTPGPIGVPGPAGPKGERGSKGDPGMTGPTGAAGLPGLHGPPGDKGNRGEDGLPVQGCWNK

SEQ ID NO: 19119 - protein, 757 aa, Homo sapiens [sequence omitted]

SEQ ID NO: 19120 - protein, 1796 aa, Homo sapiens
  Payload ID: 3833
  Gene Symbol: COL14A1
  Gene Name: collagen, type XIV, alpha 1
  Uniprot ID: Q05707
  ENSP ID: ENSP00000297848
MKIFQRKMRYWLLPPFLAIVYFCTIVQGQVAPPTRLRYNVISHDSIQISWKAPRGKFGGYKLLVTPTSGGKTNQLNLQNTATKAIIQGLMPDQNYTVQIIAYNKDKESKPAQGQFRIKDLEKRKDPKPRVKVVDRGNGSRPSSPEEVKFVCQTPAIADIVILVDGSWSIGRFNFRLVRHFLENLVTAFDVGSEKTRIGLAQYSGDPRIEWHLNAFSTKDEVIEAVRNLPYKGGNTLTGLALNYIFENSFKPEAGSRTGVSKIGILITDGKSQDDIIPPSRNLRESGVELFAIGVKNADVNELQEIASEPDSTHVYNVAEFDLMHTVVESLTRTLCSRVEEQDREIKASAHAITGPPTELITSEVTARSFMVNWTHAPGNVEKYRVVYYPTRGGKPDEVVVDGTVSSTVLKNLMSLTEYQIAVFAIYAHTASEGLRGTETTLALPMASDLLLYDVTENSMRVKWDAVPGASGYLILYAPLTEGLAGDEKEMKIGETHTDIELSGLLPNTEYTVTVYAMFGEEASDPVTGQETTLALSPPRNLRISNVGSNSARLTWDPTSRQINGYRIVYNNADGTEINEVEVDPITTFPLKGLTPLTEYTIAIFSIYDEGQSEPLTGVFTTEEVPAQQYLEIDEVTTDSFRVTWHPLSADEGLHKLMWIPVYGGKTEEVVLKEEQDSHVIEGLEPGTEYEVSLLAVLDDGSESEVVTAVGTTLDSFWTEPATTIVPTTSVTSVFQTGIRNLVVGDETTSSLRVKWDISDSDVQQFRVTYMTAQGDPEEEVIGTVMVPGSQNNLLLKPLLPDTEYKVTVTPIYTDGEGVSVSAPGKTLPSSGPQNLRVSEEWYNRLRITWDPPSSPVKGYRIVYKPVSVPGPTLETFVGADINTILITNLLSGMDYNVKIFASQASGFSDALTGMVKTLFLGVTNLQAKHVEMTSLCAHWQVHRHATAYRVVIESLQDRQKQESTVGGGTTRHCFYGLQPDSEYKISVYTKLQEIEGPSVSIMEKTQSLPTRPPTFPPTIPPAKEVCKAAKADLVFMVDGSWSIGDENFNKIISFLYSTVGALNKIGTDGTQVAMVQFTDDPRTEFKLNAYKTKETLLDAIKHISYKGGNTKTGKAIKYVRDTLFTAESGTRRGIPKVIVVITDGRSQDDVNKISREMQLDGYSIFAIGVADADYSELVSIGSKPSARHVFFVDDFDAFKKIEDELITFVCETASATCPVVHKDGIDLAGFKMMEMFGLVEKDFSSVEGVSMEPGTFNVFPCYQLHKDALVSQPTRYLHPEGLPSDYTISFLFRILPDTPQEPFALWEILNKNSDPLVGVILDNGGKTLTYFNYDQSGDFQTVTFEGPEIRKIFYGSFHKLHIVVSETLVKVVIDCKQVGEKAMNASANITSDGVEVLGKMVRSRGPGGNSAPFQLQMFDIVCSTSWANTDKCCELPGLRDDESCPDLPHSCSCSETNEVALGPAGPPGGPGLRGPKGQQGEPGPKGPDGPRGEIGLPGPQGPPGPQGPSGLSIQGMPGMPGEKGEKGDTGLPGPQGIPGGVGSPGRDGSPGQRGLPGKDGSSGPPGPPGPIGIPGTPGVPGITGSMGPQGALGPPGVPGAKGERGERGDLQSQAMVRSVARQVCEQLIQSHMARYTAILNQIPSHSSSIRTVQGPPGEPGRPGSPGAPGEQGPPGTPGFPGNAGVPGTPGERGLTGIKGEKGNPGVGTQGPRGPPGPAGPSGESRPGSPGPPGSPGPRGPPGHLGVPGPQGPSGQPGYCDPSSCSAYGVRAPHPDQPEFTPVQDELEAMELWGPGV

SEQ ID NO: 19121 - protein, 1780 aa, Homo sapiens
  Payload ID: 3833
  Gene Symbol: COL14A1
  Gene Name: collagen, type XIV, alpha 1
  Uniprot ID: Q05707
  ENSP ID: ENSP00000311809
MKIFQRKMRYWLLPPFLAIVYFCTIVQGQVAPPTRLRYNVISHDSIQISWKAPRGKFGGYKLLVTPTSGGKTNQLNLQNTATKAIIQGLMPDQNYTVQIIAYNKDKESKPAQGQFRIKDLEKRKDPKPRVKVVDRGNGSRPSSPEEVKFVCQTPAIADIVILVDGSWSIGRFNFRLVRHFLENLVTAFDVGSEKTRIGLAQYSGDPRIEWHLNAFSTKDEVIEAVRNLPYKGGNTLTGLALNYIFENSFKPEAGSRTGVSKIGILITDGKSQDDIIPPSRNLRESGVELFAIGVKNADVNELQEIASEPDSTHVYNVAEFDLMHTVVESLTRTLCSRVEEQDREIKASAHAITGPPTELITSEVTARSFMVNWTHAPGNVEKYRVVYYPTRGGKPDEVVVDGTVSSTVLKNLMSLTEYQIAVFAIYAHTASEGLRGTETTLALPMASDLLLYDVTENSMRVKWDAVPGASGYLILYAPLTEGLAGDEKEMKIGETHTDIELSGLLPNTEYTVTVYAMFGEEASDPVTGQETTLALSPPRNLRISNVGSNSARLTWDPTSRQINGYRIVYNNADGTEINEVEVDPITTFPLKGLTPLTEYTIAIFSIYDEGQSEPLTGVFTTEEVPAQQYLEIDEVTTDSFRVTWHPLSADEGLHKLMWIPVYGGKTEEVVLKEEQDSHVIEGLEPGTEYEVSLLAVLDDGSESEVVTAVGTTLDSFWTEPATTIVPTTSVTSVFQTGIRNLVVGDETTSSLRVKWDISDSDVQQFRVTYMTAQGDPEEEVIGTVMVPGSQNNLLLKPLLPDTEYKVTVTPIYTDGEGVSVSAPGKTLPSSGPQNLRVSEEWYNRLRITWDPPSSPVKGYRIVYKPVSVPGPTLETFVGADINTILITNLLSGMDYNVKIFASQASGFSDALTGMVKTLFLGVTNLQAKHVEMTSLCAHWQVHRHATAYRVVIESLQDRQKQESTVGGGTTRHCFYGLQPDSEYKISVYTKLQEIEGPSVSIMEKTQSLPTRPPTFPPTIPPAKEVCKAAKADLVFMVDGSWSIGDENFNKIISFLYSTVGALNKIGTDGTQVAMVQFTDDPRTEFKLNAYKTKETLLDAIKHISYKGGNTKTGKAIKYVRDTLFTAESGTRRGIPKVIVVITDGRSQDDVNKISREMQLDGYSIFAIGVADADYSELVSIGSKPSARHVFFVDDFDAFKKIEDELITFVCETASATCPVVHKDGIDLAGFKMMEMFGLVEKDFSSVEGVSMEPGTFNVFPCYQLHKDALVSQPTRYLHPEGLPSDYTISFLFRILPDTPQEPFALWEILNKNSDPLVGVILDNGGKTLTYFNYDQSGDFQTVTFEGPEIRKIFYGSFHKLHIVVSETLVKVVIDCKQVGEKAMNASANITSDGVEVLGKMVRSRGPGGNSAPFQLQMFDIVCSTSWANTDKCCELPGLRDDESCPDLPHSCSCSETNEVALGPAGPPGGPGLRGPKGQQGEPGPKGPDGPRGEIGLPGPQGPPGPQGPSGLSIQGMPGMPGEKGEKGDTGLPGPQGIPGGVGSPGRDGSPGQRGLPGKDGSSGPPGPPGPIGIPGTPGVPGITGSMGPQGALGPPGVPGAKGERGERGDLQSQAMVRSVARQVCEQLIQSHMARYTAILNQIPSHSSSIRTVQGPPGEPGRPGSPGAPGEQGPPGTPGFPGNAGVPGTPGERGLTGIKGEKGNPGVGTQGPRGPPGPAGPSGESRPGSPGPPGSPGPRGPPGHLGVPGPQGPSGQPGYCDPSSCSAYGVRDLIPYNDYQH

SEQ ID NO: 19122 - protein, 149 aa, Homo sapiens
  Payload ID: 3833
  Gene Symbol: COL14A1
  Gene Name: collagen, type XIV, alpha 1
  ENSP ID: ENSP00000403640
GPPGEPGRPGSPGAPGEQGPPGTPGFPGNAGVPGTPGERGLTGIKGEKGNPGVGTQGPRGPPGPAGPSGESRPGSPGPPGSPGPRGPPGHLGVPGPQGPSGQPGYCDPSSCSAYGVRGWMGIFLLDHPTLPSSPDHLPSLLFPGDGLLT

SEQ ID NO: 19123 - protein, 843 aa, Homo sapiens
  Payload ID: 3833
  Gene Symbol: COL14A1
  Gene Name: collagen, type XIV, alpha 1
  ENSP ID: ENSP00000409461
FDVGSEKTRIGLAQYSGDPRIEWHLNAFSTKDEVIEAVRNLPYKGGNTLTGLALNYIFENSFKPEAGSRTGVSKIGILITDGKSQDDIIPPSRNLRESGVELFAIGVKNADVNELQEIASEPDSTHVYNVAEFDLMHTVVESLTRTLCSRVEEQDREIKASAHAITGPPTELITSEVTARSFMVNWTHAPGNVEKYRVVYYPTRGGKPDEVVVDGTVSSTVLKNLMSLTEYQIAVFAIYAHTASEGLRGTETTLALPMASDLLLYDVTENSMRVKWDAVPGASGYLILYAPLTEGLAGDEKEMKIGETHTDIELSGLLPNTEYTVTVYAMFGEEASDPVTGQETTLALSPPRNLRISNVGSNSARLTWDPTSRQINGYRIVYNNADGTEINEVEVDPITTFPLKGLTPLTEYTIAIFSIYDEGQSEPLTGVFTTEEVPAQQYLEIDEVTTDSFRVTWHPLSADEGLHKLMWIPVYGGKTEEVVLKEEQDSHVIEGLEPGTEYEVSLLAVLDDGSESEVVTAVGTTLDSFWTEPATTIVPTTSVTSVFQTGIRNLVVGDETTSSLRVKWDISDSDVQQFRVTYMTAQGDPEEEVIGTVMVPGSQNNLLLKPLLPDTEYKVTVTPIYTDGEGVSVSAPGKTLPSSGPQNLRVSEEWYNRLRITWDPPSSPVKGYRIVYKPVSVPGPTLETFVGADINTILITNLLSGMDYNVKIFASQASGFSDALTGMVKTLFLGVTNLQAKHVEMTSLCAHWQVHRHATAYRVVIESLQDRQKQESTVGGGTTRHCFYGLQPDSEYKISVYTKLQEIEGPSVSIMEKTQSLPTRPPTFPPTIPPAKEGKRIIE

SEQ ID NO: 19124 - protein, 534 aa, Homo sapiens
  Payload ID: 3833
  Gene Symbol: COL14A1
  Gene Name: collagen, type XIV, alpha 1
  ENSP ID: ENSP00000428851
MKIFQRKMRYWLLPPFLAIVYFCTIVQGQVAPPTRLRYNVISHDSIQISWKAPRGKFGGYKLLVTPTSGGKTNQLNLQNTATKAIIQGLMPDQNYTVQIIAYNKDKESKPAQGQFRIKDLEKRKDPKPRVKVVDRGNGSRPSSPEEVKFVCQTPAIADIVILVDGSWSIGRFNFRLVRHFLENLVTAFDVGSEKTRIGLAQYSGDPRIEWHLNAFSTKDEVIEAVRNLPYKGGNTLTGLALNYIFENSFKPEAGSRTGVSKIGILITDGKSQDDIIPPSRNLRESGVELFAIGVKNADVNELQEIASEPDSTHVYNVAEFDLMHTVVESLTRTLCSRVEEQDREIKASAHAITGPPTELITSEVTARSFMVNWTHAPGNVEKYRVVYYPTRGGKPDEVVVDGTVSSTVLKNLMSLTEYQIAVFAIYAHTASEGLRGTETTLALPMASDLLLYDVTENSMRVKWDAVPGASGYLILYAPLTEGLAGDEKEMKIGETHTDIELSGLLPNTEYTVTVYAMFGEEASDPVTGQETTSP

SEQ ID NO: 19125 - protein, 336 aa, Homo sapiens
  Payload ID: 3833
  Gene Symbol: COL14A1
  Gene Name: collagen, type XIV, alpha 1
  ENSP ID: ENSP00000429123
  MOD_RES (1)..(1): Any amino acid
XVCQTPAIADIVILVDGSWSIGRFNFRLVRHFLENLVTAFDVGSEKTRIGVKNADVNELQEIASEPDSTHVYNVAEFDLMHTVVESLTRTLCSRVEEQDREIKASAHAITGPPTELITSEVTARSFMVNWTHAPGNVEKYRVVYYPTRGGKPDEVVVDGTVSSTVLKNLMSLTEYQIAVFAIYAHTASEGLRGTETTLALPMASDLLLYDVTENSMRVKWDAVPGASGYLILYAPLTEGLAGDEKEMKIGETHTDIELSGLLPNTEYTVTVYAMFGEEASDPVTGQETTLALSPPRNLRISNVGSNSARLTWDPTSRQINGYRIVYNNADGTEINE

SEQ ID NO: 19126 - protein, 534 aa, Homo sapiens; identical to SEQ ID NO: 19124
  Payload ID: 3833
  Gene Symbol: COL14A1
  Gene Name: collagen, type XIV, alpha 1
  ENSP ID: ENSP00000443974

SEQ ID NO: 19127 - protein, 36 aa, Homo sapiens
  Payload ID: 3834
  Gene Symbol: COL19A1
  Gene Name: collagen, type XIX, alpha 1
  ENSP ID: ENSP00000416556
GPPGIQGIHQTLGGYYNKDNKGNDEHEAGGLKGDKV

SEQ ID NO: 19128 - protein, 60 aa, Homo sapiens
  Payload ID: 3834
  Gene Symbol: COL19A1
  Gene Name: collagen, type XIX, alpha 1
  ENSP ID: ENSP00000479481
MRLTGPWKLWLWMSIFLLPASTSVTVRDKTGIQANSLPNHQMLFIAFKSLKQILLRLKRP

SEQ ID NO: 19129 - protein, 1142 aa, Homo sapiens
  Payload ID: 3834
  Gene Symbol: COL19A1
  Gene Name: collagen, type XIX, alpha 1
  Uniprot ID: Q14993
  ENSP ID: ENSP00000480474
MRLTGPWKLWLWMSIFLLPASTSVTVRDKTEESCPILRIEGHQLTYDNINKLEVSGFDLGDSFSLRRAFCESDKTCFKLGSALLIRDTIKIFPKGLPEEYSVAAMFRVRRNAKKERWFLWQVLNQQNIPQISIVVDGGKKVVEFMFQATEGDVLNYIFRNRELRPLFDRQWHKLGISIQSQVISLYMDCNLIARRQTDEKDTVDFHGRTVIATRASDGKPVDIELHQLKIYCSANLIAQETCCEISDTKCPEQDGFGNIASSWVTAHASKMSSYLPAKQELKDQCQCIPNKGEAGLPGAPGSPGQKGHKGEPGENGLHGAPGFPGQKGEQGFEGSKGETGEKGEQGEKGDPALAGLNGENGLKGDLGPHGPPGPKGEKGDTGPPGPPALPGSLGIQGPQGPPGKEGQRGRRGKTGPPGKPGPPGPPGPPGIQGIHQTLGGYYNKDNKGNDEHEAGGLKGDKGETGLPGFPGSVGPKGQKGEPGEPFTKGEKGDRGEPGVIGSQGVKGEPGDPGPPGLIGSPGLKGQQGSAGSMGPRGPPGDVGLPGEHGIPGKQGIKGEKGDPGGIIGPPGLPGPKGEAGPPGKSLPGEPGLDGNPGAPGPRGPKGERGLPGVHGSPGDIGPQGIGIPGRTGAQGPAGEPGIQGPRGLPGLPGTPGTPGNDGVPGRDGKPGLPGPPGDPIALPLLGDIGALLKNFCGNCQASVPGLKSNKGEEGGAGEPGKYDSMARKGDIGPRGPPGIPGREGPKGSKGERGYPGIPGEKGDEGLQGIPGIPGAPGPTGPPGLMGRTGHPGPTGAKGEKGSDGPPGKPGPPGPPGIPFNERNGMSSLYKIKGGVNVPSYPGPPGPPGPKGDPGPVGEPGAMGLPGLEGFPGVKGDRGPAGPPGIAGMSGKPGAPGPPGVPGEPGERGPVGDIGFPGPEGPSGKPGINGKDGIPGAQGIMGKPGDRGPKGERGDQGIPGDRGSQGERGKPGLTGMKGAIGPMGPPGNKGSMGSPGHQGPPGSPGIPGIPADAVSFEEIKKYINQEVLRIFEERMAVFLSQLKLPAAMLAAQAYGRPGPPGKDGLPGPPGDPGPQGYRGQKGERGEPGIGLPGSPGLPGTSALGLPGSPGAPGPQGPPGPSGRCNPEDCLYPVSHAHQRTGGN

SEQ ID NO: 19130 - protein, 1388 aa, Homo sapiens
  Payload ID: 3835
  Gene Symbol: COL15A1
  Gene Name: collagen, type XV, alpha 1
  Uniprot ID: P39059
  ENSP ID: ENSP00000364140
MAPRRNNGQCWCLLMLLSVSTPLPAVTQTRGATETASQGHLDLTQLIGVPLPSSVSFVTGYGGFPAYSFGPGANVGRPARTLIPSTFFRDFAISVVVKPSSTRGGVLFAITDAFQKVIYLGLRLSGVEDGHQRIILYYTEPGSHVSQEAAAFSVPVMTHRWNRFAMIVQGEEVTLLVNCEEHSRIPFQRSSQALAFESSAGIFMGNAGATGLERFTGSLQQLTVHPDPRTPEELCDPEESSASGETSGLQEADGVAEILEAVTYTQASPKEAKVEPINTPPTPSSPFEDMELSGEPVPEGTLETTNMSIIQHSSPKQGSGEILNDTLEGVHSVDGDPITDSGSGAGAFLDIAEEKNLAATAAGLAEVPISTAGEAEASSVPTGGPTLSMSTENPEEGVTPGPDNEERLAATAAGEAEALASMPGEVEASGVAPGELDLSMSAQSLGEEATVGPSSEDSLTTAAAATEVSLSTFEDEEASGVPTDGLAPLTATMAPERAVTSGPGDEEDLAAATTEEPLITAGGEESGSPPPDGPPLPLPTVAPERWITPAQREHVGMKGQAGPKGEKGDAGEELPGPPEPSGPVGPTAGAEAEGSGLGWGSDVGSGSGDLVGSEQLLRGPPGPPGPPGLPGIPGKPGTDVFMGPPGSPGEDGPAGEPGPPGPEGQPGVDGATGLPGMKGEKGARGPNGSVGEKGDPGNRGLPGPPGKKGQAGPPGVMGPPGPPGPPGPPGPGCTMGLGFEDTEGSGSTQLLNEPKLSRPTAAIGLKGEKGDRGPKGERGMDGASIVGPPGPRGPPGHIKVLSNSLINITHGFMNFSDIPELVGPPGPDGLPGLPGFPGPRGPKGDTGLPGFPGLKGEQGEKGEPGAILTEDIPLERLMGKKGEPGMHGAPGPMGPKGPPGHKGEFGLPGRPGRPGLNGLKGTKGDPGVIMQGPPGLPGPPGPPGPPGAVINIKGAIFPIPVRPHCKMPVDTAHPGSPELITFHGVKGEKGSWGLPGSKGEKGDQGAQGPPGPPLDLAYLRHFLNNLKGENGDKGFKGEKGEKGDINGSFLMSGPPGLPGNPGPAGQKGETVVGPQGPPGAPGLPGPPGFGRPGDPGPPGPPGPPGPPAILGAAVALPGPPGPPGQPGLPGSRNLVTAFSNMDDMLQKAHLVIEGTFIYLRDSTEFFIRVRDGWKKLQLGELIPIPADSPPPPALSSNPHQLLPPPNPISSANYEKPALHLAALNMPFSGDIRADFQCFKQARAAGLLSTYRAFLSSHLQDLSTIVRKAERYSLPIVNLKGQVLFNNWDSIFSGHGGQFNMHIPIYSFDGRDIMTDPSWPQKVIWHGSSPHGVRLVDNYCEAWRTADTAVTGLASPLSTGKILDQKAYSCANRLIVLCIENSFMTDARK

SEQ ID NO: 19131 - protein, 1374 aa, Homo sapiens
  Payload ID: 3835
  Gene Symbol: COL15A1
  Gene Name: collagen, type XV, alpha 1
  ENSP ID: ENSP00000483455
MLLSVSTPLPAVTQTRGATETASQGHLDLTQLIGVPLPSSVSFVTGYGGFPAYSFGPGANVGRPARTLIPSTFFRDFAISVVVKPSSTRGGVLFAITDAFQKVIYLGLRLSGVEDGHQRIILYYTEPGSHVSQEAAAFSVPVMTHRWNRFAMIVQGEEVTLLVNCEEHSRIPFQRSSQALAFESSAGIFMGNAGATGLERFTGSLQQLTVHPDPRTPEELCDPEESSASGETSGLQEADGVAEILEAVTYTQASPKEAKVEPINTPPTPSSPFEDMELSGEPVPEGTLETTNMSIIQHSSPKQGKGAILNDTLEGVHSVDGDPITDSGSGAGAFLDIAEEKNLAATAAGLAEVPISTAGEAEASSVPTGGPTLSMSTENPEEGVTPGPDNEERLAATAAGEAEALASMPGEVEASGVAPGELDLSMSAQSLGEEATVGPSSEDSLTTAAAATEVSLSTFEDEEASGVPTDGLAPLTATMAPERAVTSGPGDEEDLAAATTEEPLITAGGEESGSPPPDGPPLPLPTVAPERWITPAQREHVGMKGQAGPKGEKGDAGEELPGPPEPSGPVGPTAGAEAEGSGLGWGSDVGSGSGDLVGSEQLLRGPPGPPGPPGLPGIPGKPGTDVFMGPPGSPGEDGPAGEPGPPGPEGQPGVDGATGLPGMKGEKGARGPNGSVGEKGDPGNRGLPGPPGKKGQAGPPGVMGPPGPPGPPGPPGPGCTMGLGFEDTEGSGSTQLLNEPKLSRPTAAIGLKGEKGDRGPKGERGMDGASIVGPPGPRGPPGHIKVLSNSLINITHGFMNFSDIPELVGPPGPDGLPGLPGFPGPRGPKGDTGLPGFPGLKGEQGEKGEPGAILTEDIPLERLMGKKGEPGMHGAPGPMGPKGPPGHKGEFGLPGRPGRPGLNGLKGTKGDPGVIMQGPPGLPGPPGPPGPPGAVINIKGAIFPIPVRPHCKMPVDTAHPGSPELITFHGVKGEKGSWGLPGSKGEKGDQGAQGPPGPPLDLAYLRHFLNNLKGENGDKGFKGEKGEKGDINGSFLMSGPPGLPGNPGPAGQKGETVVGPQGPPGAPGLPGPPGFGRPGDPGPPGPPGPPGPPAILGAAVALPGPPGPPGQPGLPGSRNLVTAFSNMDDMLQKAHLVIEGTFIYLRDSTEFFIRVRDGWKKLQLGELIPIPADSPPPPALSSNPHQLLPPPNPISSANYEKPALHLAALNMPFSGDIRADFQCFKQARAAGLLSTYRAFLSSHLQDLSTIVRKAERYSLPIVNLKGQVLFNNWDSIFSGHGGQFNMHIPIYSFDGRDIMTDPSWPQKVIWHGSSPHGVRLVDNYCEAWRTADTAVTGLASPLSTGKILDQKAYSCANRLIVLCIENSFMTDARK

SEQ ID NO: 19132 - protein, 308 aa, Homo sapiens
  Payload ID: 3836
  Gene Symbol: COL16A1
  Gene Name: collagen, type XVI, alpha 1
  ENSP ID: ENSP00000362771
KVYTRCFCLEEPQNSEVDAQLTGRISQKAERGAKVHQETAADECPPCVHGARDSNGGKGERGLPGPPGSKGEKGARGNDCVRISPDAPLQCAEGPKGEKGESGALGPSGLPGSTGEKGQKGEKGDGGIKGVPGKPGRDGRPGEICVIGPKGQKGDPGFVGPEGLAGEPGPPGLPGPPGIGLPGTPGDPGGPPGPKGDKGSSGIPGKEGPGGKPGKPGVKGEKGDPCEVCPTLPEGFQNFVGLPGKPGPKGEPGDPVPARGDPGIQGIKGEKGEPCLSCSSVVGAQHLVSSTGASGDVGSPGFGLPGLP

SEQ ID NO: 19133 - protein, 966 aa, Homo sapiens
  Payload ID: 3836
  Gene Symbol: COL16A1
  Gene Name: collagen, type XVI, alpha 1
  ENSP ID: ENSP00000362772
MWVSWAPGLWLLGLWATFGHGANTGAQCPPSQQEGLKLEHSSSLPANVTGFNLIHRLSLMKTSAIKKIRNPKGPLILRLGAAPVTQPTRRVFPRGLPEEFALVLTLLLKKHTHQKTWYLFQVTDANGYPQISLEVNSQERSLELRAQGQDGDFVSCIFPVPQLFDLRWHKLMLSVAGRVASVHVDCSSASSQPLGPRRPMRPVGHVFLGLDAEQGKPVSFDLQQVHIYCDPELVLEEGCCEILPAGCPPETSKARRDTQSNELIEINPQSEGKVYTRCFCLEEPQNSEVDAQLTGRISQKAERGAKVHQETAADECPPCVHGARDSNVTLAPSGPKGGKGERGLPGPPGSKGEKGARGNDCVRISPDAPLQCAEGPKGEKGESGALGPSGLPGSTGEKGQKGEKGDGGIKGVPGKPGRDGRPGEICVIGPKGQKGDPGFVGPEGLAGEPGPPGLPGPPGIGLPGTPGDPGGPPGPKGDKGSSGIPGKEGPGGKPGKPGVKGEKGDPCEVCPTLPEGFQNFVGLPGKPGPKGEPGDPVPARGDPGIQGIKGEKGEPCLSCSSVVGAQHLVSSTGASGDVGSPGFGLPGLPGRAGVPGLKGEKGNFGEAGPAGSPGPPGPVGPAGIKGAKGEPCEPCPALSNLQDGDVRVVALPGPSGEKGEPGPPGFGLPGKQGKAGERGLKGQKGDAGNPGDPGTPGTTGRPGLSGEPGVQGPAGPKGEKGDGCTACPSLQGTVTDMAGRPGQPGPKGEQGPEGVGRPGKPGQPGLPGVQGPPGLKGVQGEPGPPGRGVQGPQGEPGAPGLPGIQGLPGPRGPPGPTGEKGAQGSPGVKGATGPVGPPGASVSGPPGRDGQQGQTGLRGTPGEKGPRGEKGEPGECSCPSQGDLIFSGMPGPPGIPGPPGPPGVPGLQVKGEKRMRSLGGRAHGSGWLLPAGPQGCCSPTPKTQTCHFSLLCLPASQGGKEGPLSL

SEQ ID NO: 19134 - protein, 1604 aa, Homo sapiens
  Payload ID: 3836
  Gene Symbol: COL16A1
  Gene Name: collagen, type XVI, alpha 1
  Uniprot ID: Q07092
  ENSP ID: ENSP00000362776
MWVSWAPGLWLLGLWATFGHGANTGAQCPPSQQEGLKLEHSSSLPANVTGFNLIHRLSLMKTSAIKKIRNPKGPLILRLGAAPVTQPTRRVFPRGLPEEFALVLTLLLKKHTHQKTWYLFQVTDANGYPQISLEVNSQERSLELRAQGQDGDFVSCIFPVPQLFDLRWHKLMLSVAGRVASVHVDCSSASSQPLGPRRPMRPVGHVFLGLDAEQGKPVSFDLQQVHIYCDPELVLEEGCCEILPAGCPPETSKARRDTQSNELIEINPQSEGKVYTRCFCLEEPQNSEVDAQLTGRISQKAERGAKVHQETAADECPPCVHGARDSNVTLAPSGPKGGKGERGLPGPPGSKGEKGARGNDCVRISPDAPLQCAEGPKGEKGESGALGPSGLPGSTGEKGQKGEKGDGGIKGVPGKPGRDGRPGEICVIGPKGQKGDPGFVGPEGLAGEPGPPGLPGPPGIGLPGTPGDPGGPPGPKGDKGSSGIPGKEGPGGKPGKPGVKGEKGDPCEVCPTLPEGFQNFVGLPGKPGPKGEPGDPVPARGDPGIQGIKGEKGEPCLSCSSVVGAQHLVSSTGASGDVGSPGFGLPGLPGRAGVPGLKGEKGNFGEAGPAGSPGPPGPVGPAGIKGAKGEPCEPCPALSNLQDGDVRVVALPGPSGEKGEPGPPGFGLPGKQGKAGERGLKGQKGDAGNPGDPGTPGTTGRPGLSGEPGVQGPAGPKGEKGDGCTACPSLQGTVTDMAGRPGQPGPKGEQGPEGVGRPGKPGQPGLPGVQGPPGLKGVQGEPGPPGRGVQGPQGEPGAPGLPGIQGLPGPRGPPGPTGEKGAQGSPGVKGATGPVGPPGASVSGPPGRDGQQGQTGLRGTPGEKGPRGEKGEPGECSCPSQGDLIFSGMPGAPGLWMGSSWQPGPQGPPGIPGPPGPPGVPGLQGVPGNNGLPGQPGLTAELGSLPIEQHLLKSICGDCVQGQRAHPGYLVEKGEKGDQGIPGVPGLDNCAQCFLSLERPRAEEARGDNSEGDPGCVGSPGLPGPPGLPGQRGEEGPPGMRGSPGPPGPIGPPGFPGAVGSPGLPGLQGERGLTGLTGDKGEPGPPGQPGYPGATGPPGLPGIKGERGYTGSAGEKGEPGPPGSEGLPGPPGPAGPRGERGPQGNSGEKGDQGFQGQPGFPGPPGPPGFPGKVGSPGPPGPQAEKGSEGIRGPSGLPGSPGPPGPPGIQGPAGLDGLDGKDGKPGLRGDPGPAGPPGLMGPPGFKGKTGHPGLPGPKGDCGKPGPPGSTGRPGAEGEPGAMGPQGRPGPPGHVGPPGPPGQPGPAGISAVGLKGDRGATGERGLAGLPGQPGPPGHPGPPGEPGTDGAAGKEGPPGKQGFYGPPGPKGDPGAAGQKGQAGEKGRAGMPGGPGKSGSMGPVGPPGPAGERGHPGAPGPSGSPGLPGVPGSMGDMVNYDEIKRFIRQEIIKMFDERMAYYTSRMQFPMEMAAAPGRPGPPGKDGAPGRPGAPGSPGLPGQIGREGRQGLPGVRGLPGTKGEKGDIGIGIAGENGLPGPPGPQGPPGYGKMGATGPMGQQGIPGIPGPPGPMGQPGKAGHCNPSDCFGAMPMEQQYPPMKTMKGPFG

SEQ ID NO: 19135 - protein, 224 aa, Homo sapiens
  Payload ID: 3836
  Gene Symbol: COL16A1
  Gene Name: collagen, type XVI, alpha 1
  ENSP ID: ENSP00000390281
GPPGSEGLPGPPGPAGPRGERGPQGNSGEKGDQGFQGQPGFPGPPGPPGFPGKVGSPGPPGPQAEKGPAGLDGLDGKDGKPGLRGDPGPAGPPGLMGPPGFKGKTGHPGLPGPKGDCGKPGPPGSTGRPGAEGEPGAMGPQGRPGPPGHVGPPGPPGQPGPAGISAVGLKGDRGATGERGLAGLPGQPGPPGHPGPPGEPGTDGAAGKEGPPGKQGFYGPPGPK

SEQ ID NO: 19136 - protein, 235 aa, Homo sapiens
  Payload ID: 3836
  Gene Symbol: COL16A1
  Gene Name: collagen, type XVI, alpha 1
  ENSP ID: ENSP00000411457
GEPGPPGRGVQGPQGEPGAPGLPGIQGLPGPRGPPGPTGEKGAQGSPGVKGATGPVGPPGASVSGPPGRDGQQGQTGLRGTPGEKGPRGEKGEPGECSCPSQGDLIFSGMPGPPGIPGPPGPPGVPGLQGVPGNNGLPGQPGLTAELGSLPIEQHLLKSICGDCVQGQRAHPGYLVEKGEKGDQGIPGVPGLDNCAQCFLSLERPRAEEARGDNSEGDPGCVGSPGLPGPPGLPG

SEQ ID NO: 19137 - protein, 1497 aa, Homo sapiens
  Payload ID: 3837
  Gene Symbol: COL17A1
  Gene Name: collagen, type XVII, alpha 1
  Uniprot ID: Q9UMD9
  ENSP ID: ENSP00000340937
MDVTKKNKRDGTEVTERIVTETVTTRLTSLPPKGGTSNGYAKTASLGGGSRLEKQSLTHGSSGYINSTGSTRGHASTSSYRRAHSPASTLPNSPGSTFERKTHVTRHAYEGSSSGNSSPEYPRKEFASSSTRGRSQTRESEIRVRLQSASPSTRWTELDDVKRLLKGSRSASVSPTRNSSNTLPIPKKGTVETKIVTASSQSVSGTYDATILDANLPSHVWSSTLPAGSSMGTYHNNMTTQSSSLLNTNAYSAGSVFGVPNNMASCSPTLHPGLSTSSSVFGMQNNLAPSLTTLSHGTTTTSTAYGVKKNMPQSPAAVNTGVSTSAACTTSVQSDDLLHKDCKFLILEKDNTPAKKEMELLIMTKDSGKVFTASPASIAATSFSEDTLKKEKQAAYNADSGLKAEANGDLKTVSTKGKTTTADIHSYGSSGGGGSGGGGGVGGAGGGPWGPAPAWCPCGSCCSWWKWLLGLLLTWLLLLGLLFGLIALAEEVRKLKARVDELERIRRSILPYGDSMDRIEKDRLQGMAPAAGADLDKIGLHSDSQEELWMFVRKKLMMEQENGNLRGSPGPKGDMGSPGPKGDRGFPGTPGIPGPLGHPGPQGPKGQKGSVGDPGMEGPMGQRGREGPMGPRGEAGPPGSGEKGERGAAGEPGPHGPPGVPGSVGPKGSSGSPGPQGPPGPVGLQGLRGEVGLPGVKGDKGPMGPPGPKGDQGEKGPRGLTGEPGMRGLPGAVGEPGAKGAMGPAGPDGHQGPRGEQGLTGMPGIRGPPGPSGDPGKPGLTGPQGPQGLPGTPGRPGIKGEPGAPGKIVTSEGSSMLTVPGPPGPPGAMGPPGPPGAPGPAGPAGLPGHQEVLNLQGPPGPPGPRGPPGPSIPGPPGPRGPPGEGLPGPPGPPGSFLSNSETFLSGPPGPPGPPGPKGDQGPPGPRGHQGEQGLPGFSTSGSSSFGLNLQGPPGPPGPQGPKGDKGDPGVPGALGIPSGPSEGGSSSTMYVSGPPGPPGPPGPPGSISSSGQEIQQYISEYMQSDSIRSYLSGVQGPPGPPGPPGPVTTITGETFDYSELASHVVSYLRTSGYGVSLFSSSISSEDILAVLQRDDVRQYLRQYLMGPRGPPGPPGASGDGSLLSLDYAELSSRILSYMSSSGISIGLPGPPGPPGLPGTSYEELLSLLRGSEFRGIVGPPGPPGPPGIPGNVWSSISVEDLSSYLHTAGLSFIPGPPGPPGPPGPRGPPGVSGALATYAAENSDSFRSELISYLTSPDVRSFIVGPPGPPGPQGPPGDSRLLSTDASHSRGSSSSSHSSSVRRGSSYSSSMSTGGGGAGSLGAGGAFGEAAGDRGPYGTDIGPGGGYGAAAEGGMYAGNGGLLGADFAGDLDYNELAVRVSESMQRQGLLQGMAYTVQGPPGQPGPQGPPGISKVFSAYSNVTADLMDFFQTYGAIQGPPGQKGEMGTPGPKGDRGPAGPPGHPGPPGPRGHKGEKGDKGDQVYAGRRRRRSIAVKP

SEQ ID NO: 19138 - protein, 1415 aa, Homo sapiens
  Payload ID: 3837
  Gene Symbol: COL17A1
  Gene Name: collagen, type XVII, alpha 1
  Uniprot ID: Q9UMD9
  ENSP ID: ENSP00000358748
MDVTKKNKRDGTEVTERIVTETVTTRLTSLPPKGGTSNGYAKTASLGGGSRLEKQSLTHGSSGYINSTGSTRGHASTSSYRRAHSPASTLPNSPGSTFERKTHVTRHAYEGSSSGNSSPEYPRKEFASSSTRGRSQTRESEIRVRLQSASPSTRWTELDDVKRLLKGSRSASVSPTRNSSNTLPIPKKGTVETKIVTASSQSVSGTYDATILDANLPSHVWSSTLPAGSSMGTYHNNMTTQSSSLLNTNAYSAGSVFGVPNNMASCSPTLHPGLSTSSSVFGMQNNLAPSLTTLSHGTTTTSTAYGVKKNMPQSPAAVNTGVSTSAACTTSVQSDDLLHKDCKFLILEKDNTPAKKEMELLIMTKDSGKVFTASPASIAATSFSEDTLKKEKQAAYNADSGLKAEANGDLKTVSTKGKTTTADIHSYGSSGGGGSGGGGGVGGAGGGPWGPAPAWCPCGSCCSWWKWLLGLLLTWLLLLGLLFGLIALAEEVRKLKARVDELERIRRSILPYGDSMDRIEKDRLQGMAPAAGADLDKIGLHSDSQEELWMFVRKKLMMEQENGNLRGSPGPKGDMGSPGPKGDRGFPGTPGIPGPLGHPGPQGPKGQKGSVGDPGMEGPMGQRGREGPMGPRGEAGPPGSGEKGERGAAGEPGPHGPPGVPGSVGPKGSSGSPGPQGPPGPVGLQGLRGEVGLPGVKGDKGPMGPPGPKGDQGEKGPRGLTGEPGMRGLPGAVGEPGAKGAMGPAGPDGHQGPRGEQGLTGMPGIRGPPGPSGDPGKPGLTGPQGPQGLPGTPGRPGIKGEPGAPGKIVTSEGSSMLTVPGPPGPPGAMGPPGPPGAPGPAGPAGLPGHQEVLNLQGPPGPPGPRGPPGPSIPGPPGPRGPPGEGLPGPPGPPGSFLSNSETFLSGPPGPPGPPGPKGDQGDPGVPGALGIPSGPSEGGSSSTMYVSGPPGPPGPPGPPGSISSSGQEIQQYISEYMQSDSIRSYLSGVQGPPGPPGPPGPVTTITGETFDYSELASHVVSYLRTSGYGVSLFSSSISSEDILAVLQRDDVRQYLRQYLMGPRGPPGPPGASGDGSLLSLDYAELSSRILSYMSSSGISIGLPGPPGPPGLPGTSYEELLSLLRAAGLSFIPGPPGPPGPPGPRGPPGVSGALATYAAENSDSFRSELISYLTSPDVRSFIVGPPGPPGPQGPPGDSRLLSTDASHSRGSSSSSHSSSVRRGSSYSSSMSTGGGGAGSLGAGGAFGEAAGDRGPYGTDIGPGGGYGAAAEGGMYAGNGGLLGADFAGDLDYNELAVRVSESMQRQGLLQGMAYTVQGPPGQPGPQGPPGISKVFSAYSNVTADLMDFFQTYGAIQGPPGQKGEMGTPGPKGDRGPAGPPGHPGPPGPRGHKGEKGDKGDQVYAGRRRRRSIAVKP

SEQ ID NO: 19139 - protein, 417 aa, Homo sapiens
  Payload ID: 3837
  Gene Symbol: COL17A1
  Gene Name: collagen, type XVII, alpha 1
  ENSP ID: ENSP00000376905
MDVTKKNKRDGTEVTERIVTETVTTRLTSLPPKGGTSNGYAKTASLGGGSRLEKQSLTHGSSGYINSTGSTRGHASTSSYRRAHSPASTLPNSPGSTFERKTHVTRHAYEGSSSGNSSPEYPRKEFASSSTRGRSQTRESEIRVRLQSASPSTRWTELDDVKRLLKGSRSASVSPTRNSSNTLPIPKKGTVETKIVTASSQSVSGTYDATILDANLPSHVWSSTLPAGSSMGTYHNNMTTQSSSLLNTNAYSAGSVFGVPNNMASCSPTLHPGLSTSSSVFGMQNNLAPSLTTLSHGTTTTSTAYGVKKNMPQSPAAVNTGVSTSAACTTSVQSDDLLHKDCKFLILEKDNTPAKKEMELLIMTKDSGKVFTASPASIAATSFSEDTLKKEKQAAYNADSGLKAEANGKNKYDCCPP

SEQ ID NO: 19140 - protein, 66 aa, Homo sapiens
  Payload ID: 3837
  Gene Symbol: COL17A1
  Gene Name: collagen, type XVII, alpha 1
  ENSP ID: ENSP00000388832
  MOD_RES (1)..(1): Any amino acid
XYGAIQGPPGQKGEMGTPGPKGDRGPAGPPGHPGPPGPRGHKGEKGDKGDQVYAGRRRRRSIAVKP

SEQ ID NO: 19141 - protein, 687 aa, Homo sapiens
  Payload ID: 3838
  Gene Symbol: COL18A1
  Gene Name: collagen, type XVIII, alpha 1
  ENSP ID: ENSP00000339118
GEVGADGVPGFPGLPGREGIAGPQGPKGDRGSRGEKGDPGKDGVGQPGLPGPPGPPGPVVYVSEQDGSVLSVPGPEGRPGFAGFPGPAGPKGNLGSKGERGSPGPKGEKGEPGSIFSPDGGALGPAQKGAKGEPGFRGPPGPYGRPGYKGEIGFPGRPGRPGMNGLKGEKGEPGDASLGFGMRGMPGPPGPPGPPGPPGTPVYDSNVFAESSRPGPPGLPGNQGPPGPKGAKGEVGPPGPPGQFPFDFLQLEAEMKGEKGDRGDAGQKGERGEPGGGGFFGSSLPGPPGPPGPPGPRGYPGIPGPKGESIRGQPGPPGPQGPPGIGYEGRQGPPGPPGPPGPPSFPGPHRQTISVPGPPGPPGPPGPPGTMGASSGQVRLWATRQAMLGQVHEVPEGWLIFVAEQEELYVRVQNGFRKVQLEARTPLPRGTDNEVAALQPPVVQLHDSNPYPRREHPHPTARPWRADDILASPPRLPEPQPYPGAPHHSSYVHLRPARPTSPPAHSHRDFQPVLHLVALNSPLSGGMRGIRGADFQCFQQARAVGLAGTFRAFLSSRLQDLYSIVRRADRAAVPIVNLKDELLFPSWEALFSGSEGPLKPGARIFSFDGKDVLRHPTWPQKSVWHGSDPNGRRLTESYCETWRTEAPSATGQASSLLGGRLLGQSAASCHHAYIVLCIENSFMTASK

SEQ ID NO: 19142 - protein, 1519 aa, Homo sapiens
  Payload ID: 3838
  Gene Symbol: COL18A1
  Gene Name: collagen, type XVIII, alpha 1
  Uniprot ID: P39060
  ENSP ID: ENSP00000347665
MAPYPCGCHILLLLFCCLAAARANLLNLNWLWFNNEDTSHAATTIPEPQGPLPVQPTADTTTHVTPRNGSTEPATAPGSPEPPSELLEDGQDTPTSAESPDAPEENIAGVGAEILNVAKGIRSFVQLWNDTVPTESLARAETLVLETPVGPLALAGPSSTPQENGTTLWPSRGIPSSPGAHTTEAGTLPAPTPSPPSLGRPWAPLTGPSVPPPSSERISEEVGLLQLLGDPPPQQVTQTDDPDVGLAYVFGPDANSGQVARYHFPSLFFRDFSLLFHIRPATEGPGVLFAITDSAQAMVLLGVKLSGVQDGHQDISLLYTEPGAGQTHTAASFRLPAFVGQWTHLALSVAGGFVALYVDCEEFQRMPLARSSRGLELEPGAGLFVAQAGGADPDKFQGVIAELKVRRDPQVSPMHCLDEEGDDSDGASGDSGSGLGDARELLREETGAALKPRLPAPPPVTTPPLAGGSSTEDSRSEEVEEQTTVASLGAQTLPGSDSVSTWDGSVRTPGGRVKEGGLKGQKGEPGVPGPPGRAGPPGSPCLPGPPGLPCPVSPLGPAGPALQTVPGPQGPPGPPGRDGTPGRDGEPGDPGEDGKPGDTGPQGFPGTPGDVGPKGDKGDPGVGERGPPGPQGPPGPPGPSFRHDKLTFIDMEGSGFGGDLEALRGPRGFPGPPGPPGVPGLPGEPGRFGVNSSDVPGPAGLPGVPGREGPPGFPGLPGPPGPPGREGPPGRTGQKGSLGEAGAPGHKGSKGAPGPAGARGESGLAGAPGPAGPPGPPGPPGPPGPGLPAGFDDMEGSGGPFWSTARSADGPQGPPGLPGLKGDPGVPGLPGAKGEVGADGVPGFPGLPGREGIAGPQGPKGDRGSRGEKGDPGKDGVGQPGLPGPPGPPGPVVYVSEQDGSVLSVPGPEGRPGFAGFPGPAGPKGNLGSKGERGSPGPKGEKGEPGSIFSPDGGALGPAQKGAKGEPGFRGPPGPYGRPGYKGEIGFPGRPGRPGMNGLKGEKGEPGDASLGFGMRGMPGPPGPPGPPGPPGTPVYDSNVFAESSRPGPPGLPGNQGPPGPKGAKGEVGPPGPPGQFPFDFLQLEAEMKGEKGDRGDAGQKGERGEPGGGGFFGSSLPGPPGPPGPPGPRGYPGIPGPKGESIRGQPGPPGPQGPPGIGYEGRQGPPGPPGPPGPPSFPGPHRQTISVPGPPGPPGPPGPPGTMGASSGVRLWATRQAMLGQVHEVPEGWLIFVAEQEELYVRVQNGFRKVQLEARTPLPRGTDNEVAALQPPVVQLHDSNPYPRREHPHPTARPWRADDILASPPRLPEPQPYPGAPHHSSYVHLRPARPTSPPAHSHRDFQPVLHLVALNSPLSGGMRGIRGADFQCFQQARAVGLAGTFRAFLSSRLQDLYSIVRRADRAAVPIVNLKDELLFPSWEALFSGSEGPLKPGARIFSFDGKDVLRHPTWPQKSVWHGSDPNGRRLTESYCETWRTEAPSATGQASSLLGGRLLGQSAASCHHAYIVLCIENSFMTASK

SEQ ID NO: 19143 - protein, 1754 aa, Homo sapiens
  Payload ID: 3838
  Gene Symbol: COL18A1
  Gene Name: collagen, type XVIII, alpha 1
  Uniprot ID: P39060
  ENSP ID: ENSP00000352798
MAPYPCGCHILLLLFCCLAAARANLLNLNWLWFNNEDTSHAATTIPEPQGPLPVQPTADTTTHVTPRNGSTEPATAPGSPEPPSELLEDGQDTPTSAESPDAPEENIAGVGAEILNVAKGIRSFVQLWNDTVPTESLARAETLVLETPVGPLALAGPSSTPQENGTTLWPSRGIPSSPGAHTTEAGTLPAPTPSPPSLGRPWAPLTGPSVPPPSSGRASLSSLLGGAPPWGSLQDPDSQGLSPAAAAPSQQLQRPDVRLRTPLLHPLVMGSLGKHAAPSAFSSGLPGALSQVAVTTLTRDSGAWVSHVANSVGPGLANNSALLGADPEAPAGRCLPLPPSLPVCGHLGISRFWLPNHLHHESGEQVRAGARAWGGLLQTHCHPFLAWFFCLLLVPPCGSVPPPAPPPCCQFCEALQDACWSRLGGGRLPVACASLPTQEDGYCVLIGPAAERISEEVGLLQLLGDPPPQQVTQTDDPDVGLAYVFGPDANSGQVARYHFPSLFFRDFSLLFHIRPATEGPGVLFAITDSAQAMVLLGVKLSGVQDGHQDISLLYTEPGAGQTHTAASFRLPAFVGQWTHLALSVAGGFVALYVDCEEFQRMPLARSSRGLELEPGAGLFVAQAGGADPDKFQGVIAELKVRRDPQVSPMHCLDEEGDDSDGASGDSGSGLGDARELLREETGAALKPRLPAPPPVTTPPLAGGSSTEDSRSEEVEEQTTVASLGAQTLPGSDSVSTWDGSVRTPGGRVKEGGLKGQKGEPGVPGPPGRAGPPGSPCLPGPPGLPCPVSPLGPAGPALQTVPGPQGPPGPPGRDGTPGRDGEPGDPGEDGKPGDTGPQGFPGTPGDVGPKGDKGDPGVGERGPPGPQGPPGPPGPSFRHDKLTFIDMEGSGFGGDLEALRGPRGFPGPPGPPGVPGLPGEPGRFGVNSSDVPGPAGLPGVPGREGPPGFPGLPGPPGPPGREGPPGRTGQKGSLGEAGAPGHKGSKGAPGPAGARGESGLAGAPGPAGPPGPPGPPGPPGPGLPAGFDDMEGSGGPFWSTARSADGPQGPPGLPGLKGDPGVPGLPGAKGEVGADGVPGFPGLPGREGIAGPQGPKGDRGSRGEKGDPGKDGVGQPGLPGPPGPPGPVVYVSEQDGSVLSVPGPEGRPGFAGFPGPAGPKGNLGSKGERGSPGPKGEKGEPGSIFSPDGGALGPAQKGAKGEPGFRGPPGPYGRPGYKGEIGFPGRPGRPGMNGLKGEKGEPGDASLGFGMRGMPGPPGPPGPPGPPGTPVYDSNVFAESSRPGPPGLPGNQGPPGPKGAKGEVGPPGPPGQFPFDFLQLEAEMKGEKGDRGDAGQKGERGEPGGGGFFGSSLPGPPGPPGPPGPRGYPGIPGPKGESIRGQPGPPGPQGPPGIGYEGRQGPPGPPGPPGPPSFPGPHRQTISVPGPPGPPGPPGPPGTMGASSGVRLWATRQAMLGQVHEVPEGWLIFVAEQEELYVRVQNGFRKVQLEARTPLPRGTDNEVAALQPPVVQLHDSNPYPRREHPHPTARPWRADDILASPPRLPEPQPYPGAPHHSSYVHLRPARPTSPPAHSHRDFQPVLHLVALNSPLSGGMRGIRGADFQCFQQARAVGLAGTFRAFLSSRLQDLYSIVRRADRAAVPIVNLKDELLFPSWEALFSGSEGPLKPGARIFSFDGKDVLRHPTWPQKSVWHGSDPNGRRLTESYCETWRTEAPSATGQASSLLGGRLLGQSAASCHHAYIVLCIENSFMTASK

SEQ ID NO: 19144 - protein, 1339 aa, Homo sapiens
  Payload ID: 3838
  Gene Symbol: COL18A1
  Gene Name: collagen, type XVIII, alpha 1
  Uniprot ID: P39060
  ENSP ID: ENSP00000383191
MAPRCPWPWPRRRRLLDVLAPLVLLLGVRAASAEPERISEEVGLLQLLGDPPPQQVTQTDDPDVGLAYVFGPDANSGQVARYHFPSLFFRDFSLLFHIRPATEGPGVLFAITDSAQAMVLLGVKLSGVQDGHQDISLLYTEPGAGQTHTAASFRLPAFVGQWTHLALSVAGGFVALYVDCEEFQRMPLARSSRGLELEPGAGLFVAQAGGADPDKFQGVIAELKVRRDPQVSPMHCLDEEGDDSDGASGDSGSGLGDARELLREETGAALKPRLPAPPPVTTPPLAGGSSTEDSRSEEVEEQTTVASLGAQTLPGSDSVSTWDGSVRTPGGRVKEGGLKGQKGEPGVPGPPGRAGPPGSPCLPGPPGLPCPVSPLGPAGPALQTVPGPQGPPGPPGRDGTPGRDGEPGDPGEDGKPGDTGPQGFPGTPGDVGPKGDKGDPGVGERGPPGPQGPPGPPGPSFRHDKLTFIDMEGSGFGGDLEALRGPRGFPGPPGPPGVPGLPGEPGRFGVNSSDVPGPAGLPGVPGREGPPGFPGLPGPPGPPGREGPPGRTGQKGSLGEAGAPGHKGSKGAPGPAGARGESGLAGAPGPAGPPGPPGPPGPPGPGLPAGFDDMEGSGGPFWSTARSADGPQGPPGLPGLKGDPGVPGLPGAKGEVGADGVPGFPGLPGREGIAGPQGPKGDRGSRGEKGDPGKDGVGQPGLPGPPGPPGPVVYVSEQDGSVLSVPGPEGRPGFAGFPGPAGPKGNLGSKGERGSPGPKGEKGEPGSIFSPDGGALGPAQKGAKGEPGFRGPPGPYGRPGYKGEIGFPGRPGRPGMNGLKGEKGEPGDASLGFGMRGMPGPPGPPGPPGPPGTPVYDSNVFAESSRPGPPGLPGNQGPPGPKGAKGEVGPPGPPGQFPFDFLQLEAEMKGEKGDRGDAGQKGERGEPGGGGFFGSSLPGPPGPPGPPGPRGYPGIPGPKGESIRGQPGPPGPQGPPGIGYEGRQGPPGPPGPPGPPSFPGPHRQTISVPGPPGPPGPPGPPGTMGASSGVRLWATRQAMLGQVHEVPEGWLIFVAEQEELYVRVQNGFRKVQLEARTPLPRGTDNEVAALQPPVVQLHDSNPYPRREHPHPTARPWRADDILASPPRLPEPQPYPGAPHHSSYVHLRPARPTSPPAHSHRDFQPVLHLVALNSPLSGGMRGIRGADFQCFQQARAVGLAGTFRAFLSSRLQDLYSIVRRADRAAVPIVNLKDELLFPSWEALFSGSEGPLKPGARIFSFDGKDVLRHPTWPQKSVWHGSDPNGRRLTESYCETWRTEAPSATGQASSLLGGRLLGQSAASCHHAYIVLCIENSFMTASK

SEQ ID NO: 19145 - protein, 280 aa, Homo sapiens
  Payload ID: 3838
  Gene Symbol: COL18A1
  Gene Name: collagen, type XVIII, alpha 1
  ENSP ID: ENSP00000415692
  MOD_RES (1)..(1): Any amino acid
XISVPGPPGPPGPPGPPGTMGASSGVRLWATRQAMLGQVHEVPEGWLIFVAEQEELYVRVQNGFRKVQDNEVAALQPPVVQLHDSNPYPRREHPHPTARPWRADDILASPPRLPEPQPYPGAPHHSSYVHLRPARPTSPPAHSHRDFQPVLHLVALNSPLSGGMRGIRGADFQCFQQARAVGLAGTFRAFLSSRLQDLYSIVRRADRAAVPIVNLKDELLFPSWEALFSGSEGPLKPGARIFSFDGKDVLRHPTWPQKSVWHGSDPNGRRLTESYCETWR

SEQ ID NO: 19146 - protein, 1284 aa, Homo sapiens
  Payload ID: 3839
  Gene Symbol: COL20A1
  Gene Name: collagen, type XX, alpha 1
  Uniprot ID: Q9P218
  ENSP ID: ENSP00000351767
MSSGDPAHLGLCLWLWLGATLGREQVQASGLLRLAVLPEDRLQMKWRESEGSGLGYLVQVKPMAGDSEQEVILTTKTPKATVGGLSPSKGYTLQIFELTGSGRFLLARREFVIEDLKSSSLDRSSQRPLGSGAPEPTPSHTGSPDPEQASEPQVAFTPSQDPRTPAGPQFRCLPPVPADMVFLVDGSWSIGHSHFQQVKDFLASVIAPFEIGPDKVQVGLTQYSGDAQTEWDLNSLSTKEQVLAAVRRLRYKGGNTFTGLALTHVLGQNLQPAAGLRPEAAKVVILVTDGKSQDDVHTAARVLKDLGVNVFAVGVKNADEAELRLLASPPRDITVHSVLDFLQLGALAGLLSRLICQRLQGGSPRQGPAAAPALDTLPAPTSLVLSQVTSSSIRLSWTPAPRHPLKYLIVWRASRGGTPREVVVEGPAASTELHNLASRTEYLVSVFPIYEGGVGEGLRGLVTTAPLPPPRALTLAAVTPRTVHLTWQPSAGATHYLVRCSPASPKGEEEEREVQVGRPEVLLDGLEPGRDYEVSVQSLRGPEGSEARGIRARTPTLAPPRHLGFSDVSHDAARVFWEGAPRPVRLVRVTYVSSEGGHSGQTEAPGNATSATLGPLSSSTTYTVRVTCLYPGGGSSTLTGRVTTKKAPSPSQLSMTELPGDAVQLAWVAAAPSGVLVYQITWTPLGEGKAHEISVPGNLGTAVLPGLGRHTEYDVTILAYYRDGARSDPVSLRYTPSTVSRSPPSNLALASETPDSLQVSWTPPLGRVLHYWLTYAPASGLGPEKSVSVPGARSHVTLPDLQAATKYRVLVSAIYAAGRSEAVSATGQTACPALRPDGSLPGFDLMVAFSLVEKAYASIRGVAMEPSAFGGTPTFTLFKDAQLTRRVSDVYPAPLPPEHTIVFLVRLLPETPREAFALWQMTAEDFQPLLGVLLDAGKKSLTYFHRDPRAALQEATFDPQEVRKIFFGSFHKVHVAVGRSKVRLYVDCRKVAERPLGEMGSPPAAGFVTLGRLAKARGPRSSSAAFQLQMLQIVCSDTWADEDRCCELPASRDGETCPAFVSACSCSSETPGPPGPQGPPGLPGRNGTPGEQGFPGPRGPPGVKGEKGDHGLPGLQGHPGHQGIPGRVGLQGPKGMRGLEGTAGLPGPPGPRGFQGMAGARGTSGERGPPGTVGPTGLPGPKGERGEKGEPQSLATLYQLVSQASHVSKFDSFHENTRPPMPILEQKLEPGTEPLGSPGTRSKALVPGEWGRGGRHLEGRGEPGAVGQMGSPGQQGASTQGLWE

SEQ ID NO: 19147 - protein, 250 aa, Homo sapiens
  Payload ID: 3839
  Gene Symbol: COL20A1
  Gene Name: collagen, type XX, alpha 1
  ENSP ID: ENSP00000406345
ERPLGEMGSPPAAGFVTLGRLAKARGPRSSSAAFQLQMLQIVCSDTWADEDRCCELPASRDGETCPAFVSACSCSSETPGPPGPQGPPGPPGVKGEKGDHGLPGLQGHPGHQGIPGRVGLQGPKGMRGLEGTAGLPGPPGPRGFQGMAGARGTSGERGPPGTVGPTGLPGPKGERGEKGEPQSLATLYQLVSQACESAIQTHVSKFDSFHENTRPPMPILEQKLEPGTEPLGSPGTRSKALVPGEWGRGG

SEQ ID NO: 19148 - protein, 401 aa, Homo sapiens
  Payload ID: 3839
  Gene Symbol: COL20A1
  Gene Name: collagen, type XX, alpha 1
  ENSP ID: ENSP00000410799
EHTIVFLVRLLPETPREAFALWQMTAEDFQPLLGVLLDAGKKSLTYFHRDPRAALQEATFDPQEVRKIFFGSFHKVHVAVGRSKVRLYVDCRKVAERPLGEMGSPPAAGFVTLGRLAKARGPRSSSAAFQLQMLQIVCSDTWADEDRCCELPASRDGETCPAFVSACSCSSETPGPPGPQGPPGLPGRNGTPGEQGFPGPRGEPGPPGQMGPEGPGGQQGSPGTQGRAVQGPVGPPGVKGEKGDHGLPGLQGHPGHQGIPGRVGLQGPKGMRGLEGTAGLPGPPGPRGFQGMAGARGTSGERGPPGTVGPTGLPGPKGERGEKGEPQSLATLYQLVSQACESAIQTHVSKFDSFHENTRPPMPILEQKLEPGTEPLGSPGTRSKALVPGEWGRGGRHLEGR

SEQ ID NO: 19149 - protein, 1297 aa, Homo sapiens
  Payload ID: 3839
  Gene Symbol: COL20A1
  Gene Name: collagen, type XX, alpha 1
  Uniprot ID: Q9P218
  ENSP ID: ENSP00000414753
MSSGDPAHLGLCLWLWLGATLGREQVQASGLLRLAVLPEDRLQMKWRESEGSGLGYLVQVKPMAGDSEQEVILTTKTPKATVGGLSPSKGYTLQIFELTGSGRFLLARREFVIEDLKSSSLDRSSQRPLGSGAPEPTPSHTGSPDPEQASEPQVAFTPSQDPRTPGGSEWRETGPQFRCLPPVPADMVFLVDGSWSIGHSHFQQVKDFLASVIAPFEIGPDKVQVGLTQYSGDAQTEWDLNSLSTKEQVLAAVRRLRYKGGNTFTGLALTHVLGQNLQPAAGLRPEAAKVVILVTDGKSQDDVHTAARVLKDLGVNVFAVGVKNADEAELRLLASPPRDITVHSVLDFLQLGALAGLLSRLICQRLQGGSPRQGPAAAPALDTLPAPTSLVLSQVTSSSIRLSWTPAPRHPLKYLIVWRASRGGTPREVVVEGPAASTELHNLASRTEYLVSVFPIYEGGVGEGLRGLVTTAPLPPPRALTLAAVTPRTVHLTWQPSAGATHYLVRCSPASPKGEEEEREVQVGRPEVLLDGLEPGRDYEVSVQSLRGPEGSEARGIRARTPTLAPPRHLGFSDVSHDAARVFWEGAPRPVRLVRVTYVSSEGGHSGQTEAPGNATSATLGPLSSSTTYTVRVTCLYPGGGSSTLTGRVTTKKAPSPSQLSMTELPGDAVQLAWVAAAPSGVLVYQITWTPLGEGKAHEISVPGNLGTAVLPGLGRHTEYDVTILAYYRDGARSDPVSLRYTPSTVSRSPPSNLALASETPDSLQVSWTPPLGRVLHYWLTYAPASGLGPEKSVSVPGARSHVTLPDLQAATKYRVLVSAIYAAGRSEAVSATGQTACPALRPDGSLPGFDLMVAFSLVEKAYASIRGVAMEPSAFGGTPTFTLFKDAQLTRRVSDVYPAPLPPEHTIVFLVRLLPETPREAFALWQMTAEDFQPLLGVLLDAGKKSLTYFHRDPRAALQEATFDPQEVRKIFFGSFHKVHVAVGRSKVRLYVDCRKVAERPLGEMGSPPAAGFVTLGRLAKARGPRSSSAAFQLQMLQIVCSDTWADEDRCCELPASRDGETCPAFVSACSCSSETPGPPGPQGPPGLPGRNGTPGEQGFPGPRGPPGVKGEKGDHGLPGLQGHPGHQGIPGRVGLQGPKGMRGLEGTAGLPGPPGPRGFQGMAGARGTSGERGPPGTVGPTGLPGPKGERGEKGEPQSLATLYQLVSQACESAIQTHVSKFDSFHENTRPPMPILEQKLEPGTEPLGSPGTRSKALVPGEWGRGGRHLEGRGEPGAVGQMGSPGQQGASTQGLWE

SEQ ID NO: 19150 - protein, 957 aa, Homo sapiens
  Payload ID: 3840
  Gene Symbol: COL21A1
  Gene Name: collagen, type XXI, alpha 1
  Uniprot ID: Q96P44
  ENSP ID: ENSP00000244728
MAHYITFLCMVLVLLLQNSVLAEDGEVRSSCRTAPTDLVFILDGSYSVGPENFEIVKKWLVNITKNFDIGPKFIQVGVVQYSDYPVLEIPLGSYDSGEHLTAAVESILYLGGNTKTGKAIQFALDYLFAKSSRFLTKIAVVLTDGKSQDDVKDAAQAARDSKITLFAIGVGSETEDAELRAIANKPSSTYVFYVEDYIAISKIREVMKQKLCEESVCPTRIPVAARDERGFDILLGLDVNKKVKKRIQLSPKKIKGYEVTSKVDLSELTSNVFPEGLPPSYVFVSTQRFKVKKIWDLWRILTIDGRPQIAVTLNGVDKILLFTTTSVINGSQVVTFANPQVKTLFDEGWHQIRLLVTEQDVTLYIDDQQIENKPLHPVLGILINGQTQIGKYSGKEETVQFDVQKLRIYCDPEQNNRETACEIPGFNGECLNGPSDVGSTPAPCICPPGKPGLQGPKGDPGLPGNPGYPGQPGQDGKPGYQGIAGTPGVPGSPGIQGARGLPGYKGEPGRDGDKGDRGLPGFPGLHGMPGSKGEMGAKGDKGSPGFYGKKGAKGEKGNAGFPGLPGPAGEPGRHGKDGLMGSPGFKGEAGSPGAPGQDGTRGEPGIPGFPGNRGLMGQKGEIGPPGQQGKKGAPGMPGLMGSNGSPGQPGTPGSKGSKGEPGIQGMPGASGLKGEPGATGSPGEPGYMGLPGIQGKKGDKGNQGEKGIQGQKGENGRQGIPGQQGIQGHHGAKGERGEKGEPGVRGAIGSKGESGVDGLMGPAGPKGQPGDPGPQGPPGLDGKPGREFSEQFIRQVCTDVIRAQLPVLLQSGRIRNCDHCLSQHGSPGIPGPPGPIGPEGPRGLPGLPGRDGVPGLVGVPGRPGVRGLKGLPGRNGEKGSQGFGYPGEQGPPGPPGPEGPPGISKEGPPGDPGLPGKDGDHGKPGIQGQPGPPGICDPSLCFSVIARRDPFRKGPNY

SEQ ID NO: 19151 - protein, 136 aa, Homo sapiens
  Payload ID: 3840
  Gene Symbol: COL21A1
  Gene Name: collagen, type XXI, alpha 1
  ENSP ID: ENSP00000359853
MAHYITFLCMVLVLLLQNSVLAEDGEVRSSCRTAPTDLVFILDGSYSVGPENFEIVKKWLVNITKNFDIGPKFIQVGVVQYSDYPVLEIPLGSYDSGEHLTAAVESILYLGGNTKTGKAIQFALDYLFAKSSRFLT

SEQ ID NO: 19152 - protein, 954 aa, Homo sapiens
  Payload ID: 3840
  Gene Symbol: COL21A1
  Gene Name: collagen, type XXI, alpha 1
  Uniprot ID: Q96P44
  ENSP ID: ENSP00000359855
MAHYITFLCMVLVLLLQNSVLAEDGEVRSSCRTAPTDLVFILDGSYSVGPENFEIVKKWLVNITKNFDIGPKFIQVGVVQYSDYPVLEIPLGSYDSGEHLTAAVESILYLGGNTKTGKAIQFALDYLFAKSSRFLTKIAVVLTDGKSQDDVKDAAQAARDSKITLFAIGVGSETEDAELRAIANKPSSTYVFYVEDYIAISKIREVMKQKLCEESVCPTRIPVAARDERGFDILLGLDVNKKVKKRIQLSPKKIKGYEVTSKVDLSELTSNVFPEGLPPSYVFVSTQRFKVKKIWDLWRILTIDGRPQIAVTLNGVDKILLFTTTSVINGSQVVTFANPQVKTLFDEGWHQIRLLVTEQDVTLYIDDQQIENKPLHPVLGILINGQTQIGKYSGKEETVQFDVQKLRIYCDPEQNNRETACEIPGFCLNGPSDVGSTPAPCICPPGKPGLQGPKGDPGLPGNPGYPGQPGQDGKPGYQGIAGTPGVPGSPGIQGARGLPGYKGEPGRDGDKGDRGLPGFPGLHGMPGSKGEMGAKGDKGSPGFYGKKGAKGEKGNAGFPGLPGPAGEPGRHGKDGLMGSPGFKGEAGSPGAPGQDGTRGEPGIPGFPGNRGLMGQKGEIGPPGQQGKKGAPGMPGLMGSNGSPGQPGTPGSKGSKGEPGIQGMPGASGLKGEPGATGSPGEPGYMGLPGIQGKKGDKGNQGEKGIQGQKGENGRQGIPGQQGIQGHHGAKGERGEKGEPGVRGAIGSKGESGVDGLMGPAGPKGQPGDPGPQGPPGLDGKPGREFSEQFIRQVCTDVIRAQLPVLLQSGRIRNCDHCLSQHGSPGIPGPPGPIGPEGPRGLPGLPGRDGVPGLVGVPGRPGVRGLKGLPGRNGEKGSQGFGYPGEQGPPGPPGPEGPPGISKEGPPGDPGLPGKDGDHGKPGIQGQPGPPGICDPSLCFSVIARRDPFRKGPNY

SEQ ID NO: 19153 - protein, 125 aa, Homo sapiens
  Payload ID: 3840
  Gene Symbol: COL21A1
  Gene Name: collagen, type XXI, alpha 1
  ENSP ID: ENSP00000390958
  MOD_RES (1)..(1): Any amino acid
XRETACEIPGFNGECLNGPSDVGSTPAPCICPPGKPGLQGPKGYQGIAGTPGVPGSPGIQGARGLPGYKGEPGRDGDKGDRGLPGFPGLHGMPGSKGEMGAKGDKGSPGFYGKKGSIDHTTKYSY

SEQ ID NO: 19154 - protein, 79 aa, Homo sapiens
  Payload ID: 3840
  Gene Symbol: COL21A1
  Gene Name: collagen, type XXI, alpha 1
  ENSP ID: ENSP00000433624
AKGDKGSPGFYGKKGAKGEKGNAGFPGLPGPAGEPGRHGKDGLMGSPGFKGEAGSPGAPGQDGTRGEPTCAYEFSHVKE

SEQ ID NO: 19155 - protein, 956 aa, Homo sapiens [sequence omitted]

SEQ ID NO: 19156 - protein, 1626 aa, Homo sapiens
  Payload ID: 3841
  Gene Symbol: COL22A1
  Gene Name: collagen, type XXII, alpha 1
  Uniprot ID: Q8NFW1
  ENSP ID: ENSP00000303153
MAGLRGNAVAGLLWMLLLWSGGGGCQAQRAGCKSVHYDLVFLLDTSSSVGKEDFEKVRQWVANLVDTFEVGPDRTRVGVVRYSDRPTTAFELGLFGSQEEVKAAARRLAYHGGNTNTGDALRYITARSFSPHAGGRPRDRAYKQVAILLTDGRSQDLVLDAAAAAHRAGIRIFAVGVGEALKEELEEIASEPKSAHVFHVSDFNAIDKIRGKLRRRLCENVLCPSVRVEGDRFKHTNGGTKEITGFDLMDLFSVKEILGKRENGAQSSYVRMGSFPVVQSTEDVFPQGLPDEYAFVTTFRFRKTSRKEDWYIWQVIDQYSIPQVSIRLDGENKAVEYNAVGAMKDAVRVVFRGSRVNDLFDRDWHKMALSIQAQNVSLHIDCALVQTLPIEERENIDIQGKTVIGKRLYDSVPIDFDLQRIVIYCDSRHAELETCCDIPSGPCQVTVVTEPPPPPPPQRPPTPGSEQIGFLKTINCSCPAGEKGEMGVAGPMGLPGPKGDIGAIGPVGAPGPKGEKGDVGIGPFGQGEKGEKGSLGLPGPPGRDGSKGMRGEPGELGEPGLPGEVGMRGPQGPPGLPGPPGRVGAPGLQGERGEKGTRGEKGERGLDGFPGKPGDTGQQGRPGPSGVAGPQGEKGDVGPAGPPGVPGSVVQQEGLKGEQGAPGPRGHQGAPGPPGARGPIGPEGRDGPPGLQGLRGKKGDMGPPGIPGLLGLQGPPGPPGVPGPPGPGGSPGLPGEIGFPGKPGPPGPTGPPGKDGPNGPPGPPGTKGEPGERGEDGLPGKPGLRGEIGEQGLAGRPGEKGEAGLPGAPGFPGVRGEKGDQGEKGELGLPGLKGDRGEKGEAGPAGPPGLPGTTSLFTPHPRMPGEQGPKGEKGDPGLPGEPGLQGRPGELGPQGPTGPPGAKGQEGAHGAPGAAGNPGAPGHVGAPGPSGPPGSVGAPGLRGTPGKDGERGEKGAAGEEGSPGPVGPRGDPGAPGLPGPPGKGKDGEPGLRGSPGLPGPLGTKAACGKVRGSENCALGGQCVKGDRGAPGIPGSPGSRGDPGIGVAGPPGPSGPPGDKGSPGSRGLPGFPGPQGPAGRDGAPGNPGERGPPGKPGLSSLLSPGDINLLAKDVCNDCPPGPPGLPGLPGFKGDKGVPGKPGREGTEGKKGEAGPPGLPGPPGIAGPQGSQGERGADGEVGQKGDQGHPGVPGFMGPPGNPGPPGADGIAGAAGPPGIQGSPGKEGPPGPQGPSGLPGIPGEEGKEGRDGKPGPPGEPGKAGEPGLPGPEGARGPPGFKGHTGDSGAPGPRGESGAMGLPGQEGLPGKDGDTGPTGPQGPQGPRGPPGKNGSPGSPGEPGPSGTPGQKGSKGENGSPGLPGFLGPRGPPGEPGEKGVPGKEGVPGKPGEPGFKGERGDPGIKGDKGPPGGKGQPGDPGIPGHKGHTGLMGPQGLPGENGPVGPPGPPGQPGFPGLRGESPSMETLRRLIQEELGKQLETRLAYLLAQMPPAYMKSSQGRPGPPGPPGKDGLPGRAGPMGEPGRPGQGGLEGPSGPIGPKGERGAKGDPGAPGVGLRGEMGPPGIPGQPGEPGYAKDGLPGIPGPQGETGPAGHPGLPGPPGPPGQCDPSQCAYFASLAARPGNVKGP

SEQ ID NO: 19157 - protein, 1319 aa, Homo sapiens
  Payload ID: 3841
  Gene Symbol: COL22A1
  Gene Name: collagen, type XXII, alpha 1
  Uniprot ID: Q8NFW1
  ENSP ID: ENSP00000387655
MAGLRGNAVAGLLWMLLLWSGGGGCQAQRAGCKSVHYDLVFLLDTSSSVGKEDFEKVRQWVANLVDTFEVGPDRTRVGVVRYSDRPTTAFELGLFGSQEEVKAAARRLAYHGGNTNTGDALRYITARSFSPHAGGRPRDRAYKQVAILLTDGRSQDLVLDAAAAAHRAGIRIFAVGVGEALKEELEEIASEPKSAHVFHVSDFNAIDKIRGKLRRRLCENVLCPSVRVEGDRFKHTNGGTKEITGFDLMDLFSVKEILGKRENGAQSSYVRMGSFPVVQSTEDVFPQGLPDEYAFVTTFRFRKTSRKEDWYIWQVIDQYSIPQVSIRLDGENKAVEYNAVAGPQGEKGDVGPAGPPGVPGSVVQQEGLKGEQGAPGPRGHQGAPGPPGARGPIGPEGRDGPPGLQGLRGKKGDMGPPGIPGLLGLQGPPGPPGVPGPPGPGGSPGLPGEIGFPGKPGPPGPTGPPGKDGPNGPPGPPGTKGEPGERGEDGLPGKPGLRGEIGEQGLAGRPGEKGEAGLPGAPGFPGVRGEKGDQGEKGELGLPGLKGDRGEKGEAGPAGPPGLPGTTSLFTPHPRMPGEQGPKGEKGDPGLPGEPGLQGRPGELGPQGPTGPPGAKGQEGAHGAPGAAGNPGAPGHVGAPGPSGPPGSVGAPGLRGTPGKDGERGEKGAAGEEGSPGPVGPRGDPGAPGLPGPPGKGKDGEPGLRGSPGLPGPLGTKGDRGAPGIPGSPGSRGDPGIGVAGPPGPSGPPGDKGSPGSRGLPGFPGPQGPAGRDGAPGNPGERGPPGKPGLSSLLSPGDINLLAKDVCNDCPPGPPGLPGLPGFKGDKGVPGKPGREGTEGKKGEAGPPGLPGPPGIAGPQGSQGERGADGEVGQKGDQGHPGVPGFMGPPGNPGPPGADGIAGAAGPPGIQGSPGKEGPPGPQGPSGLPGIPGEEGKEGRDGKPGPPGEPGKAGEPGLPGPEGARGPPGFKGHTGDSGAPGPRGESGAMGLPGQEGLPGKDGDTGPTGPQGPQGPRGPPGKNGSPGSPGEPGPSGTPGQKGSKGENGSPGLPGFLGPRGPPGEPGEKGVPGKEGVPGKPGEPGFKGERGDPGIKGDKGPPGGKGQPGDPGIPGHKGHTGLMGPQGLPGENGPVGPPGPPGQPGFPGLRGESPSMETLRRLIQEELGKQLETRLAYLLAQMPPAYMKSSQGRPGPPGPPGKDGLPGRAGPMGEPGRPGQGGLEGPSGPIGPKGERGAKGDPGAPGVGLRGEMGPPGIPGQPGEPGYAKDGLPGIPGPQGETGPAGHPGLPGPPGPPGQCDPSQCAYFASLAARPGNVKGP

SEQ ID NO: 19158 - protein, 65 aa, Homo sapiens
  Payload ID: 3841
  Gene Symbol: COL22A1
  Gene Name: collagen, type XXII, alpha 1
  ENSP ID: ENSP00000428244
GEPGELGEPGLPGEVGMRGPQGPPGLPGPPGRVGAPVSEGTCLGRGSTPSPGIKNQVLASSSTCI

SEQ ID NO: 19159 - protein, 540 aa, Homo sapiens
  Payload ID: 3842
  Gene Symbol: COL23A1
  Gene Name: collagen, type XXIII, alpha 1
  Uniprot ID: Q86Y22
  ENSP ID: ENSP00000375069
MGPGERAGGGGDAGKGNAAGGGGGGRSATTAGSRAVSALCLLLSVGSAAACLLLGVQAAALQGRVAALEEERELLRRAGPPGALDAWAEPHLERLLREKLDGLAKIRTAREAPSECVCPPGPPGRRGKPGRRGDPGPPGQSGRDGYPGPLGLDGKPGLPGPKGEKGAPGDFGPRGDQGQDGAAGPPGPPGPPGARGPPGDTGKDGPRGAQGPAGPKGEPGQDGEMGPKGPPGPKGEPGVPGKKGDDGTPSQPGPPGPKGEPGSMGPRGENGVDGAPGPKGEPGHRGTDGAAGPRGAPGLKGEQGDTVVIDYDGRILDALKGPPGPQGPPGPPGIPGAKGELGLPGAPGIDGEKGPKGQKGDPGEPGPAGLKGEAGEMGLSGLPGADGLKGEKGESASDSLQESLAQLIVEPGPPGPPGPPGPMGLQGIQGPKGLDGAKGEKGASGERGPSGLPGPVGPPGLIGLPGTKGEKGRPGEPGLDGFPGPRGEKGDRSERGEKGERGVPGRKGVKGQKGEPGPPGLDQPCPVGPDGLPVPGCWHK

SEQ ID NO: 19160 - protein, 393 aa, Homo sapiens [sequence omitted]

SEQ ID NO: 19161 - protein, 1714 aa, Homo sapiens
  Payload ID: 3843
  Gene Symbol: COL24A1
  Gene Name: collagen, type XXIV, alpha 1
  Uniprot ID: Q17RW2
  ENSP ID: ENSP00000359603
MHLRAHRTRRGKVSPTAKTKSLLHFIVLCVAGVVVHAQEQGIDILHQLGLGGKDVRHSSPATAVPSASTPLPQGVHLTESGVIFKNDAYIETPFVKILPVNLGQPFTILTGLQSHRVNNAFLFSIRNKNRLQLGVQLLPKKLVVHIRGKQPAVFNYSVHDEQWHSFAITIRNQSVSMFVECGKKYFSTETIPEVQTFDSNSVFTLGSMNNNSIHFEGIVCQLDIIPSAEASADYCRYVKQQCRQADKYQPETSIPCTTLIPTKIPEHSPPPKLFAEKVLSEDTFTEGKSIPNIIKNDSETVYKRQEHQISRSQLSSLQSGNVSAVDLTNHGIQAKEMITEEDTQTNFSLSVTTHRISEAKMNTKEKFSSLLNMSDNITQHDDRVTGLSLFKKMPSILPQIKQDTITNLKKAITANLHTNELMEMQPILNTSLHRVTNEPSVDNHLDLRKEGEFYPDATYPIENSYETELYDYYYYEDLNTMLEMEYLRGPKGDTGPPGPPGPAGIPGPSGKRGPRGIPGPHGNPGLPGLPGPKGPKGDPGFSPGQPVPGEKGDQGLSGLMGPPGMQGDKGLKGHPGLPGLPGEQGIPGFAGNIGSPGYPGRQGLAGPEGNPGPKGAQGFIGSPGEAGQLGPEGERGIPGIRGKKGFKGRQGFPGDFGDRGPAGLDGSPGLVGGTGPPGFPGLRGSVGPVGPIGPAGIPGPMGLSGNKGLPGIKGDKGEQGTAGELGEPGYPGDKGAVGLPGPPGMRGKSGPSGQTGDPGLQGPSGPPGPEGFPGDIGIPGQNGPEGPKGLLGNRGPPGPPGLKGTQGEEGPIGAFGELGPRGKPGQKGYAGEPGPEGLKGEVGDQGNIGKIGETGPVGLPGEVGMTGSIGEKGERGSPGPLGPQGEKGVMGYPGPPGVPGPIGPLGLPGHVGARGPPGSQGPKGQRGSRGPDGLLGEQGIQGAKGEKGDQGKRGPHGLIGKTGNPGERGFQGKPGLQGLPGSTGDRGLPGEPGLRGLQGDVGPPGEMGMEGPPGTEGESGLQGEPGAKGDVGTAGSVGGTGEPGLRGEPGAPGEEGLQGKDGLKGVPGGRGLPGEDGEKGEMGLPGIIGPLGRSGQTGLPGPEGIVGIPGQRGRPGKKGDKGQIGPTGEVGSRGPPGKIGKSGPKGARGTRGAVGHLGLMGPDGEPGIPGYRGHQGQPGPSGLPGPKGEKGYPGEDSTVLGPPGPRGEPGPVGDQGERGEPGAEGYKGHVGVPGLRGATGQQGPPGEPGDQGEQGLKGERGSEGNKGKKGAPGPSGKPGIPGLQGLLGPKGIQGYHGADGISGNPGKIGPPGKQGLPGIRGGPGRTGLAGAPGPPGVKGSSGLPGSPGIQGPKGEQGLPGQPGIQGKRGHRGAQGDQGPCGDPGLKGQPGEYGVQGLTGFQGFPGPKGPEGDAGIVGISGPKGPIGHRGNTGPLGREGIIGPTGRTGPRGEKGFRGETGPQGPRGQPGPPGPPGAPGPRKQMDINAAIQALIESNTALQMESYQNTEVTLIDHSEEIFKTLNYLSNLLHSIKNPLGTRDNPARICKDLLNCEQKVSDGKYWIDPNLGCPSDAIEVFCNFSAGGQTCLPPVSVTKLEFGVGKVQMNFLHLLSSEATHIITIHCLNTPRWTSTQTSGPGLPIGFKGWNGQIFKVNTLLEPKVLSDDCKIQDGSWHKATFLFHTQEPNQLPVIEVQKLPHLKTERKYYIDSSSVCFL

SEQ ID NO: 19162 - protein, 890 aa, Homo sapiens
  Payload ID: 3843
  Gene Symbol: COL24A1
  Gene Name: collagen, type XXIV, alpha 1
  ENSP ID: ENSP00000409515
MHLRAHRTRRGKVSPTAKTKSLLHFIVLCVAGVVVHAQEQGIDILHQLGLGGKDVRHSSPATAVPSASTPLPQGVHLTESGVIFKNDAYIETPFVKILPVNLGQPFTILTGLQSHRVNNAFLFSIRNKNRLQLGVQLLPKKLVVHIRGKQPAVFNYSVHDEQWHSFAITIRNQSVSMFVECGKKYFSTETIPEVQTFDSNSVFTLGSMNNNSIHFEGIVCQLDIIPSAEASADYCRYVKQQCRQADKYQPETSIPCTTLIPTKIPEHSPPPKLFAEKVLSEDTFTEGKSIPNIIKNDSETVYKRQEHQISRSQLSSLQSGNVSAVDLTNHGIQAKEMITEEDTQTNFSLSVTTHRISEAKMNTKEKFSSLLNMSDNITQHDDRVTGLSLFKKMPSILPQIKQDTITNLKKAITANLHTNELMEMQPILNTSLHRVTNEPSVDNHLDLRKEGEFYPDATYPIENSYETELYDYYYYEDLNTMLEMEYLRGPKGDTGPPGPPGPAGIPGPSGKRGPRGIPGPHGNPGLPGLPGPKGPKGDPGFSPGQPVPGEKGDQGLSGLMGPPGMQGDKGLKGHPGLPGLPGEQGIPGFAGNIGSPGYPGRQGLAGPEGNPGPKGAQGFIGSPGEAGQLGPEGERGIPGIRGKKGFKGRQGFPGDFGDRGPAGLDGSPGLVGGTGPPGFPGLRGSVGPVGPIGPAGIPGPMGLSGNKGLPGIKGDKGEQGTAGELGEPGYPGDKGAVGLPGPPGMRGKSGPSGQTGDPGLQGPSGPPGPEGFPGDIGIPGQNGPEGPKGLLGNRGPPGPPGLKGTQGEEGPIGAFGELGPRGKPGQKGYAGEPGPEGLKGEVGDQGNIGKIGETMESCSVTQAGAQWHDLGSLHPLPPGFKRFSCLSLPG

SEQ ID NO: 19163 - protein, 166 aa, Homo sapiens
  Payload ID: 3843
  Gene Symbol: COL24A1
  Gene Name: collagen, type XXIV, alpha 1
  ENSP ID: ENSP00000432605
  MOD_RES (1)..(1): Any amino acid
XIKNPLGTRDNPARICKDLLNCEQKVSDGKYWIDPNLGCPSDAIEVFCNFSAGGQTCLPPVSVTKAFTIITPEIEEGRILPFLGNHEPLIKSSMIVLLPKYPHHHPHSSGSWHRIIIEGKKMGLCELCRGNRSSGEADSSCFHDQITSLISLIHKLNPRKTREVLG

SEQ ID NO: 19164 - protein, 81 aa, Homo sapiens
  Payload ID: 3843
  Gene Symbol: COL24A1
  Gene Name: collagen, type XXIV, alpha 1
  ENSP ID: ENSP00000434740
MHLRAHRTRRGKVSPTAKTKSLLHFIVLCVAGVVVHAQEQGIDILHQLGLGGKDVRHSSPATAVPSASTPLPQGVHLTESG

SEQ ID NO: 19165 - protein, 642 aa, Homo sapiens
  Payload ID: 3844
  Gene Symbol: COL25A1
  Gene Name: collagen, type XXV, alpha 1
  Uniprot ID: Q9BXS0
  ENSP ID: ENSP00000382077
MLLKKHAGKGGGREPRSEDPTPAEQHCARTMPPCAVLAALLSVVAVVSCLYLGVKTNDLQARIAALESAKGAPSIHLLPDTLDHLKTMVQEKVERLLAQKSYEHMAKIRIAREAPSECNCPAGPPGKRGKRGRRGESGPPGQPGPQGPPGPKGDKGEQGDQGPRMVFPKINHGFLSADQQLIKRRLIKGDQGQAGPPGPPGPPGPRGPPGDTGKDGPRGMPGVPGEPGKPGEQGLMGPLGPPGQKGSIGAPGIPGMNGQKGEPGLPGAVGQNGIPGPKGEPGEQGEKGDAGENGPKGDTGEKGDPGSSAAGIKGEPGESGRPGQKGEPGLPGLPGLPGIKGEPGFIGPQGEPGLPGLPGTKGERGEAGPPGRGERGEPGAPGPKGKQGESGTRGPKGSKGDRGEKGDSGAQGPRGPPGQKGDQGATEIIDYNGNLHEALQRITTLTVTGPPGPPGPQGLQGPKGEQGSPGIPGMDGEQGLKGSKGDMGDPGMTGEKGGIGLPGLPGANGMKGEKGDSGMPGPQGPSIIGPPGPPGPHGPPGPMGPHGLPGPKGTDGPMGPHGPAGPKGERGEKGAMGEPGPRGPYGLPGKDGEPGLDGFPGPRGEKGDLGEKGEKVTSPSQHVPCLILLLLSALLFSLCDSI

SEQ ID NO: 19166 - protein, 645 aa, Homo sapiens
  Payload ID: 3844
  Gene Symbol: COL25A1
  Gene Name: collagen, type XXV, alpha 1
  ENSP ID: ENSP00000382078
MLLKKHAGKGGGREPRSEDPTPAEQHCARTMPPCAVLAALLSVVAVVSCLYLGVKTNDLQARIAALESAKGAPSIHLLPDTLDHLKTMVQEKVERLLAQKSYEHMAKIRIAREAPSECNCPAGPPGKRGKRGRRGESGPPGQPGPQGPPGPKGDKGEQGDQGPRGLPGFPTVAALHSNQILTVKGDQGQAGPPGPPGPPGPRGPPGDTGKDGPRGMPGVPGEPGKPGEQGLMGPLGPPGQKGSIGAPGIPGMNGQKGEPGLPGAVGQNGIPGPKGEPGEQGEKGDAGENGPKGDTGEKGDPGSSAAGIKGEPGESGRPGQKGEPGLPGLPGLPGIKGEPGFIGPQGEPGLPGLPGTKGERGEAGPPGRGERGEPGAPGPKGDRGEKGDSGAQGPRGPPGQKGDQGATEIIDYNGNLHEALQGPPGPPGPQGLQGPKGEQGSPGIPGMDGEQGLKGSKGDMGDPGMTGEKGGIGLPGLPGANGMKGEKGDSGMPGPQGPSIIGPPGPPGPHGPPGPMGPHGLPGPKGEPGLNGVKGLKGEPGQKGDRGPLGLPGASGLDGKPGSRGTDGPMGPHGPAGPKGERGEKGAMGEPGPRGPYGLPGFPGPRGEKGDLGEKGEKVTSPSQHVPCLILLLLSALLFSLCDSI

SEQ ID NO: 19167 - protein, 654 aa, Homo sapiens
  Payload ID: 3844
  Gene Symbol: COL25A1
  Gene Name: collagen, type XXV, alpha 1
  Uniprot ID: Q9BXS0
  ENSP ID: ENSP00000382083
MLLKKHAGKGGGREPRSEDPTPAEQHCARTMPPCAVLAALLSVVAVVSCLYLGVKTNDLQARIAALESAKGAPSIHLLPDTLDHLKTMVQEKVERLLAQKSYEHMAKIRIAREAPSECNCPAGPPGKRGKRGRRGESGPPGQPGPQGPPGPKGDKGEQGDQGPRMVFPKINHGFLSADQQLIKRRLIKGDQGQAGPPGPPGPPGPRGPPGDTGKDGPRGMPGVPGEPGKPGEQGLMGPLGPPGQKGSIGAPGIPGMNGQKGEPGLPGAVGQNGIPGPKGEPGEQGEKGDAGENGPKGDTGEKGDPGSSAAGIKGEPGESGRPGQKGEPGLPGLPGLPGIKGEPGFIGPQGEPGLPGLPGTKGERGEAGPPGRGERGEPGAPGPKGKQGESGTRGPKGSKGDRGEKGDSGAQGPRGPPGQKGDQGATEIIDYNGNLHEALQRITTLTVTGPPGPPGPQGLQGPKGEQGSPGIPGMDGEQGLKGSKGDMGDPGMTGEKGGIGLPGLPGANGMKGEKGDSGMPGPQGPSIIGPPGPPGPHGPPGPMGPHGLPGPKGTDGPMGPHGPAGPKGERGEKGAMGEPGPRGPYGLPGKDGEPGLDGFPGPRGEKGDLGEKGEKGFRGVKGEKGEPGQPGLDGLDAPCQLGPDGLPMPGCWQK

SEQ ID NO: 19168 - protein, 70 aa, Homo sapiens
  Payload ID: 3844
  Gene Symbol: COL25A1
  Gene Name: collagen, type XXV, alpha 1
  ENSP ID: ENSP00000422266
MLLKKHAGKGGGREPRSEDPTPAEQHCARTMPPCAVLAALLSVVAVVSCLYLGVKTNDLQARIAALESAK

SEQ ID NO: 19169 - protein, 29 aa, Homo sapiens
  Payload ID: 3844
  Gene Symbol: COL25A1
  Gene Name: collagen, type XXV, alpha 1
  ENSP ID: ENSP00000426841
  MOD_RES (1)..(1): Any amino acid
XGPRGEKGDLGEKGEKGPDGLPMPGCWQK

SEQ ID NO: 19170 - protein, 496 aa, Homo sapiens
  Payload ID: 3844
  Gene Symbol: COL25A1
  Gene Name: collagen, type XXV, alpha 1
  ENSP ID: ENSP00000437131
MLLKKHAGKGGGREPRSEDPTPAEQHCARTMPPCAVLAALLSVVAVVSCLYLGVKTNDLQARIAALESAKGAPSIHLLPDTLDHLKTMVQEKVERLLAQKSYEHMAKIRIAREAPSECNCPAGPPGKRGKRGRRGESGPPGQPGPQGPPGPKGDKGEQGDQGPRGPLGPPGQKGSIGAPGIPGMNGQKGEPGLPGAVGQNGIPGPKGEPGEQGEKGDAGENGPKGDTGEKGDPGSSAAGIKGEPGESGRPGQKGEPGLPGLPGLPGIKGEPGFIGPQGEPGLPGLPGTKGERGEAGPPGRGERGEPGAPGPKGKQGESGTRGPKGSKGDRGEKGDSGAQGPRGPPGQKGDQGATEIIDYNGNLHEALQRITTLTVTGPPGPPGPQGLQGPKGEQGSPGIPGMDGEQGLKGSKGDMGDPGSQWNERRKRRFWNAGSTGSFYHRPTRPTRSPWPTWPHGTSWTSWTKGSIWLRRKARIPGYRWSYGTPWPCRSQRRKR

SEQ ID NO: 19171 - protein, 333 aa, Homo sapiens [sequence omitted]

SEQ ID NO: 19172 - protein, 494 aa, Homo sapiens [sequence omitted]

SEQ ID NO: 19173 - protein, 441 aa, Homo sapiens
  Payload ID: 3845
  Gene Symbol: COL26A1
  Gene Name: collagen, type XXVI, alpha 1
  Uniprot ID: Q96A83
  ENSP ID: ENSP00000318234
MKLALLLPWACCCLCGSALATGFLYPFSAAALQQHGYPEPGAGSPGSGYASRRHWCHHTVTRTVSCQVQNGSETVVQRVYQSCRWPGPCANLVSYRTLIRPTYRVSYRTVTVLEWRCCPGFTGSNCDEECMNCTRLSDMSERLTTLEAKVLLLEAAERPSSPDNDLPAPESTPPTWNEDFLPDAIPLAHPVPRQRRPTGPAGPPGQTGPPGPAGPPGSKGDRGQTGEKGPAGPPGLLGPPGPRGLPGEMGRPGPPGPPGPAGNPGPSPNSPQGALYSLQPPTDKDNGDSRLASAIVDTVLAGVPGPRGPPGPPGPPGPRGPPGPPGTPGSQGLAGERGTVGPSGEPGVKGEEGEKAATAEGEGVQQLREALKILAERVLILEHMIGIHDPLASPEGGSGQDAALRANLKMKRGGAQPDGVLAALLGPDPGQKSVDQASSRK

SEQ ID NO: 19174 - protein, 439 aa, Homo sapiens
  Payload ID: 3845
  Gene Symbol: COL26A1
  Gene Name: collagen, type XXVI, alpha 1
  Uniprot ID: Q96A83
  ENSP ID: ENSP00000482102
MKLALLLPWACCCLCGSALATGFLYPFSAAALQQHGYPEPGAGSPGSGYASRRHWCHHTVTRTVSCQVQNGSETVVQRVYQSCRWPGPCANLVRTLIRPTYRVSYRTVTVLEWRCCPGFTGSNCDEECMNCTRLSDMSERLTTLEAKVLLLEAAERPSSPDNDLPAPESTPPTWNEDFLPDAIPLAHPVPRQRRPTGPAGPPGQTGPPGPAGPPGSKGDRGQTGEKGPAGPPGLLGPPGPRGLPGEMGRPGPPGPPGPAGNPGPSPNSPQGALYSLQPPTDKDNGDSRLASAIVDTVLAGVPGPRGPPGPPGPPGPRGPPGPPGTPGSQGLAGERGTVGPSGEPGVKGEEGEKAATAEGEGVQQLREALKILAERVLILEHMIGIHDPLASPEGGSGQDAALRANLKMKRGGAQPDGVLAALLGPDPGQKSVDQASSRK

SEQ ID NO: 19175 - protein, 1860 aa, Homo sapiens
  Payload ID: 3846
  Gene Symbol: COL27A1
  Gene Name: collagen, type XXVII, alpha 1
  Uniprot ID: Q8IZC6
  ENSP ID: ENSP00000348385
MGAGSARGARGTAAAAAARGGGFLFSWILVSFACHLASTQGAPEDVDILQRLGLSWTKAGSPAPPGVIPFQSGFIFTQRARLQAPTGTVIPAALGTELALVLSLCSHRVNHAFLFAVRSQKRKLQLGLQFLPGKTVVHLGSRRSVAFDLDMHDGRWHHLALELRGRTVTLVTACGQRRVPVLLPFHRDPALDPGGSFLFGKMNPHAVQFEGALCQFSIYPVTQVAHNYCTHLRKQCGQADTYQSPLGPLFSQDSGRPFTFQSDLALLGLENLTTATPALGSLPAGRGPRGTVAPATPTKPQRTSPTNPHQHMAVGGPAQTPLLPAKLSASNALDPMLPASVGGSTRTPRPAAAQPSQKITATKIPKSLPTKPSAPSTSIVPIKSPHPTQKTAPSSFTKSALPTQKQVPPTSRPVPARVSRPAEKPIQRNPGMPRPPPPSTRPLPPTTSSSKKPIPTLARTEAKITSHASKPASARTSTHKPPPFTALSSSPAPTPGSTRSTRPPATMVPPTSGTSTPRTAPAVPTPGSAPTGSKKPIGSEASKKAGPKSSPRKPVPLRPGKAARDVPLSDLTTRPSPRQPQPSQQTTPALVLAPAQFLSSSPRPTSSGYSIFHLAGSTPFPLLMGPPGPKGDCGLPGPPGLPGLPGIPGARGPRGPPGPYGNPGLPGPPGAKGQKGDPGLSPGKAHDGAKGDMGLPGLSGNPGPPGRKGHKGYPGPAGHPGEQGQPGPEGSPGAKGYPGRQGLPGPVGDPGPKGSRGYIGLPGLFGLPGSDGERGLPGVPGKRGKMGMPGFPGVFGERGPPGLDGNPGELGLPGPPGVPGLIGDLGVLGPIGYPGPKGMKGLMGSVGEPGLKGDKGEQGVPGVSGDPGFQGDKGSQGLPGFPGARGKPGPLGKVGDKGSIGFPGPPGPEGFPGDIGPPGDNGPEGMKGKPGARGLPGPRGQLGPEGDEGPMGPPGAPGLEGQPGRKGFPGRPGLDGVKGEPGDPGRPGPVGEQGFMGFIGLVGEPGIVGEKGDRGMMGPPGVPGPKGSMGHPGMPGGMGTPGEPGPQGPPGSRGPPGMRGAKGRRGPRGPDGPAGEQGSRGLKGPPGPQGRPGRPGQQGVAGERGHLGSRGFPGIPGPSGPPGTKGLPGEPGPQGPQGPIGPPGEMGPKGPPGAVGEPGLPGEAGMKGDLGPLGTPGEQGLIGQRGEPGLEGDSGPMGPDGLKGDRGDPGPDGEHGEKGQEGLMGEDGPPGPPGVTGVRGPEGKSGKQGEKGRTGAKGAKGYQGQLGEMGVPGDPGPPGTPGPKGSRGSLGPTGAPGRMGAQGEPGLAGYDGHKGIVGPLGPPGPKGEKGEQGEDGKAEGPPGPPGDRGPVGDRGDRGEPGDPGYPGQEGVQGLRGKPGQQGQPGHPGPRGWPGPKGSKGAEGPKGKQGKAGAPGRRGVQGLQGLPGPRGVVGRQGLEGIAGPDGLPGRDGQAGQQGEQGDDGDPGPMGPAGKRGNPGVAGLPGAQGPPGFKGESGLPGQLGPPGKRGTEGRTGLPGNQGEPGSKGQPGDSGEMGFPGMAGLFGPKGPPGDIGFKGIQGPRGPPGLMGKEGIVGPLGILGPSGLPGPKGDKGSRGDWGLQGPRGPPGPRGRPGPPGPPGGPIQLQQDDLGAAFQTWMDTSGALRPESYSYPDRLVLDQGGEIFKTLHYLSNLIQSIKTPLGTKENPARVCRDLMDCEQKMVDGTYWVDPNLGCSSDTIEVSCNFTHGGQTCLKPITASKVEFAISRVQMNFLHLLSSEVTQHITIHCLNMTVWQEGTGQTPAKQAVRFRAWNGQIFEAGGQFRPEVSMDGCKVQDGRWHQTLFTFRTQDPQQLPIISVDNLPPASSGKQYRLEVGPACFL

SEQ ID NO: 19176 - protein, 714 aa, Homo sapiens
  Payload ID: 3846
  Gene Symbol: COL27A1
  Gene Name: collagen, type XXVII, alpha 1
  ENSP ID: ENSP00000391328
LSWTKAGSPAPPGVIPFQSGFIFTQRARLQAPTGTVIPAALGTELALVLSLCSHRVNHAFLFAVRSQKRKLQLGLQFLPGKTVVHLGSRRSVAFDLDMHDGRWHHLALELRGRTVTLVTACGQRRVPVLLPFHRDPALDPGGSFLFGKMNPHAVQFEGALCQFSIYPVTQVAHNYCTHLRKQCGQADTYQSPLGPLFSQDSGRPFTFQSDLALLGLENLTTATPALGSLPAGRGPRGTVAPATPTKPQRTSPTNPHQHMAVGGPAQTPLLPAKLSASNALDPMLPASVGGSTRTPRPAAAQPSQKITATKIPKSLPTKPSAPSTSIVPIKSPHPTQKTAPSSFTKSALPTQKQVPPTSRPVPARVSRPAEKPIQRNPGMPRPPPPSTRPLPPTTSSSKKPIPTLARTEAKITSHASKPASARTSTHKPPPFTALSSSPAPTPGSTRSTRPPATMVPPTSGTSTPRTAPAVPTPGSAPTGSKKPIGSEASKKAGPKSSPRKPVPLRPGKAARDVPLSDLTTRPSPRQPQPSQQTTPALVLAPAQFLSSSPRPTSSGYSIFHLAGSTPFPLLMGPPGPKGDCGLPGPPGLPGLPGIPGARGPRGPPGPYGNPGLPGPPGAKGDMGLPGLSGNPGPPGRKGLPGPVGDPGPKGSRGYIGLPGLFGLPGSDGERGLPGVPGKRGKMGMPVLLPQSSEARGGNSMPSEGALAGRHGSHL

SEQ ID NO: 19177 - protein, 485 aa, Homo sapiens
  Payload ID: 3846
  Gene Symbol: COL27A1
  Gene Name: collagen, type XXVII, alpha 1
  ENSP ID: ENSP00000432928
  MOD_RES (1)..(1): Any amino acid
XAAQPSQKITATKIPKSLPTKPSAPSTSIVPIKSPHPTQKTAPSSFTKSALPTQKQVPPTSRPVPARVSRPAEKPIQRNPGMPRPPPPSTRPLPPTTSSSKKPIPTLARTEAKITSHASKPASARTSTHKPPPFTALSSSPAPTPGSTRSTRPPATMVPPTSGTSTPRTAPAVPTPGSAPTGSKKPIGSEASKKAGPKSSPRKPVPLRPGKAARDVPLSDLTTRPSPRQPQPSQQTTPALVLAPAQFLSSSPRPTSSGYSIFHLAGSTPFPLLMGPPGPKGDCGLPGPPGLPGLPGIPGARGPRGPPGPYGNPGLPGPPGAKGDMGLPGLSGNPGPPGRKGHKGYPGPAGHPGEQGQPGPEGSPGAKGYPGRQGLPGPVGDPGPKGSRGYIGLPGLFGLPGSDGERGLPGVPGKRGKMGMPGFPGVFGERGPPGLDGNPGELGLPGPPGVPGLIGDLGVLGPIGYPGPKGMKGLMGSVGEPGLKG

SEQ ID NO: 19178 - protein, 1125 aa, Homo sapiens
  Payload ID: 3847
  Gene Symbol: COL28A1
  Gene Name: collagen, type XXVIII, alpha 1
  Uniprot ID: Q2UY09
  ENSP ID: ENSP00000382356
MWNRYFVFYLLLLSAFTSQTVSGQRKKGPKSNLLARKSDVQGSICFIDIVFIVDSSESSKIALFDKQKDFVDSLSDKIFQLTPGRSLEYDIKLAALQFSSSVQIDPPFSSWKDLQTFKQKVKSMNLIGQGTFSYYAISNATRLLKREGRKDGVKVVLLMTDGIDHPKNPDVQSISEDARISGISFITIALSTVVNEAKLRLISGDSSSEPTLLLSDPTLVDKIQDRLDILFEKKCERKICECEKGDPGDPGPPGTHGNPGIKGERGPKGNPGNAQKGEAGERGPGGIPGYKGDKGERGECGKPGIKGDKGSPGPYGPKGPRGIQGITGPPGDPGPKGFQGNKGEPGPPGPYGSPGAPGIGQQGIKGERGQEGRPGAPGPIGVGEPGQPGPRGPEGVPGERGLPGEGFPGPKGEKGSEGPTGPQGLQGLSIKGEKGDIGPVGPQGPMGIPGIGSQGEQGIQGPIGPPGPQGPAGQGLPGSKGEVGQMGPTGPRGPVGIGVQGPKGEPGSIGLPGQPGVPGEDGAAGKKGEAGLPGARGPEGPPGKGQPGPKGDEGKKGSKGNQGQRGLPGPEGPKGEPGIMGPFGMPGTSIPGPPGPKGDRGGPGIPGFKGEPGLSIRGPKGVQGPRGPVGAPGLKGDGYPGVPGPRGLPGPPGPMGLRGVGDTGAKGEPGVRGPPGPSGPRGVGTQGPKGDTGQKGLPGPPGPPGYGSQGIKGEQGPQGFPGPKGTMGHGLPGQKGEHGERGDVGKKGDKGEIGEPGSPGKQGLQGPKGDLGLTKEEIIKLITEICGCGPKCKETPLELVFVIDSSESVGPENFQIIKNFVKTMADRVALDLATARIGIINYSHKVEKVANLKQFSSKDDFKLAVDNMQYLGEGTYTATALQAANDMFEDARPGVKKVALVITDGQTDSRDKEKLTEVVKNASDTNVEIFVIGVVKKNDPNFEIFHKEMNLIATDPEHVYQFDDFFTLQDTLKQKLFQKICEDFDSYLVQIFGSSSPQPGFGMSGEELSESTPEPQKEISESLSVTRDQDEDDKAPEPTWADDLPATTSSEATTTPRPLLSTPVDGAEDPRCLEALKPGNCGEYVVRWYYDKQVNSCARFWFSGCNGSGNRFNSEKECQETCIQG

SEQ ID NO: 19179 - protein, 80 aa, Homo sapiens
  Payload ID: 3847
  Gene Symbol: COL28A1
  Gene Name: collagen, type XXVIII, alpha 1
  ENSP ID: ENSP00000391380
ATTSSEATTTPRPLLSTPVDGAEDPRCLEALKPGNCGEYVVRWYYDKQVNSCARFWFSGCNGSGNRFNSEKECQETCIQG

SEQ ID NO: 19180 - protein, 67 aa, Homo sapiens
  Payload ID: 3847
  Gene Symbol: COL28A1
  Gene Name: collagen, type XXVIII, alpha 1
  ENSP ID: ENSP00000408401
KGNPGNAQKGEAGERGPGGIPGYKGDKQYSREDREVEHNNEKYVACLLPSPALLQQSSLTHHGTCSH

SEQ ID NO: 19181 - protein, 130 aa, Homo sapiens
  Payload ID: 3847
  Gene Symbol: COL28A1
  Gene Name: collagen, type XXVIII, alpha 1
  ENSP ID: ENSP00000410557
GMPGTSIPGPPGPKGDRGGPGIPGFKGEPGLSIRGPKGVQGPRGPVGAPGLKGDGYPGVPGPRGLPGPPGPMGLRGVGDTGAKTLNTSHGLEDPSCPDCSFCHFSLAADIQPKWPALLQLIPASGTRQDG

SEQ ID NO: 19182 - protein, 142 aa, Homo sapiens
  Payload ID: 3847
  Gene Symbol: COL28A1
  Gene Name: collagen, type XXVIII, alpha 1
  ENSP ID: ENSP00000413093
FDSYLVQIFGSSSPQPGFGMSGEELSESTPEPQKEISESLSVTRDQDEDDKAPEPTWADDLPATTSSEATTTPRPLLSTPVDGAEDPRCLEALKPGNCGEYVVRWYYDKQVNSCARFWFSGCNGSGNRFNSEKECQETCIQG

SEQ ID NO: 19183 - protein, 445 aa, Homo sapiens
  Payload ID: 3848
  Gene Symbol: COLQ
  Gene Name: collagen-like tail subunit (single strand of homotrimer)  of asymmetric acetylcholinesterase
  Uniprot ID: Q9Y215
  ENSP ID: ENSP00000373291
MTGSSFSLAHLLIISGLLCYSAGCLALPSLDQKKRGGHKACCLLTPPPPPLFPPPFFRGGRSPLLSPDMKNLMLELETSQSPCMQGSLGSPGPPGPQGPPGLPGKTGPKGEKGELGRPGRKGRPGPPGVPGMPGPIGWPGPEGPRGEKGDLGMMGLPGSRGPMGSKGYPGSRGEKGSRGEKGDLGPKGEKGFPGFPGMLGQKGEMGPKGEPGIAGHRGPTGRPGKRGKQGQKGDSGVMGPPGKPGPSGQPGRPGPPGPPPAGQLIMGPKGERGFPGPPGRCLCGPTMNVNNPSYGESVYGPSSPRVPVIFVVNNQEELERLNTQNAIAFRRDQRSLYFKDSLGWLPIQLTPFYPVDYTADQHGTCGDGLLQPGEECDDGNSDVGDDCIRCHRAYCGDGHRHEGVEDCDGSDFGYLTCETYLPGSYGDLQCTQYCYIDSTPCRYFT

SEQ ID NO: 19184 - protein, 421 aa, Homo sapiens
  Payload ID: 3848
  Gene Symbol: COLQ
  Gene Name: collagen-like tail subunit (single strand of homotrimer)  of asymmetric acetylcholinesterase
  Uniprot ID: Q9Y215
  ENSP ID: ENSP00000373296
MVVLNPMTLGIYLQLFFLSIVSQPTFINSVLPISAALPSLDQKKRGGHKACCLLTPPPPPLFPPPFFRGGRSPGPPGLPGKTGPKGEKGELGRPGRKGRPGPPGVPGMPGPIGWPGPEGPRGEKGDLGMMGLPGSRGPMGSKGYPGSRGEKGSRGEKGDLGPKGEKGFPGFPGMLGQKGEMGPKGEPGIAGHRGPTGRPGKRGKQGQKGDSGVMGPPGKPGPSGQPGRPGPPGPPPAGQLIMGPKGERGFPGPPGRCLCGPTMNVNNPSYGESVYGPSSPRVPVIFVVNNQEELERLNTQNAIAFRRDQRSLYFKDSLGWLPIQLTPFYPVDYTADQHGTCGDGLLQPGEECDDGNSDVGDDCIRCHRAYCGDGHRHEGVEDCDGSDFGYLTCETYLPGSYGDLQCTQYCYIDSTPCRYFT

SEQ ID NO: 19185 - protein, 455 aa, Homo sapiens
  Payload ID: 3848
  Gene Symbol: COLQ
  Gene Name: collagen-like tail subunit (single strand of homotrimer)  of asymmetric acetylcholinesterase
  Uniprot ID: Q9Y215
  ENSP ID: ENSP00000373298
MVVLNPMTLGIYLQLFFLSIVSQPTFINSVLPISAALPSLDQKKRGGHKACCLLTPPPPPLFPPPFFRGGRSPLLSPDMKNLMLELETSQSPCMQGSLGSPGPPGPQGPPGLPGKTGPKGEKGELGRPGRKGRPGPPGVPGMPGPIGWPGPEGPRGEKGDLGMMGLPGSRGPMGSKGYPGSRGEKGSRGEKGDLGPKGEKGFPGFPGMLGQKGEMGPKGEPGIAGHRGPTGRPGKRGKQGQKGDSGVMGPPGKPGPSGQPGRPGPPGPPPAGQLIMGPKGERGFPGPPGRCLCGPTMNVNNPSYGESVYGPSSPRVPVIFVVNNQEELERLNTQNAIAFRRDQRSLYFKDSLGWLPIQLTPFYPVDYTADQHGTCGDGLLQPGEECDDGNSDVGDDCIRCHRAYCGDGHRHEGVEDCDGSDFGYLTCETYLPGSYGDLQCTQYCYIDSTPCRYFT

SEQ ID NO: 19186 - protein, 456 aa, Homo sapiens
  Payload ID: 3848
  Gene Symbol: COLQ
  Gene Name: collagen-like tail subunit (single strand of homotrimer)  of asymmetric acetylcholinesterase
  ENSP ID: ENSP00000474271
MVVLNPMTLGIYLQLFFLSIVSQPTFINSVLPISAALPSLDQKKRGGHKACCLLTPPPPPLFPPPFFRGGRSPLLSPDMKNLMLELETSQSPCMQGSLGSPGPPGPQGPPGLPGKTGPKGEKGELGRPGRKGRPGPPGVPGMPGPIGWPGPEGPRGEKGDLGMMGLPGSRGPMGSKGYPGSRGEKGSRGEKGDLGPKGEKGFPGFPGMLGQKGEMGPKGEPGIAGHRGPTGRPGKRGKQGQKGDSGVMGPPGKPGPSGQPGRPGPPGPPPAGQLIMGPKGERGFPGPPGRCLCGPTMNVNNPSYGESVYGPSSPRVPVIFVVNNQEELERLNTQNAIAFRRDQRSLYFKDSLGWLPIQLTPFYPVDYTADQHGTCGDGLLQPGEECDDGNSDVGDDCIRDCHRAYCGDGHRHEGVEDCDGSDFGYLTCETYLPGSYGDLQCTQYCYIDSTPCRYFT

SEQ ID NO: 19187 - protein, 194 aa, Homo sapiens
  Payload ID: 3848
  Gene Symbol: COLQ
  Gene Name: collagen-like tail subunit (single strand of homotrimer)  of asymmetric acetylcholinesterase
  ENSP ID: ENSP00000474936
ISGLLCYSAGCLALPSLDQKKRGGHKACCLLTPPPPPLFPPPFFRGGRSPGPPGLPGKTGPKGEKGELGRPGRKGRPGPPGVPGMPGPIGWPGPEGPRGEKGDLGMMGLPGSRGPMGSKGYPGSRGEKGSRGEKGDLGPKGEKGFPGFPGMLGQKGEMGPKGEPGIAGHRGPTGRPGKRGKQGQKGDSGVMGPP

SEQ ID NO: 19188 - protein, 686 aa, Homo sapiens
  Payload ID: 3849
  Gene Symbol: CRMP1
  Gene Name: collapsin response mediator protein 1
  Uniprot ID: Q14194
  ENSP ID: ENSP00000321606
MADRRRAWNTEDDLPVYLARPGSAAQTPRQKYGGMFAAVEGAYENKTIDFDAYSVGRRGSARTPRSAGRPDAVGLPGPGGSEDTASDVSEPSGSAVSSPGERDERPPTLRIRRPAPRDLPLGRDNGQSDRLLIKGGRIINDDQSLYADVYLEDGLIKQIGENLIVPGGVKTIEANGRMVIPGGIDVNTYLQKPSQGMTAADDFFQGTRAALVGGTTMIIDHVVPEPGSSLLTSFEKWHEAADTKSCCDYSLHVDITSWYDGVREELEVLVQDKGVNSFQVYMAYKDVYQMSDSQLYEAFTFLKGLGAVILVHAENGDLIAQEQKRILEMGITGPEGHALSRPEELEAEAVFRAITIAGRINCPVYITKVMSKSAADIIALARKKGPLVFGEPIAASLGTDGTHYWSKNWAKAAAFVTSPPLSPDPTTPDYLTSLLACGDLQVTGSGHCPYSTAQKAVGKDNFTLIPEGVNGIEERMTVVWDKAVATGKMDENQFVAVTSTNAAKIFNLYPRKGRIAVGSDADVVIWDPDKLKTITAKSHKSAVEYNIFEGMECHGSPLVVISQGKIVFEDGNINVNKGMGRFIPRKAFPEHLYQRVKIRNKVFGLQGVSRGMYDGPVYEVPATPKYATPAPSAKSSPSKHQPPPIRNLHQSNFSLSGAQIDDNNPRRTGHRIVAPPGGRSNITSLG

SEQ ID NO: 19189 - protein, 572 aa, Homo sapiens
  Payload ID: 3849
  Gene Symbol: CRMP1
  Gene Name: collapsin response mediator protein 1
  Uniprot ID: Q14194
  ENSP ID: ENSP00000380987
MSYQGKKSIPHITSDRLLIKGGRIINDDQSLYADVYLEDGLIKQIGENLIVPGGVKTIEANGRMVIPGGIDVNTYLQKPSQGMTAADDFFQGTRAALVGGTTMIIDHVVPEPGSSLLTSFEKWHEAADTKSCCDYSLHVDITSWYDGVREELEVLVQDKGVNSFQVYMAYKDVYQMSDSQLYEAFTFLKGLGAVILVHAENGDLIAQEQKRILEMGITGPEGHALSRPEELEAEAVFRAITIAGRINCPVYITKVMSKSAADIIALARKKGPLVFGEPIAASLGTDGTHYWSKNWAKAAAFVTSPPLSPDPTTPDYLTSLLACGDLQVTGSGHCPYSTAQKAVGKDNFTLIPEGVNGIEERMTVVWDKAVATGKMDENQFVAVTSTNAAKIFNLYPRKGRIAVGSDADVVIWDPDKLKTITAKSHKSAVEYNIFEGMECHGSPLVVISQGKIVFEDGNINVNKGMGRFIPRKAFPEHLYQRVKIRNKVFGLQGVSRGMYDGPVYEVPATPKYATPAPSAKSSPSKHQPPPIRNLHQSNFSLSGAQIDDNNPRRTGHRIVAPPGGRSNITSLG

SEQ ID NO: 19190 - protein, 570 aa, Homo sapiens
  Payload ID: 3849
  Gene Symbol: CRMP1
  Gene Name: collapsin response mediator protein 1
  ENSP ID: ENSP00000425742
MQKMNNEVVDKSDRLLIKGGRIINDDQSLYADVYLEDGLIKQIGENLIVPGGVKTIEANGRMVIPGGIDVNTYLQKPSQGMTAADDFFQGTRAALVGGTTMIIDHVVPEPGSSLLTSFEKWHEAADTKSCCDYSLHVDITSWYDGVREELEVLVQDKGVNSFQVYMAYKDVYQMSDSQLYEAFTFLKGLGAVILVHAENGDLIAQEQKRILEMGITGPEGHALSRPEELEAEAVFRAITIAGRINCPVYITKVMSKSAADIIALARKKGPLVFGEPIAASLGTDGTHYWSKNWAKAAAFVTSPPLSPDPTTPDYLTSLLACGDLQVTGSGHCPYSTAQKAVGKDNFTLIPEGVNGIEERMTVVWDKAVATGKMDENQFVAVTSTNAAKIFNLYPRKGRIAVGSDADVVIWDPDKLKTITAKSHKSAVEYNIFEGMECHGSPLVVISQGKIVFEDGNINVNKGMGRFIPRKAFPEHLYQRVKIRNKVFGLQGVSRGMYDGPVYEVPATPKYATPAPSAKSSPSKHQPPPIRNLHQSNFSLSGAQIDDNNPRRTGHRIVAPPGGRSNITSLG

SEQ ID NO: 19191 - protein, 277 aa, Homo sapiens
  Payload ID: 3850
  Gene Symbol: COLEC10
  Gene Name: collectin sub-family member 10 (C-type lectin)
  Uniprot ID: Q9Y6Z7
  ENSP ID: ENSP00000332723
MNGFASLLRRNQFILLVLFLLQIQSLGLDIDSRPTAEVCATHTISPGPKGDDGEKGDPGEEGKHGKVGRMGPKGIKGELGDMGDQGNIGKTGPIGKKGDKGEKGLLGIPGEKGKAGTVCDCGRYRKFVGQLDISIARLKTSMKFVKNVIAGIRETEEKFYYIVQEEKNYRESLTHCRIRGGMLAMPKDEAANTLIADYVAKSGFFRVFIGVNDLEREGQYMFTDNTPLQNYSNWNEGEPSDPYGHEDCVEMLSSGRWNDTECHLTMYFVCEFIKKKK

SEQ ID NO: 19192 - protein, 268 aa, Homo sapiens
  Payload ID: 3851
  Gene Symbol: COLEC11
  Gene Name: collectin sub-family member 11
  Uniprot ID: Q9BWP8
  ENSP ID: ENSP00000236693
MTPALCRSSSLASKGMRERRETKAPPDGLEESAPREKKQSQPVVTASDISKRKCTSSFVEMGSQGDMGDKGQKGSVGRHGKIGPIGSKGEKGDSGDIGPPGPNGEPGLPCECSQLRKAIGEMDNQVSQLTSELKFIKNAVAGVRETESKIYLLVKEEKRYADAQLSCQGRGGTLSMPKDEAANGLMAAYLAQAGLARVFIGINDLEKEGAFVYSDHSPMRTFNKWRSGEPNNAYDEEDCVEMVASGGWNDVACHTTMYFMCEFDKENM

SEQ ID NO: 19193 - protein, 271 aa, Homo sapiens
  Payload ID: 3851
  Gene Symbol: COLEC11
  Gene Name: collectin sub-family member 11
  Uniprot ID: Q9BWP8
  ENSP ID: ENSP00000339168
MRGNLALVGVLISLAFLSLLPSGHPQPAGDDACSVQILVPGLKGDAGEKGDKGAPGRPGRVGPTGEKGDMGDKGQKGSVGRHGKIGPIGSKGEKGDSGDIGPPGPNGEPGLPCECSQLRKAIGEMDNQVSQLTSELKFIKNAVAGVRETESKIYLLVKEEKRYADAQLSCQGRGGTLSMPKDEAANGLMAAYLAQAGLARVFIGINDLEKEGAFVYSDHSPMRTFNKWRSGEPNNAYDEEDCVEMVASGGWNDVACHTTMYFMCEFDKENM

SEQ ID NO: 19194 - protein, 247 aa, Homo sapiens
  Payload ID: 3851
  Gene Symbol: COLEC11
  Gene Name: collectin sub-family member 11
  Uniprot ID: Q9BWP8
  ENSP ID: ENSP00000371494
MRGNLALVGVLISLAFLSLLPSGHPQPAGDDACSVQILVPGLKGDAGEKGDKGAPGRPGRVGPTGEKGEKGDSGDIGPPGPNGEPGLPCECSQLRKAIGEMDNQVSQLTSELKFIKNAVAGVRETESKIYLLVKEEKRYADAQLSCQGRGGTLSMPKDEAANGLMAAYLAQAGLARVFIGINDLEKEGAFVYSDHSPMRTFNKWRSGEPNNAYDEEDCVEMVASGGWNDVACHTTMYFMCEFDKENM

SEQ ID NO: 19195 - protein, 221 aa, Homo sapiens
  Payload ID: 3851
  Gene Symbol: COLEC11
  Gene Name: collectin sub-family member 11
  Uniprot ID: Q9BWP8
  ENSP ID: ENSP00000384882
MWWVPPSPYGCLPCALPGDMGDKGQKGSVGRHGKIGPIGSKGEKGDSGDIGPPGPNGEPGLPCECSQLRKAIGEMDNQVSQLTSELKFIKNAVAGVRETESKIYLLVKEEKRYADAQLSCQGRGGTLSMPKDEAANGLMAAYLAQAGLARVFIGINDLEKEGAFVYSDHSPMRTFNKWRSGEPNNAYDEEDCVEMVASGGWNDVACHTTMYFMCEFDKENM

SEQ ID NO: 19196 - protein, 245 aa, Homo sapiens
  Payload ID: 3851
  Gene Symbol: COLEC11
  Gene Name: collectin sub-family member 11
  Uniprot ID: Q9BWP8
  ENSP ID: ENSP00000385130
MWWVPPSPYGCLPCALPGDAGEKGDKGAPGRPGRVGPTGEKGDMGDKGQKGSVGRHGKIGPIGSKGEKGDSGDIGPPGPNGEPGLPCECSQLRKAIGEMDNQVSQLTSELKFIKNAVAGVRETESKIYLLVKEEKRYADAQLSCQGRGGTLSMPKDEAANGLMAAYLAQAGLARVFIGINDLEKEGAFVYSDHSPMRTFNKWRSGEPNNAYDEEDCVEMVASGGWNDVACHTTMYFMCEFDKENM

SEQ ID NO: 19197 - protein, 221 aa, Homo sapiens
  Payload ID: 3851
  Gene Symbol: COLEC11
  Gene Name: collectin sub-family member 11
  Uniprot ID: Q9BWP8
  ENSP ID: ENSP00000385653
MWWVPPSPYGCLPCALPGDAGEKGDKGAPGRPGRVGPTGEKGEKGDSGDIGPPGPNGEPGLPCECSQLRKAIGEMDNQVSQLTSELKFIKNAVAGVRETESKIYLLVKEEKRYADAQLSCQGRGGTLSMPKDEAANGLMAAYLAQAGLARVFIGINDLEKEGAFVYSDHSPMRTFNKWRSGEPNNAYDEEDCVEMVASGGWNDVACHTTMYFMCEFDKENM

SEQ ID NO: 19198 - protein, 197 aa, Homo sapiens
  Payload ID: 3851
  Gene Symbol: COLEC11
  Gene Name: collectin sub-family member 11
  Uniprot ID: Q9BWP8
  ENSP ID: ENSP00000385827
MWWVPPSPYGCLPCALPGEKGDSGDIGPPGPNGEPGLPCECSQLRKAIGEMDNQVSQLTSELKFIKNAVAGVRETESKIYLLVKEEKRYADAQLSCQGRGGTLSMPKDEAANGLMAAYLAQAGLARVFIGINDLEKEGAFVYSDHSPMRTFNKWRSGEPNNAYDEEDCVEMVASGGWNDVACHTTMYFMCEFDKENM

SEQ ID NO: 19199 - protein, 123 aa, Homo sapiens
  Payload ID: 3851
  Gene Symbol: COLEC11
  Gene Name: collectin sub-family member 11
  ENSP ID: ENSP00000393167
MKKQRGVGVLPALRMRGNLALVGVLISLAFLSLLPSGHPQPAGDDACSVQILVPGLKGDAGEKGDKGAPGRPGRVGPTGEKGDMGDKGQKGSVGRHGKIGPIGSKGEKGDSGDIGPPGPNGEP

SEQ ID NO: 19200 - protein, 116 aa, Homo sapiens
  Payload ID: 3851
  Gene Symbol: COLEC11
  Gene Name: collectin sub-family member 11
  ENSP ID: ENSP00000410919
MRGNLALVGVLISLAFLSLLPSGHPQPAGDDACSVQILVPGLKGDAGEKGDKGAPGRPGRVGPTGEKGDMGDKGQKGSVGRHGKIGPIGSKGEKGDSGDIGPPGPNGEPAPSAPQR

SEQ ID NO: 19201 - protein, 285 aa, Homo sapiens
  Payload ID: 3851
  Gene Symbol: COLEC11
  Gene Name: collectin sub-family member 11
  Uniprot ID: Q9BWP8
  ENSP ID: ENSP00000411770
MKKQRGVGVLPALRMRGNLALVGVLISLAFLSLLPSGHPQPAGDDACSVQILVPGLKGDAGEKGDKGAPGRPGRVGPTGEKGDMGDKGQKGSVGRHGKIGPIGSKGEKGDSGDIGPPGPNGEPGLPCECSQLRKAIGEMDNQVSQLTSELKFIKNAVAGVRETESKIYLLVKEEKRYADAQLSCQGRGGTLSMPKDEAANGLMAAYLAQAGLARVFIGINDLEKEGAFVYSDHSPMRTFNKWRSGEPNNAYDEEDCVEMVASGGWNDVACHTTMYFMCEFDKENM

SEQ ID NO: 19202 - protein, 742 aa, Homo sapiens
  Payload ID: 3852
  Gene Symbol: COLEC12
  Gene Name: collectin sub-family member 12
  Uniprot ID: Q5KU26
  ENSP ID: ENSP00000383115
MKDDFAEEEEVQSFGYKRFGIQEGTQCTKCKNNWALKFSIILLYILCALLTITVAILGYKVVEKMDNVTGGMETSRQTYDDKLTAVESDLKKLGDQTGKKAISTNSELSTFRSDILDLRQQLREITEKTSKNKDTLEKLQASGDALVDRQSQLKETLENNSFLITTVNKTLQAYNGYVTNLQQDTSVLQGNLQNQMYSHNVVIMNLNNLNLTQVQQRNLITNLQRSVDDTSQAIQRIKNDFQNLQQVFLQAKKDTDWLKEKVQSLQTLAANNSALAKANNDTLEDMNSQLNSFTGQMENITTISQANEQNLKDLQDLHKDAENRTAIKFNQLEERFQLFETDIVNIISNISYTAHHLRTLTSNLNEVRTTCTDTLTKHTDDLTSLNNTLANIRLDSVSLRMQQDLMRSRLDTEVANLSVIMEEMKLVDSKHGQLIKNFTILQGPPGPRGPRGDRGSQGPPGPTGNKGQKGEKGEPGPPGPAGERGPIGPAGPPGERGGKGSKGSQGPKGSRGSPGKPGPQGSSGDPGPPGPPGKEGLPGPQGPPGFQGLQGTVGEPGVPGPRGLPGLPGVPGMPGPKGPPGPPGPSGAVVPLALQNEPTPAPEDNGCPPHWKNFTDKCYYFSVEKEIFEDAKLFCEDKSSHLVFINTREEQQWIKKQMVGRESHWIGLTDSERENEWKWLDGTSPDYKNWKAGQPDNWGHGHGPGEDCAGLIYAGQWNDFQCEDVNNFICEKDRETVLSSAL

SEQ ID NO: 19203 - protein, 554 aa, Homo sapiens
  Payload ID: 3853
  Gene Symbol: CSF1
  Gene Name: colony stimulating factor 1 (macrophage)
  Uniprot ID: P09603
  ENSP ID: ENSP00000327513
MTAPGAAGRCPPTTWLGSLLLLVCLLASRSITEEVSEYCSHMIGSGHLQSLQRLIDSQMETSCQITFEFVDQEQLKDPVCYLKKAFLLVQDIMEDTMRFRDNTPNAIAIVQLQELSLRLKSCFTKDYEEHDKACVRTFYETPLQLLEKVKNVFNETKNLLDKDWNIFSKNCNNSFAECSSQDVVTKPDCNCLYPKAIPSSDPASVSPHQPLAPSMAPVAGLTWEDSEGTEGSSLLPGEQPLHTVDPGSAKQRPPRSTCQSFEPPETPVVKDSTIGGSPQPRPSVGAFNPGMEDILDSAMGTNWVPEEASGEASEIPVPQGTELSPSRPGGGSMQTEPARPSNFLSASSPLPASAKGQQPADVTGTALPRVGPVRPTGQDWNHTPQKTDHPSALLRDPPEPGSPRISSLRPQGLSNPSTLSAQPQLSRSHSSGSVLPLGELEGRRSTRDRRSPAEPEGGPASEGAARPLPRFNSVPLTDTGHERQSEGSFSPQLQESVFHLLVPSVILVLLAVGGLLFYRWRRRSHQEPQRADSPLEQPEGSPLTQDDRQVELPV

SEQ ID NO: 19204 - protein, 119 aa, Homo sapiens
  Payload ID: 3853
  Gene Symbol: CSF1
  Gene Name: colony stimulating factor 1 (macrophage)
  ENSP ID: ENSP00000349854
MTAPGAAGRCPPTTWLGSLLLLVCLLASRSITEEVSEYCSHMIGSGHLQSLQRLIDSQMETSCQITFEFVDQEQLKDPVCYLKKAFLLVQDIMEDTMRFRDNTPNAIAIVQLQELSLRL

SEQ ID NO: 19205 - protein, 438 aa, Homo sapiens
  Payload ID: 3853
  Gene Symbol: CSF1
  Gene Name: colony stimulating factor 1 (macrophage)
  Uniprot ID: P09603
  ENSP ID: ENSP00000358816
MTAPGAAGRCPPTTWLGSLLLLVCLLASRSITEEVSEYCSHMIGSGHLQSLQRLIDSQMETSCQITFEFVDQEQLKDPVCYLKKAFLLVQDIMEDTMRFRDNTPNAIAIVQLQELSLRLKSCFTKDYEEHDKACVRTFYETPLQLLEKVKNVFNETKNLLDKDWNIFSKNCNNSFAECSSQDVVTKPDCNCLYPKAIPSSDPASVSPHQPLAPSMAPVAGLTWEDSEGTEGSSLLPGEQPLHTVDPGSAKQRPPRSTCQSFEPPETPVVKDSTIGGSPQPRPSVGAFNPGMEDILDSAMGTNWVPEEASGEASEIPVPQGTELSPSRPGGGSMQTEPARPSNFLSASSPLPASAKGQQPADVTGHERQSEGSFSPQLQESVFHLLVPSVILVLLAVGGLLFYRWRRRSHQEPQRADSPLEQPEGSPLTQDDRQVELPV

SEQ ID NO: 19206 - protein, 554 aa, Homo sapiens; identical to SEQ ID NO: 19203
  Payload ID: 3853
  Gene Symbol: CSF1
  Gene Name: colony stimulating factor 1 (macrophage)
  Uniprot ID: P09603
  ENSP ID: ENSP00000358817

SEQ ID NO: 19207 - protein, 256 aa, Homo sapiens
  Payload ID: 3853
  Gene Symbol: CSF1
  Gene Name: colony stimulating factor 1 (macrophage)
  Uniprot ID: P09603
  ENSP ID: ENSP00000407317
MTAPGAAGRCPPTTWLGSLLLLVCLLASRSITEEVSEYCSHMIGSGHLQSLQRLIDSQMETSCQITFEFVDQEQLKDPVCYLKKAFLLVQDIMEDTMRFRDNTPNAIAIVQLQELSLRLKSCFTKDYEEHDKACVRTFYETPLQLLEKVKNVFNETKNLLDKDWNIFSKNCNNSFAECSSQGHERQSEGSFSPQLQESVFHLLVPSVILVLLAVGGLLFYRWRRRSHQEPQRADSPLEQPEGSPLTQDDRQVELPV

SEQ ID NO: 19208 - protein, 113 aa, Homo sapiens
  Payload ID: 3853
  Gene Symbol: CSF1
  Gene Name: colony stimulating factor 1 (macrophage)
  ENSP ID: ENSP00000431547
MIGSGHLQSLQRLIDSQMETSCQITFEFVDQEQLKDPVCYLKKAFLLVQDIMEDTMRFRDNTPNAIAIVQLQELSLRLKSCFTKDYEEHDKACVRTFYETPLQLLEKVKNVFN

SEQ ID NO: 19209 - protein, 285 aa, Homo sapiens
  Payload ID: 3853
  Gene Symbol: CSF1
  Gene Name: colony stimulating factor 1 (macrophage)
  ENSP ID: ENSP00000433837
MTAPGAAGRCPPTIDSQMETSCQITFEFVDQEQLKDPVCYLKKAFLLVQDIMEDTMRFRDNTPNAIAIVQLQELSLRLKSCFTKDYEEHDKACVRTFYETPLQLLEKVKNVFNETKNLLDKDWNIFSKNCNNSFAECSSQDVVTKPDCNCLYPKAIPSSDPASVSPHQPLAPSMAPVAGLTWEDSEGTEGSSLLPGEQPLHTVDPGSAKQRPPRSTCQSFEPPETPVVKDSTIGGSPQPRPSVGAFNPGMEDILDSAMGTNWVPEEASGEASEIPVPQGTELSPS

SEQ ID NO: 19210 - protein, 150 aa, Homo sapiens
  Payload ID: 3853
  Gene Symbol: CSF1
  Gene Name: colony stimulating factor 1 (macrophage)
  ENSP ID: ENSP00000434527
MGWGRLQRISLPSQCLSLLSTWLGSLLLLVCLLASRSITEEVSEYCSHMIGSGHLQSLQRLIDSQMETSCQITFEFVDQEQLKDPVCYLKKAFLLVQDIMEDTMRFRDNTPNAIAIVQLQELSLRLKSCFTKDYEEHDKACVRTFYETPL

SEQ ID NO: 19211 - protein, 972 aa, Homo sapiens
  Payload ID: 3854
  Gene Symbol: CSF1R
  Gene Name: colony stimulating factor 1 receptor
  Uniprot ID: P07333
  ENSP ID: ENSP00000286301
MGPGVLLLLLVATAWHGQGIPVIEPSVPELVVKPGATVTLRCVGNGSVEWDGPPSPHWTLYSDGSSSILSTNNATFQNTGTYRCTEPGDPLGGSAAIHLYVKDPARPWNVLAQEVVVFEDQDALLPCLLTDPVLEAGVSLVRVRGRPLMRHTNYSFSPWHGFTIHRAKFIQSQDYQCSALMGGRKVMSISIRLKVQKVIPGPPALTLVPAELVRIRGEAAQIVCSASSVDVNFDVFLQHNNTKLAIPQQSDFHNNRYQKVLTLNLDQVDFQHAGNYSCVASNVQGKHSTSMFFRVVESAYLNLSSEQNLIQEVTVGEGLNLKVMVEAYPGLQGFNWTYLGPFSDHQPEPKLANATTKDTYRHTFTLSLPRLKPSEAGRYSFLARNPGGWRALTFELTLRYPPEVSVIWTFINGSGTLLCAASGYPQPNVTWLQCSGHTDRCDEAQVLQVWDDPYPEVLSQEPFHKVTVQSLLTVETLEHNQTYECRAHNSVGSGSWAFIPISAGAHTHPPDEFLFTPVVVACMSIMALLLLLLLLLLYKYKQKPKYQVRWKIIESYEGNSYTFIDPTQLPYNEKWEFPRNNLQFGKTLGAGAFGKVVEATAFGLGKEDAVLKVAVKMLKSTAHADEKEALMSELKIMSHLGQHENIVNLLGACTHGGPVLVITEYCCYGDLLNFLRRKAEAMLGPSLSPGQDPEGGVDYKNIHLEKKYVRRDSGFSSQGVDTYVEMRPVSTSSNDSFSEQDLDKEDGRPLELRDLLHFSSQVAQGMAFLASKNCIHRDVAARNVLLTNGHVAKIGDFGLARDIMNDSNYIVKGNARLPVKWMAPESIFDCVYTVQSDVWSYGILLWEIFSLGLNPYPGILVNSKFYKLVKDGYQMAQPAFAPKNIYSIMQACWALEPTHRPTFQQICSFLQEQAQEDRRERDYTNLPSSSRSGGSGSSSSELEEESSSEHLTCCEQGDIAQPLLQPNNYQFC

SEQ ID NO: 19212 - protein, 49 aa, Homo sapiens
  Payload ID: 3854
  Gene Symbol: CSF1R
  Gene Name: colony stimulating factor 1 receptor
  ENSP ID: ENSP00000421174
MRHTNYSFSPWHGFTIHRAKFIQSQDYQCSALMGGRKVMSISIRLKVQK

SEQ ID NO: 19213 - protein, 671 aa, Homo sapiens
  Payload ID: 3854
  Gene Symbol: CSF1R
  Gene Name: colony stimulating factor 1 receptor
  ENSP ID: ENSP00000422212
MGPGVLLLLLVATAWHGQGIPVIEPSVPELVVKPGATVTLRCVGNGSVEWDGPPSPHWTLYSDGSSSILSTNNATFQNTGTYRCTEPGDPLGGSAAIHLYVKDPARPWNVLAQEVVVFEDQDALLPCLLTDPVLEAGVSLVRVRGRPLMRHTNYSFSPWHGFTIHRAKFIQSQDYQCSALMGGRKVMSISIRLKVQKVIPGPPALTLVPAELVRIRGEAAQIVCSASSVDVNFDVFLQHNNTKLAIPQQSDFHNNRYQKVLTLNLDQVDFQHAGNYSCVASNVQGKHSTSMFFRVVESAYLNLSSEQNLIQEVTVGEGLNLKVMVEAYPGLQGFNWTYLGPFSDHQPEPKLANATTKDTYRHTFTLSLPRLKPSEAGRYSFLARNPGGWRALTFELTLRYPPEVSVIWTFINGSGTLLCAASGYPQPNVTWLQCSGHTDRCDEAQVLQVWDDPYPEVLSQEPFHKVTVQSLLTVETLEHNQTYECRAHNSVGSGSWAFIPISAGAHTHPPDEFLFTPVVVACMSIMALLLLLLLLLLYKYKQKPKYQVRWKIIESYEGNSYTFIDPTQLPYNEKWEFPRNNLQFGKTLGAGAFGKVVEATAFGLGKEDAVLKVAVKMLKSTAHADEKEALMSELKIMSHLGQHENIVNLLGACTHGGTVASPARVWTPMWR

SEQ ID NO: 19214 - protein, 64 aa, Homo sapiens
  Payload ID: 3854
  Gene Symbol: CSF1R
  Gene Name: colony stimulating factor 1 receptor
  ENSP ID: ENSP00000427545
AGSPWALGQRPFGAQGLKGPVCVAATAHADEKEALMSELKIMSHLGQHENIVNLLGACTHGGIS

SEQ ID NO: 19215 - protein, 306 aa, Homo sapiens
  Payload ID: 3854
  Gene Symbol: CSF1R
  Gene Name: colony stimulating factor 1 receptor
  Uniprot ID: P07333
  ENSP ID: ENSP00000445282
MGPGVLLLLLVATAWHGQGIPVIEPSVPELVVKPGATVTLRCVGNGSVEWDGPPSPHWTLYSDGSSSILSTNNATFQNTGTYRCTEPGDPLGGSAAIHLYVKDPARPWNVLAQEVVVFEDQDALLPCLLTDPVLEAGVSLVRVRGRPLMRHTNYSFSPWHGFTIHRAKFIQSQDYQCSALMGGRKVMSISIRLKVQKVIPGPPALTLVPAELVRIRGEAAQIVCSASSVDVNFDVFLQHNNTKLAIPQQSDFHNNRYQKVLTLNLDQVDFQHAGNYSCVASNVQGKHSTSMFFRVVGTPSPSLCPA

SEQ ID NO: 19216 - protein, 144 aa, Homo sapiens
  Payload ID: 3855
  Gene Symbol: CSF2
  Gene Name: colony stimulating factor 2 (granulocyte-macrophage)
  Uniprot ID: P04141
  ENSP ID: ENSP00000296871
MWLQSLLLLGTVACSISAPARSPSPSTQPWEHVNAIQEARRLLNLSRDTAAEMNETVEVISEMFDLQEPTCLQTRLELYKQGLRGSLTKLKGPLTMMASHYKQHCPPTPETSCATQIITFESFKENLKDFLLVIPFDCWEPVQE

SEQ ID NO: 19217 - protein, 377 aa, Homo sapiens
  Payload ID: 3856
  Gene Symbol: CSF2RA
  Gene Name: colony stimulating factor 2 receptor, alpha, low-affinity (granulocyte-macrophage)
  Uniprot ID: P15509
  ENSP ID: ENSP00000347606
MLLLVTSLLLCELPHPAFLLIPEKSDLRTVAPASSLNVRFDSRTMNLSWDCQENTTFSKCFLTDKKNRVVEPRLSNNECSCTFREICLHEGVTFEVHVNTSQRGFQQKLLYPNSGREGTAAQNFSCFIYNADLMNCTWARGPTAPRDVQYFLYIRNSKRRREIRCPYYIQDSGTHVGCHLDNLSGLTSRNYFLVNGTSREIGIQFFDSLLDTKKIERFNPPSNVTVRCNTTHCLVRWKQPRTYQKLSYLDFQYQLDVHRKNTQPGTENLLINVSGDLENRYNFPSSEPRAKHSVKIRAADVRILNWSSWSEAIEFDHLGGIHPRGRERLPRRGLDREGNYLRPRGCRNGMDISASATRGNCFLDDAVNLYIIFYVFI

SEQ ID NO: 19218 - protein, 233 aa, Homo sapiens
  Payload ID: 3856
  Gene Symbol: CSF2RA
  Gene Name: colony stimulating factor 2 receptor, alpha, low-affinity (granulocyte-macrophage)
  Uniprot ID: P15509
  ENSP ID: ENSP00000348058
MLLLVTSLLLCELPHPAFLLIPEKSDLRTVAPASSLNVRFDSRTMNLSWDCQENTTFSKCFLTDKKNRVVEPRLSNNECSCTFREICLHEGVTFEVHVNTSQRGFQQKLLYPNSGREGTAAQNFSCFIYNADLMNCTWARGPTAPRDVQYFLYIRNSKRRREIRCPYYIQDSGTHVGCHLDNLSGLTSRNYFLVNGTSREIGIQFFDSLLDTKKIGSLGYSGCSRQFHRSKTN

SEQ ID NO: 19219 - protein, 333 aa, Homo sapiens
  Payload ID: 3856
  Gene Symbol: CSF2RA
  Gene Name: colony stimulating factor 2 receptor, alpha, low-affinity (granulocyte-macrophage)
  Uniprot ID: P15509
  ENSP ID: ENSP00000370911
MLLLVTSLLLCELPHPAFLLIPEKSDLRTVAPASSLNVRFDSRTMNLSWDCQENTTFSKCFLTDKKNRVVEPRLSNNECSCTFREICLHEGVTFEVHVNTSQRGFQQKLLYPNSGREGTAAQNFSCFIYNADLMNCTWARGPTAPRDVQYFLYIRNSKRRREIRCPYYIQDSGTHVGCHLDNLSGLTSRNYFLVNGTSREIGIQFFDSLLDTKKIERFNPPSNVTVRCNTTHCLVRWKQPRTYQKLSYLDFQYQLDVHRKNTQPGTENLLINVSGDLENRYNFPSSEPRAKHSVKIRAADVRILNWSSWSEAIEFGSLGYSGCSRQFHRSKTN

SEQ ID NO: 19220 - protein, 410 aa, Homo sapiens
  Payload ID: 3856
  Gene Symbol: CSF2RA
  Gene Name: colony stimulating factor 2 receptor, alpha, low-affinity (granulocyte-macrophage)
  Uniprot ID: P15509
  ENSP ID: ENSP00000370920
MLLLVTSLLLCELPHPAFLLIPEKSDLRTVAPASSLNVRFDSRTMNLSWDCQENTTFSKCFLTDKKNRVVEPRLSNNECSCTFREICLHEGVTFEVHVNTSQRGFQQKLLYPNSGREGTAAQNFSCFIYNADLMNCTWARGPTAPRDVQYFLYIRNSKRRREIRCPYYIQDSGTHVGCHLDNLSGLTSRNYFLVNGTSREIGIQFFDSLLDTKKIERFNPPSNVTVRCNTTHCLVRWKQPRTYQKLSYLDFQYQLDVHRKNTQPGTENLLINVSGDLENRYNFPSSEPRAKHSVKIRAADVRILNWSSWSEAIEFGSDDGNLGSVYIYVLLIVGTLVCGIVLGFLFKRFLRIQRLFPPVPQIKDKLNDNHEVEDEMGPQRHHRCGWNLYPTPGPSPGSGSSPRLGSESSL

SEQ ID NO: 19221 - protein, 400 aa, Homo sapiens
  Payload ID: 3856
  Gene Symbol: CSF2RA
  Gene Name: colony stimulating factor 2 receptor, alpha, low-affinity (granulocyte-macrophage)
  Uniprot ID: P15509
  ENSP ID: ENSP00000370935
MLLLVTSLLLCELPHPAFLLIPEKSDLRTVAPASSLNVRFDSRTMNLSWDCQENTTFSKCFLTDKKNRVVEPRLSNNECSCTFREICLHEGVTFEVHVNTSQRGFQQKLLYPNSGREGTAAQNFSCFIYNADLMNCTWARGPTAPRDVQYFLYIRNSKRRREIRCPYYIQDSGTHVGCHLDNLSGLTSRNYFLVNGTSREIGIQFFDSLLDTKKIERFNPPSNVTVRCNTTHCLVRWKQPRTYQKLSYLDFQYQLDVHRKNTQPGTENLLINVSGDLENRYNFPSSEPRAKHSVKIRAADVRILNWSSWSEAIEFGSDDGNLGSVYIYVLLIVGTLVCGIVLGFLFKRFLRIQRLFPPVPQIKDKLNDNHEVEDEIIWEEFTPEEGKGYREEVLTVKEIT

SEQ ID NO: 19222 - protein, 400 aa, Homo sapiens; identical to SEQ ID NO: 19221
  Payload ID: 3856
  Gene Symbol: CSF2RA
  Gene Name: colony stimulating factor 2 receptor, alpha, low-affinity (granulocyte-macrophage)
  Uniprot ID: P15509
  ENSP ID: ENSP00000370940

SEQ ID NO: 19223 - protein, 434 aa, Homo sapiens
  Payload ID: 3856
  Gene Symbol: CSF2RA
  Gene Name: colony stimulating factor 2 receptor, alpha, low-affinity (granulocyte-macrophage)
  Uniprot ID: P15509
  ENSP ID: ENSP00000394227
MLLLVTSLLLCELPHPAFLLIPEKSDLRTVAPASSLNVRFDSRTMNLSWDCQENTTFSKCFLTDKKNRVVEPRLSNNECSCTFREICLHEGVTFEVHVNTSQRGFQQKLLYPNSGREGTAAQNFSCFIYNADLMNCTWARGPTAPRDVQYFLYIRNSKRRREIRCPYYIQDSGTHVGCHLDNLSGLTSRNYFLVNGTSREIGIQFFDSLLDTKKIERFNPPSNVTVRCNTTHCLVRWKQPRTYQKLSYLDFQYQLDVHRKNTQPGTENLLINVSGDLENRYNFPSSEPRAKHSVKIRAADVRILNWSSWSEAIEFGSHSVTQAGVQWHNLGSLQPPSPRLKRFSCLRLPGSDDGNLGSVYIYVLLIVGTLVCGIVLGFLFKRFLRIQRLFPPVPQIKDKLNDNHEVEDEIIWEEFTPEEGKGYREEVLTVKEIT

SEQ ID NO: 19224 - protein, 188 aa, Homo sapiens
  Payload ID: 3856
  Gene Symbol: CSF2RA
  Gene Name: colony stimulating factor 2 receptor, alpha, low-affinity (granulocyte-macrophage)
  ENSP ID: ENSP00000397452
MLLLVTSLLLCELPHPAFLLIPEKSDLRTVAPASSLNVRFDSRTMNLSWDCQENTTFSKCFLTDKKNRVVEPRLSNNECSCTFREICLHEGVTFEVHVNTSQRGFQQKLLYPNSGREGTAAQNFSCFIYNADLMNCTWARGPTAPRDVQYFLYIRNSKRRREIRCPYYIQDSGTHVGCHLDNLSGLTS

SEQ ID NO: 19225 - protein, 238 aa, Homo sapiens
  Payload ID: 3856
  Gene Symbol: CSF2RA
  Gene Name: colony stimulating factor 2 receptor, alpha, low-affinity (granulocyte-macrophage)
  ENSP ID: ENSP00000410667
MLLLVTSLLLCELPHPAFLLIPEKSDLRTVAPASSLNVRFDSRTMNLSWDCQENTTFSKCFLTDKKNRVVEPRLSNNECSCTFREICLHEGVTFEVHVNTSQRGFQQKLLYPNSGREGTAAQNFSCFIYNADLMNCTWARGPTAPRDVQYFLYIRNSKRRREIRCPYYIQDSGTHVGCHLDNLSGLTSRNYFLVNGTSREIGIQFFDSLLDTKKIERFNPPSNVTVRCNTTHCLVRWK

SEQ ID NO: 19226 - protein, 400 aa, Homo sapiens; identical to SEQ ID NO: 19221
  Payload ID: 3856
  Gene Symbol: CSF2RA
  Gene Name: colony stimulating factor 2 receptor, alpha, low-affinity (granulocyte-macrophage)
  Uniprot ID: P15509
  ENSP ID: ENSP00000416437

SEQ ID NO: 19227 - protein, 285 aa, Homo sapiens
  Payload ID: 3856
  Gene Symbol: CSF2RA
  Gene Name: colony stimulating factor 2 receptor, alpha, low-affinity (granulocyte-macrophage)
  ENSP ID: ENSP00000436825
MLLLVTSLLLCELPHPAFLLIPEKSDLRTVAPASSLNVRFDSRTMNLSWDCQENTTFSKCFLTDKKNRVVEPRLSNNECSCTFREICLHEGVTFEVHVNTSQRGFQQKLLYPNSGREGTAAQNFSCFIYNADLMNCTWARGPTAPRDVQYFLYIRNSKRRREIRCPYYIQDSGTHVGCHLDNLSGLTSRNYFLVNGTSREIGIQFFDSLLDTKKIERFNPPSNVTVRCNTTHCLVRWKQPRTYQKLSYLDFQYQLDVHRKNTQPGTENLLVLTTGTSALCTFMCS

SEQ ID NO: 19228 - protein, 267 aa, Homo sapiens
  Payload ID: 3856
  Gene Symbol: CSF2RA
  Gene Name: colony stimulating factor 2 receptor, alpha, low-affinity (granulocyte-macrophage)
  Uniprot ID: P15509
  ENSP ID: ENSP00000440491
MNCTWARGPTAPRDVQYFLYIRNSKRRREIRCPYYIQDSGTHVGCHLDNLSGLTSRNYFLVNGTSREIGIQFFDSLLDTKKIERFNPPSNVTVRCNTTHCLVRWKQPRTYQKLSYLDFQYQLDVHRKNTQPGTENLLINVSGDLENRYNFPSSEPRAKHSVKIRAADVRILNWSSWSEAIEFGSDDGNLGSVYIYVLLIVGTLVCGIVLGFLFKRFLRIQRLFPPVPQIKDKLNDNHEVEDEIIWEEFTPEEGKGYREEVLTVKEIT

SEQ ID NO: 19229 - protein, 90 aa, Homo sapiens
  Payload ID: 3856
  Gene Symbol: CSF2RA
  Gene Name: colony stimulating factor 2 receptor, alpha, low-affinity (granulocyte-macrophage)
  ENSP ID: ENSP00000476684
MLLLVTSLLLCELPHPAFLLIPEKSDLRTVAPASSLNVRFDSRTMNLSWDCQENTTFSKCFLTDKKNRVVEPRMEFPSCCPDRTIAHQPA

SEQ ID NO: 19230 - protein, 889 aa, Homo sapiens
  Payload ID: 3857
  Gene Symbol: CSF2RB
  Gene Name: colony stimulating factor 2 receptor, beta, low-affinity (granulocyte-macrophage)
  ENSP ID: ENSP00000262825
MVLAQGLLSMALLALCWERSLAGAEETIPLQTLRCYNDYTSHITCRWADTQDAQRLVNVTLIRRVNEDLLEPVSCDLSDDMPWSACPHPRCVPRRCVIPCQSFVVTDVDYFSFQPDRPLGTRLTVTLTQHVQPPEPRDLQISTDQDHFLLTWSVALGSPQSHWLSPGDLEFEVVYKRLQDSWEDAAILLSNTSQATLGPEHLMPSSTYVARVRTRLAPGSRLSGRPSKWSPEVCWDSQPGDEAQPQNLECFFDGAAVLSCSWEVRKEVASSVSFGLFYKPSPDAGEEECSPVLREGLGSLHTRHHCQIPVPDPATHGQYIVSVQPRRAEKHIKSSVNIQMAPPSLNVTKDGDSYSLRWETMKMRYEHIDHTFEIQYRKDTATWKDSKTETLQNAHSMALPALEPSTRYWARVRVRTSRTGYNGIWSEWSEARSWDTESVLPMWVLALIVIFLTIAVLLALRFCGIYGYRLRRKWEEKIPNPSKSHLFQNGSAELWPPGSMSAFTSGSPPHQGPWGSRFPELEGVFPVGFGDSEVSPLTIEDPKHVCDPPSGPDTTPAASDLPTEQPPSPQPGPPAASHTPEKQASSFDFNGPYLGPPHSRSLPDILGQPEPPQEGGSQKSPPPGSLEYLCLPAGGQVQLVPLAQAMGPGQAVEVERRPSQGAAGSPSLESGGGPAPPALGPRVGGQDQKDSPVAIPMSSGDTEDPGVASGYVSSADLVFTPNSGASSVSLVPSLGLPSDQTPSLCPGLASGPPGAPGPVKSGFEGYVELPPIEGRSPRSPRNNPVPPEAKSPVLNPGERPADVSPTSPQPEGLLVLQQVGDYCFLPGLGPGPLSLRSKPSSPGPGPEIKNLDQAFQVKKPPGQAVPQVPVIQLFKALVVSVMSVGPPVP

SEQ ID NO: 19231 - protein, 897 aa, Homo sapiens
  Payload ID: 3857
  Gene Symbol: CSF2RB
  Gene Name: colony stimulating factor 2 receptor, beta, low-affinity (granulocyte-macrophage)
  Uniprot ID: P32927
  ENSP ID: ENSP00000384053
MVLAQGLLSMALLALCWERSLAGAEETIPLQTLRCYNDYTSHITCRWADTQDAQRLVNVTLIRRVNEDLLEPVSCDLSDDMPWSACPHPRCVPRRCVIPCQSFVVTDVDYFSFQPDRPLGTRLTVTLTQHVQPPEPRDLQISTDQDHFLLTWSVALGSPQSHWLSPGDLEFEVVYKRLQDSWEDAAILLSNTSQATLGPEHLMPSSTYVARVRTRLAPGSRLSGRPSKWSPEVCWDSQPGDEAQPQNLECFFDGAAVLSCSWEVRKEVASSVSFGLFYKPSPDAGEEECSPVLREGLGSLHTRHHCQIPVPDPATHGQYIVSVQPRRAEKHIKSSVNIQMAPPSLNVTKDGDSYSLRWETMKMRYEHIDHTFEIQYRKDTATWKDSKTETLQNAHSMALPALEPSTRYWARVRVRTSRTGYNGIWSEWSEARSWDTESVLPMWVLALIVIFLTIAVLLALRFCGIYGYRLRRKWEEKIPNPSKSHLFQNGSAELWPPGSMSAFTSGSPPHQGPWGSRFPELEGVFPVGFGDSEVSPLTIEDPKHVCDPPSGPDTTPAASDLPTEQPPSPQPGPPAASHTPEKQASSFDFNGPYLGPPHSRSLPDILGQPEPPQEGGSQKSPPPGSLEYLCLPAGGQVQLVPLAQAMGPGQAVEVERRPSQGAAGSPSLESGGGPAPPALGPRVGGQDQKDSPVAIPMSSGDTEDPGVASGYVSSADLVFTPNSGASSVSLVPSLGLPSDQTPSLCPGLASGPPGAPGPVKSGFEGYVELPPIEGRSPRSPRNNPVPPEAKSPVLNPGERPADVSPTSPQPEGLLVLQQVGDYCFLPGLGPGPLSLRSKPSSPGPGPEIKNLDQAFQVKKPPGQAVPQVPVIQLFKALKQQDYLSLPPWEVNKPGEVC

SEQ ID NO: 19232 - protein, 903 aa, Homo sapiens
  Payload ID: 3857
  Gene Symbol: CSF2RB
  Gene Name: colony stimulating factor 2 receptor, beta, low-affinity (granulocyte-macrophage)
  Uniprot ID: P32927
  ENSP ID: ENSP00000385271
MVLAQGLLSMALLALCWERSLAGAEETIPLQTLRCYNDYTSHITCRWADTQDAQRLVNVTLIRRVNEDLLEPVSCDLSDDMPWSACPHPRCVPRRCVIPCQSFVVTDVDYFSFQPDRPLGTRLTVTLTQHVQPPEPRDLQISTDQDHFLLTWSVALGSPQSHWLSPGDLEFEVVYKRLQDSWEDAAILLSNTSQATLGPEHLMPSSTYVARVRTRLAPGSRLSGRPSKWSPEVCWDSQPGDEAQPQNLECFFDGAAVLSCSWEVRKEVASSVSFGLFYKPSPDAGSAVLLREEECSPVLREGLGSLHTRHHCQIPVPDPATHGQYIVSVQPRRAEKHIKSSVNIQMAPPSLNVTKDGDSYSLRWETMKMRYEHIDHTFEIQYRKDTATWKDSKTETLQNAHSMALPALEPSTRYWARVRVRTSRTGYNGIWSEWSEARSWDTESVLPMWVLALIVIFLTIAVLLALRFCGIYGYRLRRKWEEKIPNPSKSHLFQNGSAELWPPGSMSAFTSGSPPHQGPWGSRFPELEGVFPVGFGDSEVSPLTIEDPKHVCDPPSGPDTTPAASDLPTEQPPSPQPGPPAASHTPEKQASSFDFNGPYLGPPHSRSLPDILGQPEPPQEGGSQKSPPPGSLEYLCLPAGGQVQLVPLAQAMGPGQAVEVERRPSQGAAGSPSLESGGGPAPPALGPRVGGQDQKDSPVAIPMSSGDTEDPGVASGYVSSADLVFTPNSGASSVSLVPSLGLPSDQTPSLCPGLASGPPGAPGPVKSGFEGYVELPPIEGRSPRSPRNNPVPPEAKSPVLNPGERPADVSPTSPQPEGLLVLQQVGDYCFLPGLGPGPLSLRSKPSSPGPGPEIKNLDQAFQVKKPPGQAVPQVPVIQLFKALKQQDYLSLPPWEVNKPGEVC

SEQ ID NO: 19233 - protein, 228 aa, Homo sapiens
  Payload ID: 3857
  Gene Symbol: CSF2RB
  Gene Name: colony stimulating factor 2 receptor, beta, low-affinity (granulocyte-macrophage)
  ENSP ID: ENSP00000393585
MPWSACPHPRCVPRRCVIPCQSFVVTDVDYFSFQPDRPLGTRLTVTLTQHVQPPEPRDLQISTDQDHFLLTWSVALGSPQSHWLSPGDLEFEVVYKRLQDSWEDAAILLSNTSQATLGPEHLMPSSTYVARVRTRLAPGSRLSGRPSKWSPEVCWDSQPGDEAQPQNLECFFDGAAVLSCSWEVRKEVASSVSFGLFYKPSPDAGEEECSPVLREGLGSLHTRHHCQI

SEQ ID NO: 19234 - protein, 207 aa, Homo sapiens
  Payload ID: 3858
  Gene Symbol: CSF3
  Gene Name: colony stimulating factor 3 (granulocyte)
  Uniprot ID: P09919
  ENSP ID: ENSP00000225474
MAGPATQSPMKLMALQLLLWHSALWTVQEATPLGPASSLPQSFLLKCLEQVRKIQGDGAALQEKLVSECATYKLCHPEELVLLGHSLGIPWAPLSSCPSQALQLAGCLSQLHSGLFLYQGLLQALEGISPELGPTLDTLQLDVADFATTIWQQMEELGMAPALQPTQGAMPAFASAFQRRAGGVLVASHLQSFLEVSYRVLRHLAQP

SEQ ID NO: 19235 - protein, 200 aa, Homo sapiens
  Payload ID: 3858
  Gene Symbol: CSF3
  Gene Name: colony stimulating factor 3 (granulocyte)
  ENSP ID: ENSP00000327766
MSPEPALSPALQLLLWHSALWTVQEATPLGPASSLPQSFLLKCLEQVRKIQGDGAALQEKLCATYKLCHPEELVLLGHSLGIPWAPLSSCPSQALQLAGCLSQLHSGLFLYQGLLQALEGISPELGPTLDTLQLDVADFATTIWQQMEELGMAPALQPTQGAMPAFASAFQRRAGGVLVASHLQSFLEVSYRVLRHLAQP

SEQ ID NO: 19236 - protein, 171 aa, Homo sapiens
  Payload ID: 3858
  Gene Symbol: CSF3
  Gene Name: colony stimulating factor 3 (granulocyte)
  Uniprot ID: P09919
  ENSP ID: ENSP00000377704
MAGPATQSPMKLMALQLLLWHSALWTVQEATPLGPASSLPQSFLLKCLEQVRKIQGDGAALQEKLVSEAGCLSQLHSGLFLYQGLLQALEGISPELGPTLDTLQLDVADFATTIWQQMEELGMAPALQPTQGAMPAFASAFQRRAGGVLVASHLQSFLEVSYRVLRHLAQP

SEQ ID NO: 19237 - protein, 204 aa, Homo sapiens
  Payload ID: 3858
  Gene Symbol: CSF3
  Gene Name: colony stimulating factor 3 (granulocyte)
  Uniprot ID: P09919
  ENSP ID: ENSP00000377705
MAGPATQSPMKLMALQLLLWHSALWTVQEATPLGPASSLPQSFLLKCLEQVRKIQGDGAALQEKLCATYKLCHPEELVLLGHSLGIPWAPLSSCPSQALQLAGCLSQLHSGLFLYQGLLQALEGISPELGPTLDTLQLDVADFATTIWQQMEELGMAPALQPTQGAMPAFASAFQRRAGGVLVASHLQSFLEVSYRVLRHLAQP

SEQ ID NO: 19238 - protein, 164 aa, Homo sapiens
  Payload ID: 3858
  Gene Symbol: CSF3
  Gene Name: colony stimulating factor 3 (granulocyte)
  ENSP ID: ENSP00000462991
MSPEPALSPALQLLLWHSALWTVQEATPLGPASSLPQSFLLKCLEQVRKIQGDGAALQEKLAGCLSQLHSGLFLYQGLLQALEGISPELGPTLDTLQLDVADFATTIWQQMEELGMAPALQPTQGAMPAFASAFQRRAGGVLVASHLQSFLEVSYRVLRHLAQP

SEQ ID NO: 19239 - protein, 57 aa, Homo sapiens
  Payload ID: 3858
  Gene Symbol: CSF3
  Gene Name: colony stimulating factor 3 (granulocyte)
  ENSP ID: ENSP00000464157
MAGPATQSPMKLMVCHLQAVPPRGAGAARTLSGHPLGSPEQLPQPGPAAGRLLEPTP

SEQ ID NO: 19240 - protein, 155 aa, Homo sapiens
  Payload ID: 3858
  Gene Symbol: CSF3
  Gene Name: colony stimulating factor 3 (granulocyte)
  ENSP ID: ENSP00000464421
MAGPATQSPMKLMALQLLLWHSALWTVQEATPLGPASSLPQSFLLKCLEQVRKIQGDGAALQEKLAGCLSQLHSGLFLYQGLLQALEGISPELGPTLDTLQLDVADFATTIWQQMEELGMAPALQPTQGAMPAFASAFQRRAGGVLVASHLQSFL

SEQ ID NO: 19241 - protein, 783 aa, Homo sapiens
  Payload ID: 3859
  Gene Symbol: CSF3R
  Gene Name: colony stimulating factor 3 receptor (granulocyte)
  Uniprot ID: Q99062
  ENSP ID: ENSP00000332180
MARLGNCSLTWAALIILLLPGSLEECGHISVSAPIVHLGDPITASCIIKQNCSHLDPEPQILWRLGAELQPGGRQQRLSDGTQESIITLPHLNHTQAFLSCCLNWGNSLQILDQVELRAGYPPAIPHNLSCLMNLTTSSLICQWEPGPETHLPTSFTLKSFKSRGNCQTQGDSILDCVPKDGQSHCCIPRKHLLLYQNMGIWVQAENALGTSMSPQLCLDPMDVVKLEPPMLRTMDPSPEAAPPQAGCLQLCWEPWQPGLHINQKCELRHKPQRGEASWALVGPLPLEALQYELCGLLPATAYTLQIRCIRWPLPGHWSDWSPSLELRTTERAPTVRLDTWWRQRQLDPRTVQLFWKPVPLEEDSGRIQGYVVSWRPSGQAGAILPLCNTTELSCTFHLPSEAQEVALVAYNSAGTSRPTPVVFSESRGPALTRLHAMARDPHSLWVGWEPPNPWPQGYVIEWGLGPPSASNSNKTWRMEQNGRATGFLLKENIRPFQLYEIIVTPLYQDTMGPSQHVYAYSQEMAPSHAPELHLKHIGKTWAQLEWVPEPPELGKSPLTHYTIFWTNAQNQSFSAILNASSRGFVLHGLEPASLYHIHLMAASQAGATNSTVLTLMTLTPEGSELHIILGLFGLLLLLTCLCGTAWLCCSPNRKNPLWPSVPDPAHSSLGSWVPTIMEEDAFQLPGLGTPPITKLTVLEEDEKKPVPWESHNSSETCGLPTLVQTYVLQGDPRAVSTQPQSQSGTSDQAGPPRRSAYFKDQIMLHPAPPNGLLCLFPITSVL

SEQ ID NO: 19242 - protein, 836 aa, Homo sapiens
  Payload ID: 3859
  Gene Symbol: CSF3R
  Gene Name: colony stimulating factor 3 receptor (granulocyte)
  Uniprot ID: Q99062
  ENSP ID: ENSP00000355406
MARLGNCSLTWAALIILLLPGSLEECGHISVSAPIVHLGDPITASCIIKQNCSHLDPEPQILWRLGAELQPGGRQQRLSDGTQESIITLPHLNHTQAFLSCCLNWGNSLQILDQVELRAGYPPAIPHNLSCLMNLTTSSLICQWEPGPETHLPTSFTLKSFKSRGNCQTQGDSILDCVPKDGQSHCCIPRKHLLLYQNMGIWVQAENALGTSMSPQLCLDPMDVVKLEPPMLRTMDPSPEAAPPQAGCLQLCWEPWQPGLHINQKCELRHKPQRGEASWALVGPLPLEALQYELCGLLPATAYTLQIRCIRWPLPGHWSDWSPSLELRTTERAPTVRLDTWWRQRQLDPRTVQLFWKPVPLEEDSGRIQGYVVSWRPSGQAGAILPLCNTTELSCTFHLPSEAQEVALVAYNSAGTSRPTPVVFSESRGPALTRLHAMARDPHSLWVGWEPPNPWPQGYVIEWGLGPPSASNSNKTWRMEQNGRATGFLLKENIRPFQLYEIIVTPLYQDTMGPSQHVYAYSQEMAPSHAPELHLKHIGKTWAQLEWVPEPPELGKSPLTHYTIFWTNAQNQSFSAILNASSRGFVLHGLEPASLYHIHLMAASQAGATNSTVLTLMTLTPEGSELHIILGLFGLLLLLTCLCGTAWLCCSPNRKNPLWPSVPDPAHSSLGSWVPTIMEEDAFQLPGLGTPPITKLTVLEEDEKKPVPWESHNSSETCGLPTLVQTYVLQGDPRAVSTQPQSQSGTSDQVLYGQLLGSPTSPGPGHYLRCDSTQPLLAGLTPSPKSYENLWFQASPLGTLVTPAPSQEDDCVFGPLLNFPLLQGIRVHGMEALGSF

SEQ ID NO: 19243 - protein, 863 aa, Homo sapiens
  Payload ID: 3859
  Gene Symbol: CSF3R
  Gene Name: colony stimulating factor 3 receptor (granulocyte)
  Uniprot ID: Q99062
  ENSP ID: ENSP00000362195
MARLGNCSLTWAALIILLLPGSLEECGHISVSAPIVHLGDPITASCIIKQNCSHLDPEPQILWRLGAELQPGGRQQRLSDGTQESIITLPHLNHTQAFLSCCLNWGNSLQILDQVELRAGYPPAIPHNLSCLMNLTTSSLICQWEPGPETHLPTSFTLKSFKSRGNCQTQGDSILDCVPKDGQSHCCIPRKHLLLYQNMGIWVQAENALGTSMSPQLCLDPMDVVKLEPPMLRTMDPSPEAAPPQAGCLQLCWEPWQPGLHINQKCELRHKPQRGEASWALVGPLPLEALQYELCGLLPATAYTLQIRCIRWPLPGHWSDWSPSLELRTTERAPTVRLDTWWRQRQLDPRTVQLFWKPVPLEEDSGRIQGYVVSWRPSGQAGAILPLCNTTELSCTFHLPSEAQEVALVAYNSAGTSRPTPVVFSESRGPALTRLHAMARDPHSLWVGWEPPNPWPQGYVIEWGLGPPSASNSNKTWRMEQNGRATGFLLKENIRPFQLYEIIVTPLYQDTMGPSQHVYAYSQEMAPSHAPELHLKHIGKTWAQLEWVPEPPELGKSPLTHYTIFWTNAQNQSFSAILNASSRGFVLHGLEPASLYHIHLMAASQAGATNSTVLTLMTLTPEGSELHIILGLFGLLLLLTCLCGTAWLCCSPNRKNPLWPSVPDPAHSSLGSWVPTIMEELPGPRQGQWLGQTSEMSRALTPHPCVQDAFQLPGLGTPPITKLTVLEEDEKKPVPWESHNSSETCGLPTLVQTYVLQGDPRAVSTQPQSQSGTSDQVLYGQLLGSPTSPGPGHYLRCDSTQPLLAGLTPSPKSYENLWFQASPLGTLVTPAPSQEDDCVFGPLLNFPLLQGIRVHGMEALGSF

SEQ ID NO: 19244 - protein, 783 aa, Homo sapiens; identical to SEQ ID NO: 19241
  Payload ID: 3859
  Gene Symbol: CSF3R
  Gene Name: colony stimulating factor 3 receptor (granulocyte)
  Uniprot ID: Q99062
  ENSP ID: ENSP00000362196

SEQ ID NO: 19245 - protein, 836 aa, Homo sapiens; identical to SEQ ID NO: 19242
  Payload ID: 3859
  Gene Symbol: CSF3R
  Gene Name: colony stimulating factor 3 receptor (granulocyte)
  Uniprot ID: Q99062
  ENSP ID: ENSP00000362198

SEQ ID NO: 19246 - protein, 21 aa, Homo sapiens
  Payload ID: 3859
  Gene Symbol: CSF3R
  Gene Name: colony stimulating factor 3 receptor (granulocyte)
  ENSP ID: ENSP00000431639
MARLGNCSLTWAALIILLLPG

SEQ ID NO: 19247 - protein, 388 aa, Homo sapiens
  Payload ID: 3859
  Gene Symbol: CSF3R
  Gene Name: colony stimulating factor 3 receptor (granulocyte)
  ENSP ID: ENSP00000435218
  MOD_RES (1)..(1): Any amino acid
XTSRPTPVVFSESRGPALTRLHAMARDPHSLWVGWEPPNPWPQGYVIEWGLGPPSASNSNKTWRMEQNGRATGFLLKAPSHAPELHLKHIGKTWAQLEWVPEPPELGKSPLTHYTIFWTNAQNQSFSAILNASSRGFVLHGLEPASLYHIHLMAASQAGATNSTVLTLMTLTPEGSELHIILGLFGLLLLLTCLCGTAWLCCSPNRKNPLWPSVPDPAHSSLGSWVPTIMEEDAFQLPGLGTPPITKLTVLEEDEKKPVPWESHNSSETCGLPTLVQTYVLQGDPRAVSTQPQSQSGTSDQVLYGQLLGSPTSPGPGHYLRCDSTQPLLAGLTPSPKSYENLWFQASPLGTLVTPAPSQEDDCVFGPLLNFPLLQGIRVHGMEALGSF

SEQ ID NO: 19248 - protein, 154 aa, Homo sapiens
  Payload ID: 3860
  Gene Symbol: COLCA2
  Gene Name: colorectal cancer associated 2
  Uniprot ID: A8K830
  ENSP ID: ENSP00000381115
MHPEPLLNSTQSAPHHFPDSFQATPFCFNQSLIPGSPSNSSILSGSLDYSYSPVQLPSYAPENYNSPASLDTRTCGYPPEDHSYQHLSSHAQYSCFSSATTSICYCASCEAEDLDALQAAEYFYPSTDCVDFAPSAAATSDFYKRETNCDICYS

SEQ ID NO: 19249 - protein, 154 aa, Homo sapiens; identical to SEQ ID NO: 19248
  Payload ID: 3860
  Gene Symbol: COLCA2
  Gene Name: colorectal cancer associated 2
  Uniprot ID: A8K830
  ENSP ID: ENSP00000434519

SEQ ID NO: 19250 - protein, 106 aa, Homo sapiens
  Payload ID: 3860
  Gene Symbol: COLCA2
  Gene Name: colorectal cancer associated 2
  ENSP ID: ENSP00000434938
MHPEPLLNSTQSAPHHFPDSFQATPFCFNQSLIPGSPSNSSILSGSLDYSYSPVQLPSYAPENYNSPASLDTRTCGYPPEDHSYQHLSSHAQYSCFSSATTSICYC

SEQ ID NO: 19251 - protein, 154 aa, Homo sapiens; identical to SEQ ID NO: 19248
  Payload ID: 3860
  Gene Symbol: COLCA2
  Gene Name: colorectal cancer associated 2
  Uniprot ID: A8K830
  ENSP ID: ENSP00000481028

SEQ ID NO: 19252 - protein, 251 aa, Homo sapiens
  Payload ID: 3860
  Gene Symbol: COLCA2
  Gene Name: colorectal cancer associated 2
  Uniprot ID: A8K830
  ENSP ID: ENSP00000484135
MSEKPKVYQGVRVKITVKELLQQRRAHQAASGGTRSGGSSVHLSDPVAPSSAGLYFEPEPISSTPNYLQRGEFSSCVSCEENSSCLDQIFDSYLQTEMHPEPLLNSTQSAPHHFPDSFQATPFCFNQSLIPGSPSNSSILSGSLDYSYSPVQLPSYAPENYNSPASLDTRTCGYPPEDHSYQHLSSHAQYSCFSSATTSICYCASCEAEDLDALQAAEYFYPSTDCVDFAPSAAATSDFYKRETNCDICYS

SEQ ID NO: 19253 - protein, 202 aa, Homo sapiens
  Payload ID: 3861
  Gene Symbol: COMMD10
  Gene Name: COMM domain containing 10
  Uniprot ID: Q9Y6G5
  ENSP ID: ENSP00000274458
MAVPAALILRESPSMKKAVSLINAIDTGRFPRLLTRILQKLHLKAESSFSEEEEEKLQAAFSLEKQDLHLVLETISFILEQAVYHNVKPAALQQQLENIHLRQDKAEAFVNTWSSMGQETVEKFRQRILAPCKLETVGWQLNLQMAHSAQAKLKSPQAVLQLGVNNEDSKSLEKVLVEFSHKELFDFYNKLETIQAQLDSLT

SEQ ID NO: 19254 - protein, 139 aa, Homo sapiens
  Payload ID: 3861
  Gene Symbol: COMMD10
  Gene Name: COMM domain containing 10
  ENSP ID: ENSP00000422448
MAVPAALILRESPSMKKAVSLINAIDTGRFPRLLTRILQKLHLKAESSFSEEEEEKLQAAFSLEKQDLHLVLETISFILEQAVYHNVKPAALQQQLENIHLRQDKAEAFVNTWSSMGQETVEKFRQRILAPSRDRWMAA

SEQ ID NO: 19255 - protein, 121 aa, Homo sapiens
  Payload ID: 3861
  Gene Symbol: COMMD10
  Gene Name: COMM domain containing 10
  ENSP ID: ENSP00000424611
AESSFSEEEEEKLQAAFSLEKQDLHLVLETISFILEQAVYHNVKPAALQQQLENIHLRQDKAEAFVNTWSSMGQETVEKFRQRILAPCKSLEKVLVEFSHKELFDFYNKLETIQAQLDSLT

SEQ ID NO: 19256 - protein, 188 aa, Homo sapiens
  Payload ID: 3861
  Gene Symbol: COMMD10
  Gene Name: COMM domain containing 10
  ENSP ID: ENSP00000427319
MKKAVSLINAIDTGRFPRLLTRILQKLHLKAESSFSEEEEEKLQAAFSLEKQDLHLVLETISFILEQAVYHNVKPAALQQQLENIHLRQDKAEAFVNTWSSMGQETVEKFRQRILAPCKLETVGWQLNLQMAHSAQAKLKSPQAVLQLGVNNEDSKSLEKVLVEFSHKELFDFYNKLETIQAQLDSLT

SEQ ID NO: 19257 - protein, 188 aa, Homo sapiens; identical to SEQ ID NO: 19256
  Payload ID: 3861
  Gene Symbol: COMMD10
  Gene Name: COMM domain containing 10
  ENSP ID: ENSP00000488332

SEQ ID NO: 19258 - protein, 135 aa, Homo sapiens
  Payload ID: 3862
  Gene Symbol: COMMD2
  Gene Name: COMM domain containing 2
  ENSP ID: ENSP00000417962
MLLELSEEHKEHLAFLPQVDSAVVAEFGRIAVEFLRRGANPKIYEGAARKLNVSSDTVQHGVEGLTYLLTESSKLMISELDFQDSVFVLGFSEELNKLLLQLYLDNRKEIRTILSELAPSLPSYHNLEWRLDVQM

SEQ ID NO: 19259 - protein, 121 aa, Homo sapiens
  Payload ID: 3862
  Gene Symbol: COMMD2
  Gene Name: COMM domain containing 2
  ENSP ID: ENSP00000418865
MLLELSEEHKEHLAFLPQVDSAVVAEFGRIAVEFLRRGANPKIYEGAARKLNVSSDTVQHGVEGLTYLLTESSKLMVRDFLDCFVLAGFLRTVWCTLHHSPGRFLNWISKTLFLFWDSLKN

SEQ ID NO: 19260 - protein, 199 aa, Homo sapiens
  Payload ID: 3862
  Gene Symbol: COMMD2
  Gene Name: COMM domain containing 2
  Uniprot ID: Q86X83
  ENSP ID: ENSP00000419475
MLLELSEEHKEHLAFLPQVDSAVVAEFGRIAVEFLRRGANPKIYEGAARKLNVSSDTVQHGVEGLTYLLTESSKLMISELDFQDSVFVLGFSEELNKLLLQLYLDNRKEIRTILSELAPSLPSYHNLEWRLDVQLASRSLRQQIKPAVTIKLHLNQNGDHNTKVLQTDPATLLHLVQQLEQALEEMKTNHCRRVVRNIK

SEQ ID NO: 19261 - protein, 195 aa, Homo sapiens
  Payload ID: 3863
  Gene Symbol: COMMD3
  Gene Name: COMM domain containing 3
  Uniprot ID: Q9UBI1
  ENSP ID: ENSP00000366032
MELSESVQKGFQMLADPRSFDSNAFTLLLRAAFQSLLDAQADEAVLDHPDLKHIDPVVLKHCHAAAATYILEAGKHRADKSTLSTYLEDCKFDRERIELFCTEYQNNKNSLEILLGSIGRSLPHITDVSWRLEYQIKTNQLHRMYRPAYLVTLSVQNTDSPSYPEISFSCSMEQLQDLVGKLKDASKSLERATQL

SEQ ID NO: 19262 - protein, 149 aa, Homo sapiens
  Payload ID: 3863
  Gene Symbol: COMMD3
  Gene Name: COMM domain containing 3
  ENSP ID: ENSP00000391237
  MOD_RES (1)..(1): Any amino acid
XLPDAGGSPLLRLQRLHASPPGGIPESAGRPGGRGRVSTYLEDCKFDRERIELFCTEYQNNKNSLEILLGSIGRSLPHITDVSWRLEYQIKTNQLHRMYRPAYLVTLSVQNTDSPSYPEISFSCSMEQLQDLVGKLKDASKSLERATQL

SEQ ID NO: 19263 - protein, 163 aa, Homo sapiens
  Payload ID: 3863
  Gene Symbol: COMMD3
  Gene Name: COMM domain containing 3
  ENSP ID: ENSP00000394580
  MOD_RES (1)..(1): Any amino acid
XMELSESVQKGFQMLADPRSFDSNAFTLLLRAAFQSLLDAQADEAVLDHPDLKHIDPVVLKHCHAAAATYILEAGKHRADKSTLSIGRSLPHITDVSWRLEYQIKTNQLHRMYRPAYLVTLSVQNTDSPSYPEISFSCSMEQLQDLVGKLKDASKSLERATQL

SEQ ID NO: 19264 - protein, 177 aa, Homo sapiens
  Payload ID: 3863
  Gene Symbol: COMMD3
  Gene Name: COMM domain containing 3
  ENSP ID: ENSP00000408982
  MOD_RES (1)..(1): Any amino acid
XELSESVQKGFQMLADPRSFDSNAFTLLLRAAFQSLLDAQADEAVLDHPDLKHIDPVVLKHCHAAAATYILEAGKHRADKSTLSTYLEDCKFDRERIELFCTEYQNNKNSLEILLGRTLIPHPIQRLVLVAAWNNYRTWWGNLKMLRKAWKEQLSCNLGKLTIRPSAEENQKRLAFS

SEQ ID NO: 19265 - protein, 48 aa, Homo sapiens
  Payload ID: 3863
  Gene Symbol: COMMD3
  Gene Name: COMM domain containing 3
  ENSP ID: ENSP00000473433
  MOD_RES (1)..(1): Any amino acid
XESVQKGFQMLADPRSFDSNAFTLLLRAAFQSLLDAQADEAVLGITGS

SEQ ID NO: 19266 - protein, 74 aa, Homo sapiens
  Payload ID: 3863
  Gene Symbol: COMMD3
  Gene Name: COMM domain containing 3
  ENSP ID: ENSP00000473624
NNKNSLEILLGSIGRSLPHITDVSWRLEYQIKTNQLHRMYRPAYLVTLSVQNTDSPSYPEISFSCSMEQLQVQY

SEQ ID NO: 19267 - protein, 199 aa, Homo sapiens
  Payload ID: 3864
  Gene Symbol: COMMD4
  Gene Name: COMM domain containing 4
  Uniprot ID: Q9H0A8
  ENSP ID: ENSP00000267935
MRFRFCGDLDCPDWVLAEISTLAKMSSVKLRLLCSQVLKELLGQGIDYEKILKLTADAKFESGDVKATVAVLSFILSSAAKHSVDGESLSSELQQLGLPKEHAASLCRCYEEKQSPLQKHLRVCSLRMNRLAGVGWRVDYTLSSSLLQSVEEPMVHLRLEVAAAPGTPAQPVAMSLSADKFQVLLAELKQAQTLMSSLG

SEQ ID NO: 19268 - protein, 140 aa, Homo sapiens
  Payload ID: 3864
  Gene Symbol: COMMD4
  Gene Name: COMM domain containing 4
  Uniprot ID: Q9H0A8
  ENSP ID: ENSP00000340867
MRFRFCGDLDCPDWVLAEISTLAKMSSVKLRLLCSQVLKELLGQGIDYEKILKLTADAKFESGDVKATVAVLSFILSSAAKHSVDGESLSSELQQLGLPKEHAASLCRCYEEKQSPLQKHLRVCSLRKLKQAQTLMSSLG

SEQ ID NO: 19269 - protein, 199 aa, Homo sapiens; identical to SEQ ID NO: 19267
  Payload ID: 3864
  Gene Symbol: COMMD4
  Gene Name: COMM domain containing 4
  Uniprot ID: Q9H0A8
  ENSP ID: ENSP00000433662

SEQ ID NO: 19270 - protein, 211 aa, Homo sapiens
  Payload ID: 3864
  Gene Symbol: COMMD4
  Gene Name: COMM domain containing 4
  ENSP ID: ENSP00000454283
MRGRQVAPETGGGCTGLSANTVCAGVRARFRFCGDLDCPDWVLAEISTLAKMSSVKLRLLCSQVLKELLGQGIDYEKILKLTADAKFESGDVKATVAVLSFILSSAAKHSVDGESLSSELQQLGLPKEHAASLCRCYEEKQSPLQKHLRVCSLRMNRLAGVGWRVDYTLSSSLLQSVEEPMVHLRLEVAAAPGTPAQPVAMSLSADKFQVL

SEQ ID NO: 19271 - protein, 177 aa, Homo sapiens
  Payload ID: 3864
  Gene Symbol: COMMD4
  Gene Name: COMM domain containing 4
  ENSP ID: ENSP00000455249
MRFRFCGDLDCPDWVLAEISTLAKMYEKILKLTADAKFESGDVKATVAVLSFILSSAAKHSVDGESLSSELQQLGLPKEHAASLCRCYEEKQSPLQKHLRVCSLRMNRLAGVGWRVDYTLSSSLLQSVEEPMVHLRLEVAAAPGTPAQPVAMSLSADKFQVLLAELKQAQTLMSSLG

SEQ ID NO: 19272 - protein, 136 aa, Homo sapiens
  Payload ID: 3864
  Gene Symbol: COMMD4
  Gene Name: COMM domain containing 4
  ENSP ID: ENSP00000455303
MRGRQVAPETGGGCTGLSANTVCAGVRAVSLYEKILKLTADAKFESGDVKATVAVLSFILSSAAKHSVDGESLSSELQQLGLPKEHAASLCRCYEEKQSPLQKHLRVCSLRMNRLAGVGWRVDYTLSSSLLQSVEE

SEQ ID NO: 19273 - protein, 146 aa, Homo sapiens
  Payload ID: 3864
  Gene Symbol: COMMD4
  Gene Name: COMM domain containing 4
  ENSP ID: ENSP00000455750
MRGRQVAPETGGGCTGLSANTVCAGVRAVSLSSVKLRLLCSQVLKELLGQGIDYEKILKLTADAKFESGDVKATVAVLSFILSSAAKHSVDGESLSSELQQLGLPKEHAASLCRCYEEKQSPLQKHLRVCSLRKLKQAQTLMSSLG

SEQ ID NO: 19274 - protein, 110 aa, Homo sapiens
  Payload ID: 3864
  Gene Symbol: COMMD4
  Gene Name: COMM domain containing 4
  ENSP ID: ENSP00000456440
MRFRFCGDLDCPDWVLAEISTLAKMSSVKLRLLCSQVLKELLGQGIDYEKILKLTADAKFVRPSTVSMANPCPVNCSSWGCPKSTRPACAAVMRRSKAPCRSTCGSAAYA

SEQ ID NO: 19275 - protein, 52 aa, Homo sapiens
  Payload ID: 3864
  Gene Symbol: COMMD4
  Gene Name: COMM domain containing 4
  ENSP ID: ENSP00000457348
MRFRFCGDLDCPDWVLAEISTLAKMSSVKLRLLCSQVLKELLGQGIDDPGWG

SEQ ID NO: 19276 - protein, 113 aa, Homo sapiens
  Payload ID: 3864
  Gene Symbol: COMMD4
  Gene Name: COMM domain containing 4
  Uniprot ID: Q9H0A8
  ENSP ID: ENSP00000457693
MRFRFCGDLDCPDWVLAEISTLAKMSSVKLRLLCSQVLKELLGQGIDYEKILKLTADAKFESGDVKATVAVLSFILSSAAKHSVDGESLSSELQQLGLPKELKQAQTLMSSLG

SEQ ID NO: 19277 - protein, 224 aa, Homo sapiens
  Payload ID: 3865
  Gene Symbol: COMMD5
  Gene Name: COMM domain containing 5
  Uniprot ID: Q9GZQ3
  ENSP ID: ENSP00000304544
MSAVGAATPYLHHPGDSHSGRVSFLGAQLPPEVAAMARLLGDLDRSTFRKLLKFVVSSLQGEDCREAVQRLGVSANLPEEQLGALLAGMHTLLQQALRLPPTSLKPDTFRDQLQELCIPQDLVGDLASVVFGSQRPLLDSVAQQQGAWLPHVADFRWRVDVAISTSALARSLQPSVLMQLKLSDGSAYRFEVPTAKFQELRYSVALVLKEMADLEKRCERRLQD

SEQ ID NO: 19278 - protein, 224 aa, Homo sapiens; identical to SEQ ID NO: 19277
  Payload ID: 3865
  Gene Symbol: COMMD5
  Gene Name: COMM domain containing 5
  Uniprot ID: Q9GZQ3
  ENSP ID: ENSP00000385793

SEQ ID NO: 19279 - protein, 224 aa, Homo sapiens; identical to SEQ ID NO: 19277
  Payload ID: 3865
  Gene Symbol: COMMD5
  Gene Name: COMM domain containing 5
  Uniprot ID: Q9GZQ3
  ENSP ID: ENSP00000394331

SEQ ID NO: 19280 - protein, 171 aa, Homo sapiens
  Payload ID: 3865
  Gene Symbol: COMMD5
  Gene Name: COMM domain containing 5
  ENSP ID: ENSP00000433758
MSAVGAATPYLHHPGDSHSGRVSFLGAQLPPEVAAMARLLGDLDRSTFRKLLKFVVSSLQGEDCREAVQRLGVSANLPEEQLGALLAGMHTLLQQALRLPPTSLKPDTFRDQLQELCIPQDLVGDLASVVFGSQRPLLDSVAQQQGAWLPHVADFRWRVDVAISTSALARS

SEQ ID NO: 19281 - protein, 171 aa, Homo sapiens; identical to SEQ ID NO: 19280
  Payload ID: 3865
  Gene Symbol: COMMD5
  Gene Name: COMM domain containing 5
  ENSP ID: ENSP00000435552

SEQ ID NO: 19282 - protein, 170 aa, Homo sapiens
  Payload ID: 3865
  Gene Symbol: COMMD5
  Gene Name: COMM domain containing 5
  ENSP ID: ENSP00000436382
  MOD_RES (1)..(1): Any amino acid
XVSSLQGEDCREAVQRLGVSANLPEEQLGALLAGMHTLLQQALRLPPTSLKPDTFRDQLQELCIPQDLVGDLASVVFGSQRPLLDSVAQQQGAWLPHVADFRWRVDVAISTSALARSLQPSVLMQLKLSDGSAYRFEVPTAKFQELRYSVALVLKEMADLEKRCERRLQD

SEQ ID NO: 19283 - protein, 224 aa, Homo sapiens; identical to SEQ ID NO: 19277
  Payload ID: 3865
  Gene Symbol: COMMD5
  Gene Name: COMM domain containing 5
  Uniprot ID: Q9GZQ3
  ENSP ID: ENSP00000445840

SEQ ID NO: 19284 - protein, 98 aa, Homo sapiens
  Payload ID: 3866
  Gene Symbol: COMMD6
  Gene Name: COMM domain containing 6
  Uniprot ID: Q7Z4G1
  ENSP ID: ENSP00000348054
MEASSEPPLDAKSDVTNQLVDFQWKLGMAVSSDTCRSLKYPYVAVMLKVADHSGQVKTKCFEMTIPQFQPQLLATSSLLSASNFYRQFKEIAAVIETV

SEQ ID NO: 19285 - protein, 39 aa, Homo sapiens
  Payload ID: 3866
  Gene Symbol: COMMD6
  Gene Name: COMM domain containing 6
  ENSP ID: ENSP00000366838
MEASSEPPLDAKSDVSSNLEGEFSVETGYGCELRHLQIS

SEQ ID NO: 19286 - protein, 85 aa, Homo sapiens
  Payload ID: 3866
  Gene Symbol: COMMD6
  Gene Name: COMM domain containing 6
  Uniprot ID: Q7Z4G1
  ENSP ID: ENSP00000366841
MEASSEPPLDAKSDVTNQLVDFQWKLGMAVSSDTCRSLKYPYVAVMLKVADHSGQVKTKCFEMTIPQFQNFYRQFKEIAAVIETV

SEQ ID NO: 19287 - protein, 100 aa, Homo sapiens
  Payload ID: 3866
  Gene Symbol: COMMD6
  Gene Name: COMM domain containing 6
  ENSP ID: ENSP00000366845
MKAPLPHPALARRMQIKDCWALIRRQLFEARNTLVDFQWKLGMAVSSDTCRSLKYPYVAVMLKVADHSGQVKTKCFEMTIPQFQNFYRQFKEIAAVIETV

SEQ ID NO: 19288 - protein, 85 aa, Homo sapiens; identical to SEQ ID NO: 19286
  Payload ID: 3866
  Gene Symbol: COMMD6
  Gene Name: COMM domain containing 6
  Uniprot ID: Q7Z4G1
  ENSP ID: ENSP00000385660

SEQ ID NO: 19289 - protein, 39 aa, Homo sapiens; identical to SEQ ID NO: 19285
  Payload ID: 3866
  Gene Symbol: COMMD6
  Gene Name: COMM domain containing 6
  ENSP ID: ENSP00000485825

SEQ ID NO: 19290 - protein, 200 aa, Homo sapiens
  Payload ID: 3867
  Gene Symbol: COMMD7
  Gene Name: COMM domain containing 7
  Uniprot ID: Q86VX2
  ENSP ID: ENSP00000278980
MGRLHCTEDPVPEAVGGDMQQLNQLGAQQFSALTEVLFHFLTEPKEVERFLAQLSEFATTNQISLGSLRSIVKSLLLVPNGALKKSLTAKQVQADFITLGLSEEKATYFSEKWKQNAPTLARWAIGQTLMINQLIDMEWKFGVTSGSSELEKVGSIFLQLKLVVKKGNQTENVYIELTLPQFYSFLHEMERVRTSMECFC

SEQ ID NO: 19291 - protein, 199 aa, Homo sapiens
  Payload ID: 3867
  Gene Symbol: COMMD7
  Gene Name: COMM domain containing 7
  Uniprot ID: Q86VX2
  ENSP ID: ENSP00000395339
MGRLHCTEDPVPEAVGGDMQQLNQLGAQFSALTEVLFHFLTEPKEVERFLAQLSEFATTNQISLGSLRSIVKSLLLVPNGALKKSLTAKQVQADFITLGLSEEKATYFSEKWKQNAPTLARWAIGQTLMINQLIDMEWKFGVTSGSSELEKVGSIFLQLKLVVKKGNQTENVYIELTLPQFYSFLHEMERVRTSMECFC

SEQ ID NO: 19292 - protein, 157 aa, Homo sapiens
  Payload ID: 3867
  Gene Symbol: COMMD7
  Gene Name: COMM domain containing 7
  ENSP ID: ENSP00000476443
MGRLHCTEDPVPEAVGGDMQQLNQLGAQQFSALTEVLFHFLTEPKEARVFTVLSLQVERFLAQLSEFATTNQISLGSLRSIVKSLLLVPNGALKKSLTAKQVQADFITLGLSEEKATYFSEKWKQNAPTLARWAIGQTLMINQLIDMEWKFGVTSGS

SEQ ID NO: 19293 - protein, 57 aa, Homo sapiens
  Payload ID: 3867
  Gene Symbol: COMMD7
  Gene Name: COMM domain containing 7
  ENSP ID: ENSP00000476617
MGRLHCTEDPVPEAVGGDMQQLNQLGAQAAGANQGSLGGILLLCWLGCLFIPPRLLK

SEQ ID NO: 19294 - protein, 183 aa, Homo sapiens
  Payload ID: 3868
  Gene Symbol: COMMD8
  Gene Name: COMM domain containing 8
  Uniprot ID: Q9NX08
  ENSP ID: ENSP00000370984
MEPEEGTPLWRLQKLPAELGPQLLHKIIDGICGRAYPVYQDYHTVWESEEWMHVLEDIAKFFKAIVGKNLPDEEIFQQLNQLNSLHQETIMKCVKSRKDEIKQALSREIVAISSAQLQDFDWQVKLALSSDKIAALRMPLLSLHLDVKENGEVKPYSIEMSREELQNLIQSLEAANKVVLQLK

SEQ ID NO: 19295 - protein, 198 aa, Homo sapiens
  Payload ID: 3869
  Gene Symbol: COMMD9
  Gene Name: COMM domain containing 9
  Uniprot ID: Q9P000
  ENSP ID: ENSP00000263401
MAALTAEHFAALQSLLKASSKDVVRQLCQESFSSSALGLKKLLDVTCSSLSVTQEEAEELLQALHRLTRLVAFRDLSSAEAILALFPENFHQNLKNLLTKIILEHVSTWRTEAQANQISLPRLVDLDWRVDIKTSSDSISRMAVPTCLLQMKIQEDPSLCGDKPSISAVTVELSKETLDTMLDGLGRIRDQLSAVASK

SEQ ID NO: 19296 - protein, 156 aa, Homo sapiens
  Payload ID: 3869
  Gene Symbol: COMMD9
  Gene Name: COMM domain containing 9
  Uniprot ID: Q9P000
  ENSP ID: ENSP00000392510
MAALTAEHFAALQSLLKLLQALHRLTRLVAFRDLSSAEAILALFPENFHQNLKNLLTKIILEHVSTWRTEAQANQISLPRLVDLDWRVDIKTSSDSISRMAVPTCLLQMKIQEDPSLCGDKPSISAVTVELSKETLDTMLDGLGRIRDQLSAVASK

SEQ ID NO: 19297 - protein, 185 aa, Homo sapiens
  Payload ID: 3869
  Gene Symbol: COMMD9
  Gene Name: COMM domain containing 9
  ENSP ID: ENSP00000435599
MAALTAEHFAALQSLLKASSKDVVRQLCQESFSSSALGLKKLLDVTCSSLSVTQEEAEELLQALHRLTRLVAFRDLSSAEAILALFPENFHQNLKNLLTKIILEHVLSATPGRSGLESGYQNLLRQHQPHGRPHLPAPDEDPRRSQPMRRQTLHLSCHRGAEQRNTGHHVRWPGPHPRPTLCRGQ

SEQ ID NO: 19298 - protein, 53 aa, Homo sapiens
  Payload ID: 3870
  Gene Symbol: COMMD3-BMI1
  Gene Name: COMMD3-BMI1 readthrough
  ENSP ID: ENSP00000398759
  MOD_RES (1)..(1): Any amino acid
XMLADPRSFDSNAFTLLLRAAFQSLLDAQADEAVLGFFIKQKCIEQRESRSLS

SEQ ID NO: 19299 - protein, 159 aa, Homo sapiens
  Payload ID: 3870
  Gene Symbol: COMMD3-BMI1
  Gene Name: COMMD3-BMI1 readthrough
  ENSP ID: ENSP00000473382
MELSESVQKGFQMLADPRSFDSNAFTLLLRAAFQSLLDAQADEAVLDHPDLKHIDPVVLKHCHAAAATYILEAGKHRADKSTLSTYLEDCKFDRERIELFCTEYQNNKNSLEILLGRIFYQAEMHRTTRIKITELNPHLMCVLCGGYFIDATTIIECLH

SEQ ID NO: 19300 - protein, 469 aa, Homo sapiens
  Payload ID: 3870
  Gene Symbol: COMMD3-BMI1
  Gene Name: COMMD3-BMI1 readthrough
  ENSP ID: ENSP00000473391
MELSESVQKGFQMLADPRSFDSNAFTLLLRAAFQSLLDAQADEAVLDHPDLKHIDPVVLKHCHAAAATYILEAGKHRADKSTLSTYLEDCKFDRERIELFCTEYQNNKNSLEILLGRTLIPHPIQRLVLVAAWNNYRIFYQAEMHRTTRIKITELNPHLMCVLCGGYFIDATTIIECLHSFCKTCIVRYLETSKYCPICDVQVHKTRPLLNIRSDKTLQDIVYKLVPGLFKNEMKRRRDFYAAHPSADAANGSNEDRGEVADEDKRIITDDEIISLSIEFFDQNRLDRKVNKDKEKSKEEVNDKRYLRCPAAMTVMHLRKFLRSKMDIPNTFQIDVMYEEEPLKDYYTLMDIAYIYTWRRNGPLPLKYRVRPTCKRMKISHQRDGLTNAGELESDSGSDKANSPAGGIPSTSSCLPSPSTPVQSPHPQFPHISSTMNGTSNSPSGNHQSSFANRPRKSSVNGSSATSSG

SEQ ID NO: 19301 - protein, 110 aa, Homo sapiens
  Payload ID: 3870
  Gene Symbol: COMMD3-BMI1
  Gene Name: COMMD3-BMI1 readthrough
  ENSP ID: ENSP00000473495
  MOD_RES (1)..(1): Any amino acid
XSVQKGFQMLADPRSFDSNAFTLLLRAAFQSLLDAQADEAVLDHPDLKHIDPVVLKHCHAAAATYILEAGKHRADKSTLRIFYQAEMHRTTRIKITELNPHLMCVLCGGY

SEQ ID NO: 19302 - protein, 2489 aa, Homo sapiens
  Payload ID: 3871
  Gene Symbol: CR1
  Gene Name: complement component (3b/4b) receptor 1 (Knops blood group)
  ENSP ID: ENSP00000356016
MGASSPRSPEPVGPPAPGLPFCCGGSLLAVVVLLALPVAWGQCNAPEWLPFARPTNLTDEFEFPIGTYLNYECRPGYSGRPFSIICLKNSVWTGAKDRCRRKSCRNPPDPVNGMVHVIKGIQFGSQIKYSCTKGYRLIGSSSATCIISGDTVIWDNETPICDRIPCGLPPTITNGDFISTNRENFHYGSVVTYRCNPGSGGRKVFELVGEPSIYCTSNDDQVGIWSGPAPQCIIPNKCTPPNVENGILVSDNRSLFSLNEVVEFRCQPGFVMKGPRRVKCQALNKWEPELPSCSRVCQPPPDVLHAERTQRDKDNFSPGQEVFYSCEPGYDLRGAASMRCTPQGDWSPAAPTCEVKSCDDFMGQLLNGRVLFPVNLQLGAKVDFVCDEGFQLKGSSASYCVLAGMESLWNSSVPVCEQIFCPSPPVIPNGRHTGKPLEVFPFGKTVNYTCDPHPDRGTSFDLIGESTIRCTSDPQGNGVWSSPAPRCGILGHCQAPDHFLFAKLKTQTNASDFPIGTSLKYECRPEYYGRPFSITCLDNLVWSSPKDVCKRKSCKTPPDPVNGMVHVITDIQVGSRINYSCTTGHRLIGHSSAECILSGNAAHWSTKPPICQRIPCGLPPTIANGDFISTNRENFHYGSVVTYRCNPGSGGRKVFELVGEPSIYCTSNDDQVGIWSGPAPQCIIPNKCTPPNVENGILVSDNRSLFSLNEVVEFRCQPGFVMKGPRRVKCQALNKWEPELPSCSRVCQPPPDVLHAERTQRDKDNFSPGQEVFYSCEPGYDLRGAASMRCTPQGDWSPAAPTCEVKSCDDFMGQLLNGRVLFPVNLQLGAKVDFVCDEGFQLKGSSASYCVLAGMESLWNSSVPVCEQIFCPSPPVIPNGRHTGKPLEVFPFGKTVNYTCDPHPDRGTSFDLIGESTIRCTSDPQGNGVWSSPAPRCGILGHCQAPDHFLFAKLKTQTNASDFPIGTSLKYECRPEYYGRPFSITCLDNLVWSSPKDVCKRKSCKTPPDPVNGMVHVITDIQVGSRINYSCTTGHRLIGHSSAECILSGNAAHWSTKPPICQRIPCGLPPTIANGDFISTNRENFHYGSVVTYRCNPGSGGRKVFELVGEPSIYCTSNDDQVGIWSGPAPQCIIPNKCTPPNVENGILVSDNRSLFSLNEVVEFRCQPGFVMKGPRRVKCQALNKWEPELPSCSRVCQPPPDVLHAERTQRDKDNFSPGQEVFYSCEPGYDLRGAASMRCTPQGDWSPAAPTCEVKSCDDFMGQLLNGRVLFPVNLQLGAKVDFVCDEGFQLKGSSASYCVLAGMESLWNSSVPVCEQIFCPSPPVIPNGRHTGKPLEVFPFGKAVNYTCDPHPDRGTSFDLIGESTIRCTSDPQGNGVWSSPAPRCGILGHCQAPDHFLFAKLKTQTNASDFPIGTSLKYECRPEYYGRPFSITCLDNLVWSSPKDVCKRKSCKTPPDPVNGMVHVITDIQVGSRINYSCTTGHRLIGHSSAECILSGNTAHWSTKPPICQRIPCGLPPTIANGDFISTNRENFHYGSVVTYRCNLGSRGRKVFELVGEPSIYCTSNDDQVGIWSGPAPQCIIPNKCTPPNVENGILVSDNRSLFSLNEVVEFRCQPGFVMKGPRRVKCQALNKWEPELPSCSRVCQPPPEILHGEHTPSHQDNFSPGQEVFYSCEPGYDLRGAASLHCTPQGDWSPEAPRCAVKSCDDFLGQLPHGRVLFPLNLQLGAKVSFVCDEGFRLKGSSVSHCVLVGMRSLWNNSVPVCEHIFCPNPPAILNGRHTGTPSGDIPYGKEISYTCDPHPDRGMTFNLIGESTIRCTSDPHGNGVWSSPAPRCELSVRAGHCKTPEQFPFASPTIPINDFEFPVGTSLNYECRPGYFGKMFSISCLENLVWSSVEDNCRRKSCGPPPEPFNGMVHINTDTQFGSTVNYSCNEGFRLIGSPSTTCLVSGNNVTWDKKAPICEIISCEPPPTISNGDFYSNNRTSFHNGTVVTYQCHTGPDGEQLFELVGERSIYCTSKDDQVGVWSSPPPRCISTNKCTAPEVENAIRVPGNRSFFTLTEIIRFRCQPGFVMVGSHTVQCQTNGRWGPKLPHCSRVCQPPPEILHGEHTLSHQDNFSPGQEVFYSCEPSYDLRGAASLHCTPQGDWSPEAPRCTVKSCDDFLGQLPHGRVLLPLNLQLGAKVSFVCDEGFRLKGRSASHCVLAGMKALWNSSVPVCEQIFCPNPPAILNGRHTGTPFGDIPYGKEISYACDTHPDRGMTFNLIGESSIRCTSDPQGNGVWSSPAPRCELSVPAACPHPPKIQNGHYIGGHVSLYLPGMTISYICDPGYLLVGKGFIFCTDQGIWSQLDHYCKEVNCSFPLFMNGISKELEMKKVYHYGDYVTLKCEDGYTLEGSPWSQCQADDRWDPPLAKCTSRTHDALIVGTLSGTIFFILLIIFLSWIILKHRKGNNAHENPKEVAIHLHSQGGSSVHPRTLQTNEENSRVLP

SEQ ID NO: 19303 - protein, 2039 aa, Homo sapiens
  Payload ID: 3871
  Gene Symbol: CR1
  Gene Name: complement component (3b/4b) receptor 1 (Knops blood group)
  Uniprot ID: P17927
  ENSP ID: ENSP00000356018
MGASSPRSPEPVGPPAPGLPFCCGGSLLAVVVLLALPVAWGQCNAPEWLPFARPTNLTDEFEFPIGTYLNYECRPGYSGRPFSIICLKNSVWTGAKDRCRRKSCRNPPDPVNGMVHVIKGIQFGSQIKYSCTKGYRLIGSSSATCIISGDTVIWDNETPICDRIPCGLPPTIANGDFISTNRENFHYGSVVTYRCNPGSGGRKVFELVGEPSIYCTSNDDQVGIWSGPAPQCIIPNKCTPPNVENGILVSDNRSLFSLNEVVEFRCQPGFVMKGPRRVKCQALNKWEPELPSCSRVCQPPPDVLHAERTQRDKDNFSPGQEVFYSCEPGYDLRGAASMRCTPQGDWSPAAPTCEVKSCDDFMGQLLNGRVLFPVNLQLGAKVDFVCDEGFQLKGSSASYCVLAGMESLWNSSVPVCEQIFCPSPPVIPNGRHTGKPLEVFPFGKTVNYTCDPHPDRGTSFDLIGESTIRCTSDPQGNGVWSSPAPRCGILGHCQAPDHFLFAKLKTQTNASDFPIGTSLKYECRPEYYGRPFSITCLDNLVWSSPKDVCKRKSCKTPPDPVNGMVHVITDIQVGSRINYSCTTGHRLIGHSSAECILSGNAAHWSTKPPICQRIPCGLPPTIANGDFISTNRENFHYGSVVTYRCNPGSGGRKVFELVGEPSIYCTSNDDQVGIWSGPAPQCIIPNKCTPPNVENGILVSDNRSLFSLNEVVEFRCQPGFVMKGPRRVKCQALNKWEPELPSCSRVCQPPPDVLHAERTQRDKDNFSPGQEVFYSCEPGYDLRGAASMRCTPQGDWSPAAPTCEVKSCDDFMGQLLNGRVLFPVNLQLGAKVDFVCDEGFQLKGSSASYCVLAGMESLWNSSVPVCEQIFCPSPPVIPNGRHTGKPLEVFPFGKAVNYTCDPHPDRGTSFDLIGESTIRCTSDPQGNGVWSSPAPRCGILGHCQAPDHFLFAKLKTQTNASDFPIGTSLKYECRPEYYGRPFSITCLDNLVWSSPKDVCKRKSCKTPPDPVNGMVHVITDIQVGSRINYSCTTGHRLIGHSSAECILSGNTAHWSTKPPICQRIPCGLPPTIANGDFISTNRENFHYGSVVTYRCNLGSRGRKVFELVGEPSIYCTSNDDQVGIWSGPAPQCIIPNKCTPPNVENGILVSDNRSLFSLNEVVEFRCQPGFVMKGPRRVKCQALNKWEPELPSCSRVCQPPPEILHGEHTPSHQDNFSPGQEVFYSCEPGYDLRGAASLHCTPQGDWSPEAPRCAVKSCDDFLGQLPHGRVLFPLNLQLGAKVSFVCDEGFRLKGSSVSHCVLVGMRSLWNNSVPVCEHIFCPNPPAILNGRHTGTPSGDIPYGKEISYTCDPHPDRGMTFNLIGESTIRCTSDPHGNGVWSSPAPRCELSVRAGHCKTPEQFPFASPTIPINDFEFPVGTSLNYECRPGYFGKMFSISCLENLVWSSVEDNCRRKSCGPPPEPFNGMVHINTDTQFGSTVNYSCNEGFRLIGSPSTTCLVSGNNVTWDKKAPICEIISCEPPPTISNGDFYSNNRTSFHNGTVVTYQCHTGPDGEQLFELVGERSIYCTSKDDQVGVWSSPPPRCISTNKCTAPEVENAIRVPGNRSFFTLTEIIRFRCQPGFVMVGSHTVQCQTNGRWGPKLPHCSRVCQPPPEILHGEHTLSHQDNFSPGQEVFYSCEPSYDLRGAASLHCTPQGDWSPEAPRCTVKSCDDFLGQLPHGRVLLPLNLQLGAKVSFVCDEGFRLKGRSASHCVLAGMKALWNSSVPVCEQIFCPNPPAILNGRHTGTPFGDIPYGKEISYACDTHPDRGMTFNLIGESSIRCTSDPQGNGVWSSPAPRCELSVPAACPHPPKIQNGHYIGGHVSLYLPGMTISYICDPGYLLVGKGFIFCTDQGIWSQLDHYCKEVNCSFPLFMNGISKELEMKKVYHYGDYVTLKCEDGYTLEGSPWSQCQADDRWDPPLAKCTSRTHDALIVGTLSGTIFFILLIIFLSWIILKHRKGNNAHENPKEVAIHLHSQGGSSVHPRTLQTNEENSRVLP

SEQ ID NO: 19304 - protein, 2039 aa, Homo sapiens
  Payload ID: 3871
  Gene Symbol: CR1
  Gene Name: complement component (3b/4b) receptor 1 (Knops blood group)
  ENSP ID: ENSP00000356019
MGASSPRSPEPVGPPAPGLPFCCGGSLLAVVVLLALPVAWGQCNAPEWLPFARPTNLTDEFEFPIGTYLNYECRPGYSGRPFSIICLKNSVWTGAKDRCRRKSCRNPPDPVNGMVHVIKGIQFGSQIKYSCTKGYRLIGSSSATCIISGDTVIWDNETPICDRIPCGLPPTITNGDFISTNRENFHYGSVVTYRCNPGSGGRKVFELVGEPSIYCTSNDDQVGIWSGPAPQCIIPNKCTPPNVENGILVSDNRSLFSLNEVVEFRCQPGFVMKGPRRVKCQALNKWEPELPSCSRVCQPPPDVLHAERTQRDKDNFSPGQEVFYSCEPGYDLRGAASMRCTPQGDWSPAAPTCEVKSCDDFMGQLLNGRVLFPVNLQLGAKVDFVCDEGFQLKGSSASYCVLAGMESLWNSSVPVCEQIFCPSPPVIPNGRHTGKPLEVFPFGKTVNYTCDPHPDRGTSFDLIGESTIRCTSDPQGNGVWSSPAPRCGILGHCQAPDHFLFAKLKTQTNASDFPIGTSLKYECRPEYYGRPFSITCLDNLVWSSPKDVCKRKSCKTPPDPVNGMVHVITDIQVGSRINYSCTTGHRLIGHSSAECILSGNAAHWSTKPPICQRIPCGLPPTIANGDFISTNRENFHYGSVVTYRCNPGSGGRKVFELVGEPSIYCTSNDDQVGIWSGPAPQCIIPNKCTPPNVENGILVSDNRSLFSLNEVVEFRCQPGFVMKGPRRVKCQALNKWEPELPSCSRVCQPPPDVLHAERTQRDKDNFSPGQEVFYSCEPGYDLRGAASMRCTPQGDWSPAAPTCEVKSCDDFMGQLLNGRVLFPVNLQLGAKVDFVCDEGFQLKGSSASYCVLAGMESLWNSSVPVCEQIFCPSPPVIPNGRHTGKPLEVFPFGKTVNYTCDPHPDRGTSFDLIGESTIRCTSDPQGNGVWSSPAPRCGILGHCQAPDHFLFAKLKTQTNASDFPIGTSLKYECRPEYYGRPFSITCLDNLVWSSPKDVCKRKSCKTPPDPVNGMVHVITDIQVGSRINYSCTTGHRLIGHSSAECILSGNTAHWSTKPPICQRIPCGLPPTIANGDFISTNRENFHYGSVVTYRCNLGSRGRKVFELVGEPSIYCTSNDDQVGIWSGPAPQCIIPNKCTPPNVENGILVSDNRSLFSLNEVVEFRCQPGFVMKGPRRVKCQALNKWEPELPSCSRVCQPPPEILHGEHTPSHQDNFSPGQEVFYSCEPGYDLRGAASLHCTPQGDWSPEAPRCAVKSCDDFLGQLPHGRVLFPLNLQLGAKVSFVCDEGFRLKGSSVSHCVLVGMRSLWNNSVPVCEHIFCPNPPAILNGRHTGTPSGDIPYGKEISYTCDPHPDRGMTFNLIGESTIRCTSDPHGNGVWSSPAPRCELSVRAGHCKTPEQFPFASPTIPINDFEFPVGTSLNYECRPGYFGKMFSISCLENLVWSSVEDNCRRKSCGPPPEPFNGMVHINTDTQFGSTVNYSCNEGFRLIGSPSTTCLVSGNNVTWDKKAPICEIISCEPPPTISNGDFYSNNRTSFHNGTVVTYQCHTGPDGEQLFELVGERSIYCTSKDDQVGVWSSPPPRCISTNKCTAPEVENAIRVPGNRSFFTLTEIIRFRCQPGFVMVGSHTVQCQTNGRWGPKLPHCSRVCQPPPEILHGEHTLSHQDNFSPGQEVFYSCEPSYDLRGAASLHCTPQGDWSPEAPRCTVKSCDDFLGQLPHGRVLLPLNLQLGAKVSFVCDEGFRLKGRSASHCVLAGMKALWNSSVPVCEQIFCPNPPAILNGRHTGTPFGDIPYGKEISYACDTHPDRGMTFNLIGESSIRCTSDPQGNGVWSSPAPRCELSVPAACPHPPKIQNGHYIGGHVSLYLPGMTISYICDPGYLLVGKGFIFCTDQGIWSQLDHYCKEVNCSFPLFMNGISKELEMKKVYHYGDYVTLKCEDGYTLEGSPWSQCQADDRWDPPLAKCTSRTHDALIVGTLSGTIFFILLIIFLSWIILKHRKGNNAHENPKEVAIHLHSQGGSSVHPRTLQTNEENSRVLP

SEQ ID NO: 19305 - protein, 2039 aa, Homo sapiens
  Payload ID: 3871
  Gene Symbol: CR1
  Gene Name: complement component (3b/4b) receptor 1 (Knops blood group)
  Uniprot ID: P17927
  ENSP ID: ENSP00000356020
MGASSPRSPEPVGPPAPGLPFCCGGSLLAVVVLLALPVAWGQCNAPEWLPFARPTNLTDEFEFPIGTYLNYECRPGYSGRPFSIICLKNSVWTGAKDRCRRKSCRNPPDPVNGMVHVIKGIQFGSQIKYSCTKGYRLIGSSSATCIISGDTVIWDNETPICDRIPCGLPPTITNGDFISTNRENFHYGSVVTYRCNPGSGGRKVFELVGEPSIYCTSNDDQVGIWSGPAPQCIIPNKCTPPNVENGILVSDNRSLFSLNEVVEFRCQPGFVMKGPRRVKCQALNKWEPELPSCSRVCQPPPDVLHAERTQRDKDNFSPGQEVFYSCEPGYDLRGAASMRCTPQGDWSPAAPTCEVKSCDDFMGQLLNGRVLFPVNLQLGAKVDFVCDEGFQLKGSSASYCVLAGMESLWNSSVPVCEQIFCPSPPVIPNGRHTGKPLEVFPFGKTVNYTCDPHPDRGTSFDLIGESTIRCTSDPQGNGVWSSPAPRCGILGHCQAPDHFLFAKLKTQTNASDFPIGTSLKYECRPEYYGRPFSITCLDNLVWSSPKDVCKRKSCKTPPDPVNGMVHVITDIQVGSRINYSCTTGHRLIGHSSAECILSGNAAHWSTKPPICQRIPCGLPPTIANGDFISTNRENFHYGSVVTYRCNPGSGGRKVFELVGEPSIYCTSNDDQVGIWSGPAPQCIIPNKCTPPNVENGILVSDNRSLFSLNEVVEFRCQPGFVMKGPRRVKCQALNKWEPELPSCSRVCQPPPDVLHAERTQRDKDNFSPGQEVFYSCEPGYDLRGAASMRCTPQGDWSPAAPTCEVKSCDDFMGQLLNGRVLFPVNLQLGAKVDFVCDEGFQLKGSSASYCVLAGMESLWNSSVPVCEQIFCPSPPVIPNGRHTGKPLEVFPFGKAVNYTCDPHPDRGTSFDLIGESTIRCTSDPQGNGVWSSPAPRCGILGHCQAPDHFLFAKLKTQTNASDFPIGTSLKYECRPEYYGRPFSITCLDNLVWSSPKDVCKRKSCKTPPDPVNGMVHVITDIQVGSRINYSCTTGHRLIGHSSAECILSGNTAHWSTKPPICQRIPCGLPPTIANGDFISTNRENFHYGSVVTYRCNLGSRGRKVFELVGEPSIYCTSNDDQVGIWSGPAPQCIIPNKCTPPNVENGILVSDNRSLFSLNEVVEFRCQPGFVMKGPRRVKCQALNKWEPELPSCSRVCQPPPEILHGEHTPSHQDNFSPGQEVFYSCEPGYDLRGAASLHCTPQGDWSPEAPRCAVKSCDDFLGQLPHGRVLFPLNLQLGAKVSFVCDEGFRLKGSSVSHCVLVGMRSLWNNSVPVCEHIFCPNPPAILNGRHTGTPSGDIPYGKEISYTCDPHPDRGMTFNLIGESTIRCTSDPHGNGVWSSPAPRCELSVRAGHCKTPEQFPFASPTIPINDFEFPVGTSLNYECRPGYFGKMFSISCLENLVWSSVEDNCRRKSCGPPPEPFNGMVHINTDTQFGSTVNYSCNEGFRLIGSPSTTCLVSGNNVTWDKKAPICEIISCEPPPTISNGDFYSNNRTSFHNGTVVTYQCHTGPDGEQLFELVGERSIYCTSKDDQVGVWSSPPPRCISTNKCTAPEVENAIRVPGNRSFFTLTEIIRFRCQPGFVMVGSHTVQCQTNGRWGPKLPHCSRVCQPPPEILHGEHTLSHQDNFSPGQEVFYSCEPSYDLRGAASLHCTPQGDWSPEAPRCTVKSCDDFLGQLPHGRVLLPLNLQLGAKVSFVCDEGFRLKGRSASHCVLAGMKALWNSSVPVCEQIFCPNPPAILNGRHTGTPFGDIPYGKEISYACDTHPDRGMTFNLIGESSIRCTSDPQGNGVWSSPAPRCELSVPAACPHPPKIQNGHYIGGHVSLYLPGMTISYICDPGYLLVGKGFIFCTDQGIWSQLDHYCKEVNCSFPLFMNGISKELEMKKVYHYGDYVTLKCEDGYTLEGSPWSQCQADDRWDPPLAKCTSRTHDALIVGTLSGTIFFILLIIFLSWIILKHRKGNNAHENPKEVAIHLHSQGGSSVHPRTLQTNEENSRVLP

SEQ ID NO: 19306 - protein, 2039 aa, Homo sapiens; identical to SEQ ID NO: 19305
  Payload ID: 3871
  Gene Symbol: CR1
  Gene Name: complement component (3b/4b) receptor 1 (Knops blood group)
  Uniprot ID: P17927
  ENSP ID: ENSP00000383744

SEQ ID NO: 19307 - protein, 660 aa, Homo sapiens
  Payload ID: 3871
  Gene Symbol: CR1
  Gene Name: complement component (3b/4b) receptor 1 (Knops blood group)
  ENSP ID: ENSP00000434718
  MOD_RES (1)..(1): Any amino acid
XSLLAVVVLLALPVAWGQCNAPEWLPFARPTNLTDEFEFPIGTYLNYECRPGYSGRPFSIICLKNSVWTGAKDRCRRKSCRNPPDPVNGMVHVIKGIQFGSQIKYSCTKGYRLIGSSSATCIISGDTVIWDNETPICDRIPCGLPPTITNGDFISTNRENFHYGSVVTYRCNPGSGGRKVFELVGEPSIYCTSNDDQVGIWSGPAPQCIIPNKCTPPNVENGILVSDNRSLFSLNEVVEFRCQPGFVMKGPRRVKCQALNKWEPELPSCSRVCQPPPDVLHAERTQRDKDNFSPGQEVFYSCEPGYDLRGAASMRCTPQGDWSPAAPTCEVKSCDDFMGQLLNGRVLFPVNLQLGAKVDFVCDEGFQLKGSSASYCVLAGMESLWNSSVPVCEQIFCPNPPAILNGRHTGTPFGDIPYGKEISYACDTHPDRGMTFNLIGESSIRCTSDPQGNGVWSSPAPRCELSVPAACPHPPKIQNGHYIGGHVSLYLPGMTISYICDPGYLLVGKGFIFCTDQGIWSQLDHYCKEVNCSFPLFMNGISKELEMKKVYHYGDYVTLKCEDGYTLEGSPWSQCQADDRWDPPLAKCTSRTHDALIVGTLSGTIFFILLIIFLSWIILKHRKGNNAHENPKEVAIHLHSQGGSSVHPRTLQTNEENSRY

SEQ ID NO: 19308 - protein, 604 aa, Homo sapiens
  Payload ID: 3871
  Gene Symbol: CR1
  Gene Name: complement component (3b/4b) receptor 1 (Knops blood group)
  ENSP ID: ENSP00000436139
MGASSPRSPEPVGPPAPGLPFCCGGSLLAVVVLLALPVAWGQCNAPEWLPFARPTNLTDEFEFPIGTYLNYECRPGYSGRPFSIICLKNSVWTGAKDRCRRKSCRNPPDPVNGMVHVIKGIQFGSQIKYSCTKGYRLIGSSSATCIISGDTVIWDNETPICDRIPCGLPPTITNGDFISTNRENFHYGSVVTYRCNPGSGGRKVFELVGEPSIYCTSNDDQVGIWSGPAPQCIIPNKCTPPNVENGILVSDNRSLFSLNEVVEFRCQPGFVMKGPRRVKCQALNKWEPELPSCSRVCQPPPDVLHAERTQRDKDNFSPGQEVFYSCEPGYDLRGAASMRCTPQGDWSPAAPTCEVKSCDDFMGQLLNGRVLFPVNLQLGAKVDFVCDEGFQLKGSSASYCVLAGMESLWNSSVPVCEQIFCPSPPVIPNGRHTGKPLEVFPFGKTVNYTCDPHPDRGTSFDLIGESTIRCTSDPQGNGVWSSPAPRCGILGHCQAPDHFLFAKLKTQTNASDFPIGTSLKYECRPEYYGRPFSITCLDNLVWSSPKDVCKRKSCKTPPDPVNGMVHVITDIQVGSRINYSCTTGSLSSPRSFSVCQVENPNQCI

SEQ ID NO: 19309 - protein, 569 aa, Homo sapiens
  Payload ID: 3872
  Gene Symbol: CR1L
  Gene Name: complement component (3b/4b) receptor 1-like
  Uniprot ID: Q2VPA4
  ENSP ID: ENSP00000421736
MAPPVRLERPFPSRRFPGLLLAALVLLLSSFSDQCNVPEWLPFARPTNLTDDFEFPIGTYLNYECRPGYSGRPFSIICLKNSVWTSAKDKCKRKSCRNPPDPVNGMAHVIKDIQFRSQIKYSCPKGYRLIGSSSATCIISGNTVIWDNKTPVCDRIICGLPPTIANGDFTSISREYFHYGSVVTYHCNLGSRGKKVFELVGEPSIYCTSKDDQVGIWSGPAPQCIIPNKCTPPNVENGILVSDNRSLFSLNEVVEFRCQPGFGMKGPSHVKCQALNKWEPELPSCSRVCQPPPDVLHAERTQRDKDNFSPGQEVFYSCEPGYDLRGSTYLHCTPQGDWSPAAPRCEVKSCDDFLGQLPNGHVLFPLNLQLGAKVDFVCDEGFQLKGSSASYCVLAGMESLWNSSVPVCERKSCETPPVPVNGMVHVITDIHVGSRINYSCTTGHRLIGHSSAECILSGNTAHWSMKPPICQQIFCPNPPAILNGRHTGTPLGDIPYGKEVSYTCDPHPDRGMTFNLIGESTIRRTSEPHGNGVWSSPAPRCELPVGAGSHDALIVGKFYEVFAEEFCHL

SEQ ID NO: 19310 - protein, 388 aa, Homo sapiens
  Payload ID: 3872
  Gene Symbol: CR1L
  Gene Name: complement component (3b/4b) receptor 1-like
  ENSP ID: ENSP00000434864
IGTYLNYECRPGYSGRPFSIICLKNSVWTSAKDKCKRKSCRNPPDPVNGMAHVIKDIQFRSQIKYSCPKGYRLIGSSSATCIISGNTVIWDNKTPVCDRIICGLPPTIANGDFTSISREYFHYGSVVTYHCNLGSRGKKVFELVGEPSIYCTSKDDQVGIWSGPAPQCIIPNKCTPPNVENGILVSDNRSLFSLNEVVEFRCQPGFGMKGPSHVKCQALNKWEPELPSCSRVCQPPPDVLHAERTQRDKDNFSPGQEVFYSCEPGYDLRGSTYLHCTPQGDWSPAAPRCEVKSCDDFLGQLPNGHVLFPLNLQLGAKVDFVCDEGFQLKGSSASYCVLAGMESLWNSSVPVCERKSCETPPVPVNGMVHVITDIHVGSRINYSCTTGF

SEQ ID NO: 19311 - protein, 1092 aa, Homo sapiens
  Payload ID: 3873
  Gene Symbol: CR2
  Gene Name: complement component (3d/Epstein Barr virus) receptor 2
  Uniprot ID: P20023
  ENSP ID: ENSP00000356024
MGAAGLLGVFLALVAPGVLGISCGSPPPILNGRISYYSTPIAVGTVIRYSCSGTFRLIGEKSLLCITKDKVDGTWDKPAPKCEYFNKYSSCPEPIVPGGYKIRGSTPYRHGDSVTFACKTNFSMNGNKSVWCQANNMWGPTRLPTCVSVFPLECPALPMIHNGHHTSENVGSIAPGLSVTYSCESGYLLVGEKIINCLSSGKWSAVPPTCEEARCKSLGRFPNGKVKEPPILRVGVTANFFCDEGYRLQGPPSSRCVIAGQGVAWTKMPVCEEIFCPSPPPILNGRHIGNSLANVSYGSIVTYTCDPDPEEGVNFILIGESTLRCTVDSQKTGTWSGPAPRCELSTSAVQCPHPQILRGRMVSGQKDRYTYNDTVIFACMFGFTLKGSKQIRCNAQGTWEPSAPVCEKECQAPPNILNGQKEDRHMVRFDPGTSIKYSCNPGYVLVGEESIQCTSEGVWTPPVPQCKVAACEATGRQLLTKPQHQFVRPDVNSSCGEGYKLSGSVYQECQGTIPWFMEIRLCKEITCPPPPVIYNGAHTGSSLEDFPYGTTVTYTCNPGPERGVEFSLIGESTIRCTSNDQERGTWSGPAPLCKLSLLAVQCSHVHIANGYKISGKEAPYFYNDTVTFKCYSGFTLKGSSQIRCKADNTWDPEIPVCEKGCQSPPGLHHGRHTGGNTVFFVSGMTVDYTCDPGYLLVGNKSIHCMPSGNWSPSAPRCEETCQHVRQSLQELPAGSRVELVNTSCQDGYQLTGHAYQMCQDAENGIWFKKIPLCKVIHCHPPPVIVNGKHTGMMAENFLYGNEVSYECDQGFYLLGEKKLQCRSDSKGHGSWSGPSPQCLRSPPVTRCPNPEVKHGYKLNKTHSAYSHNDIVYVDCNPGFIMNGSRVIRCHTDNTWVPGVPTCIKKAFIGCPPPPKTPNGNHTGGNIARFSPGMSILYSCDQGYLLVGEALLLCTHEGTWSQPAPHCKEVNCSSPADMDGIQKGLEPRKMYQYGAVVTLECEDGYMLEGSPQSQCQSDHQWNPPLAVCRSRSLAPVLCGIAAGLILLTFLIVITLYVISKHRARNYYTDTSQKEAFHLEAREVYSVDPYNPAS

SEQ ID NO: 19312 - protein, 1033 aa, Homo sapiens
  Payload ID: 3873
  Gene Symbol: CR2
  Gene Name: complement component (3d/Epstein Barr virus) receptor 2
  Uniprot ID: P20023
  ENSP ID: ENSP00000356025
MGAAGLLGVFLALVAPGVLGISCGSPPPILNGRISYYSTPIAVGTVIRYSCSGTFRLIGEKSLLCITKDKVDGTWDKPAPKCEYFNKYSSCPEPIVPGGYKIRGSTPYRHGDSVTFACKTNFSMNGNKSVWCQANNMWGPTRLPTCVSVFPLECPALPMIHNGHHTSENVGSIAPGLSVTYSCESGYLLVGEKIINCLSSGKWSAVPPTCEEARCKSLGRFPNGKVKEPPILRVGVTANFFCDEGYRLQGPPSSRCVIAGQGVAWTKMPVCEEIFCPSPPPILNGRHIGNSLANVSYGSIVTYTCDPDPEEGVNFILIGESTLRCTVDSQKTGTWSGPAPRCELSTSAVQCPHPQILRGRMVSGQKDRYTYNDTVIFACMFGFTLKGSKQIRCNAQGTWEPSAPVCEKECQAPPNILNGQKEDRHMVRFDPGTSIKYSCNPGYVLVGEESIQCTSEGVWTPPVPQCKVAACEATGRQLLTKPQHQFVRPDVNSSCGEGYKLSGSVYQECQGTIPWFMEIRLCKEITCPPPPVIYNGAHTGSSLEDFPYGTTVTYTCNPGPERGVEFSLIGESTIRCTSNDQERGTWSGPAPLCKLSLLAVQCSHVHIANGYKISGKEAPYFYNDTVTFKCYSGFTLKGSSQIRCKADNTWDPEIPVCEKETCQHVRQSLQELPAGSRVELVNTSCQDGYQLTGHAYQMCQDAENGIWFKKIPLCKVIHCHPPPVIVNGKHTGMMAENFLYGNEVSYECDQGFYLLGEKKLQCRSDSKGHGSWSGPSPQCLRSPPVTRCPNPEVKHGYKLNKTHSAYSHNDIVYVDCNPGFIMNGSRVIRCHTDNTWVPGVPTCIKKAFIGCPPPPKTPNGNHTGGNIARFSPGMSILYSCDQGYLLVGEALLLCTHEGTWSQPAPHCKEVNCSSPADMDGIQKGLEPRKMYQYGAVVTLECEDGYMLEGSPQSQCQSDHQWNPPLAVCRSRSLAPVLCGIAAGLILLTFLIVITLYVISKHRARNYYTDTSQKEAFHLEAREVYSVDPYNPAS

SEQ ID NO: 19313 - protein, 971 aa, Homo sapiens
  Payload ID: 3873
  Gene Symbol: CR2
  Gene Name: complement component (3d/Epstein Barr virus) receptor 2
  ENSP ID: ENSP00000356026
MGAAGLLGVFLALVAPGVLGISCGSPPPILNGRISYYSTPIAVGTVIRYSCSGTFRLIGEKSLLCITKDKVDGTWDKPAPKCEYFNKYSSCPEPIVPGGYKIRGSTPYRHGDSVTFACKTNFSMNGNKSVWCQANNMWGPTRLPTCVSVFPLECPALPMIHNGHHTSENVGSIAPGLSVTYSCESGYLLVGEKIINCLSSGKWSAVPPTCEEARCKSLGRFPNGKVKEPPILRVGVTANFFCDEGYRLQGPPSSRCVIAGQGVAWTKMPVCEEIFCPSPPPILNGRHIGNSLANVSYGSIVTYTCDPDPEEGVNFILIGESTLRCTVDSQKTGTWSGPAPRCELSTSAVQCPHPQILRGRMVSGQKDRYTYNDTVIFACMFGFTLKGSKQIRCNAQGTWEPSAPVCEKECQAPPNILNGQKEDRHMVRFDPGTSIKYSCNPGYVLVGEESIQCTSEGVWTPPVPQCKVAACEATGRQLLTKPQHQFVRPDVNSSCGEGYKLSGSVYQECQGTIPWFMEIRLCKEITCPPPPVIYNGAHTGSSLEDFPYGTTVTYTCNPGPERGVEFSLIGESTIRCTSNDQERGTWSGPAPLCKLSLLAVQCSHVHIANGYKISGKEAPYFYNDTVTFKCYSGFTLKGSSQIRCKADNTWDPEIPVCEKETCQHVRQSLQELPAGSRVELVNTSCQDGYQLTGHAYQMCQDAENGIWFKKIPLCKVIHCHPPPVIVNGKHTGMMAENFLYGNEVSYECDQGFYLLGEKKLQCRSDSKGHGSWSGPSPQCLRSPPVTRCPNPEVKHGYKLNKTHSAYSHNDIVYVDCNPGFIMNGSRVIRCHTDNTWVPGVPTCIKKEVNCSSPADMDGIQKGLEPRKMYQYGAVVTLECEDGYMLEGSPQSQCQSDHQWNPPLAVCRSRSLAPVLCGIAAGLILLTFLIVITLYVISKHRARNYYTDTSQKEAFHLEAREVYSVDPYNPAS

SEQ ID NO: 19314 - protein, 282 aa, Homo sapiens
  Payload ID: 3874
  Gene Symbol: C1QBP
  Gene Name: complement component 1, q subcomponent binding protein
  Uniprot ID: Q07021
  ENSP ID: ENSP00000225698
MLPLLRCVPRVLGSSVAGLRAAAPASPFRQLLQPAPRLCTRPFGLLSVRAGSERRPGLLRPRGPCACGCGCGSLHTDGDKAFVDFLSDEIKEERKIQKHKTLPKMSGGWELELNGTEAKLVRKVAGEKITVTFNINNSIPPTFDGEEEPSQGQKVEEQEPELTSTPNFVVEVIKNDDGKKALVLDCHYPEDEVGQEDEAESDIFSIREVSFQSTGESEWKDTNYTLNTDSLDWALYDHLMDFLADRGVDNTFADELVELSTALEHQEYITFLEDLKSFVKSQ

SEQ ID NO: 19315 - protein, 9 aa, Homo sapiens
  Payload ID: 3874
  Gene Symbol: C1QBP
  Gene Name: complement component 1, q subcomponent binding protein
  ENSP ID: ENSP00000458624
MSGGWELEL

SEQ ID NO: 19316 - protein, 178 aa, Homo sapiens
  Payload ID: 3874
  Gene Symbol: C1QBP
  Gene Name: complement component 1, q subcomponent binding protein
  ENSP ID: ENSP00000460308
MSGGWELELNGTEAKLVRKVAGEKITVTFNINNSIPPTFDGEEEPSQGQKVEEQEPELTSTPNFVVEVIKNDDGKKALVLDCHYPEDEVGQEDEAESDIFSIREVSFQSTGESEWKDTNYTLNTDSLDWALYDHLMDFLADRGVDNTFADELVELSTALEHQEYITFLEDLKSFVKSQ

SEQ ID NO: 19317 - protein, 177 aa, Homo sapiens
  Payload ID: 3874
  Gene Symbol: C1QBP
  Gene Name: complement component 1, q subcomponent binding protein
  ENSP ID: ENSP00000460638
MSGGWELELNGTEAKLVRKVAGEKITVTFNINNSIPPTFDGEEEPSQGQKVEEQEPELTSTPNFVVEVIKNDDGKKALVLDCHYPEDEVGQEDEAESDIFSIREVSFQSTGESEWKDTNYTLNTDSLDWALYDHLMDFLADRGVDNTFADELVELSTALEHQEYITFLEDLKSFVKS

SEQ ID NO: 19318 - protein, 245 aa, Homo sapiens
  Payload ID: 3875
  Gene Symbol: C1QA
  Gene Name: complement component 1, q subcomponent, A chain
  Uniprot ID: P02745
  ENSP ID: ENSP00000363773
MEGPRGWLVLCVLAISLASMVTEDLCRAPDGKKGEAGRPGRRGRPGLKGEQGEPGAPGIRTGIQGLKGDQGEPGPSGNPGKVGYPGPSGPLGARGIPGIKGTKGSPGNIKDQPRPAFSAIRRNPPMGGNVVIFDTVITNQEEPYQNHSGRFVCTVPGYYYFTFQVLSQWEICLSIVSSSRGQVRRSLGFCDTTNKGLFQVVSGGMVLQLQQGDQVWVEKDPKKGHIYQGSEADSVFSGFLIFPSA

SEQ ID NO: 19319 - protein, 245 aa, Homo sapiens; identical to SEQ ID NO: 19318
  Payload ID: 3875
  Gene Symbol: C1QA
  Gene Name: complement component 1, q subcomponent, A chain
  Uniprot ID: P02745
  ENSP ID: ENSP00000385564

SEQ ID NO: 19320 - protein, 220 aa, Homo sapiens
  Payload ID: 3875
  Gene Symbol: C1QA
  Gene Name: complement component 1, q subcomponent, A chain
  ENSP ID: ENSP00000416841
MEGPRGWLVLCVLAISLASMVTEDLCRAPDGKKGEAGRPGRRGRPGLKGEQGEPGAPGIRTGIQGLKGDQGEPGPSGNPGKVGYPGPSGPLGARGIPGIKGTKGSPGNIKDQPRPAFSAIRRNPPMGGNVVIFDTVITNQEEPYQNHSGRFVCTVPGYYYFTFQVLSQWEICLSIVSSSRGQVRRSLGFCDTTNKGLFQVVSGGMVLQLQQGDQVWVEKD

SEQ ID NO: 19321 - protein, 253 aa, Homo sapiens
  Payload ID: 3876
  Gene Symbol: C1QB
  Gene Name: complement component 1, q subcomponent, B chain
  Uniprot ID: P02746
  ENSP ID: ENSP00000313967
MMMKIPWGSIPVLMLLLLLGLIDISQAQLSCTGPPAIPGIPGIPGTPGPDGQPGTPGIKGEKGLPGLAGDHGEFGEKGDPGIPGNPGKVGPKGPMGPKGGPGAPGAPGPKGESGDYKATQKIAFSATRTINVPLRRDQTIRFDHVITNMNNNYEPRSGKFTCKVPGLYYFTYHASSRGNLCVNLMRGRERAQKVVTFCDYAYNTFQVTTGGMVLKLEQGENVFLQATDKNSLLGMEGANSIFSGFLLFPDMEA

SEQ ID NO: 19322 - protein, 228 aa, Homo sapiens
  Payload ID: 3876
  Gene Symbol: C1QB
  Gene Name: complement component 1, q subcomponent, B chain
  ENSP ID: ENSP00000404606
MKIPWGSIPVLMLLLLLGLIDISQAQLSCTGPPAIPGIPGIPGTPGPDGQPGTPGIKGEKGLPGLAGDHGEFGEKGDPGIPGNPGKVGPKGPMGPKGGPGAPGAPGPKGESGDYKATQKIAFSATRTINVPLRRDQTIRFDHVITNMNNNYEPRSGKFTCKVPGLYYFTYHASSRGNLCVNLMRGRERAQKVVTFCDYAYNTFQVTTGGMVLKLEQGENVFLQATDKN

SEQ ID NO: 19323 - protein, 251 aa, Homo sapiens
  Payload ID: 3876
  Gene Symbol: C1QB
  Gene Name: complement component 1, q subcomponent, B chain
  ENSP ID: ENSP00000423689
MKIPWGSIPVLMLLLLLGLIDISQAQLSCTGPPAIPGIPGIPGTPGPDGQPGTPGIKGEKGLPGLAGDHGEFGEKGDPGIPGNPGKVGPKGPMGPKGGPGAPGAPGPKGESGDYKATQKIAFSATRTINVPLRRDQTIRFDHVITNMNNNYEPRSGKFTCKVPGLYYFTYHASSRGNLCVNLMRGRERAQKVVTFCDYAYNTFQVTTGGMVLKLEQGENVFLQATDKNSLLGMEGANSIFSGFLLFPDMEA

SEQ ID NO: 19324 - protein, 153 aa, Homo sapiens
  Payload ID: 3876
  Gene Symbol: C1QB
  Gene Name: complement component 1, q subcomponent, B chain
  ENSP ID: ENSP00000426317
MKIPWGSIPVLMLLLLLGLIDISQAQLSCTGPPAIPGIPGIPGTPGPDGQPGTPGIKGEKGLPGLAGDHGEFGEKGDPGIPGNPGKVGPKGPMGPKGGPGAPGAPGPKGESGDYKATQKIAFSATRTINVPLRRDQTIRFDHVITNMNNNYEP

SEQ ID NO: 19325 - protein, 245 aa, Homo sapiens
  Payload ID: 3877
  Gene Symbol: C1QC
  Gene Name: complement component 1, q subcomponent, C chain
  Uniprot ID: P02747
  ENSP ID: ENSP00000363768
MDVGPSSLPHLGLKLLLLLLLLPLRGQANTGCYGIPGMPGLPGAPGKDGYDGLPGPKGEPGIPAIPGIRGPKGQKGEPGLPGHPGKNGPMGPPGMPGVPGPMGIPGEPGEEGRYKQKFQSVFTVTRQTHQPPAPNSLIRFNAVLTNPQGDYDTSTGKFTCKVPGLYYFVYHASHTANLCVLLYRSGVKVVTFCGHTSKTNQVNSGGVLLRLQVGEEVWLAVNDYYDMVGIQGSDSVFSGFLLFPD

SEQ ID NO: 19326 - protein, 245 aa, Homo sapiens; identical to SEQ ID NO: 19325
  Payload ID: 3877
  Gene Symbol: C1QC
  Gene Name: complement component 1, q subcomponent, C chain
  Uniprot ID: P02747
  ENSP ID: ENSP00000363770

SEQ ID NO: 19327 - protein, 245 aa, Homo sapiens; identical to SEQ ID NO: 19325
  Payload ID: 3877
  Gene Symbol: C1QC
  Gene Name: complement component 1, q subcomponent, C chain
  Uniprot ID: P02747
  ENSP ID: ENSP00000363771

SEQ ID NO: 19328 - protein, 258 aa, Homo sapiens
  Payload ID: 3878
  Gene Symbol: C1QL1
  Gene Name: complement component 1, q subcomponent-like 1
  Uniprot ID: O75973
  ENSP ID: ENSP00000253407
MLLVLVVLIPVLVSSGGPEGHYEMLGTCRMVCDPYPARGPGAGARTDGGDALSEQSGAPPPSTLVQGPQGKPGRTGKPGPPGPPGDPGPPGPVGPPGEKGEPGKPGPPGLPGAGGSGAISTATYTTVPRVAFYAGLKNPHEGYEVLKFDDVVTNLGNNYDAASGKFTCNIPGTYFFTYHVLMRGGDGTSMWADLCKNGQVRASAIAQDADQNYDYASNSVILHLDAGDEVFIKLDGGKAHGGNSNKYSTFSGFIIYSD

SEQ ID NO: 19329 - protein, 287 aa, Homo sapiens
  Payload ID: 3879
  Gene Symbol: C1QL2
  Gene Name: complement component 1, q subcomponent-like 2
  Uniprot ID: Q7Z5L3
  ENSP ID: ENSP00000272520
MALGLLIAVPLLLQAAPRGAAHYEMMGTCRMICDPYTAAPGGEPPGAKAQPPGPSTAALEVMQDLSANPPPPFIQGPKGDPGRPGKPGPRGPPGEPGPPGPRGPPGEKGDSGRPGLPGLQLTAGTASGVGVVGGGAGVGGDSEGEVTSALSATFSGPKIAFYVGLKSPHEGYEVLKFDDVVTNLGNHYDPTTGKFSCQVRGIYFFTYHILMRGGDGTSMWADLCKNGQVRASAIAQDADQNYDYASNSVVLHLDSGDEVYVKLDGGKAHGGNNNKYSTFSGFLLYPD

SEQ ID NO: 19330 - protein, 255 aa, Homo sapiens
  Payload ID: 3880
  Gene Symbol: C1QL3
  Gene Name: complement component 1, q subcomponent-like 3
  Uniprot ID: Q5VWW1
  ENSP ID: ENSP00000298943
MVLLLVILIPVLVSSAGTSAHYEMLGTCRMVCDPYGGTKAPSTAATPDRGLMQSLPTFIQGPKGEAGRPGKAGPRGPPGEPGPPGPMGPPGEKGEPGRQGLPGPPGAPGLNAAGAISAATYSTVPKIAFYAGLKRQHEGYEVLKFDDVVTNLGNHYDPTTGKFTCSIPGIYFFTYHVLMRGGDGTSMWADLCKNNQVRASAIAQDADQNYDYASNSVVLHLEPGDEVYIKLDGGKAHGGNNNKYSTFSGFIIYAD

SEQ ID NO: 19331 - protein, 213 aa, Homo sapiens
  Payload ID: 3880
  Gene Symbol: C1QL3
  Gene Name: complement component 1, q subcomponent-like 3
  Uniprot ID: Q5VWW1
  ENSP ID: ENSP00000480149
MVLLLVILIPVLVSSAGTSAHYEMLGTCRMVCDPYGGTKAPSTAATPDRGLMQSLPTFIQGPPGAPGLNAAGAISAATYSTVPKIAFYAGLKRQHEGYEVLKFDDVVTNLGNHYDPTTGKFTCSIPGIYFFTYHVLMRGGDGTSMWADLCKNNQVRASAIAQDADQNYDYASNSVVLHLEPGDEVYIKLDGGKAHGGNNNKYSTFSGFIIYAD

SEQ ID NO: 19332 - protein, 238 aa, Homo sapiens
  Payload ID: 3881
  Gene Symbol: C1QL4
  Gene Name: complement component 1, q subcomponent-like 4
  Uniprot ID: Q86Z23
  ENSP ID: ENSP00000335285
MVLLLLVAIPLLVHSSRGPAHYEMLGRCRMVCDPHGPRGPGPDGAPASVPPFPPGAKGEVGRRGKAGLRGPPGPPGPRGPPGEPGRPGPPGPPGPGPGGVAPAAGYVPRIAFYAGLRRPHEGYEVLRFDDVVTNVGNAYEAASGKFTCPMPGVYFFAYHVLMRGGDGTSMWADLMKNGQVRASAIAQDADQNYDYASNSVILHLDVGDEVFIKLDGGKVHGGNTNKYSTFSGFIIYPD

SEQ ID NO: 19333 - protein, 705 aa, Homo sapiens
  Payload ID: 3882
  Gene Symbol: C1R
  Gene Name: complement component 1, r subcomponent
  Uniprot ID: P00736
  ENSP ID: ENSP00000438615
MWLLYLLVPALFCRAGGSIPIPQKLFGEVTSPLFPKPYPNNFETTTVITVPTGYRVKLVFQQFDLEPSEGCFYDYVKISADKKSLGRFCGQLGSPLGNPPGKKEFMSQGNKMLLTFHTDFSNEENGTIMFYKGFLAYYQAVDLDECASRSKSGEEDPQPQCQHLCHNYVGGYFCSCRPGYELQEDRHSCQAECSSELYTEASGYISSLEYPRSYPPDLRCNYSIRVERGLTLHLKFLEPFDIDDHQQVHCPYDQLQIYANGKNIGEFCGKQRPPDLDTSSNAVDLLFFTDESGDSRGWKLRYTTEIIKCPQPKTLDEFTIIQNLQPQYQFRDYFIATCKQGYQLIEGNQVLHSFTAVCQDDGTWHRAMPRCKIKDCGQPRNLPNGDFRYTTTMGVNTYKARIQYYCHEPYYKMQTRAGSRESEQGVYTCTAQGIWKNEQKGEKIPRCLPVCGKPVNPVEQRQRIIGGQKAKMGNFPWQVFTNIHGRGGGALLGDRWILTAAHTLYPKEHEAQSNASLDVFLGHTNVEELMKLGNHPIRRVSVHPDYRQDESYNFEGDIALLELENSVTLGPNLLPICLPDNDTFYDLGLMGYVSGFGVMEEKIAHDLRFVRLPVANPQACENWLRGKNRMDVFSQNMFCAGHPSLKQDACQGDSGGVFAVRDPNTDRWVATGIVSWGIGCSRGYGFYTKVLNYVDWIKKEMEEED

SEQ ID NO: 19334 - protein, 671 aa, Homo sapiens
  Payload ID: 3882
  Gene Symbol: C1R
  Gene Name: complement component 1, r subcomponent
  ENSP ID: ENSP00000438636
MWLLYLLVPALFCRAGGSIPIPQKLFGEVTSPLFPKPYPNNFETTTVITVPTGYRVKLVFQQFDLEPSEGCFYDYVKMLLTFHTDFSNEENGTIMFYKGFLAYYQAVDLDECASRSKSGEEDPQPQCQHLCHNYVGGYFCSCRPGYELQEDRHSCQAECSSELYTEASGYISSLEYPRSYPPDLRCNYSIRVERGLTLHLKFLEPFDIDDHQQVHCPYDQLQIYANGKNIGEFCGKQRPPDLDTSSNAVDLLFFTDESGDSRGWKLRYTTEIIKCPQPKTLDEFTIIQNLQPQYQFRDYFIATCKQGYQLIEGNQVLHSFTAVCQDDGTWHRAMPRCKIKDCGQPRNLPNGDFRYTTTMGVNTYKARIQYYCHEPYYKMQTRAGSRESEQGVYTCTAQGIWKNEQKGEKIPRCLPVCGKPVNPVEQRQRIIGGQKAKMGNFPWQVFTNIHGRGGGALLGDRWILTAAHTLYPKEHEAQSNASLDVFLGHTNVEELMKLGNHPIRRVSVHPDYRQDESYNFEGDIALLELENSVTLGPNLLPICLPDNDTFYDLGLMGYVSGFGVMEEKIAHDLRFVRLPVANPQACENWLRGKNRMDVFSQNMFCAGHPSLKQDACQGDSGGVFAVRDPNTDRWVATGIVSWGIGCSRGYGFYTKVLNYVDWIKKEMEEED

SEQ ID NO: 19335 - protein, 93 aa, Homo sapiens
  Payload ID: 3882
  Gene Symbol: C1R
  Gene Name: complement component 1, r subcomponent
  ENSP ID: ENSP00000439223
MSQGNKMLLTFHTDFSNEENGTIMFYKGFLAYYQAVDLDECASRSKSGEEDPQPQCQHLCHNYVGGYFCSCRPGYELQEDRHSCQAECSSELY

SEQ ID NO: 19336 - protein, 71 aa, Homo sapiens
  Payload ID: 3882
  Gene Symbol: C1R
  Gene Name: complement component 1, r subcomponent
  ENSP ID: ENSP00000441601
MSQGNKMLLTFHTDFSNEENGTIMFYKGFLAYYQAVDLDECASRSKSGEEDPQPQCQHLCHNYVGGYFCSC

SEQ ID NO: 19337 - protein, 156 aa, Homo sapiens
  Payload ID: 3882
  Gene Symbol: C1R
  Gene Name: complement component 1, r subcomponent
  ENSP ID: ENSP00000442946
MWLLYLLVPALFCRAGGSIPIPQKLFGEVTSPLFPKPYPNNFETTTVITVPTGYRVKLVFQQFDLEPSEGCFYDYVKISADKKSLGRFCGQLGSPLGNPPGKKEFMSQGNKMLLTFHTDFSNEENGTIMFYKGFLAYYQAVGEEDPQPQCQHLCHN

SEQ ID NO: 19338 - protein, 49 aa, Homo sapiens
  Payload ID: 3882
  Gene Symbol: C1R
  Gene Name: complement component 1, r subcomponent
  ENSP ID: ENSP00000444009
MSQGNKMLLTFHTDFSNEENGTIMFYKGFLAYYQAVDLDECASRSKSGE

SEQ ID NO: 19339 - protein, 719 aa, Homo sapiens
  Payload ID: 3882
  Gene Symbol: C1R
  Gene Name: complement component 1, r subcomponent
  ENSP ID: ENSP00000444271
MSVRFRVGREENAQWWLLYLLVPALFCRAGGSIPIPQKLFGEVTSPLFPKPYPNNFETTTVITVPTGYRVKLVFQQFDLEPSEGCFYDYVKISADKKSLGRFCGQLGSPLGNPPGKKEFMSQGNKMLLTFHTDFSNEENGTIMFYKGFLAYYQAVDLDECASRSKSGEEDPQPQCQHLCHNYVGGYFCSCRPGYELQEDRHSCQAECSSELYTEASGYISSLEYPRSYPPDLRCNYSIRVERGLTLHLKFLEPFDIDDHQQVHCPYDQLQIYANGKNIGEFCGKQRPPDLDTSSNAVDLLFFTDESGDSRGWKLRYTTEIIKCPQPKTLDEFTIIQNLQPQYQFRDYFIATCKQGYQLIEGNQVLHSFTAVCQDDGTWHRAMPRCKIKDCGQPRNLPNGDFRYTTTMGVNTYKARIQYYCHEPYYKMQTRAGSRESEQGVYTCTAQGIWKNEQKGEKIPRCLPVCGKPVNPVEQRQRIIGGQKAKMGNFPWQVFTNIHGRGGGALLGDRWILTAAHTLYPKEHEAQSNASLDVFLGHTNVEELMKLGNHPIRRVSVHPDYRQDESYNFEGDIALLELENSVTLGPNLLPICLPDNDTFYDLGLMGYVSGFGVMEEKIAHDLRFVRLPVANPQACENWLRGKNRMDVFSQNMFCAGHPSLKQDACQGDSGGVFAVRDPNTDRWVATGIVSWGIGCSRGYGFYTKVLNYVDWIKKEMEEED

SEQ ID NO: 19340 - protein, 156 aa, Homo sapiens
  Payload ID: 3882
  Gene Symbol: C1R
  Gene Name: complement component 1, r subcomponent
  ENSP ID: ENSP00000445285
MWLLYLLVPALFCRAGGSIPIPQKLFGEVTSPLFPKPYPNNFETTTVITVPTGYRVKLVFQQFDLEPSEGCFYDYVKKEFMSQGNKMLLTFHTDFSNEENGTIMFYKGFLAYYQAVDLDECASRSKSGEEDPQPQCQHLCHNYVGGYFCSCRPGYE

SEQ ID NO: 19341 - protein, 144 aa, Homo sapiens
  Payload ID: 3882
  Gene Symbol: C1R
  Gene Name: complement component 1, r subcomponent
  ENSP ID: ENSP00000446356
MWLLYLLVPALFCRAGGSIPIPQKLFGEVTSPLFPKPYPNNFETTTVITVPTGYRVKLVFQQFDLEPSEGCFYDYVKISADKKSLGRFCGQLGSPLGNPPGKKEFMSQGNKMLLTFHTDFSNEENGTIMFYKGFLAYYQAVGLW

SEQ ID NO: 19342 - protein, 487 aa, Homo sapiens
  Payload ID: 3883
  Gene Symbol: C1RL
  Gene Name: complement component 1, r subcomponent-like
  Uniprot ID: Q9NZP8
  ENSP ID: ENSP00000266542
MPGPRVWGKYLWRSPHSKGCPGAMWWLLLWGVLQACPTRGSVLLAQELPQQLTSPGYPEPYGKGQESSTDIKAPEGFAVRLVFQDFDLEPSQDCAGDSVTISFVGSDPSQFCGQQGSPLGRPPGQREFVSSGRSLRLTFRTQPSSENKTAHLHKGFLALYQTVAVNYSQPISEASRGSEAINAPGDNPAKVQNHCQEPYYQAAAAGALTCATPGTWKDRQDGEEVLQCMPVCGRPVTPIAQNQTTLGSSRAKLGNFPWQAFTSIHGRGGGALLGDRWILTAAHTIYPKDSVSLRKNQSVNVFLGHTAIDEMLKLGNHPVHRVVVHPDYRQNESHNFSGDIALLELQHSIPLGPNVLPVCLPDNETLYRSGLLGYVSGFGMEMGWLTTELKYSRLPVAPREACNAWLQKRQRPEVFSDNMFCVGDETQRHSVCQGDSGSVYVVWDNHAHHWVATGIVSWGIGCGEGYDFYTKVLSYVDWIKGVMNGKN

SEQ ID NO: 19343 - protein, 191 aa, Homo sapiens
  Payload ID: 3883
  Gene Symbol: C1RL
  Gene Name: complement component 1, r subcomponent-like
  ENSP ID: ENSP00000437398
MPGPRVWGKYLWRSPHSKGCPGAMWWLLLWGVLQACPTRGSVLLAQELPQQLTSPGYPEPYGKGQESSTDIKAPEGFAVRLVFQDFDLEPSQDCAGDSVTISFVGSDPSQFCGQQGSPLGRPPGQREFVSSGRSLRLTFRTQPSSENKTAHLHKGFLALYQTVGALTCATPGTWKDRQDGEEVLQCMPVCG

SEQ ID NO: 19344 - protein, 83 aa, Homo sapiens
  Payload ID: 3883
  Gene Symbol: C1RL
  Gene Name: complement component 1, r subcomponent-like
  ENSP ID: ENSP00000437569
GLRPGAVPGLCRGLCHNLIRRFGSKPVLWSARLPSGQAPWSEGVCILREEFAADLPHTAFLGEQDCPPPQGLPGPLPNRGCEL

SEQ ID NO: 19345 - protein, 110 aa, Homo sapiens
  Payload ID: 3883
  Gene Symbol: C1RL
  Gene Name: complement component 1, r subcomponent-like
  ENSP ID: ENSP00000438286
MPGPRVWGKYLWRSPHSKGCPGAISHSSVRIQASSVVSKAPLWAGPLVRGSFQPISEASRGSEAINAPGDNPAKVQNHCQEPYYQAAAAGCGSYADPITDQPSVRFSPQL

SEQ ID NO: 19346 - protein, 85 aa, Homo sapiens
  Payload ID: 3883
  Gene Symbol: C1RL
  Gene Name: complement component 1, r subcomponent-like
  ENSP ID: ENSP00000438951
  MOD_RES (1)..(1): Any amino acid
XPGLRPGAVPGLCRGLCHNLIRRFGSKPVLWSARLPSGQAPWSEGVCILREEFAADLPHTAFLGEQDCPPPQGLPGPLPNRGCEL

SEQ ID NO: 19347 - protein, 194 aa, Homo sapiens
  Payload ID: 3883
  Gene Symbol: C1RL
  Gene Name: complement component 1, r subcomponent-like
  ENSP ID: ENSP00000439180
  MOD_RES (1)..(1): Any amino acid
XSFVGSDPSQFCGQQGSPLGRPPGQREFVSSGRSLRLTFRTQPSSENKTAHLHKGFLALYQTVVCGRPVTPIAQNQTTLGSSRAKLGNFPWQAFTSIHGRGGGALLGDRWILTAAHTIYPKDSVSLRKNQSVNVFLGHTAIDEMLKLGNHPVHRVVVHPDYRQNESHNFSGDIALLELQHSIPLGPNVLPVCLP

SEQ ID NO: 19348 - protein, 314 aa, Homo sapiens
  Payload ID: 3883
  Gene Symbol: C1RL
  Gene Name: complement component 1, r subcomponent-like
  ENSP ID: ENSP00000441885
MPGPRVWGKYLWRSPHSKGCPGAMWWLLLWGVLQACPTRGSVLLAQELPQQLTSPGYPEPYGKGQESSTDIKAPEGFAVRLVFQDFDLEPSQDCAGDSVTISFVGSDPSQFCGQQGSPLGRPPGQREFVSSGRSLRLTFRTQPSSENKTAHLHKGFLALYQTVAVNYSQPISEASRGSEAINAPGDNPAKVQNHCQEPYYQAAAAASTPSLFLCLSSFTPQGHSPVQPQGPGKTDRMGRRFFSVCLSADGQSPPLPRIRRPSVLPEPSWATSPGKPSPVSTAVGAGPCWGTDGSSLLPTPSTPRTVFLSGRTRV

SEQ ID NO: 19349 - protein, 187 aa, Homo sapiens
  Payload ID: 3883
  Gene Symbol: C1RL
  Gene Name: complement component 1, r subcomponent-like
  ENSP ID: ENSP00000442611
MPGPRVWGKYLWRSPHSKGCPGAMWWLLLWGVLQACPTRGSVLLAQELPQQLTSPGYPEPYGKGQESSTDIKAPEGFAVRLVFQDFDLEPSQDCAGDSVTISFVGSDPSQFCGQQGSPLGRPPGQREFVSSGRSLRLTFRTQPSSENKTAHLHKGFLALYQTVGECPSWGCREGASVPSHDPGIFKP

SEQ ID NO: 19350 - protein, 66 aa, Homo sapiens
  Payload ID: 3883
  Gene Symbol: C1RL
  Gene Name: complement component 1, r subcomponent-like
  ENSP ID: ENSP00000444157
  MOD_RES (1)..(1): Any amino acid
XNPAKVQNHCQEPYYQAAAAGALTCATPGTWKDRQDGEEVLQCMPGCGSYADPITDQPSVRFSPQL

SEQ ID NO: 19351 - protein, 688 aa, Homo sapiens
  Payload ID: 3884
  Gene Symbol: C1S
  Gene Name: complement component 1, s subcomponent
  Uniprot ID: P09871
  ENSP ID: ENSP00000328173
MWCIVLFSLLAWVYAEPTMYGEILSPNYPQAYPSEVEKSWDIEVPEGYGIHLYFTHLDIELSENCAYDSVQIISGDTEEGRLCGQRSSNNPHSPIVEEFQVPYNKLQVIFKSDFSNEERFTGFAAYYVATDINECTDFVDVPCSHFCNNFIGGYFCSCPPEYFLHDDMKNCGVNCSGDVFTALIGEIASPNYPKPYPENSRCEYQIRLEKGFQVVVTLRREDFDVEAADSAGNCLDSLVFVAGDRQFGPYCGHGFPGPLNIETKSNALDIIFQTDLTGQKKGWKLRYHGDPMPCPKEDTPNSVWEPAKAKYVFRDVVQITCLDGFEVVEGRVGATSFYSTCQSNGKWSNSKLKCQPVDCGIPESIENGKVEDPESTLFGSVIRYTCEEPYYYMENGGGGEYHCAGNGSWVNEVLGPELPKCVPVCGVPREPFEEKQRIIGGSDADIKNFPWQVFFDNPWAGGALINEYWVLTAAHVVEGNREPTMYVGSTSVQTSRLAKSKMLTPEHVFIHPGWKLLEVPEGRTNFDNDIALVRLKDPVKMGPTVSPICLPGTSSDYNLMDGDLGLISGWGRTEKRDRAVRLKAARLPVAPLRKCKEVKVEKPTADAEAYVFTPNMICAGGEKGMDSCKGDSGGAFAVQDPNDKTKFYAAGLVSWGPQCGTYGLYTRVKNYVDWIMKTMQENSTPRED

SEQ ID NO: 19352 - protein, 688 aa, Homo sapiens; identical to SEQ ID NO: 19351
  Payload ID: 3884
  Gene Symbol: C1S
  Gene Name: complement component 1, s subcomponent
  Uniprot ID: P09871
  ENSP ID: ENSP00000354057

SEQ ID NO: 19353 - protein, 521 aa, Homo sapiens
  Payload ID: 3884
  Gene Symbol: C1S
  Gene Name: complement component 1, s subcomponent
  ENSP ID: ENSP00000384171
MKNCGVNCSGDVFTALIGEIASPNYPKPYPENSRCEYQIRLEKGFQVVVTLRREDFDVEAADSAGNCLDSLVFVAGDRQFGPYCGHGFPGPLNIETKSNALDIIFQTDLTGQKKGWKLRYHGDPMPCPKEDTPNSVWEPAKAKYVFRDVVQITCLDGFEVVEGRVGATSFYSTCQSNGKWSNSKLKCQPVDCGIPESIENGKVEDPESTLFGSVIRYTCEEPYYYMENGGGGEYHCAGNGSWVNEVLGPELPKCVPVCGVPREPFEEKQRIIGGSDADIKNFPWQVFFDNPWAGGALINEYWVLTAAHVVEGNREPTMYVGSTSVQTSRLAKSKMLTPEHVFIHPGWKLLEVPEGRTNFDNDIALVRLKDPVKMGPTVSPICLPGTSSDYNLMDGDLGLISGWGRTEKRDRAVRLKAARLPVAPLRKCKEVKVEKPTADAEAYVFTPNMICAGGEKGMDSCKGDSGGAFAVQDPNDKTKFYAAGLVSWGPQCGTYGLYTRVKNYVDWIMKTMQENSTPRED

SEQ ID NO: 19354 - protein, 168 aa, Homo sapiens
  Payload ID: 3884
  Gene Symbol: C1S
  Gene Name: complement component 1, s subcomponent
  ENSP ID: ENSP00000384464
MWCIVLFSLLAWVYAEPTMYGEILSPNYPQAYPSEVEKSWDIEVPEGYGIHLYFTHLDIELSENCAYDSVQIISGDTEEGRLCGQRSSNNPHSPIVEEFQVPYNKLQVIFKSDFSNEERFTGFAAYYVATDINECTDFVDVPCSHFCNNFIGGYFCSCPPEYFLHDDM

SEQ ID NO: 19355 - protein, 688 aa, Homo sapiens; identical to SEQ ID NO: 19351
  Payload ID: 3884
  Gene Symbol: C1S
  Gene Name: complement component 1, s subcomponent
  Uniprot ID: P09871
  ENSP ID: ENSP00000385035

SEQ ID NO: 19356 - protein, 355 aa, Homo sapiens
  Payload ID: 3884
  Gene Symbol: C1S
  Gene Name: complement component 1, s subcomponent
  ENSP ID: ENSP00000397921
  MOD_RES (1)..(1): Any amino acid
XSKVRRCRKPGPRDRQLTRVDKSPEMWCIVLFSLLAWVYAEPTMYGEILSPNYPQAYPSEVEKSWDIEVPEGYGIHLYFTHLDIELSENCAYDSVQIISGDTEEGRLCGQRSSNNPHSPIVEEFQVPYNKLQVIFKSDFSNEERFTGFAAYYVATDINECTDFVDVPCSHFCNNFIGGYFCSCPPEYFLHDDMKNCGVNCSGDVFTALIGEIASPNYPKPYPENSRCEYQIRLEKGFQVVVTLRREDFDVEAADSAGNCLDSLVFVAGDRQFGPYCGHGFPGPLNIETKSNALDIIFQTDLTGQKKGWKLRYHGDPMPCPKEDTPNSVWEPAKAKYVFRDVVQITCLDGFEVVEK

SEQ ID NO: 19357 - protein, 100 aa, Homo sapiens
  Payload ID: 3884
  Gene Symbol: C1S
  Gene Name: complement component 1, s subcomponent
  ENSP ID: ENSP00000399892
MWCIVLFSLLAWVYAEPTMYGEILSPNYPQAYPSEVEKSWDIEVPEGYGIHLYFTHLDIELSENCAYDSVQIISGDTEEGRLCGQRSSNNPHSPIVEEFQ

SEQ ID NO: 19358 - protein, 103 aa, Homo sapiens
  Payload ID: 3884
  Gene Symbol: C1S
  Gene Name: complement component 1, s subcomponent
  ENSP ID: ENSP00000406643
MWCIVLFSLLAWVYAEPTMYGEILSPNYPQAYPSEVEKSWDIEVPEGYGIHLYFTHLDIELSENCAYDSVQIISGDTEEGRLCGQRSSNNPHSPIVEEFQVPY

SEQ ID NO: 19359 - protein, 157 aa, Homo sapiens
  Payload ID: 3884
  Gene Symbol: C1S
  Gene Name: complement component 1, s subcomponent
  ENSP ID: ENSP00000442298
MKNCGVNCSGDVFTALIGEIASPNYPKPYPENSRCEYQIRLEKGFQVVVTLRREDFDVEAADSAGNCLDSLVFVAGDRQFGPYCGHGFPGPLNIETKSNALDIIFQTDLTGQKKGWKLRYHGDPMPCPKEDTPNSVWEPAKAKYVFRDVVQITCLDG

SEQ ID NO: 19360 - protein, 682 aa, Homo sapiens [sequence omitted]

SEQ ID NO: 19361 - protein, 752 aa, Homo sapiens
  Payload ID: 3885
  Gene Symbol: C2
  Gene Name: complement component 2
  Uniprot ID: P06681
  ENSP ID: ENSP00000299367
MGPLMVLFCLLFLYPGLADSAPSCPQNVNISGGTFTLSHGWAPGSLLTYSCPQGLYPSPASRLCKSSGQWQTPGATRSLSKAVCKPVRCPAPVSFENGIYTPRLGSYPVGGNVSFECEDGFILRGSPVRQCRPNGMWDGETAVCDNGAGHCPNPGISLGAVRTGFRFGHGDKVRYRCSSNLVLTGSSERECQGNGVWSGTEPICRQPYSYDFPEDVAPALGTSFSHMLGATNPTQKTKESLGRKIQIQRSGHLNLYLLLDCSQSVSENDFLIFKESASLMVDRIFSFEINVSVAIITFASEPKVLMSVLNDNSRDMTEVISSLENANYKDHENGTGTNTYAALNSVYLMMNNQMRLLGMETMAWQEIRHAIILLTDGKSNMGGSPKTAVDHIREILNINQKRNDYLDIYAIGVGKLDVDWRELNELGSKKDGERHAFILQDTKALHQVFEHMLDVSKLTDTICGVGNMSANASDQERTPWHVTIKPKSQETCRGALISDQWVLTAAHCFRDGNDHSLWRVNVGDPKSQWGKEFLIEKAVISPGFDVFAKKNQGILEFYGDDIALLKLAQKVKMSTHARPICLPCTMEANLALRRPQGSTCRDHENELLNKQSVPAHFVALNGSKLNINLKMGVEWTSCAEVVSQEKTMFPNLTDVREVVTDQFLCSGTQEDESPCKGESGGAVFLERRFRFFQVGLVSWGLYNPCLGSADKNSRKRAPRSKVPPPRDFHINLFRMQPWLRQHLGDVLNFLPL

SEQ ID NO: 19362 - protein, 752 aa, Homo sapiens; identical to SEQ ID NO: 19361
  Payload ID: 3885
  Gene Symbol: C2
  Gene Name: complement component 2
  Uniprot ID: P06681
  ENSP ID: ENSP00000364660

SEQ ID NO: 19363 - protein, 526 aa, Homo sapiens
  Payload ID: 3885
  Gene Symbol: C2
  Gene Name: complement component 2
  ENSP ID: ENSP00000372664
  MOD_RES (1)..(1): Any amino acid
XMVLFCLLFLYPAGHCPNPGISLGAVRTGFRFGHGDKVRYRCSSNLVLTGSSERECQGNGVWSGTEPICRQPYSYDFPEDVAPALGTSFSHMLGATNPTQKTKDHENGTGTNTYAALNSVYLMMNNQMRLLGMETMAWQEIRHAIILLTDGKSNMGGSPKTAVDHIREILNINQKRNDYLDIYAIGVGKLDVDWRELNELGSKKDGERHAFILQDTKALHQVFEHMLDVSKLTDTICGVGNMSANASDQERTPWHVTIKPKSQETCRGALISDQWVLTAAHCFRDGNDHSLWRVNVGDPKSQWGKEFLIEKAVISPGFDVFAKKNQGILEFYGDDIALLKLAQKVKMSTHARPICLPCTMEANLALRRPQGSTCRDHENELLNKQSVPAHFVALNGSKLNINLKMGVEWTSCAEVVSQEKTMFPNLTDVREVVTDQFLCSGTQEDESPCKGESGGAVFLERRFRFFQVGLVSWGLYNPCLGSADKNSRKRAPRSKVPPPRDFHINLFRMQPWLRQHLGDVLNFLPL

SEQ ID NO: 19364 - protein, 525 aa, Homo sapiens
  Payload ID: 3885
  Gene Symbol: C2
  Gene Name: complement component 2
  ENSP ID: ENSP00000372850
MVLFCLLFLYPAGHCPNPGISLGAVRTGFRFGHGDKVRYRCSSNLVLTGSSERECQGNGVWSGTEPICRQPYSYDFPEDVAPALGTSFSHMLGATNPTQKTKDHENGTGTNTYAALNSVYLMMNNQMRLLGMETMAWQEIRHAIILLTDGKSNMGGSPKTAVDHIREILNINQKRNDYLDIYAIGVGKLDVDWRELNELGSKKDGERHAFILQDTKALHQVFEHMLDVSKLTDTICGVGNMSANASDQERTPWHVTIKPKSQETCRGALISDQWVLTAAHCFRDGNDHSLWRVNVGDPKSQWGKEFLIEKAVISPGFDVFAKKNQGILEFYGDDIALLKLAQKVKMSTHARPICLPCTMEANLALRRPQGSTCRDHENELLNKQSVPAHFVALNGSKLNINLKMGVEWTSCAEVVSQEKTMFPNLTDVREVVTDQFLCSGTQEDESPCKGESGGAVFLERRFRFFQVGLVSWGLYNPCLGSADKNSRKRAPRSKVPPPRDFHINLFRMQPWLRQHLGDVLNFLPL

SEQ ID NO: 19365 - protein, 752 aa, Homo sapiens; identical to SEQ ID NO: 19361
  Payload ID: 3885
  Gene Symbol: C2
  Gene Name: complement component 2
  Uniprot ID: P06681
  ENSP ID: ENSP00000372853

SEQ ID NO: 19366 - protein, 525 aa, Homo sapiens; identical to SEQ ID NO: 19364
  Payload ID: 3885
  Gene Symbol: C2
  Gene Name: complement component 2
  ENSP ID: ENSP00000372858

SEQ ID NO: 19367 - protein, 158 aa, Homo sapiens
  Payload ID: 3885
  Gene Symbol: C2
  Gene Name: complement component 2
  ENSP ID: ENSP00000387374
MRALCIRETCSSELGFSRNWSRRKAGHCPNPGISLGAVRTGFRFGHGDKVRYRCSSNLVLTGSSERECQGNGVWSGTEPICRQPYSYDFPEDVAPALGTSFSHMLGATNPTQKTKESLGRKIQIQRSGHLNLYLLLDCSQSVSENDFLIFKESASLMV

SEQ ID NO: 19368 - protein, 139 aa, Homo sapiens
  Payload ID: 3885
  Gene Symbol: C2
  Gene Name: complement component 2
  ENSP ID: ENSP00000388286
MGPLMVLFCLLFLYPGLADSAPSCPQNVNISGGTFTLSHGWAPGSLLTYSCPQGLYPSPASRLCKSSGQWQTPGATRSLSKAVCKPVRCPAPVSFENGIYTPRLGSYPVGGNVSFECEDGFILRGSPVRQCRPNGMWDG

SEQ ID NO: 19369 - protein, 84 aa, Homo sapiens
  Payload ID: 3885
  Gene Symbol: C2
  Gene Name: complement component 2
  ENSP ID: ENSP00000388727
MGTRSAIAAPRILCSRGLRSGSARATGSGVERSPSAANPTLMTSLRTWPLPWALPSPTCLGPPIPPRRQRKAWAVKSKSSALVI

SEQ ID NO: 19370 - protein, 125 aa, Homo sapiens
  Payload ID: 3885
  Gene Symbol: C2
  Gene Name: complement component 2
  ENSP ID: ENSP00000389650
MGPLMVLFCLLFLYPGLADSAPSCPQNVNISGGTFTLSHGWAPGSLLTYSCPQGLYPSPASRLCKSSGQWQTPGATRSLSKAVCKPGHCPNPGISLGAVRTGFRFGHGDKVRYRCSSNLVLTGSS

SEQ ID NO: 19371 - protein, 169 aa, Homo sapiens
  Payload ID: 3885
  Gene Symbol: C2
  Gene Name: complement component 2
  ENSP ID: ENSP00000389865
MRALCIRETCSSELGFSRNWSRRKAGHCPNPGISLGAVRTGFRFGHGDKVRYRCSSNLVLTGSSERECQGNGVWSGTEPICRQPYSYDFPEDVAPALGTSFSHMLGATNPTQKTKDHENGTGTNTYAALNSVYLMMNNQMRLLGMETMAWQEIRHAIILLTDGKSNMGG

SEQ ID NO: 19372 - protein, 139 aa, Homo sapiens; identical to SEQ ID NO: 19368
  Payload ID: 3885
  Gene Symbol: C2
  Gene Name: complement component 2
  ENSP ID: ENSP00000390302

SEQ ID NO: 19373 - protein, 145 aa, Homo sapiens
  Payload ID: 3885
  Gene Symbol: C2
  Gene Name: complement component 2
  ENSP ID: ENSP00000390659
  MOD_RES (1)..(1): Any amino acid
XGHCPNPGISLGAVRTGFRFGHGDKVRYRCSSNLVLTGSSERECQGNGVWSGTEPICRQPYSYDFPEDVAPALGTSFSHMLGATNPTQKTKDHENGTGTNTYAALNSVYLMMNNQMRLLGMETMAWQEIRHAIILLTDGKSNMGG

SEQ ID NO: 19374 - protein, 525 aa, Homo sapiens; identical to SEQ ID NO: 19364
  Payload ID: 3885
  Gene Symbol: C2
  Gene Name: complement component 2
  ENSP ID: ENSP00000391314

SEQ ID NO: 19375 - protein, 203 aa, Homo sapiens
  Payload ID: 3885
  Gene Symbol: C2
  Gene Name: complement component 2
  ENSP ID: ENSP00000391354
MGPLMVLFCLLFLYPGLADSAPSCPQNVNISGGTFTLSHGWAPGSLLTYSCPQGLYPSPASRLCKSSGQWQTPGATRSLSKAVCKPGHCPNPGISLGAVRTGFRFGHGDKVRYRCSSNLVLTGSSERECQGNGVWSGTEPICRQPYSYDFPEDVAPALGTSFSHMLGATNPTQKTKESLGRKIQIQRSGHLNLYLLLDCSQSV

SEQ ID NO: 19376 - protein, 139 aa, Homo sapiens; identical to SEQ ID NO: 19368
  Payload ID: 3885
  Gene Symbol: C2
  Gene Name: complement component 2
  ENSP ID: ENSP00000391400

SEQ ID NO: 19377 - protein, 158 aa, Homo sapiens; identical to SEQ ID NO: 19367
  Payload ID: 3885
  Gene Symbol: C2
  Gene Name: complement component 2
  ENSP ID: ENSP00000391508

SEQ ID NO: 19378 - protein, 125 aa, Homo sapiens; identical to SEQ ID NO: 19370
  Payload ID: 3885
  Gene Symbol: C2
  Gene Name: complement component 2
  ENSP ID: ENSP00000392182

SEQ ID NO: 19379 - protein, 538 aa, Homo sapiens
  Payload ID: 3885
  Gene Symbol: C2
  Gene Name: complement component 2
  Uniprot ID: P06681
  ENSP ID: ENSP00000392322
MRALCIRETCSSELGFSRNWSRRKAGHCPNPGISLGAVRTGFRFGHGDKVRYRCSSNLVLTGSSERECQGNGVWSGTEPICRQPYSYDFPEDVAPALGTSFSHMLGATNPTQKTKDHENGTGTNTYAALNSVYLMMNNQMRLLGMETMAWQEIRHAIILLTDGKSNMGGSPKTAVDHIREILNINQKRNDYLDIYAIGVGKLDVDWRELNELGSKKDGERHAFILQDTKALHQVFEHMLDVSKLTDTICGVGNMSANASDQERTPWHVTIKPKSQETCRGALISDQWVLTAAHCFRDGNDHSLWRVNVGDPKSQWGKEFLIEKAVISPGFDVFAKKNQGILEFYGDDIALLKLAQKVKMSTHARPICLPCTMEANLALRRPQGSTCRDHENELLNKQSVPAHFVALNGSKLNINLKMGVEWTSCAEVVSQEKTMFPNLTDVREVVTDQFLCSGTQEDESPCKGESGGAVFLERRFRFFQVGLVSWGLYNPCLGSADKNSRKRAPRSKVPPPRDFHINLFRMQPWLRQHLGDVLNFLPL

SEQ ID NO: 19380 - protein, 125 aa, Homo sapiens; identical to SEQ ID NO: 19370
  Payload ID: 3885
  Gene Symbol: C2
  Gene Name: complement component 2
  ENSP ID: ENSP00000392445

SEQ ID NO: 19381 - protein, 752 aa, Homo sapiens; identical to SEQ ID NO: 19361
  Payload ID: 3885
  Gene Symbol: C2
  Gene Name: complement component 2
  Uniprot ID: P06681
  ENSP ID: ENSP00000392835

SEQ ID NO: 19382 - protein, 145 aa, Homo sapiens; identical to SEQ ID NO: 19373
  Payload ID: 3885
  Gene Symbol: C2
  Gene Name: complement component 2
  ENSP ID: ENSP00000393055
  MOD_RES (1)..(1): Any amino acid

SEQ ID NO: 19383 - protein, 134 aa, Homo sapiens
  Payload ID: 3885
  Gene Symbol: C2
  Gene Name: complement component 2
  ENSP ID: ENSP00000395426
  MOD_RES (1)..(1): Any amino acid
XGHCPNPGISLGAVRTGFRFGHGDKVRYRCSSNLVLTGSSERECQGNGVWSGTEPICRQPYSYDFPEDVAPALGTSFSHMLGATNPTQKTKESLGRKIQIQRSGHLNLYLLLDCSQSVSENDFLIFKESASLMV

SEQ ID NO: 19384 - protein, 620 aa, Homo sapiens
  Payload ID: 3885
  Gene Symbol: C2
  Gene Name: complement component 2
  Uniprot ID: P06681
  ENSP ID: ENSP00000395683
MGPLMVLFCLLFLYPAGHCPNPGISLGAVRTGFRFGHGDKVRYRCSSNLVLTGSSERECQGNGVWSGTEPICRQPYSYDFPEDVAPALGTSFSHMLGATNPTQKTKESLGRKIQIQRSGHLNLYLLLDCSQSVSENDFLIFKESASLMVDRIFSFEINVSVAIITFASEPKVLMSVLNDNSRDMTEVISSLENANYKDHENGTGTNTYAALNSVYLMMNNQMRLLGMETMAWQEIRHAIILLTDGKSNMGGSPKTAVDHIREILNINQKRNDYLDIYAIGVGKLDVDWRELNELGSKKDGERHAFILQDTKALHQVFEHMLDVSKLTDTICGVGNMSANASDQERTPWHVTIKPKSQETCRGALISDQWVLTAAHCFRDGNDHSLWRVNVGDPKSQWGKEFLIEKAVISPGFDVFAKKNQGILEFYGDDIALLKLAQKVKMSTHARPICLPCTMEANLALRRPQGSTCRDHENELLNKQSVPAHFVALNGSKLNINLKMGVEWTSCAEVVSQEKTMFPNLTDVREVVTDQFLCSGTQEDESPCKGESGGAVFLERRFRFFQVGLVSWGLYNPCLGSADKNSRKRAPRSKVPPPRDFHINLFRMQPWLRQHLGDVLNFLPL

SEQ ID NO: 19385 - protein, 169 aa, Homo sapiens; identical to SEQ ID NO: 19371
  Payload ID: 3885
  Gene Symbol: C2
  Gene Name: complement component 2
  ENSP ID: ENSP00000396369

SEQ ID NO: 19386 - protein, 525 aa, Homo sapiens; identical to SEQ ID NO: 19364
  Payload ID: 3885
  Gene Symbol: C2
  Gene Name: complement component 2
  ENSP ID: ENSP00000398098

SEQ ID NO: 19387 - protein, 169 aa, Homo sapiens; identical to SEQ ID NO: 19371
  Payload ID: 3885
  Gene Symbol: C2
  Gene Name: complement component 2
  ENSP ID: ENSP00000400097

SEQ ID NO: 19388 - protein, 525 aa, Homo sapiens; identical to SEQ ID NO: 19364
  Payload ID: 3885
  Gene Symbol: C2
  Gene Name: complement component 2
  ENSP ID: ENSP00000400362

SEQ ID NO: 19389 - protein, 139 aa, Homo sapiens; identical to SEQ ID NO: 19368
  Payload ID: 3885
  Gene Symbol: C2
  Gene Name: complement component 2
  ENSP ID: ENSP00000401708

SEQ ID NO: 19390 - protein, 752 aa, Homo sapiens; identical to SEQ ID NO: 19361
  Payload ID: 3885
  Gene Symbol: C2
  Gene Name: complement component 2
  Uniprot ID: P06681
  ENSP ID: ENSP00000402278

SEQ ID NO: 19391 - protein, 139 aa, Homo sapiens; identical to SEQ ID NO: 19368
  Payload ID: 3885
  Gene Symbol: C2
  Gene Name: complement component 2
  ENSP ID: ENSP00000403325

SEQ ID NO: 19392 - protein, 139 aa, Homo sapiens; identical to SEQ ID NO: 19368
  Payload ID: 3885
  Gene Symbol: C2
  Gene Name: complement component 2
  ENSP ID: ENSP00000403658

SEQ ID NO: 19393 - protein, 125 aa, Homo sapiens; identical to SEQ ID NO: 19370
  Payload ID: 3885
  Gene Symbol: C2
  Gene Name: complement component 2
  ENSP ID: ENSP00000404144

SEQ ID NO: 19394 - protein, 353 aa, Homo sapiens
  Payload ID: 3885
  Gene Symbol: C2
  Gene Name: complement component 2
  ENSP ID: ENSP00000404452
MGPLMVLFCLLFLYPAGHCPNPGISLGAVRTGFRFGHGDKVRYRCSSNLVLTGSSERECQGNGVWSGTEPICRQPYSYDFPEDVAPALGTSFSHMLGATNPTQKTKESLGRKIQIQRSGHLNLYLLLDCSQSVSENDFLIFKESASLMVDRIFSFEINVSVAIITFASEPKVLMSVLNDNSRDMTEVISSLENANYKDHENGTGTNTYAALNSVYLMMNNQMRLLGMETMAWQEIRHAIILLTDGKSNMGGSPKTAVDHIREILNINQKRNDYLDIYAIGVGKLDVDWRELNELGSKKDGERHAFILQDTKALHQVFEHMLDVSKLTDTICGVGNMSANASDQERTPWHVTIK

SEQ ID NO: 19395 - protein, 125 aa, Homo sapiens; identical to SEQ ID NO: 19370
  Payload ID: 3885
  Gene Symbol: C2
  Gene Name: complement component 2
  ENSP ID: ENSP00000405701

SEQ ID NO: 19396 - protein, 169 aa, Homo sapiens; identical to SEQ ID NO: 19371
  Payload ID: 3885
  Gene Symbol: C2
  Gene Name: complement component 2
  ENSP ID: ENSP00000405749

SEQ ID NO: 19397 - protein, 752 aa, Homo sapiens; identical to SEQ ID NO: 19361
  Payload ID: 3885
  Gene Symbol: C2
  Gene Name: complement component 2
  Uniprot ID: P06681
  ENSP ID: ENSP00000405800

SEQ ID NO: 19398 - protein, 158 aa, Homo sapiens; identical to SEQ ID NO: 19367
  Payload ID: 3885
  Gene Symbol: C2
  Gene Name: complement component 2
  ENSP ID: ENSP00000406121

SEQ ID NO: 19399 - protein, 328 aa, Homo sapiens
  Payload ID: 3885
  Gene Symbol: C2
  Gene Name: complement component 2
  ENSP ID: ENSP00000406190
MGPLMVLFCLLFLYPGLADSAPSCPQNVNISGGTFTLSHGWAPGSLLTYSCPQGLYPSPASRLCKSSGQWQTPGATRSLSKAVCKPVRCPAPVSFENGIYTPRLGSYPVGGNVSFECEDGFILRGSPVRQCRPNGMWDGETAVCDNGAGHCPNPGISLGAVRTGFRFGHGDKVRYRCSSNLVLTGSSERECQGNGVWSGTEPICRQPYSYDFPEDVAPALGTSFSHMLGATNPTQKTKESLGRKIQIQRSGHLNLYLLLDCSQSVSENDFLIFKESASLMVDRVRNQESACSRGLPVLTISLCLLPLLRTPLTAHLLQEVFSDYTHAM

SEQ ID NO: 19400 - protein, 752 aa, Homo sapiens; identical to SEQ ID NO: 19361
  Payload ID: 3885
  Gene Symbol: C2
  Gene Name: complement component 2
  Uniprot ID: P06681
  ENSP ID: ENSP00000407961

SEQ ID NO: 19401 - protein, 353 aa, Homo sapiens; identical to SEQ ID NO: 19394
  Payload ID: 3885
  Gene Symbol: C2
  Gene Name: complement component 2
  ENSP ID: ENSP00000408250

SEQ ID NO: 19402 - protein, 125 aa, Homo sapiens; identical to SEQ ID NO: 19370
  Payload ID: 3885
  Gene Symbol: C2
  Gene Name: complement component 2
  ENSP ID: ENSP00000409041

SEQ ID NO: 19403 - protein, 353 aa, Homo sapiens; identical to SEQ ID NO: 19394
  Payload ID: 3885
  Gene Symbol: C2
  Gene Name: complement component 2
  ENSP ID: ENSP00000410904

SEQ ID NO: 19404 - protein, 158 aa, Homo sapiens; identical to SEQ ID NO: 19367
  Payload ID: 3885
  Gene Symbol: C2
  Gene Name: complement component 2
  ENSP ID: ENSP00000411298

SEQ ID NO: 19405 - protein, 353 aa, Homo sapiens; identical to SEQ ID NO: 19394
  Payload ID: 3885
  Gene Symbol: C2
  Gene Name: complement component 2
  ENSP ID: ENSP00000411376

SEQ ID NO: 19406 - protein, 139 aa, Homo sapiens; identical to SEQ ID NO: 19368
  Payload ID: 3885
  Gene Symbol: C2
  Gene Name: complement component 2
  ENSP ID: ENSP00000412289

SEQ ID NO: 19407 - protein, 353 aa, Homo sapiens; identical to SEQ ID NO: 19394
  Payload ID: 3885
  Gene Symbol: C2
  Gene Name: complement component 2
  ENSP ID: ENSP00000413295

SEQ ID NO: 19408 - protein, 353 aa, Homo sapiens; identical to SEQ ID NO: 19394
  Payload ID: 3885
  Gene Symbol: C2
  Gene Name: complement component 2
  ENSP ID: ENSP00000413482

SEQ ID NO: 19409 - protein, 158 aa, Homo sapiens; identical to SEQ ID NO: 19367
  Payload ID: 3885
  Gene Symbol: C2
  Gene Name: complement component 2
  ENSP ID: ENSP00000413995

SEQ ID NO: 19410 - protein, 525 aa, Homo sapiens; identical to SEQ ID NO: 19364
  Payload ID: 3885
  Gene Symbol: C2
  Gene Name: complement component 2
  ENSP ID: ENSP00000416484

SEQ ID NO: 19411 - protein, 134 aa, Homo sapiens; identical to SEQ ID NO: 19383
  Payload ID: 3885
  Gene Symbol: C2
  Gene Name: complement component 2
  ENSP ID: ENSP00000416938
  MOD_RES (1)..(1): Any amino acid

SEQ ID NO: 19412 - protein, 463 aa, Homo sapiens
  Payload ID: 3885
  Gene Symbol: C2
  Gene Name: complement component 2
  ENSP ID: ENSP00000417482
MGTRSAIAAPRILCSRGLRSGSARATGSGVERSPSAANPTLMTSLRTWPLPWALPSPTCLGPPIPPRRQRIFSFEINVSVAIITFASEPKVLMSVLNDNSRDMTEVISSLENANYKDHENGTGTNTYAALNSVYLMMNNQMRLLGMETMAWQEIRHAIILLTDGKSNMGGSPKTAVDHIREILNINQKRNDYLDIYAIGVGKLDVDWRELNELGSKKDGERHAFILQDTKALHQVFEHMLDVSKLTDTICGVGNMSANASDQERTPWHVTIKPKSQETCRGALISDQWVLTAAHCFRDGNDHSLWRVNVGDPKSQWGKEFLIEKAVISPGFDVFAKKNQGILEFYGDDIALLKLAQKVKMSTHARPICLPCTMEANLALRRPQGSTCRDHENELLNKQSVPAHFVALNGSKLNINLKMGVEWTSCAEVVSQEKTMFPNLTDVREVVTDQFLCSGTQEDESPCK

SEQ ID NO: 19413 - protein, 160 aa, Homo sapiens
  Payload ID: 3885
  Gene Symbol: C2
  Gene Name: complement component 2
  ENSP ID: ENSP00000417790
  MOD_RES (1)..(1): Any amino acid
XLMVDRIFSFEINVSVAIITFASEPKVLMSVLNDNSRDMTEVISSLENANYKDHENGTGTNTYAALNSVYLMMNNQMRLLGMETMAWQEIRHAIILLTDGKSNMGGSPKTAVDHIREILNINQKRNDYLAPKPQESGDFPLPHQTSMPSGWASWMWTGEN

SEQ ID NO: 19414 - protein, 104 aa, Homo sapiens
  Payload ID: 3885
  Gene Symbol: C2
  Gene Name: complement component 2
  ENSP ID: ENSP00000418332
MGPLMVLFCLLFLYPGLADSAPSCPQNVNISGGTFTLSHGWAPGSLLTYSCPQGLYPSPASRLCKSSGQWQTPGATRSLSKAVCKREAPCGLCSGCALSSPCLL

SEQ ID NO: 19415 - protein, 506 aa, Homo sapiens
  Payload ID: 3885
  Gene Symbol: C2
  Gene Name: complement component 2
  ENSP ID: ENSP00000418923
MGTRSAIAAPRILCSRGLRSGSARATGSGVERSPSAAIFSFEINVSVAIITFASEPKVLMSVLNDNSRDMTEVISSLENANYKDHENGTGTNTYAALNSVYLMMNNQMRLLGMETMAWQEIRHAIILLTDGKSNMGGSPKTAVDHIREILNINQKRNDYLDIYAIGVGKLDVDWRELNELGSKKDGERHAFILQDTKALHQVFEHMLDVSKLTDTICGVGNMSANASDQERTPWHVTIKPKSQETCRGALISDQWVLTAAHCFRDGNDHSLWRVNVGDPKSQWGKEFLIEKAVISPGFDVFAKKNQGILEFYGDDIALLKLAQKVKMSTHARPICLPCTMEANLALRRPQGSTCRDHENELLNKQSVPAHFVALNGSKLNINLKMGVEWTSCAEVVSQEKTMFPNLTDVREVVTDQFLCSGTQEDESPCKGESGGAVFLERRFRFFQVGLVSWGLYNPCLGSADKNSRKRAPRSKVPPPRDFHINLFRMQPWLRQHLGDVLNFLPL

SEQ ID NO: 19416 - protein, 136 aa, Homo sapiens
  Payload ID: 3885
  Gene Symbol: C2
  Gene Name: complement component 2
  ENSP ID: ENSP00000419048
MGRPGRAGHCPNPGISLGAVRTGFRFGHGDKVRYRCSSNLVLTGSSERECQGNGVWSGTEPICRQPYSYDFPEDVAPALGTSFSHMLGATNPTQKTKESLGRKIQIQRSGHLNLYLLLDCSQSVSENDFLIFKESA

SEQ ID NO: 19417 - protein, 84 aa, Homo sapiens; identical to SEQ ID NO: 19369
  Payload ID: 3885
  Gene Symbol: C2
  Gene Name: complement component 2
  ENSP ID: ENSP00000420305

SEQ ID NO: 19418 - protein, 620 aa, Homo sapiens; identical to SEQ ID NO: 19384
  Payload ID: 3885
  Gene Symbol: C2
  Gene Name: complement component 2
  Uniprot ID: P06681
  ENSP ID: ENSP00000446639

SEQ ID NO: 19419 - protein, 620 aa, Homo sapiens; identical to SEQ ID NO: 19384
  Payload ID: 3885
  Gene Symbol: C2
  Gene Name: complement component 2
  Uniprot ID: P06681
  ENSP ID: ENSP00000446728

SEQ ID NO: 19420 - protein, 506 aa, Homo sapiens; identical to SEQ ID NO: 19415
  Payload ID: 3885
  Gene Symbol: C2
  Gene Name: complement component 2
  ENSP ID: ENSP00000447134

SEQ ID NO: 19421 - protein, 723 aa, Homo sapiens
  Payload ID: 3885
  Gene Symbol: C2
  Gene Name: complement component 2
  ENSP ID: ENSP00000447458
MAGLLGAFSPTPAPRACTHPQHHGCARAADSGRPQEPPGLCLRRSANVRLPVGFAQAVRCPAPVSFENGIYTPRLGSYPVGGNVSFECEDGFILRGSPVRQCRPNGMWDGETAVCDNGAGHCPNPGISLGAVRTGFRFGHGDKVRYRCSSNLVLTGSSERECQGNGVWSGTEPICRQPYSYDFPEDVAPALGTSFSHMLGATNPTQKTKESLGRKIQIQRSGHLNLYLLLDCSQSVSENDFLIFKESASLMVDRIFSFEINVSVAIITFASEPKVLMSVLNDNSRDMTEVISSLENANYKDHENGTGTNTYAALNSVYLMMNNQMRLLGMETMAWQEIRHAIILLTDGKSNMGGSPKTAVDHIREILNINQKRNDYLDIYAIGVGKLDVDWRELNELGSKKDGERHAFILQDTKALHQVFEHMLDVSKLTDTICGVGNMSANASDQERTPWHVTIKPKSQETCRGALISDQWVLTAAHCFRDGNDHSLWRVNVGDPKSQWGKEFLIEKAVISPGFDVFAKKNQGILEFYGDDIALLKLAQKVKMSTHARPICLPCTMEANLALRRPQGSTCRDHENELLNKQSVPAHFVALNGSKLNINLKMGVEWTSCAEVVSQEKTMFPNLTDVREVVTDQFLCSGTQEDESPCKGESGGAVFLERRFRFFQVGLVSWGLYNPCLGSADKNSRKRAPRSKVPPPRDFHINLFRMQPWLRQHLGDVLNFLPL

SEQ ID NO: 19422 - protein, 620 aa, Homo sapiens; identical to SEQ ID NO: 19384
  Payload ID: 3885
  Gene Symbol: C2
  Gene Name: complement component 2
  Uniprot ID: P06681
  ENSP ID: ENSP00000447632

SEQ ID NO: 19423 - protein, 723 aa, Homo sapiens; identical to SEQ ID NO: 19421
  Payload ID: 3885
  Gene Symbol: C2
  Gene Name: complement component 2
  ENSP ID: ENSP00000448602

SEQ ID NO: 19424 - protein, 620 aa, Homo sapiens; identical to SEQ ID NO: 19384
  Payload ID: 3885
  Gene Symbol: C2
  Gene Name: complement component 2
  Uniprot ID: P06681
  ENSP ID: ENSP00000449286

SEQ ID NO: 19425 - protein, 723 aa, Homo sapiens; identical to SEQ ID NO: 19421
  Payload ID: 3885
  Gene Symbol: C2
  Gene Name: complement component 2
  ENSP ID: ENSP00000449345

SEQ ID NO: 19426 - protein, 723 aa, Homo sapiens; identical to SEQ ID NO: 19421
  Payload ID: 3885
  Gene Symbol: C2
  Gene Name: complement component 2
  ENSP ID: ENSP00000449366

SEQ ID NO: 19427 - protein, 620 aa, Homo sapiens; identical to SEQ ID NO: 19384
  Payload ID: 3885
  Gene Symbol: C2
  Gene Name: complement component 2
  Uniprot ID: P06681
  ENSP ID: ENSP00000449715

SEQ ID NO: 19428 - protein, 723 aa, Homo sapiens; identical to SEQ ID NO: 19421
  Payload ID: 3885
  Gene Symbol: C2
  Gene Name: complement component 2
  ENSP ID: ENSP00000449823

SEQ ID NO: 19429 - protein, 506 aa, Homo sapiens; identical to SEQ ID NO: 19415
  Payload ID: 3885
  Gene Symbol: C2
  Gene Name: complement component 2
  ENSP ID: ENSP00000449940

SEQ ID NO: 19430 - protein, 723 aa, Homo sapiens; identical to SEQ ID NO: 19421
  Payload ID: 3885
  Gene Symbol: C2
  Gene Name: complement component 2
  ENSP ID: ENSP00000450180

SEQ ID NO: 19431 - protein, 620 aa, Homo sapiens; identical to SEQ ID NO: 19384
  Payload ID: 3885
  Gene Symbol: C2
  Gene Name: complement component 2
  Uniprot ID: P06681
  ENSP ID: ENSP00000450387

SEQ ID NO: 19432 - protein, 506 aa, Homo sapiens; identical to SEQ ID NO: 19415
  Payload ID: 3885
  Gene Symbol: C2
  Gene Name: complement component 2
  ENSP ID: ENSP00000478351

SEQ ID NO: 19433 - protein, 538 aa, Homo sapiens; identical to SEQ ID NO: 19379
  Payload ID: 3885
  Gene Symbol: C2
  Gene Name: complement component 2
  Uniprot ID: P06681
  ENSP ID: ENSP00000480739

SEQ ID NO: 19434 - protein, 538 aa, Homo sapiens; identical to SEQ ID NO: 19379
  Payload ID: 3885
  Gene Symbol: C2
  Gene Name: complement component 2
  Uniprot ID: P06681
  ENSP ID: ENSP00000481651

SEQ ID NO: 19435 - protein, 506 aa, Homo sapiens; identical to SEQ ID NO: 19415
  Payload ID: 3885
  Gene Symbol: C2
  Gene Name: complement component 2
  ENSP ID: ENSP00000482072

SEQ ID NO: 19436 - protein, 506 aa, Homo sapiens; identical to SEQ ID NO: 19415
  Payload ID: 3885
  Gene Symbol: C2
  Gene Name: complement component 2
  ENSP ID: ENSP00000482188

SEQ ID NO: 19437 - protein, 538 aa, Homo sapiens; identical to SEQ ID NO: 19379
  Payload ID: 3885
  Gene Symbol: C2
  Gene Name: complement component 2
  Uniprot ID: P06681
  ENSP ID: ENSP00000482616

SEQ ID NO: 19438 - protein, 506 aa, Homo sapiens; identical to SEQ ID NO: 19415
  Payload ID: 3885
  Gene Symbol: C2
  Gene Name: complement component 2
  ENSP ID: ENSP00000483004

SEQ ID NO: 19439 - protein, 538 aa, Homo sapiens; identical to SEQ ID NO: 19379
  Payload ID: 3885
  Gene Symbol: C2
  Gene Name: complement component 2
  Uniprot ID: P06681
  ENSP ID: ENSP00000483231

SEQ ID NO: 19440 - protein, 1663 aa, Homo sapiens
  Payload ID: 3886
  Gene Symbol: C3
  Gene Name: complement component 3
  Uniprot ID: P01024
  ENSP ID: ENSP00000245907
MGPTSGPSLLLLLLTHLPLALGSPMYSIITPNILRLESEETMVLEAHDAQGDVPVTVTVHDFPGKKLVLSSEKTVLTPATNHMGNVTFTIPANREFKSEKGRNKFVTVQATFGTQVVEKVVLVSLQSGYLFIQTDKTIYTPGSTVLYRIFTVNHKLLPVGRTVMVNIENPEGIPVKQDSLSSQNQLGVLPLSWDIPELVNMGQWKIRAYYENSPQQVFSTEFEVKEYVLPSFEVIVEPTEKFYYIYNEKGLEVTITARFLYGKKVEGTAFVIFGIQDGEQRISLPESLKRIPIEDGSGEVVLSRKVLLDGVQNPRAEDLVGKSLYVSATVILHSGSDMVQAERSGIPIVTSPYQIHFTKTPKYFKPGMPFDLMVFVTNPDGSPAYRVPVAVQGEDTVQSLTQGDGVAKLSINTHPSQKPLSITVRTKKQELSEAEQATRTMQALPYSTVGNSNNYLHLSVLRTELRPGETLNVNFLLRMDRAHEAKIRYYTYLIMNKGRLLKAGRQVREPGQDLVVLPLSITTDFIPSFRLVAYYTLIGASGQREVVADSVWVDVKDSCVGSLVVKSGQSEDRQPVPGQQMTLKIEGDHGARVVLVAVDKGVFVLNKKNKLTQSKIWDVVEKADIGCTPGSGKDYAGVFSDAGLTFTSSSGQQTAQRAELQCPQPAARRRRSVQLTEKRMDKVGKYPKELRKCCEDGMRENPMRFSCQRRTRFISLGEACKKVFLDCCNYITELRRQHARASHLGLARSNLDEDIIAEENIVSRSEFPESWLWNVEDLKEPPKNGISTKLMNIFLKDSITTWEILAVSMSDKKGICVADPFEVTVMQDFFIDLRLPYSVVRNEQVEIRAVLYNYRQNQELKVRVELLHNPAFCSLATTKRRHQQTVTIPPKSSLSVPYVIVPLKTGLQEVEVKAAVYHHFISDGVRKSLKVVPEGIRMNKTVAVRTLDPERLGREGVQKEDIPPADLSDQVPDTESETRILLQGTPVAQMTEDAVDAERLKHLIVTPSGCGEQNMIGMTPTVIAVHYLDETEQWEKFGLEKRQGALELIKKGYTQQLAFRQPSSAFAAFVKRAPSTWLTAYVVKVFSLAVNLIAIDSQVLCGAVKWLILEKQKPDGVFQEDAPVIHQEMIGGLRNNNEKDMALTAFVLISLQEAKDICEEQVNSLPGSITKAGDFLEANYMNLQRSYTVAIAGYALAQMGRLKGPLLNKFLTTAKDKNRWEDPGKQLYNVEATSYALLALLQLKDFDFVPPVVRWLNEQRYYGGGYGSTQATFMVFQALAQYQKDAPDHQELNLDVSLQLPSRSSKITHRIHWESASLLRSEETKENEGFTVTAEGKGQGTLSVVTMYHAKAKDQLTCNKFDLKVTIKPAPETEKRPQDAKNTMILEICTRYRGDQDATMSILDISMMTGFAPDTDDLKQLANGVDRYISKYELDKAFSDRNTLIIYLDKVSHSEDDCLAFKVHQYFNVELIQPGAVKVYAYYNLEESCTRFYHPEKEDGKLNKLCRDELCRCAEENCFIQKSDDKVTLEERLDKACEPGVDYVYKTRLVKVQLSNDFDEYIMAIEQTIKSGSDEVQVGQQRTFISPIKCREALKLEEKKHYLMWGLSSDFWGEKPNLSYIIGKDTWVEHWPEEDECQDEENQKQCQDLGAFTESMVVFGCPN

SEQ ID NO: 19441 - protein, 100 aa, Homo sapiens
  Payload ID: 3886
  Gene Symbol: C3
  Gene Name: complement component 3
  ENSP ID: ENSP00000469482
  MOD_RES (1)..(1): Any amino acid
XFIQKSDDKVTLEERLDKACEPGVDYVYKTRLVKVQLSNDFDEYIMAIEQTIKSGSDEVQVGQQRTFISPIKCREALKLEEKKHYLMWGLSSDFWGEKPK

SEQ ID NO: 19442 - protein, 192 aa, Homo sapiens
  Payload ID: 3886
  Gene Symbol: C3
  Gene Name: complement component 3
  ENSP ID: ENSP00000469744
ITHRIHWESASLLRSEETKENEGFTVTAEGKGQGTLSVVTMYHAKAKDQLTCNKFDLKVTIKPAPETGIPSPIFLSSVFLEKRPQDAKNTMILEICTRYRGDQDATMSILDISMMTGFAPDTDDLKQLANGVDRYISKYELDKAFSDRNTLIIYLDKVSHSEDDCLAFKVHQYFNVELIQPGAVKVYAYYNL

SEQ ID NO: 19443 - protein, 101 aa, Homo sapiens
  Payload ID: 3886
  Gene Symbol: C3
  Gene Name: complement component 3
  ENSP ID: ENSP00000471384
NNEKDMALTAFVLISLQEAKDICEEQVNSLPGSITKAGDFLEANYMNLQRSYTVAIAGYALAQMGRLKGPLLNKFLTTAKDEENQKQCQDLGAFTESMVVF

SEQ ID NO: 19444 - protein, 103 aa, Homo sapiens
  Payload ID: 3886
  Gene Symbol: C3
  Gene Name: complement component 3
  ENSP ID: ENSP00000472044
MVLEAHDAQGDVPVTVTVHDFPGKKLVLSSEKTVLTPATNHMGNVTFTIPANREFKSEKGRNKFVTVQATFGTQVVEKVVLVSLQSGYLFIQTDKTIYTPGST

SEQ ID NO: 19445 - protein, 482 aa, Homo sapiens
  Payload ID: 3887
  Gene Symbol: C3AR1
  Gene Name: complement component 3a receptor 1
  Uniprot ID: Q16581
  ENSP ID: ENSP00000302079
MASFSAETNSTDLLSQPWNEPPVILSMVILSLTFLLGLPGNGLVLWVAGLKMQRTVNTIWFLHLTLADLLCCLSLPFSLAHLALQGQWPYGRFLCKLIPSIIVLNMFASVFLLTAISLDRCLVVFKPIWCQNHRNVGMACSICGCIWVVAFVMCIPVFVYREIFTTDNHNRCGYKFGLSSSLDYPDFYGDPLENRSLENIVQPPGEMNDRLDPSSFQTNDHPWTVPTVFQPQTFQRPSADSLPRGSARLTSQNLYSNVFKPADVVSPKIPSGFPIEDHETSPLDNSDAFLSTHLKLFPSASSNSFYESELPQGFQDYYNLGQFTDDDQVPTPLVAITITRLVVGFLLPSVIMIACYSFIVFRMQRGRFAKSQSKTFRVAVVVVAVFLVCWTPYHIFGVLSLLTDPETPLGKTLMSWDHVCIALASANSCFNPFLYALLGKDFRKKARQSIQGILEAAFSEELTRSTHCPSNNVISERNSTTV

SEQ ID NO: 19446 - protein, 146 aa, Homo sapiens
  Payload ID: 3887
  Gene Symbol: C3AR1
  Gene Name: complement component 3a receptor 1
  ENSP ID: ENSP00000444500
MASFSAETNSTDLLSQPWNEPPVILSMVILSLTFLLGLPGNGLVLWVAGLKMQRTVNTIWFLHLTLADLLCCLSLPFSLAHLALQGQWPYGRFLCKLIPSIIVLNMFASVFLLTAISLDRCLVVFKPIWCQNHRNVGMACSICGCI

SEQ ID NO: 19447 - protein, 597 aa, Homo sapiens
  Payload ID: 3888
  Gene Symbol: C4BPA
  Gene Name: complement component 4 binding protein, alpha
  Uniprot ID: P04003
  ENSP ID: ENSP00000356037
MHPPKTPSGALHRKRKMAAWPFSRLWKVSDPILFQMTLIAALLPAVLGNCGPPPTLSFAAPMDITLTETRFKTGTTLKYTCLPGYVRSHSTQTLTCNSDGEWVYNTFCIYKRCRHPGELRNGQVEIKTDLSFGSQIEFSCSEGFFLIGSTTSRCEVQDRGVGWSHPLPQCEIVKCKPPPDIRNGRHSGEENFYAYGFSVTYSCDPRFSLLGHASISCTVENETIGVWRPSPPTCEKITCRKPDVSHGEMVSGFGPIYNYKDTIVFKCQKGFVLRGSSVIHCDADSKWNPSPPACEPNSCINLPDIPHASWETYPRPTKEDVYVVGTVLRYRCHPGYKPTTDEPTTVICQKNLRWTPYQGCEALCCPEPKLNNGEITQHRKSRPANHCVYFYGDEISFSCHETSRFSAICQGDGTWSPRTPSCGDICNFPPKIAHGHYKQSSSYSFFKEEIIYECDKGYILVGQAKLSCSYSHWSAPAPQCKALCRKPELVNGRLSVDKDQYVEPENVTIQCDSGYGVVGPQSITCSGNRTWYPEVPKCEWETPEGCEQVLTGKRLMQCLPNPEDVKMALEVYKLSLEIEQLELQRDSARQSTLDKEL

SEQ ID NO: 19448 - protein, 118 aa, Homo sapiens
  Payload ID: 3888
  Gene Symbol: C4BPA
  Gene Name: complement component 4 binding protein, alpha
  ENSP ID: ENSP00000395968
MHPPKTPSGALHRKRKMAAWPFSRLWKVSDPILFQMTLIAALLPAVLGNCGPPPTLSFAAPMDITLTETRFKTGTTLKYTCLPGYVRSHSTQTLTCNSDGEWVYNTFCILDTGFHHIG

SEQ ID NO: 19449 - protein, 152 aa, Homo sapiens
  Payload ID: 3888
  Gene Symbol: C4BPA
  Gene Name: complement component 4 binding protein, alpha
  ENSP ID: ENSP00000403386
MHPPKTPSGALHRKRKMAAWPFSRLWKVSDPILFQMTLIAALLPAVLGNCGPPPTLSFAAPMDITLTETRFKTGTTLKYTCLPGYVRSHSTQTLTCNSDGEWVYNTFCIYKRCRHPGELRNGQVEIKTDLSFGSQIEFSCSEGFFLIGSTTS

SEQ ID NO: 19450 - protein, 252 aa, Homo sapiens
  Payload ID: 3889
  Gene Symbol: C4BPB
  Gene Name: complement component 4 binding protein, beta
  Uniprot ID: P20851
  ENSP ID: ENSP00000243611
MFFWCACCLMVAWRVSASDAEHCPELPPVDNSIFVAKEVEGQILGTYVCIKGYHLVGKKTLFCNASKEWDNTTTECRLGHCPDPVLVNGEFSSSGPVNVSDKITFMCNDHYILKGSNRSQCLEDHTWAPPFPICKSRDCDPPGNPVHGYFEGNNFTLGSTISYYCEDRYYLVGVQEQQCVDGEWSSALPVCKLIQEAPKPECEKALLAFQESKNLCEAMENFMQQLKESGMTMEELKYSLELKKAELKAKLL

SEQ ID NO: 19451 - protein, 251 aa, Homo sapiens
  Payload ID: 3889
  Gene Symbol: C4BPB
  Gene Name: complement component 4 binding protein, beta
  Uniprot ID: P20851
  ENSP ID: ENSP00000356043
MFFWCACCLMVAWRVSASDEHCPELPPVDNSIFVAKEVEGQILGTYVCIKGYHLVGKKTLFCNASKEWDNTTTECRLGHCPDPVLVNGEFSSSGPVNVSDKITFMCNDHYILKGSNRSQCLEDHTWAPPFPICKSRDCDPPGNPVHGYFEGNNFTLGSTISYYCEDRYYLVGVQEQQCVDGEWSSALPVCKLIQEAPKPECEKALLAFQESKNLCEAMENFMQQLKESGMTMEELKYSLELKKAELKAKLL

SEQ ID NO: 19452 - protein, 252 aa, Homo sapiens; identical to SEQ ID NO: 19450
  Payload ID: 3889
  Gene Symbol: C4BPB
  Gene Name: complement component 4 binding protein, beta
  Uniprot ID: P20851
  ENSP ID: ENSP00000356045

SEQ ID NO: 19453 - protein, 252 aa, Homo sapiens; identical to SEQ ID NO: 19450
  Payload ID: 3889
  Gene Symbol: C4BPB
  Gene Name: complement component 4 binding protein, beta
  Uniprot ID: P20851
  ENSP ID: ENSP00000375790

SEQ ID NO: 19454 - protein, 181 aa, Homo sapiens
  Payload ID: 3889
  Gene Symbol: C4BPB
  Gene Name: complement component 4 binding protein, beta
  ENSP ID: ENSP00000392237
MFFWCACCLMVAWRVSASDAEHCPELPPVDNSIFVAKEVEGQILGTYVCIKGYHLVGKKTLFCNASKEWDNTTTECRLGHCPDPVLVNGEFSSSGPVNVSDKITFMCNDHYILKGSNRSQCLEDHTWAPPFPICKSRDCDPPGNPVHGYFEGNNFTLGSTISYYCEDRYYLVGVQEQQCVD

SEQ ID NO: 19455 - protein, 1744 aa, Homo sapiens
  Payload ID: 3890
  Gene Symbol: C4A
  Gene Name: complement component 4A (Rodgers blood group)
  ENSP ID: ENSP00000364444
MRLLWGLIWASSFFTLSLQKPRLLLFSPSVVHLGVPLSVGVQLQDVPRGQVVKGSVFLRNPSRNNVPCSPKVDFTLSSERDFALLSLQVPLKDAKSCGLHQLLRGPEVQLVAHSPWLKDSLSRTTNIQGINLLFSSRRGHLFLQTDQPIYNPGQRVRYRVFALDQKMRPSTDTITVMVENSHGLRVRKKEVYMPSSIFQDDFVIPDISEPGTWKISARFSDGLESNSSTQFEVKKYVLPNFEVKITPGKPYILTVPGHLDEMQLDIQARYIYGKPVQGVAYVRFGLLDEDGKKTFFRGLESQTKLVNGQSHISLSKAEFQDALEKLNMGITDLQGLRLYVAAAIIEYPGGEMEEAELTSWYFVSSPFSLDLSKTKRHLVPGAPFLLQALVREMSGSPASGIPVKVSATVSSPGSVPEVQDIQQNTDGSGQVSIPIIIPQTISELQLSVSAGSPHPAIARLTVAAPPSGGPGFLSIEWPDSRPPRVGDTLNLNLRAVGSGATFSHYYYMILSRGQIVFMNREPKRTLTSVSVFVDHHLAPSFYFVAFYYHGDHPVANSLRVDVQAGACEGKLELSVDGAKQYRNGESVKLHLETDSLALVALGALDTALYAAGSKSHKPLNMGKVFEAMNSYDLGCGPGGGDSALQVFQAAGLAFSDGDQWTLSRKRLSCPKEKTTRKKRNVNFQKAINEKLGQYASPTAKRCCQDGVTRLPMMRSCEQRAARVQQPDCREPFLSCCQFAESLRKKSRDKGQAGLQRALEILQEEDLIDEDDIPVRSFFPENWLWRVETVDRFQILTLWLPDSLTTWEIHGLSLSKTKGLCVATPVQLRVFREFHLHLRLPMSVRRFEQLELRPVLYNYLDKNLTVSVHVSPVEGLCLAGGGGLAQQVLVPAGSARPVAFSVVPTAAAAVSLKVVARGSFEFPVGDAVSKVLQIEKEGAIHREELVYELNPLDHRGRTLEIPGNSDPNMIPDGDFNSYVRVTASDPLDTLGSEGALSPGGVASLLRLPRGCGEQTMIYLAPTLAASRYLDKTEQWSTLPPETKDHAVDLIQKGYMRIQQFRKADGSYAAWLSRDSSTWLTAFVLKVLSLAQEQVGGSPEKLQETSNWLLSQQQADGSFQDPCPVLDRSMQGGLVGNDETVALTAFVTIALHHGLAVFQDEGAEPLKQRVEASISKANSFLGEKASAGLLGAHAAAITAYALTLTKAPVDLLGVAHNNLMAMAQETGDNLYWGSVTGSQSNAVSPTPAPRNPSDPMPQAPALWIETTAYALLHLLLHEGKAEMADQAAAWLTRQGSFQGGFRSTQDTVIALDALSAYWIASHTTEERGLNVTLSSTGRNGFKSHALQLNNRQIRGLEEELQFSLGSKINVKVGGNSKGTLKVLRTYNVLDMKNTTCQDLQIEVTVKGHVEYTMEANEDYEDYEYDELPAKDDPDAPLQPVTPLQLFEGRRNRRRREAPKVVEEQESRVHYTVCIWRNGKVGLSGMAIADVTLLSGFHALRADLEKLTSLSDRYVSHFETEGPHVLLYFDSVPTSRECVGFEAVQEVPVGLVQPASATLYDYYNPERRCSVFYGAPSKSRLLATLCSAEVCQCAEGKCPRQRRALERGLQDEDGYRMKFACYYPRVEYGFQVKVLREDSRAAFRLFETKITQVLHFTKDVKAAANQMRNFLVRASCRLRLEPGKEYLIMGLDGATYDLEGHPQYLLDSNSWIEEMPSERLCRSTRQRAACAQLNDFLQEYGTQGCQV

SEQ ID NO: 19456 - protein, 1744 aa, Homo sapiens [sequence omitted]

SEQ ID NO: 19457 - protein, 1744 aa, Homo sapiens
  Payload ID: 3890
  Gene Symbol: C4A
  Gene Name: complement component 4A (Rodgers blood group)
  Uniprot ID: P0C0L4
  ENSP ID: ENSP00000388662
MRLLWGLIWASSFFTLSLQKPRLLLFSPSVVHLGVPLSVGVQLQDVPRGQVVKGSVFLRNPSRNNVPCSPKVDFTLSSERDFALLSLQVPLKDAKSCGLHQLLRGPEVQLVAHSPWLKDSLSRTTNIQGINLLFSSRRGHLFLQTDQPIYNPGQRVRYRVFALDQKMRPSTDTITVMVENSHGLRVRKKEVYMPSSIFQDDFVIPDISEPGTWKISARFSDGLESNSSTQFEVKKYVLPNFEVKITPGKPYILTVPGHLDEMQLDIQARYIYGKPVQGVAYVRFGLLDEDGKKTFFRGLESQTKLVNGQSHISLSKAEFQDALEKLNMGITDLQGLRLYVAAAIIEYPGGEMEEAELTSWYFVSSPFSLDLSKTKRHLVPGAPFLLQALVREMSGSPASGIPVKVSATVSSPGSVPEVQDIQQNTDGSGQVSIPIIIPQTISELQLSVSAGSPHPAIARLTVAAPPSGGPGFLSIERPDSRPPRVGDTLNLNLRAVGSGATFSHYYYMILSRGQIVFMNREPKRTLTSVSVFVDHHLAPSFYFVAFYYHGDHPVANSLRVDVQAGACEGKLELSVDGAKQYRNGESVKLHLETDSLALVALGALDTALYAAGSKSHKPLNMGKVFEAMNSYDLGCGPGGGDSALQVFQAAGLAFSDGDQWTLSRKRLSCPKEKTTRKKRNVNFQKAINEKLGQYASPTAKRCCQDGVTRLPMMRSCEQRAARVQQPDCREPFLSCCQFAESLRKKSRDKGQAGLQRALEILQEEDLIDEDDIPVRSFFPENWLWRVETVDRFQILTLWLPDSLTTWEIHGLSLSKTKGLCVATPVQLRVFREFHLHLRLPMSVRRFEQLELRPVLYNYLDKNLTVSVHVSPVEGLCLAGGGGLAQQVLVPAGSARPVAFSVVPTAAAAVSLKVVARGSFEFPVGDAVSKVLQIEKEGAIHREELVYELNPLDHRGRTLEIPGNSDPNMIPDGDFNSYVRVTASDPLDTLGSEGALSPGGVASLLRLPRGCGEQTMIYLAPTLAASRYLDKTEQWSTLPPETKDHAVDLIQKGYMRIQQFRKADGSYAAWLSRDSSTWLTAFVLKVLSLAQEQVGGSPEKLQETSNWLLSQQQADGSFQDPCPVLDRSMQGGLVGNDETVALTAFVTIALHHGLAVFQDEGAEPLKQRVEASISKANSFLGEKASAGLLGAHAAAITAYALTLTKAPVDLLGVAHNNLMAMAQETGDNLYWGSVTGSQSNAVSPTPAPRNPSDPMPQAPALWIETTAYALLHLLLHEGKAEMADQAAAWLTRQGSFQGGFRSTQDTVIALDALSAYWIASHTTEERGLNVTLSSTGRNGFKSHALQLNNRQIRGLEEELQFSLGSKINVKVGGNSKGTLKVLRTYNVLDMKNTTCQDLQIEVTVKGHVEYTMEANEDYEDYEYDELPAKDDPDAPLQPVTPLQLFEGRRNRRRREAPKVVEEQESRVHYTVCIWRNGKVGLSGMAIADVTLLSGFHALRADLEKLTSLSDRYVSHFETEGPHVLLYFDSVPTSRECVGFEAVQEVPVGLVQPASATLYDYYNPERRCSVFYGAPSKSRLLATLCSAEVCQCAEGKCPRQRRALERGLQDEDGYRMKFACYYPRVEYGFQVKVLREDSRAAFRLFETKITQVLHFTKDVKAAANQMRNFLVRASCRLRLEPGKEYLIMGLDGATYDLEGHPQYLLDSNSWIEEMPSERLCRSTRQRAACAQLNDFLQEYGTQGCQV

SEQ ID NO: 19458 - protein, 1744 aa, Homo sapiens
  Payload ID: 3890
  Gene Symbol: C4A
  Gene Name: complement component 4A (Rodgers blood group)
  Uniprot ID: P0C0L4
  ENSP ID: ENSP00000396688
MRLLWGLIWASSFFTLSLQKPRLLLFSPSVVHLGVPLSVGVQLQDVPRGQVVKGSVFLRNPSRNNVPCSPKVDFTLSSERDFALLSLQVPLKDAKSCGLHQLLRGPEVQLVAHSPWLKDSLSRTTNIQGINLLFSSRRGHLFLQTDQPIYNPGQRVRYRVFALDQKMRPSTDTITVMVENSHGLRVRKKEVYMPSSIFQDDFVIPDISEPGTWKISARFSDGLESNSSTQFEVKKYVLPNFEVKITPGKPYILTVPGHLDEMQLDIQARYIYGKPVQGVAYVRFGLLDEDGKKTFFRGLESQTKLVNGQSHISLSKAEFQDALEKLNMGITDLQGLRLYVAAAIIESPGGEMEEAELTSWYFVSSPFSLDLSKTKRHLVPGAPFLLQALVREMSGSPASGIPVKVSATVSSPGSVPEVQDIQQNTDGSGQVSIPIIIPQTISELQLSVSAGSPHPAIARLTVAAPPSGGPGFLSIERPDSRPPRVGDTLNLNLRAVGSGATFSHYYYMILSRGQIVFMNREPKRTLTSVSVFVDHHLAPSFYFVAFYYHGDHPVANSLRVDVQAGACEGKLELSVDGAKQYRNGESVKLHLETDSLALVALGALDTALYAAGSKSHKPLNMGKVFEAMNSYDLGCGPGGGDSALQVFQAAGLAFSDGDQWTLSRKRLSCPKEKTTRKKRNVNFQKAINEKLGQYASPTAKRCCQDGVTRLPMMRSCEQRAARVQQPDCREPFLSCCQFAESLRKKSRDKGQAGLQRALEILQEEDLIDEDDIPVRSFFPENWLWRVETVDRFQILTLWLPDSLTTWEIHGLSLSKTKGLCVATPVQLRVFREFHLHLRLPMSVRRFEQLELRPVLYNYLDKNLTVSVHVSPVEGLCLAGGGGLAQQVLVPAGSARPVAFSVVPTAAAAVSLKVVARGSFEFPVGDAVSKVLQIEKEGAIHREELVYELNPLDHRGRTLEIPGNSDPNMIPDGDFNSYVRVTASDPLDTLGSEGALSPGGVASLLRLPRGCGEQTMIYLAPTLAASRYLDKTEQWSTLPPETKDHAVDLIQKGYMRIQQFRKADGSYAAWLSRDSSTWLTAFVLKVLSLAQEQVGGSPEKLQETSNWLLSQQQADGSFQDPCPVLDRSMQGGLVGNDETVALTAFVTIALHHGLAVFQDEGAEPLKQRVEASISKANSFLGEKASAGLLGAHAAAITAYALTLTKAPVDLLGVAHNNLMAMAQETGDNLYWGSVTGSQSNAVSPTPAPRNPSDPMPQAPALWIETTAYALLHLLLHEGKAEMADQASAWLTRQGSFQGGFRSTQDTVIALDALSAYWIASHTTEERGLNVTLSSTGRNGFKSHALQLNNRQIRGLEEELQFSLGSKINVKVGGNSKGTLKVLRTYNVLDMKNTTCQDLQIEVTVKGHVEYTMEANEDYEDYEYDELPAKDDPDAPLQPVTPLQLFEGRRNRRRREAPKVVEEQESRVHYTVCIWRNGKVGLSGMAIADVTLLSGFHALRADLEKLTSLSDRYVSHFETEGPHVLLYFDSVPTSRECVGFEAVQEVPVGLVQPASATLYDYYNPERRCSVFYGAPSKSRLLATLCSAEVCQCAEGKCPRQRRALERGLQDEDGYRMKFACYYPRVEYGFQVKVLREDSRAAFRLFETKITQVLHFTKDVKAAANQMRNFLVRASCRLRLEPGKEYLIMGLDGATYDLEGHPQYLLDSNSWIEEMPSERLCRSTRQRAACAQLNDFLQEYGTQGCQV

SEQ ID NO: 19459 - protein, 1698 aa, Homo sapiens
  Payload ID: 3890
  Gene Symbol: C4A
  Gene Name: complement component 4A (Rodgers blood group)
  Uniprot ID: P0C0L4
  ENSP ID: ENSP00000420212
MRLLWGLIWASSFFTLSLQKPRLLLFSPSVVHLGVPLSVGVQLQDVPRGQVVKGSVFLRNPSRNNVPCSPKVDFTLSSERDFALLSLQVPLKDAKSCGLHQLLRGPEVQLVAHSPWLKDSLSRTTNIQGINLLFSSRRGHLFLQTDQPIYNPGQRVRYRVFALDQKMRPSTDTITVMVENSHGLRVRKKEVYMPSSIFQDDFVIPDISEPGTWKISARFSDGLESNSSTQFEVKKYVLPNFEVKITPGKPYILTVPGHLDEMQLDIQARYIYGKPVQGVAYVRFGLLDEDGKKTFFRGLESQTKLVNGQSHISLSKAEFQDALEKLNMGITDLQGLRLYVAAAIIESPGGEMEEAELTSWYFVSSPFSLDLSKTKRHLVPGAPFLLQALVREMSGSPASGIPVKVSATVSSPGSVPEVQDIQQNTDGSGQVSIPIIIPQTISELQLSVSAGSPHPAIARLTVAAPPSGGPGFLSIERPDSRPPRVGDTLNLNLRAVGSGATFSHYYYMILSRGQIVFMNREPKRTLTSVSVFVDHHLAPSFYFVAFYYHGDHPVANSLRVDVQAGACEGKLELSVDGAKQYRNGESVKLHLETDSLALVALGALDTALYAAGSKSHKPLNMGKVFEAMNSYDLGCGPGGGDSALQVFQAAGLAFSDGDQWTLSRKRLSCPKEKTTRKKRNVNFQKAINEKLGQYASPTAKRCCQDGVTRLPMMRSCEQRAARVQQPDCREPFLSCCQFAESLRKKSRDKGQAGLQRALEILQEEDLIDEDDIPVRSFFPENWLWRVETVDRFQILTLWLPDSLTTWEIHGLSLSKTKGLCVATPVQLRVFREFHLHLRLPMSVRRFEQLELRPVLYNYLDKNLTVSVHVSPVEGLCLAGGGGLAQQVLVPAGSARPVAFSVVPTAAAAVSLKVVARGSFEFPVGDAVSKVLQIEKEGAIHREELVYELNPLDHRGRTLEIPGNSDPNMIPDGDFNSYVRVTASDPLDTLGSEGALSPGGVASLLRLPRGCGEQTMIYLAPTLAASRYLDKTEQWSTLPPETKDHAVDLIQKGYMRIQQFRKADGSYAAWLSRDSSTWLTAFVLKVLSLAQEQVGGSPEKLQETSNWLLSQQQADGSFQDPCPVLDRSMQGGLVGNDETVALTAFVTIALHHGLAVFQDEGAEPLKQRVEASISKANSFLGEKASAGLLGAHAAAITAYALTLTKAPVDLLGVAHNNLMAMAQETGDNLYWGSVTGSQSNAVSPTPAPRNPSDPMPQAPALWIETTAYALLHLLLHEGKAEMADQASAWLTRQGSFQGGFRSTQDTVIALDALSAYWIASHTTEERGLNVTLSSTGRNGFKSHALQLNNRQIRGLEEELQFSLGSKINVKVGGNSKGTLKVLRTYNVLDMKNTTCQDLQIEVTVKGHVEYTMEANEDYEDYEYDELPAKDDPDAPLQPVTPLQLFEGRRNRRRREAPKLTSLSDRYVSHFETEGPHVLLYFDSVPTSRECVGFEAVQEVPVGLVQPASATLYDYYNPERRCSVFYGAPSKSRLLATLCSAEVCQCAEGKCPRQRRALERGLQDEDGYRMKFACYYPRVEYGFQVKVLREDSRAAFRLFETKITQVLHFTKDVKAAANQMRNFLVRASCRLRLEPGKEYLIMGLDGATYDLEGHPQYLLDSNSWIEEMPSERLCRSTRQRAACAQLNDFLQEYGTQGCQV

SEQ ID NO: 19460 - protein, 1698 aa, Homo sapiens [sequence omitted]

SEQ ID NO: 19461 - protein, 1698 aa, Homo sapiens
  Payload ID: 3890
  Gene Symbol: C4A
  Gene Name: complement component 4A (Rodgers blood group)
  ENSP ID: ENSP00000448276
MRLLWGLIWASSFFTLSLQKPRLLLFSPSVVHLGVPLSVGVQLQDVPRGQVVKGSVFLRNPSRNNVPCSPKVDFTLSSERDFALLSLQVPLKDAKSCGLHQLLRGPEVQLVAHSPWLKDSLSRTTNIQGINLLFSSRRGHLFLQTDQPIYNPGQRVRYRVFALDQKMRPSTDTITVMVENSHGLRVRKKEVYMPSSIFQDDFVIPDISEPGTWKISARFSDGLESNSSTQFEVKKYVLPNFEVKITPGKPYILTVPGHLDEMQLDIQARYIYGKPVQGVAYVRFGLLDEDGKKTFFRGLESQTKLVNGQSHISLSKAEFQDALEKLNMGITDLQGLRLYVAAAIIESPGGEMEEAELTSWYFVSSPFSLDLSKTKRHLVPGAPFLLQALVREMSGSPASGIPVKVSATVSSPGSVPEVQDIQQNTDGSGQVSIPIIIPQTISELQLSVSAGSPHPAIARLTVAAPPSGGPGFLSIERPDSRPPRVGDTLNLNLRAVGSGATFSHYYYMILSRGQIVFMNREPKRTLTSVSVFVDHHLAPSFYFVAFYYHGDHPVANSLRVDVQAGACEGKLELSVDGAKQYRNGESVKLHLETDSLALVALGALDTALYAAGSKSHKPLNMGKVFEAMNSYDLGCGPGGGDSALQVFQAAGLAFSDGDQWTLSRKRLSCPKEKTTRKKRNVNFQKAINEKLGQYASPTAKRCCQDGVTRLPMMRSCEQRAARVQQPDCREPFLSCCQFAESLRKKSRDKGQAGLQRALEILQEEDLIDEDDIPVRSFFPENWLWRVETVDRFQILTLWLPDSLTTWEIHGLSLSKTKGLCVATPVQLRVFREFHLHLRLPMSVRRFEQLELRPVLYNYLDKNLTVSVHVSPVEGLCLAGGGGLAQQVLVPAGSARPVAFSVVPTAAAAVSLKVVARGSFEFPVGDAVSKVLQIEKEGAIHREELVYELNPLDHRGRTLEIPGNSDPNMIPDGDFNSYVRVTASDPLDTLGSEGALSPGGVASLLRLPRGCGEQTMIYLAPTLAASRYLDKTEQWSTLPPETKDHAVDLIQKGYMRIQQFRKADGSYAAWLSRDSSTWLTAFVLKVLSLAQEQVGGSPEKLQETSNWLLSQQQADGSFQDPCPVLDRSMQGGLVGNDETVALTAFVTIALHHGLAVFQDEGAEPLKQRVEASISKASSFLGEKASAGLLGAHAAAITAYALTLTKAPVDLLGVAHNNLMAMAQETGDNLYWGSVTGSQSNAVSPTPAPRNPSDPMPQAPALWIETTAYALLHLLLHEGKAEMADQAAAWLTRQGSFQGGFRSTQDTVIALDALSAYWIASHTTEERGLNVTLSSTGRNGFKSHALQLNNRQIRGLEEELQFSLGSKINVKVGGNSKGTLKVLRTYNVLDMKNTTCQDLQIEVTVKGHVEYTMEANEDYEDYEYDELPAKDDPDAPLQPVTPLQLFEGRRNRRRREAPKLTSLSDRYVSHFETEGPHVLLYFDSVPTSRECVGFEAVQEVPVGLVQPASATLYDYYNPERRCSVFYGAPSKSRLLATLCSAEVCQCAEGKCPRQRRALERGLQDEDGYRMKFACYYPRVEYGFQVKVLREDSRAAFRLFETKITQVLHFTKDVKAAANQMRNFLVRASCRLRLEPGKEYLIMGLDGATYDLEGHPQYLLDSNSWIEEMPSERLCRSTRQRAACAQLNDFLQEYGTQGCQV

SEQ ID NO: 19462 - protein, 1698 aa, Homo sapiens
  Payload ID: 3890
  Gene Symbol: C4A
  Gene Name: complement component 4A (Rodgers blood group)
  ENSP ID: ENSP00000449828
MRLLWGLIWASSFFTLSLQKPRLLLFSPSVVHLGVPLSVGVQLQDVPRGQVVKGSVFLRNPSRNNVPCSPKVDFTLSSERDFALLSLQVPLKDAKSCGLHQLLRGPEVQLVAHSPWLKDSLSRTTNIQGINLLFSSRRGHLFLQTDQPIYNPGQRVRYRVFALDQKMRPSTDTITVMVENSHGLRVRKKEVYMPSSIFQDDFVIPDISEPGTWKISARFSDGLESNSSTQFEVKKYVLPNFEVKITPGKPYILTVPGHLDEMQLDIQARYIYGKPVQGVAYVRFGLLDEDGKKTFFRGLESQTKLVNGQSHISLSKAEFQDALEKLNMGITDLQGLRLYVAAAIIEYPGGEMEEAELTSWYFVSSPFSLDLSKTKRHLVPGAPFLLQALVREMSGSPASGIPVKVSATVSSPGSVPEVQDIQQNTDGSGQVSIPIIIPQTISELQLSVSAGSPHPAIARLTVAAPPSGGPGFLSIEWPDSRPPRVGDTLNLNLRAVGSGATFSHYYYMILSRGQIVFMNREPKRTLTSVSVFVDHHLAPSFYFVAFYYHGDHPVANSLRVDVQAGACEGKLELSVDGAKQYRNGESVKLHLETDSLALVALGALDTALYAAGSKSHKPLNMGKVFEAMNSYDLGCGPGGGDSALQVFQAAGLAFSDGDQWTLSRKRLSCPKEKTTRKKRNVNFQKAINEKLGQYASPTAKRCCQDGVTRLPMMRSCEQRAARVQQPDCREPFLSCCQFAESLRKKSRDKGQAGLQRALEILQEEDLIDEDDIPVRSFFPENWLWRVETVDRFQILTLWLPDSLTTWEIHGLSLSKTKGLCVATPVQLRVFREFHLHLRLPMSVRRFEQLELRPVLYNYLDKNLTVSVHVSPVEGLCLAGGGGLAQQVLVPAGSARPVAFSVVPTAAAAVSLKVVARGSFEFPVGDAVSKVLQIEKEGAIHREELVYELNPLDHRGRTLEIPGNSDPNMIPDGDFNSYVRVTASDPLDTLGSEGALSPGGVASLLRLPRGCGEQTMIYLAPTLAASRYLDKTEQWSTLPPETKDHAVDLIQKGYMRIQQFRKADGSYAAWLSRDSSTWLTAFVLKVLSLAQEQVGGSPEKLQETSNWLLSQQQADGSFQDPCPVLDRSMQGGLVGNDETVALTAFVTIALHHGLAVFQDEGAEPLKQRVEASISKANSFLGEKASAGLLGAHAAAITAYALTLTKAPVDLLGVAHNNLMAMAQETGDNLYWGSVTGSQSNAVSPTPAPRNPSDPMPQAPALWIETTAYALLHLLLHEGKAEMADQAAAWLTRQGSFQGGFRSTQDTVIALDALSAYWIASHTTEERGLNVTLSSTGRNGFKSHALQLNNRQIRGLEEELQFSLGSKINVKVGGNSKGTLKVLRTYNVLDMKNTTCQDLQIEVTVKGHVEYTMEANEDYEDYEYDELPAKDDPDAPLQPVTPLQLFEGRRNRRRREAPKLTSLSDRYVSHFETEGPHVLLYFDSVPTSRECVGFEAVQEVPVGLVQPASATLYDYYNPERRCSVFYGAPSKSRLLATLCSAEVCQCAEGKCPRQRRALERGLQDEDGYRMKFACYYPRVEYGFQVKVLREDSRAAFRLFETKITQVLHFTKDVKAAANQMRNFLVRASCRLRLEPGKEYLIMGLDGATYDLEGHPQYLLDSNSWIEEMPSERLCRSTRQRAACAQLNDFLQEYGTQGCQV

SEQ ID NO: 19463 - protein, 1744 aa, Homo sapiens; identical to SEQ ID NO: 19455
  Payload ID: 3890
  Gene Symbol: C4A
  Gene Name: complement component 4A (Rodgers blood group)
  ENSP ID: ENSP00000484103

SEQ ID NO: 19464 - protein, 1744 aa, Homo sapiens
  Payload ID: 3891
  Gene Symbol: C4B
  Gene Name: complement component 4B (Chido blood group)
  Uniprot ID: P0C0L5
  ENSP ID: ENSP00000364321
MRLLWGLIWASSFFTLSLQKPRLLLFSPSVVHLGVPLSVGVQLQDVPRGQVVKGSVFLRNPSRNNVPCSPKVDFTLSSERDFALLSLQVPLKDAKSCGLHQLLRGPEVQLVAHSPWLKDSLSRTTNIQGINLLFSSRRGHLFLQTDQPIYNPGQRVRYRVFALDQKMRPSTDTITVMVENSHGLRVRKKEVYMPSSIFQDDFVIPDISEPGTWKISARFSDGLESNSSTQFEVKKYVLPNFEVKITPGKPYILTVPGHLDEMQLDIQARYIYGKPVQGVAYVRFGLLDEDGKKTFFRGLESQTKLVNGQSHISLSKAEFQDALEKLNMGITDLQGLRLYVAAAIIEYPGGEMEEAELTSWYFVSSPFSLDLSKTKRHLVPGAPFLLQALVREMSGSPASGIPVKVSATVSSPGSVPEVQDIQQNTDGSGQVSIPIIIPQTISELQLSVSAGSPHPAIARLTVAAPPSGGPGFLSIERPDSRPPRVGDTLNLNLRAVGSGATFSHYYYMILSRGQIVFMNREPKRTLTSVSVFVDHHLAPSFYFVAFYYHGDHPVANSLRVDVQAGACEGKLELSVDGAKQYRNGESVKLHLETDSLALVALGALDTALYAAGSKSHKPLNMGKVFEAMNSYDLGCGPGGGDSALQVFQAAGLAFSDGDQWTLSRKRLSCPKEKTTRKKRNVNFQKAINEKLGQYASPTAKRCCQDGVTRLPMMRSCEQRAARVQQPDCREPFLSCCQFAESLRKKSRDKGQAGLQRALEILQEEDLIDEDDIPVRSFFPENWLWRVETVDRFQILTLWLPDSLTTWEIHGLSLSKTKGLCVATPVQLRVFREFHLHLRLPMSVRRFEQLELRPVLYNYLDKNLTVSVHVSPVEGLCLAGGGGLAQQVLVPAGSARPVAFSVVPTAAAAVSLKVVARGSFEFPVGDAVSKVLQIEKEGAIHREELVYELNPLDHRGRTLEIPGNSDPNMIPDGDFNSYVRVTASDPLDTLGSEGALSPGGVASLLRLPRGCGEQTMIYLAPTLAASRYLDKTEQWSTLPPETKDHAVDLIQKGYMRIQQFRKADGSYAAWLSRGSSTWLTAFVLKVLSLAQEQVGGSPEKLQETSNWLLSQQQADGSFQDLSPVIHRSMQGGLVGNDETVALTAFVTIALHHGLAVFQDEGAEPLKQRVEASISKASSFLGEKASAGLLGAHAAAITAYALTLTKAPADLRGVAHNNLMAMAQETGDNLYWGSVTGSQSNAVSPTPAPRNPSDPMPQAPALWIETTAYALLHLLLHEGKAEMADQAAAWLTRQGSFQGGFRSTQDTVIALDALSAYWIASHTTEERGLNVTLSSTGRNGFKSHALQLNNRQIRGLEEELQFSLGSKINVKVGGNSKGTLKVLRTYNVLDMKNTTCQDLQIEVTVKGHVEYTMEANEDYEDYEYDELPAKDDPDAPLQPVTPLQLFEGRRNRRRREAPKVVEEQESRVHYTVCIWRNGKVGLSGMAIADVTLLSGFHALRADLEKLTSLSDRYVSHFETEGPHVLLYFDSVPTSRECVGFEAVQEVPVGLVQPASATLYDYYNPERRCSVFYGAPSKSRLLATLCSAEVCQCAEGKCPRQRRALERGLQDEDGYRMKFACYYPRVEYGFQVKVLREDSRAAFRLFETKITQVLHFTKDVKAAANQMRNFLVRASCRLRLEPGKEYLIMGLDGATYDLEGHPQYLLDSNSWIEEMPSERLCRSTRQRAACAQLNDFLQEYGTQGCQV

SEQ ID NO: 19465 - protein, 1698 aa, Homo sapiens
  Payload ID: 3891
  Gene Symbol: C4B
  Gene Name: complement component 4B (Chido blood group)
  ENSP ID: ENSP00000391933
MRLLWGLIWASSFFTLSLQKPRLLLFSPSVVHLGVPLSVGVQLQDVPRGQVVKGSVFLRNPSRNNVPCSPKVDFTLSSERDFALLSLQVPLKDAKSCGLHQLLRGPEVQLVAHSPWLKDSLSRTTNIQGINLLFSSRRGHLFLQTDQPIYNPGQRVRYRVFALDQKMRPSTDTITVMVENSHGLRVRKKEVYMPSSIFQDDFVIPDISEPGTWKISARFSDGLESNSSTQFEVKKYVLPNFEVKITPGKPYILTVPGHLDEMQLDIQARYIYGKPVQGVAYVRFGLLDEDGKKTFFRGLESQTKLVNGQSHISLSKAEFQDALEKLNMGITDLQGLRLYVAAAIIESPGGEMEEAELTSWYFVSSPFSLDLSKTKRHLVPGAPFLLQALVREMSGSPASGIPVKVSATVSSPGSVPEVQDIQQNTDGSGQVSIPIIIPQTISELQLSVSAGSPHPAIARLTVAAPPSGGPGFLSIERPDSRPPRVGDTLNLNLRAVGSGATFSHYYYMILSRGQIVFMNREPKRTLTSVSVFVDHHLAPSFYFVAFYYHGDHPVANSLRVDVQAGACEGKLELSVDGAKQYRNGESVKLHLETDSLALVALGALDTALYAAGSKSHKPLNMGKVFEAMNSYDLGCGPGGGDSALQVFQAAGLAFSDGDQWTLSRKRLSCPKEKTTRKKRNVNFQKAINEKLGQYASPTAKRCCQDGVTRLPMMRSCEQRAARVQQPDCREPFLSCCQFAESLRKKSRDKGQAGLQRALEILQEEDLIDEDDIPVRSFFPENWLWRVETVDRFQILTLWLPDSLTTWEIHGLSLSKTKGLCVATPVQLRVFREFHLHLRLPMSVRRFEQLELRPVLYNYLDKNLTVSVHVSPVEGLCLAGGGGLAQQVLVPAGSARPVAFSVVPTAATAVSLKVVARGSFEFPVGDAVSKVLQIEKEGAIHREELVYELNPLDHRGRTLEIPGNSDPNMIPDGDFNSYVRVTASDPLDTLGSEGALSPGGVASLLRLPRGCGEQTMIYLAPTLAASRYLDKTEQWSTLPPETKDHAVDLIQKGYMRIQQFRKADGSYAAWLSRGSSTWLTAFVLKVLSLAQEQVGGSPEKLQETSNWLLSQQQADGSFQDLSPVIHRSMQGGLVGNDETVALTAFVTIALHHGLAVFQDEGAEPLKQRVEASISKASSFLGEKASAGLLGAHAAAITAYALTLTKAPADLRGVAHNNLMAMAQETGDNLYWGSVTGSQSNAVSPTPAPRNPSDPMPQAPALWIETTAYALLHLLLHEGKAEMADQAAAWLTRQGSFQGGFRSTQDTVIALDALSAYWIASHTTEERGLNVTLSSTGRNGFKSHALQLNNRQIRGLEEELQFSLGSKINVKVGGNSKGTLKVLRTYNVLDMKNTTCQDLQIEVTVKGHVEYTMEANEDYEDYEYDELPAKDDPDAPLQPVTPLQLFEGRRNRRRREAPKLTSLSDRYVSHFETEGPHVLLYFDSVPTSRECVGFEAVQEVPVGLVQPASATLYDYYNPERRCSVFYGAPSKSRLLATLCSAEVCQCAEGKCPRQRRALERGLQDEDGYRMKFACYYPRVEYGFQVKVLREDSRAAFRLFETKITQVLHFTKDVKAAANQMRNFLVRASCRLRLEPGKEYLIMGLDGATYDLEGHPQYLLDSNSWIEEMPSERLCRSTRQRAACAQLNDFLQEYGTQGCQV

SEQ ID NO: 19466 - protein, 1744 aa, Homo sapiens
  Payload ID: 3891
  Gene Symbol: C4B
  Gene Name: complement component 4B (Chido blood group)
  Uniprot ID: P0C0L5
  ENSP ID: ENSP00000407942
MRLLWGLIWASSFFTLSLQKPRLLLFSPSVVHLGVPLSVGVQLQDVPRGQVVKGSVFLRNPSRNNVPCSPKVDFTLSSERDFALLSLQVPLKDAKSCGLHQLLRGPEVQLVAHSPWLKDSLSRTTNIQGINLLFSSRRGHLFLQTDQPIYNPGQRVRYRVFALDQKMRPSTDTITVMVENSHGLRVRKKEVYMPSSIFQDDFVIPDISEPGTWKISARFSDGLESNSSTQFEVKKYVLPNFEVKITPGKPYILTVPGHLDEMQLDIQARYIYGKPVQGVAYVRFGLLDEDGKKTFFRGLESQTKLVNGQSHISLSKAEFQDALEKLNMGITDLQGLRLYVAAAIIESPGGEMEEAELTSWYFVSSPFSLDLSKTKRHLVPGAPFLLQALVREMSGSPASGIPVKVSATVSSPGSVPEVQDIQQNTDGSGQVSIPIIIPQTISELQLSVSAGSPHPAIARLTVAAPPSGGPGFLSIERPDSRPPRVGDTLNLNLRAVGSGATFSHYYYMILSRGQIVFMNREPKRTLTSVSVFVDHHLAPSFYFVAFYYHGDHPVANSLRVDVQAGACEGKLELSVDGAKQYRNGESVKLHLETDSLALVALGALDTALYAAGSKSHKPLNMGKVFEAMNSYDLGCGPGGGDSALQVFQAAGLAFSDGDQWTLSRKRLSCPKEKTTRKKRNVNFQKAINEKLGQYASPTAKRCCQDGVTRLPMMRSCEQRAARVQQPDCREPFLSCCQFAESLRKKSRDKGQAGLQRALEILQEEDLIDEDDIPVRSFFPENWLWRVETVDRFQILTLWLPDSLTTWEIHGLSLSKTKGLCVATPVQLRVFREFHLHLRLPMSVRRFEQLELRPVLYNYLDKNLTVSVHVSPVEGLCLAGGGGLAQQVLVPAGSARPVAFSVVPTAATAVSLKVVARGSFEFPVGDAVSKVLQIEKEGAIHREELVYELNPLDHRGRTLEIPGNSDPNMIPDGDFNSYVRVTASDPLDTLGSEGALSPGGVASLLRLPRGCGEQTMIYLAPTLAASRYLDKTEQWSTLPPETKDHAVDLIQKGYMRIQQFRKADGSYAAWLSRGSSTWLTAFVLKVLSLAQEQVGGSPEKLQETSNWLLSQQQADGSFQDLSPVIHRSMQGGLVGNDETVALTAFVTIALHHGLAVFQDEGAEPLKQRVEASISKASSFLGEKASAGLLGAHAAAITAYALTLTKAPADLRGVAHNNLMAMAQETGDNLYWGSVTGSQSNAVSPTPAPRNPSDPMPQAPALWIETTAYALLHLLLHEGKAEMADQAAAWLTRQGSFQGGFRSTQDTVIALDALSAYWIASHTTEERGLNVTLSSTGRNGFKSHALQLNNRQIRGLEEELQFSLGSKINVKVGGNSKGTLKVLRTYNVLDMKNTTCQDLQIEVTVKGHVEYTMEANEDYEDYEYDELPAKDDPDAPLQPVTPLQLFEGRRNRRRREAPKVVEEQESRVHYTVCIWRNGKVGLSGMAIADVTLLSGFHALRADLEKLTSLSDRYVSHFETEGPHVLLYFDSVPTSRECVGFEAVQEVPVGLVQPASATLYDYYNPERRCSVFYGAPSKSRLLATLCSAEVCQCAEGKCPRQRRALERGLQDEDGYRMKFACYYPRVEYGFQVKVLREDSRAAFRLFETKITQVLHFTKDVKAAANQMRNFLVRASCRLRLEPGKEYLIMGLDGATYDLEGHPQYLLDSNSWIEEMPSERLCRSTRQRAACAQLNDFLQEYGTQGCQV

SEQ ID NO: 19467 - protein, 1744 aa, Homo sapiens [sequence omitted]

SEQ ID NO: 19468 - protein, 1744 aa, Homo sapiens; identical to SEQ ID NO: 19466
  Payload ID: 3891
  Gene Symbol: C4B
  Gene Name: complement component 4B (Chido blood group)
  Uniprot ID: P0C0L5
  ENSP ID: ENSP00000415941

SEQ ID NO: 19469 - protein, 1698 aa, Homo sapiens
  Payload ID: 3891
  Gene Symbol: C4B
  Gene Name: complement component 4B (Chido blood group)
  ENSP ID: ENSP00000446528
MRLLWGLIWASSFFTLSLQKPRLLLFSPSVVHLGVPLSVGVQLQDVPRGQVVKGSVFLRNPSRNNVPCSPKVDFTLSSERDFALLSLQVPLKDAKSCGLHQLLRGPEVQLVAHSPWLKDSLSRTTNIQGINLLFSSRRGHLFLQTDQPIYNPGQRVRYRVFALDQKMRPSTDTITVMVENSHGLRVRKKEVYMPSSIFQDDFVIPDISEPGTWKISARFSDGLESNSSTQFEVKKYVLPNFEVKITPGKPYILTVPGHLDEMQLDIQARYIYGKPVQGVAYVRFGLLDEDGKKTFFRGLESQTKLVNGQSHISLSKAEFQDALEKLNMGITDLQGLRLYVAAAIIESPGGEMEEAELTSWYFVSSPFSLDLSKTKRHLVPGAPFLLQALVREMSGSPASGIPVKVSATVSSPGSVPEVQDIQQNTDGSGQVSIPIIIPQTISELQLSVSAGSPHPAIARLTVAAPPSGGPGFLSIERPDSRPPRVGDTLNLNLRAVGSGATFSHYYYMILSRGQIVFMNREPKRTLTSVSVFVDHHLAPSFYFVAFYYHGDHPVANSLRVDVQAGACEGKLELSVDGAKQYRNGESVKLHLETDSLALVALGALDTALYAAGSKSHKPLNMGKVFEAMNSYDLGCGPGGGDSALQVFQAAGLAFSDGDQWTLSRKRLSCPKEKTTRKKRNVNFQKAINEKLGQYASPTAKRCCQDGVTRLPMMRSCEQRAARVQQPDCREPFLSCCQFAESLRKKSRDKGQAGLQRALEILQEEDLIDEDDIPVRSFFPENWLWRVETVDRFQILTLWLPDSLTTWEIHGLSLSKTKGLCVATPVQLRVFREFHLHLRLPMSVRRFEQLELRPVLYNYLDKNLTVSVHVSPVEGLCLAGGGGLAQQVLVPAGSARPVAFSVVPTAAAAVSLKVVARGSFEFPVGDAVSKVLQIEKEGAIHREELVYELNPLDHRGRTLEIPGNSDPNMIPDGDFNSYVRVTASDPLDTLGSEGALSPGGVASLLRLPRGCGEQTMIYLAPTLAASRYLDKTEQWSTLPPETKDHAVDLIQKGYMRIQQFRKADGSYAAWLSRGSSTWLTAFVLKVLSLAQEQVGGSPEKLQETSNWLLSQQQADGSFQDLSPVIHRSMQGGLVGNDETVALTAFVTIALHHGLAVFQDEGAEPLKQRVEASISKANSFLGEKASAGLLGAHAAAITAYALTLTKAPADLRGVAHNNLMAMAQETGDNLYWGSVTGSQSNAVSPTPAPRNPSDPMPQAPALWIETTAYALLHLLLHEGKAEMADQAAAWLTRQGSFQGGFRSTQDTVIALDALSAYWIASHTTEERGLNVTLSSTGRNGFKSHALQLNNRQIRGLEEELQFSLGSKINVKVGGNSKGTLKVLRTYNVLDMKNTTCQDLQIEVTVKGHVEYTMEANEDYEDYEYDELPAKDDPDAPLQPVTPLQLFEGRRNRRRREAPKLTSLSDRYVSHFETEGPHVLLYFDSVPTSRECVGFEAVQEVPVGLVQPASATLYDYYNPERRCSVFYGAPSKSRLLATLCSAEVCQCAEGKCPRQRRALERGLQDEDGYRMKFACYYPRVEYGFQVKVLREDSRAAFRLFETKITQVLHFTKDVKAAANQMRNFLVRASCRLRLEPGKEYLIMGLDGATYDLEGHPQYLLDSNSWIEEMPSERLCRSTRQRAACAQLNDFLQEYGTQGCQV

SEQ ID NO: 19470 - protein, 1698 aa, Homo sapiens
  Payload ID: 3891
  Gene Symbol: C4B
  Gene Name: complement component 4B (Chido blood group)
  ENSP ID: ENSP00000447600
MRLLWGLIWASSFFTLSLQKPRLLLFSPSVVHLGVPLSVGVQLQDVPRGQVVKGSVFLRNPSRNNVPCSPKVDFTLSSERDFALLSLQVPLKDAKSCGLHQLLRGPEVQLVAHSPWLKDSLSRTTNIQGINLLFSSRRGHLFLQTDQPIYNPGQRVRYRVFALDQKMRPSTDTITVMVENSHGLRVRKKEVYMPSSIFQDDFVIPDISEPGTWKISARFSDGLESNSSTQFEVKKYVLPNFEVKITPGKPYILTVPGHLDEMQLDIQARYIYGKPVQGVAYVRFGLLDEDGKKTFFRGLESQTKLVNGQSHISLSKAEFQDALEKLNMGITDLQGLRLYVAAAIIEYPGGEMEEAELTSWYFVSSPFSLDLSKTKRHLVPGAPFLLQALVREMSGSPASGIPVKVSATVSSPGSVPEVQDIQQNTDGSGQVSIPIIIPQTISELQLSVSAGSPHPAIARLTVAAPPSGGPGFLSIERPDSRPPRVGDTLNLNLRAVGSGATFSHYYYMILSRGQIVFMNREPKRTLTSVSVFVDHHLAPSFYFVAFYYHGDHPVANSLRVDVQAGACEGKLELSVDGAKQYRNGESVKLHLETDSLALVALGALDTALYAAGSKSHKPLNMGKVFEAMNSYDLGCGPGGGDSALQVFQAAGLAFSDGDQWTLSRKRLSCPKEKTTRKKRNVNFQKAINEKLGQYASPTAKRCCQDGVTRLPMMRSCEQRAARVQQPDCREPFLSCCQFAESLRKKSRDKGQAGLQRALEILQEEDLIDEDDIPVRSFFPENWLWRVETVDRFQILTLWLPDSLTTWEIHGLSLSKTKGLCVATPVQLRVFREFHLHLRLPMSVRRFEQLELRPVLYNYLDKNLTVSVHVSPVEGLCLAGGGGLAQQVLVPAGSARPVAFSVVPTAAAAVSLKVVARGSFEFPVGDAVSKVLQIEKEGAIHREELVYELNPLDHRGRTLEIPGNSDPNMIPDGDFNSYVRVTASDPLDTLGSEGALSPGGVASLLRLPRGCGEQTMIYLAPTLAASRYLDKTEQWSTLPPETKDHAVDLIQKGYMRIQQFRKADGSYAAWLSRGSSTWLTAFVLKVLSLAQEQVGGSPEKLQETSNWLLSQQQADGSFQDLSPVIHRSMQGGLVGNDETVALTAFVTIALHHGLAVFQDEGAEPLKQRVEASISKASSFLGEKASAGLLGAHAAAITAYALTLTKAPADLRGVAHNNLMAMAQETGDNLYWGSVTGSQSNAVSPTPAPRNPSDPMPQAPALWIETTAYALLHLLLHEGKAEMADQAAAWLTRQGSFQGGFRSTQDTVIALDALSAYWIASHTTEERGLNVTLSSTGRNGFKSHALQLNNRQIRGLEEELQFSLGSKINVKVGGNSKGTLKVLRTYNVLDMKNTTCQDLQIEVTVKGHVEYTMEANEDYEDYEYDELPAKDDPDAPLQPVTPLQLFEGRRNRRRREAPKLTSLSDRYVSHFETEGPHVLLYFDSVPTSRECVGFEAVQEVPVGLVQPASATLYDYYNPERRCSVFYGAPSKSRLLATLCSAEVCQCAEGKCPRQRRALERGLQDEDGYRMKFACYYPRVEYGFQVKVLREDSRAAFRLFETKITQVLHFTKDVKAAANQMRNFLVRASCRLRLEPGKEYLIMGLDGATYDLEGHPQYLLDSNSWIEEMPSERLCRSTRQRAACAQLNDFLQEYGTQGCQV

SEQ ID NO: 19471 - protein, 1698 aa, Homo sapiens; identical to SEQ ID NO: 19465
  Payload ID: 3891
  Gene Symbol: C4B
  Gene Name: complement component 4B (Chido blood group)
  ENSP ID: ENSP00000449523

SEQ ID NO: 19472 - protein, 1744 aa, Homo sapiens; identical to SEQ ID NO: 19464
  Payload ID: 3892
  Gene Symbol: C4B_2
  Gene Name: complement component 4B (Chido blood group), copy 2
  Uniprot ID: P0C0L5
  ENSP ID: ENSP00000412786

SEQ ID NO: 19473 - protein, 1698 aa, Homo sapiens; identical to SEQ ID NO: 19470
  Payload ID: 3892
  Gene Symbol: C4B_2
  Gene Name: complement component 4B (Chido blood group), copy 2
  ENSP ID: ENSP00000449433

SEQ ID NO: 19474 - protein, 1676 aa, Homo sapiens
  Payload ID: 3893
  Gene Symbol: C5
  Gene Name: complement component 5
  Uniprot ID: P01031
  ENSP ID: ENSP00000223642
MGLLGILCFLIFLGKTWGQEQTYVISAPKIFRVGASENIVIQVYGYTEAFDATISIKSYPDKKFSYSSGHVHLSSENKFQNSAILTIQPKQLPGGQNPVSYVYLEVVSKHFSKSKRMPITYDNGFLFIHTDKPVYTPDQSVKVRVYSLNDDLKPAKRETVLTFIDPEGSEVDMVEEIDHIGIISFPDFKIPSNPRYGMWTIKAKYKEDFSTTGTAYFEVKEYVLPHFSVSIEPEYNFIGYKNFKNFEITIKARYFYNKVVTEADVYITFGIREDLKDDQKEMMQTAMQNTMLINGIAQVTFDSETAVKELSYYSLEDLNNKYLYIAVTVIESTGGFSEEAEIPGIKYVLSPYKLNLVATPLFLKPGIPYPIKVQVKDSLDQLVGGVPVTLNAQTIDVNQETSDLDPSKSVTRVDDGVASFVLNLPSGVTVLEFNVKTDAPDLPEENQAREGYRAIAYSSLSQSYLYIDWTDNHKALLVGEHLNIIVTPKSPYIDKITHYNYLILSKGKIIHFGTREKFSDASYQSINIPVTQNMVPSSRLLVYYIVTGEQTAELVSDSVWLNIEEKCGNQLQVHLSPDADAYSPGQTVSLNMATGMDSWVALAAVDSAVYGVQRGAKKPLERVFQFLEKSDLGCGAGGGLNNANVFHLAGLTFLTNANADDSQENDEPCKEILRPRRTLQKKIEEIAAKYKHSVVKKCCYDGACVNNDETCEQRAARISLGPRCIKAFTECCVVASQLRANISHKDMQLGRLHMKTLLPVSKPEIRSYFPESWLWEVHLVPRRKQLQFALPDSLTTWEIQGVGISNTGICVADTVKAKVFKDVFLEMNIPYSVVRGEQIQLKGTVYNYRTSGMQFCVKMSAVEGICTSESPVIDHQGTKSSKCVRQKVEGSSSHLVTFTVLPLEIGLHNINFSLETWFGKEILVKTLRVVPEGVKRESYSGVTLDPRGIYGTISRRKEFPYRIPLDLVPKTEIKRILSVKGLLVGEILSAVLSQEGINILTHLPKGSAEAELMSVVPVFYVFHYLETGNHWNIFHSDPLIEKQKLKKKLKEGMLSIMSYRNADYSYSVWKGGSASTWLTAFALRVLGQVNKYVEQNQNSICNSLLWLVENYQLDNGSFKENSQYQPIKLQGTLPVEARENSLYLTAFTVIGIRKAFDICPLVKIDTALIKADNFLLENTLPAQSTFTLAISAYALSLGDKTHPQFRSIVSALKREALVKGNPPIYRFWKDNLQHKDSSVPNTGTARMVETTAYALLTSLNLKDINYVNPVIKWLSEEQRYGGGFYSTQDTINAIEGLTEYSLLVKQLRLSMDIDVSYKHKGALHNYKMTDKNFLGRPVEVLLNDDLIVSTGFGSGLATVHVTTVVHKTSTSEEVCSFYLKIDTQDIEASHYRGYGNSDYKRIVACASYKPSREESSSGSSHAVMDISLPTGISANEEDLKALVEGVDQLFTDYQIKDGHVILQLNSIPSSDFLCVRFRIFELFEVGFLSPATFTVYEYHRPDKQCTMFYSTSNIKIQKVCEGAACKCVEADCGQMQEELDLTISAETRKQTACKPEIAYAYKVSITSITVENVFVKYKATLLDIYKTGEAVAEKDSEITFIKKVTCTNAELVKGRQYLIMGKEALQIKYNFSFRYIYPLDSLTWIEYWPRDTTCSSCQAFLANLDEFAEDIFLNGC

SEQ ID NO: 19475 - protein, 350 aa, Homo sapiens
  Payload ID: 3894
  Gene Symbol: C5AR1
  Gene Name: complement component 5a receptor 1
  Uniprot ID: P21730
  ENSP ID: ENSP00000347197
MDSFNYTTPDYGHYDDKDTLDLNTPVDKTSNTLRVPDILALVIFAVVFLVGVLGNALVVWVTAFEAKRTINAIWFLNLAVADFLSCLALPILFTSIVQHHHWPFGGAACSILPSLILLNMYASILLLATISADRFLLVFKPIWCQNFRGAGLAWIACAVAWGLALLLTIPSFLYRVVREEYFPPKVLCGVDYSHDKRRERAVAIVRLVLGFLWPLLTLTICYTFILLRTWSRRATRSTKTLKVVVAVVASFFIFWLPYQVTGIMMSFLEPSSPTFLLLKKLDSLCVSFAYINCCINPIIYVVAGQGFQGRLRKSLPSLLRNVLTEESVVRESKSFTRSTVDTMAQKTQAV

SEQ ID NO: 19476 - protein, 17 aa, Homo sapiens
  Payload ID: 3894
  Gene Symbol: C5AR1
  Gene Name: complement component 5a receptor 1
  ENSP ID: ENSP00000470613
MYASILLLATISADRFL

SEQ ID NO: 19477 - protein, 337 aa, Homo sapiens [sequence omitted]

SEQ ID NO: 19478 - protein, 337 aa, Homo sapiens [sequence omitted]

SEQ ID NO: 19479 - protein, 934 aa, Homo sapiens
  Payload ID: 3896
  Gene Symbol: C6
  Gene Name: complement component 6
  Uniprot ID: P13671
  ENSP ID: ENSP00000263413
MARRSVLYFILLNALINKGQACFCDHYAWTQWTSCSKTCNSGTQSRHRQIVVDKYYQENFCEQICSKQETRECNWQRCPINCLLGDFGPWSDCDPCIEKQSKVRSVLRPSQFGGQPCTAPLVAFQPCIPSKLCKIEEADCKNKFRCDSGRCIARKLECNGENDCGDNSDERDCGRTKAVCTRKYNPIPSVQLMGNGFHFLAGEPRGEVLDNSFTGGICKTVKSSRTSNPYRVPANLENVGFEVQTAEDDLKTDFYKDLTSLGHNENQQGSFSSQGGSSFSVPIFYSSKRSENINHNSAFKQAIQASHKKDSSFIRIHKVMKVLNFTTKAKDLHLSDVFLKALNHLPLEYNSALYSRIFDDFGTHYFTSGSLGGVYDLLYQFSSEELKNSGLTEEEAKHCVRIETKKRVLFAKKTKVEHRCTTNKLSEKHEGSFIQGAEKSISLIRGGRSEYGAALAWEKGSSGLEEKTFSEWLESVKENPAVIDFELAPIVDLVRNIPCAVTKRNNLRKALQEYAAKFDPCQCAPCPNNGRPTLSGTECLCVCQSGTYGENCEKQSPDYKSNAVDGQWGCWSSWSTCDATYKRSRTRECNNPAPQRGGKRCEGEKRQEEDCTFSIMENNGQPCINDDEEMKEVDLPEIEADSGCPQPVPPENGFIRNEKQLYLVGEDVEISCLTGFETVGYQYFRCLPDGTWRQGDVECQRTECIKPVVQEVLTITPFQRLYRIGESIELTCPKGFVVAGPSRYTCQGNSWTPPISNSLTCEKDTLTKLKGHCQLGQKQSGSECICMSPEEDCSHHSEDLCVFDTDSNDYFTSPACKFLAEKCLNNQQLHFLHIGSCQDGRQLEWGLERTRLSSNSTKKESCGYDTCYDWEKCSASTSKCVCLLPPQCFKGGNQLYCVKMGSSTSEKTLNICEVGTIRCANRKMEILHPGKCLA

SEQ ID NO: 19480 - protein, 934 aa, Homo sapiens; identical to SEQ ID NO: 19479
  Payload ID: 3896
  Gene Symbol: C6
  Gene Name: complement component 6
  Uniprot ID: P13671
  ENSP ID: ENSP00000338861

SEQ ID NO: 19481 - protein, 133 aa, Homo sapiens
  Payload ID: 3896
  Gene Symbol: C6
  Gene Name: complement component 6
  ENSP ID: ENSP00000396565
MARRSVLYFILLNALINKGQACFCDHYAWTQWTSCSKTCNSGTQSRHRQIVVDKYYQENFCEQICSKQETRECNWQRCPINCLLGDFGPWSDCDPCIEKQSKVRSVLRPSQFGGQPCTAPLVAFQPCIPSKLC

SEQ ID NO: 19482 - protein, 31 aa, Homo sapiens
  Payload ID: 3896
  Gene Symbol: C6
  Gene Name: complement component 6
  ENSP ID: ENSP00000401578
MARRSVLYFILLNALINKGQACFCDHYAWTQ

SEQ ID NO: 19483 - protein, 843 aa, Homo sapiens
  Payload ID: 3897
  Gene Symbol: C7
  Gene Name: complement component 7
  Uniprot ID: P10643
  ENSP ID: ENSP00000322061
MKVISLFILVGFIGEFQSFSSASSPVNCQWDFYAPWSECNGCTKTQTRRRSVAVYGQYGGQPCVGNAFETQSCEPTRGCPTEEGCGERFRCFSGQCISKSLVCNGDSDCDEDSADEDRCEDSERRPSCDIDKPPPNIELTGNGYNELTGQFRNRVINTKSFGGQCRKVFSGDGKDFYRLSGNVLSYTFQVKINNDFNYEFYNSTWSYVKHTSTEHTSSSRKRSFFRSSSSSSRSYTSHTNEIHKGKSYQLLVVENTVEVAQFINNNPEFLQLAEPFWKELSHLPSLYDYSAYRRLIDQYGTHYLQSGSLGGEYRVLFYVDSEKLKQNDFNSVEEKKCKSSGWHFVVKFSSHGCKELENALKAASGTQNNVLRGEPFIRGGGAGFISGLSYLELDNPAGNKRRYSAWAESVTNLPQVIKQKLTPLYELVKEVPCASVKKLYLKWALEEYLDEFDPCHCRPCQNGGLATVEGTHCLCHCKPYTFGAACEQGVLVGNQAGGVDGGWSCWSSWSPCVQGKKTRSRECNNPPPSGGGRSCVGETTESTQCEDEELEHLRLLEPHCFPLSLVPTEFCPSPPALKDGFVQDEGTMFPVGKNVVYTCNEGYSLIGNPVARCGEDLRWLVGEMHCQKIACVLPVLMDGIQSHPQKPFYTVGEKVTVSCSGGMSLEGPSAFLCGSSLKWSPEMKNARCVQKENPLTQAVPKCQRWEKLQNSRCVCKMPYECGPSLDVCAQDERSKRILPLTVCKMHVLHCQGRNYTLTGRDSCTLPASAEKACGACPLWGKCDAESSKCVCREASECEEEGFSICVEVNGKEQTMSECEAGALRCRGQSISVTSIRPCAAETQ

SEQ ID NO: 19484 - protein, 584 aa, Homo sapiens
  Payload ID: 3898
  Gene Symbol: C8A
  Gene Name: complement component 8, alpha polypeptide
  Uniprot ID: P07357
  ENSP ID: ENSP00000354458
MFAVVFFILSLMTCQPGVTAQEKVNQRVRRAATPAAVTCQLSNWSEWTDCFPCQDKKYRHRSLLQPNKFGGTICSGDIWDQASCSSSTTCVRQAQCGQDFQCKETGRCLKRHLVCNGDQDCLDGSDEDDCEDVRAIDEDCSQYEPIPGSQKAALGYNILTQEDAQSVYDASYYGGQCETVYNGEWRELRYDSTCERLYYGDDEKYFRKPYNFLKYHFEALADTGISSEFYDNANDLLSKVKKDKSDSFGVTIGIGPAGSPLLVGVGVSHSQDTSFLNELNKYNEKKFIFTRIFTKVQTAHFKMRKDDIMLDEGMLQSLMELPDQYNYGMYAKFINDYGTHYITSGSMGGIYEYILVIDKAKMESLGITSRDITTCFGGSLGIQYEDKINVGGGLSGDHCKKFGGGKTERARKAMAVEDIISRVRGGSSGWSGGLAQNRSTITYRSWGRSLKYNPVVIDFEMQPIHEVLRHTSLGPLEAKRQNLRRALDQYLMEFNACRCGPCFNNGVPILEGTSCRCQCRLGSLGAACEQTQTEGAKADGSWSCWSSWSVCRAGIQERRRECDNPAPQNGGASCPGRKVQTQAC

SEQ ID NO: 19485 - protein, 591 aa, Homo sapiens
  Payload ID: 3899
  Gene Symbol: C8B
  Gene Name: complement component 8, beta polypeptide
  Uniprot ID: P07358
  ENSP ID: ENSP00000360281
MKNSRTWAWRAPVELFLLCAALGCLSLPGSRGERPHSFGSNAVNKSFAKSRQMRSVDVTLMPIDCELSSWSSWTTCDPCQKKRYRYAYLLQPSQFHGEPCNFSDKEVEDCVTNRPCGSQVRCEGFVCAQTGRCVNRRLLCNGDNDCGDQSDEANCRRIYKKCQHEMDQYWGIGSLASGINLFTNSFEGPVLDHRYYAGGCSPHYILNTRFRKPYNVESYTPQTQGKYEFILKEYESYSDFERNVTEKMASKSGFSFGFKIPGIFELGISSQSDRGKHYIRRTKRFSHTKSVFLHARSDLEVAHYKLKPRSLMLHYEFLQRVKRLPLEYSYGEYRDLFRDFGTHYITEAVLGGIYEYTLVMNKEAMERGDYTLNNVHACAKNDFKIGGAIEEVYVSLGVSVGKCRGILNEIKDRNKRDTMVEDLVVLVRGGASEHITTLAYQELPTADLMQEWGDAVQYNPAIIKVKVEPLYELVTATDFAYSSTVRQNMKQALEEFQKEVSSCHCAPCQGNGVPVLKGSRCDCICPVGSQGLACEVSYRKNTPIDGKWNCWSNWSSCSGRRKTRQRQCNNPPPQNGGSPCSGPASETLDCS

SEQ ID NO: 19486 - protein, 529 aa, Homo sapiens
  Payload ID: 3899
  Gene Symbol: C8B
  Gene Name: complement component 8, beta polypeptide
  ENSP ID: ENSP00000440113
MDTCMTLAFTLSGRFFMLLSQYRYAYLLQPSQFHGEPCNFSDKEVEDCVTNRPCGSQVRCEGFVCAQTGRCVNRRLLCNGDNDCGDQSDEANCRRIYKKCQHEMDQYWGIGSLASGINLFTNSFEGPVLDHRYYAGGCSPHYILNTRFRKPYNVESYTPQTQGKYEFILKEYESYSDFERNVTEKMASKSGFSFGFKIPGIFELGISSQSDRGKHYIRRTKRFSHTKSVFLHARSDLEVAHYKLKPRSLMLHYEFLQRVKRLPLEYSYGEYRDLFRDFGTHYITEAVLGGIYEYTLVMNKEAMERGDYTLNNVHACAKNDFKIGGAIEEVYVSLGVSVGKCRGILNEIKDRNKRDTMVEDLVVLVRGGASEHITTLAYQELPTADLMQEWGDAVQYNPAIIKVKVEPLYELVTATDFAYSSTVRQNMKQALEEFQKEVSSCHCAPCQGNGVPVLKGSRCDCICPVGSQGLACEVSYRKNTPIDGKWNCWSNWSSCSGRRKTRQRQCNNPPPQNGGSPCSGPASETLDCS

SEQ ID NO: 19487 - protein, 539 aa, Homo sapiens
  Payload ID: 3899
  Gene Symbol: C8B
  Gene Name: complement component 8, beta polypeptide
  ENSP ID: ENSP00000442548
MRSVDVTLMPIDCELSSWSSWTTCDPCQKKRYRYAYLLQPSQFHGEPCNFSDKEVEDCVTNRPCGSQVRCEGFVCAQTGRCVNRRLLCNGDNDCGDQSDEANCRRIYKKCQHEMDQYWGIGSLASGINLFTNSFEGPVLDHRYYAGGCSPHYILNTRFRKPYNVESYTPQTQGKYEFILKEYESYSDFERNVTEKMASKSGFSFGFKIPGIFELGISSQSDRGKHYIRRTKRFSHTKSVFLHARSDLEVAHYKLKPRSLMLHYEFLQRVKRLPLEYSYGEYRDLFRDFGTHYITEAVLGGIYEYTLVMNKEAMERGDYTLNNVHACAKNDFKIGGAIEEVYVSLGVSVGKCRGILNEIKDRNKRDTMVEDLVVLVRGGASEHITTLAYQELPTADLMQEWGDAVQYNPAIIKVKVEPLYELVTATDFAYSSTVRQNMKQALEEFQKEVSSCHCAPCQGNGVPVLKGSRCDCICPVGSQGLACEVSYRKNTPIDGKWNCWSNWSSCSGRRKTRQRQCNNPPPQNGGSPCSGPASETLDCS

SEQ ID NO: 19488 - protein, 202 aa, Homo sapiens
  Payload ID: 3900
  Gene Symbol: C8G
  Gene Name: complement component 8, gamma polypeptide
  Uniprot ID: P07360
  ENSP ID: ENSP00000224181
MLPPGTATLLTLLLAAGSLGQKPQRPRRPASPISTIQPKANFDAQQFAGTWLLVAVGSACRFLQEQGHRAEATTLHVAPQGTAMAVSTFRKLDGICWQVRQLYGDTGVLGRFLLQARDARGAVHVVVAETDYQSFAVLYLERAGQLSVKLYARSLPVSDSVLSGFEQRVQEAHLTEDQIFYFPKYGFCEAADQFHVLDEVRR

SEQ ID NO: 19489 - protein, 164 aa, Homo sapiens
  Payload ID: 3900
  Gene Symbol: C8G
  Gene Name: complement component 8, gamma polypeptide
  ENSP ID: ENSP00000360697
MLPPGTATLLTLLLAAGSLGQKPQRPRRPASPISTIQPKANFDAQQFAGTWLLVAVGSACRFLQEQGHRAEATTLHVAPQGTAMAVSTFRKLDGICWQVRQLYGDTGVLGRFLLQARDARGAVHVVVAETDYQSFAVLYLERAGQLSVKLYGAQGVVTDRPGVG

SEQ ID NO: 19490 - protein, 559 aa, Homo sapiens
  Payload ID: 3901
  Gene Symbol: C9
  Gene Name: complement component 9
  Uniprot ID: P02748
  ENSP ID: ENSP00000263408
MSACRSFAVAICILEISILTAQYTTSYDPELTESSGSASHIDCRMSPWSEWSQCDPCLRQMFRSRSIEVFGQFNGKRCTDAVGDRRQCVPTEPCEDAEDDCGNDFQCSTGRCIKMRLRCNGDNDCGDFSDEDDCESEPRPPCRDRVVEESELARTAGYGINILGMDPLSTPFDNEFYNGLCNRDRDGNTLTYYRRPWNVASLIYETKGEKNFRTEHYEEQIEAFKSIIQEKTSNFNAAISLKFTPTETNKAEQCCEETASSISLHGKGSFRFSYSKNETYQLFLSYSSKKEKMFLHVKGEIHLGRFVMRNRDVVLTTTFVDDIKALPTTYEKGEYFAFLETYGTHYSSSGSLGGLYELIYVLDKASMKRKGVELKDIKRCLGYHLDVSLAFSEISVGAEFNKDDCVKRGEGRAVNITSENLIDDVVSLIRGGTRKYAFELKEKLLRGTVIDVTDFVNWASSINDAPVLISQKLSPIYNLVPVKMKNAHLKKQNLERAIEDYINEFSVRKCHTCQNGGTVILMDGKCLCACPFKFEGIACEISKQKISEGLPALEFPNEK

SEQ ID NO: 19491 - protein, 589 aa, Homo sapiens
  Payload ID: 3902
  Gene Symbol: CFB
  Gene Name: complement factor B
  ENSP ID: ENSP00000364592
MGSNLSPQLCLMPFILGLLSGGVTTTPWSLAQPQGSCSLEGVEIKGGSFRLLQEGQALEYVCPSGFYPYPVQTRTCRSTGSWSTLKTQDQKTVRKAECRAIHCPRPHDFENGEYWPRSPYYNVSDEISFHCYDGYTLRGSANRTCQVNGRWSGQTAICDNGAGYCSNPGIPIGTRKVGSQYRLEDSVTYHCSRGLTLRGSQRRTCQEGGSWSGTEPSCQDSFMYDTPQEVAEAFLSSLTETIEGVDAEDGHGPGEQQKRKIVLDPSGSMNIYLVLDGSDSIGASNFTGAKKCLVNLIEKVASYGVKPRYGLVTYATYPKIWVKVSEADSSNADWVTKQLNEINYEDHKLKSGTNTKKALQAVYSMMSWPDDVPPEGWNRTRHVIILMTDGLHNMGGDPITVIDEIRDLLYIGKDRKNPREDYLDVYVFGVGPLVNQVNINALASKKDNEQHVFKVKDMENLEDVFYQMIDESQSLSLCGMVWEHRKGTDYHKQPWQAKISVIRPSKGHESCMGAVVSEYFVLTAAHCFTVDDKEHSIKVSVGGEKRDLEIEVVLFHPNYNINGKKEAGIPEFYDYDVALIKLKNKLKYG

SEQ ID NO: 19492 - protein, 589 aa, Homo sapiens; identical to SEQ ID NO: 19491
  Payload ID: 3902
  Gene Symbol: CFB
  Gene Name: complement factor B
  ENSP ID: ENSP00000364604

SEQ ID NO: 19493 - protein, 764 aa, Homo sapiens [sequence omitted]

SEQ ID NO: 19494 - protein, 764 aa, Homo sapiens
  Payload ID: 3902
  Gene Symbol: CFB
  Gene Name: complement factor B
  Uniprot ID: P00751
  ENSP ID: ENSP00000388352
MGSNLSPQLCLMPFILGLLSGGVTTTPWSLARPQGSCSLEGVEIKGGSFRLLQEGQALEYVCPSGFYPYPVQTRTCRSTGSWSTLKTQDQKTVRKAECRAIHCPRPHDFENGEYWPRSPYYNVSDEISFHCYDGYTLRGSANRTCQVNGRWSGQTAICDNGAGYCSNPGIPIGTRKVGSQYRLEDSVTYHCSRGLTLRGSQRRTCQEGGSWSGTEPSCQDSFMYDTPQEVAEAFLSSLTETIEGVDAEDGHGPGEQQKRKIVLDPSGSMNIYLVLDGSDSIGASNFTGAKKCLVNLIEKVASYGVKPRYGLVTYATYPKIWVKVSEADSSNADWVTKQLNEINYEDHKLKSGTNTKKALQAVYSMMSWPDDVPPEGWNRTRHVIILMTDGLHNMGGDPITVIDEIRDLLYIGKDRKNPREDYLDVYVFGVGPLVNQVNINALASKKDNEQHVFKVKDMENLEDVFYQMIDESQSLSLCGMVWEHRKGTDYHKQPWQAKISVIRPSKGHESCMGAVVSEYFVLTAAHCFTVDDKEHSIKVSVGGEKRDLEIEVVLFHPNYNINGKKEAGIPEFYDYDVALIKLKNKLKYGQTIRPICLPCTEGTTRALRLPPTTTCQQQKEELLPAQDIKALFVSEEEKKLTRKEVYIKNGDKKGSCERDAQYAPGYDKVKDISEVVTPRFLCTGGVSPYADPNTCRGDSGGPLIVHKRSRFIQVGVISWGVVDVCKNQKRQKQVPAHARDFHINLFQVLPWLKEKLQDEDLGFL

SEQ ID NO: 19495 - protein, 764 aa, Homo sapiens; identical to SEQ ID NO: 19494
  Payload ID: 3902
  Gene Symbol: CFB
  Gene Name: complement factor B
  Uniprot ID: P00751
  ENSP ID: ENSP00000389604

SEQ ID NO: 19496 - protein, 764 aa, Homo sapiens; identical to SEQ ID NO: 19494
  Payload ID: 3902
  Gene Symbol: CFB
  Gene Name: complement factor B
  Uniprot ID: P00751
  ENSP ID: ENSP00000391902

SEQ ID NO: 19497 - protein, 764 aa, Homo sapiens; identical to SEQ ID NO: 19494
  Payload ID: 3902
  Gene Symbol: CFB
  Gene Name: complement factor B
  Uniprot ID: P00751
  ENSP ID: ENSP00000401719

SEQ ID NO: 19498 - protein, 764 aa, Homo sapiens [sequence omitted]

SEQ ID NO: 19499 - protein, 764 aa, Homo sapiens; identical to SEQ ID NO: 19494
  Payload ID: 3902
  Gene Symbol: CFB
  Gene Name: complement factor B
  Uniprot ID: P00751
  ENSP ID: ENSP00000411515

SEQ ID NO: 19500 - protein, 764 aa, Homo sapiens; identical to SEQ ID NO: 19494
  Payload ID: 3902
  Gene Symbol: CFB
  Gene Name: complement factor B
  Uniprot ID: P00751
  ENSP ID: ENSP00000413351

SEQ ID NO: 19501 - protein, 764 aa, Homo sapiens; identical to SEQ ID NO: 19494
  Payload ID: 3902
  Gene Symbol: CFB
  Gene Name: complement factor B
  Uniprot ID: P00751
  ENSP ID: ENSP00000414341

SEQ ID NO: 19502 - protein, 764 aa, Homo sapiens; identical to SEQ ID NO: 19494
  Payload ID: 3902
  Gene Symbol: CFB
  Gene Name: complement factor B
  Uniprot ID: P00751
  ENSP ID: ENSP00000414889

SEQ ID NO: 19503 - protein, 764 aa, Homo sapiens; identical to SEQ ID NO: 19494
  Payload ID: 3902
  Gene Symbol: CFB
  Gene Name: complement factor B
  Uniprot ID: P00751
  ENSP ID: ENSP00000416561

SEQ ID NO: 19504 - protein, 86 aa, Homo sapiens
  Payload ID: 3902
  Gene Symbol: CFB
  Gene Name: complement factor B
  ENSP ID: ENSP00000417793
MGSNLSPQLCLMPFILGLLSGVRVSFWLLPVPCADTYLQIYGVLEHPEDSRPKDCQEGRVQSNPLSKTTRLRERGILAPVSLLQCE

SEQ ID NO: 19505 - protein, 68 aa, Homo sapiens
  Payload ID: 3902
  Gene Symbol: CFB
  Gene Name: complement factor B
  ENSP ID: ENSP00000418833
  MOD_RES (1)..(1): Any amino acid
XPRFLCTGGVSPYADPNTCRGDSGGPLIVHKRSRFIQVSPPFPIWGDAKWSAWAPKQESSMHVASNSR

SEQ ID NO: 19506 - protein, 305 aa, Homo sapiens
  Payload ID: 3902
  Gene Symbol: CFB
  Gene Name: complement factor B
  ENSP ID: ENSP00000419887
  MOD_RES (1)..(1): Any amino acid
XDGLHNMGGDPITVIDEIRDLLYIGKDRKNPREDYLDVYVFGVGPLVNQVNINALASKKDNEQHVFKVKDMENLEDVFYQMIGGEKRDLEIEVVLFHPNYNINGKKEAGIPEFYDYDVALIKLKNKLKYGQTIRPICLPCTEGTTRALRLPPTTTCQQQKEELLPAQDIKALFVSEEEKKLTRKEVYIKNGDKKGSCERDAQYAPGYDKVKDISEVVTPRFLCTGGVSPYADPNTCRGDSGGPLIVHKRSRFIQVGVISWGVVDVCKNQKRQKQVPAHARDFHINLFQVLPWLKEKLQDEDLGFL

SEQ ID NO: 19507 - protein, 144 aa, Homo sapiens
  Payload ID: 3902
  Gene Symbol: CFB
  Gene Name: complement factor B
  ENSP ID: ENSP00000420090
MGSNLSPQLCLMPFILGLLSGGVTTTPWSLARPQGSCSLEGVEIKGGSFRLLQEGQALEYVCPSGFYPYPVQTRTCRSTGSWSTLKTQDQKTVRKAECRAIHCPRPHDFENGEYWPRSPYYNVSDEISFHCYDGYTLRGSANRT

SEQ ID NO: 19508 - protein, 253 aa, Homo sapiens
  Payload ID: 3903
  Gene Symbol: CFD
  Gene Name: complement factor D (adipsin)
  Uniprot ID: P00746
  ENSP ID: ENSP00000332139
MHSWERLAVLVLLGAAACAAPPRGRILGGREAEAHARPYMASVQLNGAHLCGGVLVAEQWVLSAAHCLEDAADGKVQVLLGAHSLSQPEPSKRLYDVLRAVPHPDSQPDTIDHDLLLLQLSEKATLGPAVRPLPWQRVDRDVAPGTLCDVAGWGIVNHAGRRPDSLQHVLLPVLDRATCNRRTHHDGAITERLMCAESNRRDSCKGDSGGPLVCGGVLEGVVTSGSRVCGNRKKPGIYTRVASYAAWIDSVLA

SEQ ID NO: 19509 - protein, 260 aa, Homo sapiens
  Payload ID: 3903
  Gene Symbol: CFD
  Gene Name: complement factor D (adipsin)
  ENSP ID: ENSP00000468253
MHSWERLAVLVLLGAAACGEEAWAWAAPPRGRILGGREAEAHARPYMASVQLNGAHLCGGVLVAEQWVLSAAHCLEDAADGKVQVLLGAHSLSQPEPSKRLYDVLRAVPHPDSQPDTIDHDLLLLQLSEKATLGPAVRPLPWQRVDRDVAPGTLCDVAGWGIVNHAGRRPDSLQHVLLPVLDRATCNRRTHHDGAITERLMCAESNRRDSCKGDSGGPLVCGGVLEGVVTSGSRVCGNRKKPGIYTRVASYAAWIDSVLA

SEQ ID NO: 19510 - protein, 253 aa, Homo sapiens; identical to SEQ ID NO: 19508
  Payload ID: 3903
  Gene Symbol: CFD
  Gene Name: complement factor D (adipsin)
  Uniprot ID: P00746
  ENSP ID: ENSP00000478745

SEQ ID NO: 19511 - protein, 260 aa, Homo sapiens; identical to SEQ ID NO: 19509
  Payload ID: 3903
  Gene Symbol: CFD
  Gene Name: complement factor D (adipsin)
  ENSP ID: ENSP00000488580

SEQ ID NO: 19512 - protein, 385 aa, Homo sapiens
  Payload ID: 3904
  Gene Symbol: CFH
  Gene Name: complement factor H
  ENSP ID: ENSP00000352658
MRLLAKIICLMLWAICVAEDCNELPPRRNTEILTGSWSDQTYPEGTQAIYKCRPGYRSLGNVIMVCRKGEWVALNPLRKCQKRPCGHPGDTPFGTFTLTGGNVFEYGVKAVYTCNEGYQLLGEINYRECDTDGWTNDIPICEEISCKSPDVINGSPISQKIIYKENERFQYKCNMGYEYSERGDAVCTESGWRPLPSCEEKSCDNPYIPNGDYSPLRIKHRTGDEITYQCRNGFYPATRGNTAKCTSTGWIPAPRCTLKPCDYPDIKHGGLYHENMRRPYFPVAVGKYYSYYCDEHFETPSGSYWDHIHCTQDGWSPAVPCLRKCYFPYLENGYNQNHGRKFVQGKSIDVACHPGYALPKAQTTVTCMENGWSPTPRCIRVSFTL

SEQ ID NO: 19513 - protein, 1231 aa, Homo sapiens
  Payload ID: 3904
  Gene Symbol: CFH
  Gene Name: complement factor H
  Uniprot ID: P08603
  ENSP ID: ENSP00000356399
MRLLAKIICLMLWAICVAEDCNELPPRRNTEILTGSWSDQTYPEGTQAIYKCRPGYRSLGNVIMVCRKGEWVALNPLRKCQKRPCGHPGDTPFGTFTLTGGNVFEYGVKAVYTCNEGYQLLGEINYRECDTDGWTNDIPICEVVKCLPVTAPENGKIVSSAMEPDREYHFGQAVRFVCNSGYKIEGDEEMHCSDDGFWSKEKPKCVEISCKSPDVINGSPISQKIIYKENERFQYKCNMGYEYSERGDAVCTESGWRPLPSCEEKSCDNPYIPNGDYSPLRIKHRTGDEITYQCRNGFYPATRGNTAKCTSTGWIPAPRCTLKPCDYPDIKHGGLYHENMRRPYFPVAVGKYYSYYCDEHFETPSGSYWDHIHCTQDGWSPAVPCLRKCYFPYLENGYNQNHGRKFVQGKSIDVACHPGYALPKAQTTVTCMENGWSPTPRCIRVKTCSKSSIDIENGFISESQYTYALKEKAKYQCKLGYVTADGETSGSITCGKDGWSAQPTCIKSCDIPVFMNARTKNDFTWFKLNDTLDYECHDGYESNTGSTTGSIVCGYNGWSDLPICYERECELPKIDVHLVPDRKKDQYKVGEVLKFSCKPGFTIVGPNSVQCYHFGLSPDLPICKEQVQSCGPPPELLNGNVKEKTKEEYGHSEVVEYYCNPRFLMKGPNKIQCVDGEWTTLPVCIVEESTCGDIPELEHGWAQLSSPPYYYGDSVEFNCSESFTMIGHRSITCIHGVWTQLPQCVAIDKLKKCKSSNLIILEEHLKNKKEFDHNSNIRYRCRGKEGWIHTVCINGRWDPEVNCSMAQIQLCPPPPQIPNSHNMTTTLNYRDGEKVSVLCQENYLIQEGEEITCKDGRWQSIPLCVEKIPCSQPPQIEHGTINSSRSSQESYAHGTKLSYTCEGGFRISEENETTCYMGKWSSPPQCEGLPCKSPPEISHGVVAHMSDSYQYGEEVTYKCFEGFGIDGPAIAKCLGEKWSHPPSCIKTDCLSLPSFENAIPMGEKKDVYKAGEQVTYTCATYYKMDGASNVTCINSRWTGRPTCRDTSCVNPPTVQNAYIVSRQMSKYPSGERVRYQCRSPYEMFGDEEVMCLNGNWTEPPQCKDSTGKCGPPPPIDNGDITSFPLSVYAPASSVEYQCQNLYQLEGNKRITCRNGQWSEPPKCLHPCVISREIMENYNIALRWTAKQKLYSRTGESVEFVCKRGYRLSSRSHTLRTTCWDGKLEYPTCAKR

SEQ ID NO: 19514 - protein, 449 aa, Homo sapiens
  Payload ID: 3904
  Gene Symbol: CFH
  Gene Name: complement factor H
  ENSP ID: ENSP00000487250
MRLLAKIICLMLWAICVAEDCNELPPRRNTEILTGSWSDQTYPEGTQAIYKCRPGYRSLGNVIMVCRKGEWVALNPLRKCQKRPCGHPGDTPFGTFTLTGGNVFEYGVKAVYTCNEGYQLLGEINYRECDTDGWTNDIPICEVVKCLPVTAPENGKIVSSAMEPDREYHFGQAVRFVCNSGYKIEGDEEMHCSDDGFWSKEKPKCVEISCKSPDVINGSPISQKIIYKENERFQYKCNMGYEYSERGDAVCTESGWRPLPSCEEKSCDNPYIPNGDYSPLRIKHRTGDEITYQCRNGFYPATRGNTAKCTSTGWIPAPRCTLKPCDYPDIKHGGLYHENMRRPYFPVAVGKYYSYYCDEHFETPSGSYWDHIHCTQDGWSPAVPCLRKCYFPYLENGYNQNHGRKFVQGKSIDVACHPGYALPKAQTTVTCMENGWSPTPRCIRVSFTL

SEQ ID NO: 19515 - protein, 330 aa, Homo sapiens
  Payload ID: 3905
  Gene Symbol: CFHR1
  Gene Name: complement factor H-related 1
  Uniprot ID: Q03591
  ENSP ID: ENSP00000314299
MWLLVSVILISRISSVGGEATFCDFPKINHGILYDEEKYKPFSQVPTGEVFYYSCEYNFVSPSKSFWTRITCTEEGWSPTPKCLRLCFFPFVENGHSESSGQTHLEGDTVQIICNTGYRLQNNENNISCVERGWSTPPKCRSTDTSCVNPPTVQNAHILSRQMSKYPSGERVRYECRSPYEMFGDEEVMCLNGNWTEPPQCKDSTGKCGPPPPIDNGDITSFPLSVYAPASSVEYQCQNLYQLEGNKRITCRNGQWSEPPKCLHPCVISREIMENYNIALRWTAKQKLYLRTGESAEFVCKRGYRLSSRSHTLRTTCWDGKLEYPTCAKR

SEQ ID NO: 19516 - protein, 271 aa, Homo sapiens
  Payload ID: 3905
  Gene Symbol: CFHR1
  Gene Name: complement factor H-related 1
  ENSP ID: ENSP00000356394
MWLLVSVILISRISSVGGEATFCDFPKINHGILYDEEKYKPFSQVPTGEVFYYSCEYNFVSPSKSFWTRITCTEEGWSPTPKCLRLCFFPFVENGHSESSGQTHLEGDTVQIICNTGYRLQNNENNISCVERGWSTPPKCRSTDSTGKCGPPPPIDNGDITSFPLSVYAPASSVEYQCQNLYQLEGNKRITCRNGQWSEPPKCLHPCVISREIMENYNIALRWTAKQKLYLRTGESAEFVCKRGYRLSSRSHTLRTTCWDGKLEYPTCAKR

SEQ ID NO: 19517 - protein, 270 aa, Homo sapiens
  Payload ID: 3906
  Gene Symbol: CFHR2
  Gene Name: complement factor H-related 2
  Uniprot ID: P36980
  ENSP ID: ENSP00000356385
MWLLVSVILISRISSVGGEAMFCDFPKINHGILYDEEKYKPFSQVPTGEVFYYSCEYNFVSPSKSFWTRITCAEEGWSPTPKCLRLCFFPFVENGHSESSGQTHLEGDTVQIICNTGYRLQNNENNISCVERGWSTPPKCRSTISAEKCGPPPPIDNGDITSFLLSVYAPGSSVEYQCQNLYQLEGNNQITCRNGQWSEPPKCLDPCVISQEIMEKYNIKLKWTNQQKLYSRTGDIVEFVCKSGYHPTKSHSFRAMCQNGKLVYPSCEEK

SEQ ID NO: 19518 - protein, 254 aa, Homo sapiens
  Payload ID: 3906
  Gene Symbol: CFHR2
  Gene Name: complement factor H-related 2
  ENSP ID: ENSP00000476677
MWLLVSVILISRISSVGGEAMFCDFPKINHGILYDEEKYKPFSQVPTGEVFYYSCEYNFVSPSKSFWTRITCAEEGWSPTPKCLRQTHLEGDTVQIICNTGYRLQNNENNISCVERGWSTPPKCRSTISAEKCGPPPPIDNGDITSFLLSVYAPGSSVEYQCQNLYQLEGNNQITCRNGQWSEPPKCLDPCVISQEIMEKYNIKLKWTNQQKLYSRTGDIVEFVCKSGYHPTKSHSFRAMCQNGKLVYPSCEEK

SEQ ID NO: 19519 - protein, 330 aa, Homo sapiens
  Payload ID: 3907
  Gene Symbol: CFHR3
  Gene Name: complement factor H-related 3
  Uniprot ID: Q02985
  ENSP ID: ENSP00000356395
MLLLINVILTLWVSCANGQVKPCDFPDIKHGGLFHENMRRPYFPVAVGKYYSYYCDEHFETPSGSYWDYIHCTQNGWSPAVPCLRKCYFPYLENGYNQNYGRKFVQGNSTEVACHPGYGLPKAQTTVTCTEKGWSPTPRCIRVRTCSKSDIEIENGFISESSSIYILNKEIQYKCKPGYATADGNSSGSITCLQNGWSAQPICINSSEKCGPPPPISNGDTTSFLLKVYVPQSRVEYQCQPYYELQGSNYVTCSNGEWSEPPRCIHPCIITEENMNKNNIKLKGRSDRKYYAKTGDTIEFMCKLGYNANTSILSFQAVCREGIVEYPRCE

SEQ ID NO: 19520 - protein, 232 aa, Homo sapiens
  Payload ID: 3907
  Gene Symbol: CFHR3
  Gene Name: complement factor H-related 3
  ENSP ID: ENSP00000356397
MLLLINVILTLWVSCANGQVKPCDFPDIKHGGLFHENMRRPYFPVAVGKYYSYYCDEHFETPSGSYWDYIHCTQNGWSPAVPCLRKCYFPYLENGYNQNYGRKFVQGNSTEVACHPGYGLPKAQTTVTCTEKGWSPTPRCIRVRTCSKSDIEIENGFISESSSIYILNKEIQYKCKPGYATADGNSSGSITCLQNGWSAQPICITACIAFRAHAQKSCTCRGRNECLILNFC

SEQ ID NO: 19521 - protein, 269 aa, Homo sapiens
  Payload ID: 3907
  Gene Symbol: CFHR3
  Gene Name: complement factor H-related 3
  Uniprot ID: Q02985
  ENSP ID: ENSP00000375845
MLLLINVILTLWVSCANGQVKPCDFPDIKHGGLFHENMRRPYFPVAVGKYYSYYCDEHFETPSGSYWDYIHCTQNGWSPAVPCLRKCYFPYLENGYNQNYGRKFVQGNSTEVACHPGYGLPKAQTTVTCTEKGWSPTPRCIRVNSSEKCGPPPPISNGDTTSFLLKVYVPQSRVEYQCQPYYELQGSNYVTCSNGEWSEPPRCIHPCIITEENMNKNNIKLKGRSDRKYYAKTGDTIEFMCKLGYNANTSILSFQAVCREGIVEYPRCE

SEQ ID NO: 19522 - protein, 232 aa, Homo sapiens; identical to SEQ ID NO: 19520
  Payload ID: 3907
  Gene Symbol: CFHR3
  Gene Name: complement factor H-related 3
  ENSP ID: ENSP00000436258

SEQ ID NO: 19523 - protein, 195 aa, Homo sapiens
  Payload ID: 3907
  Gene Symbol: CFHR3
  Gene Name: complement factor H-related 3
  ENSP ID: ENSP00000481905
MLLLINVILTLWVSCANGQVKPCDFPDIKHGGLFHENMRRPYFPVAVGKYYSYYCDEHFETPSGSYWDYIHCTQNGWSPAVPCLRKCYFPYLENGYNQNYGRKFVQGNSTEVACHPGYGLPKAQTTVTCTEKGWSPTPRCIRVRTCSKSDIEIENGFISESSSIYILNKEIQYKCKPGYATADGNSSDMVFCISY

SEQ ID NO: 19524 - protein, 331 aa, Homo sapiens
  Payload ID: 3908
  Gene Symbol: CFHR4
  Gene Name: complement factor H-related 4
  Uniprot ID: Q92496
  ENSP ID: ENSP00000251424
MLLLINVILTLWVSCANGQEVKPCDFPEIQHGGLYYKSLRRLYFPAAAGQSYSYYCDQNFVTPSGSYWDYIHCTQDGWSPTVPCLRTCSKSDIEIENGFISESSSIYILNKEIQYKCKPGYATADGNSSGSITCLQNGWSAQPICIKFCDMPVFENSRAKSNGMRFKLHDTLDYECYDGYEISYGNTTGSIVCGEDGWSHFPTCYNSSEKCGPPPPISNGDTTSFLLKVYVPQSRVEYQCQSYYELQGSNYVTCSNGEWSEPPRCIHPCIITEENMNKNNIQLKGKSDIKYYAKTGDTIEFMCKLGYNANTSVLSFQAVCREGIVEYPRCE

SEQ ID NO: 19525 - protein, 577 aa, Homo sapiens
  Payload ID: 3908
  Gene Symbol: CFHR4
  Gene Name: complement factor H-related 4
  Uniprot ID: Q92496
  ENSP ID: ENSP00000356386
MLLLINVILTLWVSCANGQVKPCDFPEIQHGGLYYKSLRRLYFPAAAGQSYSYYCDQNFVTPSGSYWDYIHCTQDGWSPTVPCLRTCSKSDVEIENGFISESSSIYILNEETQYNCKPGYATAEGNSSGSITCLQNGWSTQPICIKFCDMPVFENSRAKSNGMWFKLHDTLDYECYDGYESSYGNTTDSIVCGEDGWSHLPTCYNSSENCGPPPPISNGDTTSFPQKVYLPWSRVEYQCQSYYELQGSKYVTCSNGDWSEPPRCISMKPCEFPEIQHGHLYYENTRRPYFPVATGQSYSYYCDQNFVTPSGSYWDYIHCTQDGWLPTVPCLRTCSKSDIEIENGFISESSSIYILNKEIQYKCKPGYATADGNSSGSITCLQNGWSAQPICIKFCDMPVFENSRAKSNGMRFKLHDTLDYECYDGYEISYGNTTGSIVCGEDGWSHFPTCYNSSEKCGPPPPISNGDTTSFLLKVYVPQSRVEYQCQSYYELQGSNYVTCSNGEWSEPPRCIHPCIITEENMNKNNIQLKGKSDIKYYAKTGDTIEFMCKLGYNANTSVLSFQAVCREGIVEYPRCE

SEQ ID NO: 19526 - protein, 331 aa, Homo sapiens
  Payload ID: 3908
  Gene Symbol: CFHR4
  Gene Name: complement factor H-related 4
  ENSP ID: ENSP00000356388
MLLLINVILTLWVSCANGQEVKPCDFPEIQHGGLYYKSLRRLYFPAAAGQSYSYYCDQNFVTPSGSYWDYIHCTQDGWLPTVPCLRTCSKSDIEIENGFISESSSIYILNKEIQYKCKPGYATADGNSSGSITCLQNGWSAQPICIKFCDMPVFENSRAKSNGMRFKLHDTLDYECYDGYEISYGNTTGSIVCGEDGWSHFPTCYNSSEKCGPPPPISNGDTTSFLLKVYVPQSRVEYQCQSYYELQGSNYVTCSNGEWSEPPRCIHPCIITEENMNKNNIQLKGKSDIKYYAKTGDTIEFMCKLGYNANTSVLSFQAVCREGIVEYPRCE

SEQ ID NO: 19527 - protein, 201 aa, Homo sapiens
  Payload ID: 3908
  Gene Symbol: CFHR4
  Gene Name: complement factor H-related 4
  ENSP ID: ENSP00000477162
MENGWSPPCRCIRVRTCSKSDIEIENGFISESSSIYILNKEIQYKCKPGYATADGNSSGSITCLQNGWSAQPICINSSEKCGPPPPISNGDTTSFLLKVYVPQSRVEYQCQSYYELQGSNYVTCSNGEWSEPPRCIHPCIITEENMNKNNIQLKGKSDIKYYAKTGDTIEFMCKLGYNANTSVLSFQAVCREGIVEYPRCE

SEQ ID NO: 19528 - protein, 569 aa, Homo sapiens
  Payload ID: 3909
  Gene Symbol: CFHR5
  Gene Name: complement factor H-related 5
  Uniprot ID: Q9BXR6
  ENSP ID: ENSP00000256785
MLLLFSVILISWVSTVGGEGTLCDFPKIHHGFLYDEEDYNPFSQVPTGEVFYYSCEYNFVSPSKSFWTRITCTEEGWSPTPKCLRMCSFPFVKNGHSESSGLIHLEGDTVQIICNTGYSLQNNEKNISCVERGWSTPPICSFTKGECHVPILEANVDAQPKKESYKVGDVLKFSCRKNLIRVGSDSVQCYQFGWSPNFPTCKGQVRSCGPPPQLSNGEVKEIRKEEYGHNEVVEYDCNPNFIINGPKKIQCVDGEWTTLPTCVEQVKTCGYIPELEYGYVQPSVPPYQHGVSVEVNCRNEYAMIGNNMITCINGIWTELPMCVATHQLKRCKIAGVNIKTLLKLSGKEFNHNSRIRYRCSDIFRYRHSVCINGKWNPEVDCTEKREQFCPPPPQIPNAQNMTTTVNYQDGEKVAVLCKENYLLPEAKEIVCKDGRWQSLPRCVESTAYCGPPPSINNGDTTSFPLSVYPPGSTVTYRCQSFYKLQGSVTVTCRNKQWSEPPRCLDPCVVSEENMNKNNIQLKWRNDGKLYAKTGDAVEFQCKFPHKAMISSPPFRAICQEGKFEYPICE

SEQ ID NO: 19529 - protein, 270 aa, Homo sapiens; identical to SEQ ID NO: 19517
  Payload ID: 3910
  Gene Symbol:
  Gene Name: Complement factor H-related protein 2  [Source:UniProtKB/Swiss -Prot
  Acc:P36980]
  Uniprot ID: P36980
  ENSP ID: ENSP00000356391

SEQ ID NO: 19530 - protein, 583 aa, Homo sapiens
  Payload ID: 3911
  Gene Symbol: CFI
  Gene Name: complement factor I
  Uniprot ID: P05156
  ENSP ID: ENSP00000378130
MKLLHVFLLFLCFHLRFCKVTYTSQEDLVEKKCLAKKYTHLSCDKVFCQPWQRCIEGTCVCKLPYQCPKNGTAVCATNRRSFPTYCQQKSLECLHPGTKFLNNGTCTAEGKFSVSLKHGNTDSEGIVEVKLVDQDKTMFICKSSWSMREANVACLDLGFQQGADTQRRFKLSDLSINSTECLHVHCRGLETSLAECTFTKRRTMGYQDFADVVCYTQKADSPMDDFFQCVNGKYISQMKACDGINDCGDQSDELCCKACQGKGFHCKSGVCIPSQYQCNGEVDCITGEDEVGCAGFASVTQEETEILTADMDAERRRIKSLLPKLSCGVKNRMHIRRKRIVGGKRAQLGDLPWQVAIKDASGITCGGIYIGGCWILTAAHCLRASKTHRYQIWTTVVDWIHPDLKRIVIEYVDRIIFHENYNAGTYQNDIALIEMKKDGNKKDCELPRSIPACVPWSPYLFQPNDTCIVSGWGREKDNERVFSLQWGEVKLISNCSKFYGNRFYEKEMECAGTYDGSIDACKGDSGGPLVCMDANNVTYVWGVVSWGENCGKPEFPGVYTKVANYFDWISYHVGRPFISQYNV

SEQ ID NO: 19531 - protein, 591 aa, Homo sapiens
  Payload ID: 3911
  Gene Symbol: CFI
  Gene Name: complement factor I
  ENSP ID: ENSP00000378131
MKLLHVFLLFLCFHLRFCKVTYTSQEDLVEKKCLAKKYTHLSCDKVFCQPWQRCIEGTCVCKLPYQCPKNGTAVCATNRRSFPTYCQQKSLECLHPGTKFLNNGTCTAEGKFSVSLKHGNTDSEGIVEVKLVDQDKTMFICKSSWSMREANVACLDLGFQQGADTQRRFKLSDLSINSTECLHVHCRGLETSLAECTFTKRRTMGYQDFADVVCYTQKADSPMDDFFQCVNGKYISQMKACDGINDCGDQSDELCCKACQGKGFHCKSGVCIPSQYQCNGEVDCITGEDEVGCAAARHPTIQGFASVTQEETEILTADMDAERRRIKSLLPKLSCGVKNRMHIRRKRIVGGKRAQLGDLPWQVAIKDASGITCGGIYIGGCWILTAAHCLRASKTHRYQIWTTVVDWIHPDLKRIVIEYVDRIIFHENYNAGTYQNDIALIEMKKDGNKKDCELPRSIPACVPWSPYLFQPNDTCIVSGWGREKDNERVFSLQWGEVKLISNCSKFYGNRFYEKEMECAGTYDGSIDACKGDSGGPLVCMDANNVTYVWGVVSWGENCGKPEFPGVYTKVANYFDWISYHVGRPFISQYNV

SEQ ID NO: 19532 - protein, 161 aa, Homo sapiens
  Payload ID: 3911
  Gene Symbol: CFI
  Gene Name: complement factor I
  ENSP ID: ENSP00000422009
MKLLHVFLLFLCFHLRFCKVTYTSQEDLVEKKCLAKKYTHLSCDKVFCQPWQRCIEGTCVCKLPYQCPKNGTAVCATNRRSFPTYCQQKSLECLHPGTKFLNNGTCTAEGKFSVSLKHGNTDSEGIVEVKLVDQDKTMFICKSSWSMREANVACLDLGFQQ

SEQ ID NO: 19533 - protein, 576 aa, Homo sapiens
  Payload ID: 3911
  Gene Symbol: CFI
  Gene Name: complement factor I
  ENSP ID: ENSP00000427438
MKLLHVFLLFLCFHLRFCKVTYTSQEDLVEKKCLAKKYTHLSCDKVFCQPWQRCIEGTCVCKLPYQCPKNGTAVCATNRRSFPTYCQQKSLECLHPGTKFLNNGTCTAEGKFSVSLKHGNTDSEGIVEVKLVDQDKTMFICKSSWSMREANVACLDLGFQQGADTQRRFKLSDLSINSTECLHVHCRGLETSLAECTFTKRRTMGYQDFADVVCYTQKADSPMDDFFQCVNGKYISQMKACDGINDCGDQSDELCCKACQGKGFHCKSGVCIPSQYQCNGEVDCITGEDEVGCAEETEILTADMDAERRRIKSLLPKLSCGVKNRMHIRRKRIVGGKRAQLGDLPWQVAIKDASGITCGGIYIGGCWILTAAHCLRASKTHRYQIWTTVVDWIHPDLKRIVIEYVDRIIFHENYNAGTYQNDIALIEMKKDGNKKDCELPRSIPACVPWSPYLFQPNDTCIVSGWGREKDNERVFSLQWGEVKLISNCSKFYGNRFYEKEMECAGTYDGSIDACKGDSGGPLVCMDANNVTYVWGVVSWGENCGKPEFPGVYTKVANYFDWISYHVGRPFISQYNV

SEQ ID NO: 19534 - protein, 378 aa, Homo sapiens
  Payload ID: 3911
  Gene Symbol: CFI
  Gene Name: complement factor I
  ENSP ID: ENSP00000483416
MKLLHVFLLFLCFHLRFCKVTYTSQEDLVEKKCLAKKYTHLSCDKVFCQPWQRCIEGTCVCKLPYQCPKNGTAVCATNRRSFPTYCQQKSLECLHPGTKFLNNGTCTAEGKFSVSLKHGNTDSEGIVEVKLVDQDKTMFICKSSWSMREANVACLDLGFQQGADTQRRFKLSDLSINSTECLHVHCRGLETSLAECTFTKRRTMGYQDFADVVCYTQKADSPMDDFFQCVNGKYISQMKACDGINDCGDQSDELCCKACQGKGFHCKSGVCIPSQYQCNGEVDCITGEDEVGCAGFASVTQEETEILTADMDAERRRIKSLLPKLSCGVKNRMHIRRKRIVGGKRAQLGGKMKQISLDIFKGLHRVYAILEFCCIILK

SEQ ID NO: 19535 - protein, 469 aa, Homo sapiens
  Payload ID: 3912
  Gene Symbol: CFP
  Gene Name: complement factor properdin
  Uniprot ID: P27918
  ENSP ID: ENSP00000247153
MITEGAQAPRLLLPPLLLLLTLPATGSDPVLCFTQYEESSGKCKGLLGGGVSVEDCCLNTAFAYQKRSGGLCQPCRSPRWSLWSTWAPCSVTCSEGSQLRYRRCVGWNGQCSGKVAPGTLEWQLQACEDQQCCPEMGGWSGWGPWEPCSVTCSKGTRTRRRACNHPAPKCGGHCPGQAQESEACDTQQVCPTHGAWATWGPWTPCSASCHGGPHEPKETRSRKCSAPEPSQKPPGKPCPGLAYEQRRCTGLPPCPVAGGWGPWGPVSPCPVTCGLGQTMEQRTCNHPVPQHGGPFCAGDATRTHICNTAVPCPVDGEWDSWGEWSPCIRRNMKSISCQEIPGQQSRGRTCRGRKFDGHRCAGQQQDIRHCYSIQHCPLKGSWSEWSTWGLCMPPCGPNPTRARQRLCTPLLPKYPPTVSMVEGQGEKNVTFWGRPLPRCEELQGQKLVVEEKRPCLHVPACKDPEEEEL

SEQ ID NO: 19536 - protein, 415 aa, Homo sapiens
  Payload ID: 3912
  Gene Symbol: CFP
  Gene Name: complement factor properdin
  ENSP ID: ENSP00000366204
MITEGAQAPRLLLPPLLLLLTLPATGSDPVLCFTQYEESSGKCKGLLGGGVSVEDCCLNTAFAYQKRSGGLCQPCRSPRWSLWSTWAPCSVTCSEGSQLRYRRCVGWNGQCSGKVAPGTLEWQLQACEDQQCCPEMGGWSGWGPWEPCSVTCSKGTRTRRRACNHPAPKCGGHCPGQAQESEACDTQQVCPTHGAWATWGPWTPCSASCHGGPHEPKETRSRKCSAPEPSQKPPGKPCPGLAYEQRRCTGLPPCPVAGGWGPWGPVSPCPVTCGLGQTMEQRTCNHPVPQHGGPFCAGDATRTHICNTAVPCPVDGEWDSWGEWSPCIRRNMKSISCQEIPGQQSRGRTCRGRKFDGHRCAGQQQDIRHCYSIQHCPLKGSWSEWSTWGLCMPPCGPNPTRARQRLCTPLLPKYP

SEQ ID NO: 19537 - protein, 469 aa, Homo sapiens; identical to SEQ ID NO: 19535
  Payload ID: 3912
  Gene Symbol: CFP
  Gene Name: complement factor properdin
  Uniprot ID: P27918
  ENSP ID: ENSP00000380189

SEQ ID NO: 19538 - protein, 167 aa, Homo sapiens
  Payload ID: 3912
  Gene Symbol: CFP
  Gene Name: complement factor properdin
  ENSP ID: ENSP00000418258
MGGWSGWGPWEPCSVTCSKGTRTRRRACNHPAPKCGGHCPGQAQESEACDTQQVCPTHGAWATWGPWTPCSASCHGGPHEPKETRSRKCSAPEPSQKPPGKPCPGLAYEQRRCTGLPPCPVAGGWGPWGPVSPCPVTCGLGQTMEQRTCNHPVPQHGGPFCAGDATR

SEQ ID NO: 19539 - protein, 134 aa, Homo sapiens
  Payload ID: 3913
  Gene Symbol: CPLX1
  Gene Name: complexin 1
  Uniprot ID: O14810
  ENSP ID: ENSP00000305613
MEFVMKQALGGATKDMGKMLGGDEEKDPDAAKKEEERQEALRQAEEERKAKYAKMEAEREAVRQGIRDKYGIKKKEEREAEAQAAMEANSEGSLTRPKKAIPPGCGDEVEEEDESILDTVIKYLPGPLQDMLKK

SEQ ID NO: 19540 - protein, 110 aa, Homo sapiens
  Payload ID: 3913
  Gene Symbol: CPLX1
  Gene Name: complexin 1
  ENSP ID: ENSP00000421947
MGKMLGGDEEKDPDAAKKEEERQEALRQAEEERKAKYAKMEAEREAVRQGIRDKYGIKKKEEREAEAQAAMEANSEGSLTRPKKAIPPGCGDEVEEEDESILDTVIKYLP

SEQ ID NO: 19541 - protein, 113 aa, Homo sapiens
  Payload ID: 3913
  Gene Symbol: CPLX1
  Gene Name: complexin 1
  ENSP ID: ENSP00000425960
MEFVMKQALGGATKDMGKMLGGDEEKDPDAAKKEEERQEALRQGIRDKYGIKKKEEREAEAQAAMEANSEGSLTRPKKAIPPGCGDEVEEEDESILDTVIKYLPGPLQDMLKK

SEQ ID NO: 19542 - protein, 134 aa, Homo sapiens
  Payload ID: 3914
  Gene Symbol: CPLX2
  Gene Name: complexin 2
  Uniprot ID: Q6PUV4
  ENSP ID: ENSP00000352544
MDFVMKQALGGATKDMGKMLGGEEEKDPDAQKKEEERQEALRQQEEERKAKHARMEAEREKVRQQIRDKYGLKKKEEKEAEEKAALEQPCEGSLTRPKKAIPAGCGDEEEEEEESILDTVLKYLPGPLQDMFKK

SEQ ID NO: 19543 - protein, 134 aa, Homo sapiens; identical to SEQ ID NO: 19542
  Payload ID: 3914
  Gene Symbol: CPLX2
  Gene Name: complexin 2
  Uniprot ID: Q6PUV4
  ENSP ID: ENSP00000377346

SEQ ID NO: 19544 - protein, 111 aa, Homo sapiens
  Payload ID: 3914
  Gene Symbol: CPLX2
  Gene Name: complexin 2
  ENSP ID: ENSP00000421106
MDFVMKQALGGATKDMGKMLGGEEEKDPDAQKKEEERQEALRQQEEERKAKHARMEAEREKVRQQIRDKYGLKKKEEKEAEEKAALEQPCEGSLTRPKKAIPAGCGDEEEE

SEQ ID NO: 19545 - protein, 134 aa, Homo sapiens; identical to SEQ ID NO: 19542
  Payload ID: 3914
  Gene Symbol: CPLX2
  Gene Name: complexin 2
  Uniprot ID: Q6PUV4
  ENSP ID: ENSP00000421825

SEQ ID NO: 19546 - protein, 6 aa, Homo sapiens
  Payload ID: 3914
  Gene Symbol: CPLX2
  Gene Name: complexin 2
  ENSP ID: ENSP00000423564
MDFVMK

SEQ ID NO: 19547 - protein, 119 aa, Homo sapiens
  Payload ID: 3914
  Gene Symbol: CPLX2
  Gene Name: complexin 2
  ENSP ID: ENSP00000423612
MDFVMKQALGGATKDMGKMLGGEEEKDPDAQKKEEERQEALRQQEEERKAKHARMEAEREKVRQQIRDKYGLKKKEEKEAEEKAALEQPCEGSLTRPKKAIPAGCGDEEEEEEESILDT

SEQ ID NO: 19548 - protein, 77 aa, Homo sapiens
  Payload ID: 3914
  Gene Symbol: CPLX2
  Gene Name: complexin 2
  ENSP ID: ENSP00000424305
MDFVMKQALGGATKDMGKMLGGEEEKDPDAQKKEEERQEALRQQEEERKAKHARMEAEREKVRQQIRDKYGLKKKEE

SEQ ID NO: 19549 - protein, 37 aa, Homo sapiens
  Payload ID: 3914
  Gene Symbol: CPLX2
  Gene Name: complexin 2
  ENSP ID: ENSP00000425284
MDFVMKQALGGATKDMGKMLGGEEEKDPDAQKKEEER

SEQ ID NO: 19550 - protein, 70 aa, Homo sapiens
  Payload ID: 3914
  Gene Symbol: CPLX2
  Gene Name: complexin 2
  ENSP ID: ENSP00000425973
MDFVMKQALGGATKDMGKMLGGEEEKDPDAQKKEEERQEALRQQEEERKAKHARMEAEREKVRQQIRDKD

SEQ ID NO: 19551 - protein, 158 aa, Homo sapiens
  Payload ID: 3915
  Gene Symbol: CPLX3
  Gene Name: complexin 3
  Uniprot ID: Q8WVH0
  ENSP ID: ENSP00000378464
MAFMVKTMVGGQLKNLTGSLGGGEDKGDGDKSAAEAQGMSREEYEEYQKQLVEEKMERDAQFTQRKAERATLRSHFRDKYRLPKNETDESQIQMAGGDVELPRELAKMIEEDTEEEEEKASVLGQLASLPGLNLGSLKDKAQATLGDLKQSAEKCHVM

SEQ ID NO: 19552 - protein, 160 aa, Homo sapiens
  Payload ID: 3916
  Gene Symbol: CPLX4
  Gene Name: complexin 4
  Uniprot ID: Q7Z7G2
  ENSP ID: ENSP00000299721
MAFLMKSMISNQVKNLGFGGGSEENKEEGGASDPAAAQGMTREEYEEYQKQMIEEKMERDAAFTQKKAERACLRVHLREKYRLPKSEMDENQIQMAGDDVDLPEDLRKMVDEDQEEEEDKDSILGQIQNLQNMDLDTIKEKAQATFTEIKQTAEQKCSVM

SEQ ID NO: 19553 - protein, 97 aa, Homo sapiens
  Payload ID: 3916
  Gene Symbol: CPLX4
  Gene Name: complexin 4
  ENSP ID: ENSP00000466304
MAFLMKSMISNQVKNLGFGGGSEENKEEGGASDPAAAQGMTREEYEEYQKQMIEEKMERDAAFTQKKAERACLRVHLREKYRLPKCTGICMSPPCCR

SEQ ID NO: 19554 - protein, 980 aa, Homo sapiens
  Payload ID: 3917
  Gene Symbol: COG1
  Gene Name: component of oligomeric golgi complex 1
  Uniprot ID: Q8WTW3
  ENSP ID: ENSP00000299886
MATAATSPALKRLDLRDPAALFETHGAEEIRGLERQVRAEIEHKKEELRQMVGERYRDLIEAADTIGQMRRCAVGLVDAVKATDQYCARLRQAGSAAPRPPRAQQPQQPSQEKFYSMAAQIKLLLEIPEKIWSSMEASQCLHATQLYLLCCHLHSLLQLDSSSSRYSPVLSRFPILIRQVAAASHFRSTILHESKMLLKCQGVSDQAVAEALCSIMLLEESSPRQALTDFLLARKATIQKLLNQPHHGAGIKAQICSLVELLATTLKQAHALFYTLPEGLLPDPALPCGLLFSTLETITGQHPAGKGTGVLQEEMKLCSWFKHLPASIVEFQPTLRTLAHPISQEYLKDTLQKWIHMCNEDIKNGITNLLMYVKSMKGLAGIRDAMWELLTNESTNHSWDVLCRRLLEKPLLFWEDMMQQLFLDRLQTLTKEGFDSISSSSKELLVSALQELESSTSNSPSNKHIHFEYNMSLFLWSESPNDLPSDAAWVSVANRGQFASSGLSMKAQAISPCVQNFCSALDSKLKVKLDDLLAYLPSDDSSLPKDVSPTQAKSSAFDRYADAGTVQEMLRTQSVACIKHIVDCIRAELQSIEEGVQGQQDALNSAKLHSVLFMARLCQSLGELCPHLKQCILGKSESSEKPAREFRALRKQGKVKTQEIIPTQAKWQEVKEVLLQQSVMGYQVWSSAVVKVLIHGFTQSLLLDDAGSVLATATSWDELEIQEEAESGSSVTSKIRLPAQPSWYVQSFLFSLCQEINRVGGHALPKVTLQEMLKSCMVQVVAAYEKLSEEKQIKKEGAFPVTQNRALQLLYDLRYLNIVLTAKGDEVKSGRSKPDSRIEKVTDHLEALIDPFDLDVFTPHLNSNLHRLVQRTSVLFGLVTGTENQLAPRSSTFNSQEPHNILPLASSQIRFGLLPLSMTSTRKAKSTRNIETKAQVVPPARSTAGDPTVPGSLFRQLVSEEDNTSAPSLFKLGWLSSMTK

SEQ ID NO: 19555 - protein, 962 aa, Homo sapiens
  Payload ID: 3917
  Gene Symbol: COG1
  Gene Name: component of oligomeric golgi complex 1
  ENSP ID: ENSP00000400111
  MOD_RES (1)..(1): Any amino acid
XATAATSPALKRLDLRDPAALFETHGAEEIRGLERQVRAEIEHKKEELRQMVGERYRDLIEAADTIGQMRRCAVGLVDAVKATDQYCARLRQAGSAAPRPPRAQQPQQPSQEKFYSMAAQIKLLLEIPEKIWSSMEASQCLHATQLYLLCCHLHSLLQLDSSSSRYSPVLSRFPILIRQVAAASHFRSTILHESKMLLKCQGVSDQAVAEALCSIMLLEESSPRQALTDFLLARKATIQKLLNQPHHGAGIKAQICSLVELLATTLKQAHALFYTLPEGLLPDPALPCGLLFSTLETITGQHPAGKGTGVLQEEMKLCSWFKHLPASIVEFQPTLRTLAHPISQEYLKDTLQKWIHMCNEDIKNGITNLLMYVKSMKGLAGIRDAMWELLTNESTNHSWDVLCRRLLEKPLLFWEDMMQQLFLDRLQTLTKEGFDSISSSSKELLVSALQELESSTSNSPSNKHIHFEYNMSLFLWSESPNDLPSDAAWVSVANRGQFASSGLSMKAQAISPCVQNFCSALDSKLKVKLDDLLAYLPSDDSSLPKDVSPTQAKSSAFDRYADAGTVQEMLRTQSVACIKHIVDCIRAELQSIEEGVQGQQDALNSAKLHSVLFMARLCQSLGELCPHLKQCILGKSESSEKPAREFRALRKQGKVKTQEIIPTQAKWQEVKEVLLQQSVMGYQVWSSAVVKVLIHGFTQSLLLDDAGSVLATATSWDELEIQEEAESGSSVTSKIRLPAQPSWYVQSFLFSLCQEINRVGGHALPKVTLQEMLKSCMVQVVAAYEKLSEEKQIKKEGAFPVTQNRALQLLYDLRYLNIVLTAKGDEVKSGRSKPDSRIEKVTDHLEALIDPFDLDVFTPHLNSNLHRLVQRTSVLFGLVTGTENQLAPRSSTFNSQEPHNILPLASSQIRFGLLPLSMTSTRKAKSTRNIETKAQVGAKSKRLIRGWVPTSHRATHDQLPFK

SEQ ID NO: 19556 - protein, 124 aa, Homo sapiens
  Payload ID: 3917
  Gene Symbol: COG1
  Gene Name: component of oligomeric golgi complex 1
  ENSP ID: ENSP00000462101
  MOD_RES (1)..(1): Any amino acid
XALKRLDLRDPAALFETHGAEEIRGLERQVRAEIEHKKEELRQMVGERYRDLIEAADTIGQMRRCAVGLVDAVKATDQYCARLRQAGSAAPRPPRAQQFCAFPCSHSSHPRRSSTAWLPRSSYS

SEQ ID NO: 19557 - protein, 26 aa, Homo sapiens
  Payload ID: 3917
  Gene Symbol: COG1
  Gene Name: component of oligomeric golgi complex 1
  ENSP ID: ENSP00000462709
QLAPRSSTFNSQEPHNILPLASSQIR

SEQ ID NO: 19558 - protein, 102 aa, Homo sapiens
  Payload ID: 3917
  Gene Symbol: COG1
  Gene Name: component of oligomeric golgi complex 1
  ENSP ID: ENSP00000463298
  MOD_RES (1)..(1): Any amino acid
XKVTDHLEALIDPFDLDVFTPHLNSNLHRLVQRTSVLFGLVTGTENQLAPRSSTFNSQEPHNILPLASSQIRFGLLPLSMTSTRKAKSTRNIETKAQYDANC

SEQ ID NO: 19559 - protein, 126 aa, Homo sapiens
  Payload ID: 3917
  Gene Symbol: COG1
  Gene Name: component of oligomeric golgi complex 1
  ENSP ID: ENSP00000463696
  MOD_RES (1)..(1): Any amino acid
XLNIVLTAKGDEVKSGRSKPDSRIEKVTDHLEALIDPFDLDVFTPHLNSNLHRLVQRTSVLFGLVTGTENQLAPRSSTFNSQEPHNILPLASSQIRFGLLPLSMTSTRKAKSTRNIETKAQYDANC

SEQ ID NO: 19560 - protein, 940 aa, Homo sapiens
  Payload ID: 3917
  Gene Symbol: COG1
  Gene Name: component of oligomeric golgi complex 1
  ENSP ID: ENSP00000479450
MATAATSPALKRLDLRDPAALFETHGAEEIRGLERQVRAEIEHKKEELRQMVGERYRDLIEAADTIGQMRRCAVGLVDAVKATDQYCARLRQAGSAAPRPPRAQQPQQPSQEKFYSMAAQIKLLLEIPEKIWSSMEASQCLHATQLYLLCCHLHSLLQLDSSSSRYSPVLSRFPILIRQVAAASHFRSTILHESKMLLKCQGVSDQAVAEALCSIMLLEESSPRQALTDFLLARKATIQKLLNQPHHGAGIKAQICSLVELLATTLKQAHALFYTLPEGLLPDPALPCGLLFSTLETITGQHPAGKGTGVLQEEMKLCSWFKHLPASIVEFQPTLRTLAHPISQEYLKDTLQKWIHMCNEDIKNGITNLLMYVKSMKGLAGIRDAMWELLTNESTNHSWDVLCRRLLEKPLLFWEDMMQQLFLDRLQTLTKEGFDSISSSSKELLVSALQELESSTSNSPSNKHIHFEYNMSLFLWSESPNDLPSDAAWVSVANRGQFASSGLSMKAQAISPCVQNFCSALDSKLKVKLDDLLAYLPSDDSSLPKDVSPTQAKSSAFDRYADAGTVQEMLRTQSVACIKHIVDCIRAELQSIEEGVQGQQDALNSAKLHSVLFMARLCQSLGELCPHLKQCILGKSESSEKPAREFRALRKQGKVKTQEIIPTQAKWQEVKEVLLQQSVMGYQVWSSAVVKVLIHGFTQSLLLDDAGSVLATATSWDELEIQEEAESGSSVTSKIRLPAQPSWYVQSFLFSLCQEINRVGGHALPKVTLQEMLKSCMVQVVAAYEKLSEEKQIKKEGAFPVTQNRALQLLYDLRYLNIVLTAKGDEVKSGRSKPDSRIEKVTDHLEALIDPFDLDVFTPHLNSNLHRLVQRTSVLFGLVTGTENQLAPRSSTFNSQEPHNILPLASSQIRFGLLPLSMTSTRKAKSTRNIETKAQYDANC

SEQ ID NO: 19561 - protein, 737 aa, Homo sapiens
  Payload ID: 3918
  Gene Symbol: COG2
  Gene Name: component of oligomeric golgi complex 2
  Uniprot ID: Q14746
  ENSP ID: ENSP00000355628
MEKSRMNLPKGPDTLCFDKDEFMKEDFDVDHFVSDCRKRVQLEELRDDLELYYKLLKTAMVELINKDYADFVNLSTNLVGMDKALNQLSVPLGQLREEVLSLRSSVSEGIRAVDERMSKQEDIRKKKMCVLRLIQVIRSVEKIEKILNSQSSKETSALEASSPLLTGQILERIATEFNQLQFHAVQSKGMPLLDKVRPRIAGITAMLQQSLEGLLLEGLQTSDVDIIRHCLRTYATIDKTRDAEALVGQVLVKPYIDEVIIEQFVESHPNGLQVMYNKLLEFVPHHCRLLREVTGGAISSEKGNTVPGYDFLVNSVWPQIVQGLEEKLPSLFNPGNPDAFHEKYTISMDFVRRLERQCGSQASVKRLRAHPAYHSFNKKWNLPVYFQIRFREIAGSLEAALTDVLEDAPAESPYCLLASHRTWSSLRRCWSDEMFLPLLVHRLWRLTLQILARYSVFVNELSLRPISNESPKEIKKPLVTGSKEPSITQGNTEDQGSGPSETKPVVSISRTQLVYVVADLDKLQEQLPELLEIIKPKLEMIGFKNFSSISALEDSQSSFSACVPSLSSKIIQDLSDSCFGFLKSALEVPRLYRRTNKEVPTTASSYVDSALKPLFQLQSGHKDKLKQAIIQQWLEGTLSESTHKYYETVSDVLNSVKKMEESLKRLKQARKTTPANPVGPSGGMSDDDKIRLQLALDVEYLGEQIQKLGLQASDIKSFSALAELVAAAKDQATAEQP

SEQ ID NO: 19562 - protein, 738 aa, Homo sapiens
  Payload ID: 3918
  Gene Symbol: COG2
  Gene Name: component of oligomeric golgi complex 2
  Uniprot ID: Q14746
  ENSP ID: ENSP00000355629
MEKSRMNLPKGPDTLCFDKDEFMKEDFDVDHFVSDCRKRVQLEELRDDLELYYKLLKTAMVELINKDYADFVNLSTNLVGMDKALNQLSVPLGQLREEVLSLRSSVSEGIRAVDERMSKQEDIRKKKMCVLRLIQVIRSVEKIEKILNSQSSKETSALEASSPLLTGQILERIATEFNQLQFHAVQSKGMPLLDKVRPRIAGITAMLQQSLEGLLLEGLQTSDVDIIRHCLRTYATIDKTRDAEALVGQVLVKPYIDEVIIEQFVESHPNGLQVMYNKLLEFVPHHCRLLREVTGGAISSEKGNTVPGYDFLVNSVWPQIVQGLEEKLPSLFNPGNPDAFHEKYTISMDFVRRLERQCGSQASVKRLRAHPAYHSFNKKWNLPVYFQIRFREIAGSLEAALTDVLEDAPAESPYCLLASHRTWSSLRRCWSDEMFLPLLVHRLWRLTLQILARYSVFVNELSLRPISNESPKEIKKPLVTGSKEPSITQGNTEDQGSGPSETKPVVSISRTQLVYVVADLDKLQEQLPELLEIIKPKLEMIGFKNFSSISAALEDSQSSFSACVPSLSSKIIQDLSDSCFGFLKSALEVPRLYRRTNKEVPTTASSYVDSALKPLFQLQSGHKDKLKQAIIQQWLEGTLSESTHKYYETVSDVLNSVKKMEESLKRLKQARKTTPANPVGPSGGMSDDDKIRLQLALDVEYLGEQIQKLGLQASDIKSFSALAELVAAAKDQATAEQP

SEQ ID NO: 19563 - protein, 679 aa, Homo sapiens
  Payload ID: 3918
  Gene Symbol: COG2
  Gene Name: component of oligomeric golgi complex 2
  ENSP ID: ENSP00000440349
MVELINKDYADFVNLSTNLVGMDKALNQLSVPLGQLREEVLSLRSSVSEGIRAVDERMSKQEDIRKKKMCVLRLIQVIRSVEKIEKILNSQSSKETSALEASSPLLTGQILERIATEFNQLQFHAVQSKGMPLLDKVRPRIAGITAMLQQSLEGLLLEGLQTSDVDIIRHCLRTYATIDKTRDAEALVGQVLVKPYIDEVIIEQFVESHPNGLQVMYNKLLEFVPHHCRLLREVTGGAISSEKGNTVPGYDFLVNSVWPQIVQGLEEKLPSLFNPGNPDAFHEKYTISMDFVRRLERQCGSQASVKRLRAHPAYHSFNKKWNLPVYFQIRFREIAGSLEAALTDVLEDAPAESPYCLLASHRTWSSLRRCWSDEMFLPLLVHRLWRLTLQILARYSVFVNELSLRPISNESPKEIKKPLVTGSKEPSITQGNTEDQGSGPSETKPVVSISRTQLVYVVADLDKLQEQLPELLEIIKPKLEMIGFKNFSSISAALEDSQSSFSACVPSLSSKIIQDLSDSCFGFLKSALEVPRLYRRTNKEVPTTASSYVDSALKPLFQLQSGHKDKLKQAIIQQWLEGTLSESTHKYYETVSDVLNSVKKMEESLKRLKQARKTTPANPVGPSGGMSDDDKIRLQLALDVEYLGEQIQKLGLQASDIKSFSALAELVAAAKDQATAEQP

SEQ ID NO: 19564 - protein, 124 aa, Homo sapiens
  Payload ID: 3918
  Gene Symbol: COG2
  Gene Name: component of oligomeric golgi complex 2
  ENSP ID: ENSP00000476305
MEKSRMNLPKGPDTLCFDKDEFMKEDFDVDHFVSDCRKRVQLEELRDDLELYYKLLKTAMVELINKDYADFVNLSTNLVGMDKALNQLSVPLGQLREEVLIMSAVSWDSPCLSHWRQGLHPDEQ

SEQ ID NO: 19565 - protein, 828 aa, Homo sapiens
  Payload ID: 3919
  Gene Symbol: COG3
  Gene Name: component of oligomeric golgi complex 3
  Uniprot ID: Q96JB2
  ENSP ID: ENSP00000258654
MAEAALLLLPEAAAERDAREKLALWDRRPDTTAPLTDRQTDSVLELKAAAENLPVPAELPIEDLCSLTSQSLPIELTSVVPESTEDILLKGFTSLGMEEERIETAQQFFSWFAKLQTQMDQDEGTKYRQMRDYLSGFQEQCDAILNDVNSALQHLESLQKQYLFVSNKTGTLHEACEQLLKEQSELVDLAENIQQKLSYFNELETINTKLNSPTLSVNSDGFIPMLAKLDDCITYISSHPNFKDYPIYLLKFKQCLSKALHLMKTYTVNTLQTLTSQLLKRDPSSVPNADNAFTLFYVKFRAAAPKVRTLIEQIELRSEKIPEYQQLLNDIHQCYLDQRELLLGPSIACTVAELTSQNNRDHCALVRSGCAFMVHVCQDEHQLYNEFFTKPTSKLDELLEKLCVSLYDVFRPLIIHVIHLETLSELCGILKNEVLEDHVQNNAEQLGAFAAGVKQMLEDVQERLVYRTHIYIQTDITGYKPAPGDLAYPDKLVMMEQIAQSLKDEQKKVPSEASFSDVHLEEGESNSLTKSGSTESLNPRPQTTISPADLHGMWYPTVRRTLVCLSKLYRCIDRAVFQGLSQEALSACIQSLLGASESISKNKTQIDGQLFLIKHLLILREQIAPFHTEFTIKEISLDLKKTRDAAFKILNPMTVPRFFRLNSNNALIEFLLEGTPEIREHYLDSKKDVDRHLKSACEQFIQQQTKLFVEQLEEFMTKVSALKTMASQGGPKYTLSQQPWAQPAKVNDLAATAYKTIKTKLPVTLRSMSLYLSNKDTEFILFKPVRNNIQQVFQKFHALLKEEFSPEDIQIIACPSMEQLSLLLLVSK

SEQ ID NO: 19566 - protein, 68 aa, Homo sapiens
  Payload ID: 3919
  Gene Symbol: COG3
  Gene Name: component of oligomeric golgi complex 3
  ENSP ID: ENSP00000477882
  MOD_RES (1)..(1): Any amino acid
XIDGQLFLIKHLLILREQIAPFHTEFTIKEISLDLKKTRGFSVKNNGQSGRPQVYSLTAALGTTSKGQ

SEQ ID NO: 19567 - protein, 444 aa, Homo sapiens
  Payload ID: 3919
  Gene Symbol: COG3
  Gene Name: component of oligomeric golgi complex 3
  Uniprot ID: Q96JB2
  ENSP ID: ENSP00000481332
MAEAALLLLPEAAAERDAREKLALWDRRPDTTAPLTDRQTDSVLELKAAAENLPVPAELPIEDLCSLTSQSLPIELTSVVPESTEDILLKGFTSLGMEEERIETAQQFFSWFAKLQTQMDQDEGTKYRQMRDYLSGFQEQCDAILNDVNSALQHLESLQKQYLFVSNKTGTLHEACEQLLKEQSELVDLAENIQQKLSYFNELETINTKLNSPTLSVNSDGFIPMLAKLDDCITYISSHPNFKDYPIYLLKFKQCLSKALHLMKTYTVNTLQTLTSQLLKRDPSSVPNADNAFTLFYVKFRAAAPKVRTLIEQIELRSEKIPEYQQLLNDIHQCYLDQRELLLGPSIACTVAELTSQNNRDHCALVRSGCAFMVHVCQDEHQLYNEFFTKPTSKLDELLEKLCVSLYDVFRPLIIHVIHLETLSELCGILKNEVLEDHVQNNGK

SEQ ID NO: 19568 - protein, 85 aa, Homo sapiens
  Payload ID: 3919
  Gene Symbol: COG3
  Gene Name: component of oligomeric golgi complex 3
  ENSP ID: ENSP00000482221
PEAAAERDAREKLALWDRRPDTTAPLTDRQTDSVLELKAAAENLPVPAEDMVPEVDLKSMKAQVEISLAQLSNSFIPWIIKVVCS

SEQ ID NO: 19569 - protein, 789 aa, Homo sapiens
  Payload ID: 3920
  Gene Symbol: COG4
  Gene Name: component of oligomeric golgi complex 4
  ENSP ID: ENSP00000315775
MGTKMADLDSPPKLSGVQQPSEGVGGGRCSEISAELIRSLTELQELEAVYERLCGEEKVVERELDALLEQQNTIESKMVTLHRMGPNLQLIEGDAKQLAGMITFTCNLAENVSSKVRQLDLAKNRLYQAIQRADDILDLKFCMDGVQTALRSEDYEQAAAHTHRYLCLDKSVIELSRQGKEGSMIDANLKLLQEAEQRLKAIVAEKFAIATKEGDLPQVERFFKIFPLLGLHEEGLRKFSEYLCKQVASKAEENLLMVLGTDMSDRRAAVIFADTLTLLFEGIARIVETHQPIVETYYGPGRLYTLIKYLQVECDRQVEKVVDKFIKQRDYHQQFRHVQNNLMRNSTTEKIEPRELDPILTEVTLMNARSELYLRFLKKRISSDFEVGDSMASEEVKQEHQKCLDKLLNNCLLSCTMQELIGLYVTMEEYFMRETVNKAVALDTYEKGQLTSSMVDDVFYIVKKCIGRALSSSSIDCLCAMINLATTELESDFRDVLCNKLRMGFPATTFQDIQRGVTSAVNIMHSSLQQGKFDTKGIESTDEAKMSFLVTLNNVEVCSENISTLKKTLESDCTKLFSQGIGGEQAQAKFDSCLSDLAAVSNKFRDLLQEGLTELNSTAIKPQVQPWINSFFSVSHNIEEEEFNDYEANDPWVQQFILNLEQQMAEFKASLSPVIYDSLTGLMTSLVAVELEKVVLKSTFNRLGGLQFDKELRSLIAYLTTVTTWTIRDKFARLSQMATILNLERVTEILDYWGPNSGPLTWRLTPAEVRQVLALRIDFRSEDIKRLRL

SEQ ID NO: 19570 - protein, 768 aa, Homo sapiens
  Payload ID: 3920
  Gene Symbol: COG4
  Gene Name: component of oligomeric golgi complex 4
  ENSP ID: ENSP00000377236
MGTKMADLDSPPKLSGVQQPSEGVGGGRCSEISAELIRSLTELQELEAVYERLCGEEKVVERELDALLEQQNTIESKMVTLHRMGPNLQLIEGDAKQLAGMITFTCNLAENVSSKVRQLDLAKNRLYQAIQRADDILDLKFCMDGVQTALRSEDYEQAAAHTHRYLCLDKSVIELSRQGKEGSMIDANLKLLQEAEQRLKAIVAEKFAIATKEGDLPQVERFFKIFPLLGLHEEGLRKFSEYLCKQVASKAEENLLMVLGTDMSDRRAAVIFADTLTLLFEGIARIVETHQPIVETYYGPGRLYTLIKYLQVECDRQVEKVVDKFIKQRDYHQQFRHVQNNLMRNSTTEKIEPRELDPILTEVTLMNARSELYLRFLKKRISSDFEVGDSMASEEVKQEHQKCLDKLLNNCLLSCTMQELIGLYVTMEEYFMRETVNKAVALDTYEKGQLTSSMVDDVFYIVKKCIGRALSSSSIDCLCAMINLATTELESDFRDVLCNKLRMGFPATTFQDIQRGVTSAVNIMHSSLQQGKFDTKGIESTDEAKMSFLSDCTKLFSQGIGGEQAQAKFDSCLSDLAAVSNKFRDLLQEGLTELNSTAIKPQVQPWINSFFSVSHNIEEEEFNDYEANDPWVQQFILNLEQQMAEFKASLSPVIYDSLTGLMTSLVAVELEKVVLKSTFNRLGGLQFDKELRSLIAYLTTVTTWTIRDKFARLSQMATILNLERVTEILDYWGPNSGPLTWRLTPAEVRQVLALRIDFRSEDIKRLRL

SEQ ID NO: 19571 - protein, 337 aa, Homo sapiens
  Payload ID: 3920
  Gene Symbol: COG4
  Gene Name: component of oligomeric golgi complex 4
  Uniprot ID: Q9H9E3
  ENSP ID: ENSP00000432802
MADLDSPPKLSGVQQPSEGVGGGRCSEISAELIRSLTELQELEAVYERLCGEEKVVERELDALLEQQNTIESKMVTLHRMGPNLQLIEGDAKQLAGMITFTCNLAENVSSKVRQLDLAKNRLYQAIQRADDILDLKFCMDGVQTALRSEDYEQAAAHTHRYLCLDKSVIELSRQGKEGSMIDANLKLLQEAEQRLKAIVAEKFAIATKEGDLPQVERFFKIFPLLGLHEEGLRKFSEYLCKQVASKAEENLLMVLGTDMSDRRAAVIFADTLTLLFEGIARIVETHQPIVETYYGPGRLYTLIKYLQVECDRQVEKVVDKFIKQRDYHQQNFVFSFF

SEQ ID NO: 19572 - protein, 100 aa, Homo sapiens
  Payload ID: 3920
  Gene Symbol: COG4
  Gene Name: component of oligomeric golgi complex 4
  ENSP ID: ENSP00000434160
MGTKMADLDSPPKLSGVQQPSEGVGGGRCSEISAELIRSLTELQELEAVYERLCGEEKVVERELDALLEQQNTIESKMVTLHRMGTASIRPFRELMTSWT

SEQ ID NO: 19573 - protein, 193 aa, Homo sapiens
  Payload ID: 3920
  Gene Symbol: COG4
  Gene Name: component of oligomeric golgi complex 4
  ENSP ID: ENSP00000454573
MGTKMADLDSPPKLSGVQQPSEGVGGGRCSEISAELIRSLTELQELEAVYERLCGEEKVVERELDALLEQQNTIESKMVTLHRMGPNLQLIEGDAKQLAGMITFTCNLAENVSSKVRQLDLAKNRLYQAIQRADDILDLKFCMDGVQTALRSEDYEQAAAHTHRYLCLDKSVICPRWSASSRSSHCWVCMRRD

SEQ ID NO: 19574 - protein, 143 aa, Homo sapiens
  Payload ID: 3920
  Gene Symbol: COG4
  Gene Name: component of oligomeric golgi complex 4
  ENSP ID: ENSP00000455693
AIKPQVQPWINSFFSVSHNIEEASLSPVIYDSLTGLMTSLVAVELEKVVLKSTFNRLGGLQFDKELRSLIAYLTTVTTWTIRDKFARLSQMATILNLERVTEILDYWGPNSGPLTWRLTPAEVRQVLALRIDFRSEDIKRLRL

SEQ ID NO: 19575 - protein, 130 aa, Homo sapiens
  Payload ID: 3920
  Gene Symbol: COG4
  Gene Name: component of oligomeric golgi complex 4
  ENSP ID: ENSP00000456653
MGTKMADLDSPPKLSGVQQPSEGVGGGRCSEISAELIRSLTELQELEAVYERLCGEEKVVERELDALLEQQNTIESKMVTLHRMGPNLQLIEGDAKQLAGMITFTCNLAENVSSKVRQLDLAKKHSTNLE

SEQ ID NO: 19576 - protein, 157 aa, Homo sapiens
  Payload ID: 3920
  Gene Symbol: COG4
  Gene Name: component of oligomeric golgi complex 4
  ENSP ID: ENSP00000461912
MVTLHRMGPNLQLIEGDAKQLAGMITFTCNLAENVSSKVRQLDLAKNRLYQAIQRADDILDLKFCMDGVQTALRSEDYEQAAAHTHRYLCLDKSVIELSRQGKEGSMIDANLKLLQEAEQRLKAIVAEKFAIATKEGDLPQVERFFKIFPLLGLHEE

SEQ ID NO: 19577 - protein, 72 aa, Homo sapiens
  Payload ID: 3920
  Gene Symbol: COG4
  Gene Name: component of oligomeric golgi complex 4
  ENSP ID: ENSP00000463732
  MOD_RES (1)..(1): Any amino acid
XSPPKLSGVQQPSEGVGGGRCSEISAELIRSLTELQELEAVYERLCGEEKVVERELDALLEQQNTIEILICS

SEQ ID NO: 19578 - protein, 860 aa, Homo sapiens
  Payload ID: 3921
  Gene Symbol: COG5
  Gene Name: component of oligomeric golgi complex 5
  Uniprot ID: Q9UP83
  ENSP ID: ENSP00000297135
MGWVGGRRRDSASPPGRSRSAADDINPAPANMEGGGGSVAVAGLGARGSGAAAATVRELLQDGCYSDFLNEDFDVKTYTSQSIHQAVIAEQLAKLAQGISQLDRELHLQVVARHEDLLAQATGIESLEGVLQMMQTRIGALQGAVDRIKAKIVEPYNKIVARTAQLARLQVACDLLRRIIRILNLSKRLQGQLQGGSREITKAAQSLNELDYLSQGIDLSGIEVIENDLLFIARARLEVENQAKRLLEQGLETQNPTQVGTALQVFYNLGTLKDTITSVVDGYCATLEENINSALDIKVLTQPSQSAVRGGPGRSTMPTPGNTAALRASFWTNMEKLMDHIYAVCGQVQHLQKVLAKKRDPVSHICFIEEIVKDGQPEIFYTFWNSVTQALSSQFHMATNSSMFLKQAFEGEYPKLLRLYNDLWKRLQQYSQHIQGNFNASGTTDLYVDLQHMEDDAQDIFIPKKPDYDPEKALKDSLQPYEAAYLSKSLSRLFDPINLVFPPGGRNPPSSDELDGIIKTIASELNVAAVDTNLTLAVSKNVAKTIQLYSVKSEQLLSTQGDASQVIGPLTEGQRRNVAVVNSLYKLHQSVTKVVSSQSSFPLAAEQTIISALKAIHALMENAVQPLLTSVGDAIEAIIITMHQEDFSGSLSSSGKPDVPCSLYMKELQGFIARVMSDYFKHFECLDFVFDNTEAIAQRAVELFIRHASLIRPLGEGGKMRLAADFAQMELAVGPFCRRVSDLGKSYRMLRSFRPLLFQASEHVASSPALGDVIPFSIIIQFLFTRAPAELKSPFQRAEWSHTRFSQWLDDHPSEKDRLLLIRGALEAYVQSVRSREGKEFAPVYPIMVQLLQKAMSALQ

SEQ ID NO: 19579 - protein, 839 aa, Homo sapiens
  Payload ID: 3921
  Gene Symbol: COG5
  Gene Name: component of oligomeric golgi complex 5
  Uniprot ID: Q9UP83
  ENSP ID: ENSP00000334703
MGWVGGRRRDSASPPGRSRSAADDINPAPANMEGGGGSVAVAGLGARGSGAAAATVRELLQDGCYSDFLNEDFDVKTYTSQSIHQAVIAEQLAKLAQGISQLDRELHLQVVARHEDLLAQATGIESLEGVLQMMQTRIGALQGAVDRIKAKIVEPYNKIVARTAQLARLQVACDLLRRIIRILNLSKRLQGQLQGGSREITKAAQSLNELDYLSQGIDLSGIEVIENDLLFIARARLEVENQAKRLLEQGLETQNPTQVGTALQVFYNLGTLKDTITSVVDGYCATLEENINSALDIKVLTQPSQSAVRGGPGRSTMPTPGNTAALRASFWTNMEKLMDHIYAVCGQVQHLQKVLAKKRDPVSHICFIEEIVKDGQPEIFYTFWNSVTQALSSQFHMATNSSMFLKQAFEGEYPKLLRLYNDLWKRLQQYSQHIQGNFNASGTTDLYVDLQHMEDDAQDIFIPKKPDYDPEKALKDSLQPYEAAYLSKSLSRLFDPINLVFPPGGRNPPSSDELDGIIKTIASELNVAAVDTNLTLAVSKNVAKTIQLYSVKSEQLLSTQGDASQVIGPLTEGQRRNVAVVNSLYKLHQSVTKAIHALMENAVQPLLTSVGDAIEAIIITMHQEDFSGSLSSSGKPDVPCSLYMKELQGFIARVMSDYFKHFECLDFVFDNTEAIAQRAVELFIRHASLIRPLGEGGKMRLAADFAQMELAVGPFCRRVSDLGKSYRMLRSFRPLLFQASEHVASSPALGDVIPFSIIIQFLFTRAPAELKSPFQRAEWSHTRFSQWLDDHPSEKDRLLLIRGALEAYVQSVRSREGKEFAPVYPIMVQLLQKAMSALQ

SEQ ID NO: 19580 - protein, 823 aa, Homo sapiens
  Payload ID: 3921
  Gene Symbol: COG5
  Gene Name: component of oligomeric golgi complex 5
  Uniprot ID: Q9UP83
  ENSP ID: ENSP00000377228
MGWVGGRRRDSASPPGRSRSAADDINPAPANMEGGGGSVAVAGLGARGSGAAAATVRELLQDGCYSDFLNEDFDVKTYTSQSIHQAVIAEQLAKLAQGISQLDRELHLQVVARHEDLLAQATGIESLEGVLQMMQTRIGALQGAVDRIKAKIVEPYNKIVARTAQLARLQVACDLLRRIIRILNLSKRLQGQLQGGSREITKAAQSLNELDYLSQGIDLSGIEVIENDLLFIARARLEVENQAKRLLEQGLETQNPTQVGTALQVFYNLGTLKDTITSVVDGYCATLEENINSALDIKVLTQPSQSAVRGGPGRSTMPTPGNTAALRASFWTNMEKLMDHIYAVCGQVQHLQKVLAKKRDPVSHICFIEEIVKDGQPEIFYTFWNSVTQALSSQFHMATNSSMFLKQAFEGEYPKLLRLYNDLWKRLQQYSQHIQGNFNASGTTDLYVDLQHMEDDAQDIFIPKKPDYDPEKALKDSLQPYEAAYLSKSLSRLFDPINLVFPPGGRNPPSSDELDGIIKTIASELNVAAVDTNLTLAVSKNVAKTIQLYSVKSEQLLSTQGDASQVIGPLTEGQRRNVAVVNSLYKLHQSVTKVVSSQSSFPLAAEQTIISALKAIHALMENAVQPLLTSVGDAIEAIIITMHQEDFSGSLSSSGKPDVPCSLYMKELQGFIARVMSDYFKHFECLDFVFDNTEAIAQRAVELFIRHASLIRPLGEGGKMRLAADFAQMELAVGPFCRRVSDLGKSYRMLRSFRPLLFQASEHVASSPALGDVIPFSIIIQFLFTRAPAELKSPFQRAEWSHTRFSQWLDDHPSEKDRLLLIR

SEQ ID NO: 19581 - protein, 179 aa, Homo sapiens
  Payload ID: 3921
  Gene Symbol: COG5
  Gene Name: component of oligomeric golgi complex 5
  ENSP ID: ENSP00000476238
MEGGGGSVAVAGLGARGSGAAAATVRELLQDGCYSDFLNEDFDVKTYTSQSIHQAVIAEQLAKLAQGISQLDRELHLQVVARHEDLLAQATGIESLEGVLQMMQTRIGALQGAVDRIKAKIVEPYNKIVARTAQLARLQVACDLLRRIIRILNLSKRLQGQLQGGSREITKAAQSLNEL

SEQ ID NO: 19582 - protein, 75 aa, Homo sapiens
  Payload ID: 3922
  Gene Symbol: COG6
  Gene Name: component of oligomeric golgi complex 6
  Uniprot ID: Q9Y2V7
  ENSP ID: ENSP00000348983
MAEGSGEVVAVSATGAANGLNNGAGGTSATTCNPLSRKLHKILETRLDNDKELGILLLSFSWLLFEDSVRDSRRC

SEQ ID NO: 19583 - protein, 657 aa, Homo sapiens
  Payload ID: 3922
  Gene Symbol: COG6
  Gene Name: component of oligomeric golgi complex 6
  Uniprot ID: Q9Y2V7
  ENSP ID: ENSP00000397441
MAEGSGEVVAVSATGAANGLNNGAGGTSATTCNPLSRKLHKILETRLDNDKEMLEALKALSTFFVENSLRTRRNLRGDIERKSLAINEEFVSIFKEVKEELESISEDVQAMSNCCQDMTSRLQAAKEQTQDLIVKTTKLQSESQKLEIRAQVADAFLSKFQLTSDEMSLLRGTREGPITEDFFKALGRVKQIHNDVKVLLRTNQQTAGLEIMEQMALLQETAYERLYRWAQSECRTLTQESCDVSPVLTQAMEALQDRPVLYKYTLDEFGTARRSTVVRGFIDALTRGGPGGTPRPIEMHSHDPLRYVGDMLAWLHQATASEKEHLEALLKHVTTQGVEENIQEVVGHITEGVCRPLKVRIEQVIVAEPGAVLLYKISNLLKFYHHTISGIVGNSATALLTTIEEMHLLSKKIFFNSLSLHASKLMDKVELPPPDLGPSSALNQTLMLLREVLASHDSSVVPLDARQADFVQVLSCVLDPLLQMCTVSASNLGTADMATFMVNSLYMMKTTLALFEFTDRRLEMLQFQIEAHLDTLINEQASYVLTRVGLSYIYNTVQQHKPEQGSLANMPNLDSVTLKAAMVQFDRYLSAPDNLLIPQLNFLLSATVKEQIVKQSTELVCRAYGEVYAAVMNPINEYKDPENILHRSPQQVQTLLS

SEQ ID NO: 19584 - protein, 615 aa, Homo sapiens
  Payload ID: 3922
  Gene Symbol: COG6
  Gene Name: component of oligomeric golgi complex 6
  Uniprot ID: Q9Y2V7
  ENSP ID: ENSP00000403733
MAEGSGEVVAVSATGAANGLNNGAGGTSATTCNPLSRKLHKILETRLDNDKEMLEALKALSTFFVENSLRTRRNLRGDIERKSLAINEEFVSIFKEVKEELESISEDVQAMSNCCQDMTSRLQAAKEQTQDLIVKTTKLQSESQKLEIRAQVADAFLSKFQLTSDEMSLLRGTREGPITEDFFKALGRVKQIHNDVKVLLRTNQQTAGLEIMEQMALLQETAYERLYRWAQSECRTLTQESCDVSPVLTQAMEALQDRPVLYKYTLDEFGTARRSTVVRGFIDALTRGGPGGTPRPIEMHSHDPLRYVGDMLAWLHQATASEKEHLEALLKHVTTQGVEENIQEVVGHITEGVCRPLKVRIEQVIVAEPGAVLLYKISNLLKFYHHTISGIVGNSATALLTTIEEMHLLSKKIFFNSLSLHASKLMDKVELPPPDLGPSSALNQTLMLLREVLASHDSSVVPLDARQADFVQVLSCVLDPLLQMCTVSASNLGTADMATFMVNSLYMMKTTLALFEFTDRRLEMLQFQIEAHLDTLINEQASYVLTRVGLSYIYNTVQQHKPEQGSLANMPNLDSVTLKAAMVQFDRYLSAPDNLLIPQLNFLLSATVKRPPNGP

SEQ ID NO: 19585 - protein, 61 aa, Homo sapiens
  Payload ID: 3922
  Gene Symbol: COG6
  Gene Name: component of oligomeric golgi complex 6
  ENSP ID: ENSP00000440438
MAEGSGEVVAVSATGAANGLNNGAGGTSATTCNPLSRKLHKILETRLDNDKVPSRLSGWDW

SEQ ID NO: 19586 - protein, 62 aa, Homo sapiens
  Payload ID: 3922
  Gene Symbol: COG6
  Gene Name: component of oligomeric golgi complex 6
  ENSP ID: ENSP00000440473
MAEGSGEVVAVSATGAANGLNNGAGGTSATTCNPLSRKLHKILETRLDNDKSADSKKFTWRY

SEQ ID NO: 19587 - protein, 61 aa, Homo sapiens; identical to SEQ ID NO: 19585
  Payload ID: 3922
  Gene Symbol: COG6
  Gene Name: component of oligomeric golgi complex 6
  ENSP ID: ENSP00000441297

SEQ ID NO: 19588 - protein, 134 aa, Homo sapiens
  Payload ID: 3922
  Gene Symbol: COG6
  Gene Name: component of oligomeric golgi complex 6
  ENSP ID: ENSP00000445217
  MOD_RES (1)..(1): Any amino acid
XFFVENSLRTRRNLRGDIERKSLAINEEFVSIFKEVKEELESISEDVQAMSNCCQDMTSRLQAAKEQTQDLIVKTTKLQSESQKLEIRAQVADAFLSKFQLTSDEMSLLRGTREGPITEFRNYGTDGLTSRNGL

SEQ ID NO: 19589 - protein, 61 aa, Homo sapiens; identical to SEQ ID NO: 19585
  Payload ID: 3922
  Gene Symbol: COG6
  Gene Name: component of oligomeric golgi complex 6
  ENSP ID: ENSP00000486051

SEQ ID NO: 19590 - protein, 770 aa, Homo sapiens
  Payload ID: 3923
  Gene Symbol: COG7
  Gene Name: component of oligomeric golgi complex 7
  Uniprot ID: P83436
  ENSP ID: ENSP00000305442
MDFSKFLADDFDVKEWINAAFRAGSKEAASGKADGHAATLVMKLQLFIQEVNHAVEETSHQALQNMPKVLRDVEALKQEASFLKEQMILVKEDIKKFEQDTSQSMQVLVEIDQVKSRMQLAAESLQEADKWSTLSADIEETFKTQDIAVISAKLTGMQNSLMMLVDTPDYSEKCVHLEALKNRLEALASPQIVAAFTSQAVDQSKVFVKVFTEIDRMPQLLAYYYKCHKVQLLAAWQELCQSDLSLDRQLTGLYDALLGAWHTQIQWATQVFQKPHEVVMVLLIQTLGALMPSLPSCLSNGVERAGPEQELTRLLEFYDATAHFAKGLEMALLPHLHEHNLVKVTELVDAVYDPYKPYQLKYGDMEESNLLIQMSAVPLEHGEVIDCVQELSHSVNKLFGLASAAVDRCVRFTNGLGTCGLLSALKSLFAKYVSDFTSTLQSIRKKCKLDHIPPNSLFQEDWTAFQNSIRIIATCGELLRHCGDFEQQLANRILSTAGKYLSDSCSPRSLAGFQESILTDKKNSAKNPWQEYNYLQKDNPAEYASLMEILYTLKEKGSSNHNLLAAPRAALTRLNQQAHQLAFDSVFLRIKQQLLLISKMDSWNTAGIGETLTDELPAFSLTPLEYISNIGQYIMSLPLNLEPFVTQEDSALELALHAGKLPFPPEQGDELPELDNMADNWLGSIARATMQTYCDAILQIPELSPHSAKQLATDIDYLINVMDALGLQPSRTLQHIVTLLKTRPEDYRQVSKGLPRRLATTVATMRSVNY

SEQ ID NO: 19591 - protein, 88 aa, Homo sapiens
  Payload ID: 3923
  Gene Symbol: COG7
  Gene Name: component of oligomeric golgi complex 7
  ENSP ID: ENSP00000459872
  MOD_RES (1)..(1): Any amino acid
XNLEPFVTQEDSALELALHAGKLPFPPEQGDELPELDNMADNWLGSIARATMQTYCDAILQIPELSPHSAKQLATDIGSPGPAPEILT

SEQ ID NO: 19592 - protein, 113 aa, Homo sapiens
  Payload ID: 3923
  Gene Symbol: COG7
  Gene Name: component of oligomeric golgi complex 7
  ENSP ID: ENSP00000460151
  MOD_RES (1)..(1): Any amino acid
XDSALELALHAGKLPFPPEQGDELPELDNMADNWLGSIARATMQTYCDAILQIPELSPHSAKQLATDIGGSPQDRRWEGQLLPAASVSFSFALQESHPKSSLSFSCGFGSEAG

SEQ ID NO: 19593 - protein, 612 aa, Homo sapiens
  Payload ID: 3924
  Gene Symbol: COG8
  Gene Name: component of oligomeric golgi complex 8
  Uniprot ID: Q96MW5
  ENSP ID: ENSP00000305459
MATAATIPSVATATAAALGEVEDEGLLASLFRDRFPEAQWRERPDVGRYLRELSGSGLERLRREPERLAEERAQLLQQTRDLAFANYKTFIRGAECTERIHRLFGDVEASLGRLLDRLPSFQQSCRNFVKEAEEISSNRRMNSLTLNRHTEILEILEIPQLMDTCVRNSYYEEALELAAYVRRLERKYSSIPVIQGIVNEVRQSMQLMLSQLIQQLRTNIQLPACLRVIGYLRRMDVFTEAELRVKFLQARDAWLRSILTAIPNDDPYFHITKTIEASRVHLFDIITQYRAIFSDEDPLLPPAMGEHTVNESAIFHGWVLQKVSQFLQVLETDLYRGIGGHLDSLLGQCMYFGLSFSRVGADFRGQLAPVFQRVAISTFQKAIQETVEKFQEEMNSYMLISAPAILGTSNMPAAVPATQPGTLQPPMVLLDFPPLACFLNNILVAFNDLRLCCPVALAQDVTGALEDALAKVTKIILAFHRAEEAAFSSGEQELFVQFCTVFLEDLVPYLNRCLQVLFPPAQIAQTLGIPPTQLSKYGNLGHVNIGAIQEPLAFILPKRETLFTLDDQALGPELTAPAPEPPAEEPRLEPAGPACPEGGRAETQAEPPSVGP

SEQ ID NO: 19594 - protein, 534 aa, Homo sapiens
  Payload ID: 3924
  Gene Symbol: COG8
  Gene Name: component of oligomeric golgi complex 8
  ENSP ID: ENSP00000455954
MATAATIPSVATATAAALGEVEDEGLLASLFRDRFPEAQWRERPDVGRYLRELSGSGLERLRREPERLAEERAQLLQQTRDLAFANYKTFIRGAECTERIHRLFGDVEASLGRLLDRLPSFQQSCRNFVKEAEEISSNRRMNSLTLNRHTEILEILEIPQLMDTCVRNSYYEEALELAAYVRRLERKYSSIPVIQGIVNEVRQSMQLMLSQLIQQLRTNIQLPACLRVIGYLRRMDVFTEAELRVKFLQARDAWLRSILTAIPNDDPYFHITKTIEASRVHLFDIITQYRAIFSDEDPLLPPAMGEHTVNESAIFHGWVLQKVSQFLQVLETDLYRGIGGHLDSLLGQCMYFGLSFSRVGADFRGQLAPVFQRVAISTFQKAIQETVEKFQEEMNSYMLISAPAILGTSNMPAAVPATQPGTLQPPMVLLDFPPLACFLNNILVAFNDLRLCCPVALAQDVTGALEDALAKVTKIILAFHRAEEAAFSSGEQELFVQFCTVFLEDLVPYLNRCLQVLFPPAQIAQTLGKRMKIL

SEQ ID NO: 19595 - protein, 223 aa, Homo sapiens
  Payload ID: 3924
  Gene Symbol: COG8
  Gene Name: component of oligomeric golgi complex 8
  ENSP ID: ENSP00000456705
  MOD_RES (1)..(1): Any amino acid
XVEDEGLLASLFRDRFPEAQWRERPDVGRYLRELSGSGLERLRREPERLAEERAQLLQQTRDLAFANYKTFIRGAECTERIHRLFGDVEASLGRLLDRLPSFQQSCRNFVKEAEEISSNRRMNSLTLNRHTEILEILEIPQLMDTCVRNSYYEEALELAAYVRRLERKYSSIPVIQGIVNEVRHAGITGGSHGARPGAFLAAHPQHQPQGQTLARMARARLCR

SEQ ID NO: 19596 - protein, 99 aa, Homo sapiens
  Payload ID: 3924
  Gene Symbol: COG8
  Gene Name: component of oligomeric golgi complex 8
  ENSP ID: ENSP00000464395
MNSLTLNRHTEILEILEIPQLMDTCVRNSYYEEALELAAYVRRLERKYSSIPVIQGIVNEVRQSMQLMLSQLIQQLRTNIQLPACLRVIGYLRRMDVFT

SEQ ID NO: 19597 - protein, 121 aa, Homo sapiens
  Payload ID: 3924
  Gene Symbol: COG8
  Gene Name: component of oligomeric golgi complex 8
  ENSP ID: ENSP00000484442
  MOD_RES (1)..(1): Any amino acid
XALGEVEDEGLLASLFRDRFPEAQWRERPDVGRYLRELSGSGLERLRREPERLAEERAQLLQQTRDLAFANYKTFIRGAECTERIHRLFGDVEASLGRLLDRLPSFQQSCRCDAPGAKGVL

SEQ ID NO: 19598 - protein, 299 aa, Homo sapiens [sequence omitted]

SEQ ID NO: 19599 - protein, 299 aa, Homo sapiens [sequence omitted]

SEQ ID NO: 19600 - protein, 57 aa, Homo sapiens
  Payload ID: 3925
  Gene Symbol: CRX
  Gene Name: cone-rod homeobox
  ENSP ID: ENSP00000457808
MMAYMNPGPHYSVNALALSGPSVDLMHQAVPYPSAPRKQRRERTTFTRSQLEELEAL

SEQ ID NO: 19601 - protein, 41 aa, Homo sapiens
  Payload ID: 3925
  Gene Symbol: CRX
  Gene Name: cone-rod homeobox
  ENSP ID: ENSP00000478106
MMAYMNPGPHYSVNALALSGPSVDLMHQAVPYPSLVQEPEG

SEQ ID NO: 19602 - protein, 349 aa, Homo sapiens
  Payload ID: 3926
  Gene Symbol: CTGF
  Gene Name: connective tissue growth factor
  Uniprot ID: P29279
  ENSP ID: ENSP00000356954
MTAASMGPVRVAFVVLLALCSRPAVGQNCSGPCRCPDEPAPRCPAGVSLVLDGCGCCRVCAKQLGELCTERDPCDPHKGLFCHFGSPANRKIGVCTAKDGAPCIFGGTVYRSGESFQSSCKYQCTCLDGAVGCMPLCSMDVRLPSPDCPFPRRVKLPGKCCEEWVCDEPKDQTVVGPALAAYRLEDTFGPDPTMIRANCLVQTTEWSACSKTCGMGISTRVTNDNASCRLEKQSRLCMVRPCEADLEENIKKGKKCIRTPKISKPIKFELSGCTSMKTYRAKFCGVCTDGRCCTPHRTTTLPVEFKCPDGEVMKKNMMFIKTCACHYNCPGDNDIFESLYYRKMYGDMA

SEQ ID NO: 19603 - protein, 713 aa, Homo sapiens
  Payload ID: 3927
  Gene Symbol: CNKSR1
  Gene Name: connector enhancer of kinase suppressor of Ras 1
  Uniprot ID: Q969H4
  ENSP ID: ENSP00000354609
MEPVETWTPGKVATWLRGLDDSLQDYPFEDWQLPGKNLLQLCPQSLEALAVRSLGHQELILGGVEQLQALSSRLQTENLQSLTEGLLGATHDFQSIVQGCLGDCAKTPIDVLCAAVELLHEADALLFWLSRYLFSHLNDFSACQEIRDLLEELSQVLHEDGPAAEKEGTVLRICSHVAGICHNILVCCPKELLEQKAVLEQVQLDSPLGLEIHTTSNCQHFVSQVDTQVPTDSRLQIQPGDEVVQINEQVVVGWPRKNMVRELLREPAGLSLVLKKIPIPETPPQTPPQVLDSPHQRSPSLSLAPLSPRAPSEDVFAFDLSSNPSPGPSPAWTDSASLGPEPLPIPPEPPAILPAGVAGTPGLPESPDKSPVGRKKSKGLATRLSRRRVSCRELGRPDCDGWLLLRKAPGGFMGPRWRRRWFVLKGHTLYWYRQPQDEKAEGLINVSNYSLESGHDQKKKYVFQLTHDVYKPFIFAADTLTDLSMWVRHLITCISKYQSPGRAPPPREEDCYSETEAEDPDDEAGSHSASPSPAQAGSPLHGDTSPAATPTQRSPRTSFGSLTDSSEEALEGMVRGLRQGGVSLLGQPQPLTQEQWRSSFMRRNRDPQLNERVHRVRALQSTLKAKLQELQVLEEVLGDPELTGEKFRQWKEQNRELYSEGLGAWGVAQAEGSSHILTSDSTEQSPHSLPSDPEEHSHLCPLTSESSLRPPDL

SEQ ID NO: 19604 - protein, 720 aa, Homo sapiens
  Payload ID: 3927
  Gene Symbol: CNKSR1
  Gene Name: connector enhancer of kinase suppressor of Ras 1
  Uniprot ID: Q969H4
  ENSP ID: ENSP00000363371
MEPVETWTPGKVATWLRGLDDSLQDYPFEDWQLPGKNLLQLCPQSLEALAVRSLGHQELILGGVEQLQALSSRLQTENLQSLTEGLLGATHDFQSIVQGCLGDCAKTPIDVLCAAVELLHEADALLFWLSRYLFSHLNDFSACQEIRDLLEELSQVLHEDGPAAEKEGTVLRICSHVAGICHNILVCCPKELLEQKAVLEQVQLDSPLGLEIHTTSNCQHFVSQVDTQVPTDSRLQIQPGDEVVQINEQVVVREERDMVGWPRKNMVRELLREPAGLSLVLKKIPIPETPPQTPPQVLDSPHQRSPSLSLAPLSPRAPSEDVFAFDLSSNPSPGPSPAWTDSASLGPEPLPIPPEPPAILPAGVAGTPGLPESPDKSPVGRKKSKGLATRLSRRRVSCRELGRPDCDGWLLLRKAPGGFMGPRWRRRWFVLKGHTLYWYRQPQDEKAEGLINVSNYSLESGHDQKKKYVFQLTHDVYKPFIFAADTLTDLSMWVRHLITCISKYQSPGRAPPPREEDCYSETEAEDPDDEAGSHSASPSPAQAGSPLHGDTSPAATPTQRSPRTSFGSLTDSSEEALEGMVRGLRQGGVSLLGQPQPLTQEQWRSSFMRRNRDPQLNERVHRVRALQSTLKAKLQELQVLEEVLGDPELTGEKFRQWKEQNRELYSEGLGAWGVAQAEGSSHILTSDSTEQSPHSLPSDPEEHSHLCPLTSESSLRPPDL

SEQ ID NO: 19605 - protein, 455 aa, Homo sapiens
  Payload ID: 3927
  Gene Symbol: CNKSR1
  Gene Name: connector enhancer of kinase suppressor of Ras 1
  ENSP ID: ENSP00000431817
MVRELLREPAGLSLVLKKIPIPETPPQTPPQVLDSPHQRSPSLSLAPLSPRAPSEDVFAFDLSSNPSPGPSPAWTDSASLGPEPLPIPPEPPAILPAGVAGTPGLPESPDKSPVGRKKSKGLATRLSRRRVSCRELGRPDCDGWLLLRKAPGGFMGPRWRRRWFVLKGHTLYWYRQPQDEKAEGLINVSNYSLESGHDQKKKYVFQLTHDVYKPFIFAADTLTDLSMWVRHLITCISKYQSPGRAPPPREEDCYSETEAEDPDDEAGSHSASPSPAQAGSPLHGDTSPAATPTQRSPRTSFGSLTDSSEEALEGMVRGLRQGGVSLLGQPQPLTQEQWRSSFMRRNRDPQLNERVHRVRALQSTLKAKLQELQVLEEVLGDPELTGEKFRQWKEQNRELYSEGLGAWGVAQAEGSSHILTSDSTEQSPHSLPSDPEEHSHLCPLTSESSLRPPDL

SEQ ID NO: 19606 - protein, 63 aa, Homo sapiens
  Payload ID: 3927
  Gene Symbol: CNKSR1
  Gene Name: connector enhancer of kinase suppressor of Ras 1
  ENSP ID: ENSP00000432057
MEPVETWTPGKVLTTPCRTIPLRTGSCLARTCSSSAPKASRLWLCGLWDTRSSSWAGWNSSRP

SEQ ID NO: 19607 - protein, 78 aa, Homo sapiens
  Payload ID: 3927
  Gene Symbol: CNKSR1
  Gene Name: connector enhancer of kinase suppressor of Ras 1
  ENSP ID: ENSP00000434047
  MOD_RES (1)..(1): Any amino acid
XIHTTSNCQHFVSQVDTQVPTDSRLQIQPGDEVVQINEQVVVGWPRKNMVRELLREPAGLSLVLKKIPIPETPPQGPI

SEQ ID NO: 19608 - protein, 229 aa, Homo sapiens
  Payload ID: 3927
  Gene Symbol: CNKSR1
  Gene Name: connector enhancer of kinase suppressor of Ras 1
  ENSP ID: ENSP00000435880
MEPVETWTPGKVATWLRGLDDSLQDYPFEDWQLPGKNLLQLCPQSLEALAVRSLGHQELILGGVEQLQALSSRLQTENLQSLTEGLLGATHDFQSIVQGCLGDCAKTPIDVLCAAVELLHEADALLFWLSRYLFSHLNDFSACQEIRDLLEELSQVLHEDGPAAEKEGTVLRIPRGWDLPQHPGLLPQGAAGTEGRARAGAAGQSIGPRNSHHQQLPALCVPSGHPGSH

SEQ ID NO: 19609 - protein, 312 aa, Homo sapiens
  Payload ID: 3927
  Gene Symbol: CNKSR1
  Gene Name: connector enhancer of kinase suppressor of Ras 1
  ENSP ID: ENSP00000437038
MEPVETWTPGKVATWLRGLDDSLQDYPFEDWQLPGKNLLQLCPQSLEALAVRSLGHQELILGGVEQLQALSSRLQTENLQSLTEGLLGATHDFQSIVQGCLGDCAKTPIDVLCAAVELLHEADALLFWLSRYLFSHLNDFSACQEIRDLLEELSQVLHEDGPAAEKEGTVLRICSHVAGICHNILVCCPKELLEQKAVLEQVQLDSPLGLEIHTTSNCQHFVSQVDTQVPTDSRLQIQPGDEVVQINEQVVVGWPRKNMVRELLREPAGLSLVLKKIPIPETPPQVTGSVQVCLGGETVGSSHPPCPPQGPI

SEQ ID NO: 19610 - protein, 898 aa, Homo sapiens
  Payload ID: 3928
  Gene Symbol: CNKSR2
  Gene Name: connector enhancer of kinase suppressor of Ras 2
  Uniprot ID: Q8WXI2
  ENSP ID: ENSP00000279451
MALIMEPVSKWSPSQVVDWMKGLDDCLQQYIKNFEREKISGDQLLRITHQELEDLGVSRIGHQELILEAVDLLCALNYGLETENLKTLSHKLNASAKNLQNFITGRRRSGHYDGRTSRKLPNDFLTSVVDLIGAAKSLLAWLDRSPFAAVTDYSVTRNNVIQLCLELTTIVQQDCTVYETENKILHVCKTLSGVCDHIISLSSDPLVSQSAHLEVIQLANIKPSEGLGMYIKSTYDGLHVITGTTENSPADRCKKIHAGDEVIQVNHQTVVGWQLKNLVNALREDPSGVILTLKKRPQSMLTSAPALLKNMRWKPLALQPLIPRSPTSSVATPSSTISTPTKRDSSALQDLYIPPPPAEPYIPRDEKGNLPCEDLRGHMVGKPVHKGSESPNSFLDQEYRKRFNIVEEDTVLYCYEYEKGRSSSQGRRESTPTYGKLRPISMPVEYNWVGDYEDPNKMKRDSRRENSLLRYMSNEKIAQEEYMFQRNSKKDTGKKSKKKGDKSNSPTHYSLLPSLQMDALRQDIMGTPVPETTLYHTFQQSSLQHKSKKKNKGPIAGKSKRRISCKDLGRGDCEGWLWKKKDAKSYFSQKWKKYWFVLKDASLYWYINEEDEKAEGFISLPEFKIDRASECRKKYAFKACHPKIKSFYFAAEHLDDMNRWLNRINMLTAGYAERERIKQEQDYWSESDKEEADTPSTPKQDSPPPPYDTYPRPPSMSCASPYVEAKHSRLSSTETSQSQSSHEEFRQEVTGSSAVSPIRKTASQRRSWQDLIETPLTSSGLHYLQTLPLEDSVFSDSAAISPEHRRQSTLPTQKCHLQDHYGPYPLAESERMQVLNGNGGKPRSFTLPRDSGFNHCCLNAPVSACDPQDDVQPPEVEEEEEEEEEEGEAAGENIGEKS

SEQ ID NO: 19611 - protein, 1034 aa, Homo sapiens
  Payload ID: 3928
  Gene Symbol: CNKSR2
  Gene Name: connector enhancer of kinase suppressor of Ras 2
  Uniprot ID: Q8WXI2
  ENSP ID: ENSP00000368824
MALIMEPVSKWSPSQVVDWMKGLDDCLQQYIKNFEREKISGDQLLRITHQELEDLGVSRIGHQELILEAVDLLCALNYGLETENLKTLSHKLNASAKNLQNFITGRRRSGHYDGRTSRKLPNDFLTSVVDLIGAAKSLLAWLDRSPFAAVTDYSVTRNNVIQLCLELTTIVQQDCTVYETENKILHVCKTLSGVCDHIISLSSDPLVSQSAHLEVIQLANIKPSEGLGMYIKSTYDGLHVITGTTENSPADRCKKIHAGDEVIQVNHQTVVGWQLKNLVNALREDPSGVILTLKKRPQSMLTSAPALLKNMRWKPLALQPLIPRSPTSSVATPSSTISTPTKRDSSALQDLYIPPPPAEPYIPRDEKGNLPCEDLRGHMVGKPVHKGSESPNSFLDQEYRKRFNIVEEDTVLYCYEYEKGRSSSQGRRESTPTYGKLRPISMPVEYNWVGDYEDPNKMKRDSRRENSLLRYMSNEKIAQEEYMFQRNSKKDTGKKSKKKGDKSNSPTHYSLLPSLQMDALRQDIMGTPVPETTLYHTFQQSSLQHKSKKKNKGPIAGKSKRRISCKDLGRGDCEGWLWKKKDAKSYFSQKWKKYWFVLKDASLYWYINEEDEKAEGFISLPEFKIDRASECRKKYAFKACHPKIKSFYFAAEHLDDMNRWLNRINMLTAGYAERERIKQEQDYWSESDKEEADTPSTPKQDSPPPPYDTYPRPPSMSCASPYVEAKHSRLSSTETSQSQSSHEEFRQEVTGSSAVSPIRKTASQRRSWQDLIETPLTSSGLHYLQTLPLEDSVFSDSAAISPEHRRQSTLPTQKCHLQDHYGPYPLAESERMQVLNGNGGKPRSFTLPRDSGFNHCCLNAPVSACDPQDDVQPPEVEEEEEEEEEEGEAAGENIGEKSESREEKLGDSLQDLYRALEQASLSPLGEHRISTKMEYKLSFIKRCNDPVMNEKLHRLRILKSTLKAREGEVAIIDKVLDNPDLTSKEFQQWKQMYLDLFLDICQNTTSNDPLSISSEVDVITSSLAHTHSYIETHV

SEQ ID NO: 19612 - protein, 1004 aa, Homo sapiens
  Payload ID: 3928
  Gene Symbol: CNKSR2
  Gene Name: connector enhancer of kinase suppressor of Ras 2
  Uniprot ID: Q8WXI2
  ENSP ID: ENSP00000397906
MALIMEPVSKWSPSQVVDWMKGLDDCLQQYIKNFEREKISGDQLLRITHQELEDLGVSRIGHQELILEAVDLLCALNYGLETENLKTLSHKLNASAKNLQNFITGRRRSGHYDGRTSRKLPNDFLTSVVDLIGAAKSLLAWLDRSPFAAVTDYSVTRNNVIQLCLELTTIVQQDCTVYETENKILHVCKTLSGVCDHIISLSSDPLVSQSAHLEVIQLANIKPSEGLGMYIKSTYDGLHVITGTTENSPADRCKKIHAGDEVIQVNHQTVVGWQLKNLVNALREDPSGVILTLKKRPQSMLTSAPALLKNMRWKPLALQPLIPRSPTSSVATPSSTISTPTKRDSSALQDLYIPPPPAEPYIPRDEKGNLPCEDLRGHMVGKPVHKGSESPNSFLDQEYRKRFNIVEEDTVLYCYEYEKGRSSSQGRRESTPTYENSLLRYMSNEKIAQEEYMFQRNSKKDTGKKSKKKGDKSNSPTHYSLLPSLQMDALRQDIMGTPVPETTLYHTFQQSSLQHKSKKKNKGPIAGKSKRRISCKDLGRGDCEGWLWKKKDAKSYFSQKWKKYWFVLKDASLYWYINEEDEKAEGFISLPEFKIDRASECRKKYAFKACHPKIKSFYFAAEHLDDMNRWLNRINMLTAGYAERERIKQEQDYWSESDKEEADTPSTPKQDSPPPPYDTYPRPPSMSCASPYVEAKHSRLSSTETSQSQSSHEEFRQEVTGSSAVSPIRKTASQRRSWQDLIETPLTSSGLHYLQTLPLEDSVFSDSAAISPEHRRQSTLPTQKCHLQDHYGPYPLAESERMQVLNGNGGKPRSFTLPRDSGFNHCCLNAPVSACDPQDDVQPPEVEEEEEEEEEEGEAAGENIGEKSESREEKLGDSLQDLYRALEQASLSPLGEHRISTKMEYKLSFIKRCNDPVMNEKLHRLRILKSTLKAREGEVAIIDKVLDNPDLTSKEFQQWKQMYLDLFLDICQNTTSNDPLSISSEVDVITSSLAHTHSYIETHV

SEQ ID NO: 19613 - protein, 849 aa, Homo sapiens
  Payload ID: 3928
  Gene Symbol: CNKSR2
  Gene Name: connector enhancer of kinase suppressor of Ras 2
  Uniprot ID: Q8WXI2
  ENSP ID: ENSP00000444633
MALIMEPVSKWSPSQVVDWMKGLDDCLQQYIKNFEREKISGDQLLRITHQELEDLGVSRIGHQELILEAVDLLCALNYGLETENLKTLSHKLNASAKNLQNFITGRRRSGHYDGRTSRKLPNDFLTSVVDLIGAAKSLLAWLDRSPFAAVTDYSVTRNNVIQLCLELTTIVQQDCTVYETENKILHVCKTLSGVCDHIISLSSDPLVSQSAHLEVIQLANIKPSEGLGMYIKSTYDGLHVITGTTENSPADRCKKIHAGDEVIQVNHQTVPLIPRSPTSSVATPSSTISTPTKRDSSALQDLYIPPPPAEPYIPRDEKGNLPCEDLRGHMVGKPVHKGSESPNSFLDQEYRKRFNIVEEDTVLYCYEYEKGRSSSQGRRESTPTYGKLRPISMPVEYNWVGDYEDPNKMKRDSRRENSLLRYMSNEKIAQEEYMFQRNSKKDTGKKSKKKGDKSNSPTHYSLLPSLQMDALRQDIMGTPVPETTLYHTFQQSSLQHKSKKKNKGPIAGKSKRRISCKDLGRGDCEGWLWKKKDAKSYFSQKWKKYWFVLKDASLYWYINEEDEKAEGFISLPEFKIDRASECRKKYAFKACHPKIKSFYFAAEHLDDMNRWLNRINMLTAGYAERERIKQEQDYWSESDKEEADTPSTPKQDSPPPPYDTYPRPPSMSCASPYVEAKHSRLSSTETSQSQSSHEEFRQEVTGSSAVSPIRKTASQRRSWQDLIETPLTSSGLHYLQTLPLEDSVFSDSAAISPEHRRQSTLPTQKCHLQDHYGPYPLAESERMQVLNGNGGKPRSFTLPRDSGFNHCCLNAPVSACDPQDDVQPPEVEEEEEEEEEEGEAAGENIGEKS

SEQ ID NO: 19614 - protein, 745 aa, Homo sapiens
  Payload ID: 3929
  Gene Symbol: CHUK
  Gene Name: conserved helix-loop-helix ubiquitous kinase
  Uniprot ID: O15111
  ENSP ID: ENSP00000359424
MERPPGLRPGAGGPWEMRERLGTGGFGNVCLYQHRELDLKIAIKSCRLELSTKNRERWCHEIQIMKKLNHANVVKACDVPEELNILIHDVPLLAMEYCSGGDLRKLLNKPENCCGLKESQILSLLSDIGSGIRYLHENKIIHRDLKPENIVLQDVGGKIIHKIIDLGYAKDVDQGSLCTSFVGTLQYLAPELFENKPYTATVDYWSFGTMVFECIAGYRPFLHHLQPFTWHEKIKKKDPKCIFACEEMSGEVRFSSHLPQPNSLCSLVVEPMENWLQLMLNWDPQQRGGPVDLTLKQPRCFVLMDHILNLKIVHILNMTSAKIISFLLPPDESLHSLQSRIERETGINTGSQELLSETGISLDPRKPASQCVLDGVRGCDSYMVYLFDKSKTVYEGPFASRSLSDCVNYIVQDSKIQLPIIQLRKVWAEAVHYVSGLKEDYSRLFQGQRAAMLSLLRYNANLTKMKNTLISASQQLKAKLEFFHKSIQLDLERYSEQMTYGISSEKMLKAWKEMEEKAIHYAEVGVIGYLEDQIMSLHAEIMELQKSPYGRRQGDLMESLEQRAIDLYKQLKHRPSDHSYSDSTEMVKIIVHTVQSQDRVLKELFGHLSKLLGCKQKIIDLLPKVEVALSNIKEADNTVMFMQGKRQKEIWHLLKIACTQSSARSLVGSSLEGAVTPQTSAWLPPTSAEHDHSLSCVVTPQDGETSAQMIEENLNCLGHLSTIIHEANEEQGNSMMNLDWSWLTE

SEQ ID NO: 19615 - protein, 137 aa, Homo sapiens
  Payload ID: 3930
  Gene Symbol: CNST
  Gene Name: consortin, connexin sorting protein
  ENSP ID: ENSP00000355468
MDDSDTPTYYLQIEPQDGCHPGDSVERSVTCLPSASDENENQLDGDGHEHLTSSDSAMGKPQVSEQDSLNNNESCTLSCEVAAGENLQNTLCEASRDEQAFLGKDKKIPGKRSPRSKKGTAKKIPPDSRILFPGGGL

SEQ ID NO: 19616 - protein, 616 aa, Homo sapiens
  Payload ID: 3930
  Gene Symbol: CNST
  Gene Name: consortin, connexin sorting protein
  Uniprot ID: Q6PJW8
  ENSP ID: ENSP00000355469
MDDSDTPTYYLQIEPQDGCHPGDSVERSVTCLPSASDENENQLDGDGHEHLTSSDSAMGKPQVSEQDSLNNNESCTLSCEVAAGENLQNTLCEASRDEQAFLGKDKKIPGKRSPRSKKGTAKKIPPGLFSGDIAPLMQEKVLSAVTYAVDDEEAAEVNANEQPEAPKLVLQSLFSLIRGEVEQLDSRALPLCLHQIAESYFQEEDYEKAMKFIQLERLYHEQLLANLSAIQEQWETKWKTVQPHTVTALRNSEKGFNGEDFERLTKICATHQDPLLSKHKIAAVEKSQERKCSTQLLVSEDPKEGGATTKESESKTCLGTESSKESQHTVEPLGSSPCCHQMDVQTDSPSLSVTAGKDHMEELLCSAEATLALHTQSSETAGSPSGPDSSEDACEDDSRLQLAQTEACQDVARIEGIAEDPKVFLSSKSKTEPLISPGCDRIPPALISEGKYSQAQRKELRLPLRDASEALPTDQLENNELNELQQPDLTDSDGKSPQAQADSDGSENVLCGNNQISDLGILLPEVCMAPEEKGDKDDQLNKETEDYLNSLLEGCLKDTEDSLSYEDNQDDDSDLLQDLSPEEASYSLQENLPSDESCLSLDDLAKRIEIAEVNQR

SEQ ID NO: 19617 - protein, 725 aa, Homo sapiens
  Payload ID: 3930
  Gene Symbol: CNST
  Gene Name: consortin, connexin sorting protein
  Uniprot ID: Q6PJW8
  ENSP ID: ENSP00000355470
MDDSDTPTYYLQIEPQDGCHPGDSVERSVTCLPSASDENENQLDGDGHEHLTSSDSAMGKPQVSEQDSLNNNESCTLSCEVAAGENLQNTLCEASRDEQAFLGKDKKIPGKRSPRSKKGTAKKIPPGLFSGDIAPLMQEKVLSAVTYAVDDEEAAEVNANEQPEAPKLVLQSLFSLIRGEVEQLDSRALPLCLHQIAESYFQEEDYEKAMKFIQLERLYHEQLLANLSAIQEQWETKWKTVQPHTVTALRNSEKGFNGEDFERLTKICATHQDPLLSKHKIAAVEKSQERKCSTQLLVSEDPKEGGATTKESESKTCLGTESSKESQHTVEPLGSSPCCHQMDVQTDSPSLSVTAGKDHMEELLCSAEATLALHTQSSETAGSPSGPDSSEDACEDDSRLQLAQTEACQDVARIEGIAEDPKVFLSSKSKTEPLISPGCDRIPPALISEGKYSQAQRKELRLPLRDASEALPTDQLENNELNELQQPDLTDSDGKSPQAQADSDGSENVLCGNNQISDLGILLPEVCMAPEEKGDKDDQLNKETEDYLNSLLEGCLKDTEDSLSYEDNQDDDSDLLQDLSPEEASYSLQENLPSDESCLSLDDLAKRIEIAEVVPTEGLVSILKKRNDTVGDHPAQMQHKPSKRRVRFQEIDDSLDQDEVGGGSCILLVLLCIATVFLSVGGTALYCTFGDMESPVCTDFADNMDFYYTKLLQGVAELKHWIYLS

SEQ ID NO: 19618 - protein, 1007 aa, Homo sapiens
  Payload ID: 3931
  Gene Symbol: CNTN1
  Gene Name: contactin 1
  Uniprot ID: Q12860
  ENSP ID: ENSP00000261160
MKMWLLVSHLVIISITTCLAVSEEDKGFGPIFEEQPINTIYPEESLEGKVSLNCRARASPFPVYKWRMNNGDVDLTSDRYSMVGGNLVINNPDKQKDAGIYYCLASNNYGMVRSTEATLSFGYLDPFPPEERPEVRVKEGKGMVLLCDPPYHFPDDLSYRWLLNEFPVFITMDKRRFVSQTNGNLYIANVEASDKGNYSCFVSSPSITKSVFSKFIPLIPIPERTTKPYPADIVVQFKDVYALMGQNVTLECFALGNPVPDIRWRKVLEPMPSTAEISTSGAVLKIFNIQLEDEGIYECEAENIRGKDKHQARIYVQAFPEWVEHINDTEVDIGSDLYWPCVATGKPIPTIRWLKNGYAYHKGELRLYDVTFENAGMYQCIAENTYGAIYANAELKILALAPTFEMNPMKKKILAAKGGRVIIECKPKAAPKPKFSWSKGTEWLVNSSRILIWEDGSLEINNITRNDGGIYTCFAENNRGKANSTGTLVITDPTRIILAPINADITVGENATMQCAASFDPALDLTFVWSFNGYVIDFNKENIHYQRNFMLDSNGELLIRNAQLKHAGRYTCTAQTIVDNSSASADLVVRGPPGPPGGLRIEDIRATSVALTWSRGSDNHSPISKYTIQTKTILSDDWKDAKTDPPIIEGNMEAARAVDLIPWMEYEFRVVATNTLGRGEPSIPSNRIKTDGAAPNVAPSDVGGGGGRNRELTITWAPLSREYHYGNNFGYIVAFKPFDGEEWKKVTVTNPDTGRYVHKDETMSPSTAFQVKVKAFNNKGDGPYSLVAVINSAQDAPSEAPTEVGVKVLSSSEISVHWEHVLEKIVESYQIRYWAAHDKEEAANRVQVTSQEYSARLENLLPDTQYFIEVGACNSAGCGPPSDMIEAFTKKAPPSQPPRIISSVRSGSRYIITWDHVVALSNESTVTGYKVLYRPDGQHDGKLYSTHKHSIEVPIPRDGEYVVEVRAHSDGGDGVVSQVKISGAPTLSPSLLGLLLPAFGILVYLEF

SEQ ID NO: 19619 - protein, 1018 aa, Homo sapiens
  Payload ID: 3931
  Gene Symbol: CNTN1
  Gene Name: contactin 1
  Uniprot ID: Q12860
  ENSP ID: ENSP00000325660
MKMWLLVSHLVIISITTCLAEFTWYRRYGHGVSEEDKGFGPIFEEQPINTIYPEESLEGKVSLNCRARASPFPVYKWRMNNGDVDLTSDRYSMVGGNLVINNPDKQKDAGIYYCLASNNYGMVRSTEATLSFGYLDPFPPEERPEVRVKEGKGMVLLCDPPYHFPDDLSYRWLLNEFPVFITMDKRRFVSQTNGNLYIANVEASDKGNYSCFVSSPSITKSVFSKFIPLIPIPERTTKPYPADIVVQFKDVYALMGQNVTLECFALGNPVPDIRWRKVLEPMPSTAEISTSGAVLKIFNIQLEDEGIYECEAENIRGKDKHQARIYVQAFPEWVEHINDTEVDIGSDLYWPCVATGKPIPTIRWLKNGYAYHKGELRLYDVTFENAGMYQCIAENTYGAIYANAELKILALAPTFEMNPMKKKILAAKGGRVIIECKPKAAPKPKFSWSKGTEWLVNSSRILIWEDGSLEINNITRNDGGIYTCFAENNRGKANSTGTLVITDPTRIILAPINADITVGENATMQCAASFDPALDLTFVWSFNGYVIDFNKENIHYQRNFMLDSNGELLIRNAQLKHAGRYTCTAQTIVDNSSASADLVVRGPPGPPGGLRIEDIRATSVALTWSRGSDNHSPISKYTIQTKTILSDDWKDAKTDPPIIEGNMEAARAVDLIPWMEYEFRVVATNTLGRGEPSIPSNRIKTDGAAPNVAPSDVGGGGGRNRELTITWAPLSREYHYGNNFGYIVAFKPFDGEEWKKVTVTNPDTGRYVHKDETMSPSTAFQVKVKAFNNKGDGPYSLVAVINSAQDAPSEAPTEVGVKVLSSSEISVHWEHVLEKIVESYQIRYWAAHDKEEAANRVQVTSQEYSARLENLLPDTQYFIEVGACNSAGCGPPSDMIEAFTKKAPPSQPPRIISSVRSGSRYIITWDHVVALSNESTVTGYKVLYRPDGQHDGKLYSTHKHSIEVPIPRDGEYVVEVRAHSDGGDGVVSQVKISGAPTLSPSLLGLLLPAFGILVYLEF

SEQ ID NO: 19620 - protein, 1018 aa, Homo sapiens; identical to SEQ ID NO: 19619
  Payload ID: 3931
  Gene Symbol: CNTN1
  Gene Name: contactin 1
  Uniprot ID: Q12860
  ENSP ID: ENSP00000447006

SEQ ID NO: 19621 - protein, 90 aa, Homo sapiens
  Payload ID: 3931
  Gene Symbol: CNTN1
  Gene Name: contactin 1
  ENSP ID: ENSP00000447860
MKMWLLVSHLVIISITTCLAEFTWYRRYGHGVSEEDKGFGPIFEEQPINTIYPEESLEGKVSLNCRARASPFPVYKWRMNNGDVDLTSDR

SEQ ID NO: 19622 - protein, 85 aa, Homo sapiens
  Payload ID: 3931
  Gene Symbol: CNTN1
  Gene Name: contactin 1
  ENSP ID: ENSP00000447862
MKMWLLVSHLVIISITTCLAEFTWYRRYGHGVSEEDKGFGPIFEEQPINTIYPEESLEGKVSLNCRARASPFPVYKWRMNNGDVD

SEQ ID NO: 19623 - protein, 627 aa, Homo sapiens
  Payload ID: 3931
  Gene Symbol: CNTN1
  Gene Name: contactin 1
  Uniprot ID: Q12860
  ENSP ID: ENSP00000448004
MKMWLLVSHLVIISITTCLAEFTWYRRYGHGVSEEDKGFGPIFEEQPINTIYPEESLEGKVSLNCRARASPFPVYKWRMNNGDVDLTSDRYSMVGGNLVINNPDKQKDAGIYYCLASNNYGMVRSTEATLSFGYLDPFPPEERPEVRVKEGKGMVLLCDPPYHFPDDLSYRWLLNEFPVFITMDKRRFVSQTNGNLYIANVEASDKGNYSCFVSSPSITKSVFSKFIPLIPIPERTTKPYPADIVVQFKDVYALMGQNVTLECFALGNPVPDIRWRKVLEPMPSTAEISTSGAVLKIFNIQLEDEGIYECEAENIRGKDKHQARIYVQAFPEWVEHINDTEVDIGSDLYWPCVATGKPIPTIRWLKNGYAYHKGELRLYDVTFENAGMYQCIAENTYGAIYANAELKILALAPTFEMNPMKKKILAAKGGRVIIECKPKAAPKPKFSWSKGTEWLVNSSRILIWEDGSLEINNITRNDGGIYTCFAENNRGKANSTGTLVITDPTRIILAPINADITVGENATMQCAASFDPALDLTFVWSFNGYVIDFNKENIHYQRNFMLDSNGELLIRNAQLKHAGRYTCTAQTIVDNSSASADLVVRGKNRKGGEKNMVDSFLPVCASLPPTW

SEQ ID NO: 19624 - protein, 627 aa, Homo sapiens; identical to SEQ ID NO: 19623
  Payload ID: 3931
  Gene Symbol: CNTN1
  Gene Name: contactin 1
  Uniprot ID: Q12860
  ENSP ID: ENSP00000448653

SEQ ID NO: 19625 - protein, 57 aa, Homo sapiens
  Payload ID: 3931
  Gene Symbol: CNTN1
  Gene Name: contactin 1
  ENSP ID: ENSP00000449517
KHSIEVPIPRDGEYVVEVRAHSDGGDGVVSQVKISEGKSTSLRSKTAKDHRSIRTMS

SEQ ID NO: 19626 - protein, 72 aa, Homo sapiens
  Payload ID: 3931
  Gene Symbol: CNTN1
  Gene Name: contactin 1
  ENSP ID: ENSP00000449706
MKMWLLVSHLVIISITTCLAEFTWYRRYGHGVSEEDKGFGPIFEEQPINTIYPEESLEGKVSLNCRARASPF

SEQ ID NO: 19627 - protein, 62 aa, Homo sapiens
  Payload ID: 3931
  Gene Symbol: CNTN1
  Gene Name: contactin 1
  ENSP ID: ENSP00000450412
MKMWLLVSHLVIISITTCLAEFTWYRRYGHGVSEEDKGFGPIFEEQPINTIYPEESLEGKVS

SEQ ID NO: 19628 - protein, 1040 aa, Homo sapiens
  Payload ID: 3932
  Gene Symbol: CNTN2
  Gene Name: contactin 2 (axonal)
  Uniprot ID: Q02246
  ENSP ID: ENSP00000330633
MGTATRRKPHLLLVAAVALVSSSAWSSALGSQTTFGPVFEDQPLSVLFPEESTEEQVLLACRARASPPATYRWKMNGTEMKLEPGSRHQLVGGNLVIMNPTKAQDAGVYQCLASNPVGTVVSREAILRFGFLQEFSKEERDPVKAHEGWGVMLPCNPPAHYPGLSYRWLLNEFPNFIPTDGRHFVSQTTGNLYIARTNASDLGNYSCLATSHMDFSTKSVFSKFAQLNLAAEDTRLFAPSIKARFPAETYALVGQQVTLECFAFGNPVPRIKWRKVDGSLSPQWTTAEPTLQIPSVSFEDEGTYECEAENSKGRDTVQGRIIVQAQPEWLKVISDTEADIGSNLRWGCAAAGKPRPTVRWLRNGEPLASQNRVEVLAGDLRFSKLSLEDSGMYQCVAENKHGTIYASAELAVQALAPDFRLNPVRRLIPAARGGEILIPCQPRAAPKAVVLWSKGTEILVNSSRVTVTPDGTLIIRNISRSDEGKYTCFAENFMGKANSTGILSVRDATKITLAPSSADINLGDNLTLQCHASHDPTMDLTFTWTLDDFPIDFDKPGGHYRRTNVKETIGDLTILNAQLRHGGKYTCMAQTVVDSASKEATVLVRGPPGPPGGVVVRDIGDTTIQLSWSRGFDNHSPIAKYTLQARTPPAGKWKQVRTNPANIEGNAETAQVLGLTPWMDYEFRVIASNILGTGEPSGPSSKIRTREAAPSVAPSGLSGGGGAPGELIVNWTPMSREYQNGDGFGYLLSFRRQGSTHWQTARVPGADAQYFVYSNESVRPYTPFEVKIRSYNRRGDGPESLTALVYSAEEEPRVAPTKVWAKGVSSSEMNVTWEPVQQDMNGILLGYEIRYWKAGDKEAAADRVRTAGLDTSARVSGLHPNTKYHVTVRAYNRAGTGPASPSANATTMKPPPRRPPGNISWTFSSSSLSIKWDPVVPFRNESAVTGYKMLYQNDLHLTPTLHLTGKNWIEIPVPEDIGHALVQIRTTGPGGDGIPAEVHIVRNGGTSMMVENMAVRPAPHPGTVISHSVAMLILIGSLEL

SEQ ID NO: 19629 - protein, 1028 aa, Homo sapiens
  Payload ID: 3933
  Gene Symbol: CNTN3
  Gene Name: contactin 3 (plasmacytoma associated)
  Uniprot ID: Q9P232
  ENSP ID: ENSP00000263665
MMFPWKQLILLSFIGCLGGELLLQGPVFIKEPSNSIFPVGSEDKKITLHCEARGNPSPHYRWQLNGSDIDMSMEHRYKLNGGNLVVINPNRNWDTGTYQCFATNSLGTIVSREAKLQFAYLENFKTKMRSTVSVREGQGVVLLCGPPPHSGELSYAWIFNEYPSFVEEDSRRFVSQETGHLYISKVEPSDVGNYTCVVTSMVTNARVLGSPTPLVLRSDGVMGEYEPKIEVQFPETLPAAKGSTVKLECFALGNPIPQINWRRSDGLPFSSKIKLRKFSGVLEIPNFQQEDAGSYECIAENSRGKNVARGRLTYYAKPHWVQLIKDVEIAVEDSLYWECRASGKPKPSYRWLKNGAALVLEERTQIENGALTISNLSVTDSGMFQCIAENKHGLVYSSAELKVVASAPDFSKNPMKKLVQVQVGSLVSLDCKPRASPRALSSWKKGDVSVQEHERISLLNDGGLKIANVTKADAGTYTCMAENQFGKANGTTHLVVTEPTRITLAPSNMDVSVGESVILPCQVQHDPLLDIIFTWYFNGALADFKKDGSHFEKVGGSSSGDLMIRNIQLKHSGKYVCMVQTGVDSVSSAADLIVRGSPGPPENVKVDEITDTTAQLSWKEGKDNHSPVISYSIQARTPFSVGWQTVTTVPEVIDGKTHTATVVELNPWVEYEFRVVASNKIGGGEPSLPSEKVRTEEAVPEVPPSEVNGGGGSRSELVITWDPVPEELQNGEGFGYVVAFRPLGVTTWIQTVVTSPDTPRYVFRNESIVPYSPYEVKVGVYNNKGEGPFSPVTTVFSAEEEPTVAPSQVSANSLSSSEIEVSWNTIPWKLSNGHLLGYEVRYWNGGGKEESSSKMKVAGNETSARLRGLKSNLAYYTAVRAYNSAGAGPFSATVNVTTKKTPPSQPPGNVVWNATDTKVLLNWEQVKAMENESEVTGYKVFYRTSSQNNVQVLNTNKTSAELVLPIKEDYIIEVKATTDGGDGTSSEQIRIPRITSMDARGSTSAISNVHPMSSYMPIVLFLIVYVLW

SEQ ID NO: 19630 - protein, 698 aa, Homo sapiens
  Payload ID: 3934
  Gene Symbol: CNTN4
  Gene Name: contactin 4
  Uniprot ID: Q8IWV2
  ENSP ID: ENSP00000380600
MEENVFWECKANGRPKPTYKWLKNGEPLLTRDRIQIEQGTLNITIVNLSDAGMYQCLAENKHGVIFSNAELSVIAVGPDFSRTLLKRVTLVKVGGEVVIECKPKASPKPVYTWKKGRDILKENERITISEDGNLRIINVTKSDAGSYTCIATNHFGTASSTGNLVVKDPTRVMVPPSSMDVTVGESIVLPCQVTHDHSLDIVFTWSFNGHLIDFDRDGDHFERVGGQDSAGDLMIRNIQLKHAGKYVCMVQTSVDRLSAAADLIVRGPPGPPEAVTIDEITDTTAQLSWRPGPDNHSPITMYVIQARTPFSVGWQAVSTVPELIDGKTFTATVVGLNPWVEYEFRTVAANVIGIGEPSRPSEKRRTEEALPEVTPANVSGGGGSKSELVITWETVPEELQNGRGFGYVVAFRPYGKMIWMLTVLASADASRYVFRNESVHPFSPFEVKVGVFNNKGEGPFSPTTVVYSAEEEPTKPPASIFARSLSATDIEVFWASPLEKNRGRIQGYEVKYWRHEDKEENARKIRTVGNQTSTKITNLKGSVLYHLAVKAYNSAGTGPSSATVNVTTRKPPPSQPPGNIIWNSSDSKIILNWDQVKALDNESEVKGYKVLYRWNRQSSTSVIETNKTSVELSLPFDEDYIIEIKPFSDGGDGSSSEQIRIPKISNAYARGSGASTSNACTLSAISTIMISLTARSSL

SEQ ID NO: 19631 - protein, 1026 aa, Homo sapiens
  Payload ID: 3934
  Gene Symbol: CNTN4
  Gene Name: contactin 4
  Uniprot ID: Q8IWV2
  ENSP ID: ENSP00000380602
MRLPWELLVLQSFILCLADDSTLHGPIFIQEPSPVMFPLDSEEKKVKLNCEVKGNPKPHIRWKLNGTDVDTGMDFRYSVVEGSLLINNPNKTQDAGTYQCTATNSFGTIVSREAKLQFAYLDNFKTRTRSTVSVRRGQGMVLLCGPPPHSGELSYAWIFNEYPSYQDNRRFVSQETGNLYIAKVEKSDVGNYTCVVTNTVTNHKVLGPPTPLILRNDGVMGEYEPKIEVQFPETVPTAKGATVKLECFALGNPVPTIIWRRADGKPIARKARRHKSNGILEIPNFQQEDAGLYECVAENSRGKNVARGQLTFYAQPNWIQKINDIHVAMEENVFWECKANGRPKPTYKWLKNGEPLLTRDRIQIEQGTLNITIVNLSDAGMYQCLAENKHGVIFSNAELSVIAVGPDFSRTLLKRVTLVKVGGEVVIECKPKASPKPVYTWKKGRDILKENERITISEDGNLRIINVTKSDAGSYTCIATNHFGTASSTGNLVVKDPTRVMVPPSSMDVTVGESIVLPCQVTHDHSLDIVFTWSFNGHLIDFDRDGDHFERVGGQDSAGDLMIRNIQLKHAGKYVCMVQTSVDRLSAAADLIVRGPPGPPEAVTIDEITDTTAQLSWRPGPDNHSPITMYVIQARTPFSVGWQAVSTVPELIDGKTFTATVVGLNPWVEYEFRTVAANVIGIGEPSRPSEKRRTEEALPEVTPANVSGGGGSKSELVITWETVPEELQNGRGFGYVVAFRPYGKMIWMLTVLASADASRYVFRNESVHPFSPFEVKVGVFNNKGEGPFSPTTVVYSAEEEPTKPPASIFARSLSATDIEVFWASPLEKNRGRIQGYEVKYWRHEDKEENARKIRTVGNQTSTKITNLKGSVLYHLAVKAYNSAGTGPSSATVNVTTRKPPPSQPPGNIIWNSSDSKIILNWDQVKALDNESEVKGYKVLYRWNRQSSTSVIETNKTSVELSLPFDEDYIIEIKPFSDGGDGSSSEQIRIPKISNAYARGSGASTSNACTLSAISTIMISLTARSSL

SEQ ID NO: 19632 - protein, 54 aa, Homo sapiens
  Payload ID: 3934
  Gene Symbol: CNTN4
  Gene Name: contactin 4
  ENSP ID: ENSP00000390560
MRLPWELLVLQSFILCLADDSTLHGPIFIQEPSPVMFPLDSEEKKVKLNCEVKG

SEQ ID NO: 19633 - protein, 1026 aa, Homo sapiens; identical to SEQ ID NO: 19631
  Payload ID: 3934
  Gene Symbol: CNTN4
  Gene Name: contactin 4
  Uniprot ID: Q8IWV2
  ENSP ID: ENSP00000396010

SEQ ID NO: 19634 - protein, 232 aa, Homo sapiens
  Payload ID: 3934
  Gene Symbol: CNTN4
  Gene Name: contactin 4
  ENSP ID: ENSP00000396719
MRLPWELLVLQSFILCLADDSTLHGPIFIQEPSPVMFPLDSEEKKVKLNCEVKGNPKPHIRWKLNGTDVDTGMDFRYSVVEGSLLINNPNKTQDAGTYQCTATNSFGTIVSREAKLQFAYLDNFKTRTRSTVSVRRGQGMVLLCGPPPHSGELSYAWIFNEYPSYQDNRRFVSQETGNLYIAKVEKSDVGNYTCVVTNTVTNHKVLGPPTPLILRNDVQYQLLSGEELMESQ

SEQ ID NO: 19635 - protein, 137 aa, Homo sapiens
  Payload ID: 3934
  Gene Symbol: CNTN4
  Gene Name: contactin 4
  ENSP ID: ENSP00000404085
MRLPWELLVLQSFILCLAGSQTDFWSLLGVLPALEADDSTLHGPIFIQEPSPVMFPLDSEEKKVKLNCEVKGNPKPHIRWKLNGTDVDTGMDFRYSVVEGSLLINNPNKTQDAGTYQCTATNSFGTIVSREAKLQFA

SEQ ID NO: 19636 - protein, 116 aa, Homo sapiens
  Payload ID: 3934
  Gene Symbol: CNTN4
  Gene Name: contactin 4
  ENSP ID: ENSP00000408594
MRLPWELLVLQSFILCLADDSTLHGPIFIQEPSPVMFPLDSEEKKVKLNCEVKGNPKPHIRWKLNGTDVDTGMDFRYSVVEGSLLINNPNKTQDAGTYQCTATNSFGTIVSREAKL

SEQ ID NO: 19637 - protein, 1026 aa, Homo sapiens; identical to SEQ ID NO: 19631
  Payload ID: 3934
  Gene Symbol: CNTN4
  Gene Name: contactin 4
  Uniprot ID: Q8IWV2
  ENSP ID: ENSP00000413642

SEQ ID NO: 19638 - protein, 143 aa, Homo sapiens
  Payload ID: 3934
  Gene Symbol: CNTN4
  Gene Name: contactin 4
  ENSP ID: ENSP00000422120
NDIHVAMEENVFWECKANGRPKPTYKWLKNGEPLLTRDRIQIEQGTLNITIVNLSDAGMYQCLAENKHGVIFSNAELSVIAVGPDFSRTLLKRVTLVKVGGEVVIECKPKASPKPVYTWKKGRDILKENESVHQGFGSGSAPL

SEQ ID NO: 19639 - protein, 1084 aa, Homo sapiens
  Payload ID: 3935
  Gene Symbol: CNTN5
  Gene Name: contactin 5
  ENSP ID: ENSP00000279463
LTEYSKSLPGLSTSYAALLRIKKSSSSSLFGSKTRPRYSSPSLGTLSASSPSWLGAAQNYYSPINLYHSSDAFKQDESVDYGPVFVQEPDDIIFPTDSDEKKVALNCEVRGNPVPSYRWLRNGTEIDLESDYRYSLIDGTFIISNPSEAKDSGHYQCLATNTVGSILSREATLQFAYLGNFSGRTRSAVSVREGQGVVLMCSPPPHSPEIIYSWVFNEFPSFVAEDSRRFISQETGNLYISKVQTSDVGSYICLVKNTVTNARVLSPPTPLTLRNDGVMGEYEPKIEVHFPFTVTAAKGTTVKMECFALGNPVPTITWMKVNGYIPSKARLRKSQAVLEIPNVQLDDAGIYECRAENSRGKNSFRGQLQVYTYPHWVEKLNDTQLDSGSPLRWECKATGKPRPTYRWLKNGVPLSPQSRVEMVNGVLMIHNVNQSDAGMYQCLAENKYGAIYASAELKILASAPTFALNQLKKTIIVTKDQEVVIECKPQGSPKPTISWKKGDRAVRENKRIAILPDGSLRILNASKSDEGKYVCRGENVFGSAEIIASLSVKEPTRIELTPKRTELTVGESIVLNCKAIHDASLDVTFYWTLKGQPIDFEEEGGHFESIRAQASSADLMIRNILLMHAGRYGCRVQTTADSVSDEAELLVRGPPGPPGIVIVEEITESTATLSWSPAADNHSPISSYNLQARSPFSLGWQTVKTVPEIITGDMESAMAVDLNPWVEYEFRVVATNPIGTGDPSTPSRMIRTNEAVPKTAPTNVSGRSGRRHELVIAWEPVSEEFQNGEGFGYIVAFRPNGTRGWKEKMVTSSEASKFIYRDESVPPLTPFEVKVGVYNNKGDGPFSQIVVICSAEGEPSAAPTDVKATSVSVSEILVAWKHIKESLGRPQGFEVGYWKDMEQEDTAETVKTRGNESFVILTGLEGNTLYHFTVRAYNGAGYGPPSSEVSATTKKSPPSQAPSNLRWEQQGSQVSLGWEPVIPLANESEVVGYKVFYRQEGHSNSQVIETQKLQAVVPLPDAGVYIIEVRAYSEGGDGTASSQIRVPSYSGGKITSAQSTLHSLSTSSSSVTLLLALMIPSTSW

SEQ ID NO: 19640 - protein, 1026 aa, Homo sapiens
  Payload ID: 3935
  Gene Symbol: CNTN5
  Gene Name: contactin 5
  Uniprot ID: O94779
  ENSP ID: ENSP00000393229
MASSWKLMLFLSVTMCLSESVDYGPVFVQEPDDIIFPTDSDEKKVALNCEVRGNPVPSYRWLRNGTEIDLESDYRYSLIDGTFIISNPSEAKDSGHYQCLATNTVGSILSREATLQFAYLGNFSGRTRSAVSVREGQGVVLMCSPPPHSPEIIYSWVFNEFPSFVAEDSRRFISQETGNLYISKVQTSDVGSYICLVKNTVTNARVLSPPTPLTLRNDGVMGEYEPKIEVHFPFTVTAAKGTTVKMECFALGNPVPTITWMKVNGYIPSKARLRKSQAVLEIPNVQLDDAGIYECRAENSRGKNSFRGQLQVYTYPHWVEKLNDTQLDSGSPLRWECKATGKPRPTYRWLKNGVPLSPQSRVEMVNGVLMIHNVNQSDAGMYQCLAENKYGAIYASAELKILASAPTFALNQLKKTIIVTKDQEVVIECKPQGSPKPTISWKKGDRAVRENKRIAILPDGSLRILNASKSDEGKYVCRGENVFGSAEIIASLSVKEPTRIELTPKRTELTVGESIVLNCKAIHDASLDVTFYWTLKGQPIDFEEEGGHFESIRAQASSADLMIRNILLMHAGRYGCRVQTTADSVSDEAELLVRGPPGPPGIVIVEEITESTATLSWSPAADNHSPISSYNLQARSPFSLGWQTVKTVPEIITGDMESAMAVDLNPWVEYEFRVVATNPIGTGDPSTPSRMIRTNEAVPKTAPTNVSGRSGRRHELVIAWEPVSEEFQNGEGFGYIVAFRPNGTRGWKEKMVTSSEASKFIYRDESVPPLTPFEVKVGVYNNKGDGPFSQIVVICSAEGEPSAAPTDVKATSVSVSEILVAWKHIKESLGRPQGFEVGYWKDMEQEDTAETVKTRGNESFVILTGLEGNTLYHFTVRAYNGAGYGPPSSEVSATTKKSPPSQAPSNLRWEQQGSQVSLGWEPVIPLANESEVVGYKVFYRQEGHSNSQVIETQKLQAVVPLPDAGVYIIEVRAYSEGGDGTASSQIRVPSYSGGKITSAQSTLHSLSTSSSSVTLLLALMIPSTSW

SEQ ID NO: 19641 - protein, 911 aa, Homo sapiens
  Payload ID: 3935
  Gene Symbol: CNTN5
  Gene Name: contactin 5
  Uniprot ID: O94779
  ENSP ID: ENSP00000433575
MASSWKLMLFLSVTMCLSEYSKSLPGLSTSYAALLRIKKSSSSSLFGSKTRPRYSSPSLGTLSASSPSWLGAAQNYYSPINLYHSSDAFKQDESVDYGPVFVQEPDDIIFPTDSDEKKVALNCEVRGNPVPSYRWLRNGTEIDLESDYRYSLIDGTFIISNPSEAKDSGHYQCLATNTVGSILSREATLQFAYLGNFSGRTRSAVSVREGQGVVLMCSPPPHSPEIIYSWVFNEFPSFVAEDSRRFISQETGNLYISKVQTSDVGSYICLVKNTVTNARVLSPPTPLTLRNDGVMGEYEPKIEVHFPFTVTAAKGTTVKMECFALGNPVPTITWMKVNGYIPSKARLRKSQAVLEIPNVQLDDAGIYECRAENSRGKNSFRGQLQVYTYPHWVEKLNDTQLDSGSPLRWECKATGKPRPTYRWLKNGVPLSPQSRVEMVNGVLMIHNVNQSDAGMYQCLAENKYGAIYASAELKILASAPTFALNQLKKTIIVTKDQEVVIECKPQGSPKPTISWKKGDRAVRENKRIAILPDGSLRILNASKSDEGKYVCRGENVFGSAEIIASLSVKEPTRIELTPKRTELTVGESIVLNCKAIHDASLDVTFYWTLKGQPIDFEEEGGHFESIRAQASSADLMIRNILLMHAGRYGCRVQTTADSVSDEAELLVRGPPGPPGIVIVEEITESTATLSWSPAADNHSPISSYNLQARSPFSLGWQTVKTVPEIITGDMESAMAVDLNPWVEYEFRVVATNPIGTGDPSTPSRMIRTNEAVPKTAPTNVSGRSGRRHELVIAWEPVSEEFQNGEGFGYIVAFRPNGTRGWKEKMVTSSEASKFIYRDESVPPLTPFEVKVGVYNNKGDGPFSQIVVICSAEGEPSAAPTDVKATSVSVSEILVAWKHIKESLGRPQGFEV

SEQ ID NO: 19642 - protein, 1100 aa, Homo sapiens
  Payload ID: 3935
  Gene Symbol: CNTN5
  Gene Name: contactin 5
  Uniprot ID: O94779
  ENSP ID: ENSP00000435637
MASSWKLMLFLSVTMCLSEYSKSLPGLSTSYAALLRIKKSSSSSLFGSKTRPRYSSPSLGTLSASSPSWLGAAQNYYSPINLYHSSDAFKQDESVDYGPVFVQEPDDIIFPTDSDEKKVALNCEVRGNPVPSYRWLRNGTEIDLESDYRYSLIDGTFIISNPSEAKDSGHYQCLATNTVGSILSREATLQFAYLGNFSGRTRSAVSVREGQGVVLMCSPPPHSPEIIYSWVFNEFPSFVAEDSRRFISQETGNLYISKVQTSDVGSYICLVKNTVTNARVLSPPTPLTLRNDGVMGEYEPKIEVHFPFTVTAAKGTTVKMECFALGNPVPTITWMKVNGYIPSKARLRKSQAVLEIPNVQLDDAGIYECRAENSRGKNSFRGQLQVYTYPHWVEKLNDTQLDSGSPLRWECKATGKPRPTYRWLKNGVPLSPQSRVEMVNGVLMIHNVNQSDAGMYQCLAENKYGAIYASAELKILASAPTFALNQLKKTIIVTKDQEVVIECKPQGSPKPTISWKKGDRAVRENKRIAILPDGSLRILNASKSDEGKYVCRGENVFGSAEIIASLSVKEPTRIELTPKRTELTVGESIVLNCKAIHDASLDVTFYWTLKGQPIDFEEEGGHFESIRAQASSADLMIRNILLMHAGRYGCRVQTTADSVSDEAELLVRGPPGPPGIVIVEEITESTATLSWSPAADNHSPISSYNLQARSPFSLGWQTVKTVPEIITGDMESAMAVDLNPWVEYEFRVVATNPIGTGDPSTPSRMIRTNEAVPKTAPTNVSGRSGRRHELVIAWEPVSEEFQNGEGFGYIVAFRPNGTRGWKEKMVTSSEASKFIYRDESVPPLTPFEVKVGVYNNKGDGPFSQIVVICSAEGEPSAAPTDVKATSVSVSEILVAWKHIKESLGRPQGFEVGYWKDMEQEDTAETVKTRGNESFVILTGLEGNTLYHFTVRAYNGAGYGPPSSEVSATTKKSPPSQAPSNLRWEQQGSQVSLGWEPVIPLANESEVVGYKVFYRQEGHSNSQVIETQKLQAVVPLPDAGVYIIEVRAYSEGGDGTASSQIRVPSYSGGKITSAQSTLHSLSTSSSSVTLLLALMIPSTSW

SEQ ID NO: 19643 - protein, 1100 aa, Homo sapiens; identical to SEQ ID NO: 19642
  Payload ID: 3935
  Gene Symbol: CNTN5
  Gene Name: contactin 5
  Uniprot ID: O94779
  ENSP ID: ENSP00000436185

SEQ ID NO: 19644 - protein, 1022 aa, Homo sapiens [sequence omitted]

SEQ ID NO: 19645 - protein, 1028 aa, Homo sapiens
  Payload ID: 3936
  Gene Symbol: CNTN6
  Gene Name: contactin 6
  Uniprot ID: Q9UQ52
  ENSP ID: ENSP00000341882
MRLLWKLVILLPLINSSAGDGLLSRPIFTQEPHDVIFPLDLSKSEVILNCAANGYPSPHYRWKQNGTDIDFTMSYHYRLDGGSLAINSPHTDQDIGMYQCLATNLLGTILSRKAKLQFAYIEDFETKTRSTVSVREGQGVVLLCGPPPHFGDLSYAWTFNDNPLYVQEDNRRFVSQETGNLYIAKVEPSDVGNYTCFITNKEAQRSVQGPPTPLVQRTDGVMGEYEPKIEVRFPETIQAAKDSSVKLECFALGNPVPDISWRRLDGSPLPGKVKYSKSQAILEIPNFQQEDEGFYECIASNLRGRNLAKGQLIFYAPPEWEQKIQNTHLSIYDNLLWECKASGKPNPWYTWLKNGERLNPEERIQIENGTLIITMLNVSDSGVYQCAAENKYQIIYANAELRVLASAPDFSKSPVKKKSFVQVGGDIVIGCKPNAFPRAAISWKRGTETLRQSKRIFLLEDGSLKIYNITRSDAGSYTCIATNQFGTAKNTGSLIVKERTVITVPPSKMDVTVGESIVLPCQVSHDPSIEVVFVWFFNGDVIDLKKGVAHFERIGGESVGDLMIRNIQLHHSGKYLCTVQTTLESLSAVADIIVRGPPGPPEDVQVEDISSTTSQLSWRAGPDNNSPIQIFTIQTRTPFSVGWQAVATVPEILNGKTYNATVVGLSPWVEYEFRVVAGNSIGIGEPSEPSELLRTKASVPVVAPVNIHGGGGSRSELVITWESIPEELQNGEGFGYIIMFRPVGSTTWSKEKVSSVESSRFVYRNESIIPLSPFEVKVGVYNNEGEGSLSTVTIVYSGEDEPQLAPRGTSLQSFSASEMEVSWNAIAWNRNTGRVLGYEVLYWTDDSKESMIGKIRVSGNVTTKNITGLKANTIYFASVRAYNTAGTGPSSPPVNVTTKKSPPSQPPANIAWKLTNSKLCLNWEHVKTMENESEVLGYKILYRQNRQSKTHILETNNTSAELLVPFEEDYLIEIRTVSDGGDGSSSEEIRIPKMSSLSSRGIQFLEPSTHFLSIVIVIFHCFAIQPLI

SEQ ID NO: 19646 - protein, 41 aa, Homo sapiens
  Payload ID: 3936
  Gene Symbol: CNTN6
  Gene Name: contactin 6
  ENSP ID: ENSP00000377804
METGNSAATHKLFCRKVYISPILLLTGLRLWLLHLEIYLLC

SEQ ID NO: 19647 - protein, 63 aa, Homo sapiens
  Payload ID: 3936
  Gene Symbol: CNTN6
  Gene Name: contactin 6
  ENSP ID: ENSP00000380616
MALEWQLLSALSDSVKVDEDRAGFQCRKNFPFEYSKRELCTCASRTDCLAPTGMQQERSVFHA

SEQ ID NO: 19648 - protein, 1028 aa, Homo sapiens; identical to SEQ ID NO: 19645
  Payload ID: 3936
  Gene Symbol: CNTN6
  Gene Name: contactin 6
  Uniprot ID: Q9UQ52
  ENSP ID: ENSP00000407822

SEQ ID NO: 19649 - protein, 63 aa, Homo sapiens; identical to SEQ ID NO: 19647
  Payload ID: 3936
  Gene Symbol: CNTN6
  Gene Name: contactin 6
  ENSP ID: ENSP00000408460

SEQ ID NO: 19650 - protein, 1384 aa, Homo sapiens
  Payload ID: 3937
  Gene Symbol: CNTNAP1
  Gene Name: contactin associated protein 1
  Uniprot ID: P78357
  ENSP ID: ENSP00000264638
MMHLRLFCILLAAVSGAEGWGYYGCDEELVGPLYARSLGASSYYSLLTAPRFARLHGISGWSPRIGDPNPWLQIDLMKKHRIRAVATQGSFNSWDWVTRYMLLYGDRVDSWTPFYQRGHNSTFFGNVNESAVVRHDLHFHFTARYIRIVPLAWNPRGKIGLRLGLYGCPYKADILYFDGDDAISYRFPRGVSRSLWDVFAFSFKTEEKDGLLLHAEGAQGDYVTLELEGAHLLLHMSLGSSPIQPRPGHTTVSAGGVLNDQHWHYVRVDRFGRDVNFTLDGYVQRFILNGDFERLNLDTEMFIGGLVGAARKNLAYRHNFRGCIENVIFNRVNIADLAVRRHSRITFEGKVAFRCLDPVPHPINFGGPHNFVQVPGFPRRGRLAVSFRFRTWDLTGLLLFSRLGDGLGHVELTLSEGQVNVSIAQSGRKKLQFAAGYRLNDGFWHEVNFVAQENHAVISIDDVEGAEVRVSYPLLIRTGTSYFFGGCPKPASRWDCHSNQTAFHGCMELLKVDGQLVNLTLVEGRRLGFYAEVLFDTCGITDRCSPNMCEHDGRCYQSWDDFICYCELTGYKGETCHTPLYKESCEAYRLSGKTSGNFTIDPDGSGPLKPFVVYCDIRENRAWTVVRHDRLWTTRVTGSSMERPFLGAIQYWNASWEEVSALANASQHCEQWIEFSCYNSRLLNTAGGYPYSFWIGRNEEQHFYWGGSQPGIQRCACGLDRSCVDPALYCNCDADQPQWRTDKGLLTFVDHLPVTQVVIGDTNRSTSEAQFFLRPLRCYGDRNSWNTISFHTGAALRFPPIRANHSLDVSFYFRTSAPSGVFLENMGGPYCQWRRPYVRVELNTSRDVVFAFDVGNGDENLTVHSDDFEFNDDEWHLVRAEINVKQARLRVDHRPWVLRPMPLQTYIWMEYDQPLYVGSAELKRRPFVGCLRAMRLNGVTLNLEGRANASEGTSPNCTGHCAHPRLPCFHGGRCVERYSYYTCDCDLTAFDGPYCNHDIGGFFEPGTWMRYNLQSALRSAAREFSHMLSRPVPGYEPGYIPGYDTPGYVPGYHGPGYRLPDYPRPGRPVPGYRGPVYNVTGEEVSFSFSTSSAPAVLLYVSSFVRDYMAVLIKDDGTLQLRYQLGTSPYVYQLTTRPVTDGQPHSINITRVYRNLFIQVDYFPLTEQKFSLLVDSQLDSPKALYLGRVMETGVIDPEIQRYNTPGFSGCLSGVRFNNVAPLKTHFRTPRPMTAELAEALRVQGELSESNCGAMPRLVSEVPPELDPWYLPPDFPYYHDEGWVAILLGFLVAFLLLGLVGMLVLFYLQNHRYKGSYHTNEPKAAHEYHPGSKPPLPTSGPAQVPTPTAAPNQAPASAPAPAPTPAPAPGPRDQNLPQILEESRSE

SEQ ID NO: 19651 - protein, 740 aa, Homo sapiens
  Payload ID: 3937
  Gene Symbol: CNTNAP1
  Gene Name: contactin associated protein 1
  ENSP ID: ENSP00000466571
MMHLRLFCILLAAVSGAEGWGYYGCDEELVGPLYARSLGASSYYSLLTAPRFARLHGISGWSPRIGDPNPWLQIDLMKKHRIRAVATQGSFNSWDWVTRYMLLYGDRVDSWTPFYQRGHNSTFFGNVNESAVVRHDLHFHFTARYIRIVPLAWNPRGKIGLRLGLYGCPYKADILYFDGDDAISYRFPRGVSRSLWDVFAFSFKTEEKDGLLLHAEGAQGDYVTLELEGAHLLLHMSLGSSPIQPRPGHTTVSAGGVLNDQHWHYVRVDRFGRDVNFTLDGYVQRFILNGDFERLNLDTEMFIGGLVGAARKNLAYRHNFRGCIENVIFNRVNIADLAVRRHSRITFEGKVAFRCLDPVPHPINFGGPHNFVQVPGFPRRGRLAVSFRFRTWDLTGLLLFSRLGDGLGHVELTLSEGQVNVSIAQSGRKKLQFAAGYRLNDGFWHEVNFVAQENHAVISIDDVEGAEVRVSYPLLIRTGTSYFFGGCPKPASRWDCHSNQTAFHGCMELLKVDGQLVNLTLVEGRRLGFYAEVLFDTCGITDRCSPNMCEHDGRCYQSWDDFICYCELTGYKGETCHTPLYKESCEAYRLSGKTSGNFTIDPDGSGPLKPFVVYCDIRENRAWTVVRHDRLWTTRVTGSSMERPFLGAIQYWNASWEEVSALANASQHCEQWIEFSCYNSRLLNTAAFGLAEMRSSTSTGEAPSLGSSAVPVVWTGAVWTLPCTATVTLTSPSGELTRDC

SEQ ID NO: 19652 - protein, 1331 aa, Homo sapiens
  Payload ID: 3938
  Gene Symbol: CNTNAP2
  Gene Name: contactin associated protein-like 2
  Uniprot ID: Q9UHC6
  ENSP ID: ENSP00000354778
MQAAPRAGCGAALLLWIVSSCLCRAWTAPSTSQKCDEPLVSGLPHVAFSSSSSISGSYSPGYAKINKRGGAGGWSPSDSDHYQWLQVDFGNRKQISAIATQGRYSSSDWVTQYRMLYSDTGRNWKPYHQDGNIWAFPGNINSDGVVRHELQHPIIARYVRIVPLDWNGEGRIGLRIEVYGCSYWADVINFDGHVVLPYRFRNKKMKTLKDVIALNFKTSESEGVILHGEGQQGDYITLELKKAKLVLSLNLGSNQLGPIYGHTSVMTGSLLDDHHWHSVVIERQGRSINLTLDRSMQHFRTNGEFDYLDLDYEITFGGIPFSGKPSSSSRKNFKGCMESINYNGVNITDLARRKKLEPSNVGNLSFSCVEPYTVPVFFNATSYLEVPGRLNQDLFSVSFQFRTWNPNGLLVFSHFADNLGNVEIDLTESKVGVHINITQTKMSQIDISSGSGLNDGQWHEVRFLAKENFAILTIDGDEASAVRTNSPLQVKTGEKYFFGGFLNQMNNSSHSVLQPSFQGCMQLIQVDDQLVNLYEVAQRKPGSFANVSIDMCAIIDRCVPNHCEHGGKCSQTWDSFKCTCDETGYSGATCHNSIYEPSCEAYKHLGQTSNYYWIDPDGSGPLGPLKVYCNMTEDKVWTIVSHDLQMQTPVVGYNPEKYSVTQLVYSASMDQISAITDSAEYCEQYVSYFCKMSRLLNTPDGSPYTWWVGKANEKHYYWGGSGPGIQKCACGIERNCTDPKYYCNCDADYKQWRKDAGFLSYKDHLPVSQVVVGDTDRQGSEAKLSVGPLRCQGDRNYWNAASFPNPSSYLHFSTFQGETSADISFYFKTLTPWGVFLENMGKEDFIKLELKSATEVSFSFDVGNGPVEIVVRSPTPLNDDQWHRVTAERNVKQASLQVDRLPQQIRKAPTEGHTRLELYSQLFVGGAGGQQGFLGCIRSLRMNGVTLDLEERAKVTSGFISGCSGHCTSYGTNCENGGKCLERYHGYSCDCSNTAYDGTFCNKDVGAFFEEGMWLRYNFQAPATNARDSSSRVDNAPDQQNSHPDLAQEEIRFSFSTTKAPCILLYISSFTTDFLAVLVKPTGSLQIRYNLGGTREPYNIDVDHRNMANGQPHSVNITRHEKTIFLKLDHYPSVSYHLPSSSDTLFNSPKSLFLGKVIETGKIDQEIHKYNTPGFTGCLSRVQFNQIAPLKAALRQTNASAHVHIQGELVESNCGASPLTLSPMSSATDPWHLDHLDSASADFPYNPGQGQAIRNGVNRNSAIIGGVIAVVIFTILCTLVFLIRYMFRHKGTYHTNEAKGAESAESADAAIMNNDPNFTETIDESKKEWLI

SEQ ID NO: 19653 - protein, 108 aa, Homo sapiens
  Payload ID: 3938
  Gene Symbol: CNTNAP2
  Gene Name: contactin associated protein-like 2
  Uniprot ID: Q9UHC6
  ENSP ID: ENSP00000481057
MSSATDPWHLDHLDSASADFPYNPGQGQAIRNGVNRNSAIIGGVIAVVIFTILCTLVFLIRYMFRHKGTYHTNEAKGAESAESADAAIMNNDPNFTETIDESKKEWLI

SEQ ID NO: 19654 - protein, 119 aa, Homo sapiens
  Payload ID: 3938
  Gene Symbol: CNTNAP2
  Gene Name: contactin associated protein-like 2
  ENSP ID: ENSP00000485955
MQAAPRAGCGAALLLWIVSSCLCRAWTAPSTSQKCDEPLVSGLPHVAFSSSSSISGSYSPGYAKINKRGGAGGWSPSDSDHYQWLQVDFGNRKQISAIATQGRYSSSDWVTQYRMLYSD

SEQ ID NO: 19655 - protein, 108 aa, Homo sapiens; identical to SEQ ID NO: 19653
  Payload ID: 3938
  Gene Symbol: CNTNAP2
  Gene Name: contactin associated protein-like 2
  Uniprot ID: Q9UHC6
  ENSP ID: ENSP00000486292

SEQ ID NO: 19656 - protein, 390 aa, Homo sapiens
  Payload ID: 3938
  Gene Symbol: CNTNAP2
  Gene Name: contactin associated protein-like 2
  ENSP ID: ENSP00000487516
MNGVTLDLEERAKVTSGFISGCSGHCTSYGTNCENGGKCLERYHGYSCDCSNTAYDGTFCNKDVGAFFEEGMWLRYNFQAPATNARDSSSRVDNAPDQQNSHPDLAQEEIRFSFSTTKAPCILLYISSFTTDFLAVLVKPTGSLQIRYNLGGTREPYNIDVDHRNMANGQPHSVNITRHEKTIFLKLDHYPSVSYHLPSSSDTLFNSPKSLFLGKVIETGKIDQEIHKYNTPGFTGCLSRVQFNQIAPLKAALRQTNASAHVHIQGELVESNCGASPLTLSPMSSATDPWHLDHLDSASADFPYNPGQGQAIRNGVNRNSAIIGGVIAVVIFTILCTLVFLIRYMFRHKGTYHTNEAKGAESAESADAAIMNNDPNFTETIDESKKEWLI

SEQ ID NO: 19657 - protein, 328 aa, Homo sapiens
  Payload ID: 3938
  Gene Symbol: CNTNAP2
  Gene Name: contactin associated protein-like 2
  ENSP ID: ENSP00000487946
  MOD_RES (1)..(1): Any amino acid
XVGAFFEEGMWLRYNFQAPATNARDSSSRVDNAPDQQNSHPDLAQEEIRFSFSTTKAPCILLYISSFTTDFLAVLVKPTGSLQIRYNLGGTREPYNIDVDHRNMANGQPHSVNITRHEKTIFLKLDHYPSVSYHLPSSSDTLFNSPKSLFLGKVIETGKIDQEIHKYNTPGFTGCLSRVQFNQIAPLKAALRQTNASAHVHIQGELVESNCGASPLTLSPMSSATDPWHLDHLDSASADFPYNPGQGQAIRNGVNRNSAIIGGVIAVVIFTILCTLVFLIRYMFRHKGTYHTNEAKGAESAESADAAIMNNDPNFTETIDESKKEWLI

SEQ ID NO: 19658 - protein, 328 aa, Homo sapiens; identical to SEQ ID NO: 19657
  Payload ID: 3938
  Gene Symbol: CNTNAP2
  Gene Name: contactin associated protein-like 2
  ENSP ID: ENSP00000488754
  MOD_RES (1)..(1): Any amino acid

SEQ ID NO: 19659 - protein, 1288 aa, Homo sapiens
  Payload ID: 3939
  Gene Symbol: CNTNAP3
  Gene Name: contactin associated protein-like 3
  Uniprot ID: Q9BZ76
  ENSP ID: ENSP00000297668
MASVAWAVLKVLLLLPTQTWSPVGAGNPPDCDAPLASALPRSSFSSSSELSSSHGPGFSRLNRRDGAGGWTPLVSNKYQWLQIDLGERMEVTAVATQGGYGSSDWVTSYLLMFSDGGRNWKQYRREESIWGFPGNTNADSVVHYRLQPPFEARFLRFLPLAWNPRGRIGMRIEVYGCAYKSEVVYFDGQSALLYRLDKKPLKPIRDVISLKFKAMQSNGILLHREGQHGNHITLELIKGKLVFFLNSGNAKLPSTIAPVTLTLGSLLDDQHWHSVLIELLDTQVNFTVDKHTHHFQAKGDSSYLDLNFEISFGGIPTPGRSRAFRRKSFHGCLENLYYNGVDVTELAKKHKPQILMMGNVSFSCPQPQTVPVTFLSSRSYLALPGNSGEDKVSVTFQFRTWNRAGHLLFGELRRGSGSFVLFLKDGKLKLSLFQPGQSPRNVTAGAGLNDGQWHSVSFSAKWSHMNVVVDDDTAVQPLVAVLIDSGDTYYFGGCLDNSSGSGCKSPLGGFQGCLRLITIGDKAVDPILVQQGALGSFRDLQIDSCGITDRCLPSYCEHGGECSQSWDTFSCDCLGTGYTGETCHSSLYEQSCEAHKHRGNPSGLYYIDADGSGPLGPFLVYCNMTADAAWTVVQHGGPDAVTLRGAPSGHPRSAVSFAYAAGAGQLRSAVNLAERCEQRLALRCGTARRPDSRDGTPLSWWVGRTNETHTSWGGSLPDAQKCTCGLEGNCIDSQYYCNCDAGRNEWTSDTIVLSQKEHLPVTQIVMTDAGRPHSEAAYTLGPLLCRGDQSFWNSASFNTETSYLHFPAFHGELTADVCFFFKTTVSSGVFMENLGITDFIRIELRAPTEVTFSFDVGNGPCEVTVQSPTPFNDNQWHHVRAERNVKGASLQVDQLPQKMQPAPADGHVRLQLNSQLFIGGTATRQRGFLGCIRSLQLNGVALDLEERATVTPGVEPGCAGHCSTYGHLCRNGGRCREKRRGVTCDCAFSAYDGPFCSNEISAYFATGSSMTYHFQEHYTLSENSSSLVSSLHRDVTLTREMITLSFRTTRTPSLLLYVSSFYEEYLSVILANNGSLQIRYKLDRHQNPDAFTFDFKNMADGQLHQVKINREEAVVMVEVNQSTKKQVILSSGTEFNAVKSLILGKVLEAAGADPDTRRAATSGFTGCLSAVRFGRAAPLKAALRPSGPSRVTVRGHVAPMARCAAGAASGSPARELAPRLAGGAGRSGPADEGEPLVNADRRDSAVIGGVIAVVIFILLCITAIAIRIYQQRKLRKENESKVSKKEEC

SEQ ID NO: 19660 - protein, 1039 aa, Homo sapiens
  Payload ID: 3939
  Gene Symbol: CNTNAP3
  Gene Name: contactin associated protein-like 3
  ENSP ID: ENSP00000350863
MEVTAVATQGGYGSSDWVTSYLLMFSDGGRNWKQYRREESIWGFPGNTNADSVVHYRLQPPFEARFLRFLPLAWNPRGRIGMRIEVYGCAYKSEVVYFDGQSALLYRLDKKPLKPIRDVISLKFKAMQSNGILLHREGQHGNHITLELIKGKLVFFLNSGNAKLPSTIAPVTLTLGSLLDDQHWHSVLIELLDTQVNFTVDKHTHHFQAKGDSSYLDLNFEISFGGIPTPGRSRAFRRKSFHGCLENLYYNGVDVTELAKKHKPQILMMGNVSFSCPQPQTVPVTFLSSRSYLALPGNSGEDKVSVTFQFRTWNRAGHLLFGELRRGSGSFVLFLKDGKLKLSLFQPGQSPRNVTAGAGLNDGQWHSVSFSAKWSHMNVVVDDDTAVQPLVAVLIDSGDTYYFGGCLDNSSGSGCKSPLGGFQGCLRLITIGDKAVDPILVQQGALGSFRDLQIDSCGITDRCLPSYCEHGGECSQSWDTFSCDCLGTGYTGETCHSSLYEQSCEAHKHRGNPSGLYYIDADGSGPLGPFLVYCNMTADAAWTVVQHGGPDAVTLRGAPSGHPRSAVSFAYAAGAGQLRSAVNLAERCEQRLALRCGTARRPDSRDGTPLSWWVGRTNETHTSWGGSLPDAQKCTCGLEGNCIDSQYYCNCDAGRNEWTSDTIVLSQKEHLPVTQIVMTDAGRPHSEAAYTLGPLLCRGDQSFWNSASFNTETSYLHFPAFHGELTADVCFFFKTTVSSGVFMENLGITDFIRIELRAPTEVTFSFDVGNGPCEVTVQSPTPFNDNQWHHVRAERNVKGASLQVDQLPQKMQPAPADGHVRLQLNSQLFIGGTATRQRGFLGCIRSLQLNGVALDLEERATVTPGVEPGCAGHCSTYGHLCRNGGRCREKRRGVTCDCAFSAYDGPFCSNEISAYFATGSSMTYHFQEHYTLSENSSSLVSSLHRDVTLTREMITLSFRTTRTPSLLLYVSSFYEEYLSVILANNGSLQIRYKLDRHQNPDAFTFDFKNMADGQLHQVKINREEAVVMVEVIPQMQKSN

SEQ ID NO: 19661 - protein, 1207 aa, Homo sapiens
  Payload ID: 3939
  Gene Symbol: CNTNAP3
  Gene Name: contactin associated protein-like 3
  ENSP ID: ENSP00000366884
MASVAWAVLKVLLLLPTQTWSPVGAGNPPDCDAPLASALPRSSFSSSSELSSSHGPGFSRLNRRDGAGGWTPLVSNKYQWLQIDLGERMEVTAVATQGGYGSSDWVTSYLLMFSDGGRNWKQYRREESIWGFPGNTNADSVVHYRLQPPFEARFLRFLPLAWNPRGRIGMRIEVYGCAYKSEVVYFDGQSALLYRLDKKPLKPIRDVISLKFKAMQSNGILLHREGQHGNHITLELIKGKLVFFLNSGNAKLPSTIAPVTLTLGSLLDDQHWHSVLIELLDTQVNFTVDKHTHHFQAKGDSSYLDLNFEISFGGIPTPGRSRAFRRKSFHGCLENLYYNGVDVTELAKKHKPQILMMGNVSFSCPQPQTVPVTFLSSRSYLALPGNSGEDKVSVTFQFRTWNRAGHLLFGELRRGSGSFVLFLKDGKLKLSLFQPGQSPRNVTAGAGLNDGQWHSVSFSAKWSHMNVVVDDDTAVQPLVAVLIDSGDTYYFGGCLDNSSGSGCKSPLGGFQGCLRLITIGDKAVDPILVQQGALGSFRDLQIDSCGITDRCLPSYCEHGGECSQSWDTFSCDCLGTGYTGETCHSSLYEQSCEAHKHRGNPSGLYYIDADGSGPLGPFLVYCNMTDAAWTVVQHGGPDAVTLRGAPSGHPRSAVSFAYAAGAGQLRSAVNLAERCEQRLALRCGTARRPDSRDGTPLSWWVGRTNETHTSWGGSLPDAQKCTCGLEGNCIDSQYYCNCDAGRNEWTSDTIVLSQKEHLPVTQIVMTDAGRPHSEAAYTLGPLLCRGDQSFWNSASFNTETSYLHFPAFHGELTADVCFFFKTTVSSGVFMENLGITDFIRIELRAPTEVTFSFDVGNGPCEVTVQSPTPFNDNQWHHVRAERNVKGASLQVDQLPQKMQPAPADGHVRLQLNSQLFIEISAYFATGSSMTYHFQEHYTLSENSSSLVSSLHRDVTLTREMITLSFRTTRTPSLLLYVSSFYEEYLSVILANNGSLQIRYKLDRHQNPDAFTFDFKNMADGQLHQVKINREEAVVMVEVNQSTKKQVILSSGTEFNAVKSLILGKVLEAAGADPDTRRAATSGFTGCLSAVRFGRAAPLKAALRPSGPSRVTVRGHVAPMARCAAGAASGSPARELAPRLAGGAGRSGPADEGEPLVNADRRDSAVIGGVIAVVIFILLCITAIAIRIYQQRKLRKENESKVSKKEEC

SEQ ID NO: 19662 - protein, 745 aa, Homo sapiens
  Payload ID: 3939
  Gene Symbol: CNTNAP3
  Gene Name: contactin associated protein-like 3
  ENSP ID: ENSP00000366887
MASVAWAVLKVLLLLPTQTWSPVGAGNPPDCDAPLASALPRSSFSSSSELSSSHGPGFSRLNRRDGAGGWTPLVSNKYQWLQIDLGERMEVTAVATQGGYGSSDWVTSYLLMFSDGGRNWKQYRREESIWGFPGNTNADSVVHYRLQPPFEARFLRFLPLAWNPRGRIGMRIEVYGCAYKSEVVYFDGQSALLYRLDKKPLKPIRDVISLKFKAMQSNGILLHREGQHGNHITLELIKGKLVFFLNSGNAKLPSTIAPVTLTLGSLLDDQHWHSVLIELLDTQVNFTVDKHTHHFQAKGDSSYLDLNFEISFGGIPTPGRSRAFRRKSFHGCLENLYYNGVDVTELAKKHKPQILMMGNVSFSCPQPQTVPVTFLSSRSYLALPGNSGEDKVSVTFQFRTWNRAGHLLFGELRRGSGSFVLFLKDGKLKLSLFQPGQSPRNVTAGAGLNDGQWHSVSFSAKWSHMNVVVDDDTAVQPLVAVLIDSGDTYYFGGCLDNSSGSGCKSPLGGFQGCLRLITIGDKAVDPILVQQGALGSFRDLQIDSCGITDRCLPSYCEHGGECSQSWDTFSCDCLGTGYTGETCHSSLYEQSCEAHKHRGNPSGLYYIDADGSGPLGPFLVYCNMTDAAWTVVQHGGPDAVTLRGAPSGHPRSAVSFAYAAGAGQLRSAVNLAERCEQRLALRCGTARRPDSRDGTPLSWWVGRTNETHTSWGGSLPDAQKCTCGLEGNCIDSQYYCNCDAGRNEW

SEQ ID NO: 19663 - protein, 604 aa, Homo sapiens
  Payload ID: 3939
  Gene Symbol: CNTNAP3
  Gene Name: contactin associated protein-like 3
  ENSP ID: ENSP00000432863
MASVAWAVLKVLLLLPTQTWSPVGAGNPPDCDAPLASALPRSSFSSSSELSSSHGPGFSRLNRRDGAGGWTPLVSNKYQWLQIDLGERMEVTAVATQGGYGSSDWVTSYLLMFSDGGRNWKQYRREESIWGFPGNTNADSVVHYRLQPPFEARFLRFLPLAWNPRGRIGMRIEVYGCAYKSEVVYFDGQSALLYRLDKKPLKPIRDVISLKFKAMQSNGILLHREGQHGNHITLELIKGKLVFFLNSGNAKLPSTIAPVTLTLGSLLDDQHWHSVLIELLDTQVNFTVDKHTHHFQAKGDSSYLDLNFEISFGGIPTPGRSRAFRRKSFHGCLENLYYNGVDVTELAKKHKPQILMMGNVSFSCPQPQTVPVTFLSSRSYLALPGNSGEDKVSVTFQFRTWNRAGHLLFGELRRGSGSFVLFLKDGKLKLSLFQPGQSPRNVTAGAGLNDGQWHSVSFSAKWSHMNVVVDDDTAVQPLVAVLIDSGDTYYFGALYEQSCEAHKHRGNPSGLYYIDADGSGPLGPFLVYCNMTDAAWTVVQHGGPDAVTLRGAPSGHPRSAVSFAYAAGAGQLRSAVNLAERCEQRLALRCGTARRPDSRGLVTQ

SEQ ID NO: 19664 - protein, 380 aa, Homo sapiens
  Payload ID: 3940
  Gene Symbol: CNTNAP3B
  Gene Name: contactin associated protein-like 3B
  Uniprot ID: Q96NU0
  ENSP ID: ENSP00000276974
MASVAWAVLKVLLLLPTQTWSPVGAGNPPDCDSPLASALPRSSFSSSSELSSSHGPGFSRLNRRDGAGGWTPLVSNKYQWLQIDLGERMEVTAVATQGGYGSSDWVTSYLLMFSDGGRNWKQYRREESIWGFPGNTNADSVVHYRLQPPFEARFLRFLPLAWNPRGRIGMRIEVYGCAYKSEVVYFDGQSALLYTLDKKPLKPIRDVISLKFKAMQSNGILLHREGQHGNHITLELIKGKLVFFLNSGNAKLPSTIAPVTLTLGSLLDDQHWHSVLIELLDTQVNFTVDKHTHHFQAKGDSSNLDLNFEISFGGILSPGRSRAFTRKSFHGCLENLYYNGVDVTELAKKHKPQILMMELAHGLQDQNLKISLTVCHQTTQ

SEQ ID NO: 19665 - protein, 605 aa, Homo sapiens
  Payload ID: 3940
  Gene Symbol: CNTNAP3B
  Gene Name: contactin associated protein-like 3B
  ENSP ID: ENSP00000432883
MASVAWAVLKVLLLLPTQTWSPVGAGNPPDCDSPLASALPRSSFSSSSELSSSHGPGFSRLNRRDGAGGWTPLVSNKYQWLQIDLGERMEVTAVATQGGYGSSDWVTSYLLMFSDGGRNWKQYRREESIWGFPGNTNADSVVHYRLQPPFEARFLRFLPLAWNPRGRIGMRIEVYGCAYKSEVVYFDGQSALLYTLDKKPLKPIRDVISLKFKAMQSNGILLHREGQHGNHITLELIKGKLVFFLNSGNAKLPSTIAPVTLTLGSLLDDQHWHSVLIELLDTQVNFTVDKHTHHFQAKGDSSNLDLNFEISFGGILSPGRSRAFTRKSFHGCLENLYYNGVDVTELAKKHKPQILMMGNVSFSCPQPQTVPVTFLSSRSYLALPGNSGEDKVSVTFQFRTWNRAGHLLFGELQRGSGSFVLFLKDGKLKLSLFQAGQSPRNVTAGAGLNDGQWHSVSFSAKWSHMNVVVDDDTAVQPLVAVLIDSGDTYYFGALYEQSCEAHKHRGNPSGLYYIDADGSGPLGPFLVYCNMTADSAWTVVRHGGPDAVTLRGAPSGHPLSAVSFAYAAGAGQLRAAVNLAERCEQRLALRCGTARRPDSRGLVTQ

SEQ ID NO: 19666 - protein, 652 aa, Homo sapiens
  Payload ID: 3940
  Gene Symbol: CNTNAP3B
  Gene Name: contactin associated protein-like 3B
  ENSP ID: ENSP00000478659
MASVAWAVLKVLLLLPTQTWSPVGAGNPPDCDSPLASALPRSSFSSSSELSSSHGPGFSRLNRRDGAGGWTPLVSNKYQWLQIDLGERMEVTAVATQGGYGSSDWVTSYLLMFSDGGRNWKQYRREESIWGFPGNTNADSVVHYRLQPPFEARFLRFLPLAWNPRGRIGMRIEVYGCAYKSEVVYFDGQSALLYTLDKKPLKPIRDVISLKFKAMQSNGILLHREGQHGNHITLELIKGKLVFFLNSGNAKLPSTIAPVTLTLGSLLDDQHWHSVLIELLDTQVNFTVDKHTHHFQAKGDSSNLDLNFEISFGGILSPGRSRAFTRKSFHGCLENLYYNGVDVTELAKKHKPQILMMGNVSFSCPQPQTVPVTFLSSRSYLALPGNSGEDKVSVTFQFRTWNRAGHLLFGELQRGSGSFVLFLKDGKLKLSLFQAGQSPRNVTAGAGLNDGQWHSVSFSAKWSHMNVVVDDDTAVQPLVAVLIDSGDTYYFGALYEQSCEAHKHRGNPSGLYYIDADGSGPLGPFLVYCNMTDSAWTVVRHGGPDAVTLRGAPSGHPLSAVSFAYAAGAGQLRAAVNLAERCEQRLALRCGTARRPDSRDGTPLSWWVGRTNETHTSWGGSLPDAQKCTCGLEGNCIDSQYYCNCDAGQNEW

SEQ ID NO: 19667 - protein, 1288 aa, Homo sapiens
  Payload ID: 3940
  Gene Symbol: CNTNAP3B
  Gene Name: contactin associated protein-like 3B
  ENSP ID: ENSP00000478671
MASVAWAVLKVLLLLPTQTWSPVGAGNPPDCDSPLASALPRSSFSSSSELSSSHGPGFSRLNRRDGAGGWTPLVSNKYQWLQIDLGERMEVTAVATQGGYGSSDWVTSYLLMFSDGGRNWKQYRREESIWGFPGNTNADSVVHYRLQPPFEARFLRFLPLAWNPRGRIGMRIEVYGCAYKSEVVYFDGQSALLYTLDKKPLKPIRDVISLKFKAMQSNGILLHREGQHGNHITLELIKGKLVFFLNSGNAKLPSTIAPVTLTLGSLLDDQHWHSVLIELLDTQVNFTVDKHTHHFQAKGDSSNLDLNFEISFGGILSPGRSRAFTRKSFHGCLENLYYNGVDVTELAKKHKPQILMMGNVSFSCPQPQTVPVTFLSSRSYLALPGNSGEDKVSVTFQFRTWNRAGHLLFGELQRGSGSFVLFLKDGKLKLSLFQAGQSPRNVTAGAGLNDGQWHSVSFSAKWSHMNVVVDDDTAVQPLVAVLIDSGDTYYFGGCLGNSSGSGCKSPLGGFQGCLRLITIGDKAVDPILVQQGALGSFRDLQIDSCGITDRCLPSYCEHGGECSQSWDTFSCDCLGTGYTGETCHSSLYEQSCEAHKHRGNPSGLYYIDADGSGPLGPFLVYCNMTADSAWTVVRHGGPDAVTLRGAPSGHPLSAVSFAYAAGAGQLRAAVNLAERCEQRLALRCGTARRPDSRDGTPLSWWVGRTNETHTSWGGSLPDAQKCTCGLEGNCIDSQYYCNCDAGQNEWTSDTIVLSQKEHLPVTQIVMTDTGQPHSEADYTLGPLLCRGDKSFWNSASFNTETSYLHFPAFHGELTADVCFFFKTTVSSGVFMENLGITDFIRIELRAPTEVTFSFDVGNGPCEVTVQSPTPFNDNQWHHVRAERNVKGASLQVDQLPQKMQPAPADGHVRLQLNSQLFIGGTATRQRGFLGCIRSLQLNGVALDLEERATVTPGVEPGCAGHCSTYGHLCRNGGRCREKRRGVTCDCAFSAYDGPFCSNEISAYFATGSSMTYHFQEHYTLSENSSSLVSSLHRDVTLTREMITLSFRTTRTPSLLLYVSSFYEEYLSVILANNGSLQIRYKLDRHQNPDAFTFDFKNMADGQLHQVKINREEAVVMVEVNQSAKKQVILSSGTEFNAVKSLILGKVLEAAGADPDTRRAATSGFTGCLSAVRFGCAAPLKAALRPSGPSRVTVRGHVAPMARCAAGAASGSPARELAPRLAGGAGRSGPVDEGEPLVNADRRDSAVIGGVIAVEIFILLCITAIAIRIYQQRKLRKENESKVSKKEEC

SEQ ID NO: 19668 - protein, 745 aa, Homo sapiens
  Payload ID: 3940
  Gene Symbol: CNTNAP3B
  Gene Name: contactin associated protein-like 3B
  ENSP ID: ENSP00000481131
MASVAWAVLKVLLLLPTQTWSPVGAGNPPDCDSPLASALPRSSFSSSSELSSSHGPGFSRLNRRDGAGGWTPLVSNKYQWLQIDLGERMEVTAVATQGGYGSSDWVTSYLLMFSDGGRNWKQYRREESIWGFPGNTNADSVVHYRLQPPFEARFLRFLPLAWNPRGRIGMRIEVYGCAYKSEVVYFDGQSALLYTLDKKPLKPIRDVISLKFKAMQSNGILLHREGQHGNHITLELIKGKLVFFLNSGNAKLPSTIAPVTLTLGSLLDDQHWHSVLIELLDTQVNFTVDKHTHHFQAKGDSSNLDLNFEISFGGILSPGRSRAFTRKSFHGCLENLYYNGVDVTELAKKHKPQILMMGNVSFSCPQPQTVPVTFLSSRSYLALPGNSGEDKVSVTFQFRTWNRAGHLLFGELQRGSGSFVLFLKDGKLKLSLFQAGQSPRNVTAGAGLNDGQWHSVSFSAKWSHMNVVVDDDTAVQPLVAVLIDSGDTYYFGGCLGNSSGSGCKSPLGGFQGCLRLITIGDKAVDPILVQQGALGSFRDLQIDSCGITDRCLPSYCEHGGECSQSWDTFSCDCLGTGYTGETCHSSLYEQSCEAHKHRGNPSGLYYIDADGSGPLGPFLVYCNMTDSAWTVVRHGGPDAVTLRGAPSGHPLSAVSFAYAAGAGQLRAAVNLAERCEQRLALRCGTARRPDSRDGTPLSWWVGRTNETHTSWGGSLPDAQKCTCGLEGNCIDSQYYCNCDAGQNEW

SEQ ID NO: 19669 - protein, 966 aa, Homo sapiens
  Payload ID: 3940
  Gene Symbol: CNTNAP3B
  Gene Name: contactin associated protein-like 3B
  ENSP ID: ENSP00000482254
MASVAWAVLKVLLLLPTQTWSPVGAGNPPDCDSPLASALPRSSFSSSSELSSSHGPGFSRLNRRDGAGGWTPLVSNKYQWLQIDLGERMEVTAVATQGGYGSSDWVTSYLLMFSDGGRNWKQYRREESIWGFPGNTNADSVVHYRLQPPFEARFLRFLPLAWNPRGRIGMRIEVYGCAYKSEVVYFDGQSALLYTLDKKPLKPIRDVISLKFKAMQSNGILLHREGQHGNHITLELIKGKLVFFLNSGNAKLPSTIAPVTLTLGSLLDDQHWHSVLIELLDTQVNFTVDKHTHHFQAKGDSSNLDLNFEISFGGILSPGRSRAFTRKSFHGCLENLYYNGVDVTELAKKHKPQILMMGNVSFSCPQPQTVPVTFLSSRSYLALPGNSGEDKVSVTFQFRTWNRAGHLLFGELQRGSGSFVLFLKDGKLKLSLFQAGQSPRNVTAGAGLNDGQWHSVSFSAKWSHMNVVVDDDTAVQPLVAVLIDSGDTYYFGALYEQSCEAHKHRGNPSGLYYIDADGSGPLGPFLVYCNMTDSAWTVVRHGGPDAVTLRGAPSGHPLSAVSFAYAAGAGQLRAAVNLAERCEQRLALRCGTARRPDSRDGTPLSWWVGRTNETHTSWGGSLPDAQKCTCGLEGNCIDSQYYCNCDAGQNEWTSDTIVLSQKEHLPVTQIVMTDTGQPHSEADYTLGPLLCRGDKSFWNSASFNTETSYLHFPAFHGELTADVCFFFKTTVSSGVFMENLGITDFIRIELRAPTEVTFSFDVGNGPCEVTVQSPTPFNDNQWHHVRAERNVKGASLQVDQLPQKMQPAPADGHVRLQLNSQLFIGGTATRQRGFLGCIRSLQLNGVALDLEERATVTPGVEPGCAGHCSTYGHLCRNGGRCREKRRGVTCDCAFSAYDGPFCSNEISAYFATGSSMTYHFQEHYTLSENSSSLVSSLHRDVTLTREMITLSFRTTRTPSLLLKFAD

SEQ ID NO: 19670 - protein, 180 aa, Homo sapiens
  Payload ID: 3940
  Gene Symbol: CNTNAP3B
  Gene Name: contactin associated protein-like 3B
  ENSP ID: ENSP00000483642
  MOD_RES (1)..(1): Any amino acid
XRDVTLTREMITLSFRTTRTPSLLLYVSSFYEEYLSVILANNGSLQIRYKLDRHQNPDAFTFDFKNMADGQLHQVKINREEAVVMVEVNQSAKKQVILSSGTEFNAVKSLILGKVLGRSGPVDEGEPLVNADRRDSAVIGGVIAVEIFILLCITAIAIRIYQQRKLRKENESKVSKKEEC

SEQ ID NO: 19671 - protein, 1207 aa, Homo sapiens
  Payload ID: 3940
  Gene Symbol: CNTNAP3B
  Gene Name: contactin associated protein-like 3B
  ENSP ID: ENSP00000483830
MASVAWAVLKVLLLLPTQTWSPVGAGNPPDCDSPLASALPRSSFSSSSELSSSHGPGFSRLNRRDGAGGWTPLVSNKYQWLQIDLGERMEVTAVATQGGYGSSDWVTSYLLMFSDGGRNWKQYRREESIWGFPGNTNADSVVHYRLQPPFEARFLRFLPLAWNPRGRIGMRIEVYGCAYKSEVVYFDGQSALLYTLDKKPLKPIRDVISLKFKAMQSNGILLHREGQHGNHITLELIKGKLVFFLNSGNAKLPSTIAPVTLTLGSLLDDQHWHSVLIELLDTQVNFTVDKHTHHFQAKGDSSNLDLNFEISFGGILSPGRSRAFTRKSFHGCLENLYYNGVDVTELAKKHKPQILMMGNVSFSCPQPQTVPVTFLSSRSYLALPGNSGEDKVSVTFQFRTWNRAGHLLFGELQRGSGSFVLFLKDGKLKLSLFQAGQSPRNVTAGAGLNDGQWHSVSFSAKWSHMNVVVDDDTAVQPLVAVLIDSGDTYYFGGCLGNSSGSGCKSPLGGFQGCLRLITIGDKAVDPILVQQGALGSFRDLQIDSCGITDRCLPSYCEHGGECSQSWDTFSCDCLGTGYTGETCHSSLYEQSCEAHKHRGNPSGLYYIDADGSGPLGPFLVYCNMTDSAWTVVRHGGPDAVTLRGAPSGHPLSAVSFAYAAGAGQLRAAVNLAERCEQRLALRCGTARRPDSRDGTPLSWWVGRTNETHTSWGGSLPDAQKCTCGLEGNCIDSQYYCNCDAGQNEWTSDTIVLSQKEHLPVTQIVMTDTGQPHSEADYTLGPLLCRGDKSFWNSASFNTETSYLHFPAFHGELTADVCFFFKTTVSSGVFMENLGITDFIRIELRAPTEVTFSFDVGNGPCEVTVQSPTPFNDNQWHHVRAERNVKGASLQVDQLPQKMQPAPADGHVRLQLNSQLFIEISAYFATGSSMTYHFQEHYTLSENSSSLVSSLHRDVTLTREMITLSFRTTRTPSLLLYVSSFYEEYLSVILANNGSLQIRYKLDRHQNPDAFTFDFKNMADGQLHQVKINREEAVVMVEVNQSAKKQVILSSGTEFNAVKSLILGKVLEAAGADPDTRRAATSGFTGCLSAVRFGCAAPLKAALRPSGPSRVTVRGHVAPMARCAAGAASGSPARELAPRLAGGAGRSGPVDEGEPLVNADRRDSAVIGGVIAVEIFILLCITAIAIRIYQQRKLRKENESKVSKKEEC

SEQ ID NO: 19672 - protein, 167 aa, Homo sapiens
  Payload ID: 3940
  Gene Symbol: CNTNAP3B
  Gene Name: contactin associated protein-like 3B
  ENSP ID: ENSP00000484919
  MOD_RES (1)..(1): Any amino acid
XSAAPGLTRTSDTIVLSQKEHLPVTQIVMTDTGQPHSEADYTLGPLLCRGDTRLLKVWRRESVIFEIFPSLFGRLRWEDGLSQGVQHKPGQDESFWNSASFNTETSYLHFPAFHGELTADVCFFFKTTVSSGVFMENLGITDFIRIELRGRLATLDKSQGTHYLAIK

SEQ ID NO: 19673 - protein, 1308 aa, Homo sapiens
  Payload ID: 3941
  Gene Symbol: CNTNAP4
  Gene Name: contactin associated protein-like 4
  ENSP ID: ENSP00000306893
MGSVTGAVLKTLLLLSTQNWNRVEAGNSYDCDDPLVSALPQASFSSSSELSSSHGPGFARLNRRDGAGGWSPLVSNKYQWLQIDLGERMEVTAVATQGGYGSSNWVTSYLLMFSDSGWNWKQYRQEDSIWGFSGNANADSVVYYRLQPSIKARFLRFIPLEWNPKGRIGMRIEVFGCAYRSEVVDLDGKSSLLYRFDQKSLSPIKDIISLKFKTMQSDGILLHREGPNGDHITLQLRRARLFLLINSGEAKLPSTSTLVNLTLGSLLDDQHWHSVLIQRLGKQVNFTVDEHRHHFHARGEFNLMNLDYEISFGGIPAPGKSVSFPHRNFHGCLENLYYNGVDIIDLAKQQKPQIIAMGNVSFSCSQPQSMPVTFLSSRSYLALPDFSGEEEVSATFQFRTWNKAGLLLFSELQLISGGILLFLSDGKLKSNLYQPGKLPSDITAGVELNDGQWHSVSLSAKKNHLSVAVDGQMASAAPLLGPEQIYSGGTYYFGGCPDKSFGSKCKSPLGGFQGCMRLISISGKVVDLISVQQGSLGNFSDLQIDSCGISDRCLPNYCEHGGECSQSWSTFHCNCTNTGYRGATCHNSIYEQSCEAYKHRGNTSGFYYIDSDGSGPLEPFLLYCNMTETAWTIIQHNGSDLTRVRNTNPENPYAGFFEYVASMEQLQATINRAEHCEQEFTYYCKKSRLVNKQDGTPLSWWVGRTNETQTYWGGSSPDLQKCTCGLEGNCIDSQYYCNCDADRNEWTNDTGLLAYKEHLPVTKIVITDTGRLHSEAAYKLGPLLCQGDRSFWNSASFDTEASYLHFPTFHGELSADVSFFFKTTASSGVFLENLGIADFIRIELRSPTVVTFSFDVGNGPFEISVQSPTHFNDNQWHHVRVERNMKEASLQVDQLTPKTQPAPADGHVLLQLNSQLFVGGTATRQRGFLGCIRSLQLNGMTLDLEERAQVTPEVQPGCRGHCSSYGKLCRNGGKCRERPIGFFCDCTFSAYTGPFCSNEISAYFGSGSSVIYNFQENYLLSKNSSSHAASFHGDMKLSREMIKFSFRTTRTPSLLLFVSSFYKEYLSVIIAKNGDLQIRYKLNKYQEPDVVNFDFKNMADGQLHHIMINREEGVVFIEIDDNRRRQVHLSSGTEFSAVKSLVLGRILEHSDVDQDTALAGAQGFTGCLSAVQLSHVAPLKAALHPSHPDPVTVTGHVTESSCMAQPGTDATSRERTHSFADHSGTIDDREPLANAIKSDSAVIGGLIAVVIFILLCITAIAVRIYQQKRLYKRSEAKRSENVDSAEAVLKSELNIQNAVNENQKEYFF

SEQ ID NO: 19674 - protein, 1311 aa, Homo sapiens
  Payload ID: 3941
  Gene Symbol: CNTNAP4
  Gene Name: contactin associated protein-like 4
  ENSP ID: ENSP00000417628
MLLFYLLVVLSIDSTKASALTNPNVALFLLADDCDDPLVSALPQASFSSSSELSSSHGPGFARLNRRDGAGGWSPLVSNKYQWLQIDLGERMEVTAVATQGGYGSSNWVTSYLLMFSDSGWNWKQYRQEDSIWGFSGNANADSVVYYRLQPSIKARFLRFIPLEWNPKGRIGMRIEVFGCAYRSEVVDLDGKSSLLYRFDQKSLSPIKDIISLKFKTMQSDGILLHREGPNGDHITLQLRRARLFLLINSGEAKLPSTSTLVNLTLGSLLDDQHWHSVLIQRLGKQVNFTVDEHRHHFHARGEFNLMNLDYEISFGGIPAPGKSVSFPHRNFHGCLENLYYNGVDIIDLAKQQKPQIIAMGNVSFSCSQPQSMPVTFLSSRSYLALPDFSGEEEVSATFQFRTWNKAGLLLFSELQLISGGILLFLSDGKLKSNLYQPGKLPSDITAGVELNDGQWHSVSLSAKKNHLSVAVDGQMASAAPLLGPEQIYSGGTYYFGGCPDKSFGSKCKSPLGGFQGCMRLISISGKVVDLISVQQGSLGNFSDLQIDSCGISDRCLPNYCEHGGECSQSWSTFHCNCTNTGYRGATCHNSIYEQSCEAYKHRGNTSGFYYIDSDGSGPLEPFLLYCNMTETAWTIIQHNGSDLTRVRNTNPENPYAGFFEYVASMEQLQATINRAEHCEQEFTYYCKKSRLVNKQDGTPLSWWVGRTNETQTYWGGSSPDLQKCTCGLEGNCIDSQYYCNCDADRNEWTNDTGLLAYKEHLPVTKIVITDTGRLHSEAAYKLGPLLCQGDRSFWNSASFDTEASYLHFPTFHGELSADVSFFFKTTASSGVFLENLGIADFIRIELRSPTVVTFSFDVGNGPFEISVQSPTHFNDNQWHHVRVERNMKEASLQVDQLTPKTQPAPADGHVLLQLNSQLFVGGTATRQRGFLGCIRSLQLNGMTLDLEERAQVTPEVQPGCRGHCSSYGKLCRNGGKCRERPIGFFCDCTFSAYTGPFCSNEISAYFGSGSSVIYNFQENYLLSKNSSSHAASFHGDMKLSREMIKFSFRTTRTPSLLLFVSSFYKEYLSVIIAKNGSLQIRYKLNKYQEPDVVNFDFKNMADGQLHHIMINREEGVVFIEIDDNRRRQVHLSSGTEFSAVKSLVLGRILEHSDVDQDTALAGAQGFTGCLSAVQLSHVAPLKAALHPSHPDPVTVTGHVTESSCMAQPGTDATSRERTHSFADHSGTIDDREPLANAIKSDSAVIGGLIAVVIFILLCITAIAVRIYQQKRLYKRSEAKRSENVDSAEAVLKSELNIQNAVNENQKEYFF

SEQ ID NO: 19675 - protein, 1235 aa, Homo sapiens
  Payload ID: 3941
  Gene Symbol: CNTNAP4
  Gene Name: contactin associated protein-like 4
  Uniprot ID: Q9C0A0
  ENSP ID: ENSP00000418741
MWNYDCDDPLVSALPQASFSSSSELSSSHGPGFARLNRRDGAGGWSPLVSNKYQWLQIDLGERMEVTAVATQGGYGSSNWVTSYLLMFSDSGWNWKQYRQEDSIWGFSGNANADSVVYYRLQPSIKARFLRFIPLEWNPKGRIGMRIEVFGCAYRSEVVDLDGKSSLLYRFDQKSLSPIKDIISLKFKTMQSDGILLHREGPNGDHITLQLRRARLFLLINSGEAKLPSTSTLVNLTLGSLLDDQHWHSVLIQRLGKQVNFTVDEHRHHFHARGEFNLMNLDYEGNVSFSCSQPQSMPVTFLSSRSYLALPDFSGEEEVSATFQFRTWNKAGLLLFSELQLISGGILLFLSDGKLKSNLYQPGKLPSDITAGVELNDGQWHSVSLSAKKNHLSVAVDGQMASAAPLLGPEQIYSGGTYYFGGCPDKSFGSKCKSPLGGFQGCMRLISISGKVVDLISVQQGSLGNFSDLQIDSCGISDRCLPNYCEHGGECSQSWSTFHCNCTNTGYRGATCHNSIYEQSCEAYKHRGNTSGFYYIDSDGSGPLEPFLLYCNMTETAWTIIQHNGSDLTRVRNTNPENPYAGFFEYVASMEQLQATINRAEHCEQEFTYYCKKSRLVNKQDGTPLSWWVGRTNETQTYWGGSSPDLQKCTCGLEGNCIDSQYYCNCDADRNEWTNDTGLLAYKEHLPVTKIVITDTGRLHSEAAYKLGPLLCQGDRSFWNSASFDTEASYLHFPTFHGELSADVSFFFKTTASSGVFLENLGIADFIRIELRSPTVVTFSFDVGNGPFEISVQSPTHFNDNQWHHVRVERNMKEASLQVDQLTPKTQPAPADGHVLLQLNSQLFVGGTATRQRGFLGCIRSLQLNGMTLDLEERAQVTPEVQPGCRGHCSSYGKLCRNGGKCRERPIGFFCDCTFSAYTGPFCSNEISAYFGSGSSVIYNFQENYLLSKNSSSHAASFHGDMKLSREMIKFSFRTTRTPSLLLFVSSFYKEYLSVIIAKNGSLQIRYKLNKYQEPDVVNFDFKNMADGQLHHIMINREEGVVFIEIDDNRRRQVHLSSGTEFSAVKSLVLGRILEHSDVDQDTALAGAQGFTGCLSAVQLSHVAPLKAALHPSHPDPVTVTGHVTESSCMAQPGTDATSRERTHSFADHSGTIDDREPLANAIKSDSAVIGGLIAVVIFILLCITAIAVRIYQQKRLYKRSEAKRSENVDSAEAVLKSELNIQNAVNENQKEYFF

SEQ ID NO: 19676 - protein, 1260 aa, Homo sapiens
  Payload ID: 3941
  Gene Symbol: CNTNAP4
  Gene Name: contactin associated protein-like 4
  ENSP ID: ENSP00000439733
MGSVTGAVLKTLLLLSTQNWNRVEAGNSYDCDDPLVSALPQASFSSSSELSSSHGPGFARLNRRDGAGGWSPLVSNKYQWLQIDLGERMEVTAVATQGGYGSSNWVTSYLLMFSDSGWNWKQYRQEDSIWGFSGNANADSVVYYRLQPSIKARFLRFIPLEWNPKGRIGMRIEVFGCAYRSEVVDLDGKSSLLYRFDQKSLSPIKDIISLKFKTMQSDGILLHREGPNGDHITLQLRRARLFLLINSGEAKLPSTSTLVNLTLGSLLDDQHWHSVLIQRLGKQVNFTVDEHRHHFHARGEFNLMNLDYEGNVSFSCSQPQSMPVTFLSSRSYLALPDFSGEEEVSATFQFRTWNKAGLLLFSELQLISGGILLFLSDGKLKSNLYQPGKLPSDITAGVELNDGQWHSVSLSAKKNHLSVAVDGQMASAAPLLGPEQIYSGGTYYFGGCPDKSFGSKCKSPLGGFQGCMRLISISGKVVDLISVQQGSLGNFSDLQIDSCGISDRCLPNYCEHGGECSQSWSTFHCNCTNTGYRGATCHNSIYEQSCEAYKHRGNTSGFYYIDSDGSGPLEPFLLYCNMTETAWTIIQHNGSDLTRVRNTNPENPYAGFFEYVASMEQLQATINRAEHCEQEFTYYCKKSRLVNKQDGTPLSWWVGRTNETQTYWGGSSPDLQKCTCGLEGNCIDSQYYCNCDADRNEWTNDTGLLAYKEHLPVTKIVITDTGRLHSEAAYKLGPLLCQGDRSFWNSASFDTEASYLHFPTFHGELSADVSFFFKTTASSGVFLENLGIADFIRIELRSPTVVTFSFDVGNGPFEISVQSPTHFNDNQWHHVRVERNMKEASLQVDQLTPKTQPAPADGHVLLQLNSQLFVGGTATRQRGFLGCIRSLQLNGMTLDLEERAQVTPEVQPGCRGHCSSYGKLCRNGGKCRERPIGFFCDCTFSAYTGPFCSNEISAYFGSGSSVIYNFQENYLLSKNSSSHAASFHGDMKLSREMIKFSFRTTRTPSLLLFVSSFYKEYLSVIIAKNGDLQIRYKLNKYQEPDVVNFDFKNMADGQLHHIMINREEGVVFIEIDDNRRRQVHLSSGTEFSAVKSLVLGRILEHSDVDQDTALAGAQGFTGCLSAVQLSHVAPLKAALHPSHPDPVTVTGHVTESSCMAQPGTDATSRERTHSFADHSGTIDDREPLANAIKSDSAVIGGLIAVVIFILLCITAIAVRIYQQKRLYKRSEAKRSENVDSAEAVLKSELNIQNAVNENQKEYFF

SEQ ID NO: 19677 - protein, 1260 aa, Homo sapiens
  Payload ID: 3941
  Gene Symbol: CNTNAP4
  Gene Name: contactin associated protein-like 4
  ENSP ID: ENSP00000477698
MGSVTGAVLKTLLLLSTQNWNRVEAGNSYDCDDPLVSALPQASFSSSSELSSSHGPGFARLNRRDGAGGWSPLVSNKYQWLQIDLGERMEVTAVATQGGYGSSNWVTSYLLMFSDSGWNWKQYRQEDSIWGFSGNANADSVVYYRLQPSIKARFLRFIPLEWNPKGRIGMRIEVFGCAYRSEVVDLDGKSSLLYRFDQKSLSPIKDIISLKFKTMQSDGILLHREGPNGDHITLQLRRARLFLLINSGEAKLPSTSTLVNLTLGSLLDDQHWHSVLIQRLGKQVNFTVDEHRHHFHARGEFNLMNLDYEGNVSFSCSQPQSMPVTFLSSRSYLALPDFSGEEEVSATFQFRTWNKAGLLLFSELQLISGGILLFLSDGKLKSNLYQPGKLPSDITAGVELNDGQWHSVSLSAKKNHLSVAVDGQMASAAPLLGPEQIYSGGTYYFGGCPDKSFGSKCKSPLGGFQGCMRLISISGKVVDLISVQQGSLGNFSDLQIDSCGISDRCLPNYCEHGGECSQSWSTFHCNCTNTGYRGATCHNSIYEQSCEAYKHRGNTSGFYYIDSDGSGPLEPFLLYCNMTETAWTIIQHNGSDLTRVRNTNPENPYAGFFEYVASMEQLQATINRAEHCEQEFTYYCKKSRLVNKQDGTPLSWWVGRTNETQTYWGGSSPDLQKCTCGLEGNCIDSQYYCNCDADRNEWTNDTGLLAYKEHLPVTKIVITDTGRLHSEAAYKLGPLLCQGDRSFWNSASFDTEASYLHFPTFHGELSADVSFFFKTTASSGVFLENLGIADFIRIELRSPTVVTFSFDVGNGPFEISVQSPTHFNDNQWHHVRVERNMKEASLQVDQLTPKTQPAPADGHVLLQLNSQLFVGGTATRQRGFLGCIRSLQLNGMTLDLEERAQVTPEVQPGCRGHCSSYGKLCRNGGKCRERPIGFFCDCTFSAYTGPFCSNEISAYFGSGSSVIYNFQENYLLSKNSSSHAASFHGDMKLSREMIKFSFRTTRTPSLLLFVSSFYKEYLSVIIAKNGSLQIRYKLNKYQEPDVVNFDFKNMADGQLHHIMINREEGVVFIEIDDNRRRQVHLSSGTEFSAVKSLVLGRILEHSDVDQDTALAGAQGFTGCLSAVQLSHVAPLKAALHPSHPDPVTVTGHVTESSCMAQPGTDATSRERTHSFADHSGTIDDREPLANAIKSDSAVIGGLIAVVIFILLCITAIAVRIYQQKRLYKRSEAKRSENVDSAEAVLKSELNIQNAVNENQKEYFF

SEQ ID NO: 19678 - protein, 1308 aa, Homo sapiens
  Payload ID: 3941
  Gene Symbol: CNTNAP4
  Gene Name: contactin associated protein-like 4
  Uniprot ID: Q9C0A0
  ENSP ID: ENSP00000479811
MGSVTGAVLKTLLLLSTQNWNRVEAGNSYDCDDPLVSALPQASFSSSSELSSSHGPGFARLNRRDGAGGWSPLVSNKYQWLQIDLGERMEVTAVATQGGYGSSNWVTSYLLMFSDSGWNWKQYRQEDSIWGFSGNANADSVVYYRLQPSIKARFLRFIPLEWNPKGRIGMRIEVFGCAYRSEVVDLDGKSSLLYRFDQKSLSPIKDIISLKFKTMQSDGILLHREGPNGDHITLQLRRARLFLLINSGEAKLPSTSTLVNLTLGSLLDDQHWHSVLIQRLGKQVNFTVDEHRHHFHARGEFNLMNLDYEISFGGIPAPGKSVSFPHRNFHGCLENLYYNGVDIIDLAKQQKPQIIAMGNVSFSCSQPQSMPVTFLSSRSYLALPDFSGEEEVSATFQFRTWNKAGLLLFSELQLISGGILLFLSDGKLKSNLYQPGKLPSDITAGVELNDGQWHSVSLSAKKNHLSVAVDGQMASAAPLLGPEQIYSGGTYYFGGCPDKSFGSKCKSPLGGFQGCMRLISISGKVVDLISVQQGSLGNFSDLQIDSCGISDRCLPNYCEHGGECSQSWSTFHCNCTNTGYRGATCHNSIYEQSCEAYKHRGNTSGFYYIDSDGSGPLEPFLLYCNMTETAWTIIQHNGSDLTRVRNTNPENPYAGFFEYVASMEQLQATINRAEHCEQEFTYYCKKSRLVNKQDGTPLSWWVGRTNETQTYWGGSSPDLQKCTCGLEGNCIDSQYYCNCDADRNEWTNDTGLLAYKEHLPVTKIVITDTGRLHSEAAYKLGPLLCQGDRSFWNSASFDTEASYLHFPTFHGELSADVSFFFKTTASSGVFLENLGIADFIRIELRSPTVVTFSFDVGNGPFEISVQSPTHFNDNQWHHVRVERNMKEASLQVDQLTPKTQPAPADGHVLLQLNSQLFVGGTATRQRGFLGCIRSLQLNGMTLDLEERAQVTPEVQPGCRGHCSSYGKLCRNGGKCRERPIGFFCDCTFSAYTGPFCSNEISAYFGSGSSVIYNFQENYLLSKNSSSHAASFHGDMKLSREMIKFSFRTTRTPSLLLFVSSFYKEYLSVIIAKNGSLQIRYKLNKYQEPDVVNFDFKNMADGQLHHIMINREEGVVFIEIDDNRRRQVHLSSGTEFSAVKSLVLGRILEHSDVDQDTALAGAQGFTGCLSAVQLSHVAPLKAALHPSHPDPVTVTGHVTESSCMAQPGTDATSRERTHSFADHSGTIDDREPLANAIKSDSAVIGGLIAVVIFILLCITAIAVRIYQQKRLYKRSEAKRSENVDSAEAVLKSELNIQNAVNENQKEYFF

SEQ ID NO: 19679 - protein, 1306 aa, Homo sapiens
  Payload ID: 3942
  Gene Symbol: CNTNAP5
  Gene Name: contactin associated protein-like 5
  Uniprot ID: Q8WYK1
  ENSP ID: ENSP00000399013
MDSLPRLTSVLTLLFSGLWHLGLTATNYNCDDPLASLLSPMAFSSSSDLTGTHSPAQLNWRVGTGGWSPADSNAQQWLQMDLGNRVEITAVATQGRYGSSDWVTSYSLMFSDTGRNWKQYKQEDSIWTFAGNMNADSVVHHKLLHSVRARFVRFVPLEWNPSGKIGMRVEVYGCSYKSDVADFDGRSSLLYRFNQKLMSTLKDVISLKFKSMQGDGVLFHGEGQRGDHITLELQKGRLALHLNLGDSKARLSSSLPSATLGSLLDDQHWHSVLIERVGKQVNFTVDKHTQHFRTKGETDALDIDYELSFGGIPVPGKPGTFLKKNFHGCIENLYYNGVNIIDLAKRRKHQIYTGNVTFSCSEPQIVPITFVNSSGSYLLLPGTPQIDGLSVSFQFRTWNKDGLLLSTELSEGSGTLLLSLEGGILRLVIQKMTERVAEILTGSNLNDGLWHSVSINARRNRITLTLDDEAAPPAPDSTWVQIYSGNSYYFGGCPDNLTDSQCLNPIKAFQGCMRLIFIDNQPKDLISVQQGSLGNFSDLHIDLCSIKDRCLPNYCEHGGSCSQSWTTFYCNCSDTSYTGATCHNSIYEQSCEVYRHQGNTAGFFYIDSDGSGPLGPLQVYCNITEDKIWTSVQHNNTELTRVRGANPEKPYAMALDYGGSMEQLEAVIDGSEHCEQEVAYHCRRSRLLNTPDGTPFTWWIGRSNERHPYWGGSPPGVQQCECGLDESCLDIQHFCNCDADKDEWTNDTGFLSFKDHLPVTQIVITDTDRSNSEAAWRIGPLRCYGDRRFWNAVSFYTEASYLHFPTFHAEFSADISFFFKTTALSGVFLENLGIKDFIRLEISSPSEITFAIDVGNGPVELVVQSPSLLNDNQWHYVRAERNLKETSLQVDNLPRSTRETSEEGHFRLQLNSQLFVGGTSSRQKGFLGCIRSLHLNGQKMDLEERAKVTSGVRPGCPGHCSSYGSICHNGGKCVEKHNGYLCDCTNSPYEGPFCKKEVSAVFEAGTSVTYMFQEPYPVTKNISLSSSAIYTDSAPSKENIALSFVTTQAPSLLLFINSSSQDFVVVLLCKNGSLQVRYHLNKEETHVFTIDADNFANRRMHHLKINREGRELTIQMDQQLRLSYNFSPEVEFRVIRSLTLGKVTENLGLDSEVAKANAMGFAGCMSSVQYNHIAPLKAALRHATVAPVTVHGTLTESSCGFMVDSDVNAVTTVHSSSDPFGKTDEREPLTNAVRSDSAVIGGVIAVVIFIIFCIIGIMTRFLYQHKQSHRTSQMKEKEYPENLDSSFRNEIDLQNTVSECKREYFI

SEQ ID NO: 19680 - protein, 184 aa, Homo sapiens
  Payload ID: 3943
  Gene Symbol: COPRS
  Gene Name: coordinator of PRMT5, differentiation stimulator
  Uniprot ID: Q9NQ92
  ENSP ID: ENSP00000304327
MDLQAAGAQAQGAAEPSRGPPLPSARGAPPSPEAGFATADHSSQERETEKAMDRLARGTQSIPNDSPARGEGTHSEEEGFAMDEEDSDGELNTWELSEGTNCPPKEQPGDLFNEDWDSELKADQGNPYDADDIQESISQELKPWVCCAPQGDMIYDPSWHHPPPLIPYYSKMVFETGQFDDAED

SEQ ID NO: 19681 - protein, 172 aa, Homo sapiens
  Payload ID: 3943
  Gene Symbol: COPRS
  Gene Name: coordinator of PRMT5, differentiation stimulator
  ENSP ID: ENSP00000367901
MGGDAGDREPGPAARSLGEGQAGFATADHSSQERETEKAMDRLARGTQSIPNDSPARGEGTHSEEEGFAMDEEDSDGELNTWELSEGTNCPPKEQPGDLFNEDWDSELKADQGNPYDADDIQESISQELKPWVCCAPQGDMIYDPSWHHPPPLIPYYSKMVFETGQFDDAED

SEQ ID NO: 19682 - protein, 82 aa, Homo sapiens
  Payload ID: 3943
  Gene Symbol: COPRS
  Gene Name: coordinator of PRMT5, differentiation stimulator
  ENSP ID: ENSP00000464423
MDLQAAGAQAQGAAEPSRGPPLPSARGAPPSPEAGFATADHSSQERETEKAMDRLASPLCCLVAFSAQLNSNLLWKPCLELP

SEQ ID NO: 19683 - protein, 103 aa, Homo sapiens
  Payload ID: 3943
  Gene Symbol: COPRS
  Gene Name: coordinator of PRMT5, differentiation stimulator
  ENSP ID: ENSP00000464425
MDRLARGTQSIPNDSPARGEGTHSEEEGFAMDEEDSDGELNTWELSEGTNCPPKEQPGDLFNEDWDSELKADQGNPYDADDIQESISQELKPWVCCAPQGDMI

SEQ ID NO: 19684 - protein, 68 aa, Homo sapiens
  Payload ID: 3943
  Gene Symbol: COPRS
  Gene Name: coordinator of PRMT5, differentiation stimulator
  ENSP ID: ENSP00000464429
MDLQAAGAQAQGAAEPSRGPPLPSARGAPPSPEPVEHRAFLMTVLPGVRAPILKRKALPWMRRTLMEN

SEQ ID NO: 19685 - protein, 450 aa, Homo sapiens
  Payload ID: 3944
  Gene Symbol: COPS2
  Gene Name: COP9 signalosome subunit 2
  Uniprot ID: P61201
  ENSP ID: ENSP00000299259
MSDMEDDFMCDDEEDYDLEYSEDSNSEPNVDLENQYYNSKALKEDDPKAALSSFQKVLELEGEKGEWGFKALKQMIKINFKLTNFPEMMNRYKQLLTYIRSAVTRNYSEKSINSILDYISTSKQNSDFLCQMDLLQEFYETTLEALKDAKNDRLWFKTNTKLGKLYLEREEYGKLQKILRQLHQSCQTDDGEDDLKKGTQLLEIYALEIQMYTAQKNNKKLKALYEQSLHIKSAIPHPLIMGVIRECGGKMHLREGEFEKAHTDFFEAFKNYDESGSPRRTTCLKYLVLANMLMKSGINPFDSQEAKPYKNDPEILAMTNLVSAYQNNDITEFEKILKTNHSNIMDDPFIREHIEELLRNIRTQVLIKLIKPYTRIHIPFISKELNIDVADVESLLVQCILDNTIHGRIDQVNQLLELDHQKRGGARYTALDKWTNQLNSLNQAVVSKLA

SEQ ID NO: 19686 - protein, 443 aa, Homo sapiens
  Payload ID: 3944
  Gene Symbol: COPS2
  Gene Name: COP9 signalosome subunit 2
  Uniprot ID: P61201
  ENSP ID: ENSP00000373553
MSDMEDDFMCDDEEDYDLEYSEDSNSEPNVDLENQYYNSKALKEDDPKAALSSFQKVLELEGEKGEWGFKALKQMIKINFKLTNFPEMMNRYKQLLTYIRSAVTRNYSEKSINSILDYISTSKQMDLLQEFYETTLEALKDAKNDRLWFKTNTKLGKLYLEREEYGKLQKILRQLHQSCQTDDGEDDLKKGTQLLEIYALEIQMYTAQKNNKKLKALYEQSLHIKSAIPHPLIMGVIRECGGKMHLREGEFEKAHTDFFEAFKNYDESGSPRRTTCLKYLVLANMLMKSGINPFDSQEAKPYKNDPEILAMTNLVSAYQNNDITEFEKILKTNHSNIMDDPFIREHIEELLRNIRTQVLIKLIKPYTRIHIPFISKELNIDVADVESLLVQCILDNTIHGRIDQVNQLLELDHQKRGGARYTALDKWTNQLNSLNQAVVSKLA

SEQ ID NO: 19687 - protein, 379 aa, Homo sapiens
  Payload ID: 3944
  Gene Symbol: COPS2
  Gene Name: COP9 signalosome subunit 2
  ENSP ID: ENSP00000443664
MSDMEDDFMCDDEEDYDLTNFPEMMNRYKQLLTYIRSAVTRNYSEKSINSILDYISTSKQMDLLQEFYETTLEALKDAKNDRLWFKTNTKLGKLYLEREEYGKLQKILRQLHQSCQTDDGEDDLKKGTQLLEIYALEIQMYTAQKNNKKLKALYEQSLHIKSAIPHPLIMGVIRECGGKMHLREGEFEKAHTDFFEAFKNYDESGSPRRTTCLKYLVLANMLMKSGINPFDSQEAKPYKNDPEILAMTNLVSAYQNNDITEFEKILKTNHSNIMDDPFIREHIEELLRNIRTQVLIKLIKPYTRIHIPFISKELNIDVADVESLLVQCILDNTIHGRIDQVNQLLELDHQKRGGARYTALDKWTNQLNSLNQAVVSKLA

SEQ ID NO: 19688 - protein, 263 aa, Homo sapiens
  Payload ID: 3944
  Gene Symbol: COPS2
  Gene Name: COP9 signalosome subunit 2
  ENSP ID: ENSP00000452944
MSDMEDDFMCDDEEDYDLEYSEDSNSEPNVDLENQYYNSKALKEDDPKAALSSFQKVLELEGEKGEWGFKALKQMIKINFKLTNFPEMMNRYKQLLTYIRSAVTRNYSEKSINSILDYISTSKQMDLLQEFYETTLEALKDAKNDRLWFKTNTKLGKLYLEREEYGKLQKILRQLHQSCQTDDGEDDLKKGTQLLEIYALEIQMYTAQKNNKKLKALYEQSLHIKSAIPHPLIMGVIRECGGKMHLREGEFEKAHTDFFEAFK

SEQ ID NO: 19689 - protein, 183 aa, Homo sapiens
  Payload ID: 3944
  Gene Symbol: COPS2
  Gene Name: COP9 signalosome subunit 2
  ENSP ID: ENSP00000453412
MSDMEDDFMCDDEEDYDLTNFPEMMNRYKQLLTYIRSAVTRNYSEKSINSILDYISTSKQMDLLQEFYETTLEALKDAKNDRLWFKTNTKLGKLYLEREEYGKLQKILRQLHQSCQTDDGEDDLKKGTQLLEIYALEIQMYTAQKNNKKLKALYEQSLHIKSAIPHPLIMGVIRECGGKMHLR

SEQ ID NO: 19690 - protein, 55 aa, Homo sapiens
  Payload ID: 3944
  Gene Symbol: COPS2
  Gene Name: COP9 signalosome subunit 2
  ENSP ID: ENSP00000453546
KTNHSNIMDDPFIREHIEELLRNIRTQVLIKLIKPYTRIHIPFISKMESRSCCLG

SEQ ID NO: 19691 - protein, 423 aa, Homo sapiens
  Payload ID: 3945
  Gene Symbol: COPS3
  Gene Name: COP9 signalosome subunit 3
  Uniprot ID: Q9UNS2
  ENSP ID: ENSP00000268717
MASALEQFVNSVRQLSAQGQMTQLCELINKSGELLAKNLSHLDTVLGALDVQEHSLGVLAVLFVKFSMPSVPDFETLFSQVQLFISTCNGEHIRYATDTFAGLCHQLTNALVERKQPLRGIGILKQAIDKMQMNTNQLTSIHADLCQLCLLAKCFKPALPYLDVDMMDICKENGAYDAKHFLCYYYYGGMIYTGLKNFERALYFYEQAITTPAMAVSHIMLESYKKYILVSLILLGKVQQLPKYTSQIVGRFIKPLSNAYHELAQVYSTNNPSELRNLVNKHSETFTRDNNMGLVKQCLSSLYKKNIQRLTKTFLTLSLQDMASRVQLSGPQEAEKYVLHMIEDGEIFASINQKDGMVSFHDNPEKYNNPAMLHNIDQEMLKCIELDERLKAMDQEITVNPQFVQKSMGSQEDDSGNKPSSYS

SEQ ID NO: 19692 - protein, 318 aa, Homo sapiens
  Payload ID: 3945
  Gene Symbol: COPS3
  Gene Name: COP9 signalosome subunit 3
  ENSP ID: ENSP00000409028
MASALEQFVNSVRQLSAQGQMTQLCELINKSGELLAKNLSHLDTVLGALDVQEHSLGVLAVLFVKFSMPSVPDFETLFSQVQLFISTCNGEHIRYATDTFAGLCHQLTNALVERKQPLRGIGILKQAIDKMQMNTNQLTSIHADLCQLCLLAKCFKPALPYLDVDMMDICKENGAYDAKHFLCYYYYGGMIYTGLKNFERALYFYEQAITTPAMAVSHIMLESYKKYILVSLILLGKVQQLPKYTSQIVGRFIKRQSLAMLARLVLNSWPQAVLLRLPPRVLGLQPLSNAYHELAQVYSTNNPSELRNLVNKHSETFT

SEQ ID NO: 19693 - protein, 345 aa, Homo sapiens
  Payload ID: 3945
  Gene Symbol: COPS3
  Gene Name: COP9 signalosome subunit 3
  ENSP ID: ENSP00000413298
MTQLCELINKSGELLAKNLSHLDTVLGALDVQEHSLGVLAVLFVKFSMPSVPDFETLFSQVQLFISTCNGEHIRYATDTFAGLCHQLTNALVERKQPLRGIGILKQAIDKMQMNTNQLTSIHADLCQLCLLAKCFKPALPYLDVDMMDICKENGAYDAKHFLCYYYYGGMIYTGLKNFERALYFYEQAITTPAMAVSHIMLESYKKYILVSLILLGKVQQLPKYTSQIVGRFIKTFLTLSLQDMASRVQLSGPQEAEKYVLHMIEDGEIFASINQKDGMVSFHDNPEKYNNPAMLHNIDQEMLKCIELDERLKAMDQEITVNPQFVQKSMGSQEDDSGNKPSSYS

SEQ ID NO: 19694 - protein, 403 aa, Homo sapiens
  Payload ID: 3945
  Gene Symbol: COPS3
  Gene Name: COP9 signalosome subunit 3
  Uniprot ID: Q9UNS2
  ENSP ID: ENSP00000437606
MTQLCELINKSGELLAKNLSHLDTVLGALDVQEHSLGVLAVLFVKFSMPSVPDFETLFSQVQLFISTCNGEHIRYATDTFAGLCHQLTNALVERKQPLRGIGILKQAIDKMQMNTNQLTSIHADLCQLCLLAKCFKPALPYLDVDMMDICKENGAYDAKHFLCYYYYGGMIYTGLKNFERALYFYEQAITTPAMAVSHIMLESYKKYILVSLILLGKVQQLPKYTSQIVGRFIKPLSNAYHELAQVYSTNNPSELRNLVNKHSETFTRDNNMGLVKQCLSSLYKKNIQRLTKTFLTLSLQDMASRVQLSGPQEAEKYVLHMIEDGEIFASINQKDGMVSFHDNPEKYNNPAMLHNIDQEMLKCIELDERLKAMDQEITVNPQFVQKSMGSQEDDSGNKPSSYS

SEQ ID NO: 19695 - protein, 107 aa, Homo sapiens
  Payload ID: 3945
  Gene Symbol: COPS3
  Gene Name: COP9 signalosome subunit 3
  ENSP ID: ENSP00000463098
MASALEQFVNSVRQLSAQGQMTQLCELINKSGELLAKNLSHLDTVLGALDVQEHSLGVLAVLFVKFSMPSVPDFETLFSQVQLFISTCNGEHIRYATDTSPARNWHP

SEQ ID NO: 19696 - protein, 116 aa, Homo sapiens
  Payload ID: 3945
  Gene Symbol: COPS3
  Gene Name: COP9 signalosome subunit 3
  ENSP ID: ENSP00000463195
MASALEQFVNSVRQLSAQGQMTQLCELINKSGELLAKNLSHLDTVLGALDVQEHSLGVLAVLFVKFSMPSVPDFETLFSQVQLFISTCNGEHIRYATDTFAGLCHQLTNALVERKQ

SEQ ID NO: 19697 - protein, 20 aa, Homo sapiens
  Payload ID: 3945
  Gene Symbol: COPS3
  Gene Name: COP9 signalosome subunit 3
  ENSP ID: ENSP00000463340
MASALEQFVNSVRQLSAQGL

SEQ ID NO: 19698 - protein, 31 aa, Homo sapiens
  Payload ID: 3945
  Gene Symbol: COPS3
  Gene Name: COP9 signalosome subunit 3
  ENSP ID: ENSP00000463477
MASALEQFVNSVRQLSAQVLFLFSRANDTAL

SEQ ID NO: 19699 - protein, 20 aa, Homo sapiens
  Payload ID: 3945
  Gene Symbol: COPS3
  Gene Name: COP9 signalosome subunit 3
  ENSP ID: ENSP00000464369
MASALEQFVNSVRQLSAQGL

SEQ ID NO: 19700 - protein, 31 aa, Homo sapiens; identical to SEQ ID NO: 19698
  Payload ID: 3945
  Gene Symbol: COPS3
  Gene Name: COP9 signalosome subunit 3
  ENSP ID: ENSP00000464572

SEQ ID NO: 19701 - protein, 17 aa, Homo sapiens
  Payload ID: 3945
  Gene Symbol: COPS3
  Gene Name: COP9 signalosome subunit 3
  ENSP ID: ENSP00000465156
  MOD_RES (1)..(1): Any amino acid
XAGLCHQLTNALVERKQ

SEQ ID NO: 19702 - protein, 51 aa, Homo sapiens
  Payload ID: 3945
  Gene Symbol: COPS3
  Gene Name: COP9 signalosome subunit 3
  ENSP ID: ENSP00000466153
EIFASINQKDGMVSFHDNPEKYNNPAMLHNIDQESMGSQEDDSGNKPSSYS

SEQ ID NO: 19703 - protein, 122 aa, Homo sapiens
  Payload ID: 3945
  Gene Symbol: COPS3
  Gene Name: COP9 signalosome subunit 3
  ENSP ID: ENSP00000468536
  MOD_RES (1)..(1): Any amino acid
XFETLFSQVQLFISTCNGEHIRYATDTFAGLCHQLTNALVERKQPLRGIGILKQAIDKMQMNTNQLTSIHADLCQAITTPAMAVSHIMLESYKKYILVSLILLGKVQQLPKYTSQIVGRFIK

SEQ ID NO: 19704 - protein, 406 aa, Homo sapiens
  Payload ID: 3946
  Gene Symbol: COPS4
  Gene Name: COP9 signalosome subunit 4
  Uniprot ID: Q9BT78
  ENSP ID: ENSP00000264389
MAAAVRQDLAQLMNSSGSHKDLAGKYRQILEKAIQLSGAEQLEALKAFVEAMVNENVSLVISRQLLTDFCTHLPNLPDSTAKEIYHFTLEKIQPRVISFEEQVASIRQHLASIYEKEEDWRNAAQVLVGIPLETGQKQYNVDYKLETYLKIARLYLEDDDPVQAEAYINRASLLQNESTNEQLQIHYKVCYARVLDYRRKFIEAAQRYNELSYKTIVHESERLEALKHALHCTILASAGQQRSRMLATLFKDERCQQLAAYGILEKMYLDRIIRGNQLQEFAAMLMPHQKATTADGSSILDRAVIEHNLLSASKLYNNITFEELGALLEIPAAKAEKIASQMITEGRMNGFIDQIDGIVHFETREALPTWDKQIQSLCFQVNNLLEKISQTAPEWTAQAMEAQMAQ

SEQ ID NO: 19705 - protein, 420 aa, Homo sapiens
  Payload ID: 3946
  Gene Symbol: COPS4
  Gene Name: COP9 signalosome subunit 4
  ENSP ID: ENSP00000424655
MAAAVRQDLAQLMNSSGSHKDLAGKYRQILEKAIQLSGAEQLEALKAFVEAMVNENVSLVISRQLLTDFCTHLPNLPDSTAKEIYHFTLEKIQPRVISFEEQVASIRQHLASIYEKEEDWRNAAQVLVGIPLETGQKQYNVDYKLETYLKIARLYLEDDDPVQAEAYINRASLLQNESTNEQLQIHYKVCYARVLDYRRKFIEAAQRYNELSYKTIVHESERLEALKHALHCTILASAGQQRSRMLATLFKDERCQQLAAYGILEKMYLDRIIRGNQLQEFAAMLMPHQKATTADGSSILDRAVIEHNLLSASKLYNNITFEELGALLEIPAAKAEKIASQMITEGRMNGFIDQIDGIVHFETSGNHQSIFCLWIYLVWIVHINGIIQYVTCDLLADSTQHSIFRVHPCHGSTRSPANVG

SEQ ID NO: 19706 - protein, 438 aa, Homo sapiens
  Payload ID: 3946
  Gene Symbol: COPS4
  Gene Name: COP9 signalosome subunit 4
  ENSP ID: ENSP00000424791
MAAAVRQDLAQLMNSSGSHKDLAGKYRQILEKAIQLSGAEQLEALKAFVEAMVNENVSLVISRQLLTDFCTHLPNLPDSTAKEIYHFTLEKIQPRVISFEEQVASIRQHLASIYEKEEDWRNAAQVLVGIPLETGQKQYNVDYKLETYLKIARLYLEDDDPVQAEAYINRASLLQNESTNEQLQIHYKVCYARVLDYRRKFIEAAQRYNELSYKTIVHESERLEALKHALHCTILASAGQQRSRMLATLFKDERCQQLAAYGILEKMYLDRIIRGNQLQEFAAMLMPHQKATTADETGSLHFAQAGLELLGSSSSSHLGFPKCWDDRGSSILDRAVIEHNLLSASKLYNNITFEELGALLEIPAAKAEKIASQMITEGRMNGFIDQIDGIVHFETREALPTWDKQIQSLCFQVNNLLEKISQTAPEWTAQAMEAQMAQ

SEQ ID NO: 19707 - protein, 275 aa, Homo sapiens
  Payload ID: 3946
  Gene Symbol: COPS4
  Gene Name: COP9 signalosome subunit 4
  ENSP ID: ENSP00000425486
MAAAVRQDLAQLMNSSGSHKDLAGKQYNVDYKLETYLKIARLYLEDDDPVQAEAYINRASLLQNESTNEQLQIHYKVCYARVLDYRRKFIEAAQRYNELSYKTIVHESERLEALKHALHCTILASAGQQRSRMLATLFKDERCQQLAAYGILEKMYLDRIIRGNQLQEFAAMLMPHQKATTADGSSILDRAVIEHNLLSASKLYNNITFEELGALLEIPAAKAEKIASQMITEGRMNGFIDQIDGIVHFETREALPTWDKQIQSLCFQVNNLLEK

SEQ ID NO: 19708 - protein, 352 aa, Homo sapiens
  Payload ID: 3946
  Gene Symbol: COPS4
  Gene Name: COP9 signalosome subunit 4
  Uniprot ID: Q9BT78
  ENSP ID: ENSP00000425976
MAAAVRQDLAQLMNSSGSHKDLAGKYRQILEKAIQLSGAEQLEALKAFVEAMVNENVSLVISRQLLTDFCTHLPNLPDSTAKEIYHFTLEKIQPRVISFEEQVASIRQHLASIYEKEEDWRNAAQVLVGIPLETGQKQYNVDYKLETYLKIARLYLEDDDPVQAEAYINRASLLQNESTNEQLQIHYKVCYARVLDYRRKFIEAAQRYNELSYKTIVHESERLEALKHALHCTILASAGQQRSRMLATLFKDERCQQLAAYGILEKMYLDRIIRGNQLQEFAAMLMPHQKATTADGSSILDRAVIEHNLLSASKLYNNITFEELGALLEIPAAKHEKPCQRGISRSNHFVSK

SEQ ID NO: 19709 - protein, 51 aa, Homo sapiens
  Payload ID: 3946
  Gene Symbol: COPS4
  Gene Name: COP9 signalosome subunit 4
  ENSP ID: ENSP00000426788
MAAAVRQDLAQLMNSSGSHKDLAGKTLFSFGIVVGIVRSWKKPFSYLEQNN

SEQ ID NO: 19710 - protein, 334 aa, Homo sapiens
  Payload ID: 3947
  Gene Symbol: COPS5
  Gene Name: COP9 signalosome subunit 5
  Uniprot ID: Q92905
  ENSP ID: ENSP00000350512
MAASGSGMAQKTWELANNMQEAQSIDEIYKYDKKQQQEILAAKPWTKDHHYFKYCKISALALLKMVMHARSGGNLEVMGLMLGKVDGETMIIMDSFALPVEGTETRVNAQAAAYEYMAAYIENAKQVGRLENAIGWYHSHPGYGCWLSGIDVSTQMLNQQFQEPFVAVVIDPTRTISAGKVNLGAFRTYPKGYKPPDEGPSEYQTIPLNKIEDFGVHCKQYYALEVSYFKSSLDRKLLELLWNKYWVNTLSSSSLLTNADYTTGQVFDLSEKLEQSEAQLGRGSFMLGLETHDRKSEDKLAKATRDSCKTTIEAIHGLMSQVIKDKLFNQINIS

SEQ ID NO: 19711 - protein, 68 aa, Homo sapiens
  Payload ID: 3947
  Gene Symbol: COPS5
  Gene Name: COP9 signalosome subunit 5
  ENSP ID: ENSP00000427869
MAASGSGMAQKTWELANNMQEAQSIDEIYKYDKKQQQEILAAKPWTKDKGRSQDFDSCLDFQHESPLL

SEQ ID NO: 19712 - protein, 57 aa, Homo sapiens
  Payload ID: 3947
  Gene Symbol: COPS5
  Gene Name: COP9 signalosome subunit 5
  ENSP ID: ENSP00000427997
MAASGSGMAQKTWELANNMQEAQSIDEIYKYDKKQQQEILAAKPWTKENGSSLCCSG

SEQ ID NO: 19713 - protein, 78 aa, Homo sapiens
  Payload ID: 3947
  Gene Symbol: COPS5
  Gene Name: COP9 signalosome subunit 5
  ENSP ID: ENSP00000428124
MAASGSGMAQKTWELANNMQEAQSIDEIYKYDKKQQQEILAAKPWTKDKGRSQDFDSCLDFQHEVYTFFSFWLKSGKA

SEQ ID NO: 19714 - protein, 151 aa, Homo sapiens
  Payload ID: 3947
  Gene Symbol: COPS5
  Gene Name: COP9 signalosome subunit 5
  ENSP ID: ENSP00000428586
MVMHARSGGNLEVMGLMLGKVDGETMIIMDSFALPVEGTETRVNAQAAAYEYMAAYIENAKQVGRLENAIGWYHSHPGYGCWLSGIDVSTQMLNQQFQEPFVAVVIDPTRTISAGKVNLGAFRTYPKGYKPPDEGPSEYQTIPLNKIEDFG

SEQ ID NO: 19715 - protein, 197 aa, Homo sapiens
  Payload ID: 3947
  Gene Symbol: COPS5
  Gene Name: COP9 signalosome subunit 5
  ENSP ID: ENSP00000429774
MVMHARSGGNLEVMGLMLGKVDGETMIIMDSFALPVEGTETRVNAQAAAYEYMAAYIENAKQVGRLENAIGWYHSHPGYGCWLSGIDVSTQMLNQQFQEPFVAVVIDPTRTISAGKVNLGAFRTYPKGYKPPDEGPSEYQTIPLNKIEDFGVHCKQYYALEVSYFKSSLDRKLLELLWNKYWVNTLSSSSLLTRQVY

SEQ ID NO: 19716 - protein, 327 aa, Homo sapiens
  Payload ID: 3948
  Gene Symbol: COPS6
  Gene Name: COP9 signalosome subunit 6
  Uniprot ID: Q7L5N1
  ENSP ID: ENSP00000304102
MAAAAAAAAATNGTGGSSGMEVDAAVVPSVMACGVTGSVSVALHPLVILNISDHWIRMRSQEGRPVQVIGALIGKQEGRNIEVMNSFELLSHTVEEKIIIDKEYYYTKEEQFKQVFKELEFLGWYTTGGPPDPSDIHVHKQVCEIIESPLFLKLNPMTKHTDLPVSVFESVIDIINGEATMLFAELTYTLATEEAERIGVDHVARMTATGSGENSTVAEHLIAQHSAIKMLHSRVKLILEYVKASEAGEVPFNHEILREAYALCHCLPVLSTDKFKTDFYDQCNDVGLMAYLGTITKTCNTMNQFVNKFNVLYDRQGIGRRMRGLFF

SEQ ID NO: 19717 - protein, 41 aa, Homo sapiens
  Payload ID: 3948
  Gene Symbol: COPS6
  Gene Name: COP9 signalosome subunit 6
  ENSP ID: ENSP00000388865
MACGVTGSVSVALHPLVILNISDHWIRMRSQEGRPVQVIGA

SEQ ID NO: 19718 - protein, 326 aa, Homo sapiens
  Payload ID: 3948
  Gene Symbol: COPS6
  Gene Name: COP9 signalosome subunit 6
  ENSP ID: ENSP00000400617
MAAAAAAAAATNGTGGSSGMEVDAAVPSVMACGVTGSVSVALHPLVILNISDHWIRMRSQEGRPVQVIGALIGKQEGRNIEVMNSFELLSHTVEEKIIIDKEYYYTKEEQFKQVFKELEFLGWYTTGGPPDPSDIHVHKQVCEIIESPLFLKLNPMTKHTDLPVSVFESVIDIINGEATMLFAELTYTLATEEAERIGVDHVARMTATGSGENSTVAEHLIAQHSAIKMLHSRVKLILEYVKASEAGEVPFNHEILREAYALCHCLPVLSTDKFKTDFYDQCNDVGLMAYLGTITKTCNTMNQFVNKFNVLYDRQGIGRRMRGLFF

SEQ ID NO: 19719 - protein, 123 aa, Homo sapiens
  Payload ID: 3948
  Gene Symbol: COPS6
  Gene Name: COP9 signalosome subunit 6
  ENSP ID: ENSP00000413702
LGWYTTGGPPDPSDIHVHKQVCEIIESPLFLKLNPMTKHTDLPVSVFESVIDIINGEATMLFAELTYTLATEEAERIGVDHVARMTATGSGENSTVAEHLIAQHSAIKMLHSRVKLILERGPL

SEQ ID NO: 19720 - protein, 275 aa, Homo sapiens
  Payload ID: 3949
  Gene Symbol: COPS7A
  Gene Name: COP9 signalosome subunit 7A
  Uniprot ID: Q9UBW8
  ENSP ID: ENSP00000229251
MSAEVKVTGQNQEQFLLLAKSAKGAALATLIHQVLEAPGVYVFGELLDMPNVRELAESDFASTFRLLTVFAYGTYADYLAEARNLPPLTEAQKNKLRHLSVVTLAAKVKCIPYAVLLEALALRNVRQLEDLVIEAVYADVLRGSLDQRNQRLEVDYSIGRDIQRQDLSAIARTLQEWCVGCEVVLSGIEEQVSRANQHKEQQLGLKQQIESEVANLKKTIKVTTAAAAAATSQDPEQHLTELREPAPGTNQRQPSKKASKGKGLRGSAKIWSKSN

SEQ ID NO: 19721 - protein, 62 aa, Homo sapiens
  Payload ID: 3949
  Gene Symbol: COPS7A
  Gene Name: COP9 signalosome subunit 7A
  ENSP ID: ENSP00000387787
MSAEVKVTGQNQEQFLLLAKSAKGAALATLIHQVLEAPGVYVFGELLDMPNVRELKPGIFLH

SEQ ID NO: 19722 - protein, 275 aa, Homo sapiens; identical to SEQ ID NO: 19720
  Payload ID: 3949
  Gene Symbol: COPS7A
  Gene Name: COP9 signalosome subunit 7A
  Uniprot ID: Q9UBW8
  ENSP ID: ENSP00000438115

SEQ ID NO: 19723 - protein, 62 aa, Homo sapiens; identical to SEQ ID NO: 19721
  Payload ID: 3949
  Gene Symbol: COPS7A
  Gene Name: COP9 signalosome subunit 7A
  ENSP ID: ENSP00000438352

SEQ ID NO: 19724 - protein, 275 aa, Homo sapiens; identical to SEQ ID NO: 19720
  Payload ID: 3949
  Gene Symbol: COPS7A
  Gene Name: COP9 signalosome subunit 7A
  Uniprot ID: Q9UBW8
  ENSP ID: ENSP00000438363

SEQ ID NO: 19725 - protein, 62 aa, Homo sapiens; identical to SEQ ID NO: 19721
  Payload ID: 3949
  Gene Symbol: COPS7A
  Gene Name: COP9 signalosome subunit 7A
  ENSP ID: ENSP00000438571

SEQ ID NO: 19726 - protein, 62 aa, Homo sapiens; identical to SEQ ID NO: 19721
  Payload ID: 3949
  Gene Symbol: COPS7A
  Gene Name: COP9 signalosome subunit 7A
  ENSP ID: ENSP00000439158

SEQ ID NO: 19727 - protein, 262 aa, Homo sapiens
  Payload ID: 3949
  Gene Symbol: COPS7A
  Gene Name: COP9 signalosome subunit 7A
  ENSP ID: ENSP00000439547
MSAEVKVTGQNQEQFLLLAKSAKGAALATLIHQVLEAPGVYVFGELLDMPNVRELAESDFASTFRLLTVFAYGTYADYLAEARNLPPLTEAQKNKLRHLSVVTLAAKVKCIPYAVLLEALALRNVRQLEDLVIEAVYADVLRGSLDQRNQRLEVDYSIGRDIQRQDLSAIARTLQEWCVGCEVVLSGIEEQVSRANQHKEQQLGLKQQIESEAPRERQDLVQVELKGLSFPPWGCGVPAACLPLRSPQRAFCAPGQLIILGS

SEQ ID NO: 19728 - protein, 125 aa, Homo sapiens
  Payload ID: 3949
  Gene Symbol: COPS7A
  Gene Name: COP9 signalosome subunit 7A
  ENSP ID: ENSP00000439949
MSAEVKVTGQNQEQFLLLAKSAKGAALATLIHQVLEAPGVYVFGELLDMPNVRELAESDFASTFRLLTVFAYGTYADYLAEARNLPPLTEAQKNKLRHLSVVTLAAKVKCIPYAVLLEALALRNV

SEQ ID NO: 19729 - protein, 62 aa, Homo sapiens; identical to SEQ ID NO: 19721
  Payload ID: 3949
  Gene Symbol: COPS7A
  Gene Name: COP9 signalosome subunit 7A
  ENSP ID: ENSP00000440020

SEQ ID NO: 19730 - protein, 212 aa, Homo sapiens
  Payload ID: 3949
  Gene Symbol: COPS7A
  Gene Name: COP9 signalosome subunit 7A
  ENSP ID: ENSP00000440683
MSAEVKVTGQNQEQFLLLAKSAKGAALATLIHQVLEAPGVYVFGELLDMPNVRELAESDFASTFRLLTVFAYGTYADYLAEARNLPPLTEAQKNKLRHLSVVTLAAKVKCIPYAVLLEALALRNVRQLEDLVIEAVYADVLRGSLDQRNQRLEVDYSIGRDIQRQDLSAIARTLQEWCVGCEVVLSGIEEQVSRANQHKEQQLGLKQQIESE

SEQ ID NO: 19731 - protein, 71 aa, Homo sapiens
  Payload ID: 3949
  Gene Symbol: COPS7A
  Gene Name: COP9 signalosome subunit 7A
  ENSP ID: ENSP00000440972
MSAEVKVTGQNQEQFLLLAKSAKGAALATLIHQVLEAPGVYVFGELLDMPNVREGRNWMTYGARGHCGLGE

SEQ ID NO: 19732 - protein, 275 aa, Homo sapiens; identical to SEQ ID NO: 19720
  Payload ID: 3949
  Gene Symbol: COPS7A
  Gene Name: COP9 signalosome subunit 7A
  Uniprot ID: Q9UBW8
  ENSP ID: ENSP00000441852

SEQ ID NO: 19733 - protein, 192 aa, Homo sapiens
  Payload ID: 3949
  Gene Symbol: COPS7A
  Gene Name: COP9 signalosome subunit 7A
  ENSP ID: ENSP00000442613
MSAEVKVTGQNQEQFLLLAKSAKGAALATLIHQVLEAPGVYVFGELLDMPNVRELAESDFASTFRLLTVFAYGTYADYLAEARNLPPLTEAQKNKLRHLSVVTLAAKVKCIPYAVLLEALALRNVRQLEDLVIEAVYADVLRGSLDQRNQRLEVDYSIGRDIQRQDLSAIARTLQEWCVGCEVVLSGIEEQV

SEQ ID NO: 19734 - protein, 62 aa, Homo sapiens; identical to SEQ ID NO: 19721
  Payload ID: 3949
  Gene Symbol: COPS7A
  Gene Name: COP9 signalosome subunit 7A
  ENSP ID: ENSP00000443628

SEQ ID NO: 19735 - protein, 56 aa, Homo sapiens
  Payload ID: 3949
  Gene Symbol: COPS7A
  Gene Name: COP9 signalosome subunit 7A
  ENSP ID: ENSP00000444807
MSAEVKVTGQNQEQFLLLAKSAKGAALATLIHQVLEAPGVYVFGELLDMPNVREWN

SEQ ID NO: 19736 - protein, 60 aa, Homo sapiens
  Payload ID: 3949
  Gene Symbol: COPS7A
  Gene Name: COP9 signalosome subunit 7A
  ENSP ID: ENSP00000445300
MSAEVKVTGQNQEQFLLLAKSAKGAALATLIHQVLEAPGVYVFGELLDMPNVRERHMANC

SEQ ID NO: 19737 - protein, 275 aa, Homo sapiens; identical to SEQ ID NO: 19720
  Payload ID: 3949
  Gene Symbol: COPS7A
  Gene Name: COP9 signalosome subunit 7A
  Uniprot ID: Q9UBW8
  ENSP ID: ENSP00000446039

SEQ ID NO: 19738 - protein, 62 aa, Homo sapiens; identical to SEQ ID NO: 19721
  Payload ID: 3949
  Gene Symbol: COPS7A
  Gene Name: COP9 signalosome subunit 7A
  ENSP ID: ENSP00000473363

SEQ ID NO: 19739 - protein, 62 aa, Homo sapiens; identical to SEQ ID NO: 19721
  Payload ID: 3949
  Gene Symbol: COPS7A
  Gene Name: COP9 signalosome subunit 7A
  ENSP ID: ENSP00000487362

SEQ ID NO: 19740 - protein, 264 aa, Homo sapiens
  Payload ID: 3950
  Gene Symbol: COPS7B
  Gene Name: COP9 signalosome subunit 7B
  Uniprot ID: Q9H9Q2
  ENSP ID: ENSP00000272995
MAGEQKPSSNLLEQFILLAKGTSGSALTALISQVLEAPGVYVFGELLELANVQELAEGANAAYLQLLNLFAYGTYPDYIANKESLPELSTAQQNKLKHLTIVSLASRMKCIPYSVLLKDLEMRNLRELEDLIIEAVYTDIIQGKLDQRNQLLEVDFCIGRDIRKKDINNIVKTLHEWCDGCEAVLLGIEQQVLRANQYKENHNRTQQQVEAEVTNIKKTLKATASSSAQEMEQQLAERECPPHAEQRQPTKKMSKVKGLVSSRH

SEQ ID NO: 19741 - protein, 273 aa, Homo sapiens
  Payload ID: 3950
  Gene Symbol: COPS7B
  Gene Name: COP9 signalosome subunit 7B
  Uniprot ID: Q9H9Q2
  ENSP ID: ENSP00000362710
MAGEQKPSSNLLEQFILLAKGTSGSALTALISQVLEAPGVYVFGELLELANVQELAEGANAAYLQLLNLFAYGTYPDYIANKESLPELSTAQQNKLKHLTIVSLASRMKCIPYSVLLKDLEMRNLRELEDLIIEAVYTDIIQGKLDQRNQLLEVDFCIGRDIRKKDINNIVKTLHEWCDGCEAVLLGIEQQVLRANQYKENHNRTQQQVEAEREKRDVPLLNLITTAFFWLPTSRRHSKPPHPPRLRRWSSSWLNGSVPLTLSRGSPPRRCPK

SEQ ID NO: 19742 - protein, 230 aa, Homo sapiens
  Payload ID: 3950
  Gene Symbol: COPS7B
  Gene Name: COP9 signalosome subunit 7B
  ENSP ID: ENSP00000386438
MTARRELTSVYMELRHLQIMLAEGANAAYLQLLNLFAYGTYPDYIANKESLPELSTAQQNKLKHLTIVSLASRMKCIPYSVLLKDLEMRNLRELEDLIIEAVYTDIIQGKLDQRNQLLEVDFCIGRDIRKKDINNIVKTLHEWCDGCEAVLLGIEQQVLRANQYKENHNRTQQQVEAEVTNIKKTLKATASSSAQEMEQQLAERECPPHAEQRQPTKKMSKVKGLVSSRH

SEQ ID NO: 19743 - protein, 157 aa, Homo sapiens
  Payload ID: 3950
  Gene Symbol: COPS7B
  Gene Name: COP9 signalosome subunit 7B
  Uniprot ID: Q9H9Q2
  ENSP ID: ENSP00000386527
MKCIPYSVLLKDLEMRNLRELEDLIIEAVYTDIIQGKLDQRNQLLEVDFCIGRDIRKKDINNIVKTLHEWCDGCEAVLLGIEQQVLRANQYKENHNRTQQQVEAEVTNIKKTLKATASSSAQEMEQQLAERECPPHAEQRQPTKKMSKVKGLVSSRH

SEQ ID NO: 19744 - protein, 264 aa, Homo sapiens; identical to SEQ ID NO: 19740
  Payload ID: 3950
  Gene Symbol: COPS7B
  Gene Name: COP9 signalosome subunit 7B
  Uniprot ID: Q9H9Q2
  ENSP ID: ENSP00000386567

SEQ ID NO: 19745 - protein, 278 aa, Homo sapiens
  Payload ID: 3950
  Gene Symbol: COPS7B
  Gene Name: COP9 signalosome subunit 7B
  ENSP ID: ENSP00000386880
MAGEQKPSSNLLEQFILLAKGTSGSALTALISQVLEAPGVYVFGELLELANVQELAEGANAAYLQLLNLFAYGTYPDYIANKESLPELSTAQQNKLKHLTIVSLASRMKCIPYSVLLKDLEMRNLRELEDLIIEAVYTDIIQGKLDQRNQLLEVDFCIGRDIRKKDINNIVKTLHEWCDGCEAVLLGIEQQVLRANQYKENHNRTQQQVEAEIACFQREKRDVPLLNLITTAFFWLPTSRRHSKPPHPPRLRRWSSSWLNGSVPLTLSRGSPPRRCPK

SEQ ID NO: 19746 - protein, 103 aa, Homo sapiens
  Payload ID: 3950
  Gene Symbol: COPS7B
  Gene Name: COP9 signalosome subunit 7B
  ENSP ID: ENSP00000388499
MAGEQKPSSNLLEQFILLAKGTSGSALTALISQVLEAPGVYVFGELLELANVQELAEGANAAYLQLLNLFAYGTYPDYIVYPLLRVAERPGDAESPGTRRPYH

SEQ ID NO: 19747 - protein, 78 aa, Homo sapiens
  Payload ID: 3950
  Gene Symbol: COPS7B
  Gene Name: COP9 signalosome subunit 7B
  ENSP ID: ENSP00000391207
MAGEQKPSSNLLEQFILLAKGTSGSALTALISQVLEAPGVYVFGELLELANVQEPGWSRSPDLMIHPPRPPKVLGLQA

SEQ ID NO: 19748 - protein, 49 aa, Homo sapiens
  Payload ID: 3950
  Gene Symbol: COPS7B
  Gene Name: COP9 signalosome subunit 7B
  ENSP ID: ENSP00000400739
  MOD_RES (1)..(1): Any amino acid
XYVFGELLELANVQELAEGANAAYLQLLNLFAYGTYPDYIDEILEDWCL

SEQ ID NO: 19749 - protein, 62 aa, Homo sapiens
  Payload ID: 3950
  Gene Symbol: COPS7B
  Gene Name: COP9 signalosome subunit 7B
  ENSP ID: ENSP00000401110
MAGEQKPSSNLLEQFILLAKGTSGSALTALISQVLEAPGVYVFGELLELANVQEDGLDLLTS

SEQ ID NO: 19750 - protein, 62 aa, Homo sapiens
  Payload ID: 3950
  Gene Symbol: COPS7B
  Gene Name: COP9 signalosome subunit 7B
  ENSP ID: ENSP00000401211
MAGEQKPSSNLLEQFILLAKGTSGSALTALISQVLEAPGVYVFGELLELANVQEPTRRACQN

SEQ ID NO: 19751 - protein, 54 aa, Homo sapiens
  Payload ID: 3950
  Gene Symbol: COPS7B
  Gene Name: COP9 signalosome subunit 7B
  ENSP ID: ENSP00000401235
MAGEQKPSSNLLEQFILLAKGTSGSALTALISQVLEAPGVYVFGELLELANVQE

SEQ ID NO: 19752 - protein, 68 aa, Homo sapiens
  Payload ID: 3950
  Gene Symbol: COPS7B
  Gene Name: COP9 signalosome subunit 7B
  ENSP ID: ENSP00000401682
MAGEQKPSSNLLEQFILLAKGTSGSALTALISQVLEAPGVYVFGELLELANVQERRGFTLLARMVSIS

SEQ ID NO: 19753 - protein, 172 aa, Homo sapiens
  Payload ID: 3950
  Gene Symbol: COPS7B
  Gene Name: COP9 signalosome subunit 7B
  ENSP ID: ENSP00000403300
YTDIIQGKLDQRNQLLEVDFCIGRDIRKKDINNIVKTLHEWCDGCEAVLLGIEQQVLRANQYKENHNRTQQQVEAEVTNIKKTLKATASSSAQEMEQQLAERECPPHAEQRQPTKKMSKVKGPSCPLELPANACSPKIFNSSWLHLGRDGGIDAPLSAEGPVAASVFSPLLG

SEQ ID NO: 19754 - protein, 54 aa, Homo sapiens; identical to SEQ ID NO: 19751
  Payload ID: 3950
  Gene Symbol: COPS7B
  Gene Name: COP9 signalosome subunit 7B
  ENSP ID: ENSP00000409591

SEQ ID NO: 19755 - protein, 150 aa, Homo sapiens
  Payload ID: 3950
  Gene Symbol: COPS7B
  Gene Name: COP9 signalosome subunit 7B
  ENSP ID: ENSP00000412548
MAGEQKPSSNLLEQFILLAKGTSGSALTALISQVLEAPGVYVFGELLELANVQECIPYSVLLKDLEMRNLRELEDLIIEAVYTDIIQGKLDQRNQLLEVDFCIGRDIRKKDINNIVKTLHEWCDGCEAVLLGIEQQVLRANQYKENHNRT

SEQ ID NO: 19756 - protein, 209 aa, Homo sapiens
  Payload ID: 3950
  Gene Symbol: COPS7B
  Gene Name: COP9 signalosome subunit 7B
  ENSP ID: ENSP00000484363
MAGEQKPSSNLLEQFILLAKGTSGSALTALISQVLEAPGVYVFGELLELANVQECIPYSVLLKDLEMRNLRELEDLIIEAVYTDIIQGKLDQRNQLLEVDFCIGRDIRKKDINNIVKTLHEWCDGCEAVLLGIEQQVLRANQYKENHNRTQQQVEAEVTNIKKTLKATASSSAQEMEQQLAERECPPHAEQRQPTKKMSKVKGLVSSRH

SEQ ID NO: 19757 - protein, 157 aa, Homo sapiens; identical to SEQ ID NO: 19743
  Payload ID: 3950
  Gene Symbol: COPS7B
  Gene Name: COP9 signalosome subunit 7B
  Uniprot ID: Q9H9Q2
  ENSP ID: ENSP00000484579

SEQ ID NO: 19758 - protein, 62 aa, Homo sapiens; identical to SEQ ID NO: 19749
  Payload ID: 3950
  Gene Symbol: COPS7B
  Gene Name: COP9 signalosome subunit 7B
  ENSP ID: ENSP00000487385

SEQ ID NO: 19759 - protein, 209 aa, Homo sapiens
  Payload ID: 3951
  Gene Symbol: COPS8
  Gene Name: COP9 signalosome subunit 8
  Uniprot ID: Q99627
  ENSP ID: ENSP00000346340
MPVAVMAESAFSFKKLLDQCENQELEAPGGIATPPVYGQLLALYLLHNDMNNARYLWKRIPPAIKSANSELGGIWSVGQRIWQRDFPGIYTTINAHQWSETVQPIMEALRDATRRRAFALVSQAYTSIIADDFAAFVGLPVEEAVKGILEQGWQADSTTRMVLPRKPVAGALDVSFNKFIPLSEPAPVPPIPNEQQLARLTDYVAFLEN

SEQ ID NO: 19760 - protein, 160 aa, Homo sapiens
  Payload ID: 3951
  Gene Symbol: COPS8
  Gene Name: COP9 signalosome subunit 8
  Uniprot ID: Q99627
  ENSP ID: ENSP00000375865
MNNARYLWKRIPPAIKSANSELGGIWSVGQRIWQRDFPGIYTTINAHQWSETVQPIMEALRDATRRRAFALVSQAYTSIIADDFAAFVGLPVEEAVKGILEQGWQADSTTRMVLPRKPVAGALDVSFNKFIPLSEPAPVPPIPNEQQLARLTDYVAFLEN

SEQ ID NO: 19761 - protein, 173 aa, Homo sapiens
  Payload ID: 3951
  Gene Symbol: COPS8
  Gene Name: COP9 signalosome subunit 8
  ENSP ID: ENSP00000387212
MPVAVMAESAFSFKKLLDQCENQELEAPGGIATPPVYGQLLALYLLHNDMNNARYLWKRIPPAIKSANSELGGIWSVGQRIWQRDFPGIYTTINAHQWSETVQPIMEALRGILEQGWQADSTTRMVLPRKPVAGALDVSFNKFIPLSEPAPVPPIPNEQQLARLTDYVAFLEN

SEQ ID NO: 19762 - protein, 64 aa, Homo sapiens
  Payload ID: 3951
  Gene Symbol: COPS8
  Gene Name: COP9 signalosome subunit 8
  ENSP ID: ENSP00000388655
MPVAVMAESAFSFKKLLDQCENQELEAPGGIATPPVYGQLLALYLLHNDINFYDLYLLNFIYNQ

SEQ ID NO: 19763 - protein, 83 aa, Homo sapiens
  Payload ID: 3951
  Gene Symbol: COPS8
  Gene Name: COP9 signalosome subunit 8
  ENSP ID: ENSP00000413696
  MOD_RES (1)..(1): Any amino acid
XIIADDFAAFVGLPVEEAVKGILEQGWQADSTTRMVLPRKPVAGALDVSFNKFIPLSEPAPVPPIPNEQQLARLTDYVAFLEN

SEQ ID NO: 19764 - protein, 196 aa, Homo sapiens
  Payload ID: 3952
  Gene Symbol: CPNE9
  Gene Name: copine family member IX
  ENSP ID: ENSP00000273027
  MOD_RES (1)..(1): Any amino acid
XRTSSQYMRFLTLGRNVRRRNMSTQELTQLNFTVAIDFTASNGNPLQPTSLHYMSPYQLSAYAMALKAVGEIIQDYDSDKLFPAYGFGAKLPPEGRISHQFPLNNNDEDPNCAGIEGVLESYFQSLRTVQLYGPTYFAPVINQVARAAAKISDGSQYYVLLIITDGVISDMTQTKEAIVSASSLPMSIIIVGVGPA

SEQ ID NO: 19765 - protein, 503 aa, Homo sapiens
  Payload ID: 3952
  Gene Symbol: CPNE9
  Gene Name: copine family member IX
  Uniprot ID: Q8IYJ1
  ENSP ID: ENSP00000373342
MSLGGASERSVPATKIEITVSCRNLLDLDTFSKSDPMVVLYTQSRASQEWREFGRTEVIDNTLNPDFVRKFVLDYFFEEKQNLRFDVYNVDSKTNISKPKDFLGQAFLALGEVIGGQGSRVERTLTGVPGKKCGTILLTAEELSNCRDIATMQLCANKLDKKDFFGKSDPFLVFYRSNEDGTFTICHKTEVVKNTLNPVWQPFSIPVRALCNGDYDRTVKIDVYDWDRDGSHDFIGEFTTSYRELSKAQNQFTVYEVLNPRKKCKKKKYVNSGTVTLLSFSVDSEFTFVDYIKGGTQLNFTVAIDFTASNGNPLQPTSLHYMSPYQLSAYAMALKAVGEIIQDYDSDKLFPAYGFGAKLPPEGRISHQFPLNNNDEDPNCAGIEGVLESYFQSLRTVQLYGPTYFAPVINQVARAAAKISDGSQYYVLLIITDGVISDMTQTKEAIVSASSLPMSIIIVGVGPAMFEAMEELDGDDVRVSSRGRYAERDIVQEGCCSLGTSVV

SEQ ID NO: 19766 - protein, 553 aa, Homo sapiens
  Payload ID: 3952
  Gene Symbol: CPNE9
  Gene Name: copine family member IX
  Uniprot ID: Q8IYJ1
  ENSP ID: ENSP00000373343
MSLGGASERSVPATKIEITVSCRNLLDLDTFSKSDPMVVLYTQSRASQEWREFGRTEVIDNTLNPDFVRKFVLDYFFEEKQNLRFDVYNVDSKTNISKPKDFLGQAFLALGEVIGGQGSRVERTLTGVPGKKCGTILLTAEELSNCRDIATMQLCANKLDKKDFFGKSDPFLVFYRSNEDGTFTICHKTEVVKNTLNPVWQPFSIPVRALCNGDYDRTVKIDVYDWDRDGSHDFIGEFTTSYRELSKAQNQFTVYEVLNPRKKCKKKKYVNSGTVTLLSFSVDSEFTFVDYIKGGTQLNFTVAIDFTASNGNPLQPTSLHYMSPYQLSAYAMALKAVGEIIQDYDSDKLFPAYGFGAKLPPEGRISHQFPLNNNDEDPNCAGIEGVLESYFQSLRTVQLYGPTYFAPVINQVARAAAKISDGSQYYVLLIITDGVISDMTQTKEAIVSASSLPMSIIIVGVGPAMFEAMEELDGDDVRVSSRGRYAERDIVQFVPFRDYVDRSGNQVLSMARLAKDVLAEIPEQLLSYMRTRDIQPRPPPPANPSPIPAPEQP

SEQ ID NO: 19767 - protein, 503 aa, Homo sapiens [sequence omitted]

SEQ ID NO: 19768 - protein, 542 aa, Homo sapiens
  Payload ID: 3953
  Gene Symbol: CPNE1
  Gene Name: copine I
  ENSP ID: ENSP00000317257
MKMMHMAHCVTLVQLSISCDHLIDKDIGSKSDPLCVLLQDVGGGSWAELGRTERVRNCSSPEFSKTLQLEYRFETVQKLRFGIYDIDNKTPELRDDDFLGGAECSLGQIVSSQVLTLPLMLKPGKPAGRGTITVSAQELKDNRVVTMEVEARNLDKKDFLGKSDPFLEFFRQGDGKWHLVYRSEVIKNNLNPTWKRFSVPVQHFCGGNPSTPIQVQCSDYDSDGSHDLIGTFHTSLAQLQAVPAEFECIHPEKQQKKKSYKNSGTIRVKICRVETEYSFLDYVMGGCQINFTVGVDFTGSNGDPSSPDSLHYLSPTGVNEYLMALWSVGSVVQDYDSDKLFPAFGFGAQVPPDWQVSHEFALNFNPSNPYCAGIQGIVDAYRQALPQVRLYGPTNFAPIINHVARFAAQAAHQGTASQYFMLLLLTDGAVTDVEATREAVVRASNLPMSVIIVGVGGADFEAMEQLDADGGPLHTRSGQAAARDIVQFVPYRRFQNAPREALAQTVLAEVPTQLVSYFRAQGWAPLKPLPPSAKDPAQAPQA

SEQ ID NO: 19769 - protein, 537 aa, Homo sapiens
  Payload ID: 3953
  Gene Symbol: CPNE1
  Gene Name: copine I
  Uniprot ID: Q99829
  ENSP ID: ENSP00000336945
MAHCVTLVQLSISCDHLIDKDIGSKSDPLCVLLQDVGGGSWAELGRTERVRNCSSPEFSKTLQLEYRFETVQKLRFGIYDIDNKTPELRDDDFLGGAECSLGQIVSSQVLTLPLMLKPGKPAGRGTITVSAQELKDNRVVTMEVEARNLDKKDFLGKSDPFLEFFRQGDGKWHLVYRSEVIKNNLNPTWKRFSVPVQHFCGGNPSTPIQVQCSDYDSDGSHDLIGTFHTSLAQLQAVPAEFECIHPEKQQKKKSYKNSGTIRVKICRVETEYSFLDYVMGGCQINFTVGVDFTGSNGDPSSPDSLHYLSPTGVNEYLMALWSVGSVVQDYDSDKLFPAFGFGAQVPPDWQVSHEFALNFNPSNPYCAGIQGIVDAYRQALPQVRLYGPTNFAPIINHVARFAAQAAHQGTASQYFMLLLLTDGAVTDVEATREAVVRASNLPMSVIIVGVGGADFEAMEQLDADGGPLHTRSGQAAARDIVQFVPYRRFQNAPREALAQTVLAEVPTQLVSYFRAQGWAPLKPLPPSAKDPAQAPQA

SEQ ID NO: 19770 - protein, 481 aa, Homo sapiens
  Payload ID: 3953
  Gene Symbol: CPNE1
  Gene Name: copine I
  ENSP ID: ENSP00000380584
MAHCVTLVQLSISCDHLIDKDIGSKSDPLCVLLQDVGGGSWAELGRTERVRNCSSPEFSKTLQLEYRFETVQKLRFGIYDIDNKTPELRDDDFLGGAECSLGQIVSSQVLTLPLMLKPGKPAGRGTITVSAQELKDNRVVTMEVEARNLDKKDFLGKSDPFLEFFRQGDGKWHLVYRSEVIKNNLNPTWKRFSVPVQHFCGGNPSTPIQVQCSDYDSDGSHDLIGTFHTSLAQLQAVPAEFECIHPEKQQKKKSYKNSGTIRVKICRVETEYSFLDYVMGGCQINFTVGVDFTGSNGDPSSPDSLHYLSPTGVNEYLMALWSVGSVVQDYDSDKLFPAFGFGAQVPPDWQVSHEFALNFNPSNPYCAGIQGIVDAYRQALPQVRLYGPTNFAPIINHVARFAAQAAHQGTASQYFMLLLLTDGAVTDVEATREAVAPREALAQTVLAEVPTQLVSYFRAQGWAPLKPLPPSAKDPAQAPQA

SEQ ID NO: 19771 - protein, 537 aa, Homo sapiens; identical to SEQ ID NO: 19769
  Payload ID: 3953
  Gene Symbol: CPNE1
  Gene Name: copine I
  Uniprot ID: Q99829
  ENSP ID: ENSP00000380585

SEQ ID NO: 19772 - protein, 427 aa, Homo sapiens
  Payload ID: 3953
  Gene Symbol: CPNE1
  Gene Name: copine I
  ENSP ID: ENSP00000386067
MAHCVTLVQLSISCDHLIDKDIGSKSDPLCVLLQDVGGGSWAELGRTERVRNCSSPEFSKTLQLEYRFETVQKLRFGIYDIDNKTPELRDDDFLGGAECSLGQIVSSQVLTLPLMLKPGKPAGRGTITVSAQELKDNRVVTMEVEARNLDKKDFLGKSDPFLEFFRQGDGKWHLVYRSEVIKNNLNPTWKRFSVPVQHFCGGNPSTPIQVQCSDYDSDGSHDLIGTFHTSLAQLQAVPAEFECIHPEKQQKKKSYKNSGTIRVKICRVETEYSFLDYVMGGCQINFTVGVDFTGSNGDPSSPDSLHYLSPTGVNEYLMALWSVGSVVQDYDSDKLFPAFGFGAQVPPDWQVSHEFALNFNPSNPYCAGIQGIVDAYRQALPQVRLYGPTNFAPIINHVARFAAQAAHQGTASDMNGLVPSNTSCCCC

SEQ ID NO: 19773 - protein, 231 aa, Homo sapiens
  Payload ID: 3953
  Gene Symbol: CPNE1
  Gene Name: copine I
  ENSP ID: ENSP00000387434
MAHCVTLVQLSISCDHLIDKDIGSKSDPLCVLLQDVGGGSWAELGRTERVRNCSSPEFSKTLQLEYRFETVQKLRFGIYDIDNKTPELRDDDFLGGAECSLGQIVSSQVLTLPLMLKPGKPAGRGTITVSAQELKDNRVVTMEVEARNLDKKDFLGKSDPFLEFFRQGDGKWHLVYRSEVIKNNLNPTWKRFSVPVQHFCGGNPSTPIQVQCSDYDSDGSHDLIGTFHTSL

SEQ ID NO: 19774 - protein, 213 aa, Homo sapiens
  Payload ID: 3953
  Gene Symbol: CPNE1
  Gene Name: copine I
  ENSP ID: ENSP00000389662
MAHCVTLVQLSISCDHLIDKDIGSKSDPLCVLLQDVGGGSWAELGRTERVRNCSSPEFSKTLQLEYRFETVQKLRFGIYDIDNKTPELRDDDFLGGAECSLGQIVSSQVLTLPLMLKPGKPAGRGTITDFLGKSDPFLEFFRQGDGKWHLVYRSEVIKNNLNPTWKRFSVPVQHFCGGNPSTPIQVQCSDYDSDGSHDLIGTFHTSLAQLQAV

SEQ ID NO: 19775 - protein, 137 aa, Homo sapiens
  Payload ID: 3953
  Gene Symbol: CPNE1
  Gene Name: copine I
  ENSP ID: ENSP00000390141
MAHCVTLVQLSISCDHLIDKDIGSKSDPLCVLLQDVGGGSWAELGRTERVRNCSSPEFSKTLQLEYRFETVQKLRFGIYDIDNKTPELRDDDFLGGAECSLGQIVSSQVLTLPLMLKPGKPAGRGTITDFLGKSDPF

SEQ ID NO: 19776 - protein, 386 aa, Homo sapiens
  Payload ID: 3953
  Gene Symbol: CPNE1
  Gene Name: copine I
  ENSP ID: ENSP00000390626
MAHCVTLVQLSISCDHLIDKDIGSKSDPLCVLLQDVGGGSWAELGRTERVRNCSSPEFSKTLQLEYRFETVQKLRFGIYDIDNKTPELRDDDFLGGAECSLGQIVSSQVLTLPLMLKPGKPAGRGTITDFLGKSDPFLEFFRQGDGKWHLVYRSEVIKNNLNPTWKRFSVPVQHFCGGNPSTPIQVQCSDYDSDGSHDLIGTFHTSLAQLQAVPAEFECIHPEKQQKKKSYKNSGTIRVKICRVETEYSFLDYVMGGCQINFTVGVDFTGSNGDPSSPDSLHYLSPTGVNEYLMALWSVGSVVQDYDSDKLFPAFGFGAQVPPDWQVSHEFALNFNPSNPYCAGIQGIVDAYRQALPQVRLYGPTNFAPIINHVARFAAQAAHQGT

SEQ ID NO: 19777 - protein, 152 aa, Homo sapiens
  Payload ID: 3953
  Gene Symbol: CPNE1
  Gene Name: copine I
  ENSP ID: ENSP00000391483
MAHCVTLVQLSISCDHLIDKDIGSKSDPLCVLLQDVGGGSWAELGRTERVRNCSSPEFSKTLQLEYRFETVQKLRFGIYDIDNKTPELRDDDFLGGAECSLGQIVSSQVLTLPLMLKPGKPAGRGTITVSAQELKDNRVVTMEVEARNLDKK

SEQ ID NO: 19778 - protein, 208 aa, Homo sapiens
  Payload ID: 3953
  Gene Symbol: CPNE1
  Gene Name: copine I
  ENSP ID: ENSP00000396069
  MOD_RES (1)..(1): Any amino acid
XNPYCAGIQGIVDAYRQALPQVRLYGPTNFAPIINHVARFAAQAAHQGTASQYFMLLLLTDGAVTDVEATREAVVRASNLPMSVIIVGVGGADFEAMEQLDADGGPLHTRSGQAAARDIVQFVPYRRFQNVSPSGGIGTDRARRSAHTTGLILQGPGLGPAQATSTLSQGSCTGPPGLGSLGGCGKSSILCPRGPSGPQPNPSHSPQC

SEQ ID NO: 19779 - protein, 174 aa, Homo sapiens
  Payload ID: 3953
  Gene Symbol: CPNE1
  Gene Name: copine I
  ENSP ID: ENSP00000397638
MAHCVTLVQLSISCDHLIDKDIGSKSDPLCVLLQDVGGGSWAELGRTERVRNCSSPEFSKTLQLEYRFETVQKLRFGIYDIDNKTPELRDDDFLGGAECSLGQIVSSQVLTLPLMLKPGKPAGRGTITVSAQELKDNRVVTMEVEARNLDKKDFLGKSDPFLEFFRQGDGKWHL

SEQ ID NO: 19780 - protein, 209 aa, Homo sapiens
  Payload ID: 3953
  Gene Symbol: CPNE1
  Gene Name: copine I
  ENSP ID: ENSP00000401915
MAHCVTLVQLSISCDHLIDKDIGSKSDPLCVLLQDVGGGSWAELGRTERVRNCSSPEFSKTLQLEYRFETVQKLRFGIYDIDNKTPELRDDDFLGGAECSLGQIVSSQVLTLPLMLKPGKPAGRGTITVSAQELKDNRVVTMEVEARNLDKKDFLGKSDPFLEFFRQGDGKWHLVYRSEVIKNNLNPTWKRFSVPVQHFCGGNPSTPIQ

SEQ ID NO: 19781 - protein, 304 aa, Homo sapiens
  Payload ID: 3953
  Gene Symbol: CPNE1
  Gene Name: copine I
  ENSP ID: ENSP00000404355
MAHCVTLVQLSISCDHLIDKDIGSKSDPLCVLLQDVGGGSWAELGRTERVRNCSSPEFSKTLQLEYRFETVQKLRFGIYDIDNKTPELRDDDFLGGAECSLGQIVSSQVLTLPLMLKPGKPAGRGTITVSAQELKDNRVVTMEVEARNLDKKDFLGKSDPFLEFFRQGDGKWHLVYRSEVIKNNLNPTWKRFSVPVQHFCGGNPSTPIQVQCSDYDSDGSHDLIGTFHTSLAQLQAVPAEFECIHPEKQQKKKSYKNSGTIRVKICRVETEYSFLDYVMGGCQINFTVGVDFTGSNGDPSSPDS

SEQ ID NO: 19782 - protein, 138 aa, Homo sapiens
  Payload ID: 3953
  Gene Symbol: CPNE1
  Gene Name: copine I
  ENSP ID: ENSP00000409305
MAHCVTLVQLSISCDHLIDKDIGSKSDPLCVLLQDVGGGSWAELGRTERVRNCSSPEFSKTLQLEYRFETVQKLRFGIYDIDNKTPELRDDDFLGGAECSLGQIVSSQVLTLPLMLKPGKPAGRGTITSPLPRSQLRN

SEQ ID NO: 19783 - protein, 201 aa, Homo sapiens
  Payload ID: 3953
  Gene Symbol: CPNE1
  Gene Name: copine I
  ENSP ID: ENSP00000409794
MAHCVTLVQLSISCDHLIDKDIGSKSDPLCVLLQDVGGGSWAELGRTERVRNCSSPEFSKTLQLEYRFETVQKLRFGIYDIDNKTPELRDDDFLGGAECSLGQIVSSQVLTLPLMLKPGKPAGRGTITVSAQELKDNRVVTMEVEARNLDKKDFLGKSDPFLEFFRQGDGKWHLVYRSEVIKNNLNPTWKRFSVPVQHFCG

SEQ ID NO: 19784 - protein, 136 aa, Homo sapiens
  Payload ID: 3953
  Gene Symbol: CPNE1
  Gene Name: copine I
  ENSP ID: ENSP00000409955
MAHCVTLVQLSISCDHLIDKDIGSKSDPLCVLLQDVGGGSWAELGRTERVRNCSSPEFSKTLQLEYRFETVQKLRFGIYDIDNKTPELRDDDFLGGAECSLGQIVSSQVLTLPLMLKPGKPAGRGTITVSAQELKD

SEQ ID NO: 19785 - protein, 66 aa, Homo sapiens
  Payload ID: 3953
  Gene Symbol: CPNE1
  Gene Name: copine I
  ENSP ID: ENSP00000412806
MAHCVTLVQLSISCDHLIDKDIGSKSDPLCVLLQDVGGGSWAELGRTERVRNCSSPEFSKTLQLEY

SEQ ID NO: 19786 - protein, 533 aa, Homo sapiens
  Payload ID: 3953
  Gene Symbol: CPNE1
  Gene Name: copine I
  ENSP ID: ENSP00000415597
MAHCVTLVQLSISCDHLIDKDIGSKSDPLCVLLQDVGGGSWAELGRTERVRNCSSPEFSKTLQLEYRFETVQKLRFGIYDIDNKTPELRDDDFLGGAECSLGQIVSSQVLTLPLMLKPGKPAGRGTITVSAQELKDNRVVTMEVEARNLDKKDFLGKSDPFLEFFRQGDGKWHLVYRSEVIKNNLNPTWKRFSVPVQHFCGGNPSTPIQVQCSDYDSDGSHDLIGTFHTSLAQLQAVPAEFECIHPEKQQKKKSYKNSGTIRVKICRVETEYSFLDYVMGGCQINFTVGVDFTGSNGDPSSPDSLHYLSPTGVNEYLMALWSVGSVVQDYDSDKLFPAFGFGAQVPPDWQVSHEFALNFNPSNPYCAGIQGIVDAYRQALPQVRLYGPTNFAPIINHVARFAAQAAHQGTASYFMLLLLTDGAVTDVEATREAVVRASNLPMSVIIVGVGGADFEAMEQLDADGGPLHTRSGQAAARDIVQFVPYRRFQNAPREALAQTVLAEVPTQLVSYFRAQGWAPLKPLPPSAKDPAQA

SEQ ID NO: 19787 - protein, 305 aa, Homo sapiens
  Payload ID: 3953
  Gene Symbol: CPNE1
  Gene Name: copine I
  ENSP ID: ENSP00000416962
MAHCVTLVQLSISCDHLIDKDIGSKSDPLCVLLQDVGGGSWAELGRTERVRNCSSPEFSKTLQLEYRFETVQKLRFGIYDIDNKTPELRDDDFLGGAECSLGQIVSSQVLTLPLMLKPGKPAGRGTITDFLGKSDPFLEFFRQGDGKWHLVYRSEVIKNNLNPTWKRFSVPVQHFCGGNPSTPIQVQCSDYDSDGSHDLIGTFHTSLAQLQAVPAEFECIHPEKQQKKKSYKNSGTIRVKICRVETEYSFLDYVMGGCQINFTVGVDFTGSNGDPSSPDSLHYLSPTGVNEYLMALWSVGSVVQD

SEQ ID NO: 19788 - protein, 548 aa, Homo sapiens
  Payload ID: 3954
  Gene Symbol: CPNE2
  Gene Name: copine II
  Uniprot ID: Q96FN4
  ENSP ID: ENSP00000290776
MAHIPSGGAPAAGAAPMGPQYCVCKVELSVSGQNLLDRDVTSKSDPFCVLFTENNGRWIEYDRTETAINNLNPAFSKKFVLDYHFEEVQKLKFALFDQDKSSMRLDEHDFLGQFSCSLGTIVSSKKITRPLLLLNDKPAGKGLITIAAQELSDNRVITLSLAGRRLDKKDLFGKSDPFLEFYKPGDDGKWMLVHRTEVIKYTLDPVWKPFTVPLVSLCDGDMEKPIQVMCYDYDNDGGHDFIGEFQTSVSQMCEARDSVPLEFECINPKKQRKKKNYKNSGIIILRSCKINRDYSFLDYILGGCQLMFTVGIDFTASNGNPLDPSSLHYINPMGTNEYLSAIWAVGQIIQDYDSDKMFPALGFGAQLPPDWKVSHEFAINFNPTNPFCSGVDGIAQAYSACLPHIRFYGPTNFSPIVNHVARFAAQATQQRTATQYFILLIITDGVISDMEETRHAVVQASKLPMSIIIVGVGNADFAAMEFLDGDSRMLRSHTGEEAARDIVQFVPFREFRNAAKETLAKAVLAELPQQVVQYFKHKNLPPTNSEPA

SEQ ID NO: 19789 - protein, 548 aa, Homo sapiens; identical to SEQ ID NO: 19788
  Payload ID: 3954
  Gene Symbol: CPNE2
  Gene Name: copine II
  Uniprot ID: Q96FN4
  ENSP ID: ENSP00000439018

SEQ ID NO: 19790 - protein, 121 aa, Homo sapiens
  Payload ID: 3954
  Gene Symbol: CPNE2
  Gene Name: copine II
  ENSP ID: ENSP00000455443
MRLDEHDFLGQFSCSLGTIVSSKKITRPLLLLNDKPAGKGLITIAAQELSDNRVITLSLAGRRLDKKDLFGKSDPFLEFYKPGDDGKWMLVHRTEVIKYTLDPVWKPFTVPLVSLCDGDME

SEQ ID NO: 19791 - protein, 81 aa, Homo sapiens
  Payload ID: 3954
  Gene Symbol: CPNE2
  Gene Name: copine II
  ENSP ID: ENSP00000455883
MAHIPSGGAPAAGAAPMGPQYCVCKVELSVSGQNLLDRDVTSKSDPFCVLFTENNGRWIEYDRTETAINNLNPAFSKKFVL

SEQ ID NO: 19792 - protein, 548 aa, Homo sapiens; identical to SEQ ID NO: 19788
  Payload ID: 3954
  Gene Symbol: CPNE2
  Gene Name: copine II
  Uniprot ID: Q96FN4
  ENSP ID: ENSP00000456042

SEQ ID NO: 19793 - protein, 281 aa, Homo sapiens
  Payload ID: 3954
  Gene Symbol: CPNE2
  Gene Name: copine II
  ENSP ID: ENSP00000457579
  MOD_RES (1)..(1): Any amino acid
XFGKSDPFLEFYKPGDDGKWMLVHRTEVIKYTLDPVWKPFTVPLVSLCDGDMEKPIQVMCYDYDNDGGHDFIGEFQTSVSQMCEARDSVPLEFECINPKKQRKKKNYKNSGIIILRSCKINRDYSFLDYILGGCQLMFTPWARLLQSTCCGELPADRGDGHCSTRQPQVGIDFTASNGNPLDPSSLHYINPMGTNEYLSAIWAVGQIIQDYDSDKMFPALGFGAQLPPDWKVSHEFAINFNPTNPFCSGVDGIAQAYSACLPHIRFYGPTNFSPIVNHVAR

SEQ ID NO: 19794 - protein, 537 aa, Homo sapiens
  Payload ID: 3955
  Gene Symbol: CPNE3
  Gene Name: copine III
  Uniprot ID: O75131
  ENSP ID: ENSP00000198765
MAAQCVTKVALNVSCANLLDKDIGSKSDPLCVLFLNTSGQQWYEVERTERIKNCLNPQFSKTFIIDYYFEVVQKLKFGVYDIDNKTIELSDDDFLGECECTLGQIVSSKKLTRPLVMKTGRPAGKGSITISAEEIKDNRVVLFEMEARKLDNKDLFGKSDPYLEFHKQTSDGNWLMVHRTEVVKNNLNPVWRPFKISLNSLCYGDMDKTIKVECYDYDNDGSHDLIGTFQTTMTKLKEASRSSPVEFECINEKKRQKKKSYKNSGVISVKQCEITVECTFLDYIMGGCQLNFTVGVDFTGSNGDPRSPDSLHYISPNGVNEYLTALWSVGLVIQDYDADKMFPAFGFGAQIPPQWQVSHEFPMNFNPSNPYCNGIQGIVEAYRSCLPQIKLYGPTNFSPIINHVARFAAAATQQQTASQYFVLLIITDGVITDLDETRQAIVNASRLPMSIIIVGVGGADFSAMEFLDGDGGSLRSPLGEVAIRDIVQFVPFRQFQNAPKEALAQCVLAEIPQQVVGYFNTYKLLPPKNPATKQQKQ

SEQ ID NO: 19795 - protein, 79 aa, Homo sapiens
  Payload ID: 3955
  Gene Symbol: CPNE3
  Gene Name: copine III
  ENSP ID: ENSP00000427966
MAAQCVTKVALNVSCANLLDKDIGSKSDPLCVLFLNTSGQQWYEVERTERIKNCLNPQFSKTFIIDYYFEVVQKLKFGV

SEQ ID NO: 19796 - protein, 262 aa, Homo sapiens
  Payload ID: 3955
  Gene Symbol: CPNE3
  Gene Name: copine III
  ENSP ID: ENSP00000428561
  MOD_RES (1)..(1): Any amino acid
XKTIELSDDDFLGECECTLGQIVSSKKLTRPLVMKTGRPAGKGSITISAEEIKDNRVVLFEMEARKLDNKVVKNNLNPVWRPFKISLNSLCYGDMDKTIKVECYDYDNDGSHDLIGTFQTTMTKLKEASRSSPVEFECINEKKRQKKKSYKNSGVISVKQCEITVECTFLDYIMGGCQLNFTVGVDFTGSNGDPRSPDSLHYISPNGVNEYLTALWSVGLVIQDYDADKMFPAFGFGAQIPPQWQVSHEFPMNFNPSNPYCN

SEQ ID NO: 19797 - protein, 153 aa, Homo sapiens
  Payload ID: 3955
  Gene Symbol: CPNE3
  Gene Name: copine III
  ENSP ID: ENSP00000429561
MAAQCVTKVALNVSCANLLDKDIGSKSDPLCVLFLNTSGQQWYEVERTERIKNCLNPQFSKTFIIDYYFEVVQKLKFGVYDIDNKTIELSDDDFLGECECTLGQIVSSKKLTRPLVMKTGRPAGKGSITISAEEIKDNRVVLFEMEARKLDNK

SEQ ID NO: 19798 - protein, 537 aa, Homo sapiens; identical to SEQ ID NO: 19794
  Payload ID: 3955
  Gene Symbol: CPNE3
  Gene Name: copine III
  Uniprot ID: O75131
  ENSP ID: ENSP00000477590

SEQ ID NO: 19799 - protein, 135 aa, Homo sapiens
  Payload ID: 3955
  Gene Symbol: CPNE3
  Gene Name: copine III
  ENSP ID: ENSP00000478894
MAAQCVTKVALNVSCANLLDKDIGSKSDPLCVLFLNTSGQQWYEVERTERIKNCLNPQFSKTFIIDYYFEVVQKLKFGVYDIDNKTIELSDDDFLGECECTLGQIVSSKKLTRPLVMKTGRPAGKGSITISAEEI

SEQ ID NO: 19800 - protein, 8 aa, Homo sapiens
  Payload ID: 3955
  Gene Symbol: CPNE3
  Gene Name: copine III
  ENSP ID: ENSP00000479670
MAAQCVTK

SEQ ID NO: 19801 - protein, 139 aa, Homo sapiens
  Payload ID: 3955
  Gene Symbol: CPNE3
  Gene Name: copine III
  ENSP ID: ENSP00000481234
MAAQCVTKVALNVSCANLLDKDIGSKSDPLCVLFLNTSGQQWYEVERTERIKNCLNPQFSKTFIIDYYFEVVQKLKFGVYDIDNKTIELSDDDFLGECECTLGQIVSSKKLTRPLVMKTGRPAGKGSITISAEEIKDNR

SEQ ID NO: 19802 - protein, 234 aa, Homo sapiens
  Payload ID: 3955
  Gene Symbol: CPNE3
  Gene Name: copine III
  ENSP ID: ENSP00000482002
MAAQCVTKVALNVSCANLLDKDIGSKSDPLCVLFLNTSGQQWYEVERTERIKNCLNPQFSKTFIIDYYFEVVQKLKFGVYDIDNKTIELSDDDFLGECECTLGQIVSSKKLTRPLVMKTGRPAGKGSITISAEEIKDNRVVLFEMEARKLDNKDLFGKSDPYLEFHKQTSDGNWLMVHRTEVVKNNLNPVWRPFKISLNSLCYGDMDKTIKVECYDYDNDGSHDLIGTFQTTMT

SEQ ID NO: 19803 - protein, 557 aa, Homo sapiens
  Payload ID: 3956
  Gene Symbol: CPNE4
  Gene Name: copine IV
  Uniprot ID: Q96A23
  ENSP ID: ENSP00000411904
MKKMSNIYESAANTLGIFNSPCLTKVELRVACKGISDRDALSKPDPCVILKMQSHGQWFEVDRTEVIRTCINPVYSKLFTVDFYFEEVQRLRFEVHDISSNHNGLKEADFLGGMECTLGQIVSQRKLSKSLLKHGNTAGKSSITVIAEELSGNDDYVELAFNARKLDDKDFFSKSDPFLEIFRMNDDATQQLVHRTEVVMNNLSPAWKSFKVSVNSLCSGDPDRRLKCIVWDWDSNGKHDFIGEFTSTFKEMRGAMEGKQVQWECINPKYKAKKKNYKNSGTVILNLCKIHKMHSFLDYIMGGCQIQFTVAIDFTASNGDPRNSCSLHYIHPYQPNEYLKALVAVGEICQDYDSDKMFPAFGFGARIPPEYTVSHDFAINFNEDNPECAGIQGVVEAYQSCLPKLQLYGPTNIAPIIQKVAKSASEETNTKEASQYFILLILTDGVITDMADTREAIVHASHLPMSVIIVGVGNADFSDMQMLDGDDGILRSPKGEPVLRDIVQFVPFRNFKHASPAALAKSVLAEVPNQVVDYYNGKGIKPKCSSEMYESSRTLAP

SEQ ID NO: 19804 - protein, 73 aa, Homo sapiens
  Payload ID: 3956
  Gene Symbol: CPNE4
  Gene Name: copine IV
  ENSP ID: ENSP00000421394
MKKMSNIYESAANTLGIFNSPCLTKVELRVACKGISDRDALSKPDPCVILKMQSHGQWFEVDRTEVIRTCINP

SEQ ID NO: 19805 - protein, 575 aa, Homo sapiens
  Payload ID: 3956
  Gene Symbol: CPNE4
  Gene Name: copine IV
  Uniprot ID: Q96A23
  ENSP ID: ENSP00000421646
MAVEPSSSESIKRRAGRRMKKMSNIYESAANTLGIFNSPCLTKVELRVACKGISDRDALSKPDPCVILKMQSHGQWFEVDRTEVIRTCINPVYSKLFTVDFYFEEVQRLRFEVHDISSNHNGLKEADFLGGMECTLGQIVSQRKLSKSLLKHGNTAGKSSITVIAEELSGNDDYVELAFNARKLDDKDFFSKSDPFLEIFRMNDDATQQLVHRTEVVMNNLSPAWKSFKVSVNSLCSGDPDRRLKCIVWDWDSNGKHDFIGEFTSTFKEMRGAMEGKQVQWECINPKYKAKKKNYKNSGTVILNLCKIHKMHSFLDYIMGGCQIQFTVAIDFTASNGDPRNSCSLHYIHPYQPNEYLKALVAVGEICQDYDSDKMFPAFGFGARIPPEYTVSHDFAINFNEDNPECAGIQGVVEAYQSCLPKLQLYGPTNIAPIIQKVAKSASEETNTKEASQYFILLILTDGVITDMADTREAIVHASHLPMSVIIVGVGNADFSDMQMLDGDDGILRSPKGEPVLRDIVQFVPFRNFKHASPAALAKSVLAEVPNQVVDYYNGKGIKPKCSSEMYESSRTLAP

SEQ ID NO: 19806 - protein, 557 aa, Homo sapiens; identical to SEQ ID NO: 19803
  Payload ID: 3956
  Gene Symbol: CPNE4
  Gene Name: copine IV
  Uniprot ID: Q96A23
  ENSP ID: ENSP00000421705

SEQ ID NO: 19807 - protein, 557 aa, Homo sapiens; identical to SEQ ID NO: 19803
  Payload ID: 3956
  Gene Symbol: CPNE4
  Gene Name: copine IV
  Uniprot ID: Q96A23
  ENSP ID: ENSP00000423811

SEQ ID NO: 19808 - protein, 575 aa, Homo sapiens; identical to SEQ ID NO: 19805
  Payload ID: 3956
  Gene Symbol: CPNE4
  Gene Name: copine IV
  Uniprot ID: Q96A23
  ENSP ID: ENSP00000424853

SEQ ID NO: 19809 - protein, 169 aa, Homo sapiens
  Payload ID: 3956
  Gene Symbol: CPNE4
  Gene Name: copine IV
  ENSP ID: ENSP00000425506
MKKMSNIYESAANTLGIFNSPCLTKVELRVACKGISDRDALSKPDPCVILKMQSHGQWFEVDRTEVIRTCINPVYSKLFTVDFYFEEVQRLRFEVHDISSNHNGLKEADFLGGMECTLGQIVSQRKLSKSLLKHGNTAGKSSITVIAEELSGNDDYVELAFNARKLDDK

SEQ ID NO: 19810 - protein, 82 aa, Homo sapiens
  Payload ID: 3956
  Gene Symbol: CPNE4
  Gene Name: copine IV
  ENSP ID: ENSP00000427561
MKKMSNIYESAANTLGIFNSPCLTKVELRVACKGISDRDALSKPDPCVILKMQSHGQWFEVDRTEVIRTCINPVYSKLFTVD

SEQ ID NO: 19811 - protein, 575 aa, Homo sapiens; identical to SEQ ID NO: 19805
  Payload ID: 3956
  Gene Symbol: CPNE4
  Gene Name: copine IV
  Uniprot ID: Q96A23
  ENSP ID: ENSP00000478878

SEQ ID NO: 19812 - protein, 593 aa, Homo sapiens
  Payload ID: 3957
  Gene Symbol: CPNE5
  Gene Name: copine V
  Uniprot ID: Q9HCH3
  ENSP ID: ENSP00000244751
MEQPEDMASLSEFDSLAGSIPATKVEITVSCRNLLDKDMFSKSDPLCVMYTQGMENKQWREFGRTEVIDNTLNPDFVRKFIVDYFFEEKQNLRFDLYDVDSKSPDLSKHDFLGQAFCTLGEIVGSPGSRLEKPLTIGAFSLNSRTGKPMPAVSNGGVPGKKCGTIILSAEELSNCRDVATMQFCANKLDKKDFFGKSDPFLVFYRSNEDGTFTICHKTEVMKNTLNPVWQTFSIPVRALCNGDYDRTIKVEVYDWDRDGSHDFIGEFTTSYRELARGQSQFNIYEVVNPKKKMKKKKYVNSGTVTLLSFAVESECTFLDYIKGGTQINFTVAIDFTASNGNPSQSTSLHYMSPYQLNAYALALTAVGEIIQHYDSDKMFPALGFGAKLPPDGRVSHEFPLNGNQENPSCCGIDGILEAYHRSLRTVQLYGPTNFAPVVTHVARNAAAVQDGSQYSVLLIITDGVISDMAQTKEAIVNAAKLPMSIIIVGVGQAEFDAMVELDGDDVRISSRGKLAERDIVQFVPFRDYVDRTGNHVLSMARLARDVLAEIPDQLVSYMKAQGIRPRPPPAAPTHSPSQSPARTPPASPLHTHI

SEQ ID NO: 19813 - protein, 301 aa, Homo sapiens
  Payload ID: 3957
  Gene Symbol: CPNE5
  Gene Name: copine V
  Uniprot ID: Q9HCH3
  ENSP ID: ENSP00000376885
MKKKKYVNSGTVTLLSFAVESECTFLDYIKGGTQINFTVAIDFTASNGNPSQSTSLHYMSPYQLNAYALALTAVGEIIQHYDSDKMFPALGFGAKLPPDGRVSHEFPLNGNQENPSCCGIDGILEAYHRSLRTVQLYGPTNFAPVVTHVARNAAAVQDGSQYSVLLIITDGVISDMAQTKEAIVNAAKLPMSIIIVGVGQAEFDAMVELDGDDVRISSRGKLAERDIVQFVPFRDYVDRTGNHVLSMARLARDVLAEIPDQLVSYMKAQGIRPRPPPAAPTHSPSQSPARTPPASPLHTHI

SEQ ID NO: 19814 - protein, 290 aa, Homo sapiens
  Payload ID: 3957
  Gene Symbol: CPNE5
  Gene Name: copine V
  ENSP ID: ENSP00000487872
AGSIPATKVEITVSCRNLLDKDMFSKSDPLCVMYTQGMENKQWREFGRTEVIDNTLNPDFVRKFIVDYFFEEKQNLRFDLYDVDSKSPDLSKHDFLGQAFCTLGEIVGSPGSRLEKPLTIGAFSLNSRTGKPMPAVSNGSGLWMESLRTTGLEASGGVPGKKCGTIILSAEELSNCRDVATMQFCANKLDKKDFFGKSDPFLVFYRSNEDGTFTICHKTEVMKNTLNPVWQTFSIPVRALCNGDYDRTIKVEVYDWDRDGSHDFIGEFTTSYRELARGQSQFNIYEVVNP

SEQ ID NO: 19815 - protein, 226 aa, Homo sapiens
  Payload ID: 3957
  Gene Symbol: CPNE5
  Gene Name: copine V
  ENSP ID: ENSP00000488125
MEQPEDMASLSEFDSLAGSIPATKVEITVSCRNLLDKDMFSKSDPLCVMYTQGMENKQWREFGRTEVIDNTLNPDFVRKFIVDYFFEEKQNLRFDLYDVDSKSPDLSKHDFLGQAFCTLGEIVGSPGSRLEKPLTIGAFSLNSRTGKPMPAVSNGGLWMESLRTTGLEASGGVPGKKCGTIILSAEELSNCRDVATMQFCANKLDKKDFFGKSDPFLVFYRSNEDG

SEQ ID NO: 19816 - protein, 557 aa, Homo sapiens
  Payload ID: 3958
  Gene Symbol: CPNE6
  Gene Name: copine VI (neuronal)
  Uniprot ID: O95741
  ENSP ID: ENSP00000380211
MSDPEMGWVPEPPTMTLGASRVELRVSCHGLLDRDTLTKPHPCVLLKLYSDEQWVEVERTEVLRSCSSPVFSRVLALEYFFEEKQPLQFHVFDAEDGATSPRNDTFLGSTECTLGQIVSQTKVTKPLLLKNGKTAGKSTITIVAEEVSGTNDYVQLTFRAYKLDNKDLFSKSDPFMEIYKTNEDQSDQLVWRTEVVKNNLNPSWEPFRLSLHSLCSCDVHRPLKFLVYDYDSSGKHDFIGEFTSTFQEMQEGTANPGQEMQWDCINPKYRDKKKNYKSSGTVVLAQCTVEKVHTFLDYIMGGCQISFTVAIDFTASNGDPRSSQSLHCLSPRQPNHYLQALRAVGGICQDYDSDKRFPAFGFGARIPPNFEVSHDFAINFDPENPECEEISGVIASYRRCLPQIQLYGPTNVAPIINRVAEPAQREQSTGQATKYSVLLVLTDGVVSDMAETRTAIVRASRLPMSIIIVGVGNADFSDMRLLDGDDGPLRCPRGVPAARDIVQFVPFRDFKDAAPSALAKCVLAEVPRQVVEYYASQGISPGAPRPCTLATTPSPSP

SEQ ID NO: 19817 - protein, 612 aa, Homo sapiens
  Payload ID: 3958
  Gene Symbol: CPNE6
  Gene Name: copine VI (neuronal)
  Uniprot ID: O95741
  ENSP ID: ENSP00000440077
MAFKEHGKITSCCIPGPINSSRAGAGAGASGWSSKGVRARAREPERGAPDREPSDMSDPEMGWVPEPPTMTLGASRVELRVSCHGLLDRDTLTKPHPCVLLKLYSDEQWVEVERTEVLRSCSSPVFSRVLALEYFFEEKQPLQFHVFDAEDGATSPRNDTFLGSTECTLGQIVSQTKVTKPLLLKNGKTAGKSTITIVAEEVSGTNDYVQLTFRAYKLDNKDLFSKSDPFMEIYKTNEDQSDQLVWRTEVVKNNLNPSWEPFRLSLHSLCSCDVHRPLKFLVYDYDSSGKHDFIGEFTSTFQEMQEGTANPGQEMQWDCINPKYRDKKKNYKSSGTVVLAQCTVEKVHTFLDYIMGGCQISFTVAIDFTASNGDPRSSQSLHCLSPRQPNHYLQALRAVGGICQDYDSDKRFPAFGFGARIPPNFEVSHDFAINFDPENPECEEISGVIASYRRCLPQIQLYGPTNVAPIINRVAEPAQREQSTGQATKYSVLLVLTDGVVSDMAETRTAIVRASRLPMSIIIVGVGNADFSDMRLLDGDDGPLRCPRGVPAARDIVQFVPFRDFKDAAPSALAKCVLAEVPRQVVEYYASQGISPGAPRPCTLATTPSPSP

SEQ ID NO: 19818 - protein, 110 aa, Homo sapiens
  Payload ID: 3958
  Gene Symbol: CPNE6
  Gene Name: copine VI (neuronal)
  ENSP ID: ENSP00000452653
MEIYKTNEDQSDQLVWRTEVVKNNLNPSWEPFRLSLHSLCSCDVHRPLKFLVYDYDSSGKHDFIGEFTSTFQEMQEGTANPGQEMQWDCINPKYRDKKKNYKSSGTVVLA

SEQ ID NO: 19819 - protein, 153 aa, Homo sapiens
  Payload ID: 3958
  Gene Symbol: CPNE6
  Gene Name: copine VI (neuronal)
  ENSP ID: ENSP00000452826
MSDPEMGWVPEPPTMTLGASRVELRVSCHGLLDRDTLTKPHPCVLLKLYSDEQWVEVRAAQVERTEVLRSCSSPVFSRVLALEYFFEEKQPLQFHVFDAEDGATSPRNDTFLGSTECTLGQIVSQTKVTKPLLLKNGKTAGKSTITIVAEEVS

SEQ ID NO: 19820 - protein, 159 aa, Homo sapiens
  Payload ID: 3958
  Gene Symbol: CPNE6
  Gene Name: copine VI (neuronal)
  ENSP ID: ENSP00000452884
MSDPEMGWVPEPPTMTLGASRVELRVSCHGLLDRDTLTKPHPCVLLKLYSDEQWVEVERTEVLRSCSSPVFSRVLALEYFFEEKQPLQFHVFDAEDGATSPRNDTFLGSTECTLGQIVSQTKVTKPLLLKNGKTAGKSTITVGKITCTHPWSRSWPRRY

SEQ ID NO: 19821 - protein, 158 aa, Homo sapiens
  Payload ID: 3958
  Gene Symbol: CPNE6
  Gene Name: copine VI (neuronal)
  ENSP ID: ENSP00000453261
MSDPEMGWVPEPPTMTLGASRVELRVSCHGLLDRDTLTKPHPCVLLKLYSDEQWVEVERTEVLRSCSSPVFSRVLALEYFFEEKQPLQFHVFDAEDGATSPRNDTFLGSTECTLGQIVSQTKVTKPLLLKNGKTAGKSTITDLFSKSDPFMEIYKTNE

SEQ ID NO: 19822 - protein, 26 aa, Homo sapiens
  Payload ID: 3958
  Gene Symbol: CPNE6
  Gene Name: copine VI (neuronal)
  ENSP ID: ENSP00000453326
MEIYKTNEDQSDQLVWRTEVVKNNLN

SEQ ID NO: 19823 - protein, 226 aa, Homo sapiens
  Payload ID: 3958
  Gene Symbol: CPNE6
  Gene Name: copine VI (neuronal)
  ENSP ID: ENSP00000453352
MSDPEMGWVPEPPTMTLGASRVELRVSCHGLLDRDTLTKPHPCVLLKLYSDEQWVEVERTEVLRSCSSPVFSRVLALEYFFEEKQPLQFHVFDAEDGATSPRNDTFLGSTECTLGQIVSQTKVTKPLLLKNGKTAGKSTITIVAEEVSGTNDYVQLTFRAYKLDNKDLFSKSDPFMEIYKTNEDQSDQLVWRTEVVKNNLNPSWEPFRLSLHSLCSCDVHRPLKFL

SEQ ID NO: 19824 - protein, 105 aa, Homo sapiens
  Payload ID: 3958
  Gene Symbol: CPNE6
  Gene Name: copine VI (neuronal)
  ENSP ID: ENSP00000453483
MSDPEMGWVPEPPTMTLGASRVELRVSCHGLLDRDTLTKPHPCVLLKLYSDEQWVEVERTEVLRSCSSPVFSRVLALEYFFEEKQPLQFHVFDAEDGATSPRNDT

SEQ ID NO: 19825 - protein, 149 aa, Homo sapiens
  Payload ID: 3958
  Gene Symbol: CPNE6
  Gene Name: copine VI (neuronal)
  ENSP ID: ENSP00000454075
MSDPEMGWVPEPPTMTLGASRVELRVSCHGLLDRDTLTKPHPCVLLKLYSDEQWVEVERTEVLRSCSSPVFSRVLALEYFFEEKQPLQFHVFDAEDGATSPRNDTFLGSTECTLGQIVSQTKVTKPLLLKNGKTAGKSTITIVAEEVSG

SEQ ID NO: 19826 - protein, 131 aa, Homo sapiens
  Payload ID: 3958
  Gene Symbol: CPNE6
  Gene Name: copine VI (neuronal)
  ENSP ID: ENSP00000454093
MSDPEMGWVPEPPTMTLGASRVELRVSCHGLLDRDTLTKPHPCVLLKLYSDEQWVEVERTEVLRSCSSPVFSRVLALEYFFEEKQPLQFHVFDAEDGATSPRNDTFLGSTECTLGQIVSQTKVTKPLLLKN

SEQ ID NO: 19827 - protein, 52 aa, Homo sapiens
  Payload ID: 3958
  Gene Symbol: CPNE6
  Gene Name: copine VI (neuronal)
  ENSP ID: ENSP00000454166
MSDPEMGWVPEPPTMTLGASRVELRVSCHGLLDRDTLTKPHPCVLLKLYSDE

SEQ ID NO: 19828 - protein, 65 aa, Homo sapiens
  Payload ID: 3958
  Gene Symbol: CPNE6
  Gene Name: copine VI (neuronal)
  ENSP ID: ENSP00000454172
MSDPEMGWVPEPPTMTLGASRVELRVSCHGLLDRDTLTKPHPCVLLKLYSDEQWVEPCLLPGAGP

SEQ ID NO: 19829 - protein, 141 aa, Homo sapiens
  Payload ID: 3958
  Gene Symbol: CPNE6
  Gene Name: copine VI (neuronal)
  ENSP ID: ENSP00000454192
MSDPEMGWVPEPPTMTLGASRVELRVSCHGLLDRDTLTKPHPCVLLKLYSDEQWVEVERTEVLRSCSSPVFSRVLALEYFFEEKQPLQFHVFDAEDGATSPRNDTFLGSTECTLGQIVSQTKVTKPLLLKNGKTAGKSTIT

SEQ ID NO: 19830 - protein, 633 aa, Homo sapiens
  Payload ID: 3959
  Gene Symbol: CPNE7
  Gene Name: copine VII
  Uniprot ID: Q9UBL6
  ENSP ID: ENSP00000268720
MSAGSERGAAATPGGLPAPCASKVELRLSCRHLLDRDPLTKSDPSVALLQQAQGQWVQVGRTEVVRSSLHPVFSKVFTVDYYFEEVQRLRFEVYDTHGPSGFSCQEDDFLGGMECTLGQPAQKWLLQVVMRVSVDVLGPAGHCAKHFLCCTESSHLARTGPSFLLRYDDLCLPWATAGAVRWWTCRGGHTQGWQIVAQKKVTRPLLLKFGRNAGKSTITVIAEDISGNNGYVELSFRARKLDDKDLFSKSDPFLELYRVNDDQGLQLVYRTEVVKNNLNPVWEAFKVSLSSLCSCEETRPLKCLVWDYDSRGKHDFIGEFSTTFEEMQKAFEEGQAQWDCVNPKYKQKRRSYKNSGVVVLADLKFHRVYSFLDYIMGGCQIHFTVAIDFTASNGDPRNSCSLHYINPYQPNEYLKALVSVGEICQDYDSDKRFSALGFGARIPPKYEVSHDFAINFNPEDDECEGIQGVVEAYQNCLPRVQLYGPTNVAPIISKVARVAAAEESTGKASQYYILLILTDGVVTDMADTREAIVRASRLPMSIIIVGVGNADFTDMQVLDGDDGVLRSPRGEPALRDIVQFVPFRELKNASPAALAKCVLAEVPKQVVEYYSHRGLPPRSLGVPAGEASPGCTP

SEQ ID NO: 19831 - protein, 558 aa, Homo sapiens
  Payload ID: 3959
  Gene Symbol: CPNE7
  Gene Name: copine VII
  Uniprot ID: Q9UBL6
  ENSP ID: ENSP00000317374
MSAGSERGAAATPGGLPAPCASKVELRLSCRHLLDRDPLTKSDPSVALLQQAQGQWVQVGRTEVVRSSLHPVFSKVFTVDYYFEEVQRLRFEVYDTHGPSGFSCQEDDFLGGMECTLGQIVAQKKVTRPLLLKFGRNAGKSTITVIAEDISGNNGYVELSFRARKLDDKDLFSKSDPFLELYRVNDDQGLQLVYRTEVVKNNLNPVWEAFKVSLSSLCSCEETRPLKCLVWDYDSRGKHDFIGEFSTTFEEMQKAFEEGQAQWDCVNPKYKQKRRSYKNSGVVVLADLKFHRVYSFLDYIMGGCQIHFTVAIDFTASNGDPRNSCSLHYINPYQPNEYLKALVSVGEICQDYDSDKRFSALGFGARIPPKYEVSHDFAINFNPEDDECEGIQGVVEAYQNCLPRVQLYGPTNVAPIISKVARVAAAEESTGKASQYYILLILTDGVVTDMADTREAIVRASRLPMSIIIVGVGNADFTDMQVLDGDDGVLRSPRGEPALRDIVQFVPFRELKNASPAALAKCVLAEVPKQVVEYYSHRGLPPRSLGVPAGEASPGCTP

SEQ ID NO: 19832 - protein, 120 aa, Homo sapiens
  Payload ID: 3959
  Gene Symbol: CPNE7
  Gene Name: copine VII
  ENSP ID: ENSP00000431863
MSAGSERGAAATPGGLPAPCASKVELRLSCRHLLDRDPLTKSDPSVALLQQAQGQWVQVGRTEVVRSSLHPVFSKVFTVDYYFEEVQRLRFEVYDTHGPSGFSCQEDDFLGGMECTLGQV

SEQ ID NO: 19833 - protein, 92 aa, Homo sapiens
  Payload ID: 3959
  Gene Symbol: CPNE7
  Gene Name: copine VII
  ENSP ID: ENSP00000434886
  MOD_RES (1)..(1): Any amino acid
XFVPFRELKNQRTAQGAPGIHHAASPVAANLCDPARHAQHTRIPCGAGQVRAGRGPEAGGGVLQPQRPAPEKPGCPCRRGQPRLHTVKMWRA

SEQ ID NO: 19834 - protein, 173 aa, Homo sapiens
  Payload ID: 3959
  Gene Symbol: CPNE7
  Gene Name: copine VII
  ENSP ID: ENSP00000435876
FHRVYSFLDYIMGGCQIHFTTKRERGETGVAIDFTASNGDPRNSCSLHYINPYQPNEYLKALVSVGEICQDYDSDKRFSALGFGARIPPKYEVSHDFAINFNPEDDECEGIQGVVEAYQNCLPRVQLYGPTNVAPIISKVARVAAAEESTGKASQYYILLILTDGVVTDMADT

SEQ ID NO: 19835 - protein, 98 aa, Homo sapiens
  Payload ID: 3959
  Gene Symbol: CPNE7
  Gene Name: copine VII
  ENSP ID: ENSP00000455086
DSDKRFSALGFGARIPPKYEVSHDFAINFNPEDDECEAILHPADPDGRRGDRHGRHTGGHCACLTPAHVHHHRGRGQRRLHRHAGPGRRRRRPALPTG

SEQ ID NO: 19836 - protein, 564 aa, Homo sapiens
  Payload ID: 3960
  Gene Symbol: CPNE8
  Gene Name: copine VIII
  Uniprot ID: Q86YQ8
  ENSP ID: ENSP00000329748
MDSRYNSTAGIGDLNQLSAAIPATRVEVSVSCRNLLDRDTFSKSDPICVLYVQGVGNKEWREFGRTEVIDNTLNPDFVRKFILDYFFEERENLRFDLYDVDSKSPNLSKHDFLGQVFCTLGEIVGSQGSRLEKPIVGIPGKKCGTIILTAEELNCCRDAVLMQFCANKLDKKDFFGKSDPFLVFYRSNEDGSFTICHKTEVVKNTLNPVWQAFKISVRALCNGDYDRTIKVEVYDWDRDGSHDFIGEFTTSYRELSRGQSQFNVYEVVNPKKKGKKKKYTNSGTVTLLSFLVETEVSFLDYIKGGTQINFTVAIDFTASNGNPAQPTSLHYMNPYQLNAYGMALKAVGEIVQDYDSDKMFPALGFGAKLPPDGRISHEFALNGNPQNPYCDGIEGVMEAYYRSLKSVQLYGPTNFAPVINHVARYASSVKDGSQYFVLLIVTDGVISDMAQTKESIVNASKLPMSIIIVGVGPAEFDAMVELDGDDVRVSSRGKYAERDIVQFVPFRDYIDRSGNHILSMARLAKDVLAEIPEQFLSYMRARGIKPSPAPPPYTPPTHVLQTQI

SEQ ID NO: 19837 - protein, 552 aa, Homo sapiens
  Payload ID: 3960
  Gene Symbol: CPNE8
  Gene Name: copine VIII
  ENSP ID: ENSP00000353633
MHFKCSSLYMLYLTEVETNWINLLDRDTFSKSDPICVLYVQGVGNKEWREFGRTEVIDNTLNPDFVRKFILDYFFEERENLRFDLYDVDSKSPNLSKHDFLGQVFCTLGEIVGSQGSRLEKPIVGIPGKKCGTIILTAEELNCCRDAVLMQFCANKLDKKDFFGKSDPFLVFYRSNEDGSFTICHKTEVVKNTLNPVWQAFKISVRALCNGDYDRTIKVEVYDWDRDGSHDFIGEFTTSYRELSRGQSQFNVYEVVNPKKKGKKKKYTNSGTVTLLSFLVETEVSFLDYIKGGTQINFTVAIDFTASNGNPAQPTSLHYMNPYQLNAYGMALKAVGEIVQDYDSDKMFPALGFGAKLPPDGRISHEFALNGNPQNPYCDGIEGVMEAYYRSLKSVQLYGPTNFAPVINHVARYASSVKDGSQYFVLLIVTDGVISDMAQTKESIVNASKLPMSIIIVGVGPAEFDAMVELDGDDVRVSSRGKYAERDIVQFVPFRDYIDRSGNHILSMARLAKDVLAEIPEQFLSYMRARGIKPSPAPPPYTPPTHVLQTQI

SEQ ID NO: 19838 - protein, 233 aa, Homo sapiens
  Payload ID: 3960
  Gene Symbol: CPNE8
  Gene Name: copine VIII
  Uniprot ID: Q86YQ8
  ENSP ID: ENSP00000439237
MNPYQLNAYGMALKAVGEIVQDYDSDKMFPALGFGAKLPPDGRISHEFALNGNPQNPYCDGIEGVMEAYYRSLKSVQLYGPTNFAPVINHVARYASSVKDGSQYFVLLIVTDGVISDMAQTKESIVNASKLPMSIIIVGVGPAEFDAMVELDGDDVRVSSRGKYAERDIVQFVPFRDYIDRSGNHILSMARLAKDVLAEIPEQFLSYMRARGIKPSPAPPPYTPPTHVLQTQI

SEQ ID NO: 19839 - protein, 12 aa, Homo sapiens
  Payload ID: 3960
  Gene Symbol: CPNE8
  Gene Name: copine VIII
  ENSP ID: ENSP00000447761
MQFCANKLDKKD

SEQ ID NO: 19840 - protein, 255 aa, Homo sapiens
  Payload ID: 3961
  Gene Symbol: CCS
  Gene Name: copper chaperone for superoxide dismutase
  ENSP ID: ENSP00000307870
MTCQSCVDAVRKSLQGVAGVQDVEVHLEDQMVLVHTTLPSQEVQALLEGTGRQAVLKGMGSGQLQNLGAAVAILGGPGTVQGVVRFLQLTPERCLIEGTIDGLEPGLHGLHVHQYGDLTNNCNSCGNHFNPDGASHGGPQDSDRHRGDLGNVRADADGRAIFRMEDEQLKVWDVIGRSLIIDEGEDDLGRGGHPLSKITGNSGERLACGIIARSAGLFQNPKQICSCDGLTIWEERGRPIAGKGRKESAQPPAHL

SEQ ID NO: 19841 - protein, 249 aa, Homo sapiens
  Payload ID: 3961
  Gene Symbol: CCS
  Gene Name: copper chaperone for superoxide dismutase
  ENSP ID: ENSP00000433609
MASDSGNQGTLCTLEFAVQMTCQSCVDAVRKSLQGVAGVQDVEVHLEDQMVLVHTTLPSQEVQALLEGTGRQAVLKGMGSGQLQNLGAAVAILGGPGTVQGVVRFLQLTPERCLIEGTIDGLEPGLHGLHVHQYGDLTNNCNSCGNHFNPDGASHGGPQDSDRTGPRGPCLPSPWGAQILRDWYPQEEMGTLGKQEEASESGNQKIAAWHHVAHIPYTHTGSHSSTAETWAMSVLMLTAAPSSEWRMSS

SEQ ID NO: 19842 - protein, 274 aa, Homo sapiens
  Payload ID: 3961
  Gene Symbol: CCS
  Gene Name: copper chaperone for superoxide dismutase
  Uniprot ID: O14618
  ENSP ID: ENSP00000436318
MASDSGNQGTLCTLEFAVQMTCQSCVDAVRKSLQGVAGVQDVEVHLEDQMVLVHTTLPSQEVQALLEGTGRQAVLKGMGSGQLQNLGAAVAILGGPGTVQGVVRFLQLTPERCLIEGTIDGLEPGLHGLHVHQYGDLTNNCNSCGNHFNPDGASHGGPQDSDRHRGDLGNVRADADGRAIFRMEDEQLKVWDVIGRSLIIDEGEDDLGRGGHPLSKITGNSGERLACGIIARSAGLFQNPKQICSCDGLTIWEERGRPIAGKGRKESAQPPAHL

SEQ ID NO: 19843 - protein, 68 aa, Homo sapiens
  Payload ID: 3961
  Gene Symbol: CCS
  Gene Name: copper chaperone for superoxide dismutase
  ENSP ID: ENSP00000436379
MEDEQLKVWDVIGRSLIIDEGEDDLGRGGHPLSKITGNSGERLACGIIARSAGLFQNPKQICSCDGLT

SEQ ID NO: 19844 - protein, 190 aa, Homo sapiens
  Payload ID: 3962
  Gene Symbol: COMMD1
  Gene Name: copper metabolism (Murr1) domain containing 1
  Uniprot ID: Q8N668
  ENSP ID: ENSP00000308236
MAAGELEGGKPLSGLLNALAQDTFHGYPGITEELLRSQLYPEVPPEEFRPFLAKMRGILKSIASADMDFNQLEAFLTAQTKKQGGITSDQAAVISKFWKSHKTKIRESLMNQSRWNSGLRGLSWRVDGKSQSRHSAQIHTPVAIIELELGKYGQESEFLCLEFDEVKVNQILKTLSEVEESISTLISQPN

SEQ ID NO: 19845 - protein, 50 aa, Homo sapiens
  Payload ID: 3962
  Gene Symbol: COMMD1
  Gene Name: copper metabolism (Murr1) domain containing 1
  ENSP ID: ENSP00000398727
  MOD_RES (1)..(1): Any amino acid
XPGITEELLRSQLYPEVPPEEFRPFLAKMRGILKRQNLPISSRVVSNSWA

SEQ ID NO: 19846 - protein, 38 aa, Homo sapiens
  Payload ID: 3962
  Gene Symbol: COMMD1
  Gene Name: copper metabolism (Murr1) domain containing 1
  ENSP ID: ENSP00000401236
  MOD_RES (1)..(1): Any amino acid
XQESEFLCLEFDEVKVNQILKTLSEVEESISTLISQPN

SEQ ID NO: 19847 - protein, 32 aa, Homo sapiens
  Payload ID: 3962
  Gene Symbol: COMMD1
  Gene Name: copper metabolism (Murr1) domain containing 1
  ENSP ID: ENSP00000410050
  MOD_RES (1)..(1): Any amino acid
XCLEFDEVKVNQILKTLSEVEESISTLISQPN

SEQ ID NO: 19848 - protein, 38 aa, Homo sapiens; identical to SEQ ID NO: 19846
  Payload ID: 3962
  Gene Symbol: COMMD1
  Gene Name: copper metabolism (Murr1) domain containing 1
  ENSP ID: ENSP00000413207
  MOD_RES (1)..(1): Any amino acid

SEQ ID NO: 19849 - protein, 98 aa, Homo sapiens
  Payload ID: 3962
  Gene Symbol: COMMD1
  Gene Name: copper metabolism (Murr1) domain containing 1
  ENSP ID: ENSP00000416997
MAAGELEGGKPLSGLLNALAQDTFHGYPGITEELLRSQLYPEVPPEEFRPFLAKMRGILKTGSCCVAQDRVQWVFIGTIMAHRGLELLGSSDSPASAS

SEQ ID NO: 19850 - protein, 454 aa, Homo sapiens
  Payload ID: 3963
  Gene Symbol: CPOX
  Gene Name: coproporphyrinogen oxidase
  Uniprot ID: P36551
  ENSP ID: ENSP00000264193
MALQLGRLSSGPCWLVARGGCGGPRAWSQCGGGGLRAWSQRSAAGRVCRPPGPAGTEQSRGLGHGSTSRGGPWVGTGLAAALAGLVGLATAAFGHVQRAEMLPKTSGTRATSLGRPEEEEDELAHRCSSFMAPPVTDLGELRRRPGDMKTKMELLILETQAQVCQALAQVDGGANFSVDRWERKEGGGGISCVLQDGCVFEKAGVSISVVHGNLSEEAAKQMRSRGKVLKTKDGKLPFCAMGVSSVIHPKNPHAPTIHFNYRYFEVEEADGNKQWWFGGGCDLTPTYLNQEDAVHFHRTLKEACDQHGPDLYPKFKKWCDDYFFIAHRGERRGIGGIFFDDLDSPSKEEVFRFVQSCARAVVPSYIPLVKKHCDDSFTPQEKLWQQLRRGRYVEFNLLYDRGTKFGLFTPGSRIESILMSLPLTARWEYMHSPSENSKEAEILEVLRHPRDWVR

SEQ ID NO: 19851 - protein, 175 aa, Homo sapiens
  Payload ID: 3963
  Gene Symbol: CPOX
  Gene Name: coproporphyrinogen oxidase
  ENSP ID: ENSP00000424924
MALQLGRLSSGPCWLVARGGCGGPRAWSQCGGGGLRAWSQRSAAGRVCRPPGPAGTEQSRGLGHGSTSRGGPWVGTGLAAALAGLVGLATAAFGHVQRAEMLPKTSGTRATSLGRPEEEEDELAHRCSSFMAPPVTDLGELRRRPGDMKTKMELLILETQAQVCQALAQRKLQNK

SEQ ID NO: 19852 - protein, 70 aa, Homo sapiens
  Payload ID: 3963
  Gene Symbol: CPOX
  Gene Name: coproporphyrinogen oxidase
  ENSP ID: ENSP00000425880
  MOD_RES (1)..(1): Any amino acid
XCDDSFTPQEKLWQQLRRGRYVEFNLLYDRGTKFGLFTPGSRIESILMSLPLTARQFSAILFLNSVEDFF

SEQ ID NO: 19853 - protein, 1261 aa, Homo sapiens
  Payload ID: 3964
  Gene Symbol: COBL
  Gene Name: cordon-bleu WH2 repeat protein
  Uniprot ID: O75128
  ENSP ID: ENSP00000265136
MDAPRASAAKPPTGRKMKARAPPPPGKAATLHVHSDQKPPHDGALGSQQNLVRMKEALRASTMDVTVVLPSGLEKRSVLNGSHAMMDLLVELCLQNHLNPSHHALEIRSSETQQPLSFKPNTLIGTLNVHTVFLKEKVPEEKVKPGPPKVPEKSVRLVVNYLRTQKAVVRVSPEVPLQNILPVICAKCEVSPEHVVLLRDNIAGEELELSKSLNELGIKELYAWDNRRETFRKSSLGNDETDKEKKKFLGFFKVNKRSNSKGCLTTPNSPSMHSRSLTLGPSLSLGSISGVSVKSEMKKRRAPPPPGSGPPVQDKASEKVSLGSQIDLQKKKRRAPAPPPPQPPPPSPLIPNRTEDKEENRKSTMVSLPLGSGSHCSPDGAPQVLSEAEETVSVGSCFASEDTTEDSGVMSSPSDIVSLDSQQDSMKYKDKWATDQEDCSDQDLAGTPDLGPQKSPLWEKNGSENSHLRTEKAVTASNDEEDLLIAGEFRKTLAELDEDLEEMEDSYETDTSSLTSSIHGASNHCPQDAMIPHGDTDAIPVTFIGEVSDDPVDSGLFSNRNNNAGSFDSEGVASRRDSLAPLQAEHSQPHEKAREEVPALHPASHDVGKGIRVALSNISKDGNLMETAPRVTSFASNLHTDNLNAKVKDKVYGCADGERTQATERVNSQPVNEKDSNDKNAALAPTSWHQRGQNPGKSYRLKHGLTTYKIIPPKSEMRCYDRDVSLSTGAIKIDELGNLVSPHATGIRIISLSSSVPEAESQPIGKVREFWRCNSVEKHLGRPSESSARGPPSTPVPTQTQNPESRLQADPKPISPQQKSAHHEGRNPLGEGRNQPPTMGMGHVRVPAAHTTEVTFLKPQRRTSSQYVASAIAKRIGAPKVHADVVRPHGYAEKGYAGKAPVLAAPPVTVKDDRTSSPHSETQGWKDGAQWPCVTPPNNHGEDLAVGAPPRGEVIGPHRKLSTQDRPAAIHRSSCFSLVQSSQRDRVSVGQSCGFSGKQSTSSQEASSASEPRRAPDGTDPPPPHTSDTQACSRELVNGSVRAPGHGEPSHPPGGSGTESHILLEREEKPSVFSTDGNETDSIWPPSIFGPKKKFKPVVQRPVPKDTSLHSALMEAIHSAGGKDRLRKTAEHTGEGRPAKLSYTEAEGERSALLAAIRGHSGTCSLRKVASSASEELQSFRDAALSAQGSESPLLEDLGLLSPPAIPPPPPPPSQALSAPRTASRFSTGTLSNTADARQALMDAIRSGTGAARLRKVPLLV

SEQ ID NO: 19854 - protein, 469 aa, Homo sapiens
  Payload ID: 3964
  Gene Symbol: COBL
  Gene Name: cordon-bleu WH2 repeat protein
  Uniprot ID: O75128
  ENSP ID: ENSP00000378910
MDAPRASAAKPPTGRKMKARAPPPPGKAATLHVHSDQKPPHDGALGSQQNLVRMKEALRASTMDVTVVLPSGLEKRSVLNGSHAMMDLLVELCLQNHLNPSHHALEIRSSETQQPLSFKPNTLIGTLNVHTVFLKEKVPEEKVKPGPPKVPEKSVRLVVNYLRTQKAVVRVSPEVPLQNILPVICAKCEVSPEHVVLLRDNIAGEELELSKSLNELGIKELYAWDNRRETFRKSSLGNDETDKEKKKFLGFFKVNKRSNSKGCLTTPNSPSMHSRSLTLGPSLSLGSISGVSVKSEMKKRRAPPPPGSGPPVQDKASEKVSLGSQIDLQKKKRRAPAPPPPQPPPPSPLIPNRTEDKEENRKSTMVYGAAEAVIRLLSLLLNTTAPGTAKPRTLWMSEGRSSLHNPEIKCSCFSSSSPFPQSLLSLLLGLSSICECMCTLRHTHAHTHNPSCVLPTSEILAFGRQSLIS

SEQ ID NO: 19855 - protein, 1271 aa, Homo sapiens
  Payload ID: 3964
  Gene Symbol: COBL
  Gene Name: cordon-bleu WH2 repeat protein
  Uniprot ID: O75128
  ENSP ID: ENSP00000378912
MDAPRASAAKPPTGRKMKARAPPPPGKAATLHVHSDQKPPHDGALGSQQNLVRMKEALRASTMDVTVVLPSGLEKRSVLNGSHAMMDLLVELCLQNHLNPSHHALEIRSSETQQPLSFKPNTLIGTLNVHTVFLKEKVPEEKVKPGPPKVPEKSVRLVVNYLRTQKAVVRVSPEVPLQNILPVICAKCEVSPEHVVLLRDNIAGEELELSKSLNELGIKELYAWDNRRETFRKSSLGNDETDKEKKKFLGFFKVNKRSNSKGCLTTPNSPSMHSRSLTLGPSLSLGSISGVSVKSEMKKRRAPPPPGSGPPVQDKASEKVSLGSQIDLQKKKRRAPAPPPPQPPPPSPLIPNRTEDKEENRKSTMGGGRQVPQKPPRGTARGPPQLVLPPPPPYPPPDTDVVEPLSFPGEGAGSEASDPIPKLSLPLGSGSHCSPDGAPQVLSEAEETVSVGSCFASEDTTEDSGVMSSPSDIVSLDSQQDSMKYKDKWATDQEDCSDQDLAGTPDLGPQKSPLWEKNGSENSHLRTEKAVTASNDEEDLLIAGEFRKTLAELDEDLEEMEDSYETDTSSLTSSIHGASNHCPQDAMIPHGDTDAIPVTFIGEVSDDPVDSGLFSNRNNNAGSFDSEGVASRRDSLAPLQAEHSQPHEKAREEVPALHPASHDVGKGIRVALSNISKDGNLMETAPRVTSFASNLHTDNLNAKVKDKVYGCADGERTQATERVNSQPVNEKDSNDKNAALAPTSWHQRGQNPGKSYRLKHGLTTYKIIPPKSEMRCYDRDVSLSTGAIKIDELGNLVSPHATGIRIISLSSSVPEAESQPIGKVREFWRCNSVEKHLGRPSESSARGPPSTPVPTQTQNPESRLQADPKPISPQQKSAHHEGRNPLGEGRNQPPTMGMGHVRVPAAHTTEVTFLKPQRRTSSQYVASAIAKRIGAPKVHADVVRPHGYAEKGYAGKAPVLAAPPVTVKDDRTSSPHSETQGWKDGAQWPCVTPPNNHGEDLAVGAPPRGEVIGPHRKLSTQDRPAAIHRSSCFSLVQSSQRDRVSVGQSCGFSGKQSTSSQEASSASEPRRAPDGTDPPPPHTSDTQACSRELVNGSVRAPGHGEPSHPPGGSGTESHILLEREEKPSVFSTDGNETDSIWPPSIFGPKKKFKPVVQRPVPKDTSLHSALMEAIHSAGGKDRLRKTAEHTGEGRPAKLSYTEAEGERSALLAAIRGHSGTCSLRKALSAPRTASRFSTGTLSNTADARQALMDAIRSGTGAARLRKVPLLV

SEQ ID NO: 19856 - protein, 163 aa, Homo sapiens
  Payload ID: 3964
  Gene Symbol: COBL
  Gene Name: cordon-bleu WH2 repeat protein
  ENSP ID: ENSP00000391864
MKARAPPPPGKAATLHVHSDQKPPHDGALGSQQNLVRMKEALRASTMDVTVVLPSGLEKRSVLNGSHAMMDLLVELCLQNHLNPSHHALEIRSSETQQPLSFKPNTLIGTLNVHTVFLKEKVPEEKVKPGPPKVPEKSVRLVVNYLRTQKAVVRVSPEVPLQN

SEQ ID NO: 19857 - protein, 379 aa, Homo sapiens
  Payload ID: 3964
  Gene Symbol: COBL
  Gene Name: cordon-bleu WH2 repeat protein
  Uniprot ID: O75128
  ENSP ID: ENSP00000399500
MDAPRASAAKPPTGRKMKARAPPPPGKAATLHVHSDQKPPHDGALGSQQNLVRMKEALRASTMDVTVVLPSGLEKRSVLNGSHAMMDLLVELCLQNHLNPSHHALEIRSSETQQPLSFKPNTLIGTLNVHTVFLKEKVPEEKVKPGPPKVPEKSVRLVVNYLRTQKAVVRVSPEVPLQNILPVICAKCEVSPEHVVLLRDNIAGEELELSKSLNELGIKELYAWDNRRETFRKSSLGNDETDKEKKKFLGFFKVNKRSNSKGCLTTPNSPSMHSRSLTLGPSLSLGSISGVSVKSEMKKRRAPPPPGSGPPVQDKASEKVSLGSQIDLQKKKRRAPAPPPPQPPPPSPLIPNRTEDKEENRKSTMVYCCASFPTQAKRF

SEQ ID NO: 19858 - protein, 1106 aa, Homo sapiens
  Payload ID: 3964
  Gene Symbol: COBL
  Gene Name: cordon-bleu WH2 repeat protein
  ENSP ID: ENSP00000401204
LKEKVPEEKVKPGPPKVPEKSVRLVVNYLRTQKAVVRVSPEVPLQNILPVICAKCEVSPEHVVLLRDNIAGEELELSKSLNELGIKELYAWDNRRETFRKSSLGNDETDKEKKKFLGFFKVNKRSNSKAEQLVLSGADSDEDTSRAAPGRGLNGCLTTPNSPSMHSRSLTLGPSLSLGSISGVSVKSEMKKRRAPPPPGSGPPVQDKASEKVSLGSQIDLQKKKRRAPAPPPPQPPPPSPLIPNRTEDKEENRKSTMVSLPLGSGSHCSPDGAPQVLSEAEETVSVGSCFASEDTTEDSGVMSSPSDIVSLDSQQDSMKYKDKWATDQEDCSDQDLAGTPDLGPQKSPLWEKNGSENSHLRTEKAVTASNDEEDLLIAGEFRKTLAELDEDLEEMEDSYETDTSSLTSSIHGASNHCPQDAMIPHGDTDAIPVTFIGEVSDDPVDSGLFSNRNNNAGSFDSEGVASRRDSLAPLQAEHSQPHEKAREEVPALHPASHDVGKGIRVALSNISKDGNLMETAPRVTSFASNLHTDNLNAKVKDKVYGCADGERTQATERVNSQPVNEKDSNDKNAALAPTSWHQRGQNPGKSYRLKHGLTTYKIIPPKSEMRCYDRDVSLSTGAIKIDELGNLVSPHATGIRIISLSSSVPEAESQPIGKVREFWRCNSVEKHLGRPSESSARGPPSTPVPTQTQNPESRLQADPKPISPQQKSAHHEGRNPLGEGRNQPPTMGMGHVRVPAAHTTEVTFLKPQRRTSSQYVASAIAKRIGAPKVHADVVRPHGYAEKGYAGKAPVLAAPPVTVKDDRTSSPHSETQGWKDGAQWPCVTPPNNHGEDLAVGAPPRGEVIGPHRKLSTQDRPAAIHRSSCFSLVQSSQRDRVSVGQSCGFSGKQSTSSQEASSASEPRRAPDGTDPPPPHTSDTQACSRELVNGSVRAPGHGEPSHPPGGSGTESHILLEREEKPSVFSTDGNETDSIWPPSIFGPKKKFKPVVQRPVPKDTSLHSALMEAIHSAGGKDRLRKTAEHTGEGRPAKLSYTEAEGERSALLAAIRGHSGTCSLRKALSAPRTASRFSTGTLSNTADARQALMDAIRSGTGAARLRKVPLLV

SEQ ID NO: 19859 - protein, 614 aa, Homo sapiens
  Payload ID: 3964
  Gene Symbol: COBL
  Gene Name: cordon-bleu WH2 repeat protein
  ENSP ID: ENSP00000405059
  MOD_RES (1)..(1): Any amino acid
XHAMMDLLVELCLQNHLNPSHHALEIRSSETQQPLSFKPNTLIGTLNVHTVFLKEKVPEEKVKPGPPKVPEKSVRLVVNYLRTQKAVVRVSPEVPLQNILPVICAKCEVSPEHVVLLRDNIAGEELELSKSLNELGIKELYAWDNRRETFRKSSLGNDETDKEKKKFLGFFKVNKRSNSKGCLTTPNSPSMHSRSLTLGPSLSLGSISGVSVKSEMKKRRAPPPPGSGPPVQDKASEKVSLGSQIDLQKKKRRAPAPPPPQPPPPSPLIPNRTEDKEENRKSTMGGGRQVPQKPPRGTARGPPQLVLPPPPPYPPPDTDVVEPLSFPGEGAGSEASDPIPKLSLPLGSGSHCSPDGAPQVLSEAEETVSVGSCFASEDTTEDSGVMSSPSDIVSLDSQQDSMKYKDKWATDQEDCSDQDLAGTPDLGPQKSPLWEKNGSENSHLRTEKAVTASNDEEDLLIAGEFRKTLAELDEDLEEMEDSYETDTSSLTSSIHGASNHCPQDAMIPHGDTDAIPVTFIGEVSDDPVDSGLFSNRNNNAGSFDSEGVASRRDSLAPLQAEHSQPHEKAREEVPALHPASHDVGKGIRVALSNISKDGNLMETAPRVTSFASNL

SEQ ID NO: 19860 - protein, 1146 aa, Homo sapiens
  Payload ID: 3964
  Gene Symbol: COBL
  Gene Name: cordon-bleu WH2 repeat protein
  ENSP ID: ENSP00000413498
LRDNIAGEELELSKSLNELGIKELYAWDNRRETFRKSSLGNDETDKEKKKFLGFFKVNKRSNSKAEQLVLSGADSDEDTSRAAPGRGLNGCLTTPNSPSMHSRSLTLGPSLSLGSISGVSVKSEMKKRRAPPPPGSGPPVQDKASEKVSLGSQIDLQKKKRRAPAPPPPQPPPPSPLIPNRTEDKEENRKSTMGGGRQVPQKPPRGTARGPPQLVLPPPPPYPPPDTDVVEPLSFPGEGAGSEASDPIPKLSLPLGSGSHCSPDGAPQVLSEAEETVSVGSCFASEDTTEDSGVMSSPSDIVSLDSQQDSMKYKDKWATDQEDCSDQDLAGTPDLGPQKSPLWEKNGSENSHLRTEKAVTASNDEEDLLIAGEFRKTLAELDEDLEEMEDSYETDTSSLTSSIHGASNHCPQDAMIPHGDTDAIPVTFIGEVSDDPVDSGLFSNRNNNAGSFDSEGVASRRDSLAPLQAEHSQPHEKAREEVPALHPASHDVGKGIRVALSNISKDGNLMETAPRVTSFASNLHTDNLNAKVKDKVYGCADGERTQATERVNSQPVNEKDSNDKNAALAPTSWHQRGQNPGKSYRLKHGLTTYKIIPPKSEMRCYDRDVSLSTGAIKIDELGNLVSPHATGIRIISLSSSVPEAESQPIGKVREFWRCNSVEKHLGRPSESSARGPPSTPVPTQTQNPESRLQADPKPISPQQKSAHHEGRNPLGEGRNQPPTMGMGHVRVPAAHTTEVTFLKPQRRTSSQYVASAIAKRIGAPKVHADVVRPHGYAEKGYAGKAPVLAAPPVTVKDDRTSSPHSETQGWKDGAQWPCVTPPNNHGEDLAVGAPPRGEVIGPHRKLSTQDRPAAIHRSSCFSLVQSSQRDRVSVGQSCGFSGKQSTSSQEASSASEPRRAPDGTDPPPPHTSDTQACSRELVNGSVRAPGHGEPSHPPGGSGTESHILLEREEKPSVFSTDGNETDSIWPPSIFGPKKKFKPVVQRPVPKDTSLHSALMEAIHSAGGKDRLRKTAEHTGEGRPAKLSYTEAEGERSALLAAIRGHSGTCSLRKVASSASEELQSFRDAALSAQGSESPLLEDLGLLSPPAIPPPPPPPSQALSAPRTASRFSTGTLSNTADARQALMDAIRSGTGAARLRKVPLLV

SEQ ID NO: 19861 - protein, 394 aa, Homo sapiens
  Payload ID: 3964
  Gene Symbol: COBL
  Gene Name: cordon-bleu WH2 repeat protein
  ENSP ID: ENSP00000488001
MDAPRASAAKPPTGRKMKARAPPPPGKAATLHVHSDQKPPHDGALGSQQNLVRMKEALRASTMDVTVVLPSGLEKRSVLNGSHAMMDLLVELCLQNHLNPSHHALEIRSSETQQPLSFKPNTLIGTLNVHTVFLKEKVPEEKVKPGPPKVPEKSVRLVVNYLRTQKAVVRVSPEVPLQNILPVICAKCEVSPEHVVLLRDNIAGEELELSKSLNELGIKELYAWDNRRVRLSKTQSEPSLSCQETFRKSSLGNDETDKEKKKFLGFFKVNKRSNSKGCLTTPNSPSMHSRSLTLGPSLSLGSISGVSVKSEMKKRRAPPPPGSGPPVQDKASEKVSLGSQIDLQKKKRRAPAPPPPQPPPPSPLIPNRTEDKEENRKSTMVYCCASFPTQAKRF

SEQ ID NO: 19862 - protein, 1166 aa, Homo sapiens
  Payload ID: 3965
  Gene Symbol: COBLL1
  Gene Name: cordon-bleu WH2 repeat protein-like 1
  Uniprot ID: Q53SF7
  ENSP ID: ENSP00000341360
MDGRTPRPQDAPARRKPKAKAPLPPAETKYTDVSSAADSVESTAFIMEQKENMIDKDVELSVVLPGDIIKSTTVHGSKPMMDLLIFLCAQYHLNPSSYTIDLLSAEQNHIKFKPNTPIGMLEVEKVILKPKMLDKKKPTPIIPEKTVRVVINFKKTQKTIVRVSPHASLQELAPIICSKCEFDPLHTLLLKDYQSQEPLDLTKSLNDLGLRELYAMDVNRESCQISQNLDIMKEKENKGFFSFFQRSKKKRDQTASAPATPLVNKHRPTFTRSNTISKPYISNTLPSDAPKKRRAPLPPMPASQSVPQDLAHIQERPASCIVKSMSVDETDKSPCEAGRVRAGSLQLSSMSAGNSSLRRTKRKAPSPPSKIPPHQSDENSRVTALQPVDGVPPDSASEANSPEELSSPETFHPGLSSQEQCTAPKLMEETSVFECPGTPEAAITSLTSGISSDYSLEEIDEKEELSEVPKVEAENISPKSQDIPFVSTDIINTLKNDPDSALGNGSGEFSQNSMEEKQETKSTDGQEPHSVVYDTSNGKKVVDSIRNLKSLGPNQENVQNEIIVYPENTEDNMKNGVKKTEINVEGVAKNNNIDMEVERPSNSEAHETDTAISYKENHLAASSVPDQKLNQPSAEKTKDAAIQTTPSCNSFDGKHQDHNLSDSKVEECVQTSNNNISTQHSCLSSQDSVNTSREFRSQGTLIIHSEDPLTVKDPICAHGNDDLLPPVDRIDKNSTASYLKNYPLYRQDYNPKPKPSNEITREYIPKIGMTTYKIVPPKSLEISKDWQSETIEYKDDQDMHALGKKHTHENVKETAIQTEDSAISESPEEPLPNLKPKPNLRTEHQVPSSVSSPDDAMVSPLKPAPKMTRDTGTAPFAPNLEEINNILESKFKSRASNAQAKPSSFFLQMQKRVSGHYVTSAAAKSVHAAPNPAPKELTNKEAERDMLPSPEQTLSPLSKMPHSVPQPLVEKTDDDVIGQAPAEASPPPIAPKPVTIPASQVSTQNLKTLKTFGAPRPYSSSGPSPFALAVVKRSQSFSKERTESPSASALVQPPANTEEGKTHSVNKFVDIPQLGVSDKENNSAHNEQNSQIPTPTDGPSFTVMRQSSLTFQSSDPEQMRQSLLTAIRSGEAAAKLKRVTIPSNTISVNGRSRLSHSMSPDAQDGH

SEQ ID NO: 19863 - protein, 1128 aa, Homo sapiens
  Payload ID: 3965
  Gene Symbol: COBLL1
  Gene Name: cordon-bleu WH2 repeat protein-like 1
  Uniprot ID: Q53SF7
  ENSP ID: ENSP00000364607
MDGRTPRPQDAPARRKPKAKAPLPPAETKYTDVSSAADSVESTAFIMEQKENMIDKDVELSVVLPGDIIKSTTVHGSKPMMDLLIFLCAQYHLNPSSYTIDLLSAEQNHIKFKPNTPIGMLEVEKVILKPKMLDKKKPTPIIPEKTVRVVINFKKTQKTIVRVSPHASLQELAPIICSKCEFDPLHTLLLKDYQSQEPLDLTKSLNDLGLRELYAMDVNRESCQISQNLDIMKEKENKGFFSFFQRSKKKRDQTASAPATPLVNKHRPTFTRSNTISKPYISNTLPSDAPKKRRAPLPPMPASQSVPQDLAHIQERPASCIVKSMSVDETDKSPCEAGRVRAGSLQLSSMSAGNSSLRRTKRKAPSPPSKIPPHQSDENSRVTALQPVDGVPPDSASEANSPEELSSPAGISSDYSLEEIDEKEELSEVPKVEAENISPKSQDIPFVSTDIINTLKNDPDSALGNGSGEFSQNSMEEKQETKSTDGQEPHSVVYDTSNGKKVVDSIRNLKSLGPNQENVVQNEIIVYPENTEDNMKNGVKKTEINVEGVAKNNNIDMEVERPSNSEAHETDTAISYKENHLAASSVPDQKLNQPSAEKTKDAAIQTTPSCNSFDGKHQDHNLSDSKVEECVQTSNNNISTQHSCLSSQDSVNTSREFRSQGTLIIHSEDPLTVKDPICAHGNDDLLPPVDRIDKNSTASYLKNYPLYRQDYNPKPKPSNEITREYIPKIGMTTYKIVPPKSLEISKDWQSETIEYKDDQDMHALGKKHTHENVKETAIQTEDSAISESPEEPLPNLKPKPNLRTEHQVPSSVSSPDDAMVSPLKPAPKMTRDTGTAPFAPNLEEINNILESKFKSRASNAQAKPSSFFLQMQKRVSGHYVTSAAAKSVHAAPNPAPKELTNKEAERDMLPSPEQTLSPLSKMPHSVPQPLVEKTDDDVIGQAPAEASPPPIAPKPVTIPASQVSTQNLKTLKTFGAPRPYSSSGPSPFALAVVKRSQSFSKERTESPSASALVQPPANTEEGKTHSVNKFVDIPQLGVSDKENNSAHNEQNSQIPTPTDGPSFTVMRQSSLTFQSSDPEQMRQSLLTAIRSGEAAAKLKRVTIPSNTISVNGRSRLSHSMSPDAQDGH

SEQ ID NO: 19864 - protein, 1204 aa, Homo sapiens
  Payload ID: 3965
  Gene Symbol: COBLL1
  Gene Name: cordon-bleu WH2 repeat protein-like 1
  Uniprot ID: Q53SF7
  ENSP ID: ENSP00000376478
MCGRAAEAAASSRTPGREMGQAVTRRLGAGARAAPRRAMDGRTPRPQDAPARRKPKAKAPLPPAETKYTDVSSAADSVESTAFIMEQKENMIDKDVELSVVLPGDIIKSTTVHGSKPMMDLLIFLCAQYHLNPSSYTIDLLSAEQNHIKFKPNTPIGMLEVEKVILKPKMLDKKKPTPIIPEKTVRVVINFKKTQKTIVRVSPHASLQELAPIICSKCEFDPLHTLLLKDYQSQEPLDLTKSLNDLGLRELYAMDVNRESCQISQNLDIMKEKENKGFFSFFQRSKKKRDQTASAPATPLVNKHRPTFTRSNTISKPYISNTLPSDAPKKRRAPLPPMPASQSVPQDLAHIQERPASCIVKSMSVDETDKSPCEAGRVRAGSLQLSSMSAGNSSLRRTKRKAPSPPSKIPPHQSDENSRVTALQPVDGVPPDSASEANSPEELSSPETFHPGLSSQEQCTAPKLMEETSVFECPGTPEAAITSLTSGISSDYSLEEIDEKEELSEVPKVEAENISPKSQDIPFVSTDIINTLKNDPDSALGNGSGEFSQNSMEEKQETKSTDGQEPHSVVYDTSNGKKVVDSIRNLKSLGPNQENVQNEIIVYPENTEDNMKNGVKKTEINVEGVAKNNNIDMEVERPSNSEAHETDTAISYKENHLAASSVPDQKLNQPSAEKTKDAAIQTTPSCNSFDGKHQDHNLSDSKVEECVQTSNNNISTQHSCLSSQDSVNTSREFRSQGTLIIHSEDPLTVKDPICAHGNDDLLPPVDRIDKNSTASYLKNYPLYRQDYNPKPKPSNEITREYIPKIGMTTYKIVPPKSLEISKDWQSETIEYKDDQDMHALGKKHTHENVKETAIQTEDSAISESPEEPLPNLKPKPNLRTEHQVPSSVSSPDDAMVSPLKPAPKMTRDTGTAPFAPNLEEINNILESKFKSRASNAQAKPSSFFLQMQKRVSGHYVTSAAAKSVHAAPNPAPKELTNKEAERDMLPSPEQTLSPLSKMPHSVPQPLVEKTDDDVIGQAPAEASPPPIAPKPVTIPASQVSTQNLKTLKTFGAPRPYSSSGPSPFALAVVKRSQSFSKERTESPSASALVQPPANTEEGKTHSVNKFVDIPQLGVSDKENNSAHNEQNSQIPTPTDGPSFTVMRQSSLTFQSSDPEQMRQSLLTAIRSGEAAAKLKRVTIPSNTISVNGRSRLSHSMSPDAQDGH

SEQ ID NO: 19865 - protein, 1168 aa, Homo sapiens
  Payload ID: 3965
  Gene Symbol: COBLL1
  Gene Name: cordon-bleu WH2 repeat protein-like 1
  Uniprot ID: Q53SF7
  ENSP ID: ENSP00000387326
  MOD_RES (1)..(1): Any amino acid
XLMCGRAAEAAASSRTPGREMGQAVTRRLGAGARAAPRRAMDGRTPRPQDAPARRKPKAKAPLPPAETKYTDVSSAADSVESTAFIMEQKENMIDKDVELSVVLPGDIIKSTTVHGSKPMMDLLIFLCAQYHLNPSSYTIDLLSAEQNHIKFKPNTPIGMLEVEKVILKPKMLDKKKPTPIIPEKTVRVVINFKKTQKTIVRVSPHASLQELAPIICSKCEFDPLHTLLLKDYQSQEPLDLTKSLNDLGLRELYAMDVNRESCQISQNLDIMKEKENKGFFSFFQRSKKKRDQTASAPATPLVNKHRPTFTRSNTISKPYISNTLPSDAPKKRRAPLPPMPASQSVPQDLAHIQERPASCIVKSMSVDETDKSPCEAGRVRAGSLQLSSMSAGNSSLRRTKRKAPSPPSKIPPHQSDENSRVTALQPVDGVPPDSASEANSPEELSSPAGISSDYSLEEIDEKEELSEVPKVEAENISPKSQDIPFVSTDIINTLKNDPDSALGNGSGEFSQNSMEEKQETKSTDGQEPHSVVYDTSNGKKVVDSIRNLKSLGPNQENVVQNEIIVYPENTEDNMKNGVKKTEINVEGVAKNNNIDMEVERPSNSEAHETDTAISYKENHLAASSVPDQKLNQPSAEKTKDAAIQTTPSCNSFDGKHQDHNLSDSKVEECVQTSNNNISTQHSCLSSQDSVNTSREFRSQGTLIIHSEDPLTVKDPICAHGNDDLLPPVDRIDKNSTASYLKNYPLYRQDYNPKPKPSNEITREYIPKIGMTTYKIVPPKSLEISKDWQSETIEYKDDQDMHALGKKHTHENVKETAIQTEDSAISESPEEPLPNLKPKPNLRTEHQVPSSVSSPDDAMVSPLKPAPKMTRDTGTAPFAPNLEEINNILESKFKSRASNAQAKPSSFFLQMQKRVSGHYVTSAAAKSVHAAPNPAPKELTNKEAERDMLPSPEQTLSPLSKMPHSVPQPLVEKTDDDVIGQAPAEASPPPIAPKPVTIPASQVSTQNLKTLKTFGAPRPYSSSGPSPFALAVVKRSQSFSKERTESPSASALVQPPANTEEGKTHSVNKFVDIPQLGVSDKENNSAHNEQNSQIPTPTDGPSFTVMRQSSLTFQSSDPEQMRQSLLTAIRSGEAAAKLKRVTIPSNTISVNGRSRLSHSMSPDAQDGH

SEQ ID NO: 19866 - protein, 138 aa, Homo sapiens
  Payload ID: 3965
  Gene Symbol: COBLL1
  Gene Name: cordon-bleu WH2 repeat protein-like 1
  ENSP ID: ENSP00000387967
MDGRTPRPQDAPARRKPKAKAPLPPAETKYTDVSSAADSVESTAFIMEQKENMIDKDVELSVVLPGDIIKSTTVHGSKPMMDLLIFLCAQYHLNPSSYTIDLLSAEQNHIKFKPNTPIGMLEVEKVILKPKMLDKKKP

SEQ ID NO: 19867 - protein, 148 aa, Homo sapiens
  Payload ID: 3965
  Gene Symbol: COBLL1
  Gene Name: cordon-bleu WH2 repeat protein-like 1
  ENSP ID: ENSP00000388110
MPPSWSPLMCGRAAEAAASSRTPGREMGQAVTRRLGAGARAAPRRAMDGRTPRPQDAPARREIAGSWRKPKAKAPLPPAETKYTDVSSAADSVESTAFIMEQKENMIDKDVELSVVLPGDIIKSTTVHGSKPMMDLLIFLCAQYHLNP

SEQ ID NO: 19868 - protein, 226 aa, Homo sapiens
  Payload ID: 3965
  Gene Symbol: COBLL1
  Gene Name: cordon-bleu WH2 repeat protein-like 1
  ENSP ID: ENSP00000397520
MPPSWSPLMCGRAAEAAASSRTPGREMGQAVTRRLGAGARAAPRRAMDGRTPRPQDAPASKPMMDLLIFLCAQYHLNPSSYTIDLLSAEQNHIKFKPNTPIGMLEVEKVILKPKMLDKKKPTPIIPEKTVRVVINFKKTQKTIVRVSPHASLQELAPIICSKCEFDPLHTLLLKDYQSQEPLDLTKSLNDLGLRELYAMDVNRATSVTVFSKSSLQESCQISQNLD

SEQ ID NO: 19869 - protein, 163 aa, Homo sapiens
  Payload ID: 3965
  Gene Symbol: COBLL1
  Gene Name: cordon-bleu WH2 repeat protein-like 1
  ENSP ID: ENSP00000397835
MLETLVGKLKCCIGEESDSQKRKPKAKAPLPPAETKYTDVSSAADSVESTAFIMEQKENMIDKDVELSVVLPGDIIKSTTVHGSKPMMDLLIFLCAQYHLNPSSYTIDLLSAEQNHIKFKPNTPIGMLEVEKVILKPKMLDKKKPTPIIPEKTVRVVINFKKT

SEQ ID NO: 19870 - protein, 258 aa, Homo sapiens
  Payload ID: 3965
  Gene Symbol: COBLL1
  Gene Name: cordon-bleu WH2 repeat protein-like 1
  ENSP ID: ENSP00000400146
  MOD_RES (1)..(1): Any amino acid
XSARGTILFYGDFLEQLRKPKAKAPLPPAETKYTDVSSAADSVESTAFIMEQKENMIDKDVELSVVLPGDIIKSTTVHGSKPMMDLLIFLCAQYHLNPSSYTIDLLSAEQNHIKFKPNTPIGMLEVEKVILKPKMLDKKKPTPIIPEKTVRVVINFKKTQKTIVRVSPHASLQELAPIICSKCEFDPLHTLLLKDYQSQEPLDLTKSLNDLGLRELYAMDVNRESCQISQNLDIMKEKENKGFFSFFQRSKKKRDQTA

SEQ ID NO: 19871 - protein, 157 aa, Homo sapiens
  Payload ID: 3965
  Gene Symbol: COBLL1
  Gene Name: cordon-bleu WH2 repeat protein-like 1
  ENSP ID: ENSP00000406062
MDGRTPRPQDAPARRKPKAKAPLPPAETKYTDVSSAADSVESTAFIMEQKENMIDKDVELSVVLPGDIIKSTTVHGSKPMMDLLIFLCAQYHLNPSSYTIDLLSAEQNHIKFKPNTPIGMLEVEKVILKPKMLDKKKPTPIIPEKTVRVVINFKKTQ

SEQ ID NO: 19872 - protein, 170 aa, Homo sapiens
  Payload ID: 3965
  Gene Symbol: COBLL1
  Gene Name: cordon-bleu WH2 repeat protein-like 1
  ENSP ID: ENSP00000409237
MKKDLKEGPSLCGLCLEELKGDFLVERLRENIPAVRRKPKAKAPLPPAETKYTDVSSAADSVESTAFIMEQKENMIDKDVELSVVLPGDIIKSTTVHGSKPMMDLLIFLCAQYHLNPSSYTIDLLSAEQNHIKFKPNTPIGMLEVEKVILKPKMLDKKKPTPIIPEKTVR

SEQ ID NO: 19873 - protein, 424 aa, Homo sapiens
  Payload ID: 3965
  Gene Symbol: COBLL1
  Gene Name: cordon-bleu WH2 repeat protein-like 1
  ENSP ID: ENSP00000416311
MDGRTPRPQDAPARRKPKAKAPLPPAETKYTDVSSAADSVESTAFIMEQKENMIDKDVELSVVLPGDIIKSTTVHGSKPMMDLLIFLCAQYHLNPSSYTIDLLSAEQNHIKFKPNTPIGMLEVEKVILKPKMLDKKKPTPIIPEKTVRVVINFKKTQKTIVRVSPHASLQELAPIICSKCEFDPLHTLLLKDYQSQEPLDLTKSLNDLGLRELYAMDVNRATSVTVFSKSSLQESCQISQNLDIMKEKENKGFFSFFQRSKKKRDQTASAPATPLVNKHRPTFTRSNTISKPYISNTLPSDAPKKRRAPLPPMPASQSVPQDLAHIQERPASCIVKSMSVDETDKSPCEAGRVRAGSLQLSSMSAGNSSLRRTKRKAPSPPSKIPPHQSDENSRVTALQPVDGVPPDSASEANSPEELSSPGNI

SEQ ID NO: 19874 - protein, 1233 aa, Homo sapiens
  Payload ID: 3965
  Gene Symbol: COBLL1
  Gene Name: cordon-bleu WH2 repeat protein-like 1
  ENSP ID: ENSP00000487041
MPPSWSPLMCGRAAEAAASSRTPGREMGQAVTRRLGAGARAAPRRAMDGRTPRPQDAPARREIAGSWRKPKAKAPLPPAETKYTDVSSAADSVESTAFIMEQKENMIDKDVELSVVLPGDIIKSTTVHGSKPMMDLLIFLCAQYHLNPSSYTIDLLSAEQNHIKFKPNTPIGMLEVEKVILKPKMLDKKKPTPIIPEKTVRVVINFKKTQKTIVRVSPHASLQELAPIICSKCEFDPLHTLLLKDYQSQEPLDLTKSLNDLGLRELYAMDVNRATSVTVFSKSSLQESCQISQNLDIMKEKENKGFFSFFQRSKKKRDQTASAPATPLVNKHRPTFTRSNTISKPYISNTLPSDAPKKRRAPLPPMPASQSVPQDLAHIQERPASCIVKSMSVDETDKSPCEAGRVRAGSLQLSSMSAGNSSLRRTKRKAPSPPSKIPPHQSDENSRVTALQPVDGVPPDSASEANSPEELSSPETFHPGLSSQEQCTAPKLMEETSVFECPGTPEAAITSLTSGISSDYSLEEIDEKEELSEVPKVEAENISPKSQDIPFVSTDIINTLKNDPDSALGNGSGEFSQNSMEEKQETKSTDGQEPHSVVYDTSNGKKVVDSIRNLKSLGPNQENVVQNEIIVYPENTEDNMKNGVKKTEINVEGVAKNNNIDMEVERPSNSEAHETDTAISYKENHLAASSVPDQKLNQPSAEKTKDAAIQTTPSCNSFDGKHQDHNLSDSKVEECVQTSNNNISTQHSCLSSQDSVNTSREFRSQGTLIIHSEDPLTVKDPICAHGNDDLLPPVDRIDKNSTASYLKNYPLYRQDYNPKPKPSNEITREYIPKIGMTTYKIVPPKSLEISKDWQSETIEYKDDQDMHALGKKHTHENVKETAIQTEDSAISESPEEPLPNLKPKPNLRTEHQVPSSVSSPDDAMVSPLKPAPKMTRDTGTAPFAPNLEEINNILESKFKSRASNAQAKPSSFFLQMQKRVSGHYVTSAAAKSVHAAPNPAPKELTNKEAERDMLPSPEQTLSPLSKMPHSVPQPLVEKTDDDVIGQAPAEASPPPIAPKPVTIPASQVSTQNLKTLKTFGAPRPYSSSGPSPFALAVVKRSQSFSKERTESPSASALVQPPANTEEGKTHSVNKFVDIPQLGVSDKENNSAHNEQNSQIPTPTDGPSFTVMRQSSLTFQSSDPEQMRQSLLTAIRSGEAAAKLKRVTIPSNTISVNGRSRLSHSMSPDAQDGH

SEQ ID NO: 19875 - protein, 363 aa, Homo sapiens
  Payload ID: 3966
  Gene Symbol: C1GALT1
  Gene Name: core 1 synthase, glycoprotein-N-acetylgalactosamine 3-beta-galactosyltransferase 1
  Uniprot ID: Q9NS00
  ENSP ID: ENSP00000223122
MASKSWLNFLTFLCGSAIGFLLCSQLFSILLGEKVDTQPNVLHNDPHARHSDDNGQNHLEGQMNFNADSSQHKDENTDIAENLYQKVRILCWVMTGPQNLEKKAKHVKATWAQRCNKVLFMSSEENKDFPAVGLKTKEGRDQLYWKTIKAFQYVHEHYLEDADWFLKADDDTYVILDNLRWLLSKYDPEEPIYFGRRFKPYVKQGYMSGGAGYVLSKEALKRFVDAFKTDKCTHSSSIEDLALGRCMEIMNVEAGDSRDTIGKETFHPFVPEHHLIKGYLPRTFWYWNYNYYPPVEGPGCCSDLAVSFHYVDSTTMYELEYLVYHLRPYGYLYRYQPTLPERILKEISQANKNEDTKVKLGNP

SEQ ID NO: 19876 - protein, 309 aa, Homo sapiens
  Payload ID: 3966
  Gene Symbol: C1GALT1
  Gene Name: core 1 synthase, glycoprotein-N-acetylgalactosamine 3-beta-galactosyltransferase 1
  Uniprot ID: Q9NS00
  ENSP ID: ENSP00000384550
MASKSWLNFLTFLCGSAIGFLLCSQLFSILLGEKVDTQPNVLHNDPHARHSDDNGQNHLEGQMNFNADSSQHKDENTDIAENLYQKVRILCWVMTGPQNLEKKAKHVKATWAQRCNKVLFMSSEENKDFPAVGLKTKEGRDQLYWKTIKAFQYVHEHYLEDADWFLKADDDTYVILDNLRWLLSKYDPEEPIYFGRRFKPYVKQGYMSGGAGYVLSKEALKRFVDAFKTDKCTHSSSIEDLALGRCMEIMNVEAGDSRDTIGKETFHPFVPEHHLIKGYLPRTFWYWNYNYYPPVEVSLEILLLCQYLD

SEQ ID NO: 19877 - protein, 363 aa, Homo sapiens; identical to SEQ ID NO: 19875
  Payload ID: 3966
  Gene Symbol: C1GALT1
  Gene Name: core 1 synthase, glycoprotein-N-acetylgalactosamine 3-beta-galactosyltransferase 1
  Uniprot ID: Q9NS00
  ENSP ID: ENSP00000389176

SEQ ID NO: 19878 - protein, 131 aa, Homo sapiens
  Payload ID: 3966
  Gene Symbol: C1GALT1
  Gene Name: core 1 synthase, glycoprotein-N-acetylgalactosamine 3-beta-galactosyltransferase 1
  ENSP ID: ENSP00000407666
MASKSWLNFLTFLCGSAIGFLLCSQLFSILLGEKVDTQPNVLHNDPHARHSDDNGQNHLEGQMNFNADSSQHKDENTDIAENLYQKVRILCWVMTGPQNLEKKAKHVKATWAQRCNKVLFMSSEENKDFPA

SEQ ID NO: 19879 - protein, 100 aa, Homo sapiens
  Payload ID: 3966
  Gene Symbol: C1GALT1
  Gene Name: core 1 synthase, glycoprotein-N-acetylgalactosamine 3-beta-galactosyltransferase 1
  ENSP ID: ENSP00000415400
MASKSWLNFLTFLCGSAIGFLLCSQLFSILLGEKVDTQPNVLHNDPHARHSDDNGQNHLEGQMNFNADSSQHKDENTDIAENLYQKVRILCWVMTGPQNL

SEQ ID NO: 19880 - protein, 182 aa, Homo sapiens
  Payload ID: 3967
  Gene Symbol: CBFB
  Gene Name: core-binding factor, beta subunit
  Uniprot ID: Q13951
  ENSP ID: ENSP00000290858
MPRVVPDQRSKFENEEFFRKLSRECEIKYTGFRDRPHEERQARFQNACRDGRSEIAFVATGTNLSLQFFPASWQGEQRQTPSREYVDLEREAGKVYLKAPMILNGVCVIWKGWIDLQRLDGMGCLEFDEERAQQEDALAQQAFEEARRRTREFEDRDRSHREEMEVRVSQLLAVTGKKTTRP

SEQ ID NO: 19881 - protein, 187 aa, Homo sapiens
  Payload ID: 3967
  Gene Symbol: CBFB
  Gene Name: core-binding factor, beta subunit
  Uniprot ID: Q13951
  ENSP ID: ENSP00000415151
MPRVVPDQRSKFENEEFFRKLSRECEIKYTGFRDRPHEERQARFQNACRDGRSEIAFVATGTNLSLQFFPASWQGEQRQTPSREYVDLEREAGKVYLKAPMILNGVCVIWKGWIDLQRLDGMGCLEFDEERAQQEDALAQQAFEEARRRTREFEDRDRSHREEMEARRQQDPSPGSNLGGGDDLKLR

SEQ ID NO: 19882 - protein, 93 aa, Homo sapiens
  Payload ID: 3967
  Gene Symbol: CBFB
  Gene Name: core-binding factor, beta subunit
  ENSP ID: ENSP00000456637
MPRVVPDQRSKFENEEFFRKLSRECEIKYTGFRDRPHEERQARFQNACRDGRSEIVYLKAPMILNGVCVIWKGWIDLQRLDGMGCLEFDEERA

SEQ ID NO: 19883 - protein, 61 aa, Homo sapiens
  Payload ID: 3967
  Gene Symbol: CBFB
  Gene Name: core-binding factor, beta subunit
  ENSP ID: ENSP00000462148
MILNGVCVIWKGWIDLQRLDGMGCLEFDEERAQQEDALAQQAFEEARRRTREFEDRDRSHR

SEQ ID NO: 19884 - protein, 82 aa, Homo sapiens
  Payload ID: 3967
  Gene Symbol: CBFB
  Gene Name: core-binding factor, beta subunit
  ENSP ID: ENSP00000462273
MILNGVCVIWKGWIDLQRLDGMGCLEFDEERAQQEDALAQQAFEEARRRTREFEDRDRSHREEMEVRVSQLLAVTGKKTTRP

SEQ ID NO: 19885 - protein, 60 aa, Homo sapiens
  Payload ID: 3967
  Gene Symbol: CBFB
  Gene Name: core-binding factor, beta subunit
  ENSP ID: ENSP00000462932
  MOD_RES (1)..(1): Any amino acid
XRKLSRECEIKYTGFRDRPHEERQARFQNACRDGRSEIARRQQDPSPGSNLGGGDDLKLR

SEQ ID NO: 19886 - protein, 604 aa, Homo sapiens
  Payload ID: 3968
  Gene Symbol: CBFA2T2
  Gene Name: core-binding factor, runt domain, alpha subunit 2
  translocated to, 2
  Uniprot ID: O43439
  ENSP ID: ENSP00000262653
MAKESGISLKEIQVLARQWKVGPEKRVPAMPGSPVEVKIQSRSSPPTMPPLPPINPGGPRPVSFTPTALSNGINHSPPTLNGAPSPPQRFSNGPASSTSSALTNQQLPATCGARQLSKLKRFLTTLQQFGNDISPEIGEKVRTLVLALVNSTVTIEEFHCKLQEATNFPLRPFVIPFLKANLPLLQRELLHCARAAKQTPSQYLAQHEHLLLNTSIASPADSSELLMEVHGNGKRPSPERREENSFDRDTIAPEPPAKRVCTISPAPRHSPALTVPLMNPGGQFHPTPPPLQHYTLEDIATSHLYREPNKMLEHREVRDRHHSLGLNGGYQDELVDHRLTEREWADEWKHLDHALNCIMEMVEKTRRSMAVLRRCQESDREELNYWKRRYNENTELRKTGTELVSRQHSPGSADSLSNDSQREFNSRPGTGYVPVEFWKKTEEAVNKVKIQAMSEVQKAVAEAEQKAFEVIATERARMEQTIADVKRQAAEDAFLVINEQEESTENCWNCGRKASETCSGCNIARYCGSFCQHKDWERHHRLCGQNLHGQSPHGQGRPLLPVGRGSSARSADCSVPSPALDKTSATTSRSSTPASVTAIDTNGL

SEQ ID NO: 19887 - protein, 263 aa, Homo sapiens
  Payload ID: 3968
  Gene Symbol: CBFA2T2
  Gene Name: core-binding factor, runt domain, alpha subunit 2
  translocated to, 2
  Uniprot ID: O43439
  ENSP ID: ENSP00000341865
MPGSPVEVKIQSRSSPPTMPPLPPINPGGPRPVSFTPTALSNGINHSPPTLNGAPSPPQRFSNGPASSTSSALTNQQLPATCGARQLSKLKRFLTTLQQFGNDISPEIGEKVRTLVLALVNSTVTIEEFHCKLQEATNFPLRPFVIPFLKANLPLLQRELLHCARAAKQTPSQYLAQHEHLLLNTSIASPADSSELLMEVHGNGKRPSPESCIIHLKSMGVASRHEYFSGTLQMPAHPVRNSTLENLWVDCSRSLRSTVLPFP

SEQ ID NO: 19888 - protein, 595 aa, Homo sapiens
  Payload ID: 3968
  Gene Symbol: CBFA2T2
  Gene Name: core-binding factor, runt domain, alpha subunit 2
  translocated to, 2
  Uniprot ID: O43439
  ENSP ID: ENSP00000345810
MVGVPGAAAFQLGPEKRVPAMPGSPVEVKIQSRSSPPTMPPLPPINPGGPRPVSFTPTALSNGINHSPPTLNGAPSPPQRFSNGPASSTSSALTNQQLPATCGARQLSKLKRFLTTLQQFGNDISPEIGEKVRTLVLALVNSTVTIEEFHCKLQEATNFPLRPFVIPFLKANLPLLQRELLHCARAAKQTPSQYLAQHEHLLLNTSIASPADSSELLMEVHGNGKRPSPERREENSFDRDTIAPEPPAKRVCTISPAPRHSPALTVPLMNPGGQFHPTPPPLQHYTLEDIATSHLYREPNKMLEHREVRDRHHSLGLNGGYQDELVDHRLTEREWADEWKHLDHALNCIMEMVEKTRRSMAVLRRCQESDREELNYWKRRYNENTELRKTGTELVSRQHSPGSADSLSNDSQREFNSRPGTGYVPVEFWKKTEEAVNKVKIQAMSEVQKAVAEAEQKAFEVIATERARMEQTIADVKRQAAEDAFLVINEQEESTENCWNCGRKASETCSGCNIARYCGSFCQHKDWERHHRLCGQNLHGQSPHGQGRPLLPVGRGSSARSADCSVPSPALDKTSATTSRSSTPASVTAIDTNGL

SEQ ID NO: 19889 - protein, 614 aa, Homo sapiens
  Payload ID: 3968
  Gene Symbol: CBFA2T2
  Gene Name: core-binding factor, runt domain, alpha subunit 2
  translocated to, 2
  Uniprot ID: O43439
  ENSP ID: ENSP00000352622
MGFHHVGQARLELLTSGDLPALASQRAGITVGPEKRVPAMPGSPVEVKIQSRSSPPTMPPLPPINPGGPRPVSFTPTALSNGINHSPPTLNGAPSPPQRFSNGPASSTSSALTNQQLPATCGARQLSKLKRFLTTLQQFGNDISPEIGEKVRTLVLALVNSTVTIEEFHCKLQEATNFPLRPFVIPFLKANLPLLQRELLHCARAAKQTPSQYLAQHEHLLLNTSIASPADSSELLMEVHGNGKRPSPERREENSFDRDTIAPEPPAKRVCTISPAPRHSPALTVPLMNPGGQFHPTPPPLQHYTLEDIATSHLYREPNKMLEHREVRDRHHSLGLNGGYQDELVDHRLTEREWADEWKHLDHALNCIMEMVEKTRRSMAVLRRCQESDREELNYWKRRYNENTELRKTGTELVSRQHSPGSADSLSNDSQREFNSRPGTGYVPVEFWKKTEEAVNKVKIQAMSEVQKAVAEAEQKAFEVIATERARMEQTIADVKRQAAEDAFLVINEQEESTENCWNCGRKASETCSGCNIARYCGSFCQHKDWERHHRLCGQNLHGQSPHGQGRPLLPVGRGSSARSADCSVPSPALDKTSATTSRSSTPASVTAIDTNGL

SEQ ID NO: 19890 - protein, 604 aa, Homo sapiens; identical to SEQ ID NO: 19886
  Payload ID: 3968
  Gene Symbol: CBFA2T2
  Gene Name: core-binding factor, runt domain, alpha subunit 2
  translocated to, 2
  Uniprot ID: O43439
  ENSP ID: ENSP00000364428

SEQ ID NO: 19891 - protein, 575 aa, Homo sapiens
  Payload ID: 3968
  Gene Symbol: CBFA2T2
  Gene Name: core-binding factor, runt domain, alpha subunit 2
  translocated to, 2
  Uniprot ID: O43439
  ENSP ID: ENSP00000380902
MPGSPVEVKIQSRSSPPTMPPLPPINPGGPRPVSFTPTALSNGINHSPPTLNGAPSPPQRFSNGPASSTSSALTNQQLPATCGARQLSKLKRFLTTLQQFGNDISPEIGEKVRTLVLALVNSTVTIEEFHCKLQEATNFPLRPFVIPFLKANLPLLQRELLHCARAAKQTPSQYLAQHEHLLLNTSIASPADSSELLMEVHGNGKRPSPERREENSFDRDTIAPEPPAKRVCTISPAPRHSPALTVPLMNPGGQFHPTPPPLQHYTLEDIATSHLYREPNKMLEHREVRDRHHSLGLNGGYQDELVDHRLTEREWADEWKHLDHALNCIMEMVEKTRRSMAVLRRCQESDREELNYWKRRYNENTELRKTGTELVSRQHSPGSADSLSNDSQREFNSRPGTGYVPVEFWKKTEEAVNKVKIQAMSEVQKAVAEAEQKAFEVIATERARMEQTIADVKRQAAEDAFLVINEQEESTENCWNCGRKASETCSGCNIARYCGSFCQHKDWERHHRLCGQNLHGQSPHGQGRPLLPVGRGSSARSADCSVPSPALDKTSATTSRSSTPASVTAIDTNGL

SEQ ID NO: 19892 - protein, 575 aa, Homo sapiens; identical to SEQ ID NO: 19891
  Payload ID: 3968
  Gene Symbol: CBFA2T2
  Gene Name: core-binding factor, runt domain, alpha subunit 2
  translocated to, 2
  Uniprot ID: O43439
  ENSP ID: ENSP00000433270

SEQ ID NO: 19893 - protein, 152 aa, Homo sapiens
  Payload ID: 3968
  Gene Symbol: CBFA2T2
  Gene Name: core-binding factor, runt domain, alpha subunit 2
  translocated to, 2
  ENSP ID: ENSP00000443398
MSEVQKAVAEAEQKAFEVIATERARMEQTIADVKRQAAEDAFLVINEQEESTENCWNCGRKASETCSGCNIARYCGSFCQHKDWERHHRLCGQNLHGQSPHGQGRPLLPVGRGSSARSADCSVPSPALDKTSATTSRSSTPASVTAIDTNGL

SEQ ID NO: 19894 - protein, 653 aa, Homo sapiens
  Payload ID: 3969
  Gene Symbol: CBFA2T3
  Gene Name: core-binding factor, runt domain, alpha subunit 2
  translocated to, 3
  Uniprot ID: O75081
  ENSP ID: ENSP00000268679
MPASRLRDRAASSASGSTCGSMSQTHPVLESGLLASAGCSAPRGPRKGGPAPVDRKAKASAMPDSPAEVKTQPRSTPPSMPPPPPAASQGATRPPSFTPHTHREDGPATLPHGRFHGCLKWSMVCLLMNGSSHSPTAINGAPCTPNGFSNGPATSSTASLSTQHLPPACGARQLSKLKRFLTTLQQFGSDISPEIGERVRTLVLGLVNSTLTIEEFHSKLQEATNFPLRPFVIPFLKANLPLLQRELLHCARLAKQTPAQYLAQHEQLLLDASASSPIDSSELLLEVNENGKRRTPDRTKENGSDRDPLHPEHLSKRPCTLNPAQRYSPSNGPPQPTPPPHYRLEDIAMAHHFRDAYRHPDPRELRERHRPLVVPGSRQEEVIDHKLTEREWAEEWKHLNNLLNCIMDMVEKTRRSLTVLRRCQEADREELNHWARRYSDAEDTKKGPAPAAARPRSSSAGPEGPQLDVPREFLPRTLTGYVPEDIWRKAEEAVNEVKRQAMSELQKAVSDAERKAHELITTERAKMERALAEAKRQASEDALTVINQQEDSSESCWNCGRKASETCSGCNAARYCGSFCQHRDWEKHHHVCGQSLQGPTAVVADPVPGPPEAAHSLGPSLPVGAASPSEAGSAGPSRPGSPSPPGPLDTVPR

SEQ ID NO: 19895 - protein, 567 aa, Homo sapiens
  Payload ID: 3969
  Gene Symbol: CBFA2T3
  Gene Name: core-binding factor, runt domain, alpha subunit 2
  translocated to, 3
  Uniprot ID: O75081
  ENSP ID: ENSP00000332122
MPDSPAEVKTQPRSTPPSMPPPPPAASQGATRPPSFTPHTLMNGSSHSPTAINGAPCTPNGFSNGPATSSTASLSTQHLPPACGARQLSKLKRFLTTLQQFGSDISPEIGERVRTLVLGLVNSTLTIEEFHSKLQEATNFPLRPFVIPFLKANLPLLQRELLHCARLAKQTPAQYLAQHEQLLLDASASSPIDSSELLLEVNENGKRRTPDRTKENGSDRDPLHPEHLSKRPCTLNPAQRYSPSNGPPQPTPPPHYRLEDIAMAHHFRDAYRHPDPRELRERHRPLVVPGSRQEEVIDHKLTEREWAEEWKHLNNLLNCIMDMVEKTRRSLTVLRRCQEADREELNHWARRYSDAEDTKKGPAPAAARPRSSSAGPEGPQLDVPREFLPRTLTGYVPEDIWRKAEEAVNEVKRQAMSELQKAVSDAERKAHELITTERAKMERALAEAKRQASEDALTVINQQEDSSESCWNCGRKASETCSGCNAARYCGSFCQHRDWEKHHHVCGQSLQGPTAVVADPVPGPPEAAHSLGPSLPVGAASPSEAGSAGPSRPGSPSPPGPLDTVPR

SEQ ID NO: 19896 - protein, 62 aa, Homo sapiens
  Payload ID: 3969
  Gene Symbol: CBFA2T3
  Gene Name: core-binding factor, runt domain, alpha subunit 2
  translocated to, 3
  ENSP ID: ENSP00000454609
MPDSPAEVKTQPRSTPPSMPPPPPAASQGATRPPSFTPHTHREDGPATLPHGRFHGCLKWSM

SEQ ID NO: 19897 - protein, 418 aa, Homo sapiens
  Payload ID: 3969
  Gene Symbol: CBFA2T3
  Gene Name: core-binding factor, runt domain, alpha subunit 2
  translocated to, 3
  ENSP ID: ENSP00000454851
MPDSPAEVKTQPRSTPPSMPPPPPAASQGATRPPSFTPHTHREDGPATLPHGRFHGCLKWSMVCLLMNGSSHSPTAINGAPCTPNGFSNGPATSSTASLSTQHLPPACGARQLSKLKRFLTTLQQFGSDISPEIGERVRTLVLGLVNSTLTIEEFHSKLQEATNFPLRPFVIPFLKANLPLLQRELLHCARLAKQTPAQYLAQHEQLLLDASASSPIDSSELLLEVNENGKRRTPDRTKENGSDRDPLHPEHLSKRPCTLNPAQRYSPSNGPPQPTPPPHYRLEDIAMAHHFRDAYRHPDPRELRERHRPLVVPGSRQEEVIDHKLTEREWAEEWKHLNNLLNCIMDMVEKTRRSLTVLRRCQEADREELNHWARRYSDAEDTKKGPAPAAARPRSSSAGPEGPQLGKHGLVCQEAWS

SEQ ID NO: 19898 - protein, 130 aa, Homo sapiens
  Payload ID: 3969
  Gene Symbol: CBFA2T3
  Gene Name: core-binding factor, runt domain, alpha subunit 2
  translocated to, 3
  ENSP ID: ENSP00000454872
MPASRLRDRAASSASGSTCGSMSQTHPVLESGLLASAGCSAPRGPRKGGPAPVDRKAKASAMPDSPAEVKTQPRSTPPSMPPPPPAASQGATRPPSFTPHTLMNGSSHSPTAINGAPCTPNGFSNGPATS

SEQ ID NO: 19899 - protein, 22 aa, Homo sapiens
  Payload ID: 3969
  Gene Symbol: CBFA2T3
  Gene Name: core-binding factor, runt domain, alpha subunit 2
  translocated to, 3
  ENSP ID: ENSP00000456102
MPDSPAEVKTQPRSTPPSMPPP

SEQ ID NO: 19900 - protein, 132 aa, Homo sapiens
  Payload ID: 3969
  Gene Symbol: CBFA2T3
  Gene Name: core-binding factor, runt domain, alpha subunit 2
  translocated to, 3
  ENSP ID: ENSP00000456717
MPDSPAEVKTQPRSTPPSMPPPPPAASQGATRPPSFTPHTHREDGPATLPHGRFHGCLKWSMVCLLMNGSSHSPTAINGAPCTPNGFSNGPATSSTASLSTQHLPPACGARQLSKLKRFLTTLQQFGSDISP

SEQ ID NO: 19901 - protein, 121 aa, Homo sapiens
  Payload ID: 3969
  Gene Symbol: CBFA2T3
  Gene Name: core-binding factor, runt domain, alpha subunit 2
  translocated to, 3
  ENSP ID: ENSP00000457410
MPDSPAEVKTQPRSTPPSMPPPPPAASQGATRPPSFTPHTLMNGSSHSPTAINGAPCTPNGFSNGPATSSTASLSTQHLPPACGARQLSKLKRFLTTLQQFGSDISPEIGERVRTLVLGLV

SEQ ID NO: 19902 - protein, 34 aa, Homo sapiens
  Payload ID: 3969
  Gene Symbol: CBFA2T3
  Gene Name: core-binding factor, runt domain, alpha subunit 2
  translocated to, 3
  ENSP ID: ENSP00000464125
  MOD_RES (1)..(1): Any amino acid
XGPEGPQLGKHGLVCQEAWSSERLVGQRLGAGRP

SEQ ID NO: 19903 - protein, 450 aa, Homo sapiens
  Payload ID: 3970
  Gene Symbol: CIR1
  Gene Name: corepressor interacting with RBPJ, 1
  Uniprot ID: Q86X95
  ENSP ID: ENSP00000339723
MGKSFANFMCKKDFHPASKSNIKKVWMAEQKISYDKKKQEELMQQYLKEQESYDNRLLMGDERVKNGLNFMYEAPPGAKKENKEKEETEGETEYKFEWQKGAPREKYAKDDMNIRDQPFGIQVRNVRCIKCHKWGHVNTDRECPLFGLSGINASSVPTDGSGPSMHPSELIAEMRNSGFALKRNVLGRNLTANDPSQEYVASEGEEDPEVEFLKSLTTKQKQKLLRKLDRLEKKKKKKDRKKKKFQKSRSKHKKHKSSSSSSSSSSSSSSTETSESSSESESNNKEKKIQRKKRKKNKCSGHNNSDSEEKDKSKKRKLHEELSSSHHNREKAKEKPRFLKHESSREDSKWSHSDSDKKSRTHKHSPEKRGSERKEGSSRSHGREERSRRSRSRSPGSYKQRETRKRAQRNPGEEQSRRNDSRSHGTDLYRGEKMYREHPGGTHTKVTQRE

SEQ ID NO: 19904 - protein, 96 aa, Homo sapiens
  Payload ID: 3970
  Gene Symbol: CIR1
  Gene Name: corepressor interacting with RBPJ, 1
  ENSP ID: ENSP00000367211
  MOD_RES (1)..(1): Any amino acid
XEWQKGAPREKYAKDDMNIRDQPFGIQVRNVRCIKCHKWGHVNTDRECPLFGLSGINASSVPTDGSGRAQWLTPVIPALWEAKAGGSFEVRSSRPA

SEQ ID NO: 19905 - protein, 1042 aa, Homo sapiens
  Payload ID: 3971
  Gene Symbol: CORIN
  Gene Name: corin, serine peptidase
  Uniprot ID: Q9Y5Q5
  ENSP ID: ENSP00000273857
MKQSPALAPEERCRRAGSPKPVLRADDNNMGNGCSQKLATANLLRFLLLVLIPCICALVLLLVILLSYVGTLQKVYFKSNGSEPLVTDGEIQGSDVILTNTIYNQSTVVSTAHPDQHVPAWTTDASLPGDQSHRNTSACMNITHSQCQMLPYHATLTPLLSVVRNMEMEKFLKFFTYLHRLSCYQHIMLFGCTLAFPECIIDGDDSHGLLPCRSFCEAAKEGCESVLGMVNYSWPDFLRCSQFRNQTESSNVSRICFSPQQENGKQLLCGRGENFLCASGICIPGKLQCNGYNDCDDWSDEAHCNCSENLFHCHTGKCLNYSLVCDGYDDCGDLSDEQNCDCNPTTEHRCGDGRCIAMEWVCDGDHDCVDKSDEVNCSCHSQGLVECRNGQCIPSTFQCDGDEDCKDGSDEENCSVIQTSCQEGDQRCLYNPCLDSCGGSSLCDPNNSLNNCSQCEPITLELCMNLPYNSTSYPNYFGHRTQKEASISWESSLFPALVQTNCYKYLMFFSCTILVPKCDVNTGEHIPPCRALCEHSKERCESVLGIVGLQWPEDTDCSQFPEENSDNQTCLMPDEYVEECSPSHFKCRSGQCVLASRRCDGQADCDDDSDEENCGCKERDLWECPSNKQCLKHTVICDGFPDCPDYMDEKNCSFCQDDELECANHACVSRDLWCDGEADCSDSSDEWDCVTLSINVNSSSFLMVHRAATEHHVCADGWQEILSQLACKQMGLGEPSVTKLIQEQEKEPRWLTLHSNWESLNGTTLHELLVNGQSCESRSKISLLCTKQDCGRRPAARMNKRILGGRTSRPGRWPWQCSLQSEPSGHICGCVLIAKKWVLTVAHCFEGRENAAVWKVVLGINNLDHPSVFMQTRFVKTIILHPRYSRAVVDYDISIVELSEDISETGYVRPVCLPNPEQWLEPDTYCYITGWGHMGNKMPFKLQEGEVRIISLEHCQSYFDMKTITTRMICAGYESGTVDSCMGDSGGPLVCEKPGGRWTLFGLTSWGSVCFSKVLGPGVYSNVSYFVEWIKRQIYIQTFLLN

SEQ ID NO: 19906 - protein, 734 aa, Homo sapiens
  Payload ID: 3971
  Gene Symbol: CORIN
  Gene Name: corin, serine peptidase
  ENSP ID: ENSP00000423216
MKQSPALAPEERCRRAGSPKPVLRADDNNMGNGCSQKLATANLLRFLLLVLIPCICALVLLLVILLSYVGTLQKVYFKSNGSEPLVTDGEIQGSDVILTNTIYNQSTVVSTAHPDQHVPAWTTDASLPGDQSHRNTSACMNITHSQCQMLPYHATLTPLLSVVRNMEMEKFLKFFTYLHRLSCYQHIMLFGCTLAFPECIIDGDDSHGLLPCRSFCEAAKEGCESVLGMVNYSWPDFLRCSQFRNQTESSNVSRICFSPQQENGKQLLCGRGENFLCASGICIPGKLQCNGYNDCDDWSDEAHCNCSENLFHCHTGKCLNYSLVCDGYDDCGDLSDEQNCACHSQGLVECRNGQCIPSTFQCDGDEDCKDGSDEENCSVIQTSCQEGDQRCLYNPCLDSCGGSSLCDPNNSLNNCSQCEPITLELCMNLPYNSTSYPNYFGHRTQKEASISWESSLFPALVQTNCYKYLMFFSCTILVPKCDVNTGEHIPPCRALCEHSKERCESVLGIVGLQWPEDTDCSQFPEENSDNQTCLMPDEYVEECSPSHFKCRSGQCVLASRRCDGQADCDDDSDEENCGCKERDLWECPSNKQCLKHTVICDGFPDCPDYMDEKNCSFCQDDELECANHACVSRDLWCDGEADCSDSSDEWDCGELLVSAICCTLSCLSATEAEWILNYFLDFTDQVHLFCFTVIKADSADLCVLFPTHRKFPHEATSLFEISILYGKTFGFKML

SEQ ID NO: 19907 - protein, 975 aa, Homo sapiens
  Payload ID: 3971
  Gene Symbol: CORIN
  Gene Name: corin, serine peptidase
  ENSP ID: ENSP00000424212
MKQSPALAPEERCRRAGSPKPVLRADDNNMGNGCSQKLATANLLRFLLLVLIPCICALVLLLVILLSYVGACMNITHSQCQMLPYHATLTPLLSVVRNMEMEKFLKFFTYLHRLSCYQHIMLFGCTLAFPECIIDGDDSHGLLPCRSFCEAAKEGCESVLGMVNYSWPDFLRCSQFRNQTESSNVSRICFSPQQENGKQLLCGRGENFLCASGICIPGKLQCNGYNDCDDWSDEAHCNCSENLFHCHTGKCLNYSLVCDGYDDCGDLSDEQNCDCNPTTEHRCGDGRCIAMEWVCDGDHDCVDKSDEVNCSCHSQGLVECRNGQCIPSTFQCDGDEDCKDGSDEENCSVIQTSCQEGDQRCLYNPCLDSCGGSSLCDPNNSLNNCSQCEPITLELCMNLPYNSTSYPNYFGHRTQKEASISWESSLFPALVQTNCYKYLMFFSCTILVPKCDVNTGEHIPPCRALCEHSKERCESVLGIVGLQWPEDTDCSQFPEENSDNQTCLMPDEYVEECSPSHFKCRSGQCVLASRRCDGQADCDDDSDEENCGCKERDLWECPSNKQCLKHTVICDGFPDCPDYMDEKNCSFCQDDELECANHACVSRDLWCDGEADCSDSSDEWDCVTLSINVNSSSFLMVHRAATEHHVCADGWQEILSQLACKQMGLGEPSVTKLIQEQEKEPRWLTLHSNWESLNGTTLHELLVNGQSCESRSKISLLCTKQDCGRRPAARMNKRILGGRTSRPGRWPWQCSLQSEPSGHICGCVLIAKKWVLTVAHCFEGRENAAVWKVVLGINNLDHPSVFMQTRFVKTIILHPRYSRAVVDYDISIVELSEDISETGYVRPVCLPNPEQWLEPDTYCYITGWGHMGNKMPFKLQEGEVRIISLEHCQSYFDMKTITTRMICAGYESGTVDSCMGDSGGPLVCEKPGGRWTLFGLTSWGSVCFSKVLGPGVYSNVSYFVEWIKRQIYIQTFLLN

SEQ ID NO: 19908 - protein, 1005 aa, Homo sapiens
  Payload ID: 3971
  Gene Symbol: CORIN
  Gene Name: corin, serine peptidase
  ENSP ID: ENSP00000425401
MKQSPALAPEERCRRAGSPKPVLRADDNNMGNGCSQKLATANLLRFLLLVLIPCICALVLLLVILLSYVGTLQKVYFKSNGSEPLVTDGEIQGSDVILTNTIYNQSTVVSTAHPDQHVPAWTTDASLPGDQSHRNTSACMNITHSQCQMLPYHATLTPLLSVVRNMEMEKFLKFFTYLHRLSCYQHIMLFGCTLAFPECIIDGDDSHGLLPCRSFCEAAKEGCESVLGMVNYSWPDFLRCSQFRNQTESSNVSRICFSPQQENGKQLLCGRGENFLCASGICIPGKLQCNGYNDCDDWSDEAHCNCSENLFHCHTGKCLNYSLVCDGYDDCGDLSDEQNCACHSQGLVECRNGQCIPSTFQCDGDEDCKDGSDEENCSVIQTSCQEGDQRCLYNPCLDSCGGSSLCDPNNSLNNCSQCEPITLELCMNLPYNSTSYPNYFGHRTQKEASISWESSLFPALVQTNCYKYLMFFSCTILVPKCDVNTGEHIPPCRALCEHSKERCESVLGIVGLQWPEDTDCSQFPEENSDNQTCLMPDEYVEECSPSHFKCRSGQCVLASRRCDGQADCDDDSDEENCGCKERDLWECPSNKQCLKHTVICDGFPDCPDYMDEKNCSFCQDDELECANHACVSRDLWCDGEADCSDSSDEWDCVTLSINVNSSSFLMVHRAATEHHVCADGWQEILSQLACKQMGLGEPSVTKLIQEQEKEPRWLTLHSNWESLNGTTLHELLVNGQSCESRSKISLLCTKQDCGRRPAARMNKRILGGRTSRPGRWPWQCSLQSEPSGHICGCVLIAKKWVLTVAHCFEGRENAAVWKVVLGINNLDHPSVFMQTRFVKTIILHPRYSRAVVDYDISIVELSEDISETGYVRPVCLPNPEQWLEPDTYCYITGWGHMGNKMPFKLQEGEVRIISLEHCQSYFDMKTITTRMICAGYESGTVDSCMGDSGGPLVCEKPGGRWTLFGLTSWGSVCFSKVLGPGVYSNVSYFVEWIKRQIYIQTFLLN

SEQ ID NO: 19909 - protein, 903 aa, Homo sapiens
  Payload ID: 3971
  Gene Symbol: CORIN
  Gene Name: corin, serine peptidase
  ENSP ID: ENSP00000425597
MNITHSQCQMLPYHATLTPLLSVVRNMEMEKFLKFFTYLHRLSCYQHIMLFGCTLAFPECIIDGDDSHGLLPCRSFCEAAKEGCESVLGMVNYSWPDFLRCSQFRNQTESSNVSRICFSPQQENGKQLLCGRGENFLCASGICIPGKLQCNGYNDCDDWSDEAHCNCSENLFHCHTGKCLNYSLVCDGYDDCGDLSDEQNCDCNPTTEHRCGDGRCIAMEWVCDGDHDCVDKSDEVNCSCHSQGLVECRNGQCIPSTFQCDGDEDCKDGSDEENCSVIQTSCQEGDQRCLYNPCLDSCGGSSLCDPNNSLNNCSQCEPITLELCMNLPYNSTSYPNYFGHRTQKEASISWESSLFPALVQTNCYKYLMFFSCTILVPKCDVNTGEHIPPCRALCEHSKERCESVLGIVGLQWPEDTDCSQFPEENSDNQTCLMPDEYVEECSPSHFKCRSGQCVLASRRCDGQADCDDDSDEENCGCKERDLWECPSNKQCLKHTVICDGFPDCPDYMDEKNCSFCQDDELECANHACVSRDLWCDGEADCSDSSDEWDCVTLSINVNSSSFLMVHRAATEHHVCADGWQEILSQLACKQMGLGEPSVTKLIQEQEKEPRWLTLHSNWESLNGTTLHELLVNGQSCESRSKISLLCTKQDCGRRPAARMNKRILGGRTSRPGRWPWQCSLQSEPSGHICGCVLIAKKWVLTVAHCFEGRENAAVWKVVLGINNLDHPSVFMQTRFVKTIILHPRYSRAVVDYDISIVELSEDISETGYVRPVCLPNPEQWLEPDTYCYITGWGHMGNKMPFKLQEGEVRIISLEHCQSYFDMKTITTRMICAGYESGTVDSCMGDSGGPLVCEKPGGRWTLFGLTSWGSVCFSKVLGPGVYSNVSYFVEWIKRQIYIQTFLLN

SEQ ID NO: 19910 - protein, 938 aa, Homo sapiens
  Payload ID: 3971
  Gene Symbol: CORIN
  Gene Name: corin, serine peptidase
  ENSP ID: ENSP00000484087
MKQSPALAPEERCRRAGSPKPVLRADDNNMGNGCSQKLATANLLRFLLLVLIPCICALVLLLVILLSYVGACMNITHSQCQMLPYHATLTPLLSVVRNMEMEKFLKFFTYLHRLSCYQHIMLFGCTLAFPECIIDGDDSHGLLPCRSFCEAAKEGCESVLGMVNYSWPDFLRCSQFRNQTESSNVSRICFSPQQENGKQLLCGRGENFLCASGICIPGKLQCNGYNDCDDWSDEAHCNCSENLFHCHTGKCLNYSLVCDGYDDCGDLSDEQNCACHSQGLVECRNGQCIPSTFQCDGDEDCKDGSDEENCSVIQTSCQEGDQRCLYNPCLDSCGGSSLCDPNNSLNNCSQCEPITLELCMNLPYNSTSYPNYFGHRTQKEASISWESSLFPALVQTNCYKYLMFFSCTILVPKCDVNTGEHIPPCRALCEHSKERCESVLGIVGLQWPEDTDCSQFPEENSDNQTCLMPDEYVEECSPSHFKCRSGQCVLASRRCDGQADCDDDSDEENCGCKERDLWECPSNKQCLKHTVICDGFPDCPDYMDEKNCSFCQDDELECANHACVSRDLWCDGEADCSDSSDEWDCVTLSINVNSSSFLMVHRAATEHHVCADGWQEILSQLACKQMGLGEPSVTKLIQEQEKEPRWLTLHSNWESLNGTTLHELLVNGQSCESRSKISLLCTKQDCGRRPAARMNKRILGGRTSRPGRWPWQCSLQSEPSGHICGCVLIAKKWVLTVAHCFEGRENAAVWKVVLGINNLDHPSVFMQTRFVKTIILHPRYSRAVVDYDISIVELSEDISETGYVRPVCLPNPEQWLEPDTYCYITGWGHMGNKMPFKLQEGEVRIISLEHCQSYFDMKTITTRMICAGYESGTVDSCMGDSGGPLVCEKPGGRWTLFGLTSWGSVCFSKVLGPGVYSNVSYFVEWIKRQIYIQTFLLN

SEQ ID NO: 19911 - protein, 528 aa, Homo sapiens
  Payload ID: 3972
  Gene Symbol: CDSN
  Gene Name: corneodesmosin
  Uniprot ID: Q15517
  ENSP ID: ENSP00000259726
MGSSRAPWMGRVGGHGMLALLLAGLLLPGTLAKSIGTFSDPCKDPTRITSPNDPCLTGKGDSSGFSSYSGSSSSGSSISSARSSGGGSSGSSSGSSIAQGGSAGSFKPGTGYSQVSYSSGSGSSLQGASGSSQLGSSSSHSGSSGSHSGSSSHSSSSSSFQFSSSSFQVGNGSALPTNDNSYRGILNPSQPGQSSSSSQTFGVSSSGQSVSSNQRPCSSDIPDSPCSGGPIVSHSGPYIPSSHSVSGGQRPVVVVVDQHGSGAPGVVQGPPCSNGGLPGKPCPPITSVDKSYGGYEVVGGSSDSYLVPGMTYSKGKIYPVGYFTKENPVKGSPGVPSFAAGPPISEGKYFSSNPIIPSQSAASSAIAFQPVGTGGVQLCGGGSTGSKGPCSPSSSRVPSSSSISSSSGLPYHPCGSASQSPCSPPGTGSFSSSSSSQSSGKIILQPCGSKSSSSGHPCMSVSSLTLTGGPDGSPHPDPSAGAKPCGSSSAGKIPCRSIRDILAQVKPLGPQLADPEVFLPQGELLDSP

SEQ ID NO: 19912 - protein, 529 aa, Homo sapiens
  Payload ID: 3972
  Gene Symbol: CDSN
  Gene Name: corneodesmosin
  ENSP ID: ENSP00000365465
MGSSRAPWMGRVGGHGMMALLLAGLLLPGTLAKSIGTFSDPCKDPTRITSPNDPCLTGKGDSSGFSSYSGSSSSGSSISSARSSGGGSSGSSSGSSIAQGGSAGSFKPGTGYSQVSYSSGSGSSLQGASGSSQLGSSSSHSGNSGSHSGSSSSHSSSSSSFQFSSSSFQVGNGSALPTNDNSYRGILNPSQPGQSSSSSQTFGVSSSGQSVSSNQRPCSSDIPDSPCSGGPIVSHSGPYIPSSHSVSGGQRPVVVVVDQHGSGAPGVVQGPPCSNGGLPGKPCPPITSVDKSYGGYEVVGGSSDSYLVPGMTYSKGKIYPVGYFTKENPVKGSPGVPSFAAGPPISEGKYFSSNPIIPSQSAASSAIAFQPVGTGGVQLCGGGSTGSKGPCSPSSSRVPSSSSISSSSGLPYHPCGSASQSPCSPPGTGSFSSSSSSQSSGKIILQPCGSKSSSSGHPCMSVSSLTLTGGPDGSPHPDPSAGAKPCGSSSAGKIPCRSIRDILAQVKPLGPQLADPEVFLPQGELLNSP

SEQ ID NO: 19913 - protein, 529 aa, Homo sapiens
  Payload ID: 3972
  Gene Symbol: CDSN
  Gene Name: corneodesmosin
  ENSP ID: ENSP00000373023
MGSSRAPWMGRVGGHGMMALLLAGLLLPGTLAKSIGTFSDPCKDPTRITSPNDPCLTGKGDSSGFSSYSGSSSSGSSISSARSSGGGSSGSSSGSSIAQGGSAGSFKPGTGYSQVSYSSGSGSSLQGASGSSQLGSSSSHSGSSGSHSGSSSSHSSSSSSFQFSSSSFQVGNGSALPTNDNSYRGILNPSQPGQSSSSSQTFGVSSSGQSVSSNQRPCSSDIPDSPCSGGPIVSHSGPYIPSSHSVSGGQRPVVVVVDQHGSGAPGVVQGPPCSNGGLPGKPCPPITSVDKSYGGYEVVGGSSDSYLVPGMTYSKGKIYPVGYFTKENPVKGSPGVPSFAAGPPISEGKYFSSNPIIPSQSAASSAIAFQPVGTGGVQLCGGGSTGSKGPCSPSSSRVPSSSSISSSAGSPYHPCGSASQSPCSPPGTGSFSSSSSSQSSGKIILQPCGSKSSSSGHPCMSVSSLTLTGGPDGSPHPDPSAGAKPCGSSSAGKIPCRSIRDILAQVKPLGPQLADPEVFLPQGELLDSP

SEQ ID NO: 19914 - protein, 529 aa, Homo sapiens
  Payload ID: 3972
  Gene Symbol: CDSN
  Gene Name: corneodesmosin
  Uniprot ID: Q15517
  ENSP ID: ENSP00000388386
MGSSRAPWMGRVGGHGMMALLLAGLLLPGTLAKSIGTFSDPCKDPTRITSPNDPCLTGKGDSSGFSSYSGSSSSGSSISSARSSGGGSSGSSSGSSIAQGGSAGSFKPGTGYSQVSYSSGSGSSLQGASGSSQLGSSSSHSGSSGSHSGSSSSHSSSSSSFQFSSSSFQVGNGSALPTNDNSYRGILNPSQPGQSSSSSQTSGVSSSGQSVSSNQRPCSSDIPDSPCSGGPIVSHSGPYIPSSHSVSGGQRPVVVVVDQHGSGAPGVVQGPPCSNGGLPGKPCPPITSVDKSYGGYEVVGGSSDSYLVPGMTYSKGKIYPVGYFTKENPVKGSPGVPSFAAGPPISEGKYFSSNPIIPSQSAASSAIAFQPVGTGGVQLCGGGSTGSKGPCSPSSSRVPSSSSISSSSGSPYHPCGSASQSPCSPPGTGSFSSSSSSQSSGKIILQPCGSKSSSSGHPCMSVSSLTLTGGPDGSPHPDPSAGAKPCGSSSAGKIPCRSIRDILAQVKPLGPQLADPEVFLPQGELLDSP

SEQ ID NO: 19915 - protein, 529 aa, Homo sapiens [sequence omitted]

SEQ ID NO: 19916 - protein, 529 aa, Homo sapiens; identical to SEQ ID NO: 19914
  Payload ID: 3972
  Gene Symbol: CDSN
  Gene Name: corneodesmosin
  Uniprot ID: Q15517
  ENSP ID: ENSP00000399604

SEQ ID NO: 19917 - protein, 144 aa, Homo sapiens
  Payload ID: 3973
  Gene Symbol: CNIH1
  Gene Name: cornichon family AMPA receptor auxiliary protein 1
  Uniprot ID: O95406
  ENSP ID: ENSP00000216416
MAFTFAAFCYMLALLLTAALIFFAIWHIIAFDELKTDYKNPIDQCNTLNPLVLPEYLIHAFFCVMFLCAAEWLTLGLNMPLLAYHIWRYMSRPVMSGPGLYDPTTIMNADILAYCQKEGWCKLAFYLLAFFYYLYGMIYVLVSS

SEQ ID NO: 19918 - protein, 96 aa, Homo sapiens
  Payload ID: 3973
  Gene Symbol: CNIH1
  Gene Name: cornichon family AMPA receptor auxiliary protein 1
  ENSP ID: ENSP00000378940
MAFTFAAFCYMLALLLTAALIFFAIWHIIAFDELKTDYKNPIDQCNTLNPLVLPEYLIHAFFCVMFLCAAEWLTLGLNMPLLAYHIWSMIYVLVSS

SEQ ID NO: 19919 - protein, 136 aa, Homo sapiens
  Payload ID: 3973
  Gene Symbol: CNIH1
  Gene Name: cornichon family AMPA receptor auxiliary protein 1
  ENSP ID: ENSP00000451142
MAFTFAAFCYMLALLLTAALIFFAIWHIIAFDELKTDYKNPIDQCNTLNPLVLPEYLIHAFFCVMFLCAAEWLTLGLNMPLLAYHIWRYMSRPVMSGPGLYDPTTIMNADILAYCQKEGWCKLAFYLLAFFYYLYG

SEQ ID NO: 19920 - protein, 53 aa, Homo sapiens
  Payload ID: 3973
  Gene Symbol: CNIH1
  Gene Name: cornichon family AMPA receptor auxiliary protein 1
  ENSP ID: ENSP00000451640
MAFTFAAFCYMLALLLTAALIFFAIWHIIAFDELKTDYKNPIDQCNTLNPVYE

SEQ ID NO: 19921 - protein, 160 aa, Homo sapiens
  Payload ID: 3973
  Gene Symbol: CNIH1
  Gene Name: cornichon family AMPA receptor auxiliary protein 1
  ENSP ID: ENSP00000451852
MAFTFAAFCYMLALLLTAALIFFAIWHIIAFDELKTDYKNPIDQCNTLNPTVEKVKKIKRVKIALKLVLPEYLIHAFFCVMFLCAAEWLTLGLNMPLLAYHIWRYMSRPVMSGPGLYDPTTIMNADILAYCQKEGWCKLAFYLLAFFYYLYGMIYVLVSS

SEQ ID NO: 19922 - protein, 121 aa, Homo sapiens
  Payload ID: 3973
  Gene Symbol: CNIH1
  Gene Name: cornichon family AMPA receptor auxiliary protein 1
  ENSP ID: ENSP00000452457
MAFTFAAFCYMLALLLTAALIFFAIWHLVLPEYLIHAFFCVMFLCAAEWLTLGLNMPLLAYHIWRYMSRPVMSGPGLYDPTTIMNADILAYCQKEGWCKLAFYLLAFFYYLYGMIYVLVSS

SEQ ID NO: 19923 - protein, 33 aa, Homo sapiens
  Payload ID: 3973
  Gene Symbol: CNIH1
  Gene Name: cornichon family AMPA receptor auxiliary protein 1
  ENSP ID: ENSP00000452466
MAFTFAAFCYMLALLLTAALIFFAIWHDKEEFG

SEQ ID NO: 19924 - protein, 160 aa, Homo sapiens
  Payload ID: 3974
  Gene Symbol: CNIH2
  Gene Name: cornichon family AMPA receptor auxiliary protein 2
  Uniprot ID: Q6PI25
  ENSP ID: ENSP00000310003
MAFTFAAFCYMLTLVLCASLIFFVIWHIIAFDELRTDFKNPIDQGNPARARERLKNIERICCLLRKLVVPEYSIHGLFCLMFLCAAEWVTLGLNIPLLFYHLWRYFHRPADGSEVMYDAVSIMNADILNYCQKESWCKLAFYLLSFFYYLYSMVYTLVSF

SEQ ID NO: 19925 - protein, 152 aa, Homo sapiens
  Payload ID: 3974
  Gene Symbol: CNIH2
  Gene Name: cornichon family AMPA receptor auxiliary protein 2
  ENSP ID: ENSP00000432177
MAFTFAAFCYMLTLVLCASLIFFVIWHIIAFDELRTDFKNPIDQGNPARARERLKNIERICCLLRKLVVPEYSIHGLFCLMFLCAAEWVTLGLNIPLLFYHLWRYFHRPADGSEVMYDAVSIMNADILNYCQKESWCKLAFYLLSFFYYLYR

SEQ ID NO: 19926 - protein, 39 aa, Homo sapiens
  Payload ID: 3974
  Gene Symbol: CNIH2
  Gene Name: cornichon family AMPA receptor auxiliary protein 2
  ENSP ID: ENSP00000433896
MAFTFAAFCYMLTLVLCASLIFFVIWHEKHHLDLSCDCQ

SEQ ID NO: 19927 - protein, 62 aa, Homo sapiens
  Payload ID: 3974
  Gene Symbol: CNIH2
  Gene Name: cornichon family AMPA receptor auxiliary protein 2
  ENSP ID: ENSP00000435537
MAFTFAAFCYMLTLVLCASLIFFVIWHIIAFDELRTDFKNPIDQGNPARAVSDTCAVPSASV

SEQ ID NO: 19928 - protein, 160 aa, Homo sapiens
  Payload ID: 3975
  Gene Symbol: CNIH3
  Gene Name: cornichon family AMPA receptor auxiliary protein 3
  Uniprot ID: Q8TBE1
  ENSP ID: ENSP00000272133
MAFTFAAFCYMLSLVLCAALIFFAIWHIIAFDELRTDFKSPIDQCNPVHARERLRNIERICFLLRKLVLPEYSIHSLFCIMFLCAQEWLTLGLNVPLLFYHFWRYFHCPADSSELAYDPPVVMNADTLSYCQKEAWCKLAFYLLSFFYYLYCMIYTLVSS

SEQ ID NO: 19929 - protein, 137 aa, Homo sapiens
  Payload ID: 3976
  Gene Symbol: CNIH4
  Gene Name: cornichon family AMPA receptor auxiliary protein 4
  ENSP ID: ENSP00000355821
MEAVVFVFSLLDCCALIFLSVYFIITLSDLECDYINARSCCSKLNKWVIPELIGHTIVTVLLLMSLHWFIFLLNLPVATWNIYRYIMVPSGNMGVFDPTEIHNRGQLKSHMKEAMIKLGFHLLCFFMYLYSGSNCPC

SEQ ID NO: 19930 - protein, 92 aa, Homo sapiens
  Payload ID: 3976
  Gene Symbol: CNIH4
  Gene Name: cornichon family AMPA receptor auxiliary protein 4
  Uniprot ID: Q9P003
  ENSP ID: ENSP00000355822
MEAVVFVFSLLDCCALIFLSVYFIITLSDLECDYINARSCCSKLNKWVIPELIGHTIVTVLLLMSLHWFIFLLNLPVATWNIYRMILALIND

SEQ ID NO: 19931 - protein, 90 aa, Homo sapiens
  Payload ID: 3976
  Gene Symbol: CNIH4
  Gene Name: cornichon family AMPA receptor auxiliary protein 4
  ENSP ID: ENSP00000355823
MEAVVFVFSLLDCCALIFLSVYFIITLSDLECDYINARSCCSKLNKWVIPELIGHTIVTVLLLMSLHWFIFLLNLPVATWNIYRGSNCPC

SEQ ID NO: 19932 - protein, 139 aa, Homo sapiens
  Payload ID: 3976
  Gene Symbol: CNIH4
  Gene Name: cornichon family AMPA receptor auxiliary protein 4
  Uniprot ID: Q9P003
  ENSP ID: ENSP00000420443
MEAVVFVFSLLDCCALIFLSVYFIITLSDLECDYINARSCCSKLNKWVIPELIGHTIVTVLLLMSLHWFIFLLNLPVATWNIYRYIMVPSGNMGVFDPTEIHNRGQLKSHMKEAMIKLGFHLLCFFMYLYSMILALIND

SEQ ID NO: 19933 - protein, 112 aa, Homo sapiens
  Payload ID: 3977
  Gene Symbol: CNFN
  Gene Name: cornifelin
  Uniprot ID: Q9BYD5
  ENSP ID: ENSP00000222032
MSYPVTSQPQCATTSCYQTQLSDWHTGLTDCCNDMPVCLCGTFAPLCLACRISDDFGECCCAPYLPGGLHSIRTGMRERYHIQGSVGHDWAALTFCLPCALCQMARELKIRE

SEQ ID NO: 19934 - protein, 112 aa, Homo sapiens; identical to SEQ ID NO: 19933
  Payload ID: 3977
  Gene Symbol: CNFN
  Gene Name: cornifelin
  Uniprot ID: Q9BYD5
  ENSP ID: ENSP00000469590

SEQ ID NO: 19935 - protein, 495 aa, Homo sapiens
  Payload ID: 3978
  Gene Symbol: CRNN
  Gene Name: cornulin
  Uniprot ID: Q9UBG3
  ENSP ID: ENSP00000271835
MPQLLQNINGIIEAFRRYARTEGNCTALTRGELKRLLEQEFADVIVKPHDPATVDEVLRLLDEDHTGTVEFKEFLVLVFKVAQACFKTLSESAEGACGSQESGSLHSGASQELGEGQRSGTEVGRAGKGQHYEGSSHRQSQQGSRGQNRPGVQTQGQATGSAWVSSYDRQAESQSQERISPQIQLSGQTEQTQKAGEGKRNQTTEMRPERQPQTREQDRAHQTGETVTGSGTQTQAGATQTVEQDSSHQTGRTSKQTQEATNDQNRGTETHGQGRSQTSQAVTGGHAQIQAGTHTQTPTQTVEQDSSHQTGSTSTQTQESTNGQNRGTEIHGQGRSQTSQAVTGGHTQIQAGSHTETVEQDRSQTVSHGGAREQGQTQTQPGSGQRWMQVSNPEAGETVPGGQAQTGASTESGRQEWSSTHPRRCVTEGQGDRQPTVVGEEWVDDHSRETVILRLDQGNLHTSVSSAQGQDAAQSEEKRGITARELYSYLRSTKP

SEQ ID NO: 19936 - protein, 535 aa, Homo sapiens
  Payload ID: 3979
  Gene Symbol: CORO7-PAM16
  Gene Name: CORO7-PAM16 readthrough
  ENSP ID: ENSP00000458607
MNRFRVSKFRHTEARPPRRESWISDIRAGTAPSCRNHIKSSCSLIAFNSDRPGVLGIVPLQGQGEDKRRVAHLGCHSDLVTDLDFSPFDDFLLATGSADRTVKLWRLPGPGQALPSAPGVVLGPEDLPVEVLQFHPTSDGILVSAAGTTVKVWDAAKQQPLTELAAHGDLVQSAVWSRDGALVGTACKDKQLRIFDPRTKPRASQSTQAHENSRDSRLAWMGTWEHLVSTGFNQMREREVKLWDTRFFSSALASLTLDTSLGCLVPLLDPDSGLLVLAGKGERQLYCYEVVPQQPALSPVTQCVLESVLRGAALVPRQALAVMSCEVLRVLQLSDTAIVPIGYHVPRKAVEFHEDLFPDTAGCVPATDPHSWWAGDNQQVQKVSLNPACRPHPSFTSCLVPPAEPLPDTAQPAVMETPVGDADASEGFSSPPSSLTSPSTPSSLGPSLSSTSGIGTSPSLRSLQSLLGPSSKFRHAQGTVLHRDSHITNLKGLNLTTPGESDGFCANKLRVAVPLLSSGGQVAVLEMREKRHREV

SEQ ID NO: 19937 - protein, 1048 aa, Homo sapiens
  Payload ID: 3979
  Gene Symbol: CORO7-PAM16
  Gene Name: CORO7-PAM16 readthrough
  ENSP ID: ENSP00000460885
MNRFRVSKFRHTEARPPRRESWISDIRAGTAPSCRNHIKSSCSLIAFNSDRPGVLGIVPLQGQGEDKRRVAHLGCHSDLVTDLDFSPFDDFLLATGSADRTVKLWRLPGPGQALPSAPGVVLGPEDLPVEVLQFHPTSDGILVSAAGTTVKVWDAAKQQPLTELAAHGDLVQSAVWSRDGALVGTACKDKQLRIFDPRTKPRASQSTQAHENSRDSRLAWMGTWEHLVSTGFNQMREREVKLWDTRFFSSALASLTLDTSLGCLVPLLDPDSGLLVLAGKGERQLYCYEVVPQQPALSPVTQCVLESVLRGAALVPRQALAVMSCEVLRVLQLSDTAIVPIGYHVPRKAVEFHEDLFPDTAGCVPATDPHSWWAGDNQQVQKVSLNPACRPHPSFTSCLVPPAEPLPDTAQPAVMETPVGDADASEGFSSPPSSLTSPSTPSSLGPSLSSTSGIGTSPSLRSLQSLLGPSSKFRHAQGTVLHRDSHITNLKGLNLTTPGESDGFCANKLRVAVPLLSSGGQVAVLELRKPGRLPDTALPTLQNGAAVTDLAWDPFDPHRLAVAGEDARIRLWRVPAEGLEEVLTTPETVLTGHTEKICSLRFHPLAANVLASSSYDLTVRIWDLQAGADRLKLQGHQDQIFSLAWSPDGQQLATVCKDGRVRVYRPRSGPEPLQEGPGPKGGRGARIVWVCDGRCLLVSGFDSQSERQLLLYEAEALAGGPLAVLGLDVAPSTLLPSYDPDTGLVLLTGKGDTRVFLYELLPESPFFLECNSFTSPDPHKGLVLLPKTECDVREVELMRCLRLRQSSLEPVAFRLPRVRKEFFQDDVFPDTAVIWEPVLSAEAWLQGANGQPWLLSLQPPDMSPVSQAPREAPARRAPSSAQYLEEKSDQQKKEELLNAMVAKLGNREDPLPQDSFEGVDEDEWAKYLAQIIVMGVQVVGRAFARALRQEFAASRAAADARGRAGHRSAAASNLSGLSLQEAQQILNVSKLSPEEVQKNYEHLFKVNDKSVGGSFYLQSKVVRAKERLDEELKIQAQEDREKGQMPHT

SEQ ID NO: 19938 - protein, 1048 aa, Homo sapiens; identical to SEQ ID NO: 19937
  Payload ID: 3979
  Gene Symbol: CORO7-PAM16
  Gene Name: CORO7-PAM16 readthrough
  ENSP ID: ENSP00000480927

SEQ ID NO: 19939 - protein, 535 aa, Homo sapiens; identical to SEQ ID NO: 19936
  Payload ID: 3979
  Gene Symbol: CORO7-PAM16
  Gene Name: CORO7-PAM16 readthrough
  ENSP ID: ENSP00000488813

SEQ ID NO: 19940 - protein, 472 aa, Homo sapiens
  Payload ID: 3980
  Gene Symbol: CORO6
  Gene Name: coronin 6
  Uniprot ID: Q6QEF8
  ENSP ID: ENSP00000344562
MSRRVVRQSKFRHVFGQAAKADQAYEDIRVSKVTWDSSFCAVNPKFLAIIVEAGGGGAFIVLPLAKTGRVDKNYPLVTGHTAPVLDIDWCPHNDNVIASASDDTTIMVWQIPDYTPMRNITEPIITLEGHSKRVGILSWHPTARNVLLSAGGDNVIIIWNVGTGEVLLSLDDMHPDVIHSVCWNSNGSLLATTCKDKTLRIIDPRKGQVVAERFAAHEGMRPMRAVFTRQGHIFTTGFTRMSQRELGLWDPNNFEEPVALQEMDTSNGVLLPFYDPDSSIVYLCGKGDSSIRYFEITDEPPFVHYLNTFSSKEPQRGMGFMPKRGLDVSKCEIARFYKLHERKCEPIIMTVPRKSDLFQDDLYPDTPGPEPALEADEWLSGQDAEPVLISLRDGYVPPKHRELRVTKRNILDVRPPSGPRRSQSASDAPLSQQHTLETLLEEIKALRERVQAQEQRITALENMLCELVDGTD

SEQ ID NO: 19941 - protein, 472 aa, Homo sapiens; identical to SEQ ID NO: 19940
  Payload ID: 3980
  Gene Symbol: CORO6
  Gene Name: coronin 6
  Uniprot ID: Q6QEF8
  ENSP ID: ENSP00000373419

SEQ ID NO: 19942 - protein, 471 aa, Homo sapiens
  Payload ID: 3980
  Gene Symbol: CORO6
  Gene Name: coronin 6
  ENSP ID: ENSP00000462627
MSRRVVRQSKFRHVFGQAAKADQAYEDIRVSKVTWDSSFCAVNPKFLAIIVEAGGGGAFIVLPLAKTGRVDKNYPLVTGHTAPVLDIDWCPHNDNVIASASDDTTIMVWQIPDYTPMRNITEPIITLEGHSKRVGILSWHPTARNVLLSAGGDNVIIIWNVGTGEVLLSLDDMHPDVIHSVCWNSNGSLLATTCKDKTLRIIDPRKGQVVAEQARPHEGARPLRAVFTADGKLLSTGFSRMSERQLALWDPNNFEEPVALQEMDTSNGVLLPFYDPDSSIVYLCGKGDSSIRYFEITDEPPFVHYLNTFSSKEPQRGMGFMPKRGLDVSKCEIARFYKLHERKCEPIIMTVPRKSDLFQDDLYPDTPGPEPALEADEWLSGQDAEPVLISLRDGYVPPKHRELRVTKRNILDVRPPSGPRRSQSASDAPLSQHTLETLLEEIKALRERVQAQEQRITALENMLCELVDGTD

SEQ ID NO: 19943 - protein, 432 aa, Homo sapiens
  Payload ID: 3980
  Gene Symbol: CORO6
  Gene Name: coronin 6
  ENSP ID: ENSP00000463723
MSRRVVRQSKFRHVFGQAAKADQAYEDIRVSKVTWDSSFCAVNPKFLAIIVEAGGGGAFIVLPLAKTGRVDKNYPLVTGHTAPVLDIDWCPHNDNVIASASDDTTIMVWQIPDYTPMRNITEPIITLEGHSKRVGILSWHPTARNVLLSAGGDNVIIIWNVGTGEVLLSLDDMHPDVIHSVCWNSNGSLLATTCKDKTLRIIDPRKGQVVANNFEEPVALQEMDTSNGVLLPFYDPDSSIVYLCGKGDSSIRYFEITDEPPFVHYLNTFSSKEPQRGMGFMPKRGLDVSKCEIARFYKLHERKCEPIIMTVPRKSDLFQDDLYPDTPGPEPALEADEWLSGQDAEPVLISLRDGYVPPKHRELRVTKRNILDVRPPSGPRRSQSASDAPLSQQHTLETLLEEIKALRERVQAQEQRITALENMLCELVDGTD

SEQ ID NO: 19944 - protein, 198 aa, Homo sapiens
  Payload ID: 3980
  Gene Symbol: CORO6
  Gene Name: coronin 6
  ENSP ID: ENSP00000464396
MSRRVVRQSKFRHVFGQAAKADQAYEDIRVSKVTWDSSFCAVNPKFLAIIVEAGGGGAFIVLPLAKTGRVDKNYPLVTGHTAPVLDIDWCPHNDNVIASASDDTTIMVWQIPDYTPMRNITEPIITLEGHSKRVGILSWHPTARNVLLSAGGDNVIIIWNVGTGEVLLSLDDMHPDVIHSVCWNSNGSLLATTCKDKT

SEQ ID NO: 19945 - protein, 29 aa, Homo sapiens
  Payload ID: 3980
  Gene Symbol: CORO6
  Gene Name: coronin 6
  ENSP ID: ENSP00000464621
  MOD_RES (1)..(1): Any amino acid
XADGKLLSTGFSRMSERQLALWDPFCCVA

SEQ ID NO: 19946 - protein, 74 aa, Homo sapiens
  Payload ID: 3980
  Gene Symbol: CORO6
  Gene Name: coronin 6
  ENSP ID: ENSP00000468235
MVWQIPDYTPMRNITEPIITLEGHSKRVGILSWHPTARNVLLSAGGDNVIIIWNVGTGEVLLSLDDMHPDVIHS

SEQ ID NO: 19947 - protein, 925 aa, Homo sapiens
  Payload ID: 3981
  Gene Symbol: CORO7
  Gene Name: coronin 7
  Uniprot ID: P57737
  ENSP ID: ENSP00000251166
MNRFRVSKFRHTEARPPRRESWISDIRAGTAPSCRNHIKSSCSLIAFNSDRPGVLGIVPLQGQGEDKRRVAHLGCHSDLVTDLDFSPFDDFLLATGSADRTVKLWRLPGPGQALPSAPGVVLGPEDLPVEVLQFHPTSDGILVSAAGTTVKVWDAAKQQPLTELAAHGDLVQSAVWSRDGALVGTACKDKQLRIFDPRTKPRASQSTQAHENSRDSRLAWMGTWEHLVSTGFNQMREREVKLWDTRFFSSALASLTLDTSLGCLVPLLDPDSGLLVLAGKGERQLYCYEVVPQQPALSPVTQCVLESVLRGAALVPRQALAVMSCEVLRVLQLSDTAIVPIGYHVPRKAVEFHEDLFPDTAGCVPATDPHSWWAGDNQQVQKVSLNPACRPHPSFTSCLVPPAEPLPDTAQPAVMETPVGDADASEGFSSPPSSLTSPSTPSSLGPSLSSTSGIGTSPSLRSLQSLLGPSSKFRHAQGTVLHRDSHITNLKGLNLTTPGESDGFCANKLRVAVPLLSSGGQVAVLELRKPGRLPDTALPTLQNGAAVTDLAWDPFDPHRLAVAGEDARIRLWRVPAEGLEEVLTTPETVLTGHTEKICSLRFHPLAANVLASSSYDLTVRIWDLQAGADRLKLQGHQDQIFSLAWSPDGQQLATVCKDGRVRVYRPRSGPEPLQEGPGPKGGRGARIVWVCDGRCLLVSGFDSQSERQLLLYEAEALAGGPLAVLGLDVAPSTLLPSYDPDTGLVLLTGKGDTRVFLYELLPESPFFLECNSFTSPDPHKGLVLLPKTECDVREVELMRCLRLRQSSLEPVAFRLPRVRKEFFQDDVFPDTAVIWEPVLSAEAWLQGANGQPWLLSLQPPDMSPVSQAPREAPARRAPSSAQYLEEKSDQQKKEELLNAMVAKLGNREDPLPQDSFEGVDEDEWD

SEQ ID NO: 19948 - protein, 907 aa, Homo sapiens
  Payload ID: 3981
  Gene Symbol: CORO7
  Gene Name: coronin 7
  Uniprot ID: P57737
  ENSP ID: ENSP00000440460
MNRFRVSKFRHTEARPPRRESWISDIRAGTAPSCRNHIKSSCSLIAFNSDRPGVLGIVPLQGQGEDKRRVAHLGCHSGSADRTVKLWRLPGPGQALPSAPGVVLGPEDLPVEVLQFHPTSDGILVSAAGTTVKVWDAAKQQPLTELAAHGDLVQSAVWSRDGALVGTACKDKQLRIFDPRTKPRASQSTQAHENSRDSRLAWMGTWEHLVSTGFNQMREREVKLWDTRFFSSALASLTLDTSLGCLVPLLDPDSGLLVLAGKGERQLYCYEVVPQQPALSPVTQCVLESVLRGAALVPRQALAVMSCEVLRVLQLSDTAIVPIGYHVPRKAVEFHEDLFPDTAGCVPATDPHSWWAGDNQQVQKVSLNPACRPHPSFTSCLVPPAEPLPDTAQPAVMETPVGDADASEGFSSPPSSLTSPSTPSSLGPSLSSTSGIGTSPSLRSLQSLLGPSSKFRHAQGTVLHRDSHITNLKGLNLTTPGESDGFCANKLRVAVPLLSSGGQVAVLELRKPGRLPDTALPTLQNGAAVTDLAWDPFDPHRLAVAGEDARIRLWRVPAEGLEEVLTTPETVLTGHTEKICSLRFHPLAANVLASSSYDLTVRIWDLQAGADRLKLQGHQDQIFSLAWSPDGQQLATVCKDGRVRVYRPRSGPEPLQEGPGPKGGRGARIVWVCDGRCLLVSGFDSQSERQLLLYEAEALAGGPLAVLGLDVAPSTLLPSYDPDTGLVLLTGKGDTRVFLYELLPESPFFLECNSFTSPDPHKGLVLLPKTECDVREVELMRCLRLRQSSLEPVAFRLPRVRKEFFQDDVFPDTAVIWEPVLSAEAWLQGANGQPWLLSLQPPDMSPVSQAPREAPARRAPSSAQYLEEKSDQQKKEELLNAMVAKLGNREDPLPQDSFEGVDEDEWD

SEQ ID NO: 19949 - protein, 161 aa, Homo sapiens
  Payload ID: 3981
  Gene Symbol: CORO7
  Gene Name: coronin 7
  ENSP ID: ENSP00000458411
MNRFRVSKFRHTEARPPRREDKQLRIFDPRTKPRASQSTQAHENSRDSRLAWMGTWEHLVSTGFNQMREREVKLWDTRFFSSALASLTLDTSLGCLVPLLDPDSGLLVLAGKGERQLYCYEVVPQQPALSPVTQCVLESVLRGAALVPRQALAVMSCEVLR

SEQ ID NO: 19950 - protein, 46 aa, Homo sapiens
  Payload ID: 3981
  Gene Symbol: CORO7
  Gene Name: coronin 7
  ENSP ID: ENSP00000458459
MNRFRVSKFRHTEARPPRREPEQVEPQRIAEPGAGRPFGPPKRQED

SEQ ID NO: 19951 - protein, 219 aa, Homo sapiens
  Payload ID: 3981
  Gene Symbol: CORO7
  Gene Name: coronin 7
  ENSP ID: ENSP00000458828
MNRFRVSKFRHTEARPPRRESWISDIRAGTAPSCRNHIKSSCSLIAFNSDRPGVLGIVPLQGQGEDKRRVAHLGCHSDLVTDLDFSPFDDFLLATGSADRTVKLWRLPGPGQALPSAPGVVLGPEDLPVEVLQFHPTSDGILSWQPMGTWCRAPSGAEMEPWWARRARTSSCGSLTPEQSRGPLRARRPMRTAGIAGWHGWAPGSTLCLLDSTRCVSAK

SEQ ID NO: 19952 - protein, 161 aa, Homo sapiens
  Payload ID: 3981
  Gene Symbol: CORO7
  Gene Name: coronin 7
  ENSP ID: ENSP00000458935
MNRFRVSKFRHTEARPPRRESWISDIRAGTAPSCRNHIKSSCSLIAFNSDRPGVLGIVPLQGQGEDKRRVAHLGCHSDLVTDLDFSPFDDFLLATGSADRTVKLWRLPGPGQALPSAPGVVLGPEDLPVEVLQFHPTSDGILSWQPMGTWCRAPSGAEMEP

SEQ ID NO: 19953 - protein, 57 aa, Homo sapiens
  Payload ID: 3981
  Gene Symbol: CORO7
  Gene Name: coronin 7
  ENSP ID: ENSP00000459085
MGTWCRAPSGAEMEPWWARRARTSSCGSLTPEQSRGPLRARRPMRTAGIAGWHGWAP

SEQ ID NO: 19954 - protein, 108 aa, Homo sapiens
  Payload ID: 3981
  Gene Symbol: CORO7
  Gene Name: coronin 7
  ENSP ID: ENSP00000459228
MGTWCRAPSGAEMEPWWARRARTSSCGSLTPEQSRGPLRALSCTETATSPTSRGSTSPHLVRVTASVPTSCVWPCRCSAAGDRWLCLSYGSLAACPTRHCPRCRMGQL

SEQ ID NO: 19955 - protein, 205 aa, Homo sapiens
  Payload ID: 3981
  Gene Symbol: CORO7
  Gene Name: coronin 7
  ENSP ID: ENSP00000459286
MLQPRPHASKHRRRRGLTAAPHVTSHPRQSVPSDKQLRIFDPRTKPRASQSTQAHENSRDSRLAWMGTWEHLVSTGFNQMREREVKLWDTRFFSSALASLTLDTSLGCLVPLLDPDSGLLVLAGKGERQLYCYEVVPQQPALSPVTQCVLESVLRGAALVPRQALAVMSCEVLRVLQLSDTAIVPIGYHVPRKAVEFHEDLFPDT

SEQ ID NO: 19956 - protein, 19 aa, Homo sapiens
  Payload ID: 3981
  Gene Symbol: CORO7
  Gene Name: coronin 7
  ENSP ID: ENSP00000459401
MNRFRVSKFRHTEARPPRR

SEQ ID NO: 19957 - protein, 11 aa, Homo sapiens
  Payload ID: 3981
  Gene Symbol: CORO7
  Gene Name: coronin 7
  ENSP ID: ENSP00000459888
MGTWCRAPSGA

SEQ ID NO: 19958 - protein, 156 aa, Homo sapiens
  Payload ID: 3981
  Gene Symbol: CORO7
  Gene Name: coronin 7
  ENSP ID: ENSP00000460036
MNRFRVSKFRHTEARPPRRESWISDIRAGTAPSCRNHIKSSCSLIAFNSDRPGVLGIVPLQGQGEDKRRVAHLGCHSDLVTDLDFSPFDDFLLATGSADRTVKLWRLPGPGQAHENSRDSRLAWMGTWEHLVSTGFNQMREREVKLWDTRFFSSAL

SEQ ID NO: 19959 - protein, 119 aa, Homo sapiens
  Payload ID: 3981
  Gene Symbol: CORO7
  Gene Name: coronin 7
  ENSP ID: ENSP00000460177
  MOD_RES (1)..(1): Any amino acid
XCSQSERQLLLYEAEALAGGPLAVLGLDVAPSTLLPSYDPDTGLVLLTGKGDTRVFLYELLPESPFFLECNSFTSPDPHKGLVLLPKTECDVREVELMRCLRLRQSSLEPVAFRLPRVR

SEQ ID NO: 19960 - protein, 114 aa, Homo sapiens
  Payload ID: 3981
  Gene Symbol: CORO7
  Gene Name: coronin 7
  ENSP ID: ENSP00000460199
MNRFRVSKFRHTEARPPRRESWISDIRAGTAPSCRNHIKSSCSLIAFNSDRPGVLGIVPLQGQGEDKRRVAHLGCHSELAAHGDLVQSAVWSRDGALVGTACKTESQSVSQAGV

SEQ ID NO: 19961 - protein, 47 aa, Homo sapiens
  Payload ID: 3981
  Gene Symbol: CORO7
  Gene Name: coronin 7
  ENSP ID: ENSP00000460901
MGTWCRAPSGAEMEPWWARRARTSSCGSLTPEQSRGPLRARRPMRTA

SEQ ID NO: 19962 - protein, 206 aa, Homo sapiens
  Payload ID: 3981
  Gene Symbol: CORO7
  Gene Name: coronin 7
  ENSP ID: ENSP00000460910
MLQPRPHASKHRRRRGLTAAPHVTSHPRQSVPSSWISDIRAGTAPSCRNHIKSSCSLIAFNSDRPGVLGIVPLQGQGEDKRRVAHLGCHSDLVTDLDFSPFDDFLLATGSADRTVKLWRLPGPGQALPSAPGVVLGPEDLPVEVLQFHPTSDGILVSAAGTTVKVWDAAKQQPLTELAAHGDLVQSAVWSRDGALVGTACKDKQLR

SEQ ID NO: 19963 - protein, 190 aa, Homo sapiens
  Payload ID: 3981
  Gene Symbol: CORO7
  Gene Name: coronin 7
  ENSP ID: ENSP00000460956
VREVELMRCLRLRQSSLEPVAFRLPRVRKEFFQDDVFPDTAVIWEPVLSAEAWLQGANGQPWLLSLQPPDMSPVSQAPREAPARRAPSSAQYLEEKSDQQKKEELLNAMVAKLGNREDPLPQDSFEGVDEDEWVSSEWPHFPAGSAVPRTCHGACLLPSQALLTPSHLLVFRPRTSLRPRHLHLTCAATS

SEQ ID NO: 19964 - protein, 46 aa, Homo sapiens
  Payload ID: 3981
  Gene Symbol: CORO7
  Gene Name: coronin 7
  ENSP ID: ENSP00000461051
MNRFRVSKFRHTEARPPRREVYWALCLCKAKERTSDAWPTWAAIQT

SEQ ID NO: 19965 - protein, 367 aa, Homo sapiens
  Payload ID: 3981
  Gene Symbol: CORO7
  Gene Name: coronin 7
  ENSP ID: ENSP00000461187
MNRFRVSKFRHTEARPPRREDKQLRIFDPRTKPRASQSTQAHENSRDSRLAWMGTWEHLVSTGFNQMREREVKLWDTRFFSSALASLTLDTSLGCLVPLLDPDSGLLVLAGKGERQLYCYEVVPQQPALSPVTQCVLESVLRGAALVPRQALAVMSCEVLRVLQLSDTAIVPIGYHVPRKAVEFHEDLFPDTAGCVPATDPHSWWAGDNQQVQKVSLNPACRPHPSFTSCLVPPAEPLPDTAQPAVMETPVGDADASEGFSSPPSSLTSPSTPSSLGPSLSSTSGIGTSPSLRSLQSLLGPSSKFRHAQGTVLHRDSHITNLKGLNLTTPGESDGFCANKLRVAVPLLSSGGQVAVLEMREKRHREV

SEQ ID NO: 19966 - protein, 840 aa, Homo sapiens
  Payload ID: 3981
  Gene Symbol: CORO7
  Gene Name: coronin 7
  Uniprot ID: P57737
  ENSP ID: ENSP00000461702
MNRFRVSKFRHTEARPPRRESWISDIRAGTAPSCRNHIKSSCSLIAFNSDRPGVLGIVPLQGQGEDKRRVAHLGCHSELAAHGDLVQSAVWSRDGALVGTACKDKQLRIFDPRTKPRASQSTQAHENSRDSRLAWMGTWEHLVSTGFNQMREREVKLWDTRFFSSALASLTLDTSLGCLVPLLDPDSGLLVLAGKGERQLYCYEVVPQQPALSPVTQCVLESVLRGAALVPRQALAVMSCEVLRVLQLSDTAIVPIGYHVPRKAVEFHEDLFPDTAGCVPATDPHSWWAGDNQQVQKVSLNPACRPHPSFTSCLVPPAEPLPDTAQPAVMETPVGDADASEGFSSPPSSLTSPSTPSSLGPSLSSTSGIGTSPSLRSLQSLLGPSSKFRHAQGTVLHRDSHITNLKGLNLTTPGESDGFCANKLRVAVPLLSSGGQVAVLELRKPGRLPDTALPTLQNGAAVTDLAWDPFDPHRLAVAGEDARIRLWRVPAEGLEEVLTTPETVLTGHTEKICSLRFHPLAANVLASSSYDLTVRIWDLQAGADRLKLQGHQDQIFSLAWSPDGQQLATVCKDGRVRVYRPRSGPEPLQEGPGPKGGRGARIVWVCDGRCLLVSGFDSQSERQLLLYEAEALAGGPLAVLGLDVAPSTLLPSYDPDTGLVLLTGKGDTRVFLYELLPESPFFLECNSFTSPDPHKGLVLLPKTECDVREVELMRCLRLRQSSLEPVAFRLPRVRKEFFQDDVFPDTAVIWEPVLSAEAWLQGANGQPWLLSLQPPDMSPVSQAPREAPARRAPSSAQYLEEKSDQQKKEELLNAMVAKLGNREDPLPQDSFEGVDEDEWD

SEQ ID NO: 19967 - protein, 201 aa, Homo sapiens
  Payload ID: 3981
  Gene Symbol: CORO7
  Gene Name: coronin 7
  ENSP ID: ENSP00000461797
MNRFRVSKFRHTEARPPRRESWISDIRAGTAPSCRNHIKSSCSLIAFNSDRPGVLGIVPLQGQGEDKRRVAHLGCHSDLVTDLDFSPFDDFLLATGSADRTVKLWRLPGPGQALPSAPGVVLGPEDLPVEVLQFHPTSDGILSWQPMGTWCRAPSGAEMEPWWARRARTSSCGSLTPEQSRGPLRARRPMRTAGIAGWHGW

SEQ ID NO: 19968 - protein, 925 aa, Homo sapiens; identical to SEQ ID NO: 19947
  Payload ID: 3981
  Gene Symbol: CORO7
  Gene Name: coronin 7
  Uniprot ID: P57737
  ENSP ID: ENSP00000482646

SEQ ID NO: 19969 - protein, 907 aa, Homo sapiens; identical to SEQ ID NO: 19948
  Payload ID: 3981
  Gene Symbol: CORO7
  Gene Name: coronin 7
  Uniprot ID: P57737
  ENSP ID: ENSP00000483187

SEQ ID NO: 19970 - protein, 156 aa, Homo sapiens; identical to SEQ ID NO: 19958
  Payload ID: 3981
  Gene Symbol: CORO7
  Gene Name: coronin 7
  ENSP ID: ENSP00000487636

SEQ ID NO: 19971 - protein, 119 aa, Homo sapiens; identical to SEQ ID NO: 19959
  Payload ID: 3981
  Gene Symbol: CORO7
  Gene Name: coronin 7
  ENSP ID: ENSP00000487652
  MOD_RES (1)..(1): Any amino acid

SEQ ID NO: 19972 - protein, 108 aa, Homo sapiens; identical to SEQ ID NO: 19954
  Payload ID: 3981
  Gene Symbol: CORO7
  Gene Name: coronin 7
  ENSP ID: ENSP00000487794

SEQ ID NO: 19973 - protein, 206 aa, Homo sapiens; identical to SEQ ID NO: 19962
  Payload ID: 3981
  Gene Symbol: CORO7
  Gene Name: coronin 7
  ENSP ID: ENSP00000487921

SEQ ID NO: 19974 - protein, 161 aa, Homo sapiens; identical to SEQ ID NO: 19949
  Payload ID: 3981
  Gene Symbol: CORO7
  Gene Name: coronin 7
  ENSP ID: ENSP00000487981

SEQ ID NO: 19975 - protein, 46 aa, Homo sapiens; identical to SEQ ID NO: 19950
  Payload ID: 3981
  Gene Symbol: CORO7
  Gene Name: coronin 7
  ENSP ID: ENSP00000488061

SEQ ID NO: 19976 - protein, 114 aa, Homo sapiens; identical to SEQ ID NO: 19960
  Payload ID: 3981
  Gene Symbol: CORO7
  Gene Name: coronin 7
  ENSP ID: ENSP00000488122

SEQ ID NO: 19977 - protein, 46 aa, Homo sapiens; identical to SEQ ID NO: 19964
  Payload ID: 3981
  Gene Symbol: CORO7
  Gene Name: coronin 7
  ENSP ID: ENSP00000488149

SEQ ID NO: 19978 - protein, 219 aa, Homo sapiens; identical to SEQ ID NO: 19951
  Payload ID: 3981
  Gene Symbol: CORO7
  Gene Name: coronin 7
  ENSP ID: ENSP00000488164

SEQ ID NO: 19979 - protein, 47 aa, Homo sapiens; identical to SEQ ID NO: 19961
  Payload ID: 3981
  Gene Symbol: CORO7
  Gene Name: coronin 7
  ENSP ID: ENSP00000488250

SEQ ID NO: 19980 - protein, 161 aa, Homo sapiens; identical to SEQ ID NO: 19952
  Payload ID: 3981
  Gene Symbol: CORO7
  Gene Name: coronin 7
  ENSP ID: ENSP00000488278

SEQ ID NO: 19981 - protein, 201 aa, Homo sapiens; identical to SEQ ID NO: 19967
  Payload ID: 3981
  Gene Symbol: CORO7
  Gene Name: coronin 7
  ENSP ID: ENSP00000488375

SEQ ID NO: 19982 - protein, 367 aa, Homo sapiens; identical to SEQ ID NO: 19965
  Payload ID: 3981
  Gene Symbol: CORO7
  Gene Name: coronin 7
  ENSP ID: ENSP00000488416

SEQ ID NO: 19983 - protein, 11 aa, Homo sapiens
  Payload ID: 3981
  Gene Symbol: CORO7
  Gene Name: coronin 7
  ENSP ID: ENSP00000488425
MGTWCRAPSGA

SEQ ID NO: 19984 - protein, 205 aa, Homo sapiens; identical to SEQ ID NO: 19955
  Payload ID: 3981
  Gene Symbol: CORO7
  Gene Name: coronin 7
  ENSP ID: ENSP00000488426

SEQ ID NO: 19985 - protein, 57 aa, Homo sapiens; identical to SEQ ID NO: 19953
  Payload ID: 3981
  Gene Symbol: CORO7
  Gene Name: coronin 7
  ENSP ID: ENSP00000488553

SEQ ID NO: 19986 - protein, 19 aa, Homo sapiens
  Payload ID: 3981
  Gene Symbol: CORO7
  Gene Name: coronin 7
  ENSP ID: ENSP00000488571
MNRFRVSKFRHTEARPPRR

SEQ ID NO: 19987 - protein, 190 aa, Homo sapiens; identical to SEQ ID NO: 19963
  Payload ID: 3981
  Gene Symbol: CORO7
  Gene Name: coronin 7
  ENSP ID: ENSP00000488658

SEQ ID NO: 19988 - protein, 840 aa, Homo sapiens; identical to SEQ ID NO: 19966
  Payload ID: 3981
  Gene Symbol: CORO7
  Gene Name: coronin 7
  Uniprot ID: P57737
  ENSP ID: ENSP00000488867

SEQ ID NO: 19989 - protein, 461 aa, Homo sapiens
  Payload ID: 3982
  Gene Symbol: CORO1A
  Gene Name: coronin, actin binding protein, 1A
  Uniprot ID: P31146
  ENSP ID: ENSP00000219150
MSRQVVRSSKFRHVFGQPAKADQCYEDVRVSQTTWDSGFCAVNPKFVALICEASGGGAFLVLPLGKTGRVDKNAPTVCGHTAPVLDIAWCPHNDNVIASGSEDCTVMVWEIPDGGLMLPLREPVVTLEGHTKRVGIVAWHTTAQNVLLSAGCDNVIMVWDVGTGAAMLTLGPEVHPDTIYSVDWSRDGGLICTSCRDKRVRIIEPRKGTVVAEKDRPHEGTRPVRAVFVSEGKILTTGFSRMSERQVALWDTKHLEEPLSLQELDTSSGVLLPFFDPDTNIVYLCGKGDSSIRYFEITSEAPFLHYLSMFSSKESQRGMGYMPKRGLEVNKCEIARFYKLHERRCEPIAMTVPRKSDLFQEDLYPPTAGPDPALTAEEWLGGRDAGPLLISLKDGYVPPKSRELRVNRGLDTGRRRAAPEASGTPSSDAVSRLEEEMRKLQATVQELQKRLDRLEETVQAK

SEQ ID NO: 19990 - protein, 148 aa, Homo sapiens
  Payload ID: 3982
  Gene Symbol: CORO1A
  Gene Name: coronin, actin binding protein, 1A
  ENSP ID: ENSP00000454752
MSRQVVRSSKFRHVFGQPAKADQCYEDVRVSQTTWDSGFCAVNPKFVALICEASGGGAFLVLPLGKTGRVDKNAPTVCGHTAPVLDIAWCPHNDNVIASGSEDCTVMVWEIPDGGLMLPLREPVVTLEGHTKRVGIVAWHTTAQNVLL

SEQ ID NO: 19991 - protein, 461 aa, Homo sapiens; identical to SEQ ID NO: 19989
  Payload ID: 3982
  Gene Symbol: CORO1A
  Gene Name: coronin, actin binding protein, 1A
  Uniprot ID: P31146
  ENSP ID: ENSP00000455552

SEQ ID NO: 19992 - protein, 249 aa, Homo sapiens
  Payload ID: 3982
  Gene Symbol: CORO1A
  Gene Name: coronin, actin binding protein, 1A
  ENSP ID: ENSP00000456266
MSRQVVRSSKFRHVFGQPAKADQCYEDVRVSQTTWDSGFCAVNPKFVALICEASGGGAFLVLPLGKTGRVDKNAPTVCGHTAPVLDIAWCPHNDNVIASGSEDCTVMVWEIPDGGLMLPLREPVVTLEGHTKRVGIVAWHTTAQNVLLSAGCDNVIMVWDVGTGAAMLTLGPEVHPDTIYSVDWSRDGGLICTSCRDKRVRIIEPRKGTVVAEKDRPHEGTRPVRAVFVSEGKILTTGFSRMSERQVAL

SEQ ID NO: 19993 - protein, 389 aa, Homo sapiens
  Payload ID: 3982
  Gene Symbol: CORO1A
  Gene Name: coronin, actin binding protein, 1A
  ENSP ID: ENSP00000456457
MSRQVVRSSKFRHVFGQPAKADQCYEDVRVSQTTWDSGFCAVNPKFVALICEASGGGAFLVLPLGKTGRVDKNAPTVCGHTAPVLDIAWCPHNDNVIASGSEDCTVMVWEIPDGGLMLPLREPVVTLEGHTKRVGIVAWHTTAQNVLLSAGCDNVIMVWDVGTGAAMLTLGPEVHPDTIYSVDWSRDGGLICTSCRDKRVRIIEPRKGTVVAEKDRPHEGTRPVRAVFVSEGKILTTGFSRMSERQVALWDTKHLEEPLSLQELDTSSGVLLPFFDPDTNIVYLCGKGDSSIRYFEITSEAPFLHYLSMFSSKESQRGMGYMPKRGLEVNKCEIARFYKLHERRCEPIAMTVPRKDAVSRLEEEMRKLQATVQELQKRLDRLEETVQAK

SEQ ID NO: 19994 - protein, 218 aa, Homo sapiens
  Payload ID: 3982
  Gene Symbol: CORO1A
  Gene Name: coronin, actin binding protein, 1A
  ENSP ID: ENSP00000456756
MPDYFSRRAGVFPMKPGDPGRRSDSRGHPCLDLRARMSRQVVRSSKFRHVFGQPAKADQCYEDVRVSQTTWDSGFCAVNPKFVALICEASGGGAFLVLPLGKTGRVDKNAPTVCGHTAPVLDIAWCPHNDNVIASGSEDCTVMVWEIPDGGLMLPLREPVVTLEGHTKRVGIVAWHTTAQNVLLSAGCDNVIMVWDVGTGAAMLTLGPEVHPDTIYSV

SEQ ID NO: 19995 - protein, 246 aa, Homo sapiens
  Payload ID: 3982
  Gene Symbol: CORO1A
  Gene Name: coronin, actin binding protein, 1A
  ENSP ID: ENSP00000457332
MSRQVVRSSKFRHVFGQPAKADQCYEDVRVSQTTWDSGFCAVNPKFVALICEASGGGAFLVLPLGKVWEIPDGGLMLPLREPVVTLEGHTKRVGIVAWHTTAQNVLLSAGCDNVIMVWDVGTGAAMLTLGPEVHPDTIYSVDWSRDGGLICTSCRDKRVRIIEPRKGTVVAEKDRPHEGTRPVRAVFVSEGKILTTGFSRMSERQVALWDTKHLEEPLSLQELDTSSGVLLPFFDPDTNIVYLCGK

SEQ ID NO: 19996 - protein, 165 aa, Homo sapiens
  Payload ID: 3982
  Gene Symbol: CORO1A
  Gene Name: coronin, actin binding protein, 1A
  ENSP ID: ENSP00000457509
MSRQVVRSSKFRHVFGQPAKADQCYEDVRVSQTTWDSGFCAVNPKFVALICEASGGGAFLVLPLGKTGRVDKNAPTVCGHTAPVLDIAWCPHNDNVIASGSEDCTVMVWEIPDGGLMLPLREPVVTLEGHTKRVGIVAWHTTAQNVLLSAGCDNVIMVWDVGTGA

SEQ ID NO: 19997 - protein, 489 aa, Homo sapiens
  Payload ID: 3983
  Gene Symbol: CORO1B
  Gene Name: coronin, actin binding protein, 1B
  Uniprot ID: Q9BR76
  ENSP ID: ENSP00000340211
MSFRKVVRQSKFRHVFGQPVKNDQCYEDIRVSRVTWDSTFCAVNPKFLAVIVEASGGGAFLVLPLSKTGRIDKAYPTVCGHTGPVLDIDWCPHNDEVIASGSEDCTVMVWQIPENGLTSPLTEPVVVLEGHTKRVGIIAWHPTARNVLLSAGCDNVVLIWNVGTAEELYRLDSLHPDLIYNVSWNHNGSLFCSACKDKSVRIIDPRRGTLVAEREKAHEGARPMRAIFLADGKVFTTGFSRMSERQLALWDPENLEEPMALQELDSSNGALLPFYDPDTSVVYVCGKGDSSIRYFEITEEPPYIHFLNTFTSKEPQRGMGSMPKRGLEVSKCEIARFYKLHERKCEPIVMTVPRKSDLFQDDLYPDTAGPEAALEAEEWVSGRDADPILISLREAYVPSKQRDLKISRRNVLSDSRPAMAPGSSHLGAPASTTTAADATPSGSLARAGEAGKLEEVMQELRALRALVKEQGDRICRLEEQLGRMENGDA

SEQ ID NO: 19998 - protein, 489 aa, Homo sapiens; identical to SEQ ID NO: 19997
  Payload ID: 3983
  Gene Symbol: CORO1B
  Gene Name: coronin, actin binding protein, 1B
  Uniprot ID: Q9BR76
  ENSP ID: ENSP00000377471

SEQ ID NO: 19999 - protein, 139 aa, Homo sapiens
  Payload ID: 3983
  Gene Symbol: CORO1B
  Gene Name: coronin, actin binding protein, 1B
  ENSP ID: ENSP00000438056
MSFRKVVRQSKFRHVFGQPVKNDQCYEDIRVSRVTWDSTFCAVNPKFLAVIVEASGGGAFLVLPLSKTGRIDKAYPTVCGHTGPVLDIDWCPHNDEVIASGSEDCTVMVWQIPENGLTSPLTEPVVVLEGHTKRVGIIA

SEQ ID NO: 20000 - protein, 282 aa, Homo sapiens
  Payload ID: 3983
  Gene Symbol: CORO1B
  Gene Name: coronin, actin binding protein, 1B
  ENSP ID: ENSP00000445330
MSFRKVVRQSKFRHVFGQPVKNDQCYEDIRVSRVTWDSTFCAVNPKFLAVIVEASGGGAFLVLPLSKTGRIDKAYPTVCGHTGPVLDIDWCPHNDEVIASGSEDCTVMVWQIPENGLTSPLTEPVVVLEGHTKRVGIIAWHPTARNVLLSAGCDNVVLIWNVGTAEELYRLDSLHPDLIYNVSWNHNGSLFCSACKDKSVRIIDPRRGTLVAEREKAHEGARPMRAIFLADGKVFTTGFSRMSERQLALWDPGSPLLQKASSSSKPPGPSPLCFCIVTSRAP

SEQ ID NO: 20001 - protein, 260 aa, Homo sapiens
  Payload ID: 3983
  Gene Symbol: CORO1B
  Gene Name: coronin, actin binding protein, 1B
  ENSP ID: ENSP00000479949
MSFRKVVRQSKFRHVFGQPVKNDQCYEDIRVSRVTWDSTFCAVNPKFLAVIVEASGGGAFLVLPLSKTGRIDKAYPTVCGHTGPVLDIDWCPHNDEVIASGSEDCTVMVWQIPENGLTSPLTEPVVVLEGHTKRVGIIAWHPTARNVLLSAGCDNVVLIWNVGTAEELYRLDSLHPDLIYNVSWNHNGSLFCSACKDKSVRIIDPRRGTLVAEREKAHEGARPMRAIFLADGKVFTTGFSRMSERQLALWDPGVRRFCLA

SEQ ID NO: 20002 - protein, 282 aa, Homo sapiens; identical to SEQ ID NO: 20000
  Payload ID: 3983
  Gene Symbol: CORO1B
  Gene Name: coronin, actin binding protein, 1B
  ENSP ID: ENSP00000486585

SEQ ID NO: 20003 - protein, 474 aa, Homo sapiens
  Payload ID: 3984
  Gene Symbol: CORO1C
  Gene Name: coronin, actin binding protein, 1C
  Uniprot ID: Q9ULV4
  ENSP ID: ENSP00000261401
MRRVVRQSKFRHVFGQAVKNDQCYDDIRVSRVTWDSSFCAVNPRFVAIIIEASGGGAFLVLPLHKTGRIDKSYPTVCGHTGPVLDIDWCPHNDQVIASGSEDCTVMVWQIPENGLTLSLTEPVVILEGHSKRVGIVAWHPTARNVLLSAGCDNAIIIWNVGTGEALINLDDMHSDMIYNVSWNRNGSLICTASKDKKVRVIDPRKQEIVAEKEKAHEGARPMRAIFLADGNVFTTGFSRMSERQLALWNPKNMQEPIALHEMDTSNGVLLPFYDPDTSIIYLCGKGDSSIRYFEITDESPYVHYLNTFSSKEPQRGMGYMPKRGLDVNKCEIARFFKLHERKCEPIIMTVPRKSDLFQDDLYPDTAGPEAALEAEEWFEGKNADPILISLKHGYIPGKNRDLKVVKKNILDSKPTANKKCDLISIPKKTTDTASVQNEAKLDEILKEIKSIKDTICNQDERISKLEQQMAKIAA

SEQ ID NO: 20004 - protein, 527 aa, Homo sapiens
  Payload ID: 3984
  Gene Symbol: CORO1C
  Gene Name: coronin, actin binding protein, 1C
  Uniprot ID: Q9ULV4
  ENSP ID: ENSP00000394496
MYGPGSQLGKSGNNSWAKERGCSIACQGSLTSARLHAPSIGERPLSHMRWKDTMRRVVRQSKFRHVFGQAVKNDQCYDDIRVSRVTWDSSFCAVNPRFVAIIIEASGGGAFLVLPLHKTGRIDKSYPTVCGHTGPVLDIDWCPHNDQVIASGSEDCTVMVWQIPENGLTLSLTEPVVILEGHSKRVGIVAWHPTARNVLLSAGCDNAIIIWNVGTGEALINLDDMHSDMIYNVSWNRNGSLICTASKDKKVRVIDPRKQEIVAEKEKAHEGARPMRAIFLADGNVFTTGFSRMSERQLALWNPKNMQEPIALHEMDTSNGVLLPFYDPDTSIIYLCGKGDSSIRYFEITDESPYVHYLNTFSSKEPQRGMGYMPKRGLDVNKCEIARFFKLHERKCEPIIMTVPRKSDLFQDDLYPDTAGPEAALEAEEWFEGKNADPILISLKHGYIPGKNRDLKVVKKNILDSKPTANKKCDLISIPKKTTDTASVQNEAKLDEILKEIKSIKDTICNQDERISKLEQQMAKIAA

SEQ ID NO: 20005 - protein, 369 aa, Homo sapiens
  Payload ID: 3984
  Gene Symbol: CORO1C
  Gene Name: coronin, actin binding protein, 1C
  ENSP ID: ENSP00000415554
MVWQIPENGLTLSLTEPVVILEGHSKRVGIVAWHPTARNVLLSAGCDNAIIIWNVGTGEALINLDDMHSDMIYNVSWNRNGSLICTASKDKKVRVIDPRKQEIVAEKEKAHEGARPMRAIFLADGNVFTTGFSRMSERQLALWNPKNMQEPIALHEMDTSNGVLLPFYDPDTSIIYLCGKGDSSIRYFEITDESPYVHYLNTFSSKEPQRGMGYMPKRGLDVNKCEIARFFKLHERKCEPIIMTVPRKSDLFQDDLYPDTAGPEAALEAEEWFEGKNADPILISLKHGYIPGKNRDLKVVKKNILDSKPTANKKCDLISIPKKTTDTASVQNEAKLDEILKEIKSIKDTICNQDERISKLEQQMAKIAA

SEQ ID NO: 20006 - protein, 474 aa, Homo sapiens; identical to SEQ ID NO: 20003
  Payload ID: 3984
  Gene Symbol: CORO1C
  Gene Name: coronin, actin binding protein, 1C
  Uniprot ID: Q9ULV4
  ENSP ID: ENSP00000438341

SEQ ID NO: 20007 - protein, 151 aa, Homo sapiens
  Payload ID: 3984
  Gene Symbol: CORO1C
  Gene Name: coronin, actin binding protein, 1C
  ENSP ID: ENSP00000447049
MRRVVRQSKFRHVFGQAVKNDQCYDDIRVSRVTWDSSFCAVNPRFVAIIIEASGGGAFLVLPLHKTGRIDKSYPTVCGHTGPVLDIDWCPHNDQVIASGSEDCTVMVWQIPENGLTLSLTEPVVILEGHSKRVGIVAWHPTARNVLLSAGG

SEQ ID NO: 20008 - protein, 165 aa, Homo sapiens
  Payload ID: 3984
  Gene Symbol: CORO1C
  Gene Name: coronin, actin binding protein, 1C
  ENSP ID: ENSP00000447337
SKEPQRGMGYMPKRGLDVNKCEIARFFKLHERKCEPIIMTVPRKSDLFQDDLYPDTAGPEAALEAEEWFEGKNADPILISLKHGYIPGKNRDLKVVKKNILDSKPTANKKCDLISIPKKTTDTASVQNEAKLDEILKEIKSIKDTICNQDERISKLEQQMAKIAA

SEQ ID NO: 20009 - protein, 480 aa, Homo sapiens
  Payload ID: 3984
  Gene Symbol: CORO1C
  Gene Name: coronin, actin binding protein, 1C
  Uniprot ID: Q9ULV4
  ENSP ID: ENSP00000447534
MRWKDTMRRVVRQSKFRHVFGQAVKNDQCYDDIRVSRVTWDSSFCAVNPRFVAIIIEASGGGAFLVLPLHKTGRIDKSYPTVCGHTGPVLDIDWCPHNDQVIASGSEDCTVMVWQIPENGLTLSLTEPVVILEGHSKRVGIVAWHPTARNVLLSAGCDNAIIIWNVGTGEALINLDDMHSDMIYNVSWNRNGSLICTASKDKKVRVIDPRKQEIVAEKEKAHEGARPMRAIFLADGNVFTTGFSRMSERQLALWNPKNMQEPIALHEMDTSNGVLLPFYDPDTSIIYLCGKGDSSIRYFEITDESPYVHYLNTFSSKEPQRGMGYMPKRGLDVNKCEIARFFKLHERKCEPIIMTVPRKSDLFQDDLYPDTAGPEAALEAEEWFEGKNADPILISLKHGYIPGKNRDLKVVKKNILDSKPTANKKCDLISIPKKTTDTASVQNEAKLDEILKEIKSIKDTICNQDERISKLEQQMAKIAA

SEQ ID NO: 20010 - protein, 169 aa, Homo sapiens
  Payload ID: 3984
  Gene Symbol: CORO1C
  Gene Name: coronin, actin binding protein, 1C
  ENSP ID: ENSP00000447989
MRRVVRQSKFRHVFGQAVKNDQCYDDIRVSRVTWDSSFCAVNPRFVAIIIEASGGGAFLVLPLHKTGRIDKSYPTVCGHTGPVLDIDWCPHNDQVIASGSEDCTVMVWQIPENGLTLSLTEPVVILEGHSKRVGIVAWHPTARNVLLSAGCDNAIIIWNVGTGEALINL

SEQ ID NO: 20011 - protein, 159 aa, Homo sapiens
  Payload ID: 3984
  Gene Symbol: CORO1C
  Gene Name: coronin, actin binding protein, 1C
  ENSP ID: ENSP00000448130
MRRVVRQSKFRHVFGQAVKNDQCYDDIRVSRVTWDSSFCAVNPRFVAIIIEASGGGAFLVLPLHKTGRIDKSYPTVCGHTGPVLDIDWCPHNDQVIASGSEDCTVMVWQIPENGLTLSLTEPVVILEGHSKRVGIVAWHPTARNVLLSAEKYAGTNCSS

SEQ ID NO: 20012 - protein, 162 aa, Homo sapiens
  Payload ID: 3984
  Gene Symbol: CORO1C
  Gene Name: coronin, actin binding protein, 1C
  ENSP ID: ENSP00000448195
MRRVVRQSKFRHVFGQAVKNDQCYDDIRVSRVTWDSSFCAVNPRFVAIIIEASGGGAFLVLPLHKTGRIDKSYPTVCGHTGPVLDIDWCPHNDQVIASGSEDCTVMVWQIPENGLTLSLTEPVVILEGHSKRVGIVAWHPTARNVLLSAGCDNAIIIWNVGT

SEQ ID NO: 20013 - protein, 163 aa, Homo sapiens
  Payload ID: 3984
  Gene Symbol: CORO1C
  Gene Name: coronin, actin binding protein, 1C
  ENSP ID: ENSP00000448527
MRRVVRQSKFRHVFGQAVKNDQCYDDIRVSRVTWDSSFCAVNPRFVAIIIEASGGGAFLVLPLHKTGRIDKSYPTVCGHTGPVLDIDWCPHNDQVIASGSEDCTVMVWQIPENGLTLSLTEPVVILEGHSKRVGIVAWHPTARNVLLSAGCDNAIIIWNVGTG

SEQ ID NO: 20014 - protein, 181 aa, Homo sapiens
  Payload ID: 3984
  Gene Symbol: CORO1C
  Gene Name: coronin, actin binding protein, 1C
  ENSP ID: ENSP00000449330
MRRVVRQSKFRHVFGQAVKNDQCYDDIRVSRVTWDSSFCAVNPRFVAIIIEASGGGAFLVLPLHKTGRIDKSYPTVCGHTGPVLDIDWCPHNDQVIASGSEDCTVMVWQIPENGLTLSLTEPVVILEGHSKRVGIVAWHPTARNVLLSAGCDNAIIIWNVGTGEALINLDDMHSDMIYNVS

SEQ ID NO: 20015 - protein, 125 aa, Homo sapiens
  Payload ID: 3984
  Gene Symbol: CORO1C
  Gene Name: coronin, actin binding protein, 1C
  ENSP ID: ENSP00000449658
MVWQIPENGLTLSLTEPVVILEGHSKRVGIVAWHPTARNVLLSAGCDNAIIIWNVGTGEALINLDDMHSDMIYNVSWNRNGSLICTASKDKKVRVIDPRKQEIVAEKEKAHEGARPMRAIFLADG

SEQ ID NO: 20016 - protein, 525 aa, Homo sapiens
  Payload ID: 3985
  Gene Symbol: CORO2A
  Gene Name: coronin, actin binding protein, 2A
  Uniprot ID: Q92828
  ENSP ID: ENSP00000343746
MSWHPQYRSSKFRHVFGKPASKENCYDSVPITRSVHDNHFCAVNPHFIAVVTECAGGGAFLVIPLHQTGKLDPHYPKVCGHRGNVLDVKWNPFDDFEIASCSEDATIKIWSIPKQLLTRNLTAYRKELVGHARRVGLVEWHPTAANILFSAGYDYKVMIWNLDTKESVITSPMSTISCHQDVILSMSFNTNGSLLATTCKDRKIRVIDPRAGTVLQEASYKGHRASKVLFLGNLKKLMSTGTSRWNNRQVALWDQDNLSVPLMEEDLDGSSGVLFPFYDADTSMLYVVGKGDGNIRYYEVSADKPHLSYLTEYRSYNPQKGIGVMPKRGLDVSSCEIFRFYKLITTKSLIEPISMIVPRRSESYQEDIYPPTAGAQPSLTAQEWLSGMNRDPILVSLRPGSELLRPHPLPAERPIFNSMAPASPRLLNQTEKLAAEDGWRSSSLLEEKMPRWAAEHRLEEKKTWLTNGFDVFECPPPKTENELLQMFYRQQEEIRRLRELLTQREVQAKQLELEIKNLRMGSEQL

SEQ ID NO: 20017 - protein, 525 aa, Homo sapiens; identical to SEQ ID NO: 20016
  Payload ID: 3985
  Gene Symbol: CORO2A
  Gene Name: coronin, actin binding protein, 2A
  Uniprot ID: Q92828
  ENSP ID: ENSP00000364218

SEQ ID NO: 20018 - protein, 475 aa, Homo sapiens
  Payload ID: 3986
  Gene Symbol: CORO2B
  Gene Name: coronin, actin binding protein, 2B
  Uniprot ID: Q9UQ03
  ENSP ID: ENSP00000261861
MSWRPQYRSSKFRNVYGKVANREHCFDGIPITKNVHDNHFCAVNTRFLAIVTESAGGGSFLVIPLEQTGRIEPNYPKVCGHQGNVLDIKWNPFIDNIIASCSEDTSVRIWEIPEGGLKRNMTEALLELHGHSRRVGLVEWHPTTNNILFSAGYDYKVLIWNLDVGEPVKMIDCHTDVILCMSFNTDGSLLTTTCKDKKLRVIEPRSGRVLQEANCKNHRVNRVVFLGNMKRLLTTGVSRWNTRQIALWDQEDLSMPLIEEEIDGLSGLLFPFYDADTHMLYLAGKGDGNIRYYEISTEKPYLSYLMEFRSPAPQKGLGVMPKHGLDVSACEVFRFYKLVTLKGLIEPISMIVPRRSDSYQEDIYPMTPGTEPALTPDEWLGGINRDPVLMSLKEGYKKSSKMVFKAPIKEKKSVVVNGIDLLENVPPRTENELLRMFFRQQDEIRRLKEELAQKDIRIRQLQLELKNLRNSPKNC

SEQ ID NO: 20019 - protein, 475 aa, Homo sapiens; identical to SEQ ID NO: 20018
  Payload ID: 3986
  Gene Symbol: CORO2B
  Gene Name: coronin, actin binding protein, 2B
  Uniprot ID: Q9UQ03
  ENSP ID: ENSP00000443819

SEQ ID NO: 20020 - protein, 475 aa, Homo sapiens; identical to SEQ ID NO: 20018
  Payload ID: 3986
  Gene Symbol: CORO2B
  Gene Name: coronin, actin binding protein, 2B
  Uniprot ID: Q9UQ03
  ENSP ID: ENSP00000446250

SEQ ID NO: 20021 - protein, 480 aa, Homo sapiens
  Payload ID: 3986
  Gene Symbol: CORO2B
  Gene Name: coronin, actin binding protein, 2B
  Uniprot ID: Q9UQ03
  ENSP ID: ENSP00000454783
MTVTKMSWRPQYRSSKFRNVYGKVANREHCFDGIPITKNVHDNHFCAVNTRFLAIVTESAGGGSFLVIPLEQTGRIEPNYPKVCGHQGNVLDIKWNPFIDNIIASCSEDTSVRIWEIPEGGLKRNMTEALLELHGHSRRVGLVEWHPTTNNILFSAGYDYKVLIWNLDVGEPVKMIDCHTDVILCMSFNTDGSLLTTTCKDKKLRVIEPRSGRVLQEANCKNHRVNRVVFLGNMKRLLTTGVSRWNTRQIALWDQEDLSMPLIEEEIDGLSGLLFPFYDADTHMLYLAGKGDGNIRYYEISTEKPYLSYLMEFRSPAPQKGLGVMPKHGLDVSACEVFRFYKLVTLKGLIEPISMIVPRRSDSYQEDIYPMTPGTEPALTPDEWLGGINRDPVLMSLKEGYKKSSKMVFKAPIKEKKSVVVNGIDLLENVPPRTENELLRMFFRQQDEIRRLKEELAQKDIRIRQLQLELKNLRNSPKNC

SEQ ID NO: 20022 - protein, 550 aa, Homo sapiens
  Payload ID: 3987
  Gene Symbol: CTTN
  Gene Name: cortactin
  Uniprot ID: Q14247
  ENSP ID: ENSP00000301843
MWKASAGHAVSIAQDDAGADDWETDPDFVNDVSEKEQRWGAKTVQGSGHQEHINIHKLRENVFQEHQTLKEKELETGPKASHGYGGKFGVEQDRMDKSAVGHEYQSKLSKHCSQVDSVRGFGGKFGVQMDRVDQSAVGFEYQGKTEKHASQKDYSSGFGGKYGVQADRVDKSAVGFDYQGKTEKHESQRDYSKGFGGKYGIDKDKVDKSAVGFEYQGKTEKHESQKDYVKGFGGKFGVQTDRQDKCALGWDHQEKLQLHESQKDYKTGFGGKFGVQSERQDSAAVGFDYKEKLAKHESQQDYSKGFGGKYGVQKDRMDKNASTFEDVTQVSSAYQKTVPVEAVTSKTSNIRANFENLAKEKEQEDRRKAEAERAQRMAKERQEQEEARRKLEEQARAKTQTPPVSPAPQPTEERLPSSPVYEDAASFKAELSYRGPVSGTEPEPVYSMEAADYREASSQQGLAYATEAVYESAEAPGHYPAEDSTYDEYENDLGITAVALYDYQAAGDDEISFDPDDIITNIEMIDDGWWRGVCKGRYGLFPANYVELRQ

SEQ ID NO: 20023 - protein, 513 aa, Homo sapiens
  Payload ID: 3987
  Gene Symbol: CTTN
  Gene Name: cortactin
  Uniprot ID: Q14247
  ENSP ID: ENSP00000317189
MWKASAGHAVSIAQDDAGADDWETDPDFVNDVSEKEQRWGAKTVQGSGHQEHINIHKLRENVFQEHQTLKEKELETGPKASHGYGGKFGVEQDRMDKSAVGHEYQSKLSKHCSQVDSVRGFGGKFGVQMDRVDQSAVGFEYQGKTEKHASQKDYSSGFGGKYGVQADRVDKSAVGFDYQGKTEKHESQRDYSKGFGGKYGIDKDKVDKSAVGFEYQGKTEKHESQKDYVKGFGGKFGVQTDRQDKCALGWDHQEKLQLHESQKDYSKGFGGKYGVQKDRMDKNASTFEDVTQVSSAYQKTVPVEAVTSKTSNIRANFENLAKEKEQEDRRKAEAERAQRMAKERQEQEEARRKLEEQARAKTQTPPVSPAPQPTEERLPSSPVYEDAASFKAELSYRGPVSGTEPEPVYSMEAADYREASSQQGLAYATEAVYESAEAPGHYPAEDSTYDEYENDLGITAVALYDYQAAGDDEISFDPDDIITNIEMIDDGWWRGVCKGRYGLFPANYVELRQ

SEQ ID NO: 20024 - protein, 634 aa, Homo sapiens
  Payload ID: 3987
  Gene Symbol: CTTN
  Gene Name: cortactin
  Uniprot ID: Q14247
  ENSP ID: ENSP00000365745
MWKASAGHAVSIAQDDAGADDWETDPDFVNDVSEKEQRWGAKTVQGSGHQEHINIHKLRENVFQEHQTLKEKELETGPKASHGYGGKFGVEQDRMDKSAVGHEYQSKLSKHCSQVDSVRGFGGKFGVQMDRVDQSAVGFEYQGKTEKHASQKDYSSGFGGKYGVQADRVDKSAVGFDYQGKTEKHESQRDYSKGFGGKYGIDKDKVDKSAVGFEYQGKTEKHESQKDYVKGFGGKFGVQTDRQDKCALGWDHQEKLQLHESQKDYSKGFGGKYGVQKDRMDKNASTFEDVTQVSSAYQKTVPVEAVTSKTSNIRANFENLAKEKEQEDRRKAEAERAQRMAKERQEQEEARRKLEEQARAKTQTPPVSPAPQPTEERLPSSPVYEDAASFKAELSYRGPVSGTEPEPVYSMEAADYREASSQQGLAYATEAVYESAEAPGHYPAEDSTYDEYENDLGITAVALYDYQAAGDDEISFDPDDIITNIEMIDDGWWRGVCKGRFRELAFSCVRVALVPIKCSRDLPGQARGLRSALWRVGRKDCPRRGASSRVSLLGRRGLGLMEVNPELSHPEHRSCHVRWEICLCHTVTARRIRKLISFLRSREAGPVPSCSQVGGVSFQKVTWKCLGTWVPECP

SEQ ID NO: 20025 - protein, 265 aa, Homo sapiens
  Payload ID: 3987
  Gene Symbol: CTTN
  Gene Name: cortactin
  ENSP ID: ENSP00000431421
TSKTSNIRANFENLAKEKEQEDRRKAEAERAQRMAKERQEQEEARRKLEEQARAKTQTPPVSPAPQPTEERLPSSPVYEDAASFKAELSYRGPVSGTEPEPVYSMEAADYREASSQQGLAYATEAVYESAEAPGHYPAEDSTYDEYENDLGITAVALYDYQAAGDDEISFDPDDIITNIEMIDDGWWRGVCKGRFRELAFSCVRVALVPIKCSRDLPGQARGLRKLISFLRSREAGPVPSCSQVGGVSFQKVTWKCLGTWVPECP

SEQ ID NO: 20026 - protein, 128 aa, Homo sapiens
  Payload ID: 3987
  Gene Symbol: CTTN
  Gene Name: cortactin
  ENSP ID: ENSP00000436613
RKAEAERAQRMAKERQEQEEARRKLEEQARAKTQTPPVSPAPQPTEERLPSSPVYEDAASFKAELSYRGPVSGTEPEPVYSMEAADYREASSQQGLAYATEAVYESAEAPGHYPAALSWLSFRGQHLR

SEQ ID NO: 20027 - protein, 1663 aa, Homo sapiens
  Payload ID: 3988
  Gene Symbol: CTTNBP2
  Gene Name: cortactin binding protein 2
  Uniprot ID: Q8WZ74
  ENSP ID: ENSP00000160373
MATDGASCEPDLSRAPEDAAGAAAEAAKKEFDVDTLSKSELRMLLSVMEGELEARDLVIEALRARRKEVFIQERYGRFNLNDPFLALQRDYEAGAGDKEKKPVCTNPLSILEAVMAHCKKMQERMSAQLAAAESRQKKLEMEKLQLQALEQEHKKLAARLEEERGKNKQVVLMLVKECKQLSGKVIEEAQKLEDVMAKLEEEKKKTNELEEELSAEKRRSTEMEAQMEKQLSEFDTEREQLRAKLNREEAHTTDLKEEIDKMRKMIEQLKRGSDSKPSLSLPRKTKDRRLVSISVGTEGTVTRSVACQTDLVTENADHMKKLPLTMPVKPSTGSPLVSANAKGSVCTSATMARPGIDRQASYGDLIGASVPAFPPPSANKIEENGPSTGSTPDPTSSTPPLPSNAAPPTAQTPGIAPQNSQAPPMHSLHSPCANTSLHPGLNPRIQAARFRFQGNANDPDQNGNTTQSPPSRDVSPTSRDNLVAKQLARNTVTQALSRFTSPQAGAPSRPGVPPTGDVGTHPPVGRTSLKTHGVARVDRGNPPPIPPKKPGLSQTPSPPHPQLKVIIDSSRASNTGAKVDNKTVASTPSSLPQGNRVINEENLPKSSSPQLPPKPSIDLTVAPAGCAVSALATSQVGAWPAATPGLNQPACSDSSLVIPTTIAFCSSINPVSASSCRPGASDSLLVTASGWSPSLTPLLMSGGPAPLAGRPTLLQQAAAQGNVTLLSMLLNEEGLDINYSCEDGHSALYSAAKNGHTDCVRLLLSAEAQVNAADKNGFTPLCAAAAQGHFECVELLISYDANINHAADGGQTPLYLACKNGNKECIKLLLEAGTNRSVKTTDGWTPVHAAVDTGNVDSLKLLMYHRIPAHGNSFNEEESESSVFDLDGGEESPEGISKPVVPADLINHANREGWTAAHIAASKGFKNCLEILCRHGGLEPERRDKCNRTVHDVATDDCKHLLENLNALKIPLRISVGEIEPSNYGSDDLECENTICALNIRKQTSWDDFSKAVSQALTNHFQAISSDGWWSLEDVTCNNTTDSNIGLSARSIRSITLGNVPWSVGQSFAQSPWDFMRKNKAEHITVLLSGPQEGCLSSVTYASMIPLQMMQNYLRLVEQYHNVIFHGPEGSLQDYIVHQLALCLKHRQMAAGFSCEIVRAEVDAGFSKEQLLDLFISSACLIPVKQSPSKKKIIIILENLEKSSLSELLRDFLAPLENRSTESPCTFQKGNGLSECYYFHENCFLMGTIAKACLQGSDLLVQQHFRWVQLRWDGEPMQGLLQRFLRRKVVNKFKGQAPSPCDPVCKIVDWALSVWRQLNSCLARLGTPEALLGPKYFLSCPVVPGHAQVTVKWMSKLWNGVIAPRVQEAILSRASVKRQPGFGQTTAKRHPSQGQQAVVKAALSILLNKAVLHGCPLPRAELDQHTADFKGGSFPLSIVSSYNTCNKKKGESGAWRKVNTSPRRKSGRFSLPTWNKPDLSTEGMKNKTISQLNCNRNASLSKQKSLENDLSLTLNLDQRLSLGSDDEADLVKELQSMCSSKSESDISKIADSRDDLRMFDSSGNNPVLSATINNLRMPVSQKEVSPLSSHQTTECSNSKSKTELGVSRVKSFLPVPRSKVTQCSQNTKRSSSSSNTRQIEINNNSKEVNWNLHKNEHLEKPNK

SEQ ID NO: 20028 - protein, 47 aa, Homo sapiens
  Payload ID: 3988
  Gene Symbol: CTTNBP2
  Gene Name: cortactin binding protein 2
  ENSP ID: ENSP00000389491
  MOD_RES (1)..(1): Any amino acid
XSVWRQLNSCLARLGTPEALLGPKYFLSCPVVPGHAQVTVKARPAYS

SEQ ID NO: 20029 - protein, 1151 aa, Homo sapiens
  Payload ID: 3988
  Gene Symbol: CTTNBP2
  Gene Name: cortactin binding protein 2
  ENSP ID: ENSP00000389576
  MOD_RES (1)..(1): Any amino acid
XDVSPTSRDNLVAKQLARNTVTQALSRFTSPQAGAPSRPGVPPTGDVGTHPPVGRTSLKTHGVARVDRGNPPPIPPKKPGLSQTPSPPHPQLKVIIDSSRASNTGAKVDNKTVASTPSSLPQGNRVINEENLPKSSSPQLPPKPSIDLTVAPAGCAVSALATSQKIQKVKCTREEPSCWSPSLTPLLMSGGPAPLAGRPTLLQQAAAQGNVTLLSMLLNEEGLDINYSCEDGHSALYSAAKNGHTDCVRLLLSAEAQVNAADKNGFTPLCAAAAQGHFECVELLISYDANINHAADGGQTPLYLACKNGNKECIKLLLEAGTNRSVKTTDGWTPVHAAVDTGNVDSLKLLMYHRIPAHGNSFNEEESESSVFDLDGGEESPEGISKPVVPADLINHANREGWTAAHIAASKGFKNCLEILCRHGGLEPERRDKCNRTVHDVATDDCKHLLENLNALKIPLRISVGEIEPSNYGSDDLECENTICALNIRKQTSWDDFSKAVSQALTNHFQAISSDGWWSLEDVTCNNTTDSNIGLSARSIRSITLGNVPWSVGQSFAQSPWDFMRKNKAEHITVLLSGPQEGCLSSVTYASMIPLQMMQNYLRLVEQYHNVIFHGPEGSLQDYIVHQLALCLKHRQMAAGFSCEIVRAEVDAGFSKEQLLDLFISSACLIPVKQSPSKKKIIIILENLEKSSLSELLRDFLAPLENRSTESPCTFQKGNGLSECYYFHENCFLMGTIAKACLQGSDLLVQQHFRWVQLRWDGEPMQGLLQRFLRRKVVNKFKGQAPSPCDPVCKIVDWALSVWRQLNSCLARLGTPEALLGPKYFLSCPVVPGHAQVTVKWMSKLWNGVIAPRVQEAILSRASVKRQPGFGQTTAKRHPSQGQQAVVKAALSILLNKAVLHGCPLPRAELDQHTADFKGGSFPLSIVSSYNTCNKKKGESGAWRKVNTSPRRKSGRFSLPTWNKPDLSTEGMKNKTISQLNCNRNASLSKQKSLENDLSLTLNLDQRLSLGSDDEADLVKELQSMCSSKSESDISKIADSRDDLRMFDSSGNNPVLSATINNLRMPVSQKEVSPLSSHQTTECSNSKSKTELGVSRVKSFLPVPRSKVTQCSQNTKRSSSSSNTRQIEINNNSKEVNWNLHKNEHLEKPNK

SEQ ID NO: 20030 - protein, 95 aa, Homo sapiens
  Payload ID: 3988
  Gene Symbol: CTTNBP2
  Gene Name: cortactin binding protein 2
  ENSP ID: ENSP00000393373
MLLSVMEGELEARDLVIEALRARRKEVFIQERYGRFNLNDPFLALQRDYEAGAGDKEKKPVCTNPLSILEAVMAHCKKMQERMSAQLAAAESRQK

SEQ ID NO: 20031 - protein, 193 aa, Homo sapiens
  Payload ID: 3988
  Gene Symbol: CTTNBP2
  Gene Name: cortactin binding protein 2
  ENSP ID: ENSP00000395925
  MOD_RES (1)..(1): Any amino acid
XDLECENTICALNIRKQTSWDDFSKAVSQALTNHFQAISSDGWWSLEDVTCNNTTDSNIGLSARSIRSITLGNVPWSVGQSFAQSPWDFMRKNKAEHITVLLSGPQEGCLSSVTYASMIPLQMMQNYLRLHRQMAAGFSCEIVRAEVDAGFSKEQLLDLFISSACLIPVKQSPSKKKIIIILENLEKSSLSEL

SEQ ID NO: 20032 - protein, 161 aa, Homo sapiens
  Payload ID: 3988
  Gene Symbol: CTTNBP2
  Gene Name: cortactin binding protein 2
  ENSP ID: ENSP00000396014
MLLSVMEGELEARDLVIEALRARRKEVFIQERYGRFNLNDPFLALQRDYEAGAGDKEKKPVCTNPLSILEAVMAHCKKMQERMSAQLAAAESRQKKLEMEKLQLQALEQEHKKLAARLEEERGKNKQVVLMLVKECKQLSGKVIEEAQKLEDVMAKLEEEK

SEQ ID NO: 20033 - protein, 640 aa, Homo sapiens
  Payload ID: 3988
  Gene Symbol: CTTNBP2
  Gene Name: cortactin binding protein 2
  ENSP ID: ENSP00000397678
MATDGASCEPDLSRAPEDAAGAAAEAAKKEFDVDTLSKSELRMLLSVMEGELEARDLVIEALRARRKEVFIQERYGRFNLNDPFLALQRDYEAGAGDKEKKPVCTNPLSILEAVMAHCKKMQERMSAQLAAAESRQKKLEMEKLQLQALEQEHKKLAARLEEERGKNKQVVLMLVKECKQLSGKVIEEAQKLEDVMAKLEEEKKKTNELEEELSAEKRRSTEMEAQMEKQLSEFDTEREQLRAKLNREEAHTTDLKEEIDKMRKMIEQLKRGSDSKPSLSLPRKTKDRRLVSISVGTEGTVTRSVACQTDLVTENADHMKKLPLTMPVKPSTGSPLVSANAKGSVCTSATMARPGIDRQASYGDLIGASVPAFPPPSANKIEENGPSTGSTPDPTSSTPPLPSNAAPPTAQTPGIAPQNSQAPPMHSLHSPCANTSLHPGLNPRIQAARFRFQGNANDPDQNGNTTQSPPSRDVSPTSRDNLVAKQLARNTVTQALSRFTSPQAGAPSRPGVPPTGDVGTHPPVGRTSLKTHGVARVDRGNPPPIPPKKPGLSQTPSPPHPQLKVIIDSSRASNTGAKVDNKTVASTPSSLPQGNRVINEENLPKSSSPQLPPKPSIDLTVAPAGCAVSALATSQAGHPP

SEQ ID NO: 20034 - protein, 136 aa, Homo sapiens
  Payload ID: 3988
  Gene Symbol: CTTNBP2
  Gene Name: cortactin binding protein 2
  ENSP ID: ENSP00000405831
MLLSVMEGELEARDLVIEALRARRKEVFIQERYGRFNLNDPFLALQRDYEAGAGDKEKKPVCTNPLSILEAVMAHCKKMQERMSAQLAAAESRQKKLEMEKLQLQALEQEHKKLAARLEEERGKNKQVVLMLVKEC

SEQ ID NO: 20035 - protein, 120 aa, Homo sapiens
  Payload ID: 3988
  Gene Symbol: CTTNBP2
  Gene Name: cortactin binding protein 2
  ENSP ID: ENSP00000406142
  MOD_RES (1)..(1): Any amino acid
XWDDFSKAVSQALTNHFQAISSDGWWSLEDVTCNNTTDSNIGLSARSIRSITLGNVPWSVGQSFAQSPWDFMRKNKAEHITVLLSGPQEGCLSSVTYASMIPLQMMQNYLRLMGKLNRER

SEQ ID NO: 20036 - protein, 82 aa, Homo sapiens
  Payload ID: 3989
  Gene Symbol: CTXN1
  Gene Name: cortexin 1
  Uniprot ID: P60606
  ENSP ID: ENSP00000313226
MSATWTLSPEPLPPSTGPPVGAGLDAEQRTVFAFVLCLLVVLVLLMVRCVRILLDPYSRMPASSWTDHKEALERGQFDYALV

SEQ ID NO: 20037 - protein, 81 aa, Homo sapiens
  Payload ID: 3990
  Gene Symbol: CTXN2
  Gene Name: cortexin 2
  Uniprot ID: P0C2S0
  ENSP ID: ENSP00000406145
MSSTYCGNSSAKMSVNEVSAFSLTLEQKTGFAFVGILCIFLGLLIIRCFKILLDPYSSMPSSTWEDEVEEFDKGTFEYALA

SEQ ID NO: 20038 - protein, 81 aa, Homo sapiens
  Payload ID: 3991
  Gene Symbol: CTXN3
  Gene Name: cortexin 3
  Uniprot ID: Q4LDR2
  ENSP ID: ENSP00000368758
MDGGQPIPSSLVPLGNESADSSMSLEQKMTFVFVILLFIFLGILIVRCFRILLDPYRSMPTSTWADGLEGLEKGQFDHALA

SEQ ID NO: 20039 - protein, 81 aa, Homo sapiens; identical to SEQ ID NO: 20038
  Payload ID: 3991
  Gene Symbol: CTXN3
  Gene Name: cortexin 3
  Uniprot ID: Q4LDR2
  ENSP ID: ENSP00000378732

SEQ ID NO: 20040 - protein, 81 aa, Homo sapiens; identical to SEQ ID NO: 20038
  Payload ID: 3991
  Gene Symbol: CTXN3
  Gene Name: cortexin 3
  Uniprot ID: Q4LDR2
  ENSP ID: ENSP00000482081

SEQ ID NO: 20041 - protein, 196 aa, Homo sapiens
  Payload ID: 3992
  Gene Symbol: CRH
  Gene Name: corticotropin releasing hormone
  Uniprot ID: P06850
  ENSP ID: ENSP00000276571
MRLPLLVSAGVLLVALLPCPPCRALLSRGPVPGARQAPQHPQPLDFFQPPPQSEQPQQPQARPVLLRMGEEYFLRLGNLNKSPAAPLSPASSLLAGGSGSRPSPEQATANFFRVLLQQLLLPRRSLDSPAALAERGARNALGGHQEAPERERRSEEPPISLDLTFHLLREVLEMARAEQLAQQAHSNRKLMEIIGK

SEQ ID NO: 20042 - protein, 322 aa, Homo sapiens
  Payload ID: 3993
  Gene Symbol: CRHBP
  Gene Name: corticotropin releasing hormone binding protein
  Uniprot ID: P24387
  ENSP ID: ENSP00000274368
MSPNFKLQCHFILIFLTALRGESRYLELREAADYDPFLLFSANLKRELAGEQPYRRALRCLDMLSLQGQFTFTADRPQLHCAAFFISEPEEFITIHYDQVSIDCQGGDFLKVFDGWILKGEKFPSSQDHPLPSAERYIDFCESGLSRRSIRSSQNVAMIFFRVHEPGNGFTLTIKTDPNLFPCNVISQTPNGKFTLVVPHQHRNCSFSIIYPVVIKISDLTLGHVNGLQLKKSSAGCEGIGDFVELLGGTGLDPSKMTPLADLCYPFHGPAQMKVGCDNTVVRMVSSGKHVNRVTFEYRQLEPYELENPNGNSIGEFCLSGL

SEQ ID NO: 20043 - protein, 238 aa, Homo sapiens
  Payload ID: 3993
  Gene Symbol: CRHBP
  Gene Name: corticotropin releasing hormone binding protein
  ENSP ID: ENSP00000426097
MSPNFKLQCHFILIFLTALRGESRYLELREAADYDPFLLFSANLKRELAGEQPYRRALRCLDMLSLQGQFTFTADRPQLHCAAFFISEPEEFITIHYDQVSIDCQGGDFLKVFDGWILKGEKFPSSQDHPLPSAERYIDFCESGLSRRSIRSSQNVAMIFFRVHEPGNGFTLTIKTDPNLFPCNVISQTPNGKFTLVVPHQHRNCSFSIIYPVVIKISDLTLGHVNGLQLKVSCLLVS

SEQ ID NO: 20044 - protein, 145 aa, Homo sapiens
  Payload ID: 3994
  Gene Symbol: CRHR1
  Gene Name: corticotropin releasing hormone receptor 1
  ENSP ID: ENSP00000239167
MGGHPQLRLVKALLLLGLNPVSASLQDQHCESLSLASNISGLQCNASVDLIGTCWPRSPAGQLVVRPCPAFFYGVRYNTTNNGYRECLANGSWAARVNYSECQEILNEEKKSKVHYHVAVIINYLGHCISLVALLVAFVLFLRLS

SEQ ID NO: 20045 - protein, 430 aa, Homo sapiens
  Payload ID: 3994
  Gene Symbol: CRHR1
  Gene Name: corticotropin releasing hormone receptor 1
  ENSP ID: ENSP00000293493
MGGHPQLRLVKALLLLGLNPVSASLQDQHCESLSLASNISGLQCNASVDLIGTCWPRSPAGQLVVRPCPAFFYGVRYNTTNNGYRECLANGSWAARVNYSECQEILNEEKKSKVHYHVAVIINYLGHCISLVALLVAFVLFLRLRPGCTHWGDQADGALEVGAPWSGAPFQVRRSIRCLRNIIHWNLISAFILRNATWFVVQLTMSPEVHQSNVGWCRLVTAAYNYFHVTNFFWMFGEGCYLHTAIVLTYSTDRLRKWMFICIGWGVPFPIIVAWAIGKLYYDNEKCWFGKRPGVYTDYIYQGPMILVLLINFIFLFNIVRILMTKLRASTTSETIQYRKAVKATLVLLPLLGITYMLFFVNPGEDEVSRVVFIYFNSFLESFQVRSAIRKRWHRWQDKHSIRARVARAMSIPTSPTRVSFHSIKQSTAV

SEQ ID NO: 20046 - protein, 415 aa, Homo sapiens
  Payload ID: 3994
  Gene Symbol: CRHR1
  Gene Name: corticotropin releasing hormone receptor 1
  Uniprot ID: P34998
  ENSP ID: ENSP00000326060
MGGHPQLRLVKALLLLGLNPVSASLQDQHCESLSLASNISGLQCNASVDLIGTCWPRSPAGQLVVRPCPAFFYGVRYNTTNNGYRECLANGSWAARVNYSECQEILNEEKKSKVHYHVAVIINYLGHCISLVALLVAFVLFLRLRSIRCLRNIIHWNLISAFILRNATWFVVQLTMSPEVHQSNVGWCRLVTAAYNYFHVTNFFWMFGEGCYLHTAIVLTYSTDRLRKWMFICIGWGVPFPIIVAWAIGKLYYDNEKCWFGKRPGVYTDYIYQGPMILVLLINFIFLFNIVRILMTKLRASTTSETIQYRKAVKATLVLLPLLGITYMLFFVNPGEDEVSRVVFIYFNSFLESFQGFFVSVFYCFLNSEVRSAIRKRWHRWQDKHSIRARVARAMSIPTSPTRVSFHSIKQSTAV

SEQ ID NO: 20047 - protein, 314 aa, Homo sapiens
  Payload ID: 3994
  Gene Symbol: CRHR1
  Gene Name: corticotropin releasing hormone receptor 1
  ENSP ID: ENSP00000340522
MVSATIPQKKSKVHYHVAVIINYLGHCISLVALLVAFVLFLRLRSIRCLRNIIHWNLISAFILRNATWFVVQLTMSPEVHQSNVGWCRLVTAAYNYFHVTNFFWMFGEGCYLHTAIVLTYSTDRLRKWMFICIGWGVPFPIIVAWAIGKLYYDNEKCWFGKRPGVYTDYIYQGPMILVLLINFIFLFNIVRILMTKLRASTTSETIQYRKAVKATLVLLPLLGITYMLFFVNPGEDEVSRVVFIYFNSFLESFQGFFVSVFYCFLNSEVRSAIRKRWHRWQDKHSIRARVARAMSIPTSPTRVSFHSIKQSTAV

SEQ ID NO: 20048 - protein, 375 aa, Homo sapiens
  Payload ID: 3994
  Gene Symbol: CRHR1
  Gene Name: corticotropin releasing hormone receptor 1
  Uniprot ID: P34998
  ENSP ID: ENSP00000344068
MGGHPQLRLVKALLLLGLNPVSASLQDQHCESLSLASNISDNGYRECLANGSWAARVNYSECQEILNEEKKSKVHYHVAVIINYLGHCISLVALLVAFVLFLRLRSIRCLRNIIHWNLISAFILRNATWFVVQLTMSPEVHQSNVGWCRLVTAAYNYFHVTNFFWMFGEGCYLHTAIVLTYSTDRLRKWMFICIGWGVPFPIIVAWAIGKLYYDNEKCWFGKRPGVYTDYIYQGPMILVLLINFIFLFNIVRILMTKLRASTTSETIQYRKAVKATLVLLPLLGITYMLFFVNPGEDEVSRVVFIYFNSFLESFQGFFVSVFYCFLNSEVRSAIRKRWHRWQDKHSIRARVARAMSIPTSPTRVSFHSIKQSTAV

SEQ ID NO: 20049 - protein, 444 aa, Homo sapiens
  Payload ID: 3994
  Gene Symbol: CRHR1
  Gene Name: corticotropin releasing hormone receptor 1
  Uniprot ID: P34998
  ENSP ID: ENSP00000381333
MGGHPQLRLVKALLLLGLNPVSASLQDQHCESLSLASNISGLQCNASVDLIGTCWPRSPAGQLVVRPCPAFFYGVRYNTTNNGYRECLANGSWAARVNYSECQEILNEEKKSKVHYHVAVIINYLGHCISLVALLVAFVLFLRLRPGCTHWGDQADGALEVGAPWSGAPFQVRRSIRCLRNIIHWNLISAFILRNATWFVVQLTMSPEVHQSNVGWCRLVTAAYNYFHVTNFFWMFGEGCYLHTAIVLTYSTDRLRKWMFICIGWGVPFPIIVAWAIGKLYYDNEKCWFGKRPGVYTDYIYQGPMILVLLINFIFLFNIVRILMTKLRASTTSETIQYRKAVKATLVLLPLLGITYMLFFVNPGEDEVSRVVFIYFNSFLESFQGFFVSVFYCFLNSEVRSAIRKRWHRWQDKHSIRARVARAMSIPTSPTRVSFHSIKQSTAV

SEQ ID NO: 20050 - protein, 52 aa, Homo sapiens
  Payload ID: 3994
  Gene Symbol: CRHR1
  Gene Name: corticotropin releasing hormone receptor 1
  ENSP ID: ENSP00000439934
  MOD_RES (1)..(1): Any amino acid
XCWFGKRPGVYTDYIYQGPMILVLLEGCESHSGAAAPPGHHLHAVLRQSRGG

SEQ ID NO: 20051 - protein, 401 aa, Homo sapiens
  Payload ID: 3994
  Gene Symbol: CRHR1
  Gene Name: corticotropin releasing hormone receptor 1
  Uniprot ID: P34998
  ENSP ID: ENSP00000462016
MGGHPQLRLVKALLLLGLNPVSASLQDQHCESLSLASNISGLQCNASVDLIGTCWPRSPAGQLVVRPCPAFFYGVRYNTTNNGYRECLANGSWAARVNYSECQEILNEEKKSKVHYHVAVIINYLGHCISLVALLVAFVLFLRLRSIRCLRNIIHWNLISAFILRNATWFVVQLTMSPEVHQSNVGWCRLVTAAYNYFHVTNFFWMFGEGCYLHTAIVLTYSTDRLRKWMFICIGWGVPFPIIVAWAIGKLYYDNEKCWFGKRPGVYTDYIYQGPMILVLLINFIFLFNIVRILMTKLRASTTSETIQYRKAVKATLVLLPLLGITYMLFFVNPGEDEVSRVVFIYFNSFLESFQVRSAIRKRWHRWQDKHSIRARVARAMSIPTSPTRVSFHSIKQSTAV

SEQ ID NO: 20052 - protein, 152 aa, Homo sapiens
  Payload ID: 3994
  Gene Symbol: CRHR1
  Gene Name: corticotropin releasing hormone receptor 1
  ENSP ID: ENSP00000462553
YGVRYNTTNNGYRECLANGSWAARVNYSECQEILNEEKKSKVHYHVAVIINYLGHCISLVALLVAFVLFLRLRSIRCLRNIIHWNLISAFILRNATWFVVQLTMSPEVHQSNVVCPSPSLWPGPLGSCTTTMRSAGLAKGLGCTPTTSTRAP

SEQ ID NO: 20053 - protein, 75 aa, Homo sapiens
  Payload ID: 3994
  Gene Symbol: CRHR1
  Gene Name: corticotropin releasing hormone receptor 1
  ENSP ID: ENSP00000463177
  MOD_RES (1)..(1): Any amino acid
XCWFGKRPGVYTDYIYQGPMILVLLINFIFLFNIVRILMTKLRASTTSETIQYRASLCLCSTVSSIVRSVLPSGR

SEQ ID NO: 20054 - protein, 93 aa, Homo sapiens
  Payload ID: 3994
  Gene Symbol: CRHR1
  Gene Name: corticotropin releasing hormone receptor 1
  ENSP ID: ENSP00000463852
  MOD_RES (1)..(1): Any amino acid
XSLASNISGLQCNASVDLIGTCWPRSPAGQLVVRPCPAFFYGVRYNTTNNGYRECLANGSWAARVNYSECQEILNEEEPGPQAQPGRAHRGGT

SEQ ID NO: 20055 - protein, 415 aa, Homo sapiens; identical to SEQ ID NO: 20046
  Payload ID: 3994
  Gene Symbol: CRHR1
  Gene Name: corticotropin releasing hormone receptor 1
  Uniprot ID: P34998
  ENSP ID: ENSP00000477786

SEQ ID NO: 20056 - protein, 375 aa, Homo sapiens; identical to SEQ ID NO: 20048
  Payload ID: 3994
  Gene Symbol: CRHR1
  Gene Name: corticotropin releasing hormone receptor 1
  Uniprot ID: P34998
  ENSP ID: ENSP00000478177

SEQ ID NO: 20057 - protein, 154 aa, Homo sapiens
  Payload ID: 3994
  Gene Symbol: CRHR1
  Gene Name: corticotropin releasing hormone receptor 1
  ENSP ID: ENSP00000478252
MGGHPQLRLVKALLLLGLNPVSASLQDQHCESLSLASNISEKKQGALPCRSHHQLPGPLYLPGGPPGGLCPLSAAQEHPVPAKHHPLEPHLRLHPAQRHLVRGPANHEPRGPPEQRGLVQVGDSRLQLLPCDQLLLDVRRGLLPAHSHRAHLLH

SEQ ID NO: 20058 - protein, 186 aa, Homo sapiens
  Payload ID: 3994
  Gene Symbol: CRHR1
  Gene Name: corticotropin releasing hormone receptor 1
  ENSP ID: ENSP00000478408
MGGHPQLRLVKALLLLGLNPVSASLQDQHCESLSLASNISEKKQGALPCRSHHQLPGPLYLPGGPPGGLCPLSAAQEHPVPAKHHPLEPHLRLHPAQRHLVRGPANHEPRGPPEQRGLVQVGDSRLQLLPCDQLLLDVRRGLLPAHSHRAHLLHRPAAQMDVHLHWLGCALPHHCGLGHWEAVLRQ

SEQ ID NO: 20059 - protein, 430 aa, Homo sapiens; identical to SEQ ID NO: 20045
  Payload ID: 3994
  Gene Symbol: CRHR1
  Gene Name: corticotropin releasing hormone receptor 1
  ENSP ID: ENSP00000479052

SEQ ID NO: 20060 - protein, 430 aa, Homo sapiens; identical to SEQ ID NO: 20045
  Payload ID: 3994
  Gene Symbol: CRHR1
  Gene Name: corticotropin releasing hormone receptor 1
  ENSP ID: ENSP00000480241

SEQ ID NO: 20061 - protein, 444 aa, Homo sapiens; identical to SEQ ID NO: 20049
  Payload ID: 3994
  Gene Symbol: CRHR1
  Gene Name: corticotropin releasing hormone receptor 1
  Uniprot ID: P34998
  ENSP ID: ENSP00000480396

SEQ ID NO: 20062 - protein, 375 aa, Homo sapiens; identical to SEQ ID NO: 20048
  Payload ID: 3994
  Gene Symbol: CRHR1
  Gene Name: corticotropin releasing hormone receptor 1
  Uniprot ID: P34998
  ENSP ID: ENSP00000480752

SEQ ID NO: 20063 - protein, 314 aa, Homo sapiens; identical to SEQ ID NO: 20047
  Payload ID: 3994
  Gene Symbol: CRHR1
  Gene Name: corticotropin releasing hormone receptor 1
  ENSP ID: ENSP00000481116

SEQ ID NO: 20064 - protein, 415 aa, Homo sapiens; identical to SEQ ID NO: 20046
  Payload ID: 3994
  Gene Symbol: CRHR1
  Gene Name: corticotropin releasing hormone receptor 1
  Uniprot ID: P34998
  ENSP ID: ENSP00000483802

SEQ ID NO: 20065 - protein, 314 aa, Homo sapiens; identical to SEQ ID NO: 20047
  Payload ID: 3994
  Gene Symbol: CRHR1
  Gene Name: corticotropin releasing hormone receptor 1
  ENSP ID: ENSP00000484097

SEQ ID NO: 20066 - protein, 444 aa, Homo sapiens; identical to SEQ ID NO: 20049
  Payload ID: 3994
  Gene Symbol: CRHR1
  Gene Name: corticotropin releasing hormone receptor 1
  Uniprot ID: P34998
  ENSP ID: ENSP00000484387

SEQ ID NO: 20067 - protein, 154 aa, Homo sapiens; identical to SEQ ID NO: 20057
  Payload ID: 3994
  Gene Symbol: CRHR1
  Gene Name: corticotropin releasing hormone receptor 1
  ENSP ID: ENSP00000484545

SEQ ID NO: 20068 - protein, 152 aa, Homo sapiens; identical to SEQ ID NO: 20052
  Payload ID: 3994
  Gene Symbol: CRHR1
  Gene Name: corticotropin releasing hormone receptor 1
  ENSP ID: ENSP00000487873

SEQ ID NO: 20069 - protein, 52 aa, Homo sapiens; identical to SEQ ID NO: 20050
  Payload ID: 3994
  Gene Symbol: CRHR1
  Gene Name: corticotropin releasing hormone receptor 1
  ENSP ID: ENSP00000488141
  MOD_RES (1)..(1): Any amino acid

SEQ ID NO: 20070 - protein, 401 aa, Homo sapiens; identical to SEQ ID NO: 20051
  Payload ID: 3994
  Gene Symbol: CRHR1
  Gene Name: corticotropin releasing hormone receptor 1
  Uniprot ID: P34998
  ENSP ID: ENSP00000488342

SEQ ID NO: 20071 - protein, 93 aa, Homo sapiens; identical to SEQ ID NO: 20054
  Payload ID: 3994
  Gene Symbol: CRHR1
  Gene Name: corticotropin releasing hormone receptor 1
  ENSP ID: ENSP00000488353
  MOD_RES (1)..(1): Any amino acid

SEQ ID NO: 20072 - protein, 145 aa, Homo sapiens; identical to SEQ ID NO: 20044
  Payload ID: 3994
  Gene Symbol: CRHR1
  Gene Name: corticotropin releasing hormone receptor 1
  ENSP ID: ENSP00000488779

SEQ ID NO: 20073 - protein, 75 aa, Homo sapiens; identical to SEQ ID NO: 20053
  Payload ID: 3994
  Gene Symbol: CRHR1
  Gene Name: corticotropin releasing hormone receptor 1
  ENSP ID: ENSP00000488796
  MOD_RES (1)..(1): Any amino acid

SEQ ID NO: 20074 - protein, 240 aa, Homo sapiens
  Payload ID: 3995
  Gene Symbol:
  Gene Name: corticotropin releasing hormone receptor 1 [Source:EntrezGene
  Acc:1394]
  ENSP ID: ENSP00000488912
MSPEVHQSNVGWCRLVTAAYNYFHVTNFFWMFGEGCYLHTAIVLTYSTDRLRKWMFICIGWGVPFPIIVAWAIGKLYYDNEKCWFGKRPGVYTDYIYQGPMILVLLINFIFLFNIVRILMTKLRASTTSETIQYRKAVKATLVLLPLLGITYMLFFVNPGEDEVSRVVFIYFNSFLESFQGFFVSVFYCFLNSEVRSAIRKRWHRWQDKHSIRARVARAMSIPTSPTRVSFHSIKQSTAV

SEQ ID NO: 20075 - protein, 438 aa, Homo sapiens
  Payload ID: 3996
  Gene Symbol: CRHR2
  Gene Name: corticotropin releasing hormone receptor 2
  Uniprot ID: Q13324
  ENSP ID: ENSP00000340943
MRGPSGPPGLLYVPHLLLCLLCLLPPPLQYAAGQSQMPKDQPLWALLEQYCHTIMTLTNLSGPYSYCNTTLDQIGTCWPRSAAGALVERPCPEYFNGVKYNTTRNAYRECLENGTWASKINYSQCEPILDDKQRKYDLHYRIALVVNYLGHCVSVAALVAAFLLFLALRSIRCLRNVIHWNLITTFILRNVMWFLLQLVDHEVHESNEVWCRCITTIFNYFVVTNFFWMFVEGCYLHTAIVMTYSTERLRKCLFLFIGWCIPFPIIVAWAIGKLYYENEQCWFGKEPGDLVDYIYQGPIILVLLINFVFLFNIVRILMTKLRASTTSETIQYRKAVKATLVLLPLLGITYMLFFVNPGEDDLSQIMFIYFNSFLQSFQGFFVSVFYCFFNGEVRSAVRKRWHRWQDHHSLRVPMARAMSIPTSPTRISFHSIKQTAAV

SEQ ID NO: 20076 - protein, 397 aa, Homo sapiens
  Payload ID: 3996
  Gene Symbol: CRHR2
  Gene Name: corticotropin releasing hormone receptor 2
  Uniprot ID: Q13324
  ENSP ID: ENSP00000344304
MGREPWPEDRDLGFPQLFCQGPYSYCNTTLDQIGTCWPRSAAGALVERPCPEYFNGVKYNTTRNAYRECLENGTWASKINYSQCEPILDDKQRKYDLHYRIALVVNYLGHCVSVAALVAAFLLFLALRSIRCLRNVIHWNLITTFILRNVMWFLLQLVDHEVHESNEVWCRCITTIFNYFVVTNFFWMFVEGCYLHTAIVMTYSTERLRKCLFLFIGWCIPFPIIVAWAIGKLYYENEQCWFGKEPGDLVDYIYQGPIILVLLINFVFLFNIVRILMTKLRASTTSETIQYRKAVKATLVLLPLLGITYMLFFVNPGEDDLSQIMFIYFNSFLQSFQGFFVSVFYCFFNGEVRSAVRKRWHRWQDHHSLRVPMARAMSIPTSPTRISFHSIKQTAAV

SEQ ID NO: 20077 - protein, 99 aa, Homo sapiens
  Payload ID: 3996
  Gene Symbol: CRHR2
  Gene Name: corticotropin releasing hormone receptor 2
  ENSP ID: ENSP00000401241
MRGPSGPPGLLYVPHLLLCLLCLLPPPLQYAAGQSQMPKDQPLWALLEQYCHTIMTLTNLSVTPGAHSHSLSARGCGTRWTRHCSTACWRPTAAWRWLK

SEQ ID NO: 20078 - protein, 64 aa, Homo sapiens
  Payload ID: 3996
  Gene Symbol: CRHR2
  Gene Name: corticotropin releasing hormone receptor 2
  ENSP ID: ENSP00000401930
MRGPSGPPGLLYVPHLLLCLLCLLPPPLQYAAGQSQMPKDQPLWALLEQYCHTIMTLTNLSGWS

SEQ ID NO: 20079 - protein, 64 aa, Homo sapiens; identical to SEQ ID NO: 20078
  Payload ID: 3996
  Gene Symbol: CRHR2
  Gene Name: corticotropin releasing hormone receptor 2
  ENSP ID: ENSP00000416620

SEQ ID NO: 20080 - protein, 411 aa, Homo sapiens
  Payload ID: 3996
  Gene Symbol: CRHR2
  Gene Name: corticotropin releasing hormone receptor 2
  Uniprot ID: Q13324
  ENSP ID: ENSP00000418722
MDAALLHSLLEANCSLALAEELLLDGWGPPLDPEGPYSYCNTTLDQIGTCWPRSAAGALVERPCPEYFNGVKYNTTRNAYRECLENGTWASKINYSQCEPILDDKQRKYDLHYRIALVVNYLGHCVSVAALVAAFLLFLALRSIRCLRNVIHWNLITTFILRNVMWFLLQLVDHEVHESNEVWCRCITTIFNYFVVTNFFWMFVEGCYLHTAIVMTYSTERLRKCLFLFIGWCIPFPIIVAWAIGKLYYENEQCWFGKEPGDLVDYIYQGPIILVLLINFVFLFNIVRILMTKLRASTTSETIQYRKAVKATLVLLPLLGITYMLFFVNPGEDDLSQIMFIYFNSFLQSFQGFFVSVFYCFFNGEVRSAVRKRWHRWQDHHSLRVPMARAMSIPTSPTRISFHSIKQTAAV

SEQ ID NO: 20081 - protein, 387 aa, Homo sapiens
  Payload ID: 3996
  Gene Symbol: CRHR2
  Gene Name: corticotropin releasing hormone receptor 2
  Uniprot ID: Q13324
  ENSP ID: ENSP00000426498
MDAALLHSLLEANCSLALAEELLLDGWGPPLDPEGPYSYCNTTLDQIGTCWPRSAAGALVERPCPEYFNGVKYNTTRNAYRECLENGTWASKINYSQCEPILDDKQRKYDLHYRIALVVNYLGHCVSVAALVAAFLLFLALRSIRCLRNVIHWNLITTFILRNVMWFLLQLVDHEVHESNEVWCRCITTIFNYFVVTNFFWMFVEGCYLHTAIVMTYSTERLRKCLFLFIGWCIPFPIIVAWAIGKLYYENEQCWFGKEPGDLVDYIYQGPIILVLLINFVFLFNIVRILMTKLRASTTSETIQYRKAVKATLVLLPLLGITYMLFFVNPGEDDLSQIMFIYFNSFLQSFQGFFVSVFYCFFNGESWVSKEAQAAGPHGREKPEQRW

SEQ ID NO: 20082 - protein, 105 aa, Homo sapiens
  Payload ID: 3997
  Gene Symbol: CORT
  Gene Name: cortistatin
  Uniprot ID: O00230
  ENSP ID: ENSP00000366248
MPLSPGLLLLLLSGATATAALPLEGGPTGRDSEHMQEAAGIRKSSLLTFLAWWFEWTSQASAGPLIGEEAREVARRQEGAPPQQSARRDRMPCRNFFWKTFSSCK

SEQ ID NO: 20083 - protein, 443 aa, Homo sapiens
  Payload ID: 3998
  Gene Symbol: COX10
  Gene Name: COX10 heme A:farnesyltransferase cytochrome c oxidase assembly factor
  Uniprot ID: Q12887
  ENSP ID: ENSP00000261643
MAASPHTLSSRLLTGCVGGSVWYLERRTIQDSPHKFLHLLRNVNKQWITFQHFSFLKRMYVTQLNRSHNQQVRPKPEPVASPFLEKTSSGQAKAEIYEMRPLSPPSLSLSRKPNEKELIELEPDSVIEDSIDVGKETKEEKRWKEMKLQVYDLPGILARLSKIKLTALVVSTTAAGFALAPGPFDWPCFLLTSVGTGLASCAANSINQFFEVPFDSNMNRTKNRPLVRGQISPLLAVSFATCCAVPGVAILTLGVNPLTGALGLFNIFLYTCCYTPLKRISIANTWVGAVVGAIPPVMGWTAATGSLDAGAFLLGGILYSWQFPHFNALSWGLREDYSRGGYCMMSVTHPGLCRRVALRHCLALLVLSAAAPVLDITTWTFPIMALPINAYISYLGFRFYVDADRRSSRRLFFCSLWHLPLLLLLMLTCKRPSGGGDAGPPPS

SEQ ID NO: 20084 - protein, 171 aa, Homo sapiens
  Payload ID: 3998
  Gene Symbol: COX10
  Gene Name: COX10 heme A:farnesyltransferase cytochrome c oxidase assembly factor
  ENSP ID: ENSP00000397750
MAASPHTLSSRLLTGCVGGSVWYLERRTIQDSPHKFLHLLRNVNKQWITFQHFSFLKRMYVTQLNRSHNQQVRPKPEPVASPFLEKTSSGQAKAEIYEMRPLSPPSLSLSRKPNEKELIELEPDSVIEDSIDVGKETKEEKRWKEMKLQVYDLPGILARLSKIKLTGTLFF

SEQ ID NO: 20085 - protein, 62 aa, Homo sapiens
  Payload ID: 3998
  Gene Symbol: COX10
  Gene Name: COX10 heme A:farnesyltransferase cytochrome c oxidase assembly factor
  ENSP ID: ENSP00000462190
MAASPHTLSSRLLTGCVGGSVWYLERRTIQDSPHKFLHLLRNVNKQWITFQHFSFLKRMLWL

SEQ ID NO: 20086 - protein, 168 aa, Homo sapiens
  Payload ID: 3998
  Gene Symbol: COX10
  Gene Name: COX10 heme A:farnesyltransferase cytochrome c oxidase assembly factor
  ENSP ID: ENSP00000462512
MAASPHTLSSRLLTGCVGGSVWYLERRTIQDSPHKFLHLLRNVNKQWITFQHFSFLKRMYVTQLNRSHNQQVRPKPEPVASPFLEKTSSGQAKAEIYEMRPLSPPSLSLSRKPNEKELIELEPDSVIEDSIDVGKETKEEKRWKEMKLQVYDLPGILARLSKIKLTVF

SEQ ID NO: 20087 - protein, 276 aa, Homo sapiens
  Payload ID: 3999
  Gene Symbol: COX11
  Gene Name: COX11 cytochrome c oxidase copper chaperone
  Uniprot ID: Q9Y6N1
  ENSP ID: ENSP00000299335
MGGLWRPGWRCVPFCGWRWIHPGSPTRAAERVEPFLRPEWSGTGGAERGLRWLGTWKRCSLRARHPALQPPRRPKSSNPFTRAQEEERRRQNKTTLTYVAAVAVGMLGASYAAVPLYRLYCQTTGLGGSAVAGHASDKIENMVPVKDRIIKISFNADVHASLQWNFRPQQTEIYVVPGETALAFYRAKNPTDKPVIGISTYNIVPFEAGQYFNKIQCFCFEEQRLNPQEEVDMPVFFYIDPEFAEDPRMIKVDLITLSYTFFEAKEGHKLPVPGYN

SEQ ID NO: 20088 - protein, 231 aa, Homo sapiens
  Payload ID: 3999
  Gene Symbol: COX11
  Gene Name: COX11 cytochrome c oxidase copper chaperone
  Uniprot ID: Q9Y6N1
  ENSP ID: ENSP00000459302
MGGLWRPGWRCVPFCGWRWIHPGSPTRAAERVEPFLRPEWSGTGGAERGLRWLGTWKRCSLRARHPALQPPRRPKSSNPFTRAQEEERRRQNKTTLTYVAAVAVGMLGASYAAVPLYRLYCQTTGLGGSAVAGHASDKIENMVPVKDRIIKISFNADVHASLQWNFRPQQTEIYVVPGETALAFYRAKNPTDKPVIGISTYNIVPFEAGQYFNKIQASKLHRVYVLESWHL

SEQ ID NO: 20089 - protein, 276 aa, Homo sapiens; identical to SEQ ID NO: 20087
  Payload ID: 3999
  Gene Symbol: COX11
  Gene Name: COX11 cytochrome c oxidase copper chaperone
  Uniprot ID: Q9Y6N1
  ENSP ID: ENSP00000459901

SEQ ID NO: 20090 - protein, 230 aa, Homo sapiens
  Payload ID: 3999
  Gene Symbol: COX11
  Gene Name: COX11 cytochrome c oxidase copper chaperone
  ENSP ID: ENSP00000460043
MGGLWRPGWRCVPFCGWRWIHPGSPTRAAERVEPFLRPEWSGTGGAERGLRWLGTWKRCSLRARHPALQPPRRPKSSNPFTRAQEEERRRQNKTTLTYVAAVAVGMLGASYAAVPLYRLYCQTTGLGGSAVAGHASDKIENMVPVKDRIIKISFNADVHASLQWNFRPQQTEIYVVPGETALAFYRAKNPTDKPVIGISTYNIVPFEAGQYFNKIQVHQSVNFTEYDKDT

SEQ ID NO: 20091 - protein, 51 aa, Homo sapiens
  Payload ID: 3999
  Gene Symbol: COX11
  Gene Name: COX11 cytochrome c oxidase copper chaperone
  ENSP ID: ENSP00000461191
  MOD_RES (1)..(1): Any amino acid
XALAFYRAKNPTDKPVIGISTYNIVPFEAGQYFNKIQVLSSRLQSCTESTF

SEQ ID NO: 20092 - protein, 57 aa, Homo sapiens
  Payload ID: 4000
  Gene Symbol: COX14
  Gene Name: COX14 cytochrome c oxidase assembly factor
  Uniprot ID: Q96I36
  ENSP ID: ENSP00000326052
MPTGKQLADIGYKTFSTSMMLLTVYGGYLCSVRVYHYFQWRRAQRQAAEEQKTSGIM

SEQ ID NO: 20093 - protein, 57 aa, Homo sapiens; identical to SEQ ID NO: 20092
  Payload ID: 4000
  Gene Symbol: COX14
  Gene Name: COX14 cytochrome c oxidase assembly factor
  Uniprot ID: Q96I36
  ENSP ID: ENSP00000446524

SEQ ID NO: 20094 - protein, 57 aa, Homo sapiens; identical to SEQ ID NO: 20092
  Payload ID: 4000
  Gene Symbol: COX14
  Gene Name: COX14 cytochrome c oxidase assembly factor
  Uniprot ID: Q96I36
  ENSP ID: ENSP00000447776

SEQ ID NO: 20095 - protein, 57 aa, Homo sapiens; identical to SEQ ID NO: 20092
  Payload ID: 4000
  Gene Symbol: COX14
  Gene Name: COX14 cytochrome c oxidase assembly factor
  Uniprot ID: Q96I36
  ENSP ID: ENSP00000450331

SEQ ID NO: 20096 - protein, 106 aa, Homo sapiens
  Payload ID: 4001
  Gene Symbol: COX16
  Gene Name: COX16 cytochrome c oxidase assembly homolog
  Uniprot ID: Q9P0S2
  ENSP ID: ENSP00000374562
MFAPAVMRAFRKNKTLGYGVPMLLLIVGGSFGLREFSQIRYDAVKSKMDPELEKKLKENKISLESEYEKIKDSKFDDWKNIRGPRPWEDPDLLQGRNPESLKTKTT

SEQ ID NO: 20097 - protein, 25 aa, Homo sapiens
  Payload ID: 4001
  Gene Symbol: COX16
  Gene Name: COX16 cytochrome c oxidase assembly homolog
  ENSP ID: ENSP00000450871
MFAPAVMRAFRKNKTLGYGVPMLVY

SEQ ID NO: 20098 - protein, 63 aa, Homo sapiens
  Payload ID: 4002
  Gene Symbol: COX17
  Gene Name: COX17 cytochrome c oxidase copper chaperone
  Uniprot ID: Q14061
  ENSP ID: ENSP00000261070
MPGLVDSNPAPPESQEKKPLKPCCACPETKKARDACIIEKGEEHCGHLIEAHKECMRALGFKI

SEQ ID NO: 20099 - protein, 58 aa, Homo sapiens
  Payload ID: 4002
  Gene Symbol: COX17
  Gene Name: COX17 cytochrome c oxidase copper chaperone
  ENSP ID: ENSP00000417120
  MOD_RES (1)..(1): Any amino acid
XSNPAPPESQEKKPLKPCCACPETKKARDACIIEKGEEHCGHLIEAHKECMRALGFKI

SEQ ID NO: 20100 - protein, 98 aa, Homo sapiens
  Payload ID: 4002
  Gene Symbol: COX17
  Gene Name: COX17 cytochrome c oxidase copper chaperone
  ENSP ID: ENSP00000417651
MPGLVDSNPAPPESQEKKPLKPCCACPETKKARDAWFRGRVSVDLSRSLVPGNDGERGERQASTTHSFLQIIIEKGEEHCGHLIEAHKECMRALGFKI

SEQ ID NO: 20101 - protein, 63 aa, Homo sapiens; identical to SEQ ID NO: 20098
  Payload ID: 4002
  Gene Symbol: COX17
  Gene Name: COX17 cytochrome c oxidase copper chaperone
  Uniprot ID: Q14061
  ENSP ID: ENSP00000417805

SEQ ID NO: 20102 - protein, 63 aa, Homo sapiens; identical to SEQ ID NO: 20098
  Payload ID: 4002
  Gene Symbol: COX17
  Gene Name: COX17 cytochrome c oxidase copper chaperone
  Uniprot ID: Q14061
  ENSP ID: ENSP00000417923

SEQ ID NO: 20103 - protein, 45 aa, Homo sapiens
  Payload ID: 4002
  Gene Symbol: COX17
  Gene Name: COX17 cytochrome c oxidase copper chaperone
  ENSP ID: ENSP00000420406
  MOD_RES (1)..(1): Any amino acid
XGNDGERGERQASTTHSFLQMCVEYLLWVKHCVRSEDVDMDKDAS

SEQ ID NO: 20104 - protein, 333 aa, Homo sapiens
  Payload ID: 4003
  Gene Symbol: COX18
  Gene Name: COX18 cytochrome c oxidase assembly factor
  Uniprot ID: Q8N8Q8
  ENSP ID: ENSP00000295890
MLCRLGGRWLRPLPALQLWARDLPLAPVPTSGAKRPTLPVWAVAPVSAVHANGWYEALAASSPVRVAEEVLLGVHAATGLPWWGSILLSTVALRGAVTLPLAAYQHYILAKVENLQPEIKTIARHLNQEVAVRANQLGWSKRDARLTYLKNMRRLISELYVRDNCHPFKATVLVWIQLPMWIFMSFALRNLSTGAAHSEGFSVQEQLATGGILWFPDLTAPDSTWILPISVGVINLLIVEICALQKIGMSRFQTYITYFVRAMSVLMIPIAATVPSSIVLYWLCSSFVGLSQNLLLRSPGFRQLCRIPSTKSDSETPYKDIFAAFNTKFISRK

SEQ ID NO: 20105 - protein, 129 aa, Homo sapiens
  Payload ID: 4003
  Gene Symbol: COX18
  Gene Name: COX18 cytochrome c oxidase assembly factor
  Uniprot ID: Q8N8Q8
  ENSP ID: ENSP00000394583
MLCRLGGRWLRPLPALQLWARDLPLAPVPTSGAKRPTLPVWAVAPVSAVHANGWYEALAASSPVRVAEEVLLGVHAATGLPWWGSILLSTVALRGAVTLPLAAYQHYILAKAHLSKEYEEANFRAICAR

SEQ ID NO: 20106 - protein, 127 aa, Homo sapiens
  Payload ID: 4003
  Gene Symbol: COX18
  Gene Name: COX18 cytochrome c oxidase assembly factor
  Uniprot ID: Q8N8Q8
  ENSP ID: ENSP00000424978
MLCRLGGRWLRPLPALQLWARDLPLAPVPTSGAKRPTLPVWAVAPVSAVHANGWYEALAASSPVRVAEEVLLGVHAATGLPWWGSILLSTVALRGAVTLPLAAYQHYILAKLGGKFAARNKNYCQAS

SEQ ID NO: 20107 - protein, 334 aa, Homo sapiens
  Payload ID: 4003
  Gene Symbol: COX18
  Gene Name: COX18 cytochrome c oxidase assembly factor
  ENSP ID: ENSP00000425261
MLCRLGGRWLRPLPALQLWARDLPLAPVPTSGAKRPTLPVWAVAPVSAVHANGWYEALAASSPVRVAEEVLLGVHAATGLPWWGSILLSTVALRGAVTLPLAAYQHYILAKVENLQPEIKTIARHLNQEVAVRANQLGWSKRDARLTYLKNMRRLISELYVRDNCHPFKATVLVWIQLPMWIFMSFALRNLSTGAAHSEAGFSVQEQLATGGILWFPDLTAPDSTWILPISVGVINLLIVEICALQKIGMSRFQTYITYFVRAMSVLMIPIAATVPSSIVLYWLCSSFVGLSQNLLLRSPGFRQLCRIPSTKSDSETPYKDIFAAFNTKFISRK

SEQ ID NO: 20108 - protein, 90 aa, Homo sapiens
  Payload ID: 4004
  Gene Symbol: COX19
  Gene Name: COX19 cytochrome c oxidase assembly factor
  Uniprot ID: Q49B96
  ENSP ID: ENSP00000342015
MSTAMNFGTKSFQPRPPDKGSFPLDHLGECKSFKEKFMKCLHNNNFENALCRKESKEYLECRMERKLMLQEPLEKLGFGDLTSGKSEAKK

SEQ ID NO: 20109 - protein, 122 aa, Homo sapiens
  Payload ID: 4004
  Gene Symbol: COX19
  Gene Name: COX19 cytochrome c oxidase assembly factor
  ENSP ID: ENSP00000413423
MSTAMNFGTKSFQPRPPDKGSFPLDHLGECKSFKEKFMKCLHNNNFENALCRKESKEYLECRMERSRLGLLHSGRLHLPELLGNPPEYPPGQQGEVRPPGRLGGGPSGVHGLPRERRRESQV

SEQ ID NO: 20110 - protein, 130 aa, Homo sapiens
  Payload ID: 4005
  Gene Symbol: COX20
  Gene Name: COX20 cytochrome c oxidase assembly factor
  Uniprot ID: Q5RI15
  ENSP ID: ENSP00000355486
MAAPPEPGEPEERKASCTSLHLSYWKSLKLLGFLDVENTPCARHSILYGSLGSVVAGFGHFLFTSRIRRSCDVGVGGFILVTLGCWFHCRYNYAKQRIQERIAREEIKKKILYEGTHLDPERKHNGSSSN

SEQ ID NO: 20111 - protein, 118 aa, Homo sapiens
  Payload ID: 4005
  Gene Symbol: COX20
  Gene Name: COX20 cytochrome c oxidase assembly factor
  Uniprot ID: Q5RI15
  ENSP ID: ENSP00000406327
MAAPPEPGEPEERKSLKLLGFLDVENTPCARHSILYGSLGSVVAGFGHFLFTSRIRRSCDVGVGGFILVTLGCWFHCRYNYAKQRIQERIAREEIKKKILYEGTHLDPERKHNGSSSN

SEQ ID NO: 20112 - protein, 365 aa, Homo sapiens
  Payload ID: 4006
  Gene Symbol: CXADR
  Gene Name: coxsackie virus and adenovirus receptor
  Uniprot ID: P78310
  ENSP ID: ENSP00000284878
MALLLCFVLLCGVVDFARSLSITTPEEMIEKAKGETAYLPCKFTLSPEDQGPLDIEWLISPADNQKVDQVIILYSGDKIYDDYYPDLKGRVHFTSNDLKSGDASINVTNLQLSDIGTYQCKVKKAPGVANKKIHLVVLVKPSGARCYVDGSEEIGSDFKIKCEPKEGSLPLQYEWQKLSDSQKMPTSWLAEMTSSVISVKNASSEYSGTYSCTVRNRVGSDQCLLRLNVVPPSNKAGLIAGAIIGTLLALALIGLIIFCCRKKRREEKYEKEVHHDIREDVPPPKSRTSTARSYIGSNHSSLGSMSPSNMEGYSKTQYNQVPSEDFERTPQSPTLPPAKVAAPNLSRMGAIPVMIPAQSKDGSIV

SEQ ID NO: 20113 - protein, 89 aa, Homo sapiens
  Payload ID: 4006
  Gene Symbol: CXADR
  Gene Name: coxsackie virus and adenovirus receptor
  Uniprot ID: P78310
  ENSP ID: ENSP00000348620
MALLLCFVLLCGVVDFARSLSITTPEEMIEKAKGETAYLPCKFTLSPEDQGPLDIEWLISPADNQKVDQVGRCATSKEPYVHCQKLHRQ

SEQ ID NO: 20114 - protein, 200 aa, Homo sapiens
  Payload ID: 4006
  Gene Symbol: CXADR
  Gene Name: coxsackie virus and adenovirus receptor
  Uniprot ID: P78310
  ENSP ID: ENSP00000383029
MALLLCFVLLCGVVDFARSLSITTPEEMIEKAKGETAYLPCKFTLSPEDQGPLDIEWLISPADNQKVDQVIILYSGDKIYDDYYPDLKGRVHFTSNDLKSGDASINVTNLQLSDIGTYQCKVKKAPGVANKKIHLVVLGKMCHLQRAVRPLPEATSAVIIHPWGPCLLPTWKDIPRLSITKYQVKTLNALLRVRLSHLLR

SEQ ID NO: 20115 - protein, 252 aa, Homo sapiens
  Payload ID: 4006
  Gene Symbol: CXADR
  Gene Name: coxsackie virus and adenovirus receptor
  Uniprot ID: P78310
  ENSP ID: ENSP00000383030
MALLLCFVLLCGVVDFARSLSITTPEEMIEKAKGETAYLPCKFTLSPEDQGPLDIEWLISPADNQKVDQVIILYSGDKIYDDYYPDLKGRVHFTSNDLKSGDASINVTNLQLSDIGTYQCKVKKAPGVANKKIHLVVLVKPSGARCYVDGSEEIGSDFKIKCEPKEGSLPLQYEWQKLSDSQKMPTSWLAGKMCHLQRAVRPLPEATSAVIIHPWGPCLLPTWKDIPRLSITKYQVKTLNALLRVRLSHLLR

SEQ ID NO: 20116 - protein, 352 aa, Homo sapiens
  Payload ID: 4006
  Gene Symbol: CXADR
  Gene Name: coxsackie virus and adenovirus receptor
  Uniprot ID: P78310
  ENSP ID: ENSP00000383033
MALLLCFVLLCGVVDFARSLSITTPEEMIEKAKGETAYLPCKFTLSPEDQGPLDIEWLISPADNQKVDQVIILYSGDKIYDDYYPDLKGRVHFTSNDLKSGDASINVTNLQLSDIGTYQCKVKKAPGVANKKIHLVVLVKPSGARCYVDGSEEIGSDFKIKCEPKEGSLPLQYEWQKLSDSQKMPTSWLAEMTSSVISVKNASSEYSGTYSCTVRNRVGSDQCLLRLNVVPPSNKAGLIAGAIIGTLLALALIGLIIFCCRKKRREEKYEKEVHHDIREDVPPPKSRTSTARSYIGSNHSSLGSMSPSNMEGYSKTQYNQVPSEDFERTPQSPTLPPAKFKYPYKTDGITVV

SEQ ID NO: 20117 - protein, 589 aa, Homo sapiens
  Payload ID: 4007
  Gene Symbol:
  Gene Name: CPEB2
  ENSP ID: ENSP00000488925
MPPPSPDSENGFYPGLPSSMNPAFFPSFSPVSPHGCTGLSVPTSGGGGGGFGGPFSATAVPPPPPPAMNIPQQQPPPPAAPQQPQSRRSPVSPQLQQQHQAAAAAFLQQRNSYNHHQPLLKQSPWSNHQSSGWGTGSMSWGAMHGRDHRRTGNMGIPGTMNQISPLKKPFSGNVIAPPKFTRSTPSLTPKSWIEDNVFRTDNNSNTLLPLQVRSSLQLPAWGSDSLQDSWCTAAGTSRIDQDRSRMYDSLNMHSLENSLIDIMRAEHDPLKGRLSYPHPGTDNLLMLNGRSSLFPIDDGLLDDGHSDQVGVLNSPTCYSAHQNGERIERFSRKVFVGGLPPDIDEDEITASFRRFGPLVVDWPHKAESKSYFPPKGYAFLLFQEESSVQALIDACIEEDGKLYLCVSSPTIKDKPVQIRPWNLSDSDFVMDGSQPLDPRKTIFVGGVPRPLRAVELAMIMDRLYGGVCYAGIDTDPELKYPKGAGRVAFSNQQSYIAAISARFVQLQHGDIDKRVEVKPYVLDDQMCDECQGARCGGKFAPFFCANVTCLQYYCEFCWANIHSRAGREFHKPLVKEGADRPRQIHFRWN

SEQ ID NO: 20118 - protein, 167 aa, Homo sapiens
  Payload ID: 4007
  Gene Symbol:
  Gene Name: CPEB2
  ENSP ID: ENSP00000489113
ITASFRRFGPLVVDWPHKAESKSYFPPKGYAFLLFQEESSVQALIDACIEEDGKLYLCVSSPTIKDKPVQIRPWNLSDSDFVMDGSQPLDPRKTIFVGGVPRPLRAVELAMIMDRLYGGVCYAGIDTDPELKYPKGAGRVAFSNQQSYIAAISARFVQLQHGDIDKR

SEQ ID NO: 20119 - protein, 559 aa, Homo sapiens
  Payload ID: 4007
  Gene Symbol:
  Gene Name: CPEB2
  ENSP ID: ENSP00000489160
MPPPSPDSENGFYPGLPSSMNPAFFPSFSPVSPHGCTGLSVPTSGGGGGGFGGPFSATAVPPPPPPAMNIPQQQPPPPAAPQQPQSRRSPVSPQLQQQHQAAAAAFLQQRNSYNHHQPLLKQSPWSNHQSSGWGTGSMSWGAMHGRDHRRTGNMGIPGTMNQISPLKKPFSGNVIAPPKFTRSTPSLTPKSWIEDNVFRTDNNSNTLLPLQDRSRMYDSLNMHSLENSLIDIMRAEHDPLKGRLSYPHPGTDNLLMLNGRSSLFPIDDGLLDDGHSDQVGVLNSPTCYSAHQNGERIERFSRKVFVGGLPPDIDEDEITASFRRFGPLVVDWPHKAESKSYFPPKGYAFLLFQEESSVQALIDACIEEDGKLYLCVSSPTIKDKPVQIRPWNLSDSDFVMDGSQPLDPRKTIFVGGVPRPLRAVELAMIMDRLYGGVCYAGIDTDPELKYPKGAGRVAFSNQQSYIAAISARFVQLQHGDIDKRVEVKPYVLDDQMCDECQGARCGGKFAPFFCANVTCLQYYCEFCWANIHSRAGREFHKPLVKEGADRPRQIHFRWN

SEQ ID NO: 20120 - protein, 1007 aa, Homo sapiens
  Payload ID: 4007
  Gene Symbol:
  Gene Name: CPEB2
  ENSP ID: ENSP00000489336
MRDFGFGVLQTAPLRSSSPGPLFCGEAYGPYAVGSVNPLPSATPFGPLSPPPLPVTGFLEAASPFSVPLGGGAGSPAAAASSSSPFLAHQQTMQDELLLGLTQQPARPLSGAAATEKLPDHHPGGGTIAGVTHLLPSQDFKPSLHHPSSSSASSCCCCRTSSPQDFSKRQQQQLSSQKRKEFSPPHLPHPPDSKPPPPPPPLHCPGRFSPPPPPAGPLLQPAQLAQRQQQQPPQQFSLLHQQHLSPQDFAPRQRPADLPPLPQLPPSPPAAPRRRHGGAGSPRKTPAAGEGSAAESPNAGLASSTPVNPAPGSMESPNHPLLNSPSNLLPGGALGAGAFSSLQSPDLPHPGGGGGGGGGGPPGGGGGGGSASPPPLPGFGTPWSVQTASPPPQPQQPPPTQPQQQPPPPQQPPQPQPQPPGSSATTPGGGSGGSLSAMPPPSPDSENGFYPGLPSSMNPAFFPSFSPVSPHGCTGLSVPTSGGGGGGFGGPFSATAVPPPPPPAMNIPQQQPPPPAAPQQPQSRRSPVSPQLQQQHQAAAAAFLQQRNSYNHHQPLLKQSPWSNHQSSGWGTGSMSWGAMHGRDHRRTGNMGIPGTMNQISPLKKPFSGNVIAPPKFTRSTPSLTPKSWIEDNVFRTDNNSNTLLPLQVRMDRSRMYDSLNMHSLENSLIDIMRAEHDPLKGRLSYPHPGTDNLLMLNARSYGRRRGRSSLFPIDDGLLDDGHSDQVGVLNSPTCYSAHQNGERIERFSRKVFVGGLPPDIDEDEITASFRRFGPLVVDWPHKAESKSYFPPKGYAFLLFQEESSVQALIDACIEEDGKLYLCVSSPTIKDKPVQIRPWNLSDSDFVMDGSQPLDPRKTIFVGGVPRPLRAVELAMIMDRLYGGVCYAGIDTDPELKYPKGAGRVAFSNQQSYIAAISARFVQLQHGDIDKRVEVKPYVLDDQMCDECQGARCGGKFAPFFCANVTCLQYYCEFCWANIHSRAGREFHKPLVKEGADRPRQIHFRWN

SEQ ID NO: 20121 - protein, 562 aa, Homo sapiens
  Payload ID: 4007
  Gene Symbol:
  Gene Name: CPEB2
  ENSP ID: ENSP00000489362
MPPPSPDSENGFYPGLPSSMNPAFFPSFSPVSPHGCTGLSVPTSGGGGGGFGGPFSATAVPPPPPPAMNIPQQQPPPPAAPQQPQSRRSPVSPQLQQQHQAAAAAFLQQRNSYNHHQPLLKQSPWSNHQSSGWGTGSMSWGAMHGRDHRRTGNMGIPGTMNQISPLKKPFSGNVIAPPKFTRSTPSLTPKSWIEDNVFRTDNNSNTLLPLQVRMDRSRMYDSLNMHSLENSLIDIMRAEHDPLKGRLSYPHPGTDNLLMLNGRSSLFPIDDGLLDDGHSDQVGVLNSPTCYSAHQNGERIERFSRKVFVGGLPPDIDEDEITASFRRFGPLVVDWPHKAESKSYFPPKGYAFLLFQEESSVQALIDACIEEDGKLYLCVSSPTIKDKPVQIRPWNLSDSDFVMDGSQPLDPRKTIFVGGVPRPLRAVELAMIMDRLYGGVCYAGIDTDPELKYPKGAGRVAFSNQQSYIAAISARFVQLQHGDIDKRVEVKPYVLDDQMCDECQGARCGGKFAPFFCANVTCLQYYCEFCWANIHSRAGREFHKPLVKEGADRPRQIHFRWN

SEQ ID NO: 20122 - protein, 567 aa, Homo sapiens
  Payload ID: 4007
  Gene Symbol:
  Gene Name: CPEB2
  ENSP ID: ENSP00000489406
MPPPSPDSENGFYPGLPSSMNPAFFPSFSPVSPHGCTGLSVPTSGGGGGGFGGPFSATAVPPPPPPAMNIPQQQPPPPAAPQQPQSRRSPVSPQLQQQHQAAAAAFLQQRNSYNHHQPLLKQSPWSNHQSSGWGTGSMSWGAMHGRDHRRTGNMGIPGTMNQISPLKKPFSGNVIAPPKFTRSTPSLTPKSWIEDNVFRTDNNSNTLLPLQDRSRMYDSLNMHSLENSLIDIMRAEHDPLKGRLSYPHPGTDNLLMLNARSYGRRRGRSSLFPIDDGLLDDGHSDQVGVLNSPTCYSAHQNGERIERFSRKVFVGGLPPDIDEDEITASFRRFGPLVVDWPHKAESKSYFPPKGYAFLLFQEESSVQALIDACIEEDGKLYLCVSSPTIKDKPVQIRPWNLSDSDFVMDGSQPLDPRKTIFVGGVPRPLRAVELAMIMDRLYGGVCYAGIDTDPELKYPKGAGRVAFSNQQSYIAAISARFVQLQHGDIDKRVEVKPYVLDDQMCDECQGARCGGKFAPFFCANVTCLQYYCEFCWANIHSRAGREFHKPLVKEGADRPRQIHFRWN

SEQ ID NO: 20123 - protein, 1034 aa, Homo sapiens
  Payload ID: 4007
  Gene Symbol:
  Gene Name: CPEB2
  ENSP ID: ENSP00000489427
MRDFGFGVLQTAPLRSSSPGPLFCGEAYGPYAVGSVNPLPSATPFGPLSPPPLPVTGFLEAASPFSVPLGGGAGSPAAAASSSSPFLAHQQTMQDELLLGLTQQPARPLSGAAATEKLPDHHPGGGTIAGVTHLLPSQDFKPSLHHPSSSSASSCCCCRTSSPQDFSKRQQQQLSSQKRKEFSPPHLPHPPDSKPPPPPPPLHCPGRFSPPPPPAGPLLQPAQLAQRQQQQPPQQFSLLHQQHLSPQDFAPRQRPADLPPLPQLPPSPPAAPRRRHGGAGSPRKTPAAGEGSAAESPNAGLASSTPVNPAPGSMESPNHPLLNSPSNLLPGGALGAGAFSSLQSPDLPHPGGGGGGGGGGPPGGGGGGGSASPPPLPGFGTPWSVQTASPPPQPQQPPPTQPQQQPPPPQQPPQPQPQPPGSSATTPGGGSGGSLSAMPPPSPDSENGFYPGLPSSMNPAFFPSFSPVSPHGCTGLSVPTSGGGGGGFGGPFSATAVPPPPPPAMNIPQQQPPPPAAPQQPQSRRSPVSPQLQQQHQAAAAAFLQQRNSYNHHQPLLKQSPWSNHQSSGWGTGSMSWGAMHGRDHRRTGNMGIPGTMNQISPLKKPFSGNVIAPPKFTRSTPSLTPKSWIEDNVFRTDNNSNTLLPLQVRSSLQLPAWGSDSLQDSWCTAAGTSRIDQDRSRMYDSLNMHSLENSLIDIMRAEHDPLKGRLSYPHPGTDNLLMLNARSYGRRRGRSSLFPIDDGLLDDGHSDQVGVLNSPTCYSAHQNGERIERFSRKVFVGGLPPDIDEDEITASFRRFGPLVVDWPHKAESKSYFPPKGYAFLLFQEESSVQALIDACIEEDGKLYLCVSSPTIKDKPVQIRPWNLSDSDFVMDGSQPLDPRKTIFVGGVPRPLRAVELAMIMDRLYGGVCYAGIDTDPELKYPKGAGRVAFSNQQSYIAAISARFVQLQHGDIDKRVEVKPYVLDDQMCDECQGARCGGKFAPFFCANVTCLQYYCEFCWANIHSRAGREFHKPLVKEGADRPRQIHFRWN

SEQ ID NO: 20124 - protein, 597 aa, Homo sapiens
  Payload ID: 4007
  Gene Symbol:
  Gene Name: CPEB2
  ENSP ID: ENSP00000489471
MPPPSPDSENGFYPGLPSSMNPAFFPSFSPVSPHGCTGLSVPTSGGGGGGFGGPFSATAVPPPPPPAMNIPQQQPPPPAAPQQPQSRRSPVSPQLQQQHQAAAAAFLQQRNSYNHHQPLLKQSPWSNHQSSGWGTGSMSWGAMHGRDHRRTGNMGIPGTMNQISPLKKPFSGNVIAPPKFTRSTPSLTPKSWIEDNVFRTDNNSNTLLPLQVRSSLQLPAWGSDSLQDSWCTAAGTSRIDQDRSRMYDSLNMHSLENSLIDIMRAEHDPLKGRLSYPHPGTDNLLMLNARSYGRRRGRSSLFPIDDGLLDDGHSDQVGVLNSPTCYSAHQNGERIERFSRKVFVGGLPPDIDEDEITASFRRFGPLVVDWPHKAESKSYFPPKGYAFLLFQEESSVQALIDACIEEDGKLYLCVSSPTIKDKPVQIRPWNLSDSDFVMDGSQPLDPRKTIFVGGVPRPLRAVELAMIMDRLYGGVCYAGIDTDPELKYPKGAGRVAFSNQQSYIAAISARFVQLQHGDIDKRVEVKPYVLDDQMCDECQGARCGGKFAPFFCANVTCLQYYCEFCWANIHSRAGREFHKPLVKEGADRPRQIHFRWN

SEQ ID NO: 20125 - protein, 301 aa, Homo sapiens
  Payload ID: 4008
  Gene Symbol: CPXCR1
  Gene Name: CPX chromosome region, candidate 1
  Uniprot ID: Q8N123
  ENSP ID: ENSP00000276127
MSYPTKEGSDTAGNAHKNSENEPPNDCSTDIESPSADPNMIYQVETNPINREPGTATSQEDVVPQAAENSELETEIQKDQREEDLKEELLLLQTPIPRKLVSHKPLNDRSRSHSGKVEMKANNFPINHKTRFRLSTSWRVPFINSHEIRSMILHLLCDRYFSQAAGCQNTMWVKRKYIACLYHPNSFTHHERAITFRRPSRVHYYRPLTERMTSGKFCKSTDTKGKCRFRAIVRSVLFVSQIQIESIFNIKGFVDILTYIHTMNVMITNTNNGWKYFCPICGRLFNTYSELRQHSCSSSGN

SEQ ID NO: 20126 - protein, 301 aa, Homo sapiens; identical to SEQ ID NO: 20125
  Payload ID: 4008
  Gene Symbol: CPXCR1
  Gene Name: CPX chromosome region, candidate 1
  Uniprot ID: Q8N123
  ENSP ID: ENSP00000362203

SEQ ID NO: 20127 - protein, 301 aa, Homo sapiens; identical to SEQ ID NO: 20125
  Payload ID: 4008
  Gene Symbol: CPXCR1
  Gene Name: CPX chromosome region, candidate 1
  Uniprot ID: Q8N123
  ENSP ID: ENSP00000484986

SEQ ID NO: 20128 - protein, 137 aa, Homo sapiens; identical to SEQ ID NO: 3750
  Payload ID: 4009
  Gene Symbol:
  Gene Name: CR388407.1
  ENSP ID: ENSP00000480438

SEQ ID NO: 20129 - protein, 167 aa, Homo sapiens [sequence omitted]

SEQ ID NO: 20130 - protein, 137 aa, Homo sapiens; identical to SEQ ID NO: 3750
  Payload ID: 4011
  Gene Symbol:
  Gene Name: CR547123.1
  ENSP ID: ENSP00000477901

SEQ ID NO: 20131 - protein, 23 aa, Homo sapiens
  Payload ID: 4012
  Gene Symbol:
  Gene Name: CR753845.1
  ENSP ID: ENSP00000469236
PTLCCLSCFSSLWPRWEDHLRPG

SEQ ID NO: 20132 - protein, 36 aa, Homo sapiens
  Payload ID: 4013
  Gene Symbol:
  Gene Name: CR759815.1
  ENSP ID: ENSP00000447586
SPPPPGGGEKPLAPPPGWVEPPKWLGLQGPSGGPGV

SEQ ID NO: 20133 - protein, 36 aa, Homo sapiens; identical to SEQ ID NO: 20132
  Payload ID: 4014
  Gene Symbol:
  Gene Name: CR847794.1
  ENSP ID: ENSP00000447114

SEQ ID NO: 20134 - protein, 137 aa, Homo sapiens; identical to SEQ ID NO: 3750
  Payload ID: 4015
  Gene Symbol:
  Gene Name: CR933783.1
  ENSP ID: ENSP00000483939

SEQ ID NO: 20135 - protein, 1269 aa, Homo sapiens
  Payload ID: 4016
  Gene Symbol: CRAMP1
  Gene Name: cramped chromatin regulator homolog 1
  Uniprot ID: Q96RY5
  ENSP ID: ENSP00000293925
MTVKLGDGGSGEDGLKKLGKRAADEESLEGEGAGGADAAEESSGTKRDEKTPRAGADGPPAPPGAPQAPSPPQGSPQDQHHFLRSSVRPQSKRPRKDPPSAVGSGNAGGSGPRGKGAEGGGSSSGNVSGVAPAAPAGGSRSSSRNLGSSGGEKEEGKKVRRQWESWSTEDKNTFFEGLYEHGKDFEAIQNNIALKYKKKGKPASMVKNKEQVRHFYYRTWHKITKYIDFDHVFSRGLKKSSQELYGLICYGELRKKIGGCMDDKNATKLNELIQVGATTVRYKGRNLRIKAPMCRALKKLCDPDGLSDEEDQKPVRLPLKVPIELQPRNNHAWARVQSLAQNPRLRMIVELHRKVSSLIEFLKQKWALHEVRVRKTLEERQLQDSCSAPMQEKVTLHLFPGENCTLTPLPGVARVVHSKAFCTVHWQEGGRCKQSAKDAHVLPPAQILGIQSGQGTARGQVKCPRSGAEGKGVGRPPPAADALQSSGESSPESAPGEGAALSLSSPDAPDRPPPRHQDTGPCLEKTPAEGRDSPTREPGALPCACGQLPDLEDELSLLDPLPRYLKSCQDLIVPEQCRCADTRPGSEQPPLGGAASPEVLAPVSKEAADLAPTGPSPRPGPGLLLDVCTKDLADAPAEELQEKGSPAGPPPSQGQPAARPPKEVPASRLAQQLREEGWNLQTSESLTLAEVYLMMGKPSKLQLEYDWLGPGRQDPRPGSLPTALHKQRLLSCLLKLISTEVNPKLALEANTISTASVRPAQEEQSMTPPGKVVTVSSRSPRCPRNQASLRSSKTFPPSSAPCSSGLRNPPRPLLVPGPSSTGSNDSDGGLFAVPTTLPPNSRHGKLFSPSKEAELTFRQHLNSISMQSDFFLPKPRKLRNRHLRKPLVVQRTLLPRPSENQSHNVCSFSILSNSSVTGRGSFRPIQSSLTKAALSRPIVPKVLPPQATSHLASAIDLAATSAGILSGNPLPALDTEGLSGISPLSSDEVTGAISGQDSTGTHQDGDTLPTVGGSDPFVSIPSRPEQEPVADSFQGSSVLSLSELPKAPLQNGLSIPLSSSESSSTRLSPPDVSALLDISLPGPPEDALSQGEPATHISDSIIEIAISSGQYGEGVPLSPAKLNGSDSSKSLPSPSSSPQPHWIASPTHDPQWYPSDSTDSSLSSLFASFISPEKSRKMLPTPIGTNSGTSLLGPSLLDGNSRDSFVSRSLADVAEVVDSQLVCMMNENSIDYISRFNDLAQELSIAEPGRREALFDGGGGGPAVSDLSQ

SEQ ID NO: 20136 - protein, 1269 aa, Homo sapiens; identical to SEQ ID NO: 20135
  Payload ID: 4016
  Gene Symbol: CRAMP1
  Gene Name: cramped chromatin regulator homolog 1
  Uniprot ID: Q96RY5
  ENSP ID: ENSP00000380559

SEQ ID NO: 20137 - protein, 184 aa, Homo sapiens
  Payload ID: 4016
  Gene Symbol: CRAMP1
  Gene Name: cramped chromatin regulator homolog 1
  ENSP ID: ENSP00000399172
  MOD_RES (1)..(1): Any amino acid
XGKLFSPSKEAELTFRQHLNSISMQSDFFLPKPRKLRNRHLRKPLVVQRTLLPRPSENQSHNVCSFSILSNSSVTGAIDLAATSAGILSGNPLPALDTEGLSGISPLSSDEVTGAISGQDSTGTHQDGDTLPTVGGSSVLSLSELPKAPLQNGLSIPLSSSESSSTRLSPPDVSALLDISLPGP

SEQ ID NO: 20138 - protein, 299 aa, Homo sapiens
  Payload ID: 4017
  Gene Symbol: CFDP1
  Gene Name: craniofacial development protein 1
  Uniprot ID: Q9UEE9
  ENSP ID: ENSP00000283882
MEEFDSEDFSTSEEDEDYVPSGGEYSEDDVNELVKEDEVDGEEQTQKTQGKKRKAQSIPARKRRQGGLSLEEEEEEDANSESEGSSSEEEDDAAEQEKGIGSEDARKKKEDELWASFLNDVGPKSKVPPSTQVKKGEETEETSSSKLLVKAEELEKPKETEKVKITKVFDFAGEEVRVTKEVDATSKEAKSFFKQNEKEKPQANVPSALPSLPAGSGLKRSSGMSSLLGKIGAKKQKMSTLEKSKLDWESFKEEEGIGEELAIHNRGKEGYIERKAFLDRVDHRQFEIERDLRLSKMKP

SEQ ID NO: 20139 - protein, 50 aa, Homo sapiens
  Payload ID: 4017
  Gene Symbol: CFDP1
  Gene Name: craniofacial development protein 1
  ENSP ID: ENSP00000455564
MSRRPAYCSLQFLGSSDPPASASPVDGTTGGEYSEDDVNELVKEDEVDGE

SEQ ID NO: 20140 - protein, 19 aa, Homo sapiens
  Payload ID: 4017
  Gene Symbol: CFDP1
  Gene Name: craniofacial development protein 1
  ENSP ID: ENSP00000462862
QANVPSALPSLPAGSGCVI

SEQ ID NO: 20141 - protein, 17 aa, Homo sapiens
  Payload ID: 4017
  Gene Symbol: CFDP1
  Gene Name: craniofacial development protein 1
  ENSP ID: ENSP00000481200
  MOD_RES (1)..(1): Any amino acid
XALPSLPAGSGKKKFDA

SEQ ID NO: 20142 - protein, 224 aa, Homo sapiens
  Payload ID: 4018
  Gene Symbol: CRP
  Gene Name: C-reactive protein, pentraxin-related
  Uniprot ID: P02741
  ENSP ID: ENSP00000255030
MEKLLCFLVLTSLSHAFGQTDMSRKAFVFPKESDTSYVSLKAPLTKPLKAFTVCLHFYTELSSTRGYSIFSYATKRQDNEILIFWSKDIGYSFTVGGSEILFEVPEVTVAPVHICTSWESASGIVEFWVDGKPRVRKSLKKGYTVGAEASIILGQEQDSFGGNFEGSQSLVGDIGNVNMWDFVLSPDEINTIYLGGPFSPNVLNWRALKYEVQGEVFTKPQLWP

SEQ ID NO: 20143 - protein, 102 aa, Homo sapiens
  Payload ID: 4018
  Gene Symbol: CRP
  Gene Name: C-reactive protein, pentraxin-related
  ENSP ID: ENSP00000357091
MEKLLCFLVLTSLSHAFGQTDMSRKAFVFPKESDTSYVSLKAPLTKPLKAFTVCLHFYTELSSTHEINTIYLGGPFSPNVLNWRALKYEVQGEVFTKPQLWP

SEQ ID NO: 20144 - protein, 102 aa, Homo sapiens; identical to SEQ ID NO: 20143
  Payload ID: 4018
  Gene Symbol: CRP
  Gene Name: C-reactive protein, pentraxin-related
  ENSP ID: ENSP00000357092

SEQ ID NO: 20145 - protein, 91 aa, Homo sapiens
  Payload ID: 4018
  Gene Symbol: CRP
  Gene Name: C-reactive protein, pentraxin-related
  Uniprot ID: P02741
  ENSP ID: ENSP00000357093
MEKLLCFLVLTSLSHAFGQTDMSRKAFVFPKESDTSYVSLKAPLTKPLKAFTVCLHFYTELSSTRGPNVLNWRALKYEVQGEVFTKPQLWP

SEQ ID NO: 20146 - protein, 46 aa, Homo sapiens
  Payload ID: 4018
  Gene Symbol: CRP
  Gene Name: C-reactive protein, pentraxin-related
  ENSP ID: ENSP00000402788
MWDFVLSPDEINTIYLGGPFSPNVLNWRALKYEVQGEVFTKPQLWP

SEQ ID NO: 20147 - protein, 381 aa, Homo sapiens
  Payload ID: 4019
  Gene Symbol: CKB
  Gene Name: creatine kinase, brain
  Uniprot ID: P12277
  ENSP ID: ENSP00000299198
MPFSNSHNALKLRFPAEDEFPDLSAHNNHMAKVLTPELYAELRAKSTPSGFTLDDVIQTGVDNPGHPYIMTVGCVAGDEESYEVFKDLFDPIIEDRHGGYKPSDEHKTDLNPDNLQGGDDLDPNYVLSSRVRTGRSIRGFCLPPHCSRGERRAIEKLAVEALSSLDGDLAGRYYALKSMTEAEQQQLIDDHFLFDKPVSPLLLASGMARDWPDARGIWHNDNKTFLVWVNEEDHLRVISMQKGGNMKEVFTRFCTGLTQIETLFKSKDYEFMWNPHLGYILTCPSNLGTGLRAGVHIKLPNLGKHEKFSEVLKRLRLQKRGTGGVDTAAVGGVFDVSNADRLGFSEVELVQMVVDGVKLLIEMEQRLEQGQAIDDLMPAQK

SEQ ID NO: 20148 - protein, 58 aa, Homo sapiens
  Payload ID: 4019
  Gene Symbol: CKB
  Gene Name: creatine kinase, brain
  ENSP ID: ENSP00000450676
MPFSNSHNALKLRFPAEDEPPVHHDRGLRGGRRGVLRSVQGSLRPHHRGPARRLQAQR

SEQ ID NO: 20149 - protein, 179 aa, Homo sapiens
  Payload ID: 4019
  Gene Symbol: CKB
  Gene Name: creatine kinase, brain
  ENSP ID: ENSP00000451426
FLFDKPVSPLLLASGMARDWPDARGIWHNDNKTFLVWVNEEDHLRVISMQKGGNMKEIETLFKSKDYEFMWNPHLGYILTCPSNLGTGLRAGVHIKLPNLGKHEKFSEVLKRLRLQKRGTGGVDTAAVGGVFDVSNADRLGFSEVELVQMVVDGVKLLIEMEQRLEQGQAIDDLMPAQK

SEQ ID NO: 20150 - protein, 128 aa, Homo sapiens
  Payload ID: 4019
  Gene Symbol: CKB
  Gene Name: creatine kinase, brain
  ENSP ID: ENSP00000451611
MAKVLTPELYAELRAKSTPSGFTLDDVIQTGVDNPGHPYIMTVGCVAGDEESYEVFKDLFDPIIEDRHGGYKPSDEHKTDLNPDNLQGGDDLDPNYVLSSRVRTGRSIRGFCLPPHCSRGERRAIEKL

SEQ ID NO: 20151 - protein, 20 aa, Homo sapiens
  Payload ID: 4019
  Gene Symbol: CKB
  Gene Name: creatine kinase, brain
  ENSP ID: ENSP00000451680
  MOD_RES (1)..(1): Any amino acid
XSPLLLASGMARDWPDARGI

SEQ ID NO: 20152 - protein, 90 aa, Homo sapiens
  Payload ID: 4019
  Gene Symbol: CKB
  Gene Name: creatine kinase, brain
  ENSP ID: ENSP00000451686
  MOD_RES (1)..(1): Any amino acid
XPAPVTLAEQIETLFKSKDYEFMWNPHLGYILTCPSNLGTGLRAGVHIKLPNLGKHEKFSEVLKRLRLQKRGTGGVDTAAVGGVFDVSNA

SEQ ID NO: 20153 - protein, 217 aa, Homo sapiens
  Payload ID: 4019
  Gene Symbol: CKB
  Gene Name: creatine kinase, brain
  ENSP ID: ENSP00000451904
MPFSNSHNALKLRFPAEDEFPDLSAHNNHMAKVLTPELYAELRAKSTPSGFTLDDVIQTGVDNPGHPYIMTVGCVAGDEESYEVFKDLFDPIIEDRHGGYKPSDEHKTDLNPDNLQGGDDLDPNYVLSSRVRTGRSIRGFCLPPHCSRGERRAIEKLAVEALSSLDGDLAGRYYALKSMTEAEQQQLIDDHFLFDKPVSPLLLASGMARDWPDARGI

SEQ ID NO: 20154 - protein, 69 aa, Homo sapiens
  Payload ID: 4020
  Gene Symbol: CKMT1A
  Gene Name: creatine kinase, mitochondrial 1A
  ENSP ID: ENSP00000389806
MAGPFSRLLSARPGLRLLALAGAGSLAAGFLLRPEPVRAASERRRLYPPRLFPSSIRSVVSWEERTEQI

SEQ ID NO: 20155 - protein, 148 aa, Homo sapiens
  Payload ID: 4020
  Gene Symbol: CKMT1A
  Gene Name: creatine kinase, mitochondrial 1A
  ENSP ID: ENSP00000398973
MAGPFSRLLSARPGLRLLALAGAGSLAAGFLLRPEPVRAASERRRLYPPSAEYPDLRKHNNCMASHLTPAVYARLCDKTTPTGWTLDQCIQTGVDNPGHPFIKTVGMVAGDEETYEVFADLFDPVIQERHNGYDPRTMKHTTDLDASK

SEQ ID NO: 20156 - protein, 221 aa, Homo sapiens
  Payload ID: 4020
  Gene Symbol: CKMT1A
  Gene Name: creatine kinase, mitochondrial 1A
  ENSP ID: ENSP00000401927
MAGPFSRLLSARPGLRLLALAGAGSLAAGFLLRPEPVRAASERRRLYPPSQTWPTGQLPGNCTRSRRLCPPSMVTGYPLPSAEYPDLRKHNNCMASHLTPAVYARLCDKTTPTGWTLDQCIQTGVDNPGHPFIKTVGMVAGDEETYEVFADLFDPVIQERHNGYDPRTMKHTTDLDASKIRSGYFDERYVLSSRVRTGRSIRGLSLPPACTRAERREVERV

SEQ ID NO: 20157 - protein, 417 aa, Homo sapiens
  Payload ID: 4020
  Gene Symbol: CKMT1A
  Gene Name: creatine kinase, mitochondrial 1A
  Uniprot ID: P12532
  ENSP ID: ENSP00000406577
MAGPFSRLLSARPGLRLLALAGAGSLAAGFLLRPEPVRAASERRRLYPPSAEYPDLRKHNNCMASHLTPAVYARLCDKTTPTGWTLDQCIQTGVDNPGHPFIKTVGMVAGDEETYEVFADLFDPVIQERHNGYDPRTMKHTTDLDASKIRSGYFDERYVLSSRVRTGRSIRGLSLPPACTRAERREVERVVVDALSGLKGDLAGRYYRLSEMTEAEQQQLIDDHFLFDKPVSPLLTAAGMARDWPDARGIWHNNEKSFLIWVNEEDHTRVISMEKGGNMKRVFERFCRGLKEVERLIQERGWEFMWNERLGYILTCPSNLGTGLRAGVHIKLPLLSKDSRFPKILENLRLQKRGTGGVDTAATGGVFDISNLDRLGKSEVELVQLVIDGVNYLIDCERRLERGQDIRIPTPVIHTKH

SEQ ID NO: 20158 - protein, 417 aa, Homo sapiens; identical to SEQ ID NO: 20157
  Payload ID: 4020
  Gene Symbol: CKMT1A
  Gene Name: creatine kinase, mitochondrial 1A
  Uniprot ID: P12532
  ENSP ID: ENSP00000413165

SEQ ID NO: 20159 - protein, 298 aa, Homo sapiens
  Payload ID: 4020
  Gene Symbol: CKMT1A
  Gene Name: creatine kinase, mitochondrial 1A
  ENSP ID: ENSP00000487331
MAGPFSRLLSARPGLRLLALAGAGSLAAGFLLRPEPVRAASERRRLYPPSAEYPDLRKHNNCMASHLTPAVYARLCDKTTPTGWTLDQCIQTGVDNPGHPFIKTVGMVAGDEETYEVFADLFDPVIQERHNGYDPRTMKHTTDLDASKIRSGYFDERYVLSSRVRTGRSIRGLSLPPACTRAERREVERVVVDALSGLKGDLAGRYYRLSEMTEAEQQQLIDDHFLFDKPVSPLLTAAGMARDWPDARGIWHNNEKSFLIWVNEEDHTRVISMEKGGNMKRVFERFCRGLKEVVVGIK

SEQ ID NO: 20160 - protein, 417 aa, Homo sapiens; identical to SEQ ID NO: 20157
  Payload ID: 4021
  Gene Symbol: CKMT1B
  Gene Name: creatine kinase, mitochondrial 1B
  Uniprot ID: P12532
  ENSP ID: ENSP00000300283

SEQ ID NO: 20161 - protein, 129 aa, Homo sapiens
  Payload ID: 4021
  Gene Symbol: CKMT1B
  Gene Name: creatine kinase, mitochondrial 1B
  ENSP ID: ENSP00000391990
MAGPFSRLLSARPGLRLLALAGAGSLAAGFLLRPEPVRAASERRRLYPPSAEYPDLRKHNNCMASHLTPAVYARLCDKTTPTGWTLDQCIQTGVDNPGHPFIKTVGMVAGDEETYEVFADLFDPVIQER

SEQ ID NO: 20162 - protein, 103 aa, Homo sapiens
  Payload ID: 4021
  Gene Symbol: CKMT1B
  Gene Name: creatine kinase, mitochondrial 1B
  ENSP ID: ENSP00000396707
MAGPFSRLLSARPGLRLLALAGAGSLAAGFLLRPEPVRAASERRRLYPPSAEYPDLRKHNNCMASHLTPAVYARLCDKTTPTGWTLDQCIQTGVDNPGHPFIK

SEQ ID NO: 20163 - protein, 58 aa, Homo sapiens
  Payload ID: 4021
  Gene Symbol: CKMT1B
  Gene Name: creatine kinase, mitochondrial 1B
  ENSP ID: ENSP00000399467
MAGPFSRLLSARPGLRLLALAGAGSLAAGFLLRPEPVRAASERRRLYPPRYLLTCLTL

SEQ ID NO: 20164 - protein, 203 aa, Homo sapiens
  Payload ID: 4021
  Gene Symbol: CKMT1B
  Gene Name: creatine kinase, mitochondrial 1B
  ENSP ID: ENSP00000411531
MAGPFSRLLSARPGLRLLALAGAGSLAAGFLLRPEPVRAASERRRLYPPSQTWPTGQLPGNCTRSRRLCPPSMVTGYPLPSAEYPDLRKHNNCMASHLTPAVYARLCDKTTPTGWTLDQCIQTGVDNPGHPFIKTVGMVAGDEETYEVFADLFDPVIQERHNGYDPRTMKHTTDLDASKIRSGYFDERYVLSSRVRTGRSIRG

SEQ ID NO: 20165 - protein, 417 aa, Homo sapiens; identical to SEQ ID NO: 20157
  Payload ID: 4021
  Gene Symbol: CKMT1B
  Gene Name: creatine kinase, mitochondrial 1B
  Uniprot ID: P12532
  ENSP ID: ENSP00000413255

SEQ ID NO: 20166 - protein, 241 aa, Homo sapiens
  Payload ID: 4021
  Gene Symbol: CKMT1B
  Gene Name: creatine kinase, mitochondrial 1B
  ENSP ID: ENSP00000413999
MAGPFSRLLSARPGLRLLALAGAGSLAAGFLLRPEPVRAASERRRLYPPSAEYPDLRKHNNCMASHLTPAVYARLCDKTTPTGWTLDQCIQTGVDNPGHPFIKTVGMVAGDEETYEVFADLFDPVIQERHNGYDPRTMKHTTDLDASKIRSGYFDERYVLSSRVRTGRSIRGLSLPPACTRAERREVERVVVDALSGLKGDLAGRYYRLSEMTEAEQQQLIDDHFLFDKPVSPLLTAAGMA

SEQ ID NO: 20167 - protein, 96 aa, Homo sapiens
  Payload ID: 4021
  Gene Symbol: CKMT1B
  Gene Name: creatine kinase, mitochondrial 1B
  ENSP ID: ENSP00000416467
MAGPFSRLLSARPGLRLLALAGAGSLAAGFLLRPEPVRAASERRRLYPPSQTWPTGQLPGNCTRSRRLCPPSMVTGYPLPSAEYPDLRKHNNCMAS

SEQ ID NO: 20168 - protein, 298 aa, Homo sapiens; identical to SEQ ID NO: 20159
  Payload ID: 4021
  Gene Symbol: CKMT1B
  Gene Name: creatine kinase, mitochondrial 1B
  ENSP ID: ENSP00000416717

SEQ ID NO: 20169 - protein, 298 aa, Homo sapiens; identical to SEQ ID NO: 20159
  Payload ID: 4021
  Gene Symbol: CKMT1B
  Gene Name: creatine kinase, mitochondrial 1B
  ENSP ID: ENSP00000486477

SEQ ID NO: 20170 - protein, 419 aa, Homo sapiens
  Payload ID: 4022
  Gene Symbol: CKMT2
  Gene Name: creatine kinase, mitochondrial 2 (sarcomeric)
  Uniprot ID: P17540
  ENSP ID: ENSP00000254035
MASIFSKLLTGRNASLLFATMGTSVLTTGYLLNRQKVCAEVREQPRLFPPSADYPDLRKHNNCMAECLTPAIYAKLRNKVTPNGYTLDQCIQTGVDNPGHPFIKTVGMVAGDEESYEVFADLFDPVIKLRHNGYDPRVMKHTTDLDASKITQGQFDEHYVLSSRVRTGRSIRGLSLPPACTRAERREVENVAITALEGLKGDLAGRYYKLSEMTEQDQQRLIDDHFLFDKPVSPLLTCAGMARDWPDARGIWHNYDKTFLIWINEEDHTRVISMEKGGNMKRVFERFCRGLKEVERLIQERGWEFMWNERLGYILTCPSNLGTGLRAGVHVRIPKLSKDPRFSKILENLRLQKRGTGGVDTAAVADVYDISNIDRIGRSEVELVQIVIDGVNYLVDCEKKLERGQDIKVPPPLPQFGKK

SEQ ID NO: 20171 - protein, 419 aa, Homo sapiens; identical to SEQ ID NO: 20170
  Payload ID: 4022
  Gene Symbol: CKMT2
  Gene Name: creatine kinase, mitochondrial 2 (sarcomeric)
  Uniprot ID: P17540
  ENSP ID: ENSP00000404203

SEQ ID NO: 20172 - protein, 419 aa, Homo sapiens; identical to SEQ ID NO: 20170
  Payload ID: 4022
  Gene Symbol: CKMT2
  Gene Name: creatine kinase, mitochondrial 2 (sarcomeric)
  Uniprot ID: P17540
  ENSP ID: ENSP00000410289

SEQ ID NO: 20173 - protein, 170 aa, Homo sapiens
  Payload ID: 4022
  Gene Symbol: CKMT2
  Gene Name: creatine kinase, mitochondrial 2 (sarcomeric)
  ENSP ID: ENSP00000423264
MASIFSKLLTGRNASLLFATMGTSVLTTGYLLNRQKVCAEVREQPRLFPPSADYPDLRKHNNCMAECLTPAIYAKLRNKVTPNGYTLDQCIQTGVDNPGHPFIKTVGMVAGDEESYEVFADLFDPVIKLRHNGYDPRVMKHTTDLDASKITQGQFDEHYVLSSRVRTGRS

SEQ ID NO: 20174 - protein, 157 aa, Homo sapiens
  Payload ID: 4022
  Gene Symbol: CKMT2
  Gene Name: creatine kinase, mitochondrial 2 (sarcomeric)
  ENSP ID: ENSP00000427635
MASIFSKLLTGRNASLLFATMGTSVLTTGYLLNRQKVCAEVREQPRLFPPSADYPDLRKHNNCMAECLTPAIYAKLRNKVTPNGYTLDQCIQTGVDNPGHPFIKTVGMVAGDEESYEVFADLFDPVIKLRHNGYDPRVMKHTTDLDASKDHFLFDKP

SEQ ID NO: 20175 - protein, 381 aa, Homo sapiens
  Payload ID: 4023
  Gene Symbol: CKM
  Gene Name: creatine kinase, muscle
  Uniprot ID: P06732
  ENSP ID: ENSP00000221476
MPFGNTHNKFKLNYKPEEEYPDLSKHNNHMAKVLTLELYKKLRDKETPSGFTVDDVIQTGVDNPGHPFIMTVGCVAGDEESYEVFKELFDPIISDRHGGYKPTDKHKTDLNHENLKGGDDLDPNYVLSSRVRTGRSIKGYTLPPHCSRGERRAVEKLSVEALNSLTGEFKGKYYPLKSMTEKEQQQLIDDHFLFDKPVSPLLLASGMARDWPDARGIWHNDNKSFLVWVNEEDHLRVISMEKGGNMKEVFRRFCVGLQKIEEIFKKAGHPFMWNQHLGYVLTCPSNLGTGLRGGVHVKLAHLSKHPKFEEILTRLRLQKRGTGGVDTAAVGSVFDVSNADRLGSSEVEQVQLVVDGVKLMVEMEKKLEKGQSIDDMIPAQK

SEQ ID NO: 20176 - protein, 2442 aa, Homo sapiens
  Payload ID: 4024
  Gene Symbol: CREBBP
  Gene Name: CREB binding protein
  Uniprot ID: Q92793
  ENSP ID: ENSP00000262367
MAENLLDGPPNPKRAKLSSPGFSANDSTDFGSLFDLENDLPDELIPNGGELGLLNSGNLVPDAASKHKQLSELLRGGSGSSINPGIGNVSASSPVQQGLGGQAQGQPNSANMASLSAMGKSPLSQGDSSAPSLPKQAASTSGPTPAASQALNPQAQKQVGLATSSPATSQTGPGICMNANFNQTHPGLLNSNSGHSLINQASQGQAQVMNGSLGAAGRGRGAGMPYPTPAMQGASSSVLAETLTQVSPQMTGHAGLNTAQAGGMAKMGITGNTSPFGQPFSQAGGQPMGATGVNPQLASKQSMVNSLPTFPTDIKNTSVTNVPNMSQMQTSVGIVPTQAIATGPTADPEKRKLIQQQLVLLLHAHKCQRREQANGEVRACSLPHCRTMKNVLNHMTHCQAGKACQVAHCASSRQIISHWKNCTRHDCPVCLPLKNASDKRNQQTILGSPASGIQNTIGSVGTGQQNATSLSNPNPIDPSSMQRAYAALGLPYMNQPQTQLQPQVPGQQPAQPQTHQQMRTLNPLGNNPMNIPAGGITTDQQPPNLISESALPTSLGATNPLMNDGSNSGNIGTLSTIPTAAPPSSTGVRKGWHEHVTQDLRSHLVHKLVQAIFPTPDPAALKDRRMENLVAYAKKVEGDMYESANSRDEYYHLLAEKIYKIQKELEEKRRSRLHKQGILGNQPALPAPGAQPPVIPQAQPVRPPNGPLSLPVNRMQVSQGMNSFNPMSLGNVQLPQAPMGPRAASPMNHSVQMNSMGSVPGMAISPSRMPQPPNMMGAHTNNMMAQAPAQSQFLPQNQFPSSSGAMSVGMGQPPAQTGVSQGQVPGAALPNPLNMLGPQASQLPCPPVTQSPLHPTPPPASTAAGMPSLQHTTPPGMTPPQPAAPTQPSTPVSSSGQTPTPTPGSVPSATQTQSTPTVQAAAQAQVTPQPQTPVQPPSVATPQSSQQQPTPVHAQPPGTPLSQAAASIDNRVPTPSSVASAETNSQQPGPDVPVLEMKTETQAEDTEPDPGESKGEPRSEMMEEDLQGASQVKEETDIAEQKSEPMEVDEKKPEVKVEVKEEEESSSNGTASQSTSPSQPRKKIFKPEELRQALMPTLEALYRQDPESLPFRQPVDPQLLGIPDYFDIVKNPMDLSTIKRKLDTGQYQEPWQYVDDVWLMFNNAWLYNRKTSRVYKFCSKLAEVFEQEIDPVMQSLGYCCGRKYEFSPQTLCCYGKQLCTIPRDAAYYSYQNRYHFCEKCFTEIQGENVTLGDDPSQPQTTISKDQFEKKKNDTLDPEPFVDCKECGRKMHQICVLHYDIIWPSGFVCDNCLKKTGRPRKENKFSAKRLQTTRLGNHLEDRVNKFLRRQNHPEAGEVFVRVVASSDKTVEVKPGMKSRFVDSGEMSESFPYRTKALFAFEEIDGVDVCFFGMHVQEYGSDCPPPNTRRVYISYLDSIHFFRPRCLRTAVYHEILIGYLEYVKKLGYVTGHIWACPPSEGDDYIFHCHPPDQKIPKPKRLQEWYKKMLDKAFAERIIHDYKDIFKQATEDRLTSAKELPYFEGDFWPNVLEESIKELEQEEEERKKEESTAASETTEGSQGDSKNAKKKNNKKTNKNKSSISRANKKKPSMPNVSNDLSQKLYATMEKHKEVFFVIHLHAGPVINTLPPIVDPDPLLSCDLMDGRDAFLTLARDKHWEFSSLRRSKWSTLCMLVELHTQGQDRFVYTCNECKHHVETRWHCTVCEDYDLCINCYNTKSHAHKMVKWGLGLDDEGSSQGEPQSKSPQESRRLSIQRCIQSLVHACQCRNANCSLPSCQKMKRVVQHTKGCKRKTNGGCPVCKQLIALCCYHAKHCQENKCPVPFCLNIKHKLRQQQIQHRLQQAQLMRRRMATMNTRNVPQQSLPSPTSAPPGTPTQQPSTPQTPQPPAQPQPSPVSMSPAGFPSVARTQPPTTVSTGKPTSQVPAPPPPAQPPPAAVEAARQIEREAQQQQHLYRVNINNSMPPGRTGMGTPGSQMAPVSLNVPRPNQVSGPVMPSMPPGQWQQAPLPQQQPMPGLPRPVISMQAQAAVAGPRMPSVQPPRSISPSALQDLLRTLKSPSSPQQQQQVLNILKSNPQLMAAFIKQRTAKYVANQPGMQPQPGLQSQPGMQPQPGMHQQPSLQNLNAMQAGVPRPGVPPQQQAMGGLNPQGQALNIMNPGHNPNMASMNPQYREMLRRQLLQQQQQQQQQQQQQQQQQQGSAGMAGGMAGHGQFQQPQGPGGYPPAMQQQQRMQQHLPLQGSSMGQMAAQMGQLGQMGQPGLGADSTPNIQQALQQRILQQQQMKQQIGSPGQPNPMSPQQHMLSGQPQASHLPGQQIATSLSNQVRSPAPVQSPRPQSQPPHSSPSPRIQPQPSPHHVSPQTGSPHPGLAVTMASSIDQGHLGNPEQSAMLPQLNTPSRSALSSELSLVGDTTGDTLEKFVEGL

SEQ ID NO: 20177 - protein, 2404 aa, Homo sapiens
  Payload ID: 4024
  Gene Symbol: CREBBP
  Gene Name: CREB binding protein
  Uniprot ID: Q92793
  ENSP ID: ENSP00000371502
MAENLLDGPPNPKRAKLSSPGFSANDSTDFGSLFDLENDLPDELIPNGGELGLLNSGNLVPDAASKHKQLSELLRGGSGSSINPGIGNVSASSPVQQGLGGQAQGQPNSANMASLSAMGKSPLSQGDSSAPSLPKQAASTSGPTPAASQALNPQAQKQVGLATSSPATSQTGPGICMNANFNQTHPGLLNSNSGHSLINQASQGQAQVMNGSLGAAGRGRGAGMPYPTPAMQGASSSVLAETLTQVSPQMTGHAGLNTAQAGGMAKMGITGNTSPFGQPFSQAGGQPMGATGVNPQLASKQSMVNSLPTFPTDIKNTSVTNVPNMSQMQTSVGIVPTQAIATGPTADPEKRKLIQQQLVLLLHAHKCQRREQANGEVRACSLPHCRTMKNVLNHMTHCQAGKACQAILGSPASGIQNTIGSVGTGQQNATSLSNPNPIDPSSMQRAYAALGLPYMNQPQTQLQPQVPGQQPAQPQTHQQMRTLNPLGNNPMNIPAGGITTDQQPPNLISESALPTSLGATNPLMNDGSNSGNIGTLSTIPTAAPPSSTGVRKGWHEHVTQDLRSHLVHKLVQAIFPTPDPAALKDRRMENLVAYAKKVEGDMYESANSRDEYYHLLAEKIYKIQKELEEKRRSRLHKQGILGNQPALPAPGAQPPVIPQAQPVRPPNGPLSLPVNRMQVSQGMNSFNPMSLGNVQLPQAPMGPRAASPMNHSVQMNSMGSVPGMAISPSRMPQPPNMMGAHTNNMMAQAPAQSQFLPQNQFPSSSGAMSVGMGQPPAQTGVSQGQVPGAALPNPLNMLGPQASQLPCPPVTQSPLHPTPPPASTAAGMPSLQHTTPPGMTPPQPAAPTQPSTPVSSSGQTPTPTPGSVPSATQTQSTPTVQAAAQAQVTPQPQTPVQPPSVATPQSSQQQPTPVHAQPPGTPLSQAAASIDNRVPTPSSVASAETNSQQPGPDVPVLEMKTETQAEDTEPDPGESKGEPRSEMMEEDLQGASQVKEETDIAEQKSEPMEVDEKKPEVKVEVKEEEESSSNGTASQSTSPSQPRKKIFKPEELRQALMPTLEALYRQDPESLPFRQPVDPQLLGIPDYFDIVKNPMDLSTIKRKLDTGQYQEPWQYVDDVWLMFNNAWLYNRKTSRVYKFCSKLAEVFEQEIDPVMQSLGYCCGRKYEFSPQTLCCYGKQLCTIPRDAAYYSYQNRYHFCEKCFTEIQGENVTLGDDPSQPQTTISKDQFEKKKNDTLDPEPFVDCKECGRKMHQICVLHYDIIWPSGFVCDNCLKKTGRPRKENKFSAKRLQTTRLGNHLEDRVNKFLRRQNHPEAGEVFVRVVASSDKTVEVKPGMKSRFVDSGEMSESFPYRTKALFAFEEIDGVDVCFFGMHVQEYGSDCPPPNTRRVYISYLDSIHFFRPRCLRTAVYHEILIGYLEYVKKLGYVTGHIWACPPSEGDDYIFHCHPPDQKIPKPKRLQEWYKKMLDKAFAERIIHDYKDIFKQATEDRLTSAKELPYFEGDFWPNVLEESIKELEQEEEERKKEESTAASETTEGSQGDSKNAKKKNNKKTNKNKSSISRANKKKPSMPNVSNDLSQKLYATMEKHKEVFFVIHLHAGPVINTLPPIVDPDPLLSCDLMDGRDAFLTLARDKHWEFSSLRRSKWSTLCMLVELHTQGQDRFVYTCNECKHHVETRWHCTVCEDYDLCINCYNTKSHAHKMVKWGLGLDDEGSSQGEPQSKSPQESRRLSIQRCIQSLVHACQCRNANCSLPSCQKMKRVVQHTKGCKRKTNGGCPVCKQLIALCCYHAKHCQENKCPVPFCLNIKHKLRQQQIQHRLQQAQLMRRRMATMNTRNVPQQSLPSPTSAPPGTPTQQPSTPQTPQPPAQPQPSPVSMSPAGFPSVARTQPPTTVSTGKPTSQVPAPPPPAQPPPAAVEAARQIEREAQQQQHLYRVNINNSMPPGRTGMGTPGSQMAPVSLNVPRPNQVSGPVMPSMPPGQWQQAPLPQQQPMPGLPRPVISMQAQAAVAGPRMPSVQPPRSISPSALQDLLRTLKSPSSPQQQQQVLNILKSNPQLMAAFIKQRTAKYVANQPGMQPQPGLQSQPGMQPQPGMHQQPSLQNLNAMQAGVPRPGVPPQQQAMGGLNPQGQALNIMNPGHNPNMASMNPQYREMLRRQLLQQQQQQQQQQQQQQQQQQGSAGMAGGMAGHGQFQQPQGPGGYPPAMQQQQRMQQHLPLQGSSMGQMAAQMGQLGQMGQPGLGADSTPNIQQALQQRILQQQQMKQQIGSPGQPNPMSPQQHMLSGQPQASHLPGQQIATSLSNQVRSPAPVQSPRPQSQPPHSSPSPRIQPQPSPHHVSPQTGSPHPGLAVTMASSIDQGHLGNPEQSAMLPQLNTPSRSALSSELSLVGDTTGDTLEKFVEGL

SEQ ID NO: 20178 - protein, 254 aa, Homo sapiens
  Payload ID: 4024
  Gene Symbol: CREBBP
  Gene Name: CREB binding protein
  ENSP ID: ENSP00000458254
  MOD_RES (1)..(1): Any amino acid
XDGSNSGNIGTLSTIPTAAPPSSTGVRKGWHEHVTQDLRSHLVHKLVQAIFPTPDPAALKDRRMENLVAYAKKVEGDMYESANSRDEYYHLLAEKIYKIQKELEEKRRSRLHKQGILGNQPALPAPGAQPPVIPQAQPVRPPRMNSFNPMSLGNVQLPQAPMGPRAASPMNHSVQMNSMGSVPGMAISPSRMPQPPNMMGAHTNNMMAQAPAQSQFLPQNQFPSSSGAMSVGMGQPPAQTGVSQVLCPTGTVAP

SEQ ID NO: 20179 - protein, 181 aa, Homo sapiens
  Payload ID: 4024
  Gene Symbol: CREBBP
  Gene Name: CREB binding protein
  ENSP ID: ENSP00000459490
  MOD_RES (1)..(1): Any amino acid
XHLLAEKIYKIQKELEEKRRSRLHKQGILGNQPALPAPGAQPPVIPQAQPVRPPNGPLSLPVNRMQVSQGMNSFNPMSLGNVQLPQAPMGPRAASPMNHSVQMNSMGSVPGMAISPSRMPQPPNMMGAHTNNMMAQAPAQSQFLPQNQFPSSSGAMSVGMGQPPAQTGVSQVLCPTGTVAP

SEQ ID NO: 20180 - protein, 196 aa, Homo sapiens
  Payload ID: 4024
  Gene Symbol: CREBBP
  Gene Name: CREB binding protein
  ENSP ID: ENSP00000460474
  MOD_RES (1)..(1): Any amino acid
XRYHFCEKCFTEIQGENVTLGDDPSQPQTTISKDQFEKKKNDTLDPEPFVDCKECGRKMHQICVLHYDIIWPSGFVCDNCLKKTGRPRKENKFSAKRLQTTRLGNHLEDRVNKFLRRQNHPEAGEVFVRVVASSDKTVEVKPGMKSRFVDSGEMSESFPYRTKALFAFEEIDGVDVCFFGMHVQEYGSDCPPPNTR

SEQ ID NO: 20181 - protein, 1105 aa, Homo sapiens
  Payload ID: 4024
  Gene Symbol: CREBBP
  Gene Name: CREB binding protein
  ENSP ID: ENSP00000461002
NATSLSNPNPIDPSSMQRAYAALGLPYMNQPQTQLQPQVPGQQPAQPQTHQQMRTLNPLGNNPMNIPAGGITTDQQPPNLISESALPTSLGATNPLMNDGSNSGNIGTLSTIPTAAPPSSTGVRKGWHEHVTQDLRSHLVHKLVQAIFPTPDPAALKDRRMENLVAYAKKVEGDMYESANSRDEYYHLLAEKIYKIQKELEEKRRSRLHKQGILGNQPALPAPGAQPPVIPQAQPVRPPNGPLSLPVNRMQVSQGMNSFNPMSLGNVQLPQAPMGPRAASPMNHSVQMNSMGSVPGMAISPSRMPQPPNMMGAHTNNMMAQAPAQSQFLPQNQFPSSSGAMSVGMGQPPAQTGVSQGQVPGAALPNPLNMLGPQASQLPCPPVTQSPLHPTPPPASTAAGMPSLQHTTPPGMTPPQPAAPTQPSTPVSSSGQTPTPTPGSVPSATQTQSTPTVQAAAQAQVTPQPQTPVQPPSVATPQSSQQQPTPVHAQPPGTPLSQAAASIDNRVPTPSSVASAETNSQQPGPDVPVLEMKTETQAEDTEPDPGESKGEPRSEMMEEDLQGASQVKEETDIAEQKSEPMEVDEKKPEVKVEVKEEEESSSNGTASQSTSPSQPRKKIFKPEELRQALMPTLEALYRQDPESLPFRQPVDPQLLGIPDYFDIVKNPMDLSTIKRKLDTGQYQEPWQYVDDVWLMFNNAWLYNRKTSRVYKFCSKLAEVFEQEIDPVMQSLGYCCGRKYEFSPQTLCCYGKQLCTIPRDAAYYSYQNSSPKYGLLADRYHFCEKCFTEIQGENVTLGDDPSQPQTTISKDQFEKKKNDTLDPEPFVDCKECGRKMHQICVLHYDIIWPSGFVCDNCLKKTGRPRKENKFSAKRLQTTRLGNHLEDRVNKFLRRQNHPEAGEVFVRVVASSDKTVEVKPGMKSRFVDSGEMSESFPYRTKALFAFEEIDGVDVCFFGMHVQEYGSDCPPPNTRRVYISYLDSIHFFRPRCLRTAVYHEILIGYLEYVKKLGYVTGHIWACPPSEGDDYIFHCHPPDQKIPKPKRLQEWYKKMLDKAFAERIIHDYKDIFKQATEDRLTSAKELPYFEGDFWPNVLEESIKELEQEE

SEQ ID NO: 20182 - protein, 634 aa, Homo sapiens
  Payload ID: 4025
  Gene Symbol: CRTC1
  Gene Name: CREB regulated transcription coactivator 1
  Uniprot ID: Q6UUV9
  ENSP ID: ENSP00000323332
MATSNNPRKFSEKIALHNQKQAEETAAFEEVMKDLSLTRAARLQLQKSQYLQLGPSRGQYYGGSLPNVNQIGSGTMDLPFQTPFQSSGLDTSRTTRHHGLVDRVYRERGRLGSPHRRPLSVDKHGRQADSCPYGTMYLSPPADTSWRRTNSDSALHQSTMTPTQPESFSSGSQDVHQKRVLLLTVPGMEETTSEADKNLSKQAWDTKKTGSRPKSCEVPGINIFPSADQENTTALIPATHNTGGSLPDLTNIHFPSPLPTPLDPEEPTFPALSSSSSTGNLAANLTHLGIGGAGQGMSTPGSSPQHRPAGVSPLSLSTEARRQQASPTLSPLSPITQAVAMDALSLEQQLPYAFFTQAGSQQPPPQPQPPPPPPPASQQPPPPPPPQAPVRLPPGGPLLPSASLTRGPQPPPLAVTVPSSLPQSPPENPGQPSMGIDIASAPALQQYRTSAGSPANQSPTSPVSNQGFSPGSSPQHTSTLGSVFGDAYYEQQMAARQANALSHQLEQFNMMENAISSSSLYSPGSTLNYSQAAMMGLTGSHGSLPDSQQLGYASHSGIPNIILTVTGESPPSLSKELTSSLAGVGDVSFDSDSQFPLDELKIDPLTLDGLHMLNDPDMVLADPATEDTFRMDRL

SEQ ID NO: 20183 - protein, 650 aa, Homo sapiens
  Payload ID: 4025
  Gene Symbol: CRTC1
  Gene Name: CREB regulated transcription coactivator 1
  Uniprot ID: Q6UUV9
  ENSP ID: ENSP00000345001
MATSNNPRKFSEKIALHNQKQAEETAAFEEVMKDLSLTRAARLQLQKSQYLQLGPSRGQYYGGSLPNVNQIGSGTMDLPFQPSGFLGEALAAAPVSLTPFQSSGLDTSRTTRHHGLVDRVYRERGRLGSPHRRPLSVDKHGRQADSCPYGTMYLSPPADTSWRRTNSDSALHQSTMTPTQPESFSSGSQDVHQKRVLLLTVPGMEETTSEADKNLSKQAWDTKKTGSRPKSCEVPGINIFPSADQENTTALIPATHNTGGSLPDLTNIHFPSPLPTPLDPEEPTFPALSSSSSTGNLAANLTHLGIGGAGQGMSTPGSSPQHRPAGVSPLSLSTEARRQQASPTLSPLSPITQAVAMDALSLEQQLPYAFFTQAGSQQPPPQPQPPPPPPPASQQPPPPPPPQAPVRLPPGGPLLPSASLTRGPQPPPLAVTVPSSLPQSPPENPGQPSMGIDIASAPALQQYRTSAGSPANQSPTSPVSNQGFSPGSSPQHTSTLGSVFGDAYYEQQMAARQANALSHQLEQFNMMENAISSSSLYSPGSTLNYSQAAMMGLTGSHGSLPDSQQLGYASHSGIPNIILTVTGESPPSLSKELTSSLAGVGDVSFDSDSQFPLDELKIDPLTLDGLHMLNDPDMVLADPATEDTFRMDRL

SEQ ID NO: 20184 - protein, 593 aa, Homo sapiens
  Payload ID: 4025
  Gene Symbol: CRTC1
  Gene Name: CREB regulated transcription coactivator 1
  ENSP ID: ENSP00000468893
MLQLQKSQYLQLGPSRGQYYGGSLPNVNQIGSGTMDLPFQTPFQSSGLDTSRTTRHHGLVDRVYRERGRLGSPHRRPLSVDKHGRQADSCPYGTMYLSPPADTSWRRTNSDSALHQSTMTPTQPESFSSGSQDVHQKRVLLLTVPGMEETTSEADKNLSKQAWDTKKTGSRPKSCEVPGINIFPSADQENTTALIPATHNTGGSLPDLTNIHFPSPLPTPLDPEEPTFPALSSSSSTGNLAANLTHLGIGGAGQGMSTPGSSPQHRPAGVSPLSLSTEARRQQASPTLSPLSPITQAVAMDALSLEQQLPYAFFTQAGSQQPPPQPQPPPPPPPASQQPPPPPPPQAPVRLPPGGPLLPSASLTRGPQPPPLAVTVPSSLPQSPPENPGQPSMGIDIASAPALQQYRTSAGSPANQSPTSPVSNQGFSPGSSPQHTSTLGSVFGDAYYEQQMAARQANALSHQLEQFNMMENAISSSSLYSPGSTLNYSQAAMMGLTGSHGSLPDSQQLGYASHSGIPNIILTVTGESPPSLSKELTSSLAGVGDVSFDSDSQFPLDELKIDPLTLDGLHMLNDPDMVLADPATEDTFRMDRL

SEQ ID NO: 20185 - protein, 392 aa, Homo sapiens
  Payload ID: 4025
  Gene Symbol: CRTC1
  Gene Name: CREB regulated transcription coactivator 1
  ENSP ID: ENSP00000469285
MDLPFQTPFQSSGLDTSRTTRHHGLVDRVYRERGRLGSPHRRPLSVDKHGRQADSCPYGTMYLSPPADTSWRRTNSDSALHQSTMTPTQPESFSSGSQDVHQKRVLLLTVPGMEETTSEADKNLSKQAWDTKKTGSRPKSCEVPGINIFPSADQENTTALIPATHNTGGSLPDLTNIHFPSPLPTPLDPEEPTFPALSSSSSTGNLAANLTHLGIGGAGQGMSTPGSSPQHRPAGVSPLSLSTEARRQQASPTLSPLSPITQLEQFNMMENAISSSSLYSPGSTLNYSQAAMMGLTGSHGSLPDSQQLGYASHSGIPNIILTVTGESPPSLSKELTSSLAGVGDVSFDSDSQFPLDELKIDPLTLDGLHMLNDPDMVLADPATEDTFRMDRL

SEQ ID NO: 20186 - protein, 54 aa, Homo sapiens
  Payload ID: 4026
  Gene Symbol: CRTC2
  Gene Name: CREB regulated transcription coactivator 2
  ENSP ID: ENSP00000305873
MATSGANGPGSATASASNPRKFSEKIALQKQRQAEETAAFEEVMMDIGSTRDKL

SEQ ID NO: 20187 - protein, 373 aa, Homo sapiens
  Payload ID: 4026
  Gene Symbol: CRTC2
  Gene Name: CREB regulated transcription coactivator 2
  ENSP ID: ENSP00000357619
MATSGANGPGSATASASNPRKFSEKIALQKQRQASLSSPQPQLQGSHSHPSLPASSLARHVLPTTSLGHPSLSAPALSSSSSSSSTSSPVLGAPSYPASTPGASPHHRRVPLSPLSLLAGPADARRSQQQLPKQFSPTMSPTLSSITQGVPLDTSKLSTDQRLPPYPYSSPSLVLPTQPHTPKSLQQPGLPSQSCSVQSSGGQPPGRQSHYGTPYPPGPSGHGQQSYHRPMSDFNLGNLEQFSMESPSASLVLDPPGFSEGPGFLGGEGPMGGPQDPHTFNHQNLTHCSRHGSGPNIILTGDSSPGFSKEIAAALAGVPGFEVSAAGLELGLGLEDELRMEPLGLEGLNMLSDPCALLPDPAVEESFRSDRLQ

SEQ ID NO: 20188 - protein, 693 aa, Homo sapiens
  Payload ID: 4026
  Gene Symbol: CRTC2
  Gene Name: CREB regulated transcription coactivator 2
  Uniprot ID: Q53ET0
  ENSP ID: ENSP00000357622
MATSGANGPGSATASASNPRKFSEKIALQKQRQAEETAAFEEVMMDIGSTRLQAQKLRLAYTRSSHYGGSLPNVNQIGSGLAEFQSPLHSPLDSSRSTRHHGLVERVQRDPRRMVSPLRRYTRHIDSSPYSPAYLSPPPESSWRRTMAWGNFPAEKGQLFRLPSALNRTSSDSALHTSVMNPSPQDTYPGPTPPSILPSRRGGILDGEMDPKVPAIEENLLDDKHLLKPWDAKKLSSSSSRPRSCEVPGINIFPSPDQPANVPVLPPAMNTGGSLPDLTNLHFPPPLPTPLDPEETAYPSLSGGNSTSNLTHTMTHLGISRGMGLGPGYDAPGLHSPLSHPSLQSSLSNPNLQASLSSPQPQLQGSHSHPSLPASSLARHVLPTTSLGHPSLSAPALSSSSSSSSTSSPVLGAPSYPASTPGASPHHRRVPLSPLSLLAGPADARRSQQQLPKQFSPTMSPTLSSITQGVPLDTSKLSTDQRLPPYPYSSPSLVLPTQPHTPKSLQQPGLPSQSCSVQSSGGQPPGRQSHYGTPYPPGPSGHGQQSYHRPMSDFNLGNLEQFSMESPSASLVLDPPGFSEGPGFLGGEGPMGGPQDPHTFNHQNLTHCSRHGSGPNIILTGDSSPGFSKEIAAALAGVPGFEVSAAGLELGLGLEDELRMEPLGLEGLNMLSDPCALLPDPAVEESFRSDRLQ

SEQ ID NO: 20189 - protein, 481 aa, Homo sapiens
  Payload ID: 4026
  Gene Symbol: CRTC2
  Gene Name: CREB regulated transcription coactivator 2
  ENSP ID: ENSP00000434115
SPLHSPLDSSRSTRHHGLVERVQRDPRRMVSPLRRYTRHIDSSPYSPAYLSPPPESSWRRTMAWGNFPAEKGQLFRLPSALNRTSSDSALHTSVMNPSPQDTYPGPTPPSILPSRRGGILDGEMDPKVFLFQVPAIEENLLDDKHLLKPWDAKKLSSSSSRPRSCEVPGINIFPSPDQPANVPVLPPAMNTGGSLPDLTNLHFPPPLPTPLDPEETAYPSLSGGNSTSNLTHTMTHLGISRGMGLGPGYDAPGLHSPLSHPSLQSSLSNPNLQASLSSPQPQLQGSHSHPSLPASSLARHVLPTTSLGHPSLSAPALSSSSSSSSTSSPVLGAPSYPASTPGASPHHRRVPLSPLSLLAGPADARRSQQQLPKQFSPTMSPTLSSITQGVPLDTSKLSTDQRLPPYPYSSPSLVLPTQPHTPKSLQQPGLPSQSCSVQSSGGQPPGRQSHYGTPYPPGPSGHGQQSYHRPMSDFNLGNLAL

SEQ ID NO: 20190 - protein, 619 aa, Homo sapiens
  Payload ID: 4027
  Gene Symbol: CRTC3
  Gene Name: CREB regulated transcription coactivator 3
  Uniprot ID: Q6UUV7
  ENSP ID: ENSP00000268184
MAASPGSGSANPRKFSEKIALHTQRQAEETRAFEQLMTDLTLSRVQFQKLQQLRLTQYHGGSLPNVSQLRSSASEFQPSFHQADNVRGTRHHGLVERPSRNRFHPLHRRSGDKPGRQFDGSAFGANYSSQPLDESWPRQQPPWKDEKHPGFRLTSALNRTNSDSALHTSALSTKPQDPYGGGGQSAWPAPYMGFCDGENNGHGEVASFPGPLKEENLLNVPKPLPKQLWETKEIQSLSGRPRSCDVGGGNAFPHNGQNLGLSPFLGTLNTGGSLPDLTNLHYSTPLPASLDTTDHHFGSMSVGNSVNNIPAAMTHLGIRSSSGLQSSRSNPSIQATLNKTVLSSSLNNHPQTSVPNASALHPSLRLFSLSNPSLSTTNLSGPSRRRQPPVSPLTLSPGPEAHQGFSRQLSSTSPLAPYPTSQMVSSDRSQLSFLPTEAQAQVSPPPPYPAPQELTQPLLQQPRAPEAPAQQPQAASSLPQSDFQLLPAQGSSLTNFFPDVGFDQQSMRPGPAFPQQVPLVQQGSRELQDSFHLRPSPYSNCGSLPNTILPEDSSTSLFKDLNSALAGLPEVSLNVDTPFPLEEELQIEPLSLDGLNMLSDSSMGLLDPSVEETFRADRL

SEQ ID NO: 20191 - protein, 618 aa, Homo sapiens
  Payload ID: 4027
  Gene Symbol: CRTC3
  Gene Name: CREB regulated transcription coactivator 3
  Uniprot ID: Q6UUV7
  ENSP ID: ENSP00000416573
MAASPGSGSANPRKFSEKIALHTQRQAEETRAFEQLMTDLTLSRVQFQKLQQLRLTQYHGGSLPNVSQLRSSASEFQPSFHQADNVRGTRHHGLVERPSRNRFHPLHRRSGDKPGRQFDGSAFGANYSSQPLDESWPRQQPPWKDEKHPGFRLTSALNRTNSDSALHTSALSTKPQDPYGGGGQSAWPAPYMGFCDGENNGHGEVASFPGPLKEENLLNVPKPLPKQLWETKEIQSLSGRPRSCDVGGGNAFPHNGQNLGLSPFLGTLNTGGSLPDLTNLHYSTPLPASLDTTDHHFGSMSVGNSVNNIPAAMTHLGIRSSSGLQSSRSNPSIQATLNKTVLSSSLNNHPQTSVPNASALHPSLRLFSLSNPSLSTTNLSGPSRRRQPPVSPLTLSPGPEAHQGFSRQLSSTSPLAPYPTSQMVSSDRSQLSFLPTEAQAQVSPPPPYPAPQELTQPLLQQPRAPEAPAQQPQAASSLPQSDFQLLPAQGSSLTNFFPDVGFDQQSMRPGPAFPQQVPLVQQGSRELQDSFHLRPSPYSNCGSLPNTILPDSSTSLFKDLNSALAGLPEVSLNVDTPFPLEEELQIEPLSLDGLNMLSDSSMGLLDPSVEETFRADRL

SEQ ID NO: 20192 - protein, 91 aa, Homo sapiens
  Payload ID: 4027
  Gene Symbol: CRTC3
  Gene Name: CREB regulated transcription coactivator 3
  ENSP ID: ENSP00000452640
MAASPGSGSANPRKFSEKIALHTQRQAEETRAFEQLMTDLTLSRVQFQKLQQLRLTQYHGGSLPNVSQLRSSASEFQVERNSSPCVDGLRQ

SEQ ID NO: 20193 - protein, 190 aa, Homo sapiens
  Payload ID: 4027
  Gene Symbol: CRTC3
  Gene Name: CREB regulated transcription coactivator 3
  ENSP ID: ENSP00000452676
  MOD_RES (1)..(1): Any amino acid
XHPLHRRSGDKPGRQFDGSAFGANYSSQPLDESWPRQQPPWKDEKHPGFRLTSALNRTNSDSALHTSALSTKPQDPYGGGGQSAWPAPYMVASFPGPLKEENLLNVPKPLPKQLWETKEIQSLSGRPRSCDVGGGNAFPHNGQNLGLSPFLGTLNTGGSLPDLTNLHYSTPLPASLDTTDHHFGSMSVGN

SEQ ID NO: 20194 - protein, 284 aa, Homo sapiens
  Payload ID: 4028
  Gene Symbol: CREBZF
  Gene Name: CREB/ATF bZIP transcription factor
  ENSP ID: ENSP00000260058
VRAPSPEEMEEEAIASLPGEETEDMDFLSGLELADLLDPRQPDWHLDPGLSSPGPLSSSGGGSDSGGLWRGDDDDEAAAAEMQRFSDLLQRLLNGIGGCSSSSDSGSAEKRRRKSPGGGGGGGSGNDNNQAATKSPRKAAAAAARLNRLKKKEYVMGLESRVRGLAAENQELRAENRELGKRVQALQEESRYLRAVLANETGLARLLSRLSGVGLRLTTSLFRDSPAGDHDYALPVGKQKQDLLEEDDSAGGVCLHVDKDKVSVEFCSACARKASSSLKIFFFR

SEQ ID NO: 20195 - protein, 130 aa, Homo sapiens
  Payload ID: 4028
  Gene Symbol: CREBZF
  Gene Name: CREB/ATF bZIP transcription factor
  ENSP ID: ENSP00000433380
  MOD_RES (1)..(1): Any amino acid
XMGLESRVRGLAAENQELRAENRELGKRVQALQEESRYLRAVLANETGLARLLSRLSGVGLRLTTSLFRDSPAGDHDYALPVGKQKQDLLEEDDSAGGVCLHVDKDKVSVEFCSACARKASSSLKIFFFR

SEQ ID NO: 20196 - protein, 354 aa, Homo sapiens
  Payload ID: 4028
  Gene Symbol: CREBZF
  Gene Name: CREB/ATF bZIP transcription factor
  Uniprot ID: Q9NS37
  ENSP ID: ENSP00000433459
MRHSLTKLLAASGSNSPTRSESPEPAATCSLPSDLTRAAAGEEETAAAGSPGRKQQFGDEGELEAGRGSRGGVAVRAPSPEEMEEEAIASLPGEETEDMDFLSGLELADLLDPRQPDWHLDPGLSSPGPLSSSGGGSDSGGLWRGDDDDEAAAAEMQRFSDLLQRLLNGIGGCSSSSDSGSAEKRRRKSPGGGGGGGSGNDNNQAATKSPRKAAAAAARLNRLKKKEYVMGLESRVRGLAAENQELRAENRELGKRVQALQEESRYLRAVLANETGLARLLSRLSGVGLRLTTSLFRDSPAGDHDYALPVGKQKQDLLEEDDSAGGVCLHVDKDKVSVEFCSACARKASSSLKM

SEQ ID NO: 20197 - protein, 354 aa, Homo sapiens; identical to SEQ ID NO: 20196
  Payload ID: 4028
  Gene Symbol: CREBZF
  Gene Name: CREB/ATF bZIP transcription factor
  Uniprot ID: Q9NS37
  ENSP ID: ENSP00000434281

SEQ ID NO: 20198 - protein, 358 aa, Homo sapiens
  Payload ID: 4028
  Gene Symbol: CREBZF
  Gene Name: CREB/ATF bZIP transcription factor
  ENSP ID: ENSP00000435762
MRHSLTKLLAASGSNSPTRSESPEPAATCSLPSDLTRAAAGEEETAAAGSPGRKQQFGDEGELEAGRGSRGGVAVRAPSPEEMEEEAIASLPGEETEDMDFLSGLELADLLDPRQPDWHLDPGLSSPGPLSSSGGGSDSGGLWRGDDDDEAAAAEMQRFSDLLQRLLNGIGGCSSSSDSGSAEKRRRKSPGGGGGGGSGNDNNQAATKSPRKAAAAAARLNRLKKKEYVMGLESRVRGLAAENQELRAENRELGKRVQALQEESRYLRAVLANETGLARLLSRLSGVGLRLTTSLFRDSPAGDHDYALPVGKQKQDLLEEDDSAGGVCLHVDKDKVSVEFCSACARKASSSLKIFFFR

SEQ ID NO: 20199 - protein, 67 aa, Homo sapiens
  Payload ID: 4028
  Gene Symbol: CREBZF
  Gene Name: CREB/ATF bZIP transcription factor
  ENSP ID: ENSP00000435980
MRADPPASLPLLLPPTTFSFLGDFLPARLRCRGYRTVVPASQPVDTAVGAEETGPAAGHISCFILKA

SEQ ID NO: 20200 - protein, 639 aa, Homo sapiens
  Payload ID: 4029
  Gene Symbol: CREBRF
  Gene Name: CREB3 regulatory factor
  Uniprot ID: Q8IUR6
  ENSP ID: ENSP00000296953
MPQPSVSGMDPPFGDAFRSHTFSEQTLMSTDLLANSSDPDFMYELDREMNYQQNPRDNFLSLEDCKDIENLESFTDVLDNEGALTSNWEQWDTYCEDLTKYTKLTSCDIWGTKEVDYLGLDDFSSPYQDEEVISKTPTLAQLNSEDSQSVSDSLYYPDSLFSVKQNPLPSSFPGKKITSRAAAPVCSSKTLQAEVPLSDCVQKASKPTSSTQIMVKTNMYHNEKVNFHVECKDYVKKAKVKINPVQQSRPLLSQIHTDAAKENTCYCGAVAKRQEKKGMEPLQGHATPALPFKETQELLLSPLPQEGPGSLAAGESSSLSASTSVSDSSQKKEEHNYSLFVSDNLGEQPTKCSPEEDEEDEEDVDDEDHDEGFGSEHELSENEEEEEEEEDYEDDKDDDISDTFSEPGYENDSVEDLKEVTSISSRKRGKRRYFWEYSEQLTPSQQERMLRPSEWNRDTLPSNMYQKNGLHHGKYAVKKSRRTDVEDLTPNPKKLLQIGNELRKLNKVISDLTPVSELPLTARPRSRKEKNKLASRACRLKKKAQYEANKVKLWGLNTEYDNLLFVINSIKQEIVNRVQNPRDERGPNMGQKLEILIKDTLGLPVAGQTSEFVNQVLEKTAEGNPTGGLVGLRIPTSKV

SEQ ID NO: 20201 - protein, 417 aa, Homo sapiens
  Payload ID: 4029
  Gene Symbol: CREBRF
  Gene Name: CREB3 regulatory factor
  Uniprot ID: Q8IUR6
  ENSP ID: ENSP00000428290
MPQPSVSGMDPPFGDAFRSHTFSEQTLMSTDLLANSSDPDFMYELDREMNYQQNPRDNFLSLEDCKDIENLESFTDVLDNEGALTSNWEQWDTYCEDLTKYTKLTSCDIWGTKEVDYLGLDDFSSPYQDEEVISKTPTLAQLNSEDSQSVSDSLYYPDSLFSVKQNPLPSSFPGKKITSRAAAPVCSSKTLQAEVPLSDCVQKASKPTSSTQIMVKTNMYHNEKVNFHVECKDYVKKAKVKINPVQQSRPLLSQIHTDAAKENTCYCGAVAKRQEKKGMEPLQGHATPALPFKETQELLLSPLPQEGPGSLAAGESSSLSASTSVSDSSQKKEEHNYSLFVSDNLGEQPTKCSPEEDEEDEEDVDDEDHDEGFGSEHELSENEEEEEEEEDYEDDKDDDISDTFSEPGIIMLASLPD

SEQ ID NO: 20202 - protein, 26 aa, Homo sapiens
  Payload ID: 4029
  Gene Symbol: CREBRF
  Gene Name: CREB3 regulatory factor
  ENSP ID: ENSP00000430801
MPQPSVSGMDPPFGDAFRSHTFSEQT

SEQ ID NO: 20203 - protein, 417 aa, Homo sapiens; identical to SEQ ID NO: 20201
  Payload ID: 4029
  Gene Symbol: CREBRF
  Gene Name: CREB3 regulatory factor
  Uniprot ID: Q8IUR6
  ENSP ID: ENSP00000431107

SEQ ID NO: 20204 - protein, 223 aa, Homo sapiens
  Payload ID: 4030
  Gene Symbol: CFC1
  Gene Name: cripto, FRL-1, cryptic family 1
  Uniprot ID: P0CG37
  ENSP ID: ENSP00000259216
MTWRHHVRLLFTVSLALQIINLGNSYQREKHNGGREEVTKVATQKHRQSPLNWTSSHFGEVTGSAEGWGPEEPLPYSRAFGEGASARPRCCRNGGTCVLGSFCVCPAHFTGRYCEHDQRRSECGALEHGAWTLRACHLCRCIFGALHCLPLQTPDRCDPKDFLASHAHGPSAGGAPSLLLLLPCALLHRLLRPDAPAHPRSLVPSVLQRERRPCGRPGLGHRL

SEQ ID NO: 20205 - protein, 191 aa, Homo sapiens
  Payload ID: 4030
  Gene Symbol: CFC1
  Gene Name: cripto, FRL-1, cryptic family 1
  ENSP ID: ENSP00000480526
MTWRHHVRLLFTVSLALQIINLGNSYQREKHNGGREEVTKVATQKHRQSPLNWTSSHFGEVTGSAEGWGPEEPLPYSRAFGEVNAAPWSTEPGPSAPATSAGASSGPCTASPSRRLTAVTRKTSWPPTLTGRAPGARPACYSCCPAHSCTASCARMRPRTLGPWSLPSSSGSGAPAEGRDLGIAFNFLCCK

SEQ ID NO: 20206 - protein, 148 aa, Homo sapiens
  Payload ID: 4030
  Gene Symbol: CFC1
  Gene Name: cripto, FRL-1, cryptic family 1
  ENSP ID: ENSP00000480843
MTWRHHVRLLFTVSLALQIINLGNSYQREKHNGGREEVTKVATQKHRQSPLNWTSSHFGEVTGSAEGWGPEEPLPYSRAFGEDPKDFLASHAHGPSAGGAPSLLLLLPCALLHRLLRPDAPAHPRSLVPSVLQRERRPCGRPGLGHRL

SEQ ID NO: 20207 - protein, 223 aa, Homo sapiens
  Payload ID: 4031
  Gene Symbol: CFC1B
  Gene Name: cripto, FRL-1, cryptic family 1B
  Uniprot ID: P0CG36
  ENSP ID: ENSP00000281882
MTWRHHVRLLFTVSLALQIINLGNSYQREKHNGGREEVTKVATQKHRQSPLNWTSSHFGEVTGSAEGWGPEEPLPYSWAFGEGASARPRCCRNGGTCVLGSFCVCPAHFTGRYCEHDQRRSECGALEHGAWTLRACHLCRCIFGALHCLPLQTPDRCDPKDFLASHAHGPSAGGAPSLLLLLPCALLHRLLRPDAPAHPRSLVPSVLQRERRPCGRPGLGHRL

SEQ ID NO: 20208 - protein, 148 aa, Homo sapiens
  Payload ID: 4031
  Gene Symbol: CFC1B
  Gene Name: cripto, FRL-1, cryptic family 1B
  ENSP ID: ENSP00000480160
MTWRHHVRLLFTVSLALQIINLGNSYQREKHNGGREEVTKVATQKHRQSPLNWTSSHFGEVTGSAEGWGPEEPLPYSWAFGEDPKDFLASHAHGPSAGGAPSLLLLLPCALLHRLLRPDAPAHPRSLVPSVLQRERRPCGRPGLGHRL

SEQ ID NO: 20209 - protein, 191 aa, Homo sapiens
  Payload ID: 4031
  Gene Symbol: CFC1B
  Gene Name: cripto, FRL-1, cryptic family 1B
  ENSP ID: ENSP00000483368
MTWRHHVRLLFTVSLALQIINLGNSYQREKHNGGREEVTKVATQKHRQSPLNWTSSHFGEVTGSAEGWGPEEPLPYSWAFGEVNAAPWSTEPGPSAPATSAGASSGPCTASPSRRLTAVTRKTSWPPTLTGRAPGARPACYSCCPAHSCTASCARMRPRTLGPWSLPSSSGSGAPAEGRDLGIAFNFLCCK

SEQ ID NO: 20210 - protein, 836 aa, Homo sapiens
  Payload ID: 4032
  Gene Symbol: CRNKL1
  Gene Name: crooked neck pre-mRNA splicing factor 1
  ENSP ID: ENSP00000366544
MTATVENLTFQKDTLGNAVDKNRRHGSTEPLVLAWSSQFRRLTWGCALDALHRSPCVAASQHGVTHLIRSSRTPHSTRCRKEDAQPGHHGNGAASVTAQARGQRSVLQVPLPVPRSCLFSESFVVSVSSQSRFLASVPGTGVQRSTAADMAASTAAGKQRIPKVAKVKNKAPAEVQITAEQLLREAKERELELLPPPPQQKITDEEELNDYKLRKRKTFEDNIRKNRTVISNWIKYAQWEESLKEIQRARSIYERALDVDYRNITLWLKYAEMEMKNRQVNHARNIWDRAITTLPRVNQFWYKYTYMEEMLGNVAGARQVFERWMEWQPEEQAWHSYINFELRYKEVDRARTIYERFVLVHPDVKNWIKYARFEEKHAYFAHARKVYERAVEFFGDEHMDEHLYVAFAKFEENQKEFERVRVIYKYALDRISKQDAQELFKNYTIFEKKFGDRRGIEDIIVSKRRFQYEEEVKANPHNYDAWFDYLRLVESDAEAEAVREVYERAIANVPPIQEKRHWKRYIYLWINYALYEELEAKDPERTRQVYQASLELIPHKKFTFAKMWILYAQFEIRQKNLSLARRALGTSIGKCPKNKLFKVYIELELQLREFDRCRKLYEKFLEFGPENCTSWIKFAELETILGDIDRARAIYELAISQPRLDMPEVLWKSYIDFEIEQEETERTRNLYRRLLQRTQHVKVWISFAQFELSSGKEGSLTKCRQIYEEANKTMRNCEEKEERLMLLESWRSFEEEFGTASDKERVDKLMPEKVKKRRKVQTDDGSDAGWEEYFDYIFPEDAANQPNLKLLAMAKLWKKQQQEKEDAEHHPDEDVDESES

SEQ ID NO: 20211 - protein, 848 aa, Homo sapiens
  Payload ID: 4032
  Gene Symbol: CRNKL1
  Gene Name: crooked neck pre-mRNA splicing factor 1
  Uniprot ID: Q9BZJ0
  ENSP ID: ENSP00000366557
MTATVENLTFQKDTLGNAVDKNTSRLELRSYSLAGRHGSTEPLVLAWSSQFRRLTWGCALDALHRSPCVAASQHGVTHLIRSSRTPHSTRCRKEDAQPGHHGNGAASVTAQARGQRSVLQVPLPVPRSCLFSESFVVSVSSQSRFLASVPGTGVQRSTAADMAASTAAGKQRIPKVAKVKNKAPAEVQITAEQLLREAKERELELLPPPPQQKITDEEELNDYKLRKRKTFEDNIRKNRTVISNWIKYAQWEESLKEIQRARSIYERALDVDYRNITLWLKYAEMEMKNRQVNHARNIWDRAITTLPRVNQFWYKYTYMEEMLGNVAGARQVFERWMEWQPEEQAWHSYINFELRYKEVDRARTIYERFVLVHPDVKNWIKYARFEEKHAYFAHARKVYERAVEFFGDEHMDEHLYVAFAKFEENQKEFERVRVIYKYALDRISKQDAQELFKNYTIFEKKFGDRRGIEDIIVSKRRFQYEEEVKANPHNYDAWFDYLRLVESDAEAEAVREVYERAIANVPPIQEKRHWKRYIYLWINYALYEELEAKDPERTRQVYQASLELIPHKKFTFAKMWILYAQFEIRQKNLSLARRALGTSIGKCPKNKLFKVYIELELQLREFDRCRKLYEKFLEFGPENCTSWIKFAELETILGDIDRARAIYELAISQPRLDMPEVLWKSYIDFEIEQEETERTRNLYRRLLQRTQHVKVWISFAQFELSSGKEGSLTKCRQIYEEANKTMRNCEEKEERLMLLESWRSFEEEFGTASDKERVDKLMPEKVKKRRKVQTDDGSDAGWEEYFDYIFPEDAANQPNLKLLAMAKLWKKQQQEKEDAEHHPDEDVDESES

SEQ ID NO: 20212 - protein, 74 aa, Homo sapiens
  Payload ID: 4032
  Gene Symbol: CRNKL1
  Gene Name: crooked neck pre-mRNA splicing factor 1
  Uniprot ID: Q9BZJ0
  ENSP ID: ENSP00000428436
MTATVENLTFQKDTLGNAVDKNILASLLVSTALPTSSAAPGRRTPRAAARRTRSLVTMETVPPPSRLKREVKGQ

SEQ ID NO: 20213 - protein, 104 aa, Homo sapiens
  Payload ID: 4032
  Gene Symbol: CRNKL1
  Gene Name: crooked neck pre-mRNA splicing factor 1
  ENSP ID: ENSP00000429226
MTATVENLTFQKDTLGNAVDKNRRHGSTEPLVLAWSSQFRRLTWGCALDALHRSPCVAASQHGVTHLIRSSRTPHSTRCRKEDAQPGHHGNGAASVTAQARGQR

SEQ ID NO: 20214 - protein, 687 aa, Homo sapiens
  Payload ID: 4032
  Gene Symbol: CRNKL1
  Gene Name: crooked neck pre-mRNA splicing factor 1
  Uniprot ID: Q9BZJ0
  ENSP ID: ENSP00000440733
MAASTAAGKQRIPKVAKVKNKAPAEVQITAEQLLREAKERELELLPPPPQQKITDEEELNDYKLRKRKTFEDNIRKNRTVISNWIKYAQWEESLKEIQRARSIYERALDVDYRNITLWLKYAEMEMKNRQVNHARNIWDRAITTLPRVNQFWYKYTYMEEMLGNVAGARQVFERWMEWQPEEQAWHSYINFELRYKEVDRARTIYERFVLVHPDVKNWIKYARFEEKHAYFAHARKVYERAVEFFGDEHMDEHLYVAFAKFEENQKEFERVRVIYKYALDRISKQDAQELFKNYTIFEKKFGDRRGIEDIIVSKRRFQYEEEVKANPHNYDAWFDYLRLVESDAEAEAVREVYERAIANVPPIQEKRHWKRYIYLWINYALYEELEAKDPERTRQVYQASLELIPHKKFTFAKMWILYAQFEIRQKNLSLARRALGTSIGKCPKNKLFKVYIELELQLREFDRCRKLYEKFLEFGPENCTSWIKFAELETILGDIDRARAIYELAISQPRLDMPEVLWKSYIDFEIEQEETERTRNLYRRLLQRTQHVKVWISFAQFELSSGKEGSLTKCRQIYEEANKTMRNCEEKEERLMLLESWRSFEEEFGTASDKERVDKLMPEKVKKRRKVQTDDGSDAGWEEYFDYIFPEDAANQPNLKLLAMAKLWKKQQQEKEDAEHHPDEDVDESES

SEQ ID NO: 20215 - protein, 674 aa, Homo sapiens
  Payload ID: 4033
  Gene Symbol: CRB1
  Gene Name: crumbs family member 1, photoreceptor morphogenesis associated
  ENSP ID: ENSP00000356367
MTSNGVALLNFYNMPSTPSFVGCLQDIKIDWNHITLENISSGSSLNVKAGCVRKDWCESQPCQSRGRCINLWLSYQCDCHRPYEGPNCLREYVAGRFGQDDSTGYVIFTLDESYGDTISLSMFVRTLQPSGLLLALENSTYQYIRVWLERGRLAMLTPNSPKLVVKFVLNDGNVHLISLKIKPYKIELYQSSQNLGFISASTWKIEKGDVIYIGGLPDKQETELNGGFFKGCIQDVRLNNQNLEFFPNPTNNASLNPVLVNVTQGCAGDNSCKSNPCHNGGVCHSRWDDFSCSCPALTSGKACEEVQWCGFSPCPHGAQCQPVLQGFECIANAVFNGQSGQILFRSNGNITRELTNITFGFRTRDANVIILHAEKEPEFLNISIQDSRLFFQLQSGNSFYMLSLTSLQSVNDGTWHEVTLSMTDPLSQTSRWQMEVDNETPFVTSTIATGSLNFLKDNTDIYVGDRAIDNIKGLQGCLSTIEIGGIYLSYFENVHGFINKPQEEQFLKISTNSVVTGCLQLNVCNSNPCLHGGNCEDIYSSYHCSCPLGWSGKHCELNIDECFSNPCIHGNCSDRVAAYHCTCEPGYTGVNCEVDIDNCQSHQCANGATCISHTNGYSCLCFGNFTGKFCRQSRLPSTVCGNEKTNLTCYNGGNCTEFQTELKCMCRPGFTGEW

SEQ ID NO: 20216 - protein, 1294 aa, Homo sapiens
  Payload ID: 4033
  Gene Symbol: CRB1
  Gene Name: crumbs family member 1, photoreceptor morphogenesis associated
  Uniprot ID: P82279
  ENSP ID: ENSP00000356369
MALKNINYLLIFYLSFSLLIYIKNSFCNKNNTRCLSNSCQNNSTCKDFSKDNDCSCSDTANNLDKDCDNMKDPCFSNPCQGSATCVNTPGERSFLCKCPPGYSGTICETTIGSCGKNSCQHGGICHQDPIYPVCICPAGYAGRFCEIDHDECASSPCQNGAVCQDGIDGYSCFCVPGYQGRHCDLEVDECASDPCKNEATCLNEIGRYTCICPHNYSGYTGAQCEIDLNECNSNPCQSNGECVELSSEKQYGRITGLPSSFSYHEASGYVCICQPGFTGIHCEEDVNECSSNPCQNGGTCENLPGNYTCHCPFDNLSRTFYGGRDCSDILLGCTHQQCLNNGTCIPHFQDGQHGFSCLCPSGYTGSLCEIATTLSFEGDGFLWVKSGSVTTKGSVCNIALRFQTVQPMALLLFRSNRDVFVKLELLSGYIHLSIQVNNQSKVLLFISHNTSDGEWHFVEVIFAEAVTLTLIDDSCKEKCIAKAPTPLESDQSICAFQNSFLGGLPVGMTSNGVALLNFYNMPSTPSFVGCLQDIKIDWNHITLENISSGSSLNVKAGCVRKDWCESQPCQSRGRCINLWLSYQCDCHRPYEGPNCLREYVAGRFGQDDSTGYVIFTLDESYGDTISLSMFVRTLQPSGLLLALENSTYQYIRVWLERGRLAMLTPNSPKLVVKFVLNDGNVHLISLKIKPYKIELYQSSQNLGFISASTWKIEKGDVIYIGGLPDKQETELNGGFFKGCIQDVRLNNQNLEFFPNPTNNASLNPVLVNVTQGCAGDNSCKSNPCHNGGVCHSRWDDFSCSCPALTSGKACEEVQWCGFSPCPHGAQCQPVLQGFECIANAVFNGQSGQILFRSNGNITRELTNITFGFRTRDANVIILHAEKEPEFLNISIQDSRLFFQLQSGNSFYMLSLTSLQSVNDGTWHEVTLSMTDPLSQTSRWQMEVDNETPFVTSTIATGSLNFLKDNTDIYVGDRAIDNIKGLQGCLSTIEIGGIYLSYFENVHGFINKPQEEQFLKISTNSVVTGCLQLNVCNSNPCLHGGNCEDIYSSYHCSCPLGWSGKHCELNIDECFSNPCIHGNCSDRVAAYHCTCEPGYTGVNCEVDIDNCQSHQCANGATCISHTNGYSCLCFGNFTGKFCRQSRLPSTVCGNEKTNLTCYNGGNCTEFQTELKCMCRPGFTGEWCEKDIDECASDPCVNGGLCQDLLNKFQCLCDVAFAGERCEVDLADDLISDIFTTIGSVTVALLLILLLAIVASVVTSNKRATQGTYSPSRQEKEGSRVEMWNLMPPPAMERLI

SEQ ID NO: 20217 - protein, 1406 aa, Homo sapiens
  Payload ID: 4033
  Gene Symbol: CRB1
  Gene Name: crumbs family member 1, photoreceptor morphogenesis associated
  Uniprot ID: P82279
  ENSP ID: ENSP00000356370
MALKNINYLLIFYLSFSLLIYIKNSFCNKNNTRCLSNSCQNNSTCKDFSKDNDCSCSDTANNLDKDCDNMKDPCFSNPCQGSATCVNTPGERSFLCKCPPGYSGTICETTIGSCGKNSCQHGGICHQDPIYPVCICPAGYAGRFCEIDHDECASSPCQNGAVCQDGIDGYSCFCVPGYQGRHCDLEVDECASDPCKNEATCLNEIGRYTCICPHNYSGVNCELEIDECWSQPCLNGATCQDALGAYFCDCAPGFLGDHCELNTDECASQPCLHGGLCVDGENRYSCNCTGSGFTGTHCETLMPLCWSKPCHNNATCEDSVDNYTCHCWPGYTGAQCEIDLNECNSNPCQSNGECVELSSEKQYGRITGLPSSFSYHEASGYVCICQPGFTGIHCEEDVNECSSNPCQNGGTCENLPGNYTCHCPFDNLSRTFYGGRDCSDILLGCTHQQCLNNGTCIPHFQDGQHGFSCLCPSGYTGSLCEIATTLSFEGDGFLWVKSGSVTTKGSVCNIALRFQTVQPMALLLFRSNRDVFVKLELLSGYIHLSIQVNNQSKVLLFISHNTSDGEWHFVEVIFAEAVTLTLIDDSCKEKCIAKAPTPLESDQSICAFQNSFLGGLPVGMTSNGVALLNFYNMPSTPSFVGCLQDIKIDWNHITLENISSGSSLNVKAGCVRKDWCESQPCQSRGRCINLWLSYQCDCHRPYEGPNCLREYVAGRFGQDDSTGYVIFTLDESYGDTISLSMFVRTLQPSGLLLALENSTYQYIRVWLERGRLAMLTPNSPKLVVKFVLNDGNVHLISLKIKPYKIELYQSSQNLGFISASTWKIEKGDVIYIGGLPDKQETELNGGFFKGCIQDVRLNNQNLEFFPNPTNNASLNPVLVNVTQGCAGDNSCKSNPCHNGGVCHSRWDDFSCSCPALTSGKACEEVQWCGFSPCPHGAQCQPVLQGFECIANAVFNGQSGQILFRSNGNITRELTNITFGFRTRDANVIILHAEKEPEFLNISIQDSRLFFQLQSGNSFYMLSLTSLQSVNDGTWHEVTLSMTDPLSQTSRWQMEVDNETPFVTSTIATGSLNFLKDNTDIYVGDRAIDNIKGLQGCLSTIEIGGIYLSYFENVHGFINKPQEEQFLKISTNSVVTGCLQLNVCNSNPCLHGGNCEDIYSSYHCSCPLGWSGKHCELNIDECFSNPCIHGNCSDRVAAYHCTCEPGYTGVNCEVDIDNCQSHQCANGATCISHTNGYSCLCFGNFTGKFCRQSRLPSTVCGNEKTNLTCYNGGNCTEFQTELKCMCRPGFTGEWCEKDIDECASDPCVNGGLCQDLLNKFQCLCDVAFAGERCEVDLADDLISDIFTTIGSVTVALLLILLLAIVASVVTSNKRATQGTYSPSRQEKEGSRVEMWNLMPPPAMERLI

SEQ ID NO: 20218 - protein, 42 aa, Homo sapiens
  Payload ID: 4033
  Gene Symbol: CRB1
  Gene Name: crumbs family member 1, photoreceptor morphogenesis associated
  ENSP ID: ENSP00000395407
EKDIDECASDPCVNGGLCQDLLNKFQCLCDVAFAGERCEVDY

SEQ ID NO: 20219 - protein, 1376 aa, Homo sapiens
  Payload ID: 4033
  Gene Symbol: CRB1
  Gene Name: crumbs family member 1, photoreceptor morphogenesis associated
  Uniprot ID: P82279
  ENSP ID: ENSP00000433932
MALKNINYLLIFYLSFSLLIYIKNSFCNKNNTRCLSNSCQNNSTCKDFSKDNDCSCSDTANNLDKDCDNMKDPCFSNPCQGSATCVNTPGERSFLCKCPPGYSGTICETTIGSCGKNSCQHGGICHQDPIYPVCICPAGYAGRFCEIDHDECASSPCQNGAVCQDGIDGYSCFCVPGYQGRHCDLEVDECASDPCKNEATCLNEIGRYTCICPHNYSGVNCELEIDECWSQPCLNGATCQDALGAYFCDCAPGFLGDHCELNTDECASQPCLHGGLCVDGENRYSCNCTGSGFTGTHCETLMPLCWSKPCHNNATCEDSVDNYTCHCWPGYTGAQCEIDLNECNSNPCQSNGECVELSSEKQYGRITGLPSSFSYHEASGYVCICQPGFTGIHCEEDVNECSSNPCQNGGTCENLPGNYTCHCPFDNLSRTFYGGRDCSDILLGCTHQQCLNNGTCIPHFQDGQHGFSCLCPSGYTGSLCEIATTLSFEGDGFLWVKSGSVTTKGSVCNIALRFQTVQPMALLLFRSNRDVFVKLELLSGYIHLSIQVNNQSKVLLFISHNTSDGEWHFVEVIFAEAVTLTLIDDSCKEKCIAKAPTPLESDQSICAFQNSFLGGLPVGMTSNGVALLNFYNMPSTPSFVGCLQDIKIDWNHITLENISSGSSLNVKAGCVRKDWCESQPCQSRGRCINLWLSYQCDCHRPYEGPNCLREYVAGRFGQDDSTGYVIFTLDESYGDTISLSMFVRTLQPSGLLLALENSTYQYIRVWLERGRLAMLTPNSPKLVVKFVLNDGNVHLISLKIKPYKIELYQSSQNLGFISASTWKIEKGDVIYIGGLPDKQETELNGGFFKGCIQDVRLNNQNLEFFPNPTNNASLNPVLVNVTQGCAGDNSCKSNPCHNGGVCHSRWDDFSCSCPALTSGKACEEVQWCGFSPCPHGAQCQPVLQGFECIANAVFNGQSGQILFRSNGNITRELTNITFGFRTRDANVIILHAEKEPEFLNISIQDSRLFFQLQSGNSFYMLSLTSLQSVNDGTWHEVTLSMTDPLSQTSRWQMEVDNETPFVTSTIATGSLNFLKDNTDIYVGDRAIDNIKGLQGCLSTIEIGGIYLSYFENVHGFINKPQEEQFLKISTNSVVTGCLQLNVCNSNPCLHGGNCEDIYSSYHCSCPLGWSGKHCELNIDECFSNPCIHGNCSDRVAAYHCTCEPGYTGVNCEVDIDNCQSHQCANGATCISHTNGYSCLCFGNFTGKFCRQSRLPSTVCGNEKTNLTCYNGGNCTEFQTELKCMCRPGFTGEWCEKDIDECASDPCVNGGLCQDLLNKFQCLCDVAFAGERCEVDVSSLSFYVSLLFWQNLFQLLSYLILRMNDEPVVEWGEQEDY

SEQ ID NO: 20220 - protein, 870 aa, Homo sapiens
  Payload ID: 4033
  Gene Symbol: CRB1
  Gene Name: crumbs family member 1, photoreceptor morphogenesis associated
  Uniprot ID: P82279
  ENSP ID: ENSP00000438091
MALKNINYLLIFYLSFSLLIYIKNSFCNKNNTRCLSNSCQNNSTCKDFSKDNDCSCSDTANNLDKDCDNMKDPCFSNPCQGSATCVNTPGERSFLCKCPPGYSGTICETTIGSCGKNSCQHGGICHQDPIYPVCICPAGYAGRFCEIDHDECASSPCQNGAVCQDGIDGYSCFCVPGYQGRHCDLEVDECASDPCKNEATCLNEIGRYTCICPHNYSGVNCELEIDECWSQPCLNGATCQDALGAYFCDCAPGFLGDHCELNTDECASQPCLHGGLCVDGENRYSCNCTGSGFTGTHCETLMPLCWSKPCHNNATCEDSVDNYTCHCWPGYTGAQCEIDLNECNSNPCQSNGECVELSSEKQYGRITGLPSSFSYHEASGYVCICQPGFTGIHCEEDVNECSSNPCQNGGTCENLPGNYTCHCPFDNLSRTFYGGRDCSDILLGCTHQQCLNNGTCIPHFQDGQHGFSCLCPSGYTGSLCEIATTLSFEGDGFLWVKSGSVTTKGSVCNIALRFQTVQPMALLLFRSNRDVFVKLELLSGYIHLSIQVNNQSKVLLFISHNTSDGEWHFVEVIFAEAVTLTLIDDSCKEKCIAKAPTPLESDQSICAFQNSFLGGLPVGMTSNGVALLNFYNMPSTPSFVGCLQDIKIDWNHITLENISSGSSLNVKAGCVRKDWCESQPCQSRGRCINLWLSYQCDCHRPYEGPNCLRGKFCRQSRLPSTVCGNEKTNLTCYNGGNCTEFQTELKCMCRPGFTGEWCEKDIDECASDPCVNGGLCQDLLNKFQCLCDVAFAGERCEVDLADDLISDIFTTIGSVTVALLLILLLAIVASVVTSNKRATQGTYSPSRQEKEGSRVEMWNLMPPPAMERLI

SEQ ID NO: 20221 - protein, 1382 aa, Homo sapiens
  Payload ID: 4033
  Gene Symbol: CRB1
  Gene Name: crumbs family member 1, photoreceptor morphogenesis associated
  ENSP ID: ENSP00000438786
MKDPCFSNPCQGSATCVNTPGERSFLCKCPPGYSGTICETTIGSCGKNSCQHGGICHQDPIYPVCICPAGYAGRFCEIDHDECASSPCQNGAVCQDGIDGYSCFCVPGYQGRHCDLEVDECASDPCKNEATCLNEIGRYTCICPHNYSGVNCELEIDECWSQPCLNGATCQDALGAYFCDCAPGFLGDHCELNTDECASQPCLHGGLCVDGENRYSCNCTGSGFTGTHCETLMPLCWSKPCHNNATCEDSVDNYTCHCWPGYTGAQCEIDLNECNSNPCQSNGECVELSSEKQYGRITGLPSSFSYHEASGYVCICQPGFTGIHCEEDVNECSSNPCQNGGTCENLPGNYTCHCPFDNLSRTFYGGRDCSDILLGCTHQQCLNNGTCIPHFQDGQHGFSCLCPSGYTGSLCEIATTLSFEGDGFLWVKSGSVTTKGSVCNIALRFQTVQPMALLLFRSNRDVFVKLELLSGYIHLSIQVNNQSKVLLFISHNTSDGEWHFVEVIFAEAVTLTLIDDSCKEKCIAKAPTPLESDQSICAFQNSFLGGLPVGMTSNGVALLNFYNMPSTPSFVGCLQDIKIDWNHITLENISSGSSLNVKAGCVRKDWCESQPCQSRGRCINLWLSYQCDCHRPYEGPNCLREYVAGRFGQDDSTGYVIFTLDESYGDTISLSMFVRTLQPSGLLLALENSTYQYIRVWLERGRLAMLTPNSPKLVVKFVLNDGNVHLISLKIKPYKIELYQSSQNLGFISASTWKIEKGDVIYIGGLPDKQETELNGGFFKGCIQDVRLNNQNLEFFPNPTNNASLNPVLVNVTQGCAGDNSCKRQTNVGRALTELGSRGPKYQVSLFRFCVGSWATGNTFFLSSIKPGSNPCHNGGVCHSRWDDFSCSCPALTSGKACEEVQWCGFSPCPHGAQCQPVLQGFECIANAVFNGQSGQILFRSNGNITRELTNITFGFRTRDANVIILHAEKEPEFLNISIQDSRLFFQLQSGNSFYMLSLTSLQSVNDGTWHEVTLSMTDPLSQTSRWQMEVDNETPFVTSTIATGSLNFLKDNTDIYVGDRAIDNIKGLQGCLSTIEIGGIYLSYFENVHGFINKPQEEQFLKISTNSVVTGCLQLNVCNSNPCLHGGNCEDIYSSYHCSCPLGWSGKHCELNIDECFSNPCIHGNCSDRVAAYHCTCEPGYTGVNCEVDIDNCQSHQCANGATCISHTNGYSCLCFGNFTGKFCRQSRLPSTVCGNEKTNLTCYNGGNCTEFQTELKCMCRPGFTGEWCEKDIDECASDPCVNGGLCQDLLNKFQCLCDVAFAGERCEVDLADDLISDIFTTIGSVTVALLLILLLAIVASVVTSNKRATQGTYSPSRQEKEGSRVEMWNLMPPPAMERLI

SEQ ID NO: 20222 - protein, 1176 aa, Homo sapiens
  Payload ID: 4034
  Gene Symbol: CRB2
  Gene Name: crumbs family member 2
  Uniprot ID: Q5IJ48
  ENSP ID: ENSP00000353092
MALARPGTPDPQALASVLLLLLWAPALSLLAGTVPSEPPSACASDPCAPGTECQATESGGYTCGPMEPRGCATQPCHHGALCVPQGPDPTGFRCYCVPGFQGPRCELDIDECASRPCHHGATCRNLADRYECHCPLGYAGVTCEMEVDECASAPCLHGGSCLDGVGSFRCVCAPGYGGTRCQLDLDECQSQPCAHGGTCHDLVNGFRCDCAGTGYEGTHCEREVLECASAPCEHNASCLEGLGSFRCLCWPGYSGELCEVDEDECASSPCQHGGRCLQRSDPALYGGVQAAFPGAFSFRHAAGFLCHCPPGFEGADCGVEVDECASRPCLNGGHCQDLPNGFQCHCPDGYAGPTCEEDVDECLSDPCLHGGTCSDTVAGYICRCPETWGGRDCSVQLTGCQGHTCPLAATCIPIFESGVHSYVCHCPPGTHGPFCGQNTTFSVMAGSPIQASVPAGGPLGLALRFRTTLPAGTLATRNDTKESLELALVAATLQATLWSYSTTVLVLRLPDLALNDGHWHQVEVVLHLATLELRLWHEGCPARLCVASGPVALASTASATPLPAGISSAQLGDATFAGCLQDVRVDGHLLLPEDLGENVLLGCERREQCRPLPCVHGGSCVDLWTHFRCDCARPHRGPTCADEIPAATFGLGGAPSSASFLLQELPGPNLTVSFLLRTRESAGLLLQFANDSAAGLTVFLSEGRIRAEVPGSPAVVLPGRWDDGLRHLVMLSFGPDQLQDLGQHVHVGGRLLAADSQPWGGPFRGCLQDLRLDGCHLPFFPLPLDNSSQPSELGGRQSWNLTAGCVSEDMCSPDPCFNGGTCLVTWNDFHCTCPANFTGPTCAQQLWCPGQPCLPPATCEEVPDGFVCVAEATFREGPPAAFSGHNASSGRLLGGLSLAFRTRDSEAWLLRAAAGALEGVWLAVRNGSLAGGVRGGHGLPGAVLPIPGPRVADGAWHRVRLAMERPAATTSRWLLWLDGAATPVALRGLASDLGFLQGPGAVRILLAENFTGCLGRVALGGLPLPLARPRPGAAPGAREHFASWPGTPAPILGCRGAPVCAPSPCLHDGACRDLFDAFACACGPGWEGPRCEAHVDPCHSAPCARGRCHTHPDGRFECRCPPGFGGPRCRWDGWAGGWAANAPWGYGGAEKSARSVDESLPFPGPHVLICDMRRTV

SEQ ID NO: 20223 - protein, 1285 aa, Homo sapiens
  Payload ID: 4034
  Gene Symbol: CRB2
  Gene Name: crumbs family member 2
  Uniprot ID: Q5IJ48
  ENSP ID: ENSP00000362734
MALARPGTPDPQALASVLLLLLWAPALSLLAGTVPSEPPSACASDPCAPGTECQATESGGYTCGPMEPRGCATQPCHHGALCVPQGPDPTGFRCYCVPGFQGPRCELDIDECASRPCHHGATCRNLADRYECHCPLGYAGVTCEMEVDECASAPCLHGGSCLDGVGSFRCVCAPGYGGTRCQLDLDECQSQPCAHGGTCHDLVNGFRCDCAGTGYEGTHCEREVLECASAPCEHNASCLEGLGSFRCLCWPGYSGELCEVDEDECASSPCQHGGRCLQRSDPALYGGVQAAFPGAFSFRHAAGFLCHCPPGFEGADCGVEVDECASRPCLNGGHCQDLPNGFQCHCPDGYAGPTCEEDVDECLSDPCLHGGTCSDTVAGYICRCPETWGGRDCSVQLTGCQGHTCPLAATCIPIFESGVHSYVCHCPPGTHGPFCGQNTTFSVMAGSPIQASVPAGGPLGLALRFRTTLPAGTLATRNDTKESLELALVAATLQATLWSYSTTVLVLRLPDLALNDGHWHQVEVVLHLATLELRLWHEGCPARLCVASGPVALASTASATPLPAGISSAQLGDATFAGCLQDVRVDGHLLLPEDLGENVLLGCERREQCRPLPCVHGGSCVDLWTHFRCDCARPHRGPTCADEIPAATFGLGGAPSSASFLLQELPGPNLTVSFLLRTRESAGLLLQFANDSAAGLTVFLSEGRIRAEVPGSPAVVLPGRWDDGLRHLVMLSFGPDQLQDLGQHVHVGGRLLAADSQPWGGPFRGCLQDLRLDGCHLPFFPLPLDNSSQPSELGGRQSWNLTAGCVSEDMCSPDPCFNGGTCLVTWNDFHCTCPANFTGPTCAQQLWCPGQPCLPPATCEEVPDGFVCVAEATFREGPPAAFSGHNASSGRLLGGLSLAFRTRDSEAWLLRAAAGALEGVWLAVRNGSLAGGVRGGHGLPGAVLPIPGPRVADGAWHRVRLAMERPAATTSRWLLWLDGAATPVALRGLASDLGFLQGPGAVRILLAENFTGCLGRVALGGLPLPLARPRPGAAPGAREHFASWPGTPAPILGCRGAPVCAPSPCLHDGACRDLFDAFACACGPGWEGPRCEAHVDPCHSAPCARGRCHTHPDGRFECRCPPGFGGPRCRLPVPSKECSLNVTCLDGSPCEGGSPAANCSCLEGLAGQRCQVPTLPCEANPCLNGGTCRAAGGVSECICNARFSGQFCEVAKGLPLPLPFPLLEVAVPAACACLLLLLLGLLSGILAARKRRQSEGTYSPSQQEVAGARLEMDSVLKVPPEERLI

SEQ ID NO: 20224 - protein, 953 aa, Homo sapiens
  Payload ID: 4034
  Gene Symbol: CRB2
  Gene Name: crumbs family member 2
  Uniprot ID: Q5IJ48
  ENSP ID: ENSP00000435279
MAMEPGALWTFLGHLWLLAGPTCEEDVDECLSDPCLHGGTCSDTVAGYICRCPETWGGRDCSVQLTGCQGHTCPLAATCIPIFESGVHSYVCHCPPGTHGPFCGQNTTFSVMAGSPIQASVPAGGPLGLALRFRTTLPAGTLATRNDTKESLELALVAATLQATLWSYSTTVLVLRLPDLALNDGHWHQVEVVLHLATLELRLWHEGCPARLCVASGPVALASTASATPLPAGISSAQLGDATFAGCLQDVRVDGHLLLPEDLGENVLLGCERREQCRPLPCVHGGSCVDLWTHFRCDCARPHRGPTCADEIPAATFGLGGAPSSASFLLQELPGPNLTVSFLLRTRESAGLLLQFANDSAAGLTVFLSEGRIRAEVPGSPAVVLPGRWDDGLRHLVMLSFGPDQLQDLGQHVHVGGRLLAADSQPWGGPFRGCLQDLRLDGCHLPFFPLPLDNSSQPSELGGRQSWNLTAGCVSEDMCSPDPCFNGGTCLVTWNDFHCTCPANFTGPTCAQQLWCPGQPCLPPATCEEVPDGFVCVAEATFREGPPAAFSGHNASSGRLLGGLSLAFRTRDSEAWLLRAAAGALEGVWLAVRNGSLAGGVRGGHGLPGAVLPIPGPRVADGAWHRVRLAMERPAATTSRWLLWLDGAATPVALRGLASDLGFLQGPGAVRILLAENFTGCLGRVALGGLPLPLARPRPGAAPGAREHFASWPGTPAPILGCRGAPVCAPSPCLHDGACRDLFDAFACACGPGWEGPRCEAHVDPCHSAPCARGRCHTHPDGRFECRCPPGFGGPRCRLPVPSKECSLNVTCLDGSPCEGGSPAANCSCLEGLAGQRCQVPTLPCEANPCLNGGTCRAAGGVSECICNARFSGQFCEVAKGLPLPLPFPLLEVAVPAACACLLLLLLGLLSGILAARKRRQSEGTYSPSQQEVAGARLEMDSVLKVPPEERLI

SEQ ID NO: 20225 - protein, 120 aa, Homo sapiens
  Payload ID: 4035
  Gene Symbol: CRB3
  Gene Name: crumbs family member 3
  Uniprot ID: Q9BUF7
  ENSP ID: ENSP00000310123
MANPGLGLLLALGLPFLLARWGRAWGQIQTTSANENSTVLPSSTSSSSDGNLRPEAITAIIVVFSLLAALLLAVGLALLVRKLREKRQTEGTYRPSSEEQVGARVPPTPNLKLPPEERLI

SEQ ID NO: 20226 - protein, 123 aa, Homo sapiens
  Payload ID: 4035
  Gene Symbol: CRB3
  Gene Name: crumbs family member 3
  Uniprot ID: Q9BUF7
  ENSP ID: ENSP00000349204
MANPGLGLLLALGLPFLLARWGRAWGQIQTTSANENSTVLPSSTSSSSDGNLRPEAITAIIVVFSLLAALLLAVGLALLVRKLREKRQTEGTYRPSSEEQFSHAAEARAPQDSKETVQGCLPI

SEQ ID NO: 20227 - protein, 120 aa, Homo sapiens; identical to SEQ ID NO: 20225
  Payload ID: 4035
  Gene Symbol: CRB3
  Gene Name: crumbs family member 3
  Uniprot ID: Q9BUF7
  ENSP ID: ENSP00000469707

SEQ ID NO: 20228 - protein, 120 aa, Homo sapiens; identical to SEQ ID NO: 20225
  Payload ID: 4035
  Gene Symbol: CRB3
  Gene Name: crumbs family member 3
  Uniprot ID: Q9BUF7
  ENSP ID: ENSP00000472010

SEQ ID NO: 20229 - protein, 586 aa, Homo sapiens
  Payload ID: 4036
  Gene Symbol: CRY1
  Gene Name: cryptochrome circadian clock 1
  Uniprot ID: Q16526
  ENSP ID: ENSP00000008527
MGVNAVHWFRKGLRLHDNPALKECIQGADTIRCVYILDPWFAGSSNVGINRWRFLLQCLEDLDANLRKLNSRLFVIRGQPADVFPRLFKEWNITKLSIEYDSEPFGKERDAAIKKLATEAGVEVIVRISHTLYDLDKIIELNGGQPPLTYKRFQTLISKMEPLEIPVETITSEVIEKCTTPLSDDHDEKYGVPSLEELGFDTDGLSSAVWPGGETEALTRLERHLERKAWVANFERPRMNANSLLASPTGLSPYLRFGCLSCRLFYFKLTDLYKKVKKNSSPPLSLYGQLLWREFFYTAATNNPRFDKMEGNPICVQIPWDKNPEALAKWAEGRTGFPWIDAIMTQLRQEGWIHHLARHAVACFLTRGDLWISWEEGMKVFEELLLDADWSINAGSWMWLSCSSFFQQFFHCYCPVGFGRRTDPNGDYIRRYLPVLRGFPAKYIYDPWNAPEGIQKVAKCLIGVNYPKPMVNHAEASRLNIERMKQIYQQLSRYRGLGLLASVPSNPNGNGGFMGYSAENIPGCSSSGSCSQGSGILHYAHGDSQQTHLLKQGRSSMGTGLSGGKRPSQEEDTQSIGPKVQRQSTN

SEQ ID NO: 20230 - protein, 106 aa, Homo sapiens
  Payload ID: 4036
  Gene Symbol: CRY1
  Gene Name: cryptochrome circadian clock 1
  ENSP ID: ENSP00000447738
IERMKQIYQQLSRYRGLGLLASVPSNPNGNGGFMGYSAENIPGCSSSGSCSQGSGILHYAHGDSQQTHLLKQGRSSMGTGLSGGKRPSQEEDTQSIGPKVQRQSTN

SEQ ID NO: 20231 - protein, 532 aa, Homo sapiens
  Payload ID: 4037
  Gene Symbol: CRY2
  Gene Name: cryptochrome circadian clock 2
  Uniprot ID: Q49AN0
  ENSP ID: ENSP00000397419
MPAPPGRTHTWFLLQSLEDLDTSLRKLNSRLFVVRGQPADVFPRLFKEWGVTRLTFEYDSEPFGKERDAAIMKMAKEAGVEVVTENSHTLYDLDRIIELNGQKPPLTYKRFQAIISRMELPKKPVGLVTSQQMESCRAEIQENHDETYGVPSLEELGFPTEGLGPAVWQGGETEALARLDKHLERKAWVANYERPRMNANSLLASPTGLSPYLRFGCLSCRLFYYRLWDLYKKVKRNSTPPLSLFGQLLWREFFYTAATNNPRFDRMEGNPICIQIPWDRNPEALAKWAEGKTGFPWIDAIMTQLRQEGWIHHLARHAVACFLTRGDLWVSWESGVRVFDELLLDADFSVNAGSWMWLSCSAFFQQFFHCYCPVGFGRRTDPSGDYIRRYLPKLKAFPSRYIYEPWNAPESIQKAAKCIIGVDYPRPIVNHAETSRLNIERMKQIYQQLSRYRGLCLLASVPSCVEDLSHPVAEPSSSQAGSMSSAGPRPLPSGPASPKRKLEAAEEPPGEELSKRARVAELPTPELPSKDA

SEQ ID NO: 20232 - protein, 614 aa, Homo sapiens
  Payload ID: 4037
  Gene Symbol: CRY2
  Gene Name: cryptochrome circadian clock 2
  ENSP ID: ENSP00000406751
MGGVHVAYRGGAGVAGAVWTVMAATVATAAAVAPAPAPGTDSASSVHWFRKGLRLHDNPALLAAVRGARCVRCVYILDPWFAASSSVGINRWRFLLQSLEDLDTSLRKLNSRLFVVRGQPADVFPRLFKEWGVTRLTFEYDSEPFGKERDAAIMKMAKEAGVEVVTENSHTLYDLDRIIELNGQKPPLTYKRFQAIISRMELPKKPVGLVTSQQMESCRAEIQENHDETYGVPSLEELGFPTEGLGPAVWQGGETEALARLDKHLERKAWVANYERPRMNANSLLASPTGLSPYLRFGCLSCRLFYYRLWDLYKKVKRNSTPPLSLFGQLLWREFFYTAATNNPRFDRMEGNPICIQIPWDRNPEALAKWAEGKTGFPWIDAIMTQLRQEGWIHHLARHAVACFLTRGDLWVSWESGVRVFDELLLDADFSVNAGSWMWLSCSAFFQQFFHCYCPVGFGRRTDPSGDYIRRYLPKLKAFPSRYIYEPWNAPESIQKAAKCIIGVDYPRPIVNHAETSRLNIERMKQIYQQLSRYRGLCLLASVPSCVEDLSHPVAEPSSSQAGSMSSAGPRPLPSGPASPKRKLEAAEEPPGEELSKRARVAELPTPELPSKDA

SEQ ID NO: 20233 - protein, 614 aa, Homo sapiens; identical to SEQ ID NO: 20232
  Payload ID: 4037
  Gene Symbol: CRY2
  Gene Name: cryptochrome circadian clock 2
  ENSP ID: ENSP00000478187

SEQ ID NO: 20234 - protein, 593 aa, Homo sapiens
  Payload ID: 4037
  Gene Symbol: CRY2
  Gene Name: cryptochrome circadian clock 2
  Uniprot ID: Q49AN0
  ENSP ID: ENSP00000484684
MAATVATAAAVAPAPAPGTDSASSVHWFRKGLRLHDNPALLAAVRGARCVRCVYILDPWFAASSSVGINRWRFLLQSLEDLDTSLRKLNSRLFVVRGQPADVFPRLFKEWGVTRLTFEYDSEPFGKERDAAIMKMAKEAGVEVVTENSHTLYDLDRIIELNGQKPPLTYKRFQAIISRMELPKKPVGLVTSQQMESCRAEIQENHDETYGVPSLEELGFPTEGLGPAVWQGGETEALARLDKHLERKAWVANYERPRMNANSLLASPTGLSPYLRFGCLSCRLFYYRLWDLYKKVKRNSTPPLSLFGQLLWREFFYTAATNNPRFDRMEGNPICIQIPWDRNPEALAKWAEGKTGFPWIDAIMTQLRQEGWIHHLARHAVACFLTRGDLWVSWESGVRVFDELLLDADFSVNAGSWMWLSCSAFFQQFFHCYCPVGFGRRTDPSGDYIRRYLPKLKAFPSRYIYEPWNAPESIQKAAKCIIGVDYPRPIVNHAETSRLNIERMKQIYQQLSRYRGLCLLASVPSCVEDLSHPVAEPSSSQAGSMSSAGPRPLPSGPASPKRKLEAAEEPPGEELSKRARVAELPTPELPSKDA

SEQ ID NO: 20235 - protein, 173 aa, Homo sapiens; identical to SEQ ID NO: 4306
  Payload ID: 4038
  Gene Symbol: CRYAA
  Gene Name: crystallin, alpha A
  Uniprot ID: P02489
  ENSP ID: ENSP00000291554

SEQ ID NO: 20236 - protein, 136 aa, Homo sapiens; identical to SEQ ID NO: 4307
  Payload ID: 4038
  Gene Symbol: CRYAA
  Gene Name: crystallin, alpha A
  ENSP ID: ENSP00000381200

SEQ ID NO: 20237 - protein, 153 aa, Homo sapiens
  Payload ID: 4038
  Gene Symbol: CRYAA
  Gene Name: crystallin, alpha A
  ENSP ID: ENSP00000381201
MSSACPRLAKLLASLLRCPAKAKRTGNGRPPPHPTTGLLSEPRVRSDRDKFVIFLDVKHFSPEDLTVKVQDDFVEIHGKHNERQDDHGYISREFHRRYRLPSNVDQSALSCSLSADGMLTFCGPKIQTGLDATHAERAIPVSREEKPTSAPSS

SEQ ID NO: 20238 - protein, 175 aa, Homo sapiens
  Payload ID: 4039
  Gene Symbol: CRYAB
  Gene Name: crystallin, alpha B
  Uniprot ID: P02511
  ENSP ID: ENSP00000227251
MDIAIHHPWIRRPFFPFHSPSRLFDQFFGEHLLESDLFPTSTSLSPFYLRPPSFLRAPSWFDTGLSEMRLEKDRFSVNLDVKHFSPEELKVKVLGDVIEVHGKHEERQDEHGFISREFHRKYRIPADVDPLTITSSLSSDGVLTVNGPRKQVSGPERTIPITREEKPAVTAAPKK

SEQ ID NO: 20239 - protein, 129 aa, Homo sapiens
  Payload ID: 4039
  Gene Symbol: CRYAB
  Gene Name: crystallin, alpha B
  ENSP ID: ENSP00000431754
MDIAIHHPWIRRPFFPFHSPSRLFDQFFGEHLLESDLFPTSTSLSPFYLRPPSFLRAPSWFDTGLSEMRLEKDRFSVNLDVKHFSPEELKVKVLGDVIEVHGKHEERQDEHGFISREFHRKYRIPADVD

SEQ ID NO: 20240 - protein, 77 aa, Homo sapiens
  Payload ID: 4039
  Gene Symbol: CRYAB
  Gene Name: crystallin, alpha B
  ENSP ID: ENSP00000432182
MDIAIHHPWIRRPFFPFHSPSRLFDQFFGEHLLESDLFPTSTSLSPFYLRPPSFLRAPSWFDTGLSEMRLEKDRFSV

SEQ ID NO: 20241 - protein, 106 aa, Homo sapiens
  Payload ID: 4039
  Gene Symbol: CRYAB
  Gene Name: crystallin, alpha B
  ENSP ID: ENSP00000432454
  MOD_RES (1)..(1): Any amino acid
XGPANIDLNLWEIPLNISMPQGLKNNEVLDCFRLLRFSLDEHGFISREFHRKYRIPADVDPLTITSSLSSDGVLTVNGPRKQVSGPERTIPITREEKPAVTAAPKK

SEQ ID NO: 20242 - protein, 175 aa, Homo sapiens; identical to SEQ ID NO: 20238
  Payload ID: 4039
  Gene Symbol: CRYAB
  Gene Name: crystallin, alpha B
  Uniprot ID: P02511
  ENSP ID: ENSP00000433560

SEQ ID NO: 20243 - protein, 175 aa, Homo sapiens; identical to SEQ ID NO: 20238
  Payload ID: 4039
  Gene Symbol: CRYAB
  Gene Name: crystallin, alpha B
  Uniprot ID: P02511
  ENSP ID: ENSP00000434247

SEQ ID NO: 20244 - protein, 155 aa, Homo sapiens
  Payload ID: 4039
  Gene Symbol: CRYAB
  Gene Name: crystallin, alpha B
  ENSP ID: ENSP00000434269
MDIAIHHPWIRRPFFPFHSPSRLFDQFFGEHLLESDLFPTSTSLSPFYLRPPSFLRAPSWFDTGLSEMRLEKDRFSVNLDVKHFSPEELKVKVLGDVIEVHGKHEERQVCSLFFCFLLIHSVHTVIVQVVLSALEAGYIPVPSHNSRDQGLQINV

SEQ ID NO: 20245 - protein, 106 aa, Homo sapiens
  Payload ID: 4039
  Gene Symbol: CRYAB
  Gene Name: crystallin, alpha B
  ENSP ID: ENSP00000434793
MRLEKDRFSVNLDVKHFSPEELKVKVLGDVIEVHGKHEERQDEHGFISREFHRKYRIPADVDPLTITSSLSSDGVLTVNGPRKQVSGPERTIPITREEKPAVTAAP

SEQ ID NO: 20246 - protein, 108 aa, Homo sapiens
  Payload ID: 4039
  Gene Symbol: CRYAB
  Gene Name: crystallin, alpha B
  ENSP ID: ENSP00000435046
MRLEKDRFSVNLDVKHFSPEELKVKVLGDVIEVHGKHEERQDEHGFISREFHRKYRIPADVDPLTITSSLSSDGVLTVNGPRKQVSGPERTIPITREEKPAVTAAPKK

SEQ ID NO: 20247 - protein, 108 aa, Homo sapiens; identical to SEQ ID NO: 20246
  Payload ID: 4039
  Gene Symbol: CRYAB
  Gene Name: crystallin, alpha B
  ENSP ID: ENSP00000435411

SEQ ID NO: 20248 - protein, 68 aa, Homo sapiens
  Payload ID: 4039
  Gene Symbol: CRYAB
  Gene Name: crystallin, alpha B
  ENSP ID: ENSP00000435931
MDIAIHHPWIRRPFFPFHSPSRLFDQFFGEHLLESDLFPTSTSLSPFYLRPPSFLRAPSWFDTGLSEM

SEQ ID NO: 20249 - protein, 108 aa, Homo sapiens; identical to SEQ ID NO: 20246
  Payload ID: 4039
  Gene Symbol: CRYAB
  Gene Name: crystallin, alpha B
  ENSP ID: ENSP00000435960

SEQ ID NO: 20250 - protein, 175 aa, Homo sapiens; identical to SEQ ID NO: 20238
  Payload ID: 4039
  Gene Symbol: CRYAB
  Gene Name: crystallin, alpha B
  Uniprot ID: P02511
  ENSP ID: ENSP00000436051

SEQ ID NO: 20251 - protein, 174 aa, Homo sapiens
  Payload ID: 4039
  Gene Symbol: CRYAB
  Gene Name: crystallin, alpha B
  ENSP ID: ENSP00000436089
MDIAIHHPWIRRPFFPFHSPSRLFDQFFGEHLLESDLFPTSTSLSPFYLRPPSFLRAPSWFDTGLSEMRLEKDRFSVNLDVKHFSPEELKVKVLGDVIEVHGKHEERQDEHGFISREFHRKYRIPADVDPLTITSSLSSDGVLTVNGPRKQVSGPERTIPITREEKPAVTAAPK

SEQ ID NO: 20252 - protein, 175 aa, Homo sapiens; identical to SEQ ID NO: 20238
  Payload ID: 4039
  Gene Symbol: CRYAB
  Gene Name: crystallin, alpha B
  Uniprot ID: P02511
  ENSP ID: ENSP00000437149

SEQ ID NO: 20253 - protein, 175 aa, Homo sapiens; identical to SEQ ID NO: 20238
  Payload ID: 4039
  Gene Symbol: CRYAB
  Gene Name: crystallin, alpha B
  Uniprot ID: P02511
  ENSP ID: ENSP00000483554

SEQ ID NO: 20254 - protein, 215 aa, Homo sapiens
  Payload ID: 4040
  Gene Symbol: CRYBA1
  Gene Name: crystallin, beta A1
  Uniprot ID: P05813
  ENSP ID: ENSP00000225387
METQAEQQELETLPTTKMAQTNPTPGSLGPWKITIYDQENFQGKRMEFTSSCPNVSERSFDNVRSLKVESGAWIGYEHTSFCGQQFILERGEYPRWDAWSGSNAYHIERLMSFRPICSANHKESKMTIFEKENFIGRQWEISDDYPSLQAMGWFNNEVGSMKIQSGAWVCYQYPGYRGYQYILECDHHGGDYKHWREWGSHAQTSQIQSIRRIQQ

SEQ ID NO: 20255 - protein, 75 aa, Homo sapiens
  Payload ID: 4040
  Gene Symbol: CRYBA1
  Gene Name: crystallin, beta A1
  ENSP ID: ENSP00000464368
  MOD_RES (1)..(1): Any amino acid
XAEQQELETLPTTKMAQTNPTPGSLGPWKITIYDQENFQGKRMEFTSSCPNVSERSFDNVRSLKVESGAIIRSLR

SEQ ID NO: 20256 - protein, 197 aa, Homo sapiens
  Payload ID: 4041
  Gene Symbol: CRYBA2
  Gene Name: crystallin, beta A2
  Uniprot ID: P53672
  ENSP ID: ENSP00000295728
MSSAPAPGPAPASLTLWDEEDFQGRRCRLLSDCANVCERGGLPRVRSVKVENGVWVAFEYPDFQGQQFILEKGDYPRWSAWSGSSSHNSNQLLSFRPVLCANHNDSRVTLFEGDNFQGCKFDLVDDYPSLPSMGWASKDVGSLKVSSGAWVAYQYPGYRGYQYVLERDRHSGEFCTYGELGTQAHTGQLQSIRRVQH

SEQ ID NO: 20257 - protein, 197 aa, Homo sapiens; identical to SEQ ID NO: 20256
  Payload ID: 4041
  Gene Symbol: CRYBA2
  Gene Name: crystallin, beta A2
  Uniprot ID: P53672
  ENSP ID: ENSP00000375946

SEQ ID NO: 20258 - protein, 128 aa, Homo sapiens
  Payload ID: 4041
  Gene Symbol: CRYBA2
  Gene Name: crystallin, beta A2
  ENSP ID: ENSP00000395120
MSSAPAPGPAPASLTLWDEEDFQGRRCRLLSDCANVCERGGLPRVRSVKVENGVWVAFEYPDFQGQQFILEKGDYPRWSAWSGSSSHNSNQLLSFRPVLCANHNDSRVTLFEGDNFQGCKFDLVDDYP

SEQ ID NO: 20259 - protein, 196 aa, Homo sapiens
  Payload ID: 4042
  Gene Symbol: CRYBA4
  Gene Name: crystallin, beta A4
  Uniprot ID: P53673
  ENSP ID: ENSP00000346805
MTLQCTKSAGPWKMVVWDEDGFQGRRHEFTAECPSVLELGFETVRSLKVLSGAWVGFEHAGFQGQQYILERGEYPSWDAWGGNTAYPAERLTSFRPAACANHRDSRLTIFEQENFLGKKGELSDDYPSLQAMGWEGNEVGSFHVHSGAWVCSQFPGYRGFQYVLECDHHSGDYKHFREWGSHAPTFQVQSIRRIQQ

SEQ ID NO: 20260 - protein, 252 aa, Homo sapiens
  Payload ID: 4043
  Gene Symbol: CRYBB1
  Gene Name: crystallin, beta B1
  Uniprot ID: P53674
  ENSP ID: ENSP00000215939
MSQAAKASASATVAVNPGPDTKGKGAPPAGTSPSPGTTLAPTTVPITSAKAAELPPGNYRLVVFELENFQGRRAEFSGECSNLADRGFDRVRSIIVSAGPWVAFEQSNFRGEMFILEKGEYPRWNTWSSSYRSDRLMSFRPIKMDAQEHKISLFEGANFKGNTIEIQGDDAPSLWVYGFSDRVGSVKVSSGTWVGYQYPGYRGYQYLLEPGDFRHWNEWGAFQPQMQSLRRLRDKQWHLEGSFPVLATEPPK

SEQ ID NO: 20261 - protein, 205 aa, Homo sapiens
  Payload ID: 4044
  Gene Symbol: CRYBB2
  Gene Name: crystallin, beta B2
  Uniprot ID: P43320
  ENSP ID: ENSP00000381273
MASDHQTQAGKPQSLNPKIIIFEQENFQGHSHELNGPCPNLKETGVEKAGSVLVQAGPWVGYEQANCKGEQFVFEKGEYPRWDSWTSSRRTDSLSSLRPIKVDSQEHKIILYENPNFTGKKMEIIDDDVPSFHAHGYQEKVSSVRVQSGTWVGYQYPGYRGLQYLLEKGDYKDSSDFGAPHPQVQSVRRIRDMQWHQRGAFHPSN

SEQ ID NO: 20262 - protein, 211 aa, Homo sapiens
  Payload ID: 4045
  Gene Symbol: CRYBB3
  Gene Name: crystallin, beta B3
  Uniprot ID: P26998
  ENSP ID: ENSP00000215855
MAEQHGAPEQAAAGKSHGDLGGSYKVILYELENFQGKRCELSAECPSLTDSLLEKVGSIQVESGPWLAFESRAFRGEQFVLEKGDYPRWDAWSNSRDSDSLLSLRPLNIDSPHHKLHLFENPAFSGRKMEIVDDDVPSLWAHGFQDRVASVRAINGTWVGYEFPGYRGRQYVFERGEYRHWNEWDASQPQLQSVRRIRDQKWHKRGRFPSS

SEQ ID NO: 20263 - protein, 113 aa, Homo sapiens
  Payload ID: 4045
  Gene Symbol: CRYBB3
  Gene Name: crystallin, beta B3
  ENSP ID: ENSP00000386123
MAEQHGAPEQAAAGKSHGDLGGSYKVILYELENFQGKRCELSAECPSLTDSLLEKVGSIQVESGPWLAFESRAFRGEQFVLEKGDYPRWDAWSNSRDSDSLLSLRPLNIVGWL

SEQ ID NO: 20264 - protein, 174 aa, Homo sapiens
  Payload ID: 4046
  Gene Symbol: CRYGA
  Gene Name: crystallin, gamma A
  Uniprot ID: P11844
  ENSP ID: ENSP00000302105
MGKITFYEDRDFQGRCYNCISDCPNLRVYFSRCNSIRVDSGCWMLYERPNYQGHQYFLRRGKYPDYQHWMGLSDSVQSCRIIPHTSSHKLRLYERDDYRGLMSELTDDCACVPELFRLPEIYSLHVLEGCWVLYEMPNYRGRQYLLRPGDYRRYHDWGGADAKVGSLRRVTDLY

SEQ ID NO: 20265 - protein, 175 aa, Homo sapiens
  Payload ID: 4047
  Gene Symbol: CRYGB
  Gene Name: crystallin, gamma B
  Uniprot ID: P07316
  ENSP ID: ENSP00000260988
MGKITFYEDRAFQGRSYECTTDCPNLQPYFSRCNSIRVESGCWMIYERPNYQGHQYFLRRGEYPDYQQWMGLSDSIRSCCLIPPHSGAYRMKIYDRDELRGQMSELTDDCISVQDRFHLTEIHSLNVLEGSWILYEMPNYRGRQYLLRPGEYRRFLDWGAPNAKVGSLRRVMDLY

SEQ ID NO: 20266 - protein, 174 aa, Homo sapiens
  Payload ID: 4048
  Gene Symbol: CRYGC
  Gene Name: crystallin, gamma C
  Uniprot ID: P07315
  ENSP ID: ENSP00000282141
MGKITFYEDRAFQGRSYETTTDCPNLQPYFSRCNSIRVESGCWMLYERPNYQGQQYLLRRGEYPDYQQWMGLSDSIRSCCLIPQTVSHRLRLYEREDHKGLMMELSEDCPSIQDRFHLSEIRSLHVLEGCWVLYELPNYRGRQYLLRPQEYRRCQDWGAMDAKAGSLRRVVDLY

SEQ ID NO: 20267 - protein, 174 aa, Homo sapiens
  Payload ID: 4049
  Gene Symbol: CRYGD
  Gene Name: crystallin, gamma D
  Uniprot ID: P07320
  ENSP ID: ENSP00000264376
MGKITLYEDRGFQGRHYECSSDHPNLQPYLSRCNSARVDSGCWMLYEQPNYSGLQYFLRRGDYADHQQWMGLSDSVRSCRLIPHSGSHRIRLYEREDYRGQMIEFTEDCSCLQDRFRFNEIHSLNVLEGSWVLYELSNYRGRQYLLMPGDYRRYQDWGATNARVGSLRRVIDFS

SEQ ID NO: 20268 - protein, 182 aa, Homo sapiens
  Payload ID: 4050
  Gene Symbol: CRYGN
  Gene Name: crystallin, gamma N
  Uniprot ID: Q8WXF5
  ENSP ID: ENSP00000338613
MAQRSGKITLYEGKHFTGQKLEVFGDCDNFQDRGFMNRVNSIHVESGAWVCFNHPDFRGQQFILEHGDYPDFFRWNSHSDHMGSCRPVGMHGEHFRLEIFEGCNFTGQCLEFLEDSPFLQSRGWVKNCVNTIKVYGDGAAWSPRSFGAEDFQLSSSLQSDQGPEEATTKPATTQPPFLTANL

SEQ ID NO: 20269 - protein, 125 aa, Homo sapiens
  Payload ID: 4050
  Gene Symbol: CRYGN
  Gene Name: crystallin, gamma N
  Uniprot ID: Q8WXF5
  ENSP ID: ENSP00000420157
MAQRSGKITLYEGKHFTGQKLEVFGDCDNFQDRGFMNRVNSIHVESGAWVCFNHPDFRGQQFILEHGDYPDFFRWNSHSDHMGSCRPVGMVSGPVHRRLSLPAGGTEGQPWQTVARNRGAWSSRL

SEQ ID NO: 20270 - protein, 178 aa, Homo sapiens
  Payload ID: 4051
  Gene Symbol: CRYGS
  Gene Name: crystallin, gamma S
  Uniprot ID: P22914
  ENSP ID: ENSP00000312099
MSKTGTKITFYEDKNFQGRRYDCDCDCADFHTYLSRCNSIKVEGGTWAVYERPNFAGYMYILPQGEYPEYQRWMGLNDRLSSCRAVHLPSGGQYKIQIFEKGDFSGQMYETTEDCPSIMEQFHMREIHSCKVLEGVWIFYELPNYRGRQYLLDKKEYRKPIDWGAASPAVQSFRRIVE

SEQ ID NO: 20271 - protein, 178 aa, Homo sapiens; identical to SEQ ID NO: 20270
  Payload ID: 4051
  Gene Symbol: CRYGS
  Gene Name: crystallin, gamma S
  Uniprot ID: P22914
  ENSP ID: ENSP00000376287

SEQ ID NO: 20272 - protein, 319 aa, Homo sapiens
  Payload ID: 4052
  Gene Symbol: CRYL1
  Gene Name: crystallin, lambda 1
  Uniprot ID: Q9Y2S2
  ENSP ID: ENSP00000298248
MASSAAGCVVIVGSGVIGRSWAMLFASGGFQVKLYDIEQQQIRNALENIRKEMKLLEQAGSLKGSLSVEEQLSLISGCPNIQEAVEGAMHIQECVPEDLELKKKIFAQLDSIIDDRVILSSSTSCLMPSKLFAGLVHVKQCIVAHPVNPPYYIPLVELVPHPETAPTTVDRTHALMKKIGQCPMRVQKEVAGFVLNRLQYAIISEAWRLVEEGIVSPSDLDLVMSEGLGMRYAFIGPLETMHLNAEGMLSYCDRYSEGIKHVLQTFGPIPEFSRATAEKVNQDMCMKVPDDPEHLAARRQWRDECLMRLAKLKSQVQPQ

SEQ ID NO: 20273 - protein, 297 aa, Homo sapiens
  Payload ID: 4052
  Gene Symbol: CRYL1
  Gene Name: crystallin, lambda 1
  Uniprot ID: Q9Y2S2
  ENSP ID: ENSP00000372262
MLFASGGFQVKLYDIEQQQIRNALENIRKEMKLLEQAGSLKGSLSVEEQLSLISGCPNIQEAVEGAMHIQECVPEDLELKKKIFAQLDSIIDDRVILSSSTSCLMPSKLFAGLVHVKQCIVAHPVNPPYYIPLVELVPHPETAPTTVDRTHALMKKIGQCPMRVQKEVAGFVLNRLQYAIISEAWRLVEEGIVSPSDLDLVMSEGLGMRYAFIGPLETMHLNAEGMLSYCDRYSEGIKHVLQTFGPIPEFSRATAEKVNQDMCMKVPDDPEHLAARRQWRDECLMRLAKLKSQVQPQ

SEQ ID NO: 20274 - protein, 148 aa, Homo sapiens
  Payload ID: 4052
  Gene Symbol: CRYL1
  Gene Name: crystallin, lambda 1
  ENSP ID: ENSP00000479908
  MOD_RES (1)..(1): Any amino acid
XQLSLISGCPNIQEAVEGAMHIQECVPEDLELKKKIFAQLDSIIDDRVILSSSTSCLMPSKLFAGLVHVKQCIVAHPVNPPYYIPLVELVPHPETAPTTVDRTHALMKKIGQCPMRVQKEVAGFVLNRLQYAIISEAWRLVELASVLG

SEQ ID NO: 20275 - protein, 314 aa, Homo sapiens
  Payload ID: 4053
  Gene Symbol: CRYM
  Gene Name: crystallin, mu
  Uniprot ID: Q14894
  ENSP ID: ENSP00000219599
MSRVPAFLSAAEVEEHLRSSSLLIPPLETALANFSSGPEGGVMQPVRTVVPVTKHRGYLGVMPAYSAAEDALTTKLVTFYEDRGITSVVPSHQATVLLFEPSNGTLLAVMDGNVITAKRTAAVSAIATKFLKPPSSEVLCILGAGVQAYSHYEIFTEQFSFKEVRIWNRTKENAEKFADTVQGEVRVCSSVQEAVAGADVIITVTLATEPILFGEWVKPGAHINAVGASRPDWRELDDELMKEAVLYVDSQEAALKESGDVLLSGAEIFAELGEVIKGVKPAHCEKTTVFKSLGMAVEDTVAAKLIYDSWSSGK

SEQ ID NO: 20276 - protein, 314 aa, Homo sapiens; identical to SEQ ID NO: 20275
  Payload ID: 4053
  Gene Symbol: CRYM
  Gene Name: crystallin, mu
  Uniprot ID: Q14894
  ENSP ID: ENSP00000440227

SEQ ID NO: 20277 - protein, 165 aa, Homo sapiens
  Payload ID: 4053
  Gene Symbol: CRYM
  Gene Name: crystallin, mu
  ENSP ID: ENSP00000459982
MSRVPAFLSAAEVEEHLRSSSLLIPPLETALANFSSGPEGGVMQPVRTVVPVTKHRGYLGVMPAYSAAEDALTTKLVTFYEDRGITSVVPSHQATVLLFEPSNGTLLAVMDGNVITAKRTAAVSAIATKFLKPPSSEVLCILGAGVQAYSHYEIFTEQFSFKEVI

SEQ ID NO: 20278 - protein, 241 aa, Homo sapiens
  Payload ID: 4053
  Gene Symbol: CRYM
  Gene Name: crystallin, mu
  ENSP ID: ENSP00000460126
MQPVRTVVPVTKHRGYLGVMPAYSAAEDALTTKLVTFYEDRGITSVVPSHQATVLLFEPSNGTLLAVMDGNVITAKRTAAVSAIATKFLKPPSSEVLCILGAGVQAYSHYEIFTEQFSFKEVRIWNRTKENAEKFADTVQGEVRVCSSVQEAVAGADVIITVTLATEPILFGEWVKPGAHINAVGASRPDWRELDDELMKEAVLYVDSQEAALKESGDVLLSGAEIFAELGEVIKGVKPAH

SEQ ID NO: 20279 - protein, 25 aa, Homo sapiens
  Payload ID: 4053
  Gene Symbol: CRYM
  Gene Name: crystallin, mu
  ENSP ID: ENSP00000460510
MSRVPAFLSAAEVEEHLRSSSLLIP

SEQ ID NO: 20280 - protein, 97 aa, Homo sapiens
  Payload ID: 4053
  Gene Symbol: CRYM
  Gene Name: crystallin, mu
  ENSP ID: ENSP00000460820
  MOD_RES (1)..(1): Any amino acid
XVGASRPDWRELDDELMKEAVLYVDSQEAALKESGDVLLSGAEIFAELGEVIKGVKPAHCEKTTVFKSLGMAVEDTVAAKLIYDSWSSAAPISLNLK

SEQ ID NO: 20281 - protein, 140 aa, Homo sapiens
  Payload ID: 4053
  Gene Symbol: CRYM
  Gene Name: crystallin, mu
  ENSP ID: ENSP00000461904
MSRVPAFLSAAEVEEHLRSSSLLIPPLETALANFSSGPEGGVMQPVRTVVPVTKHRGYLGVMPAYSAAEDALTTKLVTFYEDRGITSVVPSHQATVLLFEPSNGTLLAVMDGNVITAKRTAAVSAIATKFLKPPSSEVLC

SEQ ID NO: 20282 - protein, 329 aa, Homo sapiens
  Payload ID: 4054
  Gene Symbol: CRYZ
  Gene Name: crystallin, zeta (quinone reductase)
  Uniprot ID: Q08257
  ENSP ID: ENSP00000339399
MATGQKLMRAVRVFEFGGPEVLKLRSDIAVPIPKDHQVLIKVHACGVNPVETYIRSGTYSRKPLLPYTPGSDVAGVIEAVGDNASAFKKGDRVFTSSTISGGYAEYALAADHTVYKLPEKLDFKQGAAIGIPYFTAYRALIHSACVKAGESVLVHGASGGVGLAACQIARAYGLKILGTAGTEEGQKIVLQNGAHEVFNHREVNYIDKIKKYVGEKGIDIIIEMLANVNLSKDLSLLSHGGRVIVVGSRGTIEINPRDTMAKESSIIGVTLFSSTKEEFQQYAAALQAGMEIGWLKPVIGSQYPLEKVAEAHENIIHGSGATGKMILLL

SEQ ID NO: 20283 - protein, 243 aa, Homo sapiens
  Payload ID: 4054
  Gene Symbol: CRYZ
  Gene Name: crystallin, zeta (quinone reductase)
  ENSP ID: ENSP00000359907
MATGQKLMRAVRVFEFGGPEVLKLRSDIAVPIPKDHQVLIKVHACGVNPVETYIRSGTYSRKPLLPYTPGSDVAGVIEAVGDNASAFKKGDRVFTSSTISGGYAEYALAADHTVYKLPEKLDFKQGAAIGIPYFTAYRALIHSACVKAGESVLVHGASGGVGLAACQIARAYGLKILGTAGTEEGQKIVLQNGAHEVFNHREVNYIDKIKKYVGEKGIDIIIEMLANVNLSKDLSLLSHGGRV

SEQ ID NO: 20284 - protein, 295 aa, Homo sapiens
  Payload ID: 4054
  Gene Symbol: CRYZ
  Gene Name: crystallin, zeta (quinone reductase)
  Uniprot ID: Q08257
  ENSP ID: ENSP00000359908
MATGQKLMRAVRVFEFGGPEVLKLRSDIAVPIPKDHQVLIKVHACGVNPVETYIRSGTYSRKPLLPYTPGSDVAGVIEAVGDNASAFKKGDRVFTSSTISGGYAEYALAADHTVYKLPEKLDFKQGAAIGIPYFTAYRALIHSACVKAGESVLVHGASGGVGLAACQIARAYGLKILGTAGTEEGQKIVLQNGAHEVFNHREVNYIDKIKVVGSRGTIEINPRDTMAKESSIIGVTLFSSTKEEFQQYAAALQAGMEIGWLKPVIGSQYPLEKVAEAHENIIHGSGATGKMILLL

SEQ ID NO: 20285 - protein, 192 aa, Homo sapiens
  Payload ID: 4054
  Gene Symbol: CRYZ
  Gene Name: crystallin, zeta (quinone reductase)
  Uniprot ID: Q08257
  ENSP ID: ENSP00000359909
MHLLSSACVKAGESVLVHGASGGVGLAACQIARAYGLKILGTAGTEEGQKIVLQNGAHEVFNHREVNYIDKIKKYVGEKGIDIIIEMLANVNLSKDLSLLSHGGRVIVVGSRGTIEINPRDTMAKESSIIGVTLFSSTKEEFQQYAAALQAGMEIGWLKPVIGSQYPLEKVAEAHENIIHGSGATGKMILLL

SEQ ID NO: 20286 - protein, 329 aa, Homo sapiens; identical to SEQ ID NO: 20282
  Payload ID: 4054
  Gene Symbol: CRYZ
  Gene Name: crystallin, zeta (quinone reductase)
  Uniprot ID: Q08257
  ENSP ID: ENSP00000399805

SEQ ID NO: 20287 - protein, 206 aa, Homo sapiens
  Payload ID: 4054
  Gene Symbol: CRYZ
  Gene Name: crystallin, zeta (quinone reductase)
  ENSP ID: ENSP00000404289
MATGQKLMRAVRVFEFGGPEVLKLRSDIAVPIPKDHQVLIKVHACGVNPVETYIRSGTYSRKPLLPYTPGSDVAGVIEAVGDNASAFKKGDRVFTSSTISGGYAEYALAADHTVYKLPEKLDFKQGAAIGIPYFTAYRALIHSACVKAGESVLVHGASGGVGLAACQIARAYGLKILGTAGTEEGQKIVLQNGAHEVFNHREVNYI

SEQ ID NO: 20288 - protein, 334 aa, Homo sapiens
  Payload ID: 4055
  Gene Symbol: CRYZL1
  Gene Name: crystallin, zeta (quinone reductase)-like 1
  ENSP ID: ENSP00000290244
MKGLYFQQSSTDEEITFVFQEKEDLPVTEDNFVKLQVKACALSQINTKLLAEMKMKKDLFPVGREIAGIVLDGILPLDSEDPGLCEVVRVHEHYLVHKPEKVTWTEAAGSIRDGVRAYTALHYLSHLSPGKSVLIMDGASAFGTIAIQLAHHRGAKVISTACSLEDKQCLERFRPPIARVIDVSNGKVHVAESCLEETGGLGVDIVLDAGVRLYSKDDEPAVKLQLLPHKHDIITLLGVGGHWVTTEENLQLDPPDSHCLFLKGATLAFLNDEVWNLSNVQQGKYLCILKDVMEKLSTGVFRPQLDEPIPLYEAKVSMEAVQKNQGRKKQVVQF

SEQ ID NO: 20289 - protein, 325 aa, Homo sapiens
  Payload ID: 4055
  Gene Symbol: CRYZL1
  Gene Name: crystallin, zeta (quinone reductase)-like 1
  ENSP ID: ENSP00000355075
MWLLSQIGPLHYAKRRNHLERDVTMKGLYFQQSSTDEEITFVFQEKEDLPVTEDNFVKLQVKACALSQINTKLLAEMKMKKDLFPVGREIAGIVLDVGSKVSFFQPDDEVVGILPLDSEDPGLCEVVRVHEHYLVHKPEKVTWTEAAGSIRDGVRAYTALHYLSHLSPGKSVLIMDGASAFGTIAIQLAHHRGAKVISTACSLEDKQCLERFRPPIARVIDVSNGKVHVAESCLEETGGLGVDIVLDAGVRLYSKDDEPAVKLQLLPHKHDIITLLGVGGHWVTTEENLQLDPPDSHCLFLKGATLAFLNDEVWNLSNVQQGKYL

SEQ ID NO: 20290 - protein, 322 aa, Homo sapiens
  Payload ID: 4055
  Gene Symbol: CRYZL1
  Gene Name: crystallin, zeta (quinone reductase)-like 1
  ENSP ID: ENSP00000370951
MKGLYFQQSSTDEEITFVFQEKEDLPVTEDNFVKLQVKACALSQINTKLLAEMKMKKDLFPVGREIAGIVLDVGSKVSFFQPDDEVVGILPLDSEDPGLCEVVRVHEHYLVHKPEKVTWTEAAGSIRDGVRAYTALHYLSHLSPGKSVLIMDGASAFGTIAIQLAHHRGAKVISTACSLEDKQCLERFRPPIARVIDVSNGKVHVAESCLEETGGLGVDIVLDAGVRLYSKDDEPAVKLQLLPHKHDIITLLGVGGHWVTTEENLQLDPPDSHCLFLKGATLAFLNDEVWNLSNVQQGKYLSTYLKGCDGEVINWCFQTSVG

SEQ ID NO: 20291 - protein, 349 aa, Homo sapiens
  Payload ID: 4055
  Gene Symbol: CRYZL1
  Gene Name: crystallin, zeta (quinone reductase)-like 1
  Uniprot ID: O95825
  ENSP ID: ENSP00000370966
MKGLYFQQSSTDEEITFVFQEKEDLPVTEDNFVKLQVKACALSQINTKLLAEMKMKKDLFPVGREIAGIVLDVGSKVSFFQPDDEVVGILPLDSEDPGLCEVVRVHEHYLVHKPEKVTWTEAAGSIRDGVRAYTALHYLSHLSPGKSVLIMDGASAFGTIAIQLAHHRGAKVISTACSLEDKQCLERFRPPIARVIDVSNGKVHVAESCLEETGGLGVDIVLDAGVRLYSKDDEPAVKLQLLPHKHDIITLLGVGGHWVTTEENLQLDPPDSHCLFLKGATLAFLNDEVWNLSNVQQGKYLCILKDVMEKLSTGVFRPQLDEPIPLYEAKVSMEAVQKNQGRKKQVVQF

SEQ ID NO: 20292 - protein, 24 aa, Homo sapiens
  Payload ID: 4055
  Gene Symbol: CRYZL1
  Gene Name: crystallin, zeta (quinone reductase)-like 1
  ENSP ID: ENSP00000382371
MWLLSQIGPLHYAKRRNHLERDTQ

SEQ ID NO: 20293 - protein, 158 aa, Homo sapiens
  Payload ID: 4055
  Gene Symbol: CRYZL1
  Gene Name: crystallin, zeta (quinone reductase)-like 1
  ENSP ID: ENSP00000387660
MKMKKDLFPVGREIAGIVLDVGSKVSFFQPDDEVVGILPLDSEDPGLCEVVRVHEHYLVHKPEKVTWTEAAGSIRDGVRAYTALHYLSHLSPGKSVLIMDGASAFGTIAIQLAHHRGAKVISTACSLEDKQCLERFRPPIARVIDVSNGKVHVAESCL

SEQ ID NO: 20294 - protein, 113 aa, Homo sapiens
  Payload ID: 4055
  Gene Symbol: CRYZL1
  Gene Name: crystallin, zeta (quinone reductase)-like 1
  ENSP ID: ENSP00000389209
MKGLYFQQSSTDEEITFVFQEKEDLPVTEDNFVKLQVKACALSQINTKLLAEMKMKKDLFPVGREIAGIVLDVGSKVSFFQPDDEVVEVLSRLGAVAHVCNPSTLGGQGGRIT

SEQ ID NO: 20295 - protein, 111 aa, Homo sapiens
  Payload ID: 4055
  Gene Symbol: CRYZL1
  Gene Name: crystallin, zeta (quinone reductase)-like 1
  ENSP ID: ENSP00000397318
  MOD_RES (1)..(1): Any amino acid
XRLYSKDDEPAVKLQLLPHKHDIITLLGVGGHWVTTEENLQLDPPDSHCLFLKGATLAFLNDEVWNLSNVQQGKYLCILKDVMEKLSTGVFRPQSDEHIPVFEARIFFGNC

SEQ ID NO: 20296 - protein, 197 aa, Homo sapiens
  Payload ID: 4055
  Gene Symbol: CRYZL1
  Gene Name: crystallin, zeta (quinone reductase)-like 1
  ENSP ID: ENSP00000399730
MKGLYFQQSSTDEEITFVFQEKEDLPVTEDNFVKLQVKACALSQINTKLLAEMKMKKDLFPVGREIAGIVLDVHKPEKVTWTEAAGSIRDGVRAYTALHYLSHLSPGKSVLIMDGASAFGTIAIQLAHHRGAKVISTACSLEDKQCLERFRPPIDLSWMNPFHCMRQKFPWKLFRKIKEEKSKLFNFNFLLSQTSVG

SEQ ID NO: 20297 - protein, 183 aa, Homo sapiens
  Payload ID: 4055
  Gene Symbol: CRYZL1
  Gene Name: crystallin, zeta (quinone reductase)-like 1
  ENSP ID: ENSP00000399937
MKGLYFQQSSTDEEITFVFQEKEDLPVTEDNFVKLQVKACALSQINTKLLAEMKMKKDLFPVGREIAGIVLDGILPLDSEDPGLCEVVRVHEHYLVHKPEKVTWTEAAGSIRDGVRAYTALHYLSHLSPGKSVLIMDGASAFGTIAIQLAHHRGAKVISTACSLEDKQCLERFRPPIENSTIA

SEQ ID NO: 20298 - protein, 107 aa, Homo sapiens
  Payload ID: 4055
  Gene Symbol: CRYZL1
  Gene Name: crystallin, zeta (quinone reductase)-like 1
  ENSP ID: ENSP00000402844
MKMKKDLFPVGREIAGIVLDVGSKVSFFQPDDEVVGILPLDSEDPGLCEVVRVHEHYLVHKPEKVTWTEAAGSIRDGVRAYTALHYLSHLSPGKSVLIMDGASAFGT

SEQ ID NO: 20299 - protein, 181 aa, Homo sapiens
  Payload ID: 4055
  Gene Symbol: CRYZL1
  Gene Name: crystallin, zeta (quinone reductase)-like 1
  ENSP ID: ENSP00000405510
MKGLYFQQSSTDEEITFVFQEKEDLPVTEDNFVKLQVKACALSQINTKLLAEMKMKKDLFPVGREIAGIVLDVGSKVSFFQPDDEVVGILPLDSEDPGLCEVVRVHEHYLVHKPEKVTWTEAAGSIRDGVRAYTALHYLSHLSPGKSVLIMDGASAFGTIAIQLAHHRGAKVISTACSLED

SEQ ID NO: 20300 - protein, 17 aa, Homo sapiens
  Payload ID: 4055
  Gene Symbol: CRYZL1
  Gene Name: crystallin, zeta (quinone reductase)-like 1
  ENSP ID: ENSP00000406423
  MOD_RES (1)..(1): Any amino acid
XQCLERFRPPIENSTIA

SEQ ID NO: 20301 - protein, 19 aa, Homo sapiens
  Payload ID: 4055
  Gene Symbol: CRYZL1
  Gene Name: crystallin, zeta (quinone reductase)-like 1
  ENSP ID: ENSP00000408385
MKGLYFQQSSTDEEITFVF

SEQ ID NO: 20302 - protein, 97 aa, Homo sapiens
  Payload ID: 4055
  Gene Symbol: CRYZL1
  Gene Name: crystallin, zeta (quinone reductase)-like 1
  ENSP ID: ENSP00000409387
HLSPGKSVLIMDGASAFGTIAIQLAHHRGAKVISTACSLEDKQCLERFRPPIARVIDVSNGKVHVAESCLEETGGLGVDIVLDAGGYIFQHSSYIFT

SEQ ID NO: 20303 - protein, 241 aa, Homo sapiens
  Payload ID: 4055
  Gene Symbol: CRYZL1
  Gene Name: crystallin, zeta (quinone reductase)-like 1
  ENSP ID: ENSP00000412087
  MOD_RES (1)..(1): Any amino acid
XDLFPVGREIAGIVLDVGSKVSFFQPDDEVVGILPLDSEDPGLCEVVRVHEHYLVHKPEKVTWTEAAGSIRDGVRAYTALHYLSHLSPGKSVLIMDGASAFGTIAIQLAHHRGAKVISTACSLEDKQCLERFRPPIARVIDVSNGKVHVAESCLEETGGLGVDIVLDAGVRLYSKDDEPAVKLQLLPHKHDIITLLGVGGHWVTTEENLQVKKQKHRDVDTDSRTQQVAEQESHSGSLSPF

SEQ ID NO: 20304 - protein, 96 aa, Homo sapiens
  Payload ID: 4055
  Gene Symbol: CRYZL1
  Gene Name: crystallin, zeta (quinone reductase)-like 1
  ENSP ID: ENSP00000413513
  MOD_RES (1)..(1): Any amino acid
XRVHEHYLVHKPEKVTWTEAAGSIRDGVRAYTALHYLSHLSPGKSVLIMDGASAFGTIAIQLAHHRGAKVISTACSLEDKQCLERFRPPIENSTIA

SEQ ID NO: 20305 - protein, 198 aa, Homo sapiens
  Payload ID: 4055
  Gene Symbol: CRYZL1
  Gene Name: crystallin, zeta (quinone reductase)-like 1
  Uniprot ID: O95825
  ENSP ID: ENSP00000416315
MKGLYFQQSSTDEEITFVFQEKEDLPVTEDNFVKLQVKACALSQINTKLLAEMKMKKDLFPVGREIAGIVLDVGSKVSFFQPDDEVVGILPLDSEDPGLCEVVRVHEHYLVHKPEKVTWTEAAGSIRDGVRAYTALHYLSHLSPGKSVLIMDGASAFGTIAIQLAHHRGAKVISTACSLEDKQCLERFRPPIENSTIA

SEQ ID NO: 20306 - protein, 971 aa, Homo sapiens
  Payload ID: 4056
  Gene Symbol: CSE1L
  Gene Name: CSE1 chromosome segregation 1-like (yeast)
  Uniprot ID: P55060
  ENSP ID: ENSP00000262982
MELSDANLQTLTEYLKKTLDPDPAIRRPAEKFLESVEGNQNYPLLLLTLLEKSQDNVIKVCASVTFKNYIKRNWRIVEDEPNKICEADRVAIKANIVHLMLSSPEQIQKQLSDAISIIGREDFPQKWPDLLTEMVNRFQSGDFHVINGVLRTAHSLFKRYRHEFKSNELWTEIKLVLDAFALPLTNLFKATIELCSTHANDASALRILFSSLILISKLFYSLNFQDLPEFFEDNMETWMNNFHTLLTLDNKLLQTDDEEEAGLLELLKSQICDNAALYAQKYDEEFQRYLPRFVTAIWNLLVTTGQEVKYDLLVSNAIQFLASVCERPHYKNLFEDQNTLTSICEKVIVPNMEFRAADEEAFEDNSEEYIRRDLEGSDIDTRRRAACDLVRGLCKFFEGPVTGIFSGYVNSMLQEYAKNPSVNWKHKDAAIYLVTSLASKAQTQKHGITQANELVNLTEFFVNHILPDLKSANVNEFPVLKADGIKYIMIFRNQVPKEHLLVSIPLLINHLQAESIVVHTYAAHALERLFTMRGPNNATLFTAAEIAPFVEILLTNLFKALTLPGSSENEYIMKAIMRSFSLLQEAIIPYIPTLITQLTQKLLAVSKNPSKPHFNHYMFEAICLSIRITCKANPAAVVNFEEALFLVFTEILQNDVQEFIPYVFQVMSLLLETHKNDIPSSYMALFPHLLQPVLWERTGNIPALVRLLQAFLERGSNTIASAAADKIPGLLGVFQKLIASKANDHQGFYLLNSIIEHMPPESVDQYRKQIFILLFQRLQNSKTTKFIKSFLVFINLYCIKYGALALQEIFDGIQPKMFGMVLEKIIIPEIQKVSGNVEKKICAVGITKLLTECPPMMDTEYTKLWTPLLQSLIGLFELPEDDTIPDEEHFIDIEDTPGYQTAFSQLAFAGKKEHDPVGQMVNNPKIHLAQSLHKLSTACPGRVPSMVSTSLNAEALQYLQGYLQAASVTLL

SEQ ID NO: 20307 - protein, 915 aa, Homo sapiens
  Payload ID: 4056
  Gene Symbol: CSE1L
  Gene Name: CSE1 chromosome segregation 1-like (yeast)
  Uniprot ID: P55060
  ENSP ID: ENSP00000379495
MELSDANLQTLTEYLKKTLDPDPAIRRPAEKFLESVEGNQNYPLLLLTLLEKSQDNVIKVCASVTFKNYIKRNWRIVEDEPNKICEADRVAIKANIVHLMLSSPEQIQKQLSDAISIIGREDFPQKWPDLLTEMVNRFQSGDFHVINGVLRTAHSLFKRYRHEFKSNELWTEIKLVLDAFALPLTNLFKATIELCSTHANDASALRILFSSLILISKLFYSLNFQDLPEFFEDNMETWMNNFHTLLTLDNKLLQTDLVSNAIQFLASVCERPHYKNLFEDQNTLTSICEKVIVPNMEFRAADEEAFEDNSEEYIRRDLEGSDIDTRRRAACDLVRGLCKFFEGPVTGIFSGYVNSMLQEYAKNPSVNWKHKDAAIYLVTSLASKAQTQKHGITQANELVNLTEFFVNHILPDLKSANVNEFPVLKADGIKYIMIFRNQVPKEHLLVSIPLLINHLQAESIVVHTYAAHALERLFTMRGPNNATLFTAAEIAPFVEILLTNLFKALTLPGSSENEYIMKAIMRSFSLLQEAIIPYIPTLITQLTQKLLAVSKNPSKPHFNHYMFEAICLSIRITCKANPAAVVNFEEALFLVFTEILQNDVQEFIPYVFQVMSLLLETHKNDIPSSYMALFPHLLQPVLWERTGNIPALVRLLQAFLERGSNTIASAAADKIPGLLGVFQKLIASKANDHQGFYLLNSIIEHMPPESVDQYRKQIFILLFQRLQNSKTTKFIKSFLVFINLYCIKYGALALQEIFDGIQPKMFGMVLEKIIIPEIQKVSGNVEKKICAVGITKLLTECPPMMDTEYTKLWTPLLQSLIGLFELPEDDTIPDEEHFIDIEDTPGYQTAFSQLAFAGKKEHDPVGQMVNNPKIHLAQSLHKLSTACPGRVPSMVSTSLNAEALQYLQGYLQAASVTLL

SEQ ID NO: 20308 - protein, 450 aa, Homo sapiens
  Payload ID: 4057
  Gene Symbol: CSK
  Gene Name: c-src tyrosine kinase
  Uniprot ID: P41240
  ENSP ID: ENSP00000220003
MSAIQAAWPSGTECIAKYNFHGTAEQDLPFCKGDVLTIVAVTKDPNWYKAKNKVGREGIIPANYVQKREGVKAGTKLSLMPWFHGKITREQAERLLYPPETGLFLVRESTNYPGDYTLCVSCDGKVEHYRIMYHASKLSIDEEVYFENLMQLVEHYTSDADGLCTRLIKPKVMEGTVAAQDEFYRSGWALNMKELKLLQTIGKGEFGDVMLGDYRGNKVAVKCIKNDATAQAFLAEASVMTQLRHSNLVQLLGVIVEEKGGLYIVTEYMAKGSLVDYLRSRGRSVLGGDCLLKFSLDVCEAMEYLEGNNFVHRDLAARNVLVSEDNVAKVSDFGLTKEASSTQDTGKLPVKWTAPEALREKKFSTKSDVWSFGILLWEIYSFGRVPYPRIPLKDVVPRVEKGYKMDAPDGCPPAVYEVMKNCWHLDAAMRPSFLQLREQLEHIKTHELHL

SEQ ID NO: 20309 - protein, 450 aa, Homo sapiens; identical to SEQ ID NO: 20308
  Payload ID: 4057
  Gene Symbol: CSK
  Gene Name: c-src tyrosine kinase
  Uniprot ID: P41240
  ENSP ID: ENSP00000414764

SEQ ID NO: 20310 - protein, 64 aa, Homo sapiens
  Payload ID: 4057
  Gene Symbol: CSK
  Gene Name: c-src tyrosine kinase
  ENSP ID: ENSP00000454640
MSAIQAAWPSGTECIAKYNFHGTAEQDLPFCKGDVLTIVAVTKDPNWYKAKNKVGREGIIPANY

SEQ ID NO: 20311 - protein, 450 aa, Homo sapiens; identical to SEQ ID NO: 20308
  Payload ID: 4057
  Gene Symbol: CSK
  Gene Name: c-src tyrosine kinase
  Uniprot ID: P41240
  ENSP ID: ENSP00000454906

SEQ ID NO: 20312 - protein, 68 aa, Homo sapiens
  Payload ID: 4057
  Gene Symbol: CSK
  Gene Name: c-src tyrosine kinase
  ENSP ID: ENSP00000457497
MPWFHGKITREQAERLLYPPETGLFLVRESTNYPGDYTLCVSCDGKVEHYRIMYHASKLSIDEEVYFE

SEQ ID NO: 20313 - protein, 110 aa, Homo sapiens
  Payload ID: 4057
  Gene Symbol: CSK
  Gene Name: c-src tyrosine kinase
  ENSP ID: ENSP00000457714
MSAIQAAWPSGTECIAKYNFHGTAEQDLPFCKGDVLTIVAVTKDPNWYKAKNKVGREGIIPANYVQKREGVKAGTKLSLMPWFHGKITREQAERLLYPPETGLFLVREST

SEQ ID NO: 20314 - protein, 781 aa, Homo sapiens
  Payload ID: 4058
  Gene Symbol: CSRP2BP
  Gene Name: CSRP2 binding protein
  ENSP ID: ENSP00000366909
MDSSIHLSSLISRHDDEATRTSTSEGLEEGEVEGETLLIVESEDQASVDLSHDQSGDSLNSDEGDVSWMEEQLSYFCDKCQKWIPASQLREQLSYLKGDNFFRFTCSDCSADGKEQYERLKLTWQQVVMLAMYNLSLEGSGRQGYFRWKEDICAFIEKHWTFLLGNRKKTSTWWSTVAGCLSVGSPMYFRSGAQEFGEPGWWKLVHNKPPTMKPEGEKLSASTLKIKASKPTLDPIITVEGLRKRASRNPVESAMELKEKRSRTQEAKDIRRAQKEAAGFLDRSTSSTPVKFISRGRRPDVILEKGEVIDFSSLSSSDRTPLTSPSPSPSLDFSAPGTPASHSATPSLLSEADLIPDVMPPQALFHDDDEMEGDGVIDPGMEYVPPPAGSVASGPVVGVRKKVRGPEQIKQEVESEEEKPDRMDIDSEDTDSNTSLQTRAREKRKPQLEKDTKPKEPRYTPVSIYEEKLLLKRLEACPGAVAMTPEARRLKRKLIVRQAKRDRGLPLFDLDQVVNAALLLVDGIYGAKEGGISRLPAGQATYRTTCQDFRILDRYQTSLPSRKGFRHQTTKFLYRLVGSEDMAVDQSIVSPYTSRILKPYIRRDYETKPPKLQLLSQIRSHLHRSDPHWTPEPDAPLDYCYVRPNHIPTINSMCQEFFWPGIDLSECLQYPDFSVVVLYKKVIIAFGFMVPDVKYNEAYISFLFVHPEWRRAGIATFMIYHLIQTCMGKDVTLHVSASNPAMLLYQKFGFKTEEYVLDFYDKYYPLESTECKHAFFLRLRR

SEQ ID NO: 20315 - protein, 782 aa, Homo sapiens
  Payload ID: 4058
  Gene Symbol: CSRP2BP
  Gene Name: CSRP2 binding protein
  Uniprot ID: Q9H8E8
  ENSP ID: ENSP00000392318
MDSSIHLSSLISRHDDEATRTSTSEGLEEGEVEGETLLIVESEDQASVDLSHDQSGDSLNSDEGDVSWMEEQLSYFCDKCQKWIPASQLREQLSYLKGDNFFRFTCSDCSADGKEQYERLKLTWQQVVMLAMYNLSLEGSGRQGYFRWKEDICAFIEKHWTFLLGNRKKTSTWWSTVAGCLSVGSPMYFRSGAQEFGEPGWWKLVHNKPPTMKPEGEKLSASTLKIKAASKPTLDPIITVEGLRKRASRNPVESAMELKEKRSRTQEAKDIRRAQKEAAGFLDRSTSSTPVKFISRGRRPDVILEKGEVIDFSSLSSSDRTPLTSPSPSPSLDFSAPGTPASHSATPSLLSEADLIPDVMPPQALFHDDDEMEGDGVIDPGMEYVPPPAGSVASGPVVGVRKKVRGPEQIKQEVESEEEKPDRMDIDSEDTDSNTSLQTRAREKRKPQLEKDTKPKEPRYTPVSIYEEKLLLKRLEACPGAVAMTPEARRLKRKLIVRQAKRDRGLPLFDLDQVVNAALLLVDGIYGAKEGGISRLPAGQATYRTTCQDFRILDRYQTSLPSRKGFRHQTTKFLYRLVGSEDMAVDQSIVSPYTSRILKPYIRRDYETKPPKLQLLSQIRSHLHRSDPHWTPEPDAPLDYCYVRPNHIPTINSMCQEFFWPGIDLSECLQYPDFSVVVLYKKVIIAFGFMVPDVKYNEAYISFLFVHPEWRRAGIATFMIYHLIQTCMGKDVTLHVSASNPAMLLYQKFGFKTEEYVLDFYDKYYPLESTECKHAFFLRLRR

SEQ ID NO: 20316 - protein, 56 aa, Homo sapiens
  Payload ID: 4058
  Gene Symbol: CSRP2BP
  Gene Name: CSRP2 binding protein
  ENSP ID: ENSP00000424752
MDSSIHLSSLISRHDDEATRTSTSEGLEEGEVEGETLLIVESEDQASVDLSHDQSG

SEQ ID NO: 20317 - protein, 654 aa, Homo sapiens
  Payload ID: 4058
  Gene Symbol: CSRP2BP
  Gene Name: CSRP2 binding protein
  Uniprot ID: Q9H8E8
  ENSP ID: ENSP00000425909
MLAMYNLSLEGSGRQGYFRWKEDICAFIEKHWTFLLGNRKKTSTWWSTVAGCLSVGSPMYFRSGAQEFGEPGWWKLVHNKPPTMKPEGEKLSASTLKIKAASKPTLDPIITVEGLRKRASRNPVESAMELKEKRSRTQEAKDIRRAQKEAAGFLDRSTSSTPVKFISRGRRPDVILEKGEVIDFSSLSSSDRTPLTSPSPSPSLDFSAPGTPASHSATPSLLSEADLIPDVMPPQALFHDDDEMEGDGVIDPGMEYVPPPAGSVASGPVVGVRKKVRGPEQIKQEVESEEEKPDRMDIDSEDTDSNTSLQTRAREKRKPQLEKDTKPKEPRYTPVSIYEEKLLLKRLEACPGAVAMTPEARRLKRKLIVRQAKRDRGLPLFDLDQVVNAALLLVDGIYGAKEGGISRLPAGQATYRTTCQDFRILDRYQTSLPSRKGFRHQTTKFLYRLVGSEDMAVDQSIVSPYTSRILKPYIRRDYETKPPKLQLLSQIRSHLHRSDPHWTPEPDAPLDYCYVRPNHIPTINSMCQEFFWPGIDLSECLQYPDFSVVVLYKKVIIAFGFMVPDVKYNEAYISFLFVHPEWRRAGIATFMIYHLIQTCMGKDVTLHVSASNPAMLLYQKFGFKTEEYVLDFYDKYYPLESTECKHAFFLRLRR

SEQ ID NO: 20318 - protein, 777 aa, Homo sapiens
  Payload ID: 4059
  Gene Symbol: CTAGE15
  Gene Name: CTAGE family, member 15
  Uniprot ID: A4D2H0
  ENSP ID: ENSP00000474204
MEEPGATPQPYLGLVLEELRRVVAALPESMRPDENPYGFPSELVVCAAVIGFFVVLLFLWRSFRSVRSRLYVGREQKLGATLSGLIEEKCKLLEKFSLIQKEYEGYEVESSLEDASFEKAAAEEARSLEATCEKLNRSNSELEDEILCLEKDLKEEKSKHSQQDELMADISKSIQSLEDESKSLKSQIAEAKIICKTFKMSEERRAIAIKDALNENSQLQTSHKQLFQQEAEVWKGQVSELNKQKITFEDSKVHAEQVLNDKENHIKTLTGHLPMMKDQAAVLEEDTTDDDNLELEVNSQWENGANLDDPLKGALKKLIHAAKLNVSLKSLEGERNHIIIQLSEVDKTKEELTEHIKNLQTQQASLQSENIYFESENQKLQQKLKIMTEFYQENEMKLYRKLTVEENYRIEEEEKLSRVEEKLSRATEQLETYRKLAKDLEEELERTVHFYQKQVISYEKRGHDNWLAARTAERNLSDLRKENAHNKQKLTETELKFELLEKDPNALDVSNTAFGREHAPNGPAPLGQRSSETRAFLSPQTLLEDPLGLSPVLPEGGGRGPRGPGNPLDHQITNERGEPSCDRLTDPHRAPSDTGSLSSPVEQDCKMMFPPPGQSYPDSALPPQREDRFYSNSERLSGSAEPRSFKMTSLDKMDGSMPSEMESSRNDAKDDLGNLNVPDSSLPAENEATGPGFIPPPLAPVRGPLFPVDTRGPFMRRGPPFPPPPPGTMFGASRGYFPPRDFPGPPHAPFAMRNIYPPRGLPPYFHPRPGFYPNPAF

SEQ ID NO: 20319 - protein, 777 aa, Homo sapiens
  Payload ID: 4060
  Gene Symbol: CTAGE4
  Gene Name: CTAGE family, member 4
  Uniprot ID: Q8IX94
  ENSP ID: ENSP00000419539
MEEPGATPQPYLGLVLEELRRVVAALPESMRPDENPYGFPSELVVCAAVIGFFVVLLFLWRSFRSVRSRLYVGREQKLGATLSGLIEEKCKLLEKFSLIQKEYEGYEVESSLEDASFEKAAAEEARSLEATCEKLNRSNSELEDEILCLEKDLKEEKSKHSQQDELMADISKSIQSLEDESKSLKSQIAEAKIICKTFKMSEERRAIAIKDALNENSQLQTSHKQLFQQEAEVWKGEVSELNKQKITFEDSKVHAEQVLNDKENHIKTLTGHLPMMKDQAAVLEEDTTDDDNLELEVNSQWENGANLDDPLKGALKKLIHAAKLNVSLKSLEGERNHIIIQLSEVDKTKEELTEHIKNLQTQQASLQSENIYFESENQKLQQKLKIMTEFYQENEMKLYRKLTVEENYRIEEEEKLSRVEEKISRATEGLETYRKLAKDLEEELERTVHFYQKQVISYEKRGHDNWLAARTAERNLSDLRKENAHNKQKLTETELKFELLEKDPNALDVSNTAFGREHSPCSPSPLGRPSSETRAFPSPQTLLEDPLRLSPVLPGGGGRGPSSPGNPLDHQITNERGEPSYDRLIDPHRAPSDTGSLSSPVEQDRRMMFPPPGQSYPDSTLPPQREDRFYSNSERLSGPAEPRSFKMTSLDKMDRSMPSEMESSRNDAKDDLGNLNVPDSSLPAENEATGPGLIPPPLAPISGPLFPVDTRGPFMRRGPPFPPPPPGTMFGASRGYFPPRDFPGPPHAPFAMRNIYPPRGLPPYLHPRPGFYPNPTF

SEQ ID NO: 20320 - protein, 804 aa, Homo sapiens
  Payload ID: 4061
  Gene Symbol: CTAGE5
  Gene Name: CTAGE family, member 5
  Uniprot ID: O15320
  ENSP ID: ENSP00000280083
MEEPGVTPQPYLGLLLEELRRVVAALPEGMRPDSNLYGFPWELVICAAVVGFFAVLFFLWRSFRSVRSRLYVGREKKLALMLSGLIEEKSKLLEKFSLVQKEYEGYEVESSLKDASFEKEATEAQSLEATCEKLNRSNSELEDEILCLEKELKEEKSKHSEQDELMADISKRIQSLEDESKSLKSQVAEAKMTFKIFQMNEERLKIAIKDALNENSQLQESQKQLLQEAEVWKEQVSELNKQKVTFEDSKVHAEQVLNDKESHIKTLTERLLKMKDWAAMLGEDITDDDNLELEMNSESENGAYLDNPPKGALKKLIHAAKLNASLKTLEGERNQIYIQLSEVDKTKEELTEHIKNLQTEQASLQSENTHFENENQKLQQKLKVMTELYQENEMKLHRKLTVEENYRLEKEEKLSKVDEKISHATEELETYRKRAKDLEEELERTIHSYQGQIISHEKKAHDNWLAARNAERNLNDLRKENAHNRQKLTETELKFELLEKDPYALDVPNTAFGREHSPYGPSPLGWPSSETRAFLSPPTLLEGPLRLSPLLPGGGGRGSRGPGNPLDHQITNERGESSCDRLTDPHRAPSDTGSLSPPWDQDRRMMFPPPGQSYPDSALPPQRQDRFCSNSGRLSGPAELRSFNMPSLDKMDGSMPSEMESSRNDTKDDLGNLNVPDSSLPAENEATGPGFVPPPLAPIRGPLFPVDARGPFLRRGPPFPPPPPGAMFGASRDYFPPGDFPGPPPAPFAMRNVYPPRGFPPYLPPRPGFFPPPPHSEGRSEFPSGLIPPSNEPATEHPEPQQET

SEQ ID NO: 20321 - protein, 771 aa, Homo sapiens
  Payload ID: 4061
  Gene Symbol: CTAGE5
  Gene Name: CTAGE family, member 5
  Uniprot ID: O15320
  ENSP ID: ENSP00000339286
MEEPGVTPQPYLGLLLEELRRVVAALPEGMRPDSNLYGFPWELVICAAVVGFFAVLFFLWRSFRSVRSRLYVGREKKLALMLSGLIEEKSKLLEKFSLVQKEYEGYEVESSLKDASFEKEATEAQSLEATCEKLNRSNSELEDEILCLEKELKEEKSKHSEQDELMADISKRIQSLEDESKSLKSQVAEAKMTFKIFQMNEERLKIAIKDALNENSQLQESQKQLLQEAEVWKEQVSELNKQKVTFEDSKVHAEQVLNDKESHIKTLTERLLKMKDWAAMLGEDITDDDNLELEMNSESENGAYLDNPPKGALKKLIHAAKLNASLKTLEGERNQIYIQLSEVDKTKEELTEHIKNLQTEQASLQSENTHFENENQKLQQKLKVMTELYQENEMKLHRKLTVEENYRLEKEEKLSKVDEKISHATEELETYRKRAKDLEEELERTIHSYQGQIISHEKKAHDNWLAARNAERNLNDLRKENAHNRQKLTETELKFELLEKDPYALDVPNTAFGREHSPYGPSPLGWPSSETRAFLSPPTLLEGPLRLSPLLPGGGGRGSRGPGNPLDHQITNERGESSCDRLTDPHRAPSDTGSLSPPWDQDRRMMFPPPGQSYPDSALPPQRQDRFCSNSGRLSGPAELRSFNMPSLDKMDGSMPSEMESSRNDTKDDLGNLNVPDSSLPAENEATGPGFVPPPLAPIRGPLFPVDARGPFLRRGPPFPPPPPGAMFGASRDYFPPGDFPGPPPAPFASARSPPGAGAPASGRGLGGPQK

SEQ ID NO: 20322 - protein, 792 aa, Homo sapiens
  Payload ID: 4061
  Gene Symbol: CTAGE5
  Gene Name: CTAGE family, member 5
  Uniprot ID: O15320
  ENSP ID: ENSP00000343897
MELKSPEEEVVAALPEGMRPDSNLYGFPWELVICAAVVGFFAVLFFLWRSFRSVRSRLYVGREKKLALMLSGLIEEKSKLLEKFSLVQKEYEGYEVESSLKDASFEKEATEAQSLEATCEKLNRSNSELEDEILCLEKELKEEKSKHSEQDELMADISKRIQSLEDESKSLKSQVAEAKMTFKIFQMNEERLKIAIKDALNENSQLQESQKQLLQEAEVWKEQVSELNKQKVTFEDSKVHAEQVLNDKESHIKTLTERLLKMKDWAAMLGEDITDDDNLELEMNSESENGAYLDNPPKGALKKLIHAAKLNASLKTLEGERNQIYIQLSEVDKTKEELTEHIKNLQTEQASLQSENTHFENENQKLQQKLKVMTELYQENEMKLHRKLTVEENYRLEKEEKLSKVDEKISHATEELETYRKRAKDLEEELERTIHSYQGQIISHEKKAHDNWLAARNAERNLNDLRKENAHNRQKLTETELKFELLEKDPYALDVPNTAFGREHSPYGPSPLGWPSSETRAFLSPPTLLEGPLRLSPLLPGGGGRGSRGPGNPLDHQITNERGESSCDRLTDPHRAPSDTGSLSPPWDQDRRMMFPPPGQSYPDSALPPQRQDRFCSNSGRLSGPAELRSFNMPSLDKMDGSMPSEMESSRNDTKDDLGNLNVPDSSLPAENEATGPGFVPPPLAPIRGPLFPVDARGPFLRRGPPFPPPPPGAMFGASRDYFPPGDFPGPPPAPFAMRNVYPPRGFPPYLPPRPGFFPPPPHSEGRSEFPSGLIPPSNEPATEHPEPQQET

SEQ ID NO: 20323 - protein, 761 aa, Homo sapiens
  Payload ID: 4061
  Gene Symbol: CTAGE5
  Gene Name: CTAGE family, member 5
  Uniprot ID: O15320
  ENSP ID: ENSP00000343912
MEEPGVTPQPYLGLLLEELRRVVAALPEGMRPDSNLYGFPWELVICAAVVGFFAVLFFLWRSFRSVRSRLYVGREKKLALMLSGLIEEKSKLLEKFSLVQKEYEGYEVESSLKDASFEKEATEAQSLEATCEKLNRSNSELEDEILCLEKELKEEKSKHSEQDELMADISKRIQSLEDESKSLKSQVAEAKMTFKIFQMNEERLKIAIKDALNENSQLQESQKQLLQEAEVWKEQVSELNKQKVTFEDSKVHAEQVLNDKESHIKTLTERLLKMKDWAAMLGEDITDDDNLELEMNSESENGAYLDNPPKGALKKLIHAAKLNASLKTLEGERNQIYIQLSEVDKTKEELTEHIKNLQTEQASLQSENTHFENENQKLQQKLKVMTELYQENEMKLHRKLTVEENYRLEKEEKLSKVDEKISHATEELETYRKRAKDLEEELERTIHSYQGQIISHEKKAHDNWLAARNAERNLNDLRKENAHNRQKLTETELKFELLEKDPYALDVPNTAFGRGSRGPGNPLDHQITNERGESSCDRLTDPHRAPSDTGSLSPPWDQDRRMMFPPPGQSYPDSALPPQRQDRFCSNSGRLSGPAELRSFNMPSLDKMDGSMPSEMESSRNDTKDDLGNLNVPDSSLPAENEATGPGFVPPPLAPIRGPLFPVDARGPFLRRGPPFPPPPPGAMFGASRDYFPPGDFPGPPPAPFAMRNVYPPRGFPPYLPPRPGFFPPPPHSEGRSEFPSGLIPPSNEPATEHPEPQQET

SEQ ID NO: 20324 - protein, 809 aa, Homo sapiens
  Payload ID: 4061
  Gene Symbol: CTAGE5
  Gene Name: CTAGE family, member 5
  Uniprot ID: O15320
  ENSP ID: ENSP00000379462
MEEPGVTPQPYLGLLLEELRRVVAALPEGMRPDSNLYGFPWELVICAAVVGFFAVLFFLWRSFRSVRSRLYVGREKKLALMLSGLIEEKSKLLEKFSLVQKEYEGYEVESSLKDASFEKEATEAQSLEVENQMATCEKLNRSNSELEDEILCLEKELKEEKSKHSEQDELMADISKRIQSLEDESKSLKSQVAEAKMTFKIFQMNEERLKIAIKDALNENSQLQESQKQLLQEAEVWKEQVSELNKQKVTFEDSKVHAEQVLNDKESHIKTLTERLLKMKDWAAMLGEDITDDDNLELEMNSESENGAYLDNPPKGALKKLIHAAKLNASLKTLEGERNQIYIQLSEVDKTKEELTEHIKNLQTEQASLQSENTHFENENQKLQQKLKVMTELYQENEMKLHRKLTVEENYRLEKEEKLSKVDEKISHATEELETYRKRAKDLEEELERTIHSYQGQIISHEKKAHDNWLAARNAERNLNDLRKENAHNRQKLTETELKFELLEKDPYALDVPNTAFGREHSPYGPSPLGWPSSETRAFLSPPTLLEGPLRLSPLLPGGGGRGSRGPGNPLDHQITNERGESSCDRLTDPHRAPSDTGSLSPPWDQDRRMMFPPPGQSYPDSALPPQRQDRFCSNSGRLSGPAELRSFNMPSLDKMDGSMPSEMESSRNDTKDDLGNLNVPDSSLPAENEATGPGFVPPPLAPIRGPLFPVDARGPFLRRGPPFPPPPPGAMFGASRDYFPPGDFPGPPPAPFAMRNVYPPRGFPPYLPPRPGFFPPPPHSEGRSEFPSGLIPPSNEPATEHPEPQQET

SEQ ID NO: 20325 - protein, 775 aa, Homo sapiens
  Payload ID: 4061
  Gene Symbol: CTAGE5
  Gene Name: CTAGE family, member 5
  Uniprot ID: O15320
  ENSP ID: ENSP00000379468
MRPDSNLYGFPWELVICAAVVGFFAVLFFLWRSFRSVRSRLYVGREKKLALMLSGLIEEKSKLLEKFSLVQKEYEGYEVESSLKDASFEKEATEAQSLEATCEKLNRSNSELEDEILCLEKELKEEKSKHSEQDELMADISKRIQSLEDESKSLKSQVAEAKMTFKIFQMNEERLKIAIKDALNENSQLQESQKQLLQEAEVWKEQVSELNKQKVTFEDSKVHAEQVLNDKESHIKTLTERLLKMKDWAAMLGEDITDDDNLELEMNSESENGAYLDNPPKGALKKLIHAAKLNASLKTLEGERNQIYIQLSEVDKTKEELTEHIKNLQTEQASLQSENTHFENENQKLQQKLKVMTELYQENEMKLHRKLTVEENYRLEKEEKLSKVDEKISHATEELETYRKRAKDLEEELERTIHSYQGQIISHEKKAHDNWLAARNAERNLNDLRKENAHNRQKLTETELKFELLEKDPYALDVPNTAFGREHSPYGPSPLGWPSSETRAFLSPPTLLEGPLRLSPLLPGGGGRGSRGPGNPLDHQITNERGESSCDRLTDPHRAPSDTGSLSPPWDQDRRMMFPPPGQSYPDSALPPQRQDRFCSNSGRLSGPAELRSFNMPSLDKMDGSMPSEMESSRNDTKDDLGNLNVPDSSLPAENEATGPGFVPPPLAPIRGPLFPVDARGPFLRRGPPFPPPPPGAMFGASRDYFPPGDFPGPPPAPFAMRNVYPPRGFPPYLPPRPGFFPPPPHSEGRSEFPSGLIPPSNEPATEHPEPQQET

SEQ ID NO: 20326 - protein, 775 aa, Homo sapiens; identical to SEQ ID NO: 20325
  Payload ID: 4061
  Gene Symbol: CTAGE5
  Gene Name: CTAGE family, member 5
  Uniprot ID: O15320
  ENSP ID: ENSP00000450449

SEQ ID NO: 20327 - protein, 724 aa, Homo sapiens
  Payload ID: 4061
  Gene Symbol: CTAGE5
  Gene Name: CTAGE family, member 5
  Uniprot ID: O15320
  ENSP ID: ENSP00000450869
MLSGLIEEKSKLLEKFSLVQKEYEGYEVESSLKDASFEKEATEAQSLEATCEKLNRSNSELEDEILCLEKELKEEKSKHSEQDELMADISKRIQSLEDESKSLKSQVAEAKMTFKIFQMNEERLKIAIKDALNENSQLQESQKQLLQEAEVWKEQVSELNKQKVTFEDSKVHAEQVLNDKESHIKTLTERLLKMKDWAAMLGEDITDDDNLELEMNSESENGAYLDNPPKGALKKLIHAAKLNASLKTLEGERNQIYIQLSEVDKTKEELTEHIKNLQTEQASLQSENTHFENENQKLQQKLKVMTELYQENEMKLHRKLTVEENYRLEKEEKLSKVDEKISHATEELETYRKRAKDLEEELERTIHSYQGQIISHEKKAHDNWLAARNAERNLNDLRKENAHNRQKLTETELKFELLEKDPYALDVPNTAFGREHSPYGPSPLGWPSSETRAFLSPPTLLEGPLRLSPLLPGGGGRGSRGPGNPLDHQITNERGESSCDRLTDPHRAPSDTGSLSPPWDQDRRMMFPPPGQSYPDSALPPQRQDRFCSNSGRLSGPAELRSFNMPSLDKMDGSMPSEMESSRNDTKDDLGNLNVPDSSLPAENEATGPGFVPPPLAPIRGPLFPVDARGPFLRRGPPFPPPPPGAMFGASRDYFPPGDFPGPPPAPFAMRNVYPPRGFPPYLPPRPGFFPPPPHSEGRSEFPSGLIPPSNEPATEHPEPQQET

SEQ ID NO: 20328 - protein, 138 aa, Homo sapiens
  Payload ID: 4061
  Gene Symbol: CTAGE5
  Gene Name: CTAGE family, member 5
  ENSP ID: ENSP00000451164
MELKSPEEEVVAALPEGMRPDSNLYGFPWELVICAAVVGFFAVLFFLWRSFRSVRSRLYVGREKKLALMLSGLIEEKSKLLEKFSLVQKEYEGYEVESSLKDASFEKEATEAQSLEFVEGSQISEATCEKLNRSNSEL

SEQ ID NO: 20329 - protein, 151 aa, Homo sapiens
  Payload ID: 4061
  Gene Symbol: CTAGE5
  Gene Name: CTAGE family, member 5
  ENSP ID: ENSP00000452395
MELKSPEEEVVAALPEGMRPDSNLYGFPWELVICAAVVGFFAVLFFLWRSFRSVRSRLYVGREKKLALMLSGLIEEKSKLLEKFSLVQKEATCEKLNRSNSELEDEILCLEKELKEEKSKHSEQDELMADISKRIQSLEDESKSLKSQVAE

SEQ ID NO: 20330 - protein, 729 aa, Homo sapiens
  Payload ID: 4061
  Gene Symbol: CTAGE5
  Gene Name: CTAGE family, member 5
  Uniprot ID: O15320
  ENSP ID: ENSP00000452562
MLSGLIEEKSKLLEKFSLVQKEYEGYEVESSLKDASFEKEATEAQSLEVENQMATCEKLNRSNSELEDEILCLEKELKEEKSKHSEQDELMADISKRIQSLEDESKSLKSQVAEAKMTFKIFQMNEERLKIAIKDALNENSQLQESQKQLLQEAEVWKEQVSELNKQKVTFEDSKVHAEQVLNDKESHIKTLTERLLKMKDWAAMLGEDITDDDNLELEMNSESENGAYLDNPPKGALKKLIHAAKLNASLKTLEGERNQIYIQLSEVDKTKEELTEHIKNLQTEQASLQSENTHFENENQKLQQKLKVMTELYQENEMKLHRKLTVEENYRLEKEEKLSKVDEKISHATEELETYRKRAKDLEEELERTIHSYQGQIISHEKKAHDNWLAARNAERNLNDLRKENAHNRQKLTETELKFELLEKDPYALDVPNTAFGREHSPYGPSPLGWPSSETRAFLSPPTLLEGPLRLSPLLPGGGGRGSRGPGNPLDHQITNERGESSCDRLTDPHRAPSDTGSLSPPWDQDRRMMFPPPGQSYPDSALPPQRQDRFCSNSGRLSGPAELRSFNMPSLDKMDGSMPSEMESSRNDTKDDLGNLNVPDSSLPAENEATGPGFVPPPLAPIRGPLFPVDARGPFLRRGPPFPPPPPGAMFGASRDYFPPGDFPGPPPAPFAMRNVYPPRGFPPYLPPRPGFFPPPPHSEGRSEFPSGLIPPSNEPATEHPEPQQET

SEQ ID NO: 20331 - protein, 777 aa, Homo sapiens
  Payload ID: 4062
  Gene Symbol: CTAGE6
  Gene Name: CTAGE family, member 6
  Uniprot ID: Q86UF2
  ENSP ID: ENSP00000474388
MEEPGATPQPYLGLVLEELRRVVAALPESMRPDENPYGFPSELVVCAAVIGFFVVLLFLWRSFRSVRSRLYVGREQKLGATLSGLIEEKCKLLEKFSLIQKEYEGYEVESSLEDASFEKAAAEEARSLEATCEKLNRSNSELEDEILCLEKDLKEEKSKHSQQDELMADISKSIQSLEDESKSLKSQIAEAKIICKTFKMSEERRAIAIKDALNENSQLQTSHKQLFQQEAEVWKGEVSELNKQKITFEDSKVHAEQVLNDKENHIKTLTGHLPMMKDQAAVLEEDTTDDDNLELEVNSQWENGANLDDPLKGALKKLIHAAKLNVSLKSLEGERNHIIIQLSEVDKTKEELTEHIKNLQTQQESLQSENIYFESENQKLQQKLKIMTEFYQEDEMKLYRKLTVEENYRIEEEEKLSKVEEKLSRATEQLETYRKLAKDLEEELERTVHFYQKQVISYEKRGHDNWLAARTAERNLSDLRKENAHNKQKLTETELKFELLEKDPNALDVSNTAFGREHAPNGPAPLGQRSSETRAFLSPQTLLEDPLGLSPVLPEGGGRGPRGPGNPLDHQITNERGEPSCDRLTDPHRAPSDTGSLSSPVEQDCKMMFPPPGQSYPDSALPPQREDRFYSNSERLSGSAEPRSFKMTSLDKMDGSMPSEMESSRNDAKDDLGNLNVPDSSLPAENEATGPGFIPPPLAPVRGPLFPVDTRGPFMRRGPPFPPPPPGTMFGASRGYFPPRDFPGPPHAPFAMRNIYPPRGLPPYFHPRPGFYPNPAF

SEQ ID NO: 20332 - protein, 777 aa, Homo sapiens
  Payload ID: 4063
  Gene Symbol: CTAGE8
  Gene Name: CTAGE family, member 8
  Uniprot ID: P0CG41
  ENSP ID: ENSP00000417289
MEEPGATPQPYLGLVLEELRRVVAALPESMRPDENPYGFPSELVVCAAVIGFFVVLLFLWRSFRSVRSRLYVGREQKLGATLSGLIEEKCKLLEKFSLIQKEYEGYEVESSLEDASFEKAAAEEARSLEATCEKLNRSNSELEDEILCLEKDLKEEKSKHSQQDELMADISKSIQSLEDESKSLKSQIAEAKIICKTFKMSEERRAIAIKDALNENSQLQTSHKQLFQQEAEVWKGQVSELNKQKITFEDSKVHAEQVLNDKENHIKTLTGHLPMMKDQAAVLEEDTTDDDNLELEVNSQWENGANLDDPLKGALKKLIHAAKLNVSLKSLEGERNHIIIQLSEVDKTKEELTEHIKNLQTQQASLQSENIYFESENQKLQQKLKIMTEFYQENEMKLYRKLTVEENYRIEEEEKLSRVEEKISRATEGLETYRKLAKDLEEELERTVHFYQKQVISYEKRGHDNWLAARTAERNLSDLRKENAHNKQKLTETELKFELLEKDPNALDVSNTAFGREHSPCSPSPLGRPSSETRAFPSPQTLLEDPLRLSPVLPGGGGRGPSSPGNPLDHQITNERGEPSYDRLIDPHRAPSDTGSLSSPVEQDRRMMFPPPGQSYPDSTLPPQREDRFYSNSERLSGPAEPRSFKMTSLDKMDRSMPSEMESSRNDAKDDLGNLNVPDSSLPAENEATGPGFIPPPLAPVRGPLFPVDTRGPFMRRGPPFPPPPPGTMFGASRGYFPPRDFPGPPHAPFAMRNIYPPRGLPPYLHPRPGFYPNPTF

SEQ ID NO: 20333 - protein, 777 aa, Homo sapiens
  Payload ID: 4064
  Gene Symbol: CTAGE9
  Gene Name: CTAGE family, member 9
  Uniprot ID: A4FU28
  ENSP ID: ENSP00000395587
MEEPGATPQPYLGLVLEELGRVVAALPESMRPDENPYGFPSELVVCAAVIGFFVVLLFLWRSFRSVRSRLYVGREQKLGATLSGLIEEKCKLLEKFSLIQKEYEGYEVESSLEDASFEKAAAEEARSLEATCEKLSRSNSELEDEILCLEKDLKEEKSKHSQQDELMADISKSIQSLEDESKSLKSQIAEAKIICKTFKMSEERRAIAIKDALNENSQLQTSHKQLFQQEAEVWKGQVSELNKQKITFEDSKVHAEQVLNDKENHIKTLTGHLPMMKDQAAVLEEDTTDDDNLELKVNSQWENGANLDDPPKGALKKLIHAAKLNVSLKSLEGERNHIIIQLSEVDKTKEELTEHIKNLQTQQASLQSENIYFESENQKLQQKLKIMTEFYQENEMKLYRKLTVEENYRIEEEEKLSRVEEKISHATEELETYRKLAKDLEEELERTVHFYQKQVISYEKRGHDNWLAARTAERNLSDLRKENAHNKQKLTERELKFELLEKDPNALDVSNTAFGREHSPCSPSPLGRPSSETRAFPSPQTLLEDPLRLSPVLPGGGGRGPSSPGNPLDHQITNERGEPSYDRLIDPHRAPSDTGSLSSPVEQDRRMMFPPPGQSYPDSTLPPQREDRFYSNSERLSGPAEPRSFKMTSLDKMDRSMPSEMESSRNDAKDDLGNLNVPDSSLPAENEATGPGLIPPPLAPISGPLFPVDTRGPFMRRGPPFPPPPPGTMFGASRGYFPPRDFPGPPHAPFAMRNIYPPRGLPPYLHPRPGFYPNPTF

SEQ ID NO: 20334 - protein, 139 aa, Homo sapiens
  Payload ID: 4065
  Gene Symbol:
  Gene Name: CTB-102L5.4
  ENSP ID: ENSP00000465845
  MOD_RES (1)..(1): Any amino acid
XILKTTPAICSTMKNTAPPTQSLGLAVHPSHAGTLTWRGTPAITSSMEAAGAIRTATALRRPACSAASASRRILPCPLAQRPWSPPPRSPVWGRATGEIPSSVPTKFRAGRRQGQVRVQSKDTTALPTPAAAPAIRTRM

SEQ ID NO: 20335 - protein, 153 aa, Homo sapiens
  Payload ID: 4065
  Gene Symbol:
  Gene Name: CTB-102L5.4
  ENSP ID: ENSP00000468040
  MOD_RES (1)..(1): Any amino acid
XSDMFNYEEYCTANAVTGPCRASFPRWYFDVERNSCNNFIYGGCRGNKNSYRSEEACMLRCFRQQENPPLPLGSKALEPTSQKPGVGAGHGGDPKLSPHKVQGRSEAGAGPGPKASNFRGLGKGRRLTAAPPSSKDTTALPTPAAAPAIRTRM

SEQ ID NO: 20336 - protein, 382 aa, Homo sapiens
  Payload ID: 4066
  Gene Symbol:
  Gene Name: CTB-133G6.1
  Uniprot ID: I3L1I5
  ENSP ID: ENSP00000458866
MGDDQEDDFPRRLSESMEDLSLDLGALQGSEYLQDLGLGAPSHSQPGETPDSRPTGEEPGRDSLFSSLAGSQDLSRRRSWERSRSCSESWRRLSLDASAVDEEPCLPRTLASLALNLPGGGLKTWTQGCLSGGGTPAESPGKECDSPKKRGRSRSVPVSFYEIRSPEISPGLEVPTPPVQGLEPPVLECMEKDHVEPDHVLIVQQVLQELRQYHGARQRACMSASPGGAHSNLTWFEFLSESEDGAGKNEKSDKSTSVKRRLSCLRSRVTRQKEKGKSPAHLKDKGQDARERRECVNGHQLLQGTFSGPSSCPLCGKPFLSSGKSGGPIHPPGGQPLSLLHVLSIILLGSLLMCASSFCFALSSAAPWREPGISPWAQGPLG

SEQ ID NO: 20337 - protein, 84 aa, Homo sapiens
  Payload ID: 4067
  Gene Symbol:
  Gene Name: CTB-50L17.14
  ENSP ID: ENSP00000464793
MSSWSRQRPKRVTLFAARCLKKRRLRSPDPVCGSRTSRTWCSVWWLCPWSGPRAPRSAMFTVQPRTGTRCWAPPAAWLRTACAA

SEQ ID NO: 20338 - protein, 77 aa, Homo sapiens
  Payload ID: 4068
  Gene Symbol:
  Gene Name: CTB-54O9.9
  ENSP ID: ENSP00000466514
LSFLCRYVPVGLLERLPQRINERPPYYLGRDYLETLMASQKAADWIRIRLLEPVSSPRPRERGVSSPTSRYRPPLSP

SEQ ID NO: 20339 - protein, 129 aa, Homo sapiens; identical to SEQ ID NO: 15150
  Payload ID: 4069
  Gene Symbol:
  Gene Name: CTB-60B18.6
  ENSP ID: ENSP00000466140

SEQ ID NO: 20340 - protein, 77 aa, Homo sapiens
  Payload ID: 4069
  Gene Symbol:
  Gene Name: CTB-60B18.6
  ENSP ID: ENSP00000474022
MSKGLLLLLLLSMGGTWASKEPLRPRCRPINATLAVEKEGCPVCITVNTTICAGYCPTMTRVLQGVLPALPQVVCNY

SEQ ID NO: 20341 - protein, 148 aa, Homo sapiens
  Payload ID: 4070
  Gene Symbol:
  Gene Name: CTB-96E2.2
  ENSP ID: ENSP00000452347
PGQVDAAMAGRIYISGMAPRPSLAKKQRFRHRNRKGYRSQRGHSRGRNQNSRRPSRATWLSLFSSEESNLGANNYDDYRMDWLVPATCEPIQSVFFFSGDKYYRVNLRTRRWQRVGFPPEKADHLQQRAATGAGEGVCSMALPQHQHP

SEQ ID NO: 20342 - protein, 273 aa, Homo sapiens
  Payload ID: 4071
  Gene Symbol:
  Gene Name: CTC-260F20.3
  ENSP ID: ENSP00000452549
MAASKVKQDMPPPGGYGPIDYKRNLPRRGLSGYSMLAIGIGTLIYGHWSIMKWNRERRRLQIEDFEARIALLPLLQAETDRRTLQMLRENLEEEAIIMKDVPDWKAFPLPALSRKQRTVLVVCGPEQNGAVGLVCARHLRVFEYEPTIFYPTRSLDLLHRDLTTQCEKMDIPFLSYLPTEVQLINEAYGLVVDAVLGPGVEPGEVGGPCTRALATLKLLSIPLVSLDIPSGMPGRGGHIGAWGAWVEAPVPQLLVAPACLNLNLPSLDGPTLG

SEQ ID NO: 20343 - protein, 97 aa, Homo sapiens
  Payload ID: 4072
  Gene Symbol:
  Gene Name: CTC-273B12.7
  ENSP ID: ENSP00000470383
MELENIRRRKQELLVEIQRLREELSEAMSEVEGLEANEGSKTLQRNRKMAMGRKKFNMDPKKGIQFLVENELLQNTPEEIARFLYKGEGLNKTAIGD

SEQ ID NO: 20344 - protein, 1178 aa, Homo sapiens
  Payload ID: 4073
  Gene Symbol:
  Gene Name: CTC-281F24.5
  ENSP ID: ENSP00000488967
MSRETRRGALPRLRRGEQAAKMPGRCVGPSRSGRGVRRPWGKRRGAGTSRGRGARRRAKPSEWETRCVSAERPQGRQRPWGTRQAAETADAAGANEALGAPGTPGSIEAARDPGAVWVNGAVGEPEVVGLAGAVWVTGSGEEETEDRSPRGCERKGRPGSLGHESILHLWLKVQAMRAASGCGEGSRVELHPVPAGEGPVERGVPGRASWVETSRGGLTGPWVKEQARGIPRAPSGPTALGLGAAYERALGFCGQGQAGRVPPASVPGALASSSEMAPHLWRGEAVGVPETGEEIGYGFVSGPCEKEQTMGEPGTVGWTGAVGAPRAMEGELGCGGAAGLWGRGQSPQIPGALTHEAVCGATPGVWGRGQAVGVSDAVEEEPTSVGAAGVCYRRQAVEETDSVGMPGPWGTGYSVGVPCAAEEETRCGGDPGFRERGQPVWVETGSGGDPGSRGAAQTAESSCPGEQAAGSGGAPGLWGIQQATGVPRALGKDTGCVSVPGLWGAGQMVRVPQAVVVPGALGEELSHSGGLGLWDGQQALGGPPAEAVPGLGEETCSGNVLSPWERRQAVGEPESLGPPALGVPGSVDQEAGCGDVACQCGRRQAVGVSETVGIPRAADVPRQGCAAAGVLMAMGVPGSGKVPARVPAAVWASGPVCQEGSSRDILNLWERTRAARISVASGGPVAREELWSGGEESVASGGPVAQEELWSGGEESVASGGHVAREKLWSGGEDCGSGAFPGPWGRRQTIGVPVVPEGPGLGGETDSGGIPRPWGQRQRVRAPVATEVLLAPRVPGSVELEPGDGGFSGLSGRQQTAGMPGTVGLSAASGVPVAPRVPRPVQEETGSELWGERETVGGPADAKGPTRMEVPTSTRMPGPMAEKTGSGGVSGLLGGRQTTGVSMAVGLLGSVGEGTIFEHVSGLSGRRQTAGRPVAARGSMAVGVPTAPGLPGPMVGDTGSGDDGSGIWGRRLATEGPTAARVPGPVEGETGSEGVSGLWRRRHGGAIPEAGRVPLPLGVLAAVGAPMAGRAPAAVWVTGSSGAEADVGVSGLTVLRRQSTGGVGASEDETGGGNILGLAGGSQAVGTSHTCVPGARLWSCPRSLGEETAYENALGMSGTRTAVGVPSVSREEIGLGHFRDHLQPSGRRLAGGVSAVRVRGSNLGESYVGEARLRGAFQ

SEQ ID NO: 20345 - protein, 37 aa, Homo sapiens
  Payload ID: 4074
  Gene Symbol:
  Gene Name: CTC-326K19.6
  ENSP ID: ENSP00000391489
NSSLSLHGGLSSGLRLRCKAWNVHGAQSGSVFQLLPG

SEQ ID NO: 20346 - protein, 588 aa, Homo sapiens
  Payload ID: 4075
  Gene Symbol:
  Gene Name: CTC-360G5.8
  ENSP ID: ENSP00000472465
  MOD_RES (1)..(1): Any amino acid
XGGGAEGRSAWAVGPVGGAGEEGFRGWEVEHGGNGWAIEKNLTPVPGAPSQTCFVTSFEWCSKRQLVDLVMEGVWQELLDSAQIEICVADWWGARENCGCVYQLRVRLLDVYEKEVVKFSASPDPVLQWTERGCRQVSHVFTNFGKGIRYVSFEQYGRDISTWQELRQLQEQIRSLEEEKAAVTEAVRALLANQDSGEVQQDPKYQGLRARGREIRKELVHLYPREAQLEEQFYLQALKLPNQTHPDVPVGDESQARVLHMVGDKPVFSFQPRGHLEIGEKLDIIRQKRLSHVSGHRSYYLRGAGALLQHGLVNFTFNKLLRRGFTPMTVPDLLRGAVFEGCGMTPNANPSQIYNIDPARFKDLNLAGTAEVGLAGYFMDHTVAFRDLPVRMVCSSTCYRAETNTGQEPRGLYRVHHFTKVEMFGVTGPGLEQSSQLLEEFLSLQMEILTELGLHFRVLDMPTQELGLPAYRKFDIEAWMPGRGRFGEVTSASNCTDFQSRRLHIMFQTEAGELQFAHTVNATACAVPRLLIALLESNQQKDGSVLVPPALQSYLGTDRITAPTHVPLQYIGPNQPRKPGLPGQPAVS

SEQ ID NO: 20347 - protein, 588 aa, Homo sapiens; identical to SEQ ID NO: 20346
  Payload ID: 4075
  Gene Symbol:
  Gene Name: CTC-360G5.8
  ENSP ID: ENSP00000488961
  MOD_RES (1)..(1): Any amino acid

SEQ ID NO: 20348 - protein, 188 aa, Homo sapiens
  Payload ID: 4076
  Gene Symbol:
  Gene Name: CTC-398G3.6
  ENSP ID: ENSP00000466387
  MOD_RES (1)..(1): Any amino acid
XRKARGRPRLTESDRARRRLESRKKYDVRRVYLGEAHGPWVDLRRRSGWSDAKLAAYLISLERGQRSGRHGKPWEQVPKKPKRKKRRRRNVNCLKNVVIWYEDHKHRCPYEPHLAELDPTFGLYTTAVWQCEAGHRYFQDLHSPLKPLSDSDPDSDKADTGGHGVSGGGGPGRPGPAQRATPWYKWSH

SEQ ID NO: 20349 - protein, 62 aa, Homo sapiens
  Payload ID: 4077
  Gene Symbol:
  Gene Name: CTC-429P9.4
  ENSP ID: ENSP00000470086
GDILLFGTLLMNAGAVLNFKLKKKDTQGFGEESREPSTDPEHGGGAGSHLQPGEIPYYQRGT

SEQ ID NO: 20350 - protein, 49 aa, Homo sapiens
  Payload ID: 4077
  Gene Symbol:
  Gene Name: CTC-429P9.4
  ENSP ID: ENSP00000470469
MIGDILLFGTLLMNAGAVLNFKLKKKDTQGFGEESREPSTGCSALESQR

SEQ ID NO: 20351 - protein, 73 aa, Homo sapiens
  Payload ID: 4077
  Gene Symbol:
  Gene Name: CTC-429P9.4
  ENSP ID: ENSP00000471649
GDILLFGTLLMNAGAVLNFKLKKKDTQGFGEESREPSTGDNIREFLLSLRYFRIFIALWNIFMMFCMIVLFGS

SEQ ID NO: 20352 - protein, 73 aa, Homo sapiens; identical to SEQ ID NO: 20351
  Payload ID: 4077
  Gene Symbol:
  Gene Name: CTC-429P9.4
  ENSP ID: ENSP00000472547

SEQ ID NO: 20353 - protein, 63 aa, Homo sapiens
  Payload ID: 4077
  Gene Symbol:
  Gene Name: CTC-429P9.4
  ENSP ID: ENSP00000472751
MNAGAVLNFKLKKKDTQGFGEESREPSTGDNIREFLLSLRYFRIFIALWNIFMMFCMIVLFGS

SEQ ID NO: 20354 - protein, 49 aa, Homo sapiens; identical to SEQ ID NO: 20350
  Payload ID: 4077
  Gene Symbol:
  Gene Name: CTC-429P9.4
  ENSP ID: ENSP00000472877

SEQ ID NO: 20355 - protein, 1651 aa, Homo sapiens
  Payload ID: 4078
  Gene Symbol:
  Gene Name: CTC-432M15.3
  ENSP ID: ENSP00000426948
MAPTLFQKLFSKRTGLGAPGRDARDPDCGFSWPLPEFDPSQIRLIVYQDCERRGRNVLFDSSVKRRNEDISVSDLNTIYSYLHGMEILSNLREHQLRLMSARARYERYSGNQVLFCSETIARCWYILLSGSVLVKGSMVLPPCSFGKQFGGKRGCDCLVLEPSEMIVVENAKDNEDSILQREIPARQSRRRFRKINYKGERQTITDDVEVNSYLSLPADLTKMHLTENPHPQVTHVSSSQSGCSIASDSGSSSLSDIYQATESEVGDVDLTRLPEGPVDSEDDEEEDEEIDRTDPLQGRDLVRECLEKEPADKTDDDIEQLLEFMHQLPAFANMTMSVRRELCSVMIFEVVEQAGAIILEDGQELDSWYVILNGTVEISHPDGKVENLFMGNSFGITPTLDKQYMHGIVRTKVDDCQFVCIAQQDYWRILNHVEKNTHKVEEEGEIVMVHEHRELDRSGTRKGHIVIKATPERLIMHLIEEHSIVDPTYIEDFLLTYRTFLESPLDVGIKLLEWFKIDSLRDKVTRIVLLWVNNHFNDFEGDPAMTRFLEEFEKNLEDTKMNGHLRLLNIACAAKAKWRQVVLQKASRESPLQFSLNGGSEKGFGIFVEGVEPGSKAADSGLKRGDQIMEVNGQNFENITFMKAVEILRNNTHLALTVKTNIFVFKELLFRTEQEKSGVPHIPKIAEKKSNRHSIQHVPGDIEQTSQEKGSKKVKANTVSGGRNKIRKILDKTRFSILPPKLFSDGGLSQSQDDSIVGTRHCRHSLAIMPIPGTLSSSSPDLLQPTTSMLDFSNPSDIPDQVIRVFKVDQQSCYIIISKDTTAKEVVFHAVHEFGLTGASDTYSLCEVSVTPEGVIKQRRLPDQFSKLADRIQLNGRYYLKNNMETETLCSDEDAQELVKESQLSMLQLSTIEVATQLSMRDFDLFRNIEPTEYIDDLFKLNSKTGNTHLKRFEDIVNQETFWVASEILTEANQLKRMKIIKHFIKIALHCRECKNFNSMFAIISGLNLASVARLRGTWEKLPSKYEKHLQDLQDIFDPSRNMAKYRNILSSQSMQPPIIPLFPVVKKDMTFLHEGNDSKVDGLVNFEKLRMISKEIRQVVRMTSANMDPAMMFRQRSLSQGSTNSNMLDVQGGAHKKRARRSSLLNAKKLYEDAQMARKVKQYLSSLDVETDEEKFQMMSLQWEPAYGTLTKNLSEKRSAKSSEMSPVPMRSAGQTTKAHLHQPHRVSQVLQVPAVNLHPIRKKGQTKDPALNTSLPQKVLGTTEEISGKKHTEDTISVASSLHSSPPASPQGSPHKGYTLIPSAKSDNLSDSSHSEISSRSSIVSNCSVDSMSAALQDERCSSQALAVPESTGALEKTEHASGIGDHSQHGPGWTLLKPSLIKCLAVSSSVSNEEISQEHIIIEAADSGRGSWTSCSSSSHDNFQSLPNPKSWDFLNSYRHTHLDDPIAEVEPTDSEPYSCSKSCSRTCGQCKGSLERKSWTSSSSLSDTYEPNYGTVKQRVLESTPAESSEGLDPKDATDPVYKTVTSSTEKGLIVYCVTSPKKDDRYREPPPTPPGYLGISLADLKEGPHTHLKPPDYSVAVQRSKMMHNSLSRLPPASLSSNLVACVPSKIVTQPQRHNLQPFHPKLGDVTDADSEADENEQVSAV

SEQ ID NO: 20356 - protein, 479 aa, Homo sapiens
  Payload ID: 4079
  Gene Symbol:
  Gene Name: CTC-435M10.3
  ENSP ID: ENSP00000443246
MDSPSLRELQQPLLEGTECETPAQKPGRHELGSPLREIAFAESLRGLQFLSPPLPSVSAGLGEPRPPDVEHPPRQQQQFSSLDDKPQFPGASAEFIDKLEFIQPNVISGIPIYRVMDRQGQIINPSEDPHLPKEKVLKLYKSMTLLNTMDRILYESQRQGRISFYMTNYGEEGTHVGSAAALDNTDLVFGQYREAGVLMYRDYPLELFMAQCYGNISDLGKGRQMPVHYGCKERHFVTISSPLATQIPQAVGAAYAAKRANANRVVICYFGEGAASEGDAHAGFNFAATLECPIIFFCRNNGYAISTPTSEQYRGDGIAARGPGYGIMSIRVDGNDVFAVYNATKEARRRAVAENQPFLIEAMTYRIGHHSTSDDSSAYRSVDEVNYWDKQDHPISRLRHYLLSQGWWDEEQEKAWRKQSRRKVMEAFEQAERKPKPNPNLLFSDVYQEMPAQLRKQQESLARHLQTYGEHYPLDHFDK

SEQ ID NO: 20357 - protein, 120 aa, Homo sapiens
  Payload ID: 4080
  Gene Symbol:
  Gene Name: CTC-454I21.3
  ENSP ID: ENSP00000465212
  MOD_RES (1)..(1): Any amino acid
XLAPEDHGSSYEGSVSFRDVAIDFSREEWRHLDPSQRNLYRDVMLETYSHLLSVGYQVPEAEVVMLEQGKEPWALQGERPRQSCPVTHRLPLPSTMTKSFLDLTRSQADTSAMLVQPPEA

SEQ ID NO: 20358 - protein, 148 aa, Homo sapiens
  Payload ID: 4080
  Gene Symbol:
  Gene Name: CTC-454I21.3
  ENSP ID: ENSP00000465960
MPASWTSPQKSSALAPEDHGSSYEGSVSFRDVAIDFSREEWRHLDLSQRNLYRDVMLETYSHLLSVGYQVPKPEVVMLEQGKEPWALQGERPRHSCPGFWVSLGSPWARFSSRLQPISSEQLCLSSQMTAKLQTPYRKRVETQCGHAS

SEQ ID NO: 20359 - protein, 56 aa, Homo sapiens
  Payload ID: 4080
  Gene Symbol:
  Gene Name: CTC-454I21.3
  ENSP ID: ENSP00000467945
MPASWTSPQKSSALAPEDHGSSYEVYRYHFQRNDVLSPISTINMHHKRQTVISECS

SEQ ID NO: 20360 - protein, 77 aa, Homo sapiens
  Payload ID: 4081
  Gene Symbol:
  Gene Name: CTC-479C5.12
  ENSP ID: ENSP00000463376
  MOD_RES (1)..(1): Any amino acid
XQLYGVHPHGSYSRLPFTALGSGQDAALAVLEDRFQPNMTVSGLCPRLCGRWWDVHPGAGGAQDPGPVRVAKACRRR

SEQ ID NO: 20361 - protein, 123 aa, Homo sapiens
  Payload ID: 4082
  Gene Symbol:
  Gene Name: CTC-479C5.6
  ENSP ID: ENSP00000488973
MTDRILYIVSNMSSVPWEGSAAAAVPATSPPTPGHYHVLYRGCGETQVGWHGETYCLVGGYRVHGDAPLATPTKAEAEKPAPRRAPKRRQATIESDKDLGCSSPKIRRLEHRGRRLTPQKLAG

SEQ ID NO: 20362 - protein, 43 aa, Homo sapiens
  Payload ID: 4083
  Gene Symbol:
  Gene Name: CTC-487M23.8
  ENSP ID: ENSP00000424153
MACAAARSPADQDRFICIYPAYLNNKKTIAEGRRIPISKCLCF

SEQ ID NO: 20363 - protein, 66 aa, Homo sapiens
  Payload ID: 4084
  Gene Symbol:
  Gene Name: CTC-490E21.12
  ENSP ID: ENSP00000469533
  MOD_RES (1)..(1): Any amino acid
XVEGHEPGCRSIGALMAHVDAVIRHCAGRLGSYVINGRTKLREKYSPVFTVYMGPGQWWFYVDTKQ

SEQ ID NO: 20364 - protein, 159 aa, Homo sapiens
  Payload ID: 4085
  Gene Symbol:
  Gene Name: CTC-512J12.6
  ENSP ID: ENSP00000468271
MIKFQMVTFKDVAVVFTEEELGLLDSVQRKLYRDVMLENFRNLLLVAHQPFKPDLISQLEREEKLLMVETETPRDGCSGRKNQQKMESIQEVTVSYFSPKELSSRQTWQQSAGGLIRCQDFLKVFQGKNSQLQEQGNSLGQVWAGIPVQISEDKNYIFT

SEQ ID NO: 20365 - protein, 250 aa, Homo sapiens
  Payload ID: 4086
  Gene Symbol:
  Gene Name: CTC-534A2.2
  ENSP ID: ENSP00000424007
MTTEVILHYRPCESDPTQLPKIAEKAIQDFPTRPLSRFIPWFPYDGSKLPLRPKRSPPVISEEAAEDVKQYLTISEHDAKSHSYDCTVDLLEFQPSLKKQHLTWSHTLKEQTNSGNLGKQSEKGKQHKRRSWSISLPSNNCTKNVSPLSKKLQDSLKALNLHSLYRARWTIEHTICNSQTLEDIWTKLNQIIRHNELPSCNATIQRHLGQIWVFCDIMYCEYVGSLLKGRLALTGKINLFVHKYGVIFSM

SEQ ID NO: 20366 - protein, 4 aa, Homo sapiens
  Payload ID: 4086
  Gene Symbol:
  Gene Name: CTC-534A2.2
  ENSP ID: ENSP00000485631
MTTE

SEQ ID NO: 20367 - protein, 94 aa, Homo sapiens
  Payload ID: 4087
  Gene Symbol:
  Gene Name: CTC-554D6.1
  ENSP ID: ENSP00000454861
  MOD_RES (1)..(1): Any amino acid
XTNLTFGDVANKATLCSMKGCMRALVAQLKSESEDLQQVIASVLRNLSWRADVNSKKTLREVGSVKALMECALEVKKMALQKQFHGLFVSILLI

SEQ ID NO: 20368 - protein, 867 aa, Homo sapiens
  Payload ID: 4088
  Gene Symbol: CTDP1
  Gene Name: CTD (carboxy-terminal domain, RNA polymerase II, polypeptide A) phosphatase, subunit 1
  Uniprot ID: Q9Y5B0
  ENSP ID: ENSP00000075430
MEVPAAGRVPAEGAPTAAVAEVRCPGPAPLRLLEWRVAAGAAVRIGSVLAVFEAAASAQSSGASQSRVASGGCVRPARPERRLRSERAGVVRELCAQPGQVVAPGAVLVRLEGCSHPVVMKGLCAECGQDLTQLQSKNGKQQVPLSTATVSMVHSVPELMVSSEQAEQLGREDQQRLHRNRKLVLMVDLDQTLIHTTEQHCQQMSNKGIFHFQLGRGEPMLHTRLRPHCKDFLEKIAKLYELHVFTFGSRLYAHTIAGFLDPEKKLFSHRILSRDECIDPFSKTGNLRNLFPCGDSMVCIIDDREDVWKFAPNLITVKKYVYFQGTGDMNAPPGSRESQTRKKVNHSRGTEVSEPSPPVRDPEGVTQAPGVEPSNGLEKPARELNGSEAATPRDSPRPGKPDERDIWPPAQAPTSSQELAGAPEPQGSCAQGGRVAPGQRPAQGATGTDLDFDLSSDSESSSESEGTKSSSSASDGESEGKRGRQKPKAAPEGAGALAQGSSLEPGRPAAPSLPGEAEPGAHAPDKEPELGGQEEGERDGLCGLGNGCADRKEAETESQNSELSGVTAGESLDQSMEEEEEEDTDEDDHLIYLEEILVRVHTDYYAKYDRYLNKEIEEAPDIRKIVPELKSKVLADVAIIFSGLHPTNFPIEKTREHYHATALGAKILTRLVLSPDAPDRATHLIAARAGTEKVLQAQECGHLHVVNPDWLWSCLERWDKVEEQLFPLRDDHTKAQRENSPAAFPDREGVPPTALFHPMPVLPKAQPGPEVRIYDSNTGKLIRTGARGPPAPSSSLPIRQEPSSFRWTTSLEKAATTATARRGGLRSRRRSPSPGSQGPAGSGRSGHLRPARGARQGAGGPEATRGS

SEQ ID NO: 20369 - protein, 842 aa, Homo sapiens
  Payload ID: 4088
  Gene Symbol: CTDP1
  Gene Name: CTD (carboxy-terminal domain, RNA polymerase II, polypeptide A) phosphatase, subunit 1
  ENSP ID: ENSP00000299543
MKGLCAECGQDLTQLQSKNGKQQVPLSTATVSMVHSVPELMVSSEQAEQLGREDQQRLHRNRKLVLMVDLDQTLIHTTEQHCQQMSNKGIFHFQLGRGEPMLHTRLRPHCKDFLEKIAKLYELHVFTFGSRLYAHTIAGFLDPEKKLFSHRILSRDECIDPFSKTGNLRNLFPCGDSMVCIIDDREDVWKFAPNLITVKKYVYFQGTGDMNAPPGSRESQTRKKVNHSRGTEVSEPSPPVRDPEGVTQAPGVEPSNGLEKPARELNGSEAATPRDSPRPGKPDERDIWPPAQAPTSSQELAGAPEPQGSCAQGGRVAPGQRPAQGATGTDLDFDLSSDSESSSESEGTKSSSSASDGESEGKRGRQKPKAAPEGAGALAQGSSLEPGRPAAPSLPGEAEPGAHAPDKEPELGGQEEGERDGLCGLGNGCADRKEAETESQNSELSGVTAGESLDQSMEEEEEEDTDEDDHLIYLEEILVRVHTDYYAKYDRYLNKEIEEAPDIRKIVPELKSKVLADVAIIFSGLHPTNFPIEKTREHYHATALGAKILTRLVLSPDAPDRATHLIAARAGTEKVLQAQECGHLHVVNPDWLWSCLERWDKVEEQLFPLRDDHTKAQRENSPAAFPDREGVPPTALFHPMPVLPKAQPGPEVRIYDSNTGKLIRTGARGPPAPSSSLPIRQEPSSFRAVPPPQPQMFGEELPDAQDGEQPGPSRRKRQPSMSETMPLYTLCKEDLESMDKEVDDILGEGSDDSDSEKRRPEEQEEEPQPRKPGTRRERTLGAPASSERSAAGGRGPRGHKRKLNEEDAASESSRESSNEDEGSSSEADEMAKALEAELNDLM

SEQ ID NO: 20370 - protein, 799 aa, Homo sapiens
  Payload ID: 4088
  Gene Symbol: CTDP1
  Gene Name: CTD (carboxy-terminal domain, RNA polymerase II, polypeptide A) phosphatase, subunit 1
  ENSP ID: ENSP00000465119
ASGGCVRPARPERRLRSERAGVVRELCAQPGQVVAPGAVLVRLEGCSHPVVMKGLCAECGQDLTQLQSKNGKQQVPLSTATVSMVHSVPELMVSSEQAEQLGREDQQRLHRNRKLVLMVDLDQTLIHTTEQHCQQMSNKGIFHFQLGRGEPMLHTRLRPHCKDFLEKIAKLYELHVFTFGSRLYAHTIAGFLDPEKKLFSHRILSRDECIDPFSKTGNLRNLFPCGDSMVCIIDDREDVWKFAPNLITVKKYVYFQGTGDMNAPPGSRESQTRKKVNHSRGTEVSEPSPPVRDPEGVTQAPGVEPSNGLEKPARELNGSEAATPRDSPRPGKPDERDIWPPAQAPTSSQELAGAPEPQGSCAQGGRVAPGQRPAQGATGTDLDFDLSSDSESSSESEGTKSSSSASDGESEGKRGRQKPKAAPEGAGALAQGSSLEPGRPAAPSLPGEAEPGAHAPDKEPELGGQEEGERDGLCGLGNGCADRKEAETESQNSELSGVTAGESLDQSMEEEEEEDTDEDDHLIYLEEILVRVHTDYYAKYDRYLNKEIEEAPDIRKIVPELKSKVLADVAIIFSGLHPTNFPIEKTREHYHATALGAKILTRLVLSPDAPDRATHLIAARAGTEKVLQAQECGHLHVVNPDWLWSCLERWDKVEEQLFPLRDDHTKAQRENSPAAFPDREGVPPTALFHPMPVLPKAQPGPEVRIYDSNTGKLIRTGARGPPAPSSSLPIRQEPSSFRAVPPPQPQMFGEELPDAQDGEQPGPSRRKRQPSMSETMPLYTLCKEDLESMDKERPQEEAE

SEQ ID NO: 20371 - protein, 78 aa, Homo sapiens
  Payload ID: 4088
  Gene Symbol: CTDP1
  Gene Name: CTD (carboxy-terminal domain, RNA polymerase II, polypeptide A) phosphatase, subunit 1
  ENSP ID: ENSP00000467563
MKGLCAECGQDLTQLQSKNGKQQVPLSTATVSMVHSVPELMVSSEQAEQLGREDQQRLHRNRKLVLMVDLDQTLIHTT

SEQ ID NO: 20372 - protein, 961 aa, Homo sapiens
  Payload ID: 4088
  Gene Symbol: CTDP1
  Gene Name: CTD (carboxy-terminal domain, RNA polymerase II, polypeptide A) phosphatase, subunit 1
  Uniprot ID: Q9Y5B0
  ENSP ID: ENSP00000484525
MEVPAAGRVPAEGAPTAAVAEVRCPGPAPLRLLEWRVAAGAAVRIGSVLAVFEAAASAQSSGASQSRVASGGCVRPARPERRLRSERAGVVRELCAQPGQVVAPGAVLVRLEGCSHPVVMKGLCAECGQDLTQLQSKNGKQQVPLSTATVSMVHSVPELMVSSEQAEQLGREDQQRLHRNRKLVLMVDLDQTLIHTTEQHCQQMSNKGIFHFQLGRGEPMLHTRLRPHCKDFLEKIAKLYELHVFTFGSRLYAHTIAGFLDPEKKLFSHRILSRDECIDPFSKTGNLRNLFPCGDSMVCIIDDREDVWKFAPNLITVKKYVYFQGTGDMNAPPGSRESQTRKKVNHSRGTEVSEPSPPVRDPEGVTQAPGVEPSNGLEKPARELNGSEAATPRDSPRPGKPDERDIWPPAQAPTSSQELAGAPEPQGSCAQGGRVAPGQRPAQGATGTDLDFDLSSDSESSSESEGTKSSSSASDGESEGKRGRQKPKAAPEGAGALAQGSSLEPGRPAAPSLPGEAEPGAHAPDKEPELGGQEEGERDGLCGLGNGCADRKEAETESQNSELSGVTAGESLDQSMEEEEEEDTDEDDHLIYLEEILVRVHTDYYAKYDRYLNKEIEEAPDIRKIVPELKSKVLADVAIIFSGLHPTNFPIEKTREHYHATALGAKILTRLVLSPDAPDRATHLIAARAGTEKVLQAQECGHLHVVNPDWLWSCLERWDKVEEQLFPLRDDHTKAQRENSPAAFPDREGVPPTALFHPMPVLPKAQPGPEVRIYDSNTGKLIRTGARGPPAPSSSLPIRQEPSSFRAVPPPQPQMFGEELPDAQDGEQPGPSRRKRQPSMSETMPLYTLCKEDLESMDKEVDDILGEGSDDSDSEKRRPEEQEEEPQPRKPGTRRERTLGAPASSERSAAGGRGPRGHKRKLNEEDAASESSRESSNEDEGSSSEADEMAKALEAELNDLM

SEQ ID NO: 20373 - protein, 805 aa, Homo sapiens
  Payload ID: 4088
  Gene Symbol: CTDP1
  Gene Name: CTD (carboxy-terminal domain, RNA polymerase II, polypeptide A) phosphatase, subunit 1
  ENSP ID: ENSP00000487888
MEVPAAGRVPAEGAPTAAVAEVRCPGPAPLRLLEWRVAAGAAVRIGSVLAVFEAAASAQSSGASQSRVASGGCVRPARPERRLRSERAGVVRELCAQPGQVVAPGAVLVRLEGCSHPVVMKGLCAECGQDLTQLQSKNGKQQVPLSTATVSMVHSVPELMVSSEQAEQLGREDQQRLHRNRKLVLMVDLDQTLIHTTEQHCQQMSNKGIFHFQLGRGEPMLHTRLRPHCKDFLEKIAKLYELHVFTFGSRLYAHTIAGFLDPEKKLFSHRILSRDECIDPFSKTGNLRNLFPCGDSMVCIIDDREDVWKFAPNLITVKKYVYFQGTGDMNAPPGSRESQTRKKVNHSRGTEVSEPSPPVRDPEGVTQAPGVEPSNGLEKPARELNGSEAATPRDSPRPGKPDERDIWPPAQAPTSSQELAGAPEPQGSCAQGGRVAPGQRPAQGATGTDLDFDLSSDSESSSESEGTKSSSSASDGESEGKRGRQKPKAAPEGAGALAQGSSLEPGRPAAPSLPGEAEPGAHAPDKEPELGGQEEGERDGLCGLGNGCADRKEAETESQNSELSGVTAGESLDQSMEEEEEEDTDEDDHLIYLEEILVRVHTDYYAKYDRYLNKEIEEAPDIRKIVPELKSKVLADVAIIFSGLHPTNFPIEKTREHYHATALGAKILTRLVLSPDAPDRATHLIAARAGTEKVLQAQECGHLHVVNPDWLWSCLERWDKVEEQLFPLRDDHTKAQRENSPAAFPDREGVPPTALFHPMPVLPKAQPGPEVRIYDSNTGKLIRTGARGPPAPSSSLPIRQEPSSF

SEQ ID NO: 20374 - protein, 805 aa, Homo sapiens; identical to SEQ ID NO: 20373
  Payload ID: 4088
  Gene Symbol: CTDP1
  Gene Name: CTD (carboxy-terminal domain, RNA polymerase II, polypeptide A) phosphatase, subunit 1
  ENSP ID: ENSP00000487949

SEQ ID NO: 20375 - protein, 737 aa, Homo sapiens
  Payload ID: 4088
  Gene Symbol: CTDP1
  Gene Name: CTD (carboxy-terminal domain, RNA polymerase II, polypeptide A) phosphatase, subunit 1
  ENSP ID: ENSP00000487989
ASGGCVRPARPERRLRSERAGVVRELCAQPGQVVAPGAVLVRLEGCSHPVVMKGLCAECGQDLTQLQSKNGKQQVPLSTATVSMVHSVPELMVSSEQAEQLGREDQQRLHRNRKLVLMVDLDQTLIHTTEQHCQQMSNKGIFHFQLGRGEPMLHTRLRPHCKDFLEKIAKLYELHVFTFGSRLYAHTIAGFLDPEKKLFSHRILSRDECIDPFSKTGNLRNLFPCGDSMVCIIDDREDVWKFAPNLITVKKYVYFQGTGDMNAPPGSRESQTRKKVNHSRGTEVSEPSPPVRDPEGVTQAPGVEPSNGLEKPARELNGSEAATPRDSPRPGKPDERDIWPPAQAPTSSQELAGAPEPQGSCAQGGRVAPGQRPAQGATGTDLDFDLSSDSESSSESEGTKSSSSASDGESEGKRGRQKPKAAPEGAGALAQGSSLEPGRPAAPSLPGEAEPGAHAPDKEPELGGQEEGERDGLCGLGNGCADRKEAETESQNSELSGVTAGESLDQSMEEEEEEDTDEDDHLIYLEEILVRVHTDYYAKYDRYLNKEIEEAPDIRKIVPELKSKVLADVAIIFSGLHPTNFPIEKTREHYHATALGAKILTRLVLSPDAPDRATHLIAARAGTEKVLQAQECGHLHVVNPDWLWSCLERWDKVEEQLFPLRDDHTKAQRENSPAAFPDREGVPPTALFHPMPVLPKAQPGPEVRIYDSNTGKLIRTGARGPPAPSSSLPIRQEPSSF

SEQ ID NO: 20376 - protein, 78 aa, Homo sapiens; identical to SEQ ID NO: 20371
  Payload ID: 4088
  Gene Symbol: CTDP1
  Gene Name: CTD (carboxy-terminal domain, RNA polymerase II, polypeptide A) phosphatase, subunit 1
  ENSP ID: ENSP00000488566

SEQ ID NO: 20377 - protein, 261 aa, Homo sapiens
  Payload ID: 4089
  Gene Symbol: CTDSP1
  Gene Name: CTD (carboxy-terminal domain, RNA polymerase II, polypeptide A) small phosphatase 1
  Uniprot ID: Q9GZU7
  ENSP ID: ENSP00000273062
MDSSAVITQISKEEARGPLRGKGDQKSAASQKPRSRGILHSLFCCVCRDDGEALPAHSGAPLLVEENGAIPKQTPVQYLLPEAKAQDSDKICVVIDLDETLVHSSFKPVNNADFIIPVEIDGVVHQVYVLKRPHVDEFLQRMGELFECVLFTASLAKYADPVADLLDKWGAFRARLFRESCVFHRGNYVKDLSRLGRDLRRVLILDNSPASYVFHPDNAVPVASWFDNMSDTELHDLLPFFEQLSRVDDVYSVLRQPRPGS

SEQ ID NO: 20378 - protein, 260 aa, Homo sapiens
  Payload ID: 4089
  Gene Symbol: CTDSP1
  Gene Name: CTD (carboxy-terminal domain, RNA polymerase II, polypeptide A) small phosphatase 1
  Uniprot ID: Q9GZU7
  ENSP ID: ENSP00000392248
MVAAPWATQEQEEGRGIQPGDRGDQKSAASQKPRSRGILHSLFCCVCRDDGEALPAHSGAPLLVEENGAIPKTPVQYLLPEAKAQDSDKICVVIDLDETLVHSSFKPVNNADFIIPVEIDGVVHQVYVLKRPHVDEFLQRMGELFECVLFTASLAKYADPVADLLDKWGAFRARLFRESCVFHRGNYVKDLSRLGRDLRRVLILDNSPASYVFHPDNAVPVASWFDNMSDTELHDLLPFFEQLSRVDDVYSVLRQPRPGS

SEQ ID NO: 20379 - protein, 262 aa, Homo sapiens
  Payload ID: 4089
  Gene Symbol: CTDSP1
  Gene Name: CTD (carboxy-terminal domain, RNA polymerase II, polypeptide A) small phosphatase 1
  ENSP ID: ENSP00000403256
  MOD_RES (1)..(1): Any amino acid
XLNSEEAQRRGAGPGAFGALLFARGDQKSAASQKPRSRGILHSLFCCVCRDDGEALPAHSGAPLLVEENGAIPKTPVQYLLPEAKAQDSDKICVVIDLDETLVHSSFKPVNNADFIIPVEIDGVVHQVYVLKRPHVDEFLQRMGELFECVLFTASLAKYADPVADLLDKWGAFRARLFRESCVFHRGNYVKDLSRLGRDLRRVLILDNSPASYVFHPDNAVPVASWFDNMSDTELHDLLPFFEQLSRVDDVYSVLRQPRPGS

SEQ ID NO: 20380 - protein, 254 aa, Homo sapiens
  Payload ID: 4089
  Gene Symbol: CTDSP1
  Gene Name: CTD (carboxy-terminal domain, RNA polymerase II, polypeptide A) small phosphatase 1
  ENSP ID: ENSP00000404301
  MOD_RES (1)..(1): Any amino acid
XRGPLRGKGDQKSAASQKPRSRGILHSLFCCVCRDDGEALPAHSGAPLLVEENGAIPKTPVQYLLPEAKAQDSDKICVVIDLDETLVHSSFKPVNNADFIIPVEIDGVVHQPPHWPAPQVYVLKRPHVDEFLQRMGELFECVLFTASLAKYADPVADLLDKWGAFRARLFRESCVFHRGNYVKDLSRLGRDLRRVLILDNSPASYVFHPDNAVPVASWFDNMSDTELHDLLPFFEQLSRVDDVYSVLRQPRPGS

SEQ ID NO: 20381 - protein, 195 aa, Homo sapiens
  Payload ID: 4089
  Gene Symbol: CTDSP1
  Gene Name: CTD (carboxy-terminal domain, RNA polymerase II, polypeptide A) small phosphatase 1
  ENSP ID: ENSP00000411308
  MOD_RES (1)..(1): Any amino acid
XRRRPPRRHREDGRHFQESLGARGESRAPSGHAPPRKASPPRRGCVPQRGWAGVGGSVFSFSPCGPQDLDAAPRSAHPRLGLAAPELRARWKGDQKSAASQKPRSRGILHSLFCCVCRDDGEALPAHSGAPLLVEENGAIPKTPVQYLLPEAKAQDSDKICVVIDLDETLVHSSFKPVNNADFIIPVEIDGVVHQ

SEQ ID NO: 20382 - protein, 271 aa, Homo sapiens
  Payload ID: 4090
  Gene Symbol: CTDSP2
  Gene Name: CTD (carboxy-terminal domain, RNA polymerase II, polypeptide A) small phosphatase 2
  Uniprot ID: O14595
  ENSP ID: ENSP00000381148
MEHGSIITQARREDALVLTKQGLVSKSSPKKPRGRNIFKALFCCFRAQHVGQSSSSTELAAYKEEANTIAKSDLLQCLQYQFYQIPGTCLLPEVTEEDQGRICVVIDLDETLVHSSFKPINNADFIVPIEIEGTTHQVYVLKRPYVDEFLRRMGELFECVLFTASLAKYADPVTDLLDRCGVFRARLFRESCVFHQGCYVKDLSRLGRDLRKTLILDNSPASYIFHPENAVPVQSWFDDMADTELLNLIPIFEELSGAEDVYTSLGQLRAP

SEQ ID NO: 20383 - protein, 119 aa, Homo sapiens
  Payload ID: 4090
  Gene Symbol: CTDSP2
  Gene Name: CTD (carboxy-terminal domain, RNA polymerase II, polypeptide A) small phosphatase 2
  ENSP ID: ENSP00000446705
MGELFECVLFTASLAKYADPVTDLLDRCGVFRARLFRESCVFHQGCYVKDLSRLGRDLRKTLILDNSPASYIFHPENAVPVQSWFDDMADTELLNLIPIFEELSGAEDVYTSLGQLRAP

SEQ ID NO: 20384 - protein, 98 aa, Homo sapiens
  Payload ID: 4090
  Gene Symbol: CTDSP2
  Gene Name: CTD (carboxy-terminal domain, RNA polymerase II, polypeptide A) small phosphatase 2
  ENSP ID: ENSP00000447046
MEHGSIITQARREDALVLTKQGLVSKSSPKKPRGRNIFKTLILDNSPASYIFHPENAVPVQSWFDDMADTELLNLIPIFEELSGAEDVYTSLGQLRAP

SEQ ID NO: 20385 - protein, 182 aa, Homo sapiens
  Payload ID: 4090
  Gene Symbol: CTDSP2
  Gene Name: CTD (carboxy-terminal domain, RNA polymerase II, polypeptide A) small phosphatase 2
  ENSP ID: ENSP00000448299
  MOD_RES (1)..(1): Any amino acid
XFKALFCCFRAQHVGQSSSSTELAAYKEEANTIAKSDLLQCLQYQFYQVRDSGLIPGTCLLPEVTEEDQGRICVVIDLDETLVHSSFKPINNADFIVPIEIEGTTHQVYVLKRPYVDEFLRRMGELFECVLFTASLAKYADPVTDLLDRCGVFRARLFRESCVFHQGCYVKDLSRLGRDLRK

SEQ ID NO: 20386 - protein, 125 aa, Homo sapiens
  Payload ID: 4090
  Gene Symbol: CTDSP2
  Gene Name: CTD (carboxy-terminal domain, RNA polymerase II, polypeptide A) small phosphatase 2
  ENSP ID: ENSP00000448386
PINNADFIVPIEIEGTTHQVYVLKRPYVDEFLRRMGELFECVLFTASLAKGCYVKDLSRLGRDLRKTLILDNSPASYIFHPENAVPVQSWFDDMADTELLNLIPIFEELSGAEDVYTSLGQLRAP

SEQ ID NO: 20387 - protein, 102 aa, Homo sapiens
  Payload ID: 4090
  Gene Symbol: CTDSP2
  Gene Name: CTD (carboxy-terminal domain, RNA polymerase II, polypeptide A) small phosphatase 2
  ENSP ID: ENSP00000448951
MEHGSIITQARREDALVLTKQGLVSKSSPKKPRGRNIFKALFCCFRAQHVGQSSSSTELAAYKEEANTIAKSDLLQCLQYQFYQISATWLGFRSQGPACSQR

SEQ ID NO: 20388 - protein, 282 aa, Homo sapiens
  Payload ID: 4090
  Gene Symbol: CTDSP2
  Gene Name: CTD (carboxy-terminal domain, RNA polymerase II, polypeptide A) small phosphatase 2
  ENSP ID: ENSP00000480551
MEHGSIITQARREDALVLTKQGLVSKSSPKKPRGRNIFKALFCCFRAQHVGQSSSSTELAAYKEEANTIAKSDLLQCLQYQFYQIPGTCLLPEVTEEDQGRICVVIDLDETLVHSSFKPINNADFIVPIEIEGTTHQVYVLKRPYVDEFLRRMGELFECVLFTASLAKYADPVTDLLDRCGVFRARLFRESCVFHQGCYVKDLSRLGRDLRKTLILDNSPASYIFHPENAVPVQSWFDDMADTELLNLIPIFEELSGAEDVYTSLGAAGPLACPASKRRPSQ

SEQ ID NO: 20389 - protein, 466 aa, Homo sapiens
  Payload ID: 4091
  Gene Symbol: CTDSPL2
  Gene Name: CTD (carboxy-terminal domain, RNA polymerase II, polypeptide A) small phosphatase like 2
  Uniprot ID: Q05D32
  ENSP ID: ENSP00000260327
MRLRTRKASQQSNQIQTQRTARAKRKYSEVDDSLPSGGEKPSKNETGLLSSIKKFIKGSTPKEERENPSKRSRIERDIDNNLITSTPRAGEKPNKQISRVRRKSQVNGEAGSYEMTNQHVKQNGKLEDNPSSGSPPRTTLLGTIFSPVFNFFSPANKNGTSGSDSPGQAVEAEEIVKQLDMEQVDEITTSTTTSTNGAAYSNQAVQVRPSLNNGLEEAEETVNRDIPPLTAPVTPDSGYSSAHAEATYEEDWEVFDPYYFIKHVPPLTEEQLNRKPALPLKTRSTPEFSLVLDLDETLVHCSLNELEDAALTFPVLFQDVIYQVYVRLRPFFREFLERMSQMYEIILFTASKKVYADKLLNILDPKKQLVRHRLFREHCVCVQGNYIKDLNILGRDLSKTIIIDNSPQAFAYQLSNGIPIESWFMDKNDNELLKLIPFLEKLVELNEDVRPHIRDRFRLHDLLPPD

SEQ ID NO: 20390 - protein, 466 aa, Homo sapiens; identical to SEQ ID NO: 20389
  Payload ID: 4091
  Gene Symbol: CTDSPL2
  Gene Name: CTD (carboxy-terminal domain, RNA polymerase II, polypeptide A) small phosphatase like 2
  Uniprot ID: Q05D32
  ENSP ID: ENSP00000452837

SEQ ID NO: 20391 - protein, 394 aa, Homo sapiens
  Payload ID: 4091
  Gene Symbol: CTDSPL2
  Gene Name: CTD (carboxy-terminal domain, RNA polymerase II, polypeptide A) small phosphatase like 2
  Uniprot ID: Q05D32
  ENSP ID: ENSP00000453051
MRLRTRKASQQSNQIQTQRTARAKRKYSEVDDSLPSGGEKPSKNETGLLSSIKKFIKGSTPKEERENPSKRSRIERDIDNNLITSTPRAGEKPNKQISRVRRKSQVNGEAGSYEMTNQHVKQNGKLEDNPSSGSPPRTTLLGTIFSPVFNFFSPANKNAPVTPDSGYSSAHAEATYEEDWEVFDPYYFIKHVPPLTEEQLNRKPALPLKTRSTPEFSLVLDLDETLVHCSLNELEDAALTFPVLFQDVIYQVYVRLRPFFREFLERMSQMYEIILFTASKKVYADKLLNILDPKKQLVRHRLFREHCVCVQGNYIKDLNILGRDLSKTIIIDNSPQAFAYQLSNGIPIESWFMDKNDNELLKLIPFLEKLVELNEDVRPHIRDRFRLHDLLPPD

SEQ ID NO: 20392 - protein, 86 aa, Homo sapiens
  Payload ID: 4091
  Gene Symbol: CTDSPL2
  Gene Name: CTD (carboxy-terminal domain, RNA polymerase II, polypeptide A) small phosphatase like 2
  ENSP ID: ENSP00000453538
  MOD_RES (1)..(1): Any amino acid
XYYFIKHVPPLTEEQLNRKPALPLKTRSTPEFSLVLDLDETLVHCSLNELEDAALTFPVLFQDVIYQWCCLHLLAKKKYTQGSEMI

SEQ ID NO: 20393 - protein, 165 aa, Homo sapiens
  Payload ID: 4091
  Gene Symbol: CTDSPL2
  Gene Name: CTD (carboxy-terminal domain, RNA polymerase II, polypeptide A) small phosphatase like 2
  ENSP ID: ENSP00000453612
MRLRTRKASQQSNQIQTQRTARAKRKYSEVDDSLPSGGEKPSKNETGLLSSIKKFIKGSTPKEERENPSKRSRIERDIDNNLITSTPRAGEKPNKQISRVRRKSQVNGEAGSYEMTNQHVKQNGKLEDNPSSGSPPRTTLLGTIFSPVFNFFSPANKNGTSGSDS

SEQ ID NO: 20394 - protein, 92 aa, Homo sapiens
  Payload ID: 4091
  Gene Symbol: CTDSPL2
  Gene Name: CTD (carboxy-terminal domain, RNA polymerase II, polypeptide A) small phosphatase like 2
  ENSP ID: ENSP00000454154
MRLRTRKASQQSNQIQTQRTARAKRKYSEVDDSLPSGGEKPSKNETGLLSSIKKFIKGSTPKEERENPSKRSRIERDIDNNLITSTPRAGEK

SEQ ID NO: 20395 - protein, 117 aa, Homo sapiens
  Payload ID: 4091
  Gene Symbol: CTDSPL2
  Gene Name: CTD (carboxy-terminal domain, RNA polymerase II, polypeptide A) small phosphatase like 2
  ENSP ID: ENSP00000454187
MRLRTRKASQQSNQIQTQRTARAKRKYSEVDDSLPSGGEKPSKNETGLLSSIKKFIKGSTPKEERENPSKRSRIERDIDNNLITSTPRAGEKPNKQISRVRRKSQVNGEAGSYEMTN

SEQ ID NO: 20396 - protein, 276 aa, Homo sapiens
  Payload ID: 4092
  Gene Symbol: CTDSPL
  Gene Name: CTD (carboxy-terminal domain, RNA polymerase II, polypeptide A) small phosphatase-like
  Uniprot ID: O15194
  ENSP ID: ENSP00000273179
MDGPAIITQVTNPKEDEGRLPGAGEKASQCNVSLKKQRSRSILSSFFCCFRDYNVEAPPPSSPSVLPPLVEENGGLQKGDQRQVIPIPSPPAKYLLPEVTVLDYGKKCVVIDLDETLVHSSFKPISNADFIVPVEIDGTIHQVYVLKRPHVDEFLQRMGQLFECVLFTASLAKYADPVADLLDRWGVFRARLFRESCVFHRGNYVKDLSRLGRELSKVIIVDNSPASYIFHPENAVPVQSWFDDMTDTELLDLIPFFEGLSREDDVYSMLHRLCNR

SEQ ID NO: 20397 - protein, 265 aa, Homo sapiens
  Payload ID: 4092
  Gene Symbol: CTDSPL
  Gene Name: CTD (carboxy-terminal domain, RNA polymerase II, polypeptide A) small phosphatase-like
  Uniprot ID: O15194
  ENSP ID: ENSP00000398288
MDGPAIITQVTNPKEDEGRLPGAGEKASQCNVSLKKQRSRSILSSFFCCFRDYNVEAPPPSSPSVLPPLVEENGGLQKPPAKYLLPEVTVLDYGKKCVVIDLDETLVHSSFKPISNADFIVPVEIDGTIHQVYVLKRPHVDEFLQRMGQLFECVLFTASLAKYADPVADLLDRWGVFRARLFRESCVFHRGNYVKDLSRLGRELSKVIIVDNSPASYIFHPENAVPVQSWFDDMTDTELLDLIPFFEGLSREDDVYSMLHRLCNR

SEQ ID NO: 20398 - protein, 93 aa, Homo sapiens
  Payload ID: 4092
  Gene Symbol: CTDSPL
  Gene Name: CTD (carboxy-terminal domain, RNA polymerase II, polypeptide A) small phosphatase-like
  ENSP ID: ENSP00000404977
  MOD_RES (1)..(1): Any amino acid
XKYLLPEVTVLDYGKKCVVIDLDETLVHSSFKPISNADFIVPVEIDGTIHQQATGKCHKSPTYGGLSGKSVHFQCQLLQTDLIIPASFSPENL

SEQ ID NO: 20399 - protein, 196 aa, Homo sapiens
  Payload ID: 4092
  Gene Symbol: CTDSPL
  Gene Name: CTD (carboxy-terminal domain, RNA polymerase II, polypeptide A) small phosphatase-like
  ENSP ID: ENSP00000407443
DLDETLVHSSFKPISNADFIVPVEIDGTIHQVYVLKRPHVDEFLQRMGQLFECVLFTASLAKYADPVADLLDRWGVFRARLFRESCVFHRGNYVKDLSRLGRELSKVIIVDNSPASYIFHPENAVPVQSWFDDMTDTELLDLIPFFEGLSREDDVYSMLHRLCNSNEASCQLHPPNSTLVCGLLCEYSEGKSFSAD

SEQ ID NO: 20400 - protein, 55 aa, Homo sapiens
  Payload ID: 4092
  Gene Symbol: CTDSPL
  Gene Name: CTD (carboxy-terminal domain, RNA polymerase II, polypeptide A) small phosphatase-like
  ENSP ID: ENSP00000408183
MDGPAIITQVTNPKEDEGRLPGAGEKDSLSEKGKKTSGRRIRKLSTHLGGRCNPR

SEQ ID NO: 20401 - protein, 103 aa, Homo sapiens
  Payload ID: 4092
  Gene Symbol: CTDSPL
  Gene Name: CTD (carboxy-terminal domain, RNA polymerase II, polypeptide A) small phosphatase-like
  ENSP ID: ENSP00000409600
  MOD_RES (1)..(1): Any amino acid
XSCVFHRGNYVKDLSRLGRELSKVIIVDNSPASYIFHPENAVPVQSWFDDMTDTELLDLIPFFEGLSREDDVYSMLHRLCNSWIHMELFGNFPCCYRAATKWN

SEQ ID NO: 20402 - protein, 244 aa, Homo sapiens
  Payload ID: 4093
  Gene Symbol: CTDNEP1
  Gene Name: CTD nuclear envelope phosphatase 1
  Uniprot ID: O95476
  ENSP ID: ENSP00000321732
MMRTQCLLGLRTFVAFAAKLWSFFIYLLRRQIRTVIQYQTVRYDILPLSPVSRNRLAQVKRKILVLDLDETLIHSHHDGVLRPTVRPGTPPDFILKVVIDKHPVRFFVHKRPHVDFFLEVVSQWYELVVFTASMEIYGSAVADKLDNSRSILKRRYYRQHCTLELGSYIKDLSVVHSDLSSIVILDNSPGAYRSHPDNAIPIKSWFSDPSDTALLNLLPMLDALRFTADVRSVLSRNLHQHRLW

SEQ ID NO: 20403 - protein, 125 aa, Homo sapiens
  Payload ID: 4093
  Gene Symbol: CTDNEP1
  Gene Name: CTD nuclear envelope phosphatase 1
  ENSP ID: ENSP00000458408
MMRTQCLLGLRTFVAFAAKLWSFFIYLLRRQIRTVIQYQTVRYDILPLSPVSRNRLAQVKRKILVLDLDETLIHSHHDGVLRPTVRPGTPPDFILKVVIDKHPVRFFVHKRPHVDFFLEVVSQWY

SEQ ID NO: 20404 - protein, 244 aa, Homo sapiens; identical to SEQ ID NO: 20402
  Payload ID: 4093
  Gene Symbol: CTDNEP1
  Gene Name: CTD nuclear envelope phosphatase 1
  Uniprot ID: O95476
  ENSP ID: ENSP00000458758

SEQ ID NO: 20405 - protein, 202 aa, Homo sapiens
  Payload ID: 4093
  Gene Symbol: CTDNEP1
  Gene Name: CTD nuclear envelope phosphatase 1
  ENSP ID: ENSP00000458763
  MOD_RES (1)..(1): Any amino acid
XQCLLGLRTFVAFAAKLWSFFIYLLRRQIRTVIQYQTVRYDILPLSPVSRNRLAQVKRKILVLDLDETLIHSHHDGVLRPTVRPGTPPDFILKVSQWYELVVFTASMEIYGSAVADKLDNSRSILKRRYYRQHCTLELGSYIKDLSVVHSDLSSIVILDNSPGAYRSHPDNAIPIKSWFSDPSDTALLNLLPMLDALRFTAD

SEQ ID NO: 20406 - protein, 111 aa, Homo sapiens
  Payload ID: 4093
  Gene Symbol: CTDNEP1
  Gene Name: CTD nuclear envelope phosphatase 1
  ENSP ID: ENSP00000459866
MEIYGSAVADKLDNSRSILKRRYYRQHCTLELGSYIKDLSVVHSDLSSIVILDNSPGAYRSHPDNAIPIKSWFSDPSDTALLNLLPMLDALRFTADVRSVLSRNLHQHRLW

SEQ ID NO: 20407 - protein, 208 aa, Homo sapiens
  Payload ID: 4093
  Gene Symbol: CTDNEP1
  Gene Name: CTD nuclear envelope phosphatase 1
  ENSP ID: ENSP00000460527
  MOD_RES (1)..(1): Any amino acid
XQYQTVRYDILPLSPVSRNRLAQVKRKILVLDLDETLIHSHHDGVLRPTVRPGTPPDFILKVVIDKHPVRFFVHKRPHVDFFLEVVSQWYELVVFTASMEIYGSAVADKLDNSRSILKRRYYRQHCTLELGSYIKDLSVVHSDLSSIVILDNSPGAYRSHPDNAIPIKSWFSDPSDTALLNLLPMLDALRFTADVRSVLSRNLHQHRL

SEQ ID NO: 20408 - protein, 244 aa, Homo sapiens; identical to SEQ ID NO: 20402
  Payload ID: 4093
  Gene Symbol: CTDNEP1
  Gene Name: CTD nuclear envelope phosphatase 1
  Uniprot ID: O95476
  ENSP ID: ENSP00000460683

SEQ ID NO: 20409 - protein, 223 aa, Homo sapiens
  Payload ID: 4093
  Gene Symbol: CTDNEP1
  Gene Name: CTD nuclear envelope phosphatase 1
  ENSP ID: ENSP00000461122
MMRTQCLLGLRTFVAFAAKLWSFFIYLLRRQIRTVIQYQTVRYDILPLSPVSRNRLAQVKRKILVLDLDETLIHSHHDGVLRPTVRPGTPPDFILKVVIDKHPVRFFVHKRPHVDFFLEVVSQWYELVVFTASMEIYGSAVADKLDNSRSILKRRYYRQHCTLELGSYIKDLSVVHSDLSSIVILDNSPGAYRSHPDNAIPIKSWFSDPSDTALLNLLPMLDA

SEQ ID NO: 20410 - protein, 67 aa, Homo sapiens
  Payload ID: 4093
  Gene Symbol: CTDNEP1
  Gene Name: CTD nuclear envelope phosphatase 1
  ENSP ID: ENSP00000461567
MMRTQCLLGLRTFVAFAAKLWSFFIYLLRRQIRTVIQYQTVRYDILPLSPVSRNRLGEEEDPGAGSG

SEQ ID NO: 20411 - protein, 244 aa, Homo sapiens; identical to SEQ ID NO: 20402
  Payload ID: 4093
  Gene Symbol: CTDNEP1
  Gene Name: CTD nuclear envelope phosphatase 1
  Uniprot ID: O95476
  ENSP ID: ENSP00000461749

SEQ ID NO: 20412 - protein, 64 aa, Homo sapiens
  Payload ID: 4094
  Gene Symbol: CNEP1R1
  Gene Name: CTD nuclear envelope phosphatase 1 regulatory subunit 1
  ENSP ID: ENSP00000373786
MNSLEQAEAPRVVSLIPAVVSGNCQDLKAFERRLTEYIHCLQPATGRWRSVLLHIIMESPIFHH

SEQ ID NO: 20413 - protein, 125 aa, Homo sapiens
  Payload ID: 4094
  Gene Symbol: CNEP1R1
  Gene Name: CTD nuclear envelope phosphatase 1 regulatory subunit 1
  Uniprot ID: Q8N9A8
  ENSP ID: ENSP00000394224
MNSLEQAEDLKAFERRLTEYIHCLQPATGRWRMLLIVVSVCTATGAWNWLIDPETQKVSFFTSLWNHPFFTISCITLIGLFFAGIHKRVVAPSIIAARCRTVLAEYNMSCDDTGKLILKPRPHVQ

SEQ ID NO: 20414 - protein, 142 aa, Homo sapiens
  Payload ID: 4094
  Gene Symbol: CNEP1R1
  Gene Name: CTD nuclear envelope phosphatase 1 regulatory subunit 1
  Uniprot ID: Q8N9A8
  ENSP ID: ENSP00000405635
MNSLEQAEAPRVVSLIPAVVSGNCQDLKAFERRLTEYIHCLQPATGRWRMLLIVVSVCTATGAWNWLIDPETQKVSFFTSLWNHPFFTISCITLIGLFFAGIHKRVVAPSIIAARCRTVLAEYNMSCDDTGKLILKPRPHVQ

SEQ ID NO: 20415 - protein, 80 aa, Homo sapiens
  Payload ID: 4094
  Gene Symbol: CNEP1R1
  Gene Name: CTD nuclear envelope phosphatase 1 regulatory subunit 1
  ENSP ID: ENSP00000454356
MLLIVVSVCTATGAWNWLIDPETQKVSFFTSLWNHPFFTISCITLIGLFFAGIHKRVVAPSIIAARCRTVLAEYNMSCDD

SEQ ID NO: 20416 - protein, 108 aa, Homo sapiens
  Payload ID: 4094
  Gene Symbol: CNEP1R1
  Gene Name: CTD nuclear envelope phosphatase 1 regulatory subunit 1
  ENSP ID: ENSP00000454676
MNSLEQAEDLKAFERRLTEYIHCLQPATGRWRMLLIVVSVCTATGAWNWLIDPETQKVSFFTSLWNHPFFTISCITLIGLFFAGIHKRVVAPSICSMSNGISRIQYVL

SEQ ID NO: 20417 - protein, 47 aa, Homo sapiens
  Payload ID: 4094
  Gene Symbol: CNEP1R1
  Gene Name: CTD nuclear envelope phosphatase 1 regulatory subunit 1
  Uniprot ID: Q8N9A8
  ENSP ID: ENSP00000456294
MNSLEQAEDLKAFERRLTEYIHCLQPATGRWRSVLLHIIMESPIFHH

SEQ ID NO: 20418 - protein, 125 aa, Homo sapiens; identical to SEQ ID NO: 20413
  Payload ID: 4094
  Gene Symbol: CNEP1R1
  Gene Name: CTD nuclear envelope phosphatase 1 regulatory subunit 1
  Uniprot ID: Q8N9A8
  ENSP ID: ENSP00000456686

SEQ ID NO: 20419 - protein, 47 aa, Homo sapiens; identical to SEQ ID NO: 20417
  Payload ID: 4094
  Gene Symbol: CNEP1R1
  Gene Name: CTD nuclear envelope phosphatase 1 regulatory subunit 1
  Uniprot ID: Q8N9A8
  ENSP ID: ENSP00000456913

SEQ ID NO: 20420 - protein, 93 aa, Homo sapiens
  Payload ID: 4094
  Gene Symbol: CNEP1R1
  Gene Name: CTD nuclear envelope phosphatase 1 regulatory subunit 1
  ENSP ID: ENSP00000457787
MLLIVVSVCTATGAWNWLIDPETQKVSFFTSLWNHPFFTISCITLIGLFFAGIHKRVVAPSIIAARCRTVLAEYNMSCDDTGKLILKPRPHVQ

SEQ ID NO: 20421 - protein, 76 aa, Homo sapiens
  Payload ID: 4095
  Gene Symbol:
  Gene Name: CTD-2006C1.10
  ENSP ID: ENSP00000458124
MDSVAFEDVAVNFTQEEWALLDPSQKNLYREVMQETLRNLTSIGKKWNNQYIEDEHQNPRRNLRCFRIQWPLRMWL

SEQ ID NO: 20422 - protein, 115 aa, Homo sapiens
  Payload ID: 4096
  Gene Symbol:
  Gene Name: CTD-2006C1.13
  ENSP ID: ENSP00000465172
MPCCSHRSCREDPGTSESREMRPESSDCKLKPVRNLQREVIESSHQAQWLTPVIPALWEAKADGASQMFQDPVACEDVAVNFTQEEWALLDISQRKLYREVMLETFRNLTSIGVS

SEQ ID NO: 20423 - protein, 3 aa, Homo sapiens
  Payload ID: 4096
  Gene Symbol:
  Gene Name: CTD-2006C1.13
  ENSP ID: ENSP00000465998
AFS

SEQ ID NO: 20424 - protein, 414 aa, Homo sapiens
  Payload ID: 4096
  Gene Symbol:
  Gene Name: CTD-2006C1.13
  ENSP ID: ENSP00000467286
MPCCSHRSCREDPGTSESREMDPVACEDVAVNFTQEEWALLDISQRKLYREVMLETFRNLTSIGKKWKDQNIEYEYQNPRRNFRSLIEGNVNEIKEDSHCGETFTQVPDDRLNFQEKKASPEAKSCDNFVCGEVGIGNSSFNMNIRGDIGHKAYEYQDYAPKPYKCQQPKKAFRYHPSFRTQERNHTGEKPYACKECGKTFISHSGIRRRMVMHSGDGPYKCKFCGKAVHCLRLYLIHERTHTGEKPYECKQCVKSFSYSATHRIHERTHTGEKPYECQQCGKAFHSSSSFQAHKRTHTGGKPYECKQCGKSFSWCHSFQIHERTHTGEKPCECSKCNKAFRSYRSYLRHKRSHTGEKPYQCKECRKAFTYPSSLRRHERTHSAKKPYECKQCGKALSYKFSNTPKNALWRKTL

SEQ ID NO: 20425 - protein, 63 aa, Homo sapiens
  Payload ID: 4096
  Gene Symbol:
  Gene Name: CTD-2006C1.13
  ENSP ID: ENSP00000467438
MPCCSHRSCREDPGTSESREMAGVQWRDLNSLQLLPPEFKGFSCLSLQSSWDYRTLWPVRMLL

SEQ ID NO: 20426 - protein, 117 aa, Homo sapiens
  Payload ID: 4097
  Gene Symbol:
  Gene Name: CTD-2007N20.1
  ENSP ID: ENSP00000486977
MDMRVPAQLLGLLLLWLPGTRCDIQMTQSPSSLSASVGDRVTITCRASQGISNSLAWYQQKPGKAPKLLLYAASRLESGVPSRFSGSGSGTDYTLTISSLQPEDFATYYCQQYYSTP

SEQ ID NO: 20427 - protein, 472 aa, Homo sapiens
  Payload ID: 4098
  Gene Symbol:
  Gene Name: CTD-2105E13.6
  ENSP ID: ENSP00000467419
  MOD_RES (1)..(1): Any amino acid
XAPAVPAPSQKAPAVPAPSQKAPAIPAPSRKASAASASPRKASAVPAPPQKTPPPSQKAPSVPTIPQKAVSPTAPKKKSLLLPAPSQKALPTSPTEYQMALSPPASRGKLPGDFDVLPTGIPGRAVLERSQSGGKPEPVVTVRTQETDVVEMTTQAKSPESPFTVTKKESKDILISQTKEVTLEAFRGQGKLEDWAHWAKLEERSPDLPGVRSKELEQRKRWVKAKELAVEGPSQEHSRPFSVEALTLTKLMITANSKEQPSKSALVSLPSWLLATPQASATSMMASVPSRPGQLSLLEGKPVVVREQPESHTWVKEGKRPWGEMKEQPWGEMKEPPWDPKGPPKVPFRSKPTSASLKREGISQAPIPLTASPWEDLRPSPLSETLISKMEATARASQQPKRVSQEPMRMPAQHPLATVGSSSEILLPMLLELETVRNTATKAEEIQEESGVLNLLPSLQHSQHSEWPDAGA

SEQ ID NO: 20428 - protein, 48 aa, Homo sapiens
  Payload ID: 4099
  Gene Symbol:
  Gene Name: CTD-2116N17.1
  ENSP ID: ENSP00000488914
MVRTKADSVPGTYRKVVAARAPRKVLGSSTSATNSTSVSSRKGYKMFT

SEQ ID NO: 20429 - protein, 116 aa, Homo sapiens
  Payload ID: 4099
  Gene Symbol:
  Gene Name: CTD-2116N17.1
  ENSP ID: ENSP00000489069
MVRTKADSVPGTYRKVVAARAPRKVLGSSTSATNSTSVSSRKAENKYAGGNPVCVRPTPKWQKGIGEFFRLSPKDSEKENQIPEEAGSSGLGKAKRKLQDVHLRLRPSDYISYGNK

SEQ ID NO: 20430 - protein, 19 aa, Homo sapiens
  Payload ID: 4099
  Gene Symbol:
  Gene Name: CTD-2116N17.1
  ENSP ID: ENSP00000489109
  MOD_RES (1)..(1): Any amino acid
XQEPPILQHTEQQAGHTAH

SEQ ID NO: 20431 - protein, 65 aa, Homo sapiens
  Payload ID: 4099
  Gene Symbol:
  Gene Name: CTD-2116N17.1
  ENSP ID: ENSP00000489289
MVRTKADSVPGTYRKVVAARAPRKVLGSSTSATNSTSVSSRKEHVLCNLITQMMKKNRTFSFIFE

SEQ ID NO: 20432 - protein, 111 aa, Homo sapiens
  Payload ID: 4099
  Gene Symbol:
  Gene Name: CTD-2116N17.1
  ENSP ID: ENSP00000489519
MVRTKADSVPGTYRKVVAARAPRKVLGSSTSATNSTSVSSRKAENKYAGGNPVCVRPTPKWQKGIGEFFRLSPKDSEKENQIPEEAGSSGLGKAKRKACPLQPDHTNDEKE

SEQ ID NO: 20433 - protein, 27 aa, Homo sapiens
  Payload ID: 4100
  Gene Symbol:
  Gene Name: CTD-2132N18.3
  ENSP ID: ENSP00000464838
ATGAPGRNRGVDLQENNPASRSQCCSN

SEQ ID NO: 20434 - protein, 161 aa, Homo sapiens
  Payload ID: 4100
  Gene Symbol:
  Gene Name: CTD-2132N18.3
  ENSP ID: ENSP00000468275
MAGRGGAARPNGPAAGNKICQFKLVLLGESAVGKSSLVLRFVKGQFHEYQESTIGAAFLTQTVCLDDTTVKFEIWDTAGQERYHSLAPMYYRGAQAAIVVYDITNTDTFARAKNWVKELQRQASPNIVIALAGNKADLASKRAVEFQLTTYPTWRMCQRMR

SEQ ID NO: 20435 - protein, 282 aa, Homo sapiens
  Payload ID: 4100
  Gene Symbol:
  Gene Name: CTD-2132N18.3
  ENSP ID: ENSP00000468367
MAGRGGAARPNGPAAGNKICQFKLVLLGESAVGKSSLVLRFVKGQFHEYQESTIGAAFLTQTVCLDDTTVKFEIWDTAGQERYHSLAPMYYRGAQAAIVVYDITNTDTFARAKNWVKELQRQASPNIVIALAGNKADLASKRAVEFQANETCKCNGWKNPKPPTAPRMDLQQPAANLSELCRSCEHPLADHVSHLENVSEDEINRLLGMVVDVENLFMSVHKEEDTDTKQVYFYLFKLLRKCILQMTRPVVEGSLGSPPFEKPNIEQGVLNFVQYKFSHLAP

SEQ ID NO: 20436 - protein, 440 aa, Homo sapiens
  Payload ID: 4101
  Gene Symbol:
  Gene Name: CTD-2135J3.4
  ENSP ID: ENSP00000451145
MSMLAERRRKQKWAVDPQNTAWSNDDSKFGQRMLEKMGWSKGKGLGAQEQGATDHIKVQVKNNHLGLGATINNEDNWIAHQDDFNQLLAELNTCHGQETTDSSDKKEKKSFSLEEKSKISKNRVHYMKFTKGKSWKALTLSQKRPYVDEAERLRLQHMQDYPNYKYRPRRKKQAKRLCKRVDPGFLLSSLSRDQNALPEKRSGSRGALGEKEDRGEYSPGTALPSLRGCYHEGPAGGGGGGTPSSVDTYPYGLPTPPEMSPLDVLEPEQTFFSSPCQEEHGHPRRIPHLPGHPYSPEYAPSPLHCSHPLGSLALGQSPGVSMMSPVPGCPPSPAYYSPATYHPLHSNLQAHLGQLSPPPEHPGFDALDQLSQVELLGDMDRNEFDQYLNTPGHPDSATGAMALSGHVPVSQVTPTGPTETSLISVLADATATYYNSYSVS

SEQ ID NO: 20437 - protein, 358 aa, Homo sapiens
  Payload ID: 4102
  Gene Symbol:
  Gene Name: CTD-2140B24.4
  ENSP ID: ENSP00000457704
MDAKSLTAWSRTLVTFKDVFVDFTREEWKLLDTAQQIVYRNVMLENYKNLVSLGYQLTKPDVILRLEKGEEPWLVEREIHQETHPDSETAFEIKSSVSSRSIFKDKQSCDIKMEGMARNDLWYLSLEEVWKCRDQLDKYQENPERHLSIPRVLSLPARHTKLTVGMATRVRTASIWVPPLQERNSSWDRIRKLQGQESILGQGTPGLQPLPGTPRQKQKSRRIEKVLEWLFISQEQPKITKSWGPLSFMDVFVDFTWEEWQLLDPAQKCLYRSVMLENYSNLVSLGYQHTKPDIIFKLEQGEELCMVQAQVPNQTCPILKAGKSKAKVLAGLVSGEGLLCASKMTPCCCILWRHSLEN

SEQ ID NO: 20438 - protein, 641 aa, Homo sapiens
  Payload ID: 4103
  Gene Symbol:
  Gene Name: CTD-2192J16.17
  ENSP ID: ENSP00000404127
MDSVVFEDVAVNFTQEEWALLGPSQKKLYRDVMQETFVNLASIGENWEEKNIEDHKNQGRKLRSHMVERLCERKEGSQFGETISQTPNPKPNKKTFTRVKPYECSVCGKDYMCHSSLNRHMRSHTEHRSYEYHKYGEKSYECKECGKRFSFRSSFRIHERTHTGEKPYKCKQCGKAFSWPSSFQIHERTHTGEKPYECKECGKAFIYHTTFRGHMRMHTGEKPYKCKECGKTFSHPSSFRNHERTHSGEKPYECKQCGKAFRYYQTFQIHERTHTGEKPYQCKQCGKALSCPTSFRSHERIHTGEKPYKCKKCGKAFSFPSSFRKHERIHTGEKPYDCKECGKAFISLPSYRRHMIMHTGNGPYKCKECGKAFDCPSSFQIHERTHTGEKPYECKQCGKAFSCSSSFRMHERTHTGEKPHECKQCGKAFSCSSSVRIHERTHTGEKPYECKQCGKAFSCSSSFRMHERIHTGEKPYECKQCGKAFSFSSSFRMHERTHTGEKPYECKQCGKAFSCSSSFRMHERTHTGEKPYECKQCGKAFSCSSSIRIHERTHTGEKPYECKQCGKAFSCSSSVRMHERTHTGVKPYECKQCDKAFSCSRSFRIHERTHTGEKPYACQQCGKAFKCSRSFRIHERVHSGE

SEQ ID NO: 20439 - protein, 163 aa, Homo sapiens
  Payload ID: 4104
  Gene Symbol:
  Gene Name: CTD-2192J16.20
  ENSP ID: ENSP00000473043
  MOD_RES (1)..(1): Any amino acid
XGEAFKSSSSCEVHERTHFGEKPYECKQCGKAFNSSSYLQLHERVHTGEKTYECKECGKAFLYSTHFRIHERTHTREKPYECKQCGRVFIYFSHLRRHERSHTGVKPCECKQCGKAFTCLNSLKVHKRIHTGERPFQCRQCGKAFSYSKSLHVHERTHSRQKP

SEQ ID NO: 20440 - protein, 198 aa, Homo sapiens
  Payload ID: 4105
  Gene Symbol:
  Gene Name: CTD-2192J16.22
  ENSP ID: ENSP00000470240
  MOD_RES (1)..(1): Any amino acid
XRRLLKDDGRGVSEPLMENGSGAWVRGRHLVLLDTAQAAAAGHRLLAEQEVLAPQVVLAPGGGAAYNLGAPPRTQFSGLRRDLPPSVHLLTLASWGPEMVLLRLEHQFAVGEDSGRNLSAPVTLNLRDLFSTFTITRLQETTLVANQLREAASRLKWTTNTGPTPHQTPYQLDPANITLEPMEIRTFLASVQWKEVDG

SEQ ID NO: 20441 - protein, 195 aa, Homo sapiens
  Payload ID: 4106
  Gene Symbol:
  Gene Name: CTD-2192J16.24
  ENSP ID: ENSP00000472710
TNNMSDPRRPNKVLRYKPPPSECNPALDDPTPDYMNLLGMIFSMCGLMLKTCPTVQPNMLNVHLLPHTHDDVGWLKTVDQYFYGIKNDIQHAGVQYILDSVISALLADPTRRFIYVEIAFFSRWWHQQTNATQEVVRDLVRQGRLEFANGGWVMNDEAATHYGAIVDQMTLGLRFLEDTFGNDGRPRVAWHIDPF

SEQ ID NO: 20442 - protein, 30 aa, Homo sapiens
  Payload ID: 4107
  Gene Symbol:
  Gene Name: CTD-2207O23.10
  ENSP ID: ENSP00000471492
  MOD_RES (1)..(1): Any amino acid
XPASSAAGAARPAAFSAAAEGTPRRSIRCW

SEQ ID NO: 20443 - protein, 47 aa, Homo sapiens
  Payload ID: 4108
  Gene Symbol:
  Gene Name: CTD-2207O23.12
  ENSP ID: ENSP00000469588
KMLKPHRTPPAPVTEEMLQRVLPQKLRAHPRLKCGAQSWSGTQATKA

SEQ ID NO: 20444 - protein, 1122 aa, Homo sapiens
  Payload ID: 4109
  Gene Symbol:
  Gene Name: CTD-2207O23.3
  ENSP ID: ENSP00000482647
  MOD_RES (1)..(1): Any amino acid
XTSVKRRLSCLRSRVTRQKEKGKSPAHLKDKGQDARERRECVNGHQLLQGTFSGPSSCPLCGKPFLSSASLKEHPRGTLLSDGSPALSRNVGMTVSQKGGPQPTPSPAGPGTQLGPITGEMDEADSAFLKFKQTADDSLSLTSPNTESIFVEDPYTASLRSEIESDGHEFEAESWSLAVDAAYAKKQKREVVKRQDVLYELMQTEVHHVRTLKIMLKVYSRALQEELQFSSKAIGRLFPCADDLLETHSHFLARLKERRQESLEEGSDRNYVIQKIGDLLVQQFSGENGERMKEKYGVFCSGHNEAVSHYKLLLQQNKKFQNLIKKIGNFSIVRRLGVQECILLVTQRITKYPVLVERIIQNTEAGTEDYEDLTQALNLIKDIISQVDAKVSECEKGQRLREIAGKMDLKSSSKLKNGLTFRKEDMLQRQLHLEGMLCWKTTSGRLKDILAILLTDVLLLLQEKDQKYVFASVDSKPPVISLQKLIVREVANEEKAMFLISASLQGPEMYEIYTSSKEDRNAWMAHIQRAVESCPDEEEGPFSLPEEERKVVEARATRLRDFQERLSMKDQLIAQSLLEKQQIYLEMAEMGGLEDLPQPRGLFRGGDPSETLQGELILKSAMSEIEGIQSLICRQLGSANGQAEDGGSSTGPPRRAETFAGYDCTNSPTKNGSFKKKVSSTDPRPRDWRGPPNSPDLKLSDSDIPGSSEESPQVVEAPGTESDPRLPTVLESELVQRIQTLSQLLLNLQAVIAHQDSYVETQRAAIQEREKQFRLQSTRGNLLLEQERQRNFEKQREERAALEKLQSQLRHEQQRWERERQWQHQELERAGARLQEREGEARQLRERLEQERAELERQRQAYQHDLERLREAQRAVERERERLELLRRLKKQNTAPGALPPDTLAEAQPPSHPPSFNGEGLEGPRVSMLPSGVGPEYAERPEVARRDSAPTENRLAKSDVPIQLLSATNQFQRQAAVQQQIPTKLAASTKGGKDKGGKSRGSQRWESSASFDLKQQLLLNKLMGKDESTSRNRRSLSPILPGRHSPAPPPDPGFPAPSPPPADSPSEGFSLKAGGTALLPGPPAPSPLPARWRRQHLSPESGRIHFPNRAPRRFTMNLRVRE

SEQ ID NO: 20445 - protein, 108 aa, Homo sapiens; identical to SEQ ID NO: 9704
  Payload ID: 4110
  Gene Symbol:
  Gene Name: CTD-2278I10.6
  ENSP ID: ENSP00000469159

SEQ ID NO: 20446 - protein, 80 aa, Homo sapiens
  Payload ID: 4111
  Gene Symbol:
  Gene Name: CTD-2287O16.3
  ENSP ID: ENSP00000470389
MSKMNEYFSTKYKIMRKYDKSGRLICNDADLCDCLEKNCLGCFYPCPKCNSNKCGPECRCNRRWVYDAIVTESGEVISTL

SEQ ID NO: 20447 - protein, 70 aa, Homo sapiens
  Payload ID: 4112
  Gene Symbol:
  Gene Name: CTD-2313N18.7
  ENSP ID: ENSP00000485141
MRVLFFVFGVLSLMSTVPPTRSFTSNDECPSEYYHCRLKCNADEHAIRYCADFSICCKLKIIQIDGQKKW

SEQ ID NO: 20448 - protein, 487 aa, Homo sapiens
  Payload ID: 4113
  Gene Symbol:
  Gene Name: CTD-2331H12.8
  ENSP ID: ENSP00000489045
MALSQGLLTFRDVAIEFSQEEWKCLDPAQRTLYRDVMLENYRNLVSLDISSKCMMNTLSSTGQGNTEVIHTGTLQRQASYHIGAFCSQEIEKDIHDFVFQWQEDETNDHEAPMTEIKKLTSSTDRYDQRHAGNKPIKGQLESRFHLHLRRHRRIHTGEKPYKCEECEKVFSCKSHLEIHRIIHTGEKPYKCKVCDKAFKHDSHLAKHTRIHRGDKHYTCNECGKVFDQKATLACHHRSHTGEKPYKCNECGKTFSQTSHLVYHHRLHTGEKPYKCNECGKTFARNSVLVIHKAVHTAEKPYKCNECGKVFKQRATLAGHRRVHTGEKPYRCEECDKVFSRKSHLERHRRIHTGEKPYKCKVCDKAFRSDSRLAEHQRVHTGERPYTCNECGKVFSTKAYLACHQKLHTGEKLYECEECDKVYIRKSHLERHRRIHTGEKPHKCGDCGKAFNSPSHLIRHQRIHTGQKSYKCHQCGKVFSLRSLLAEH

SEQ ID NO: 20449 - protein, 104 aa, Homo sapiens
  Payload ID: 4114
  Gene Symbol:
  Gene Name: CTD-2349B8.1
  ENSP ID: ENSP00000459737
  MOD_RES (1)..(1): Any amino acid
XHFLPASWRGLASPSEEETPGVRVTGSGAERSGGRARRAAQAMSSCAVATLSGSASCPGLPVWRVTPPSPRDTSESRASASCWRVTTSMRCACLRTCWATARRT

SEQ ID NO: 20450 - protein, 76 aa, Homo sapiens
  Payload ID: 4114
  Gene Symbol:
  Gene Name: CTD-2349B8.1
  ENSP ID: ENSP00000459792
  MOD_RES (1)..(1): Any amino acid
XRGPSNRVRRGEERRESQEGRPGYVLLRCRHAVRQRFLPGSPRLEGHAAFSSRHFREPGLSILLESYYEHESDSVT

SEQ ID NO: 20451 - protein, 145 aa, Homo sapiens
  Payload ID: 4115
  Gene Symbol:
  Gene Name: CTD-2369P2.10
  ENSP ID: ENSP00000408510
MHVMAASMARGGVSARVLLQAARGTWWNRPGGTSGSGEGVALGTTRKFQATGSRPAGEEDAGGPERPGDVVNVVFVDRSGQRIPVSGRVGDNVLHLAQRHGVDLEGACEASLACSTCHVYVSEDHLDLLPPPEERRTRGWAARLC

SEQ ID NO: 20452 - protein, 157 aa, Homo sapiens
  Payload ID: 4116
  Gene Symbol:
  Gene Name: CTD-2369P2.12
  ENSP ID: ENSP00000467814
SYSFDYPSDMGPRRLFSHPREPALGPHGPSRHKMSPPPSGFGERSSGGSGGGPLSHFYSGSPTSYFTSGLQAGLKQSHLSKAIGSSPLGSGEGLLGLSPGPNGHSHLLKTPLGGQKRSFAHLLPSPEPSPEGSYVGQHSQGLGGHYADSYLKRKRIF

SEQ ID NO: 20453 - protein, 123 aa, Homo sapiens
  Payload ID: 4117
  Gene Symbol:
  Gene Name: CTD-2370N5.3
  ENSP ID: ENSP00000462030
  MOD_RES (1)..(1): Any amino acid
XCAENNNNMAMLICLIIIAVLFLICTFLFLSTVVLANKVSSLRRSKQVGKRQPRSNGDFLASGLWPAESDTWKRTKQLTGPNLVMQSTGVLTATRERKDEEGTEKLTNKQIAKSPKCPVRTRI

SEQ ID NO: 20454 - protein, 117 aa, Homo sapiens
  Payload ID: 4117
  Gene Symbol:
  Gene Name: CTD-2370N5.3
  ENSP ID: ENSP00000463745
  MOD_RES (1)..(1): Any amino acid
XCAENNNNMAMLICLIIIAVLFLICTFLFLSTVVLANKVSSLRRSKQVGKRQPRSNGDFLASGLWPAESDTWKRTKQLTGPNLVMQSTGVLTATRERKDEEGTEKLTNKQIDNEEIF

SEQ ID NO: 20455 - protein, 171 aa, Homo sapiens
  Payload ID: 4117
  Gene Symbol:
  Gene Name: CTD-2370N5.3
  ENSP ID: ENSP00000463981
MPETSHIVALTSKSEQELYIPSVVSNSPSTVQSIENTSKSHGEIFKKDVCAENNNNMAMLICLIIIAVLFLICTFLFLSTVVLANKVSSLRRSKQVGKRQPRSNGDFLASGLWPAESDTWKRTKQLTGPNLVMQSTGVLTATRERKDEEGTEKLTNKQIAKSPKCPVRTRI

SEQ ID NO: 20456 - protein, 153 aa, Homo sapiens
  Payload ID: 4117
  Gene Symbol:
  Gene Name: CTD-2370N5.3
  ENSP ID: ENSP00000464508
  MOD_RES (1)..(1): Any amino acid
XCAENNNNMAMLICLIIIAVLFLICTFLFLSTVVLANKVSSLRRSKQVGKRQPRSNGDFLASGLWPAESDTWKRTKQLTGPNLVMQSTGVLTATRERKDEEGTEKLTNKQIEEETVTQKCRVLPKVIQVNRTHHSLLMRRNLTKLFQFARGTF

SEQ ID NO: 20457 - protein, 91 aa, Homo sapiens
  Payload ID: 4118
  Gene Symbol:
  Gene Name: CTD-2410N18.5
  ENSP ID: ENSP00000430774
MDEKVFTKELDQWIEQLNECKQLSESQVKSLCEKMPSIKLQSSDGEIFEVDVEIAKQSVTIKTMLEDLGMDDEGDDDPVPLPNVNAAILKK

SEQ ID NO: 20458 - protein, 739 aa, Homo sapiens
  Payload ID: 4119
  Gene Symbol:
  Gene Name: CTD-2501B8.1
  ENSP ID: ENSP00000464149
MGQGWATAGLPSLLFLLLCYGHPLLVPSQEASQQVTVTHGTSSQATTSSQTTTHQATAHQTSAQSPNLVTDEAEASKFVEEYDRTSQVVWNEYAEANWNYNTNITTETSKILLQKNMQIANHTLKYGTQARKFDVNQLQNTTIKRIIKKVQDLERAALPAQELEEYNKILLDMETTYSVATVCHPNGSCLQLEPDLTNVMATSRKYEDLLWAWEGWRDKAGRAILQFYPKYVELINQAARLNGYVDAGDSWRSMYETPSLEQDLERLFQELQPLYLNLHAYVRRALHRHYGAQHINLEGPIPAHLLGNMWAQTWSNIYDLVVPFPSAPSMDTTEAMLKQGWTPRRMFKEADDFFTSLGLLPVPPEFWNKSMLEKPTDGREVVCHASAWDFYNGKDFRIKQCTTVNLEDLVVAHHEMGHIQYFMQYKDLPVALREGANPGFHEAIGDVLALSVSTPKHLHSLNLLSSEGGSDEHDINFLMKMALDKIAFIPFSYLVDQWRWRVFDGSITKENYNQEWWSLRLKYQGLCPPVPRTQGDFDPGAKFHIPSSVPYIRYFVSFIIQFQFHEALCQAAGHTGPLHKCDIYQSKEAGQRLATAMKLGFSRPWPEAMQLITGQPNMSASAMLSYFKPLLDWLRTENELHGEKLGWPQYNWTPNSDDFYNETETKIFLQFYDQTGIWDHGAPHLLPPSQARGTREAPVYMSKRAASSGPPGSPKLPPAAQGHGEVPVHDLLWHPGPPV

SEQ ID NO: 20459 - protein, 110 aa, Homo sapiens
  Payload ID: 4120
  Gene Symbol:
  Gene Name: CTD-2510F5.6
  ENSP ID: ENSP00000464167
DLRKLLRKVDVERSPGGTPLTNKENMETGTGLTPVMTQALRRKFQVQPGPPPCPVFYPEKQEITLPPDGLWVLRFPYAYVTERGPCFPPKENVQLMSYKVLRGVLKAVTQ

SEQ ID NO: 20460 - protein, 226 aa, Homo sapiens
  Payload ID: 4121
  Gene Symbol:
  Gene Name: CTD-2521M24.10
  ENSP ID: ENSP00000472415
MPKKWLFLPFEDDLRRDLGRQFSVERLPAVVVLKPDGDVLTRDGADEIQRLGTACFANWQEAAEVLDRNFQLPEDLEDQEPRSLTECLRRHKSDWFLYDCRLLRHVALGLFCCGISVYLAALSIYALLLFEIETGAAAASILGSGTLVLVAVLTHTLLRAARAARRGLHELSPPSFEDDLARPAEVSKASPRAQPQQGIHRRTPYSTCPEPGDPFGSMATATAPAA

SEQ ID NO: 20461 - protein, 64 aa, Homo sapiens
  Payload ID: 4122
  Gene Symbol:
  Gene Name: CTD-2528L19.4
  ENSP ID: ENSP00000464957
MIVREETRGECTDLDSRCEIISDGKMQLYRKHSCVTLHQRIHNGQKPYEWNTTDLRSLGLRNNL

SEQ ID NO: 20462 - protein, 39 aa, Homo sapiens
  Payload ID: 4122
  Gene Symbol:
  Gene Name: CTD-2528L19.4
  ENSP ID: ENSP00000466284
MQLYRKHSCVTLHQRIHNGQKPYEWNTTDLRSLGLRNNL

SEQ ID NO: 20463 - protein, 130 aa, Homo sapiens
  Payload ID: 4122
  Gene Symbol:
  Gene Name: CTD-2528L19.4
  ENSP ID: ENSP00000467889
MSYGSITFGDVAIDFSHQEWEYLSLVQKTLYQEVMMENYDNLVSLAGHSVSKPDLITLLEQGKEPWMIVREETRGECTDLDSRCEIISDGKMQLYRKHSCVTLHQRIHNGQKPYEWNTTDLRSLGLRNNL

SEQ ID NO: 20464 - protein, 46 aa, Homo sapiens
  Payload ID: 4123
  Gene Symbol:
  Gene Name: CTD-2535L24.2
  ENSP ID: ENSP00000462418
  MOD_RES (1)..(1): Any amino acid
XLKGLMPASLRQELEDTISSLKSQVNFLQKRASILQEELTTYQGRR

SEQ ID NO: 20465 - protein, 29 aa, Homo sapiens
  Payload ID: 4124
  Gene Symbol:
  Gene Name: CTD-2545G14.7
  ENSP ID: ENSP00000466023
  MOD_RES (1)..(1): Any amino acid
XNAIPIKSWFSDPSDTALLNLLPMLDALR

SEQ ID NO: 20466 - protein, 397 aa, Homo sapiens
  Payload ID: 4125
  Gene Symbol:
  Gene Name: CTD-2545M3.6
  ENSP ID: ENSP00000473233
  MOD_RES (1)..(1): Any amino acid
XGVAAYMKSEDPLFVLEHSLPIDTQYYLEQQLAKPLLRIFEPILGEGRAEAVLLRGDHTRCKTVLTGKVGGLLAFAKRRNCCIGCRTVLSHQGAVCEFCQPRESELYQKEVSHLNALEERFSRLWTQCQRCQGSLHEDVICTRLDGPHFSCLYPDGVFYDLDSCKHSSYPDSEGAPDSLWDWTVAPPVPATPYEAFDPAAAAFSHPQAAQLCYEPPTYSPAGNLELAPSLEAPGPGLPAYPTENFASQTLVPPAYAPYPSPVLSEEEDLPLDSPALEVSDSESDEALVAGPEGKGSEAGTRKKLRLYQFLLGLLTRGDMRECVWWVEPGAGVFQFSSKHKELLARRWGQQKGNRKRMTYQKLARALRNYAKTGEIRKVKRKLTYQFDSALLPAVRRA

SEQ ID NO: 20467 - protein, 92 aa, Homo sapiens
  Payload ID: 4126
  Gene Symbol:
  Gene Name: CTD-2561J22.3
  ENSP ID: ENSP00000473166
EFSLEEWQCLDTAQQDLYRKVMLENYRNLVFLAGIAVSKPDLVTCLEQGKDPWNMKGHSTVVKPPGGDCSIFLMEHQGDVTLLPGPCPQRRL

SEQ ID NO: 20468 - protein, 84 aa, Homo sapiens
  Payload ID: 4127
  Gene Symbol:
  Gene Name: CTD-2574D22.6
  ENSP ID: ENSP00000457363
  MOD_RES (1)..(1): Any amino acid
XDEPVTPKDSLIDRRRTPGSSARSQKREARLDKVLSDMKRHKKLEEQILRTGRDLFSLDSEDPSPASPPLRSSGSSLFPRQRKY

SEQ ID NO: 20469 - protein, 71 aa, Homo sapiens
  Payload ID: 4128
  Gene Symbol:
  Gene Name: CTD-2583A14.10
  ENSP ID: ENSP00000469133
MCGLILEDVFHFADHQETHHKQKLNRSGACGKNLDDTAYLHQHQKQHIGEKFYRKSVREASFVKKRKLRVS

SEQ ID NO: 20470 - protein, 166 aa, Homo sapiens
  Payload ID: 4128
  Gene Symbol:
  Gene Name: CTD-2583A14.10
  ENSP ID: ENSP00000471077
MAAAAPRRPTQQGTVTFEDVAVNFSQEEWCLLSEAQRCLYRDVMLENLALISSLGCWCGSKDEEAPCKQRISVQRESQSRTPRAGVSPKKAHPCEMCGLILEDVFHFADHQETHHKQKLNRSGACGKNLDDTAYLHQHQKQHIGEKFYRKSVREASFVKKRKLRVS

SEQ ID NO: 20471 - protein, 133 aa, Homo sapiens
  Payload ID: 4128
  Gene Symbol:
  Gene Name: CTD-2583A14.10
  ENSP ID: ENSP00000472427
MLENLALISSLGCWCGSKDEEAPCKQRISVQRESQSRTPRAGVSPKKAHPCEMCGLILEDVFHFADHQETHHKQKLNRSGACGKNLDDTAYLHQHQKQHIGEKFYRKSVREASFVKKRKLRVSQEPFVFREFG

SEQ ID NO: 20472 - protein, 11 aa, Homo sapiens
  Payload ID: 4128
  Gene Symbol:
  Gene Name: CTD-2583A14.10
  ENSP ID: ENSP00000472484
MLENLALISSL

SEQ ID NO: 20473 - protein, 132 aa, Homo sapiens
  Payload ID: 4128
  Gene Symbol:
  Gene Name: CTD-2583A14.10
  ENSP ID: ENSP00000473738
MAAAAPRRPTQGTVTFEDVAVNFSQEEWCLLSEAQRCLYRDVMLENLALISSLGCWCGSKDEEAPCKQRISVQRESQSRTPRAGVSPKKAHPCEMCGLILEDVFHFADHQETHHKQKLNRSGACGKNLDDTA

SEQ ID NO: 20474 - protein, 60 aa, Homo sapiens
  Payload ID: 4128
  Gene Symbol:
  Gene Name: CTD-2583A14.10
  ENSP ID: ENSP00000474684
MAVVATLRLSAQGTVTFEDVAVKFTQEEWNLLSEAQRCLYRDVTLENLALMSSLAGHCDL

SEQ ID NO: 20475 - protein, 42 aa, Homo sapiens
  Payload ID: 4129
  Gene Symbol:
  Gene Name: CTD-2583A14.9
  ENSP ID: ENSP00000470782
MLENLALISSLDCPLHLCQFPDLSPCWRVCLERLLSARSALW

SEQ ID NO: 20476 - protein, 172 aa, Homo sapiens
  Payload ID: 4130
  Gene Symbol:
  Gene Name: CTD-2587H24.4
  ENSP ID: ENSP00000473050
  MOD_RES (1)..(1): Any amino acid
XAEGSPEPGTPAAPTPESFTVHFLPLNSAQTLHHKSCYNGRFQLLYVACGMVHLLIPELGACVAPGGNLIVELARYLVDVRQEQLQGFNTRVRELAQAAGFAPQTGARPSETFARFCKSQESALGNTVPAVEPGTPPLDILAQPLEASNPALEGLTQPLQVSSGSLKQPGGD

SEQ ID NO: 20477 - protein, 43 aa, Homo sapiens
  Payload ID: 4131
  Gene Symbol:
  Gene Name: CTD-2616J11.11
  ENSP ID: ENSP00000469452
MVLAVGVGVVGMVMGLRIRCDEGESLRGQTTSAFLFLGDPSEA

SEQ ID NO: 20478 - protein, 630 aa, Homo sapiens
  Payload ID: 4132
  Gene Symbol:
  Gene Name: CTD-3074O7.11
  ENSP ID: ENSP00000398526
MDPSWRRSSHSWPQPMPDSGRAPVRPHLAKLEEDVWPCPQFHQTKAASGPPFVNEANSKWLDAHYDPMANIHTFSACLALADLHGDGEYKLVVGDLGPGGQQPRLKVLKGPLVMTESPLPALPAAAATFLMEQHEPRTPALALASGPCVYVYKNLRPYFKFSLPQLPPNPLEQDLWNQAKEDRIDPLTLKEMLESIRETAEEPLSIQSLRFLQLELSEMEAFVNQHKSNSIKRQTVITTMTTLKKNLADEDAVSCLVLGTENKELLVLDPEAFTILAKMSLPSVPVFLEVSGQFDVEFRLAAACRNGNIYILRRDSKHPKYCIELSAQPVGLIRVHKVLVVGSTQDSLHGFTHKGKKLWTVQMPAAILTMNLLEQHSRGLQAVMAGLANGEVRIYRDKALLNVIHTPDAVTSLCFGRYGREDNTLIMTTRGGGLIIKILKRTAVFVEGGSEVGPPPAQAMKLNVPRKTRLYVDQTLREREAGTAMHRAFQTDLYLLRLRAARAYLQALESSLSPLSTTAREPLKLHAVVQGLGPTFKLTLHLQNTSTTRPVLGLLVCFLYNEALYSLPRAFFKVPLLVPGLNYPLETFVESLSNKGISDIIKVLVLREGQSAPLLSAHVNMPGSEGLAAA

SEQ ID NO: 20479 - protein, 3231 aa, Homo sapiens
  Payload ID: 4133
  Gene Symbol:
  Gene Name: CTD-3088G3.8
  ENSP ID: ENSP00000470478
MTACTGSAGPHLPVGTRYTYHFSTNTSTSLQDVLVEGSGLGLQGLAVLDVLGLCQMALWLQDFQVTSILGAKVELLKESESLSATLGRNPLRFILHSGRVAHLCPHPTEPRWVLNVKRAVLSLLQGHPGAHSPKTFDEVDILGRCPTTYQHHGDWLHKTKDLARCSLRRGRSSLHSQALPGVAPGLTSRLTCVQSFRAGVLREASCTELDSAGPLPAKASAVQMRTLSSLSLLHEMPQDPAGTDPDDRDDEDMTPSSLLYEWEETPSQAMVATAATLVRRLCLAQTTSLEAMDLFLTLVSQLQGLSGGELMELWQYSSFKCRDNGQPLLDALPSCGTEHCVGLMKELIASAAVEADEVEAWLSSLAFLPQPTDAMVHMLLPLLQTPRASPGAFLGISALVHNLCASLDGPCGQLPGVGSLVRILGDALGENCTIQEPSDDDKLQLVLKAVGNAGLAAMALTPTLSACASLRSSTPEIRLGAIQAFRRVPCSADRSVLSRLYQSLEEDAEIRINAYLALMRCPSEEVFAQVRRTQAGELSTQVGSFVWSHILQLLETHDPLKRALRDTLPEDILSQEFHPEMWKHSSYSDVTFRSVSGSLGANLEGTLLFSPASFLPRSATVNLTIHTMGRAFNLLELGLRLENAEEIAHRLFGRKSFWGQEDGREPEPEEPPGPEPGPAPQPASPECPGDRDRRMRYLQQKVTRRRGARQALRCELSVKLLGQELSFVNCGATGSHVNHWPLNLAELAIKLMKGQEVQMNRRLSLAAQELVFPTVSGLPARLTLNASAAISIRVRGTTDFQQRSDFSVNGYVKPSALLQISAQMGTAGILGQAGLRWVTSVRSAASLDGGIQVQKGRVLKVHLNTPEEAVELLSFSSQLYLITRDGVRSLRHVPGPSEVQSCTGEEVSYTWGWRLCTGVTWPVPGQPYLLSLPVFAAVTLQKRDPGLRQYLLEAAYTLQPQKGSWFPQEATAHVFMGTPGSEVLRDVGVDMSYSLPQNKFRLKLLHPKKKIELDGKMEALGSAHTGHLELVLDDRDVYYIKGWSDLQPAMGGEAERFQAQLEVKLVTGGSPVVFTGNLTRQVGSKLAFSASLSHLLSDQANVTALLERKEENGRRVAALGAELFVPGLVGLRALGLLQQRGQLWTNSLRIQYSLLGQAKQAAHECSTSQKLRADSGSDGAYRLELRHELHCTQILAFSHKVQLWHEEDSGHLHSQLEVSYGKHWDKNSNKRHLRVSQTFKNDSGPALSNHFMEFVLQVPERQVDCRVQLYHLSLRLPYVESSSHLKVQYNGRPLFVAGGQWKDTSRATLWKWEGALNLDSPWLMVSAAHRLYWPHRAVFQAVLELTLGKAWTLKDLVVSVGCRSQGPNREGKIQVYTAATTYLRVSTVTVLAQSLFHSWSELESAWNAAVQGEIHAENSRDRKILNCWLKGPQQELNLTAAYRHLEWPRKTQVSLTAVRIGAQGQPRGLQLEGELEELRQDRTLYRKRGALLLRHPLHLPIPQSLLLQETFTADRRHQRYSLETRVVLNGREETLQTMVLGCQAGHPYVCAGLMHPYDGKVIPRNTEGCLVTWNQHTAKNREVEATLKVHRKVVLHLKGLHHDRSQHGEIRHSLALDLAHSYQLSFPQALSLDGGIIFRQSPQGTFNFGMDARAAVNHNVTSQASVQLNGSDSDFAFFFQLRHPHGPTFPPNFQVQAAAGRYRVRSLNGSLSVQMSGRELVLLEVDASQDTRRSSRGWGVSVLLHQAVLSAPRAVRLQLSAKITPARIWLFSKALLDQNTAQLLLKASEEWRGGRILTFQSQTRHTVAGWAAMPRLLTLTGRLKQKETLQEGTLSVTADSAVLGFLLRDQHEKAGNGTSVRSVTCVLAQNSSQALPGELQLKGRLQAQTRNLRAQASIRAHAASLALGGACSWGPRHGQLAGGPTHNISTLSDAGLPSEAGMLLSLTHVASNCSARLALWNAGAQLDGAIGLEDVTPESSGLQLHASLRHTHTMPSLKHWGLPFSLDGHGHFQVNCSGDASPTQLLGWCRGDIAGQPLEVSVDIHNGSSGFEHSGRILMGPTFLNYSVSCYYHDGHLELSGRSWHNSEALLWAGFPGEACLSAELQIHETQTQARVALHGGDSGVSMDLAALVARPRRGPLQLVASASHTVPALQRLGLPFTNQLVFQGLWEAEEMSSSLQLTCDSQATLVLDVRGQNQAVSKELLFSGRHRLPFLLGLCPSSASASAKLHYSKGEVQSMFALGVEERHFHISTRQVAAKAGLNNFIKLEQTFLQLSALPRELFLQTAYERAHGTRVLRQVVLWDGQEVALTGSLSGPFPKPTRNLSLQVELTHPLPLPLPRHCSLRLSSEHLGGSHRDGLVVGWDGRDQVLVSSSLWLGKSELAARLALAHPFNLPWRQAEASGLAESRGGRQSRQVQLTWNRGQPATLQLTWADGSLAHSTAWDGCLAASPGQLQETWGLNSLQACGAFTQTPAVFVEQLNVSWGQHRMRQNLTYERHWPSQPDKIIMEATLEHVLGASCTRQSFWGEVQTDYARWLRHSLHLGLCDLPRALLVVGEHTLGQGGLLLRSRCHLGLAPDPDHGLHLSLTLQNHSRPRSADFSGALELRGSKAQRVGLLGRVSTSTSQSLVRLEGSVDNREEKVRLSVFRAPSCLQASVAHEEGGREESVVLRACAHGRTAEAEVLFRDGRQPSQPLGRLTLQAANQSLLLAARGCQGGLLGHVESRIAAVGSQVQARLEEKVQGLGASVRRFQQLVQPAGTLDGVAGLLLQLSQAGREAMQASGWAVATLWARSQALTQHLPLYLEWLQVGLEQLREELEWPLATLKDAYLEVTLRPLEEVWRERAEEAMRRLQAWVPGMPGKGGPRPIRAALGAMKGALELAAQQMLSWAEATFSRALKRLCKPLLDLYSLSARNRSVVVMLPLLPAGDEPLDVARVTSYLMEEKLLRPLRELSGANVLAEYYWLRRRLLAGPWEYHALVAGAQHVVTFDGRVWDLSTQCGSILLAQDFAHNTFSLTLSRTGSGLTALFVELNHKTLILYPSLQAYRLYNSSLPGDSCPDLKLHPATTRKDVSRIELASEDGVSVSCDVPTGLCSLTLGLWQHGISAGLLGTNDNEAGNELMLPDGSMARSLEELSLAWQVGGDCRATEKPQQEQACPGQLPACWAFFEGPHSSLRDCFRVVDPTPFLSLCVQVPCGTQELQPACNLAAAYIHLCARGFVPLAPPPQCV

SEQ ID NO: 20480 - protein, 79 aa, Homo sapiens
  Payload ID: 4133
  Gene Symbol:
  Gene Name: CTD-3088G3.8
  ENSP ID: ENSP00000471908
EEVFAQVRRTQAGELSTQVGSFVWSHILQLLETHDPLKRALRDTLPEDILSQEFHPEMWKHSSYSDVTFRSAWAPAGKC

SEQ ID NO: 20481 - protein, 46 aa, Homo sapiens
  Payload ID: 4133
  Gene Symbol:
  Gene Name: CTD-3088G3.8
  ENSP ID: ENSP00000472593
AAAYIHLCARGFVPLAPPPQCDTIPTRWIHLPPVIQSNTNLGVAVQ

SEQ ID NO: 20482 - protein, 455 aa, Homo sapiens
  Payload ID: 4133
  Gene Symbol:
  Gene Name: CTD-3088G3.8
  ENSP ID: ENSP00000472859
  MOD_RES (1)..(1): Any amino acid
XAGREGSRLGCLCEKVPAIGAAGRHPGRRGRPPSAAVPGGAGGHAGPLATLKDAYLEVTLRPLEEVWRERAEEAMRRLQAWVPGMPGKGGPRPIRAALGAMKGALELAAQQMLSWAEATFSRALKRLCKPLLDLYSLSARNRSVVVMLPLLPAGDEPLDVARVTSYLMEEKLLRPLRELSGANVLAEYYWLRRRLLAGPWEYHALVAGAQHVVTFDGRVWDLSTQCGSILLAQDFAHNTFSLTLSRTGSGLTALFVELNHKTLILYPSLQAYRLYNSSLPGDSCPDLKLHPATTRKDVSRIELASEDGVSVSCDVPTGLCSLTLGLWQHGISAGLLGTNDNEAGNELMLPDGSMARSLEELSLAWQVGGDCRATEKPQQEQACPGQLPACWAFFEGPHSSLRDCFRVVDPTPFLSLCVQVPCGTQELQPACNLAAAYIHLCARGFVPLAPPPQCV

SEQ ID NO: 20483 - protein, 46 aa, Homo sapiens
  Payload ID: 4134
  Gene Symbol:
  Gene Name: CTD-3105H18.14
  ENSP ID: ENSP00000394047
MDSVAFEDVAVNFTQEEWALLGPCQKNLYEDVMQETIRNLDCVGMK

SEQ ID NO: 20484 - protein, 149 aa, Homo sapiens
  Payload ID: 4135
  Gene Symbol:
  Gene Name: CTD-3105H18.16
  ENSP ID: ENSP00000471613
MASVALEDVAVNFTREEWALLGPCQKNLYKDVMQETIRNLDCVGMKWKDQNIEDQYRYPRKNLRCRMLERFVESKDGTQCGETSSQIQDSIVTKNTLPGVGPYESRMSGEVIMGHSSLNCYIRVGAGHKPYEYHECGEKPDTHKQRGKA

SEQ ID NO: 20485 - protein, 80 aa, Homo sapiens
  Payload ID: 4136
  Gene Symbol:
  Gene Name: CTD-3105H18.18
  ENSP ID: ENSP00000471607
MDSVVFEDVAVNFTQEEWALLGPSQKKLYRDVMQETFVNLASIGENWEEKNIEDHKNQGRKLRDGVLPCCPDWSQTPELK

SEQ ID NO: 20486 - protein, 72 aa, Homo sapiens
  Payload ID: 4137
  Gene Symbol:
  Gene Name: CTD-3148I10.9
  ENSP ID: ENSP00000470318
  MOD_RES (1)..(1): Any amino acid
XQVFQAGDVPSERPFYPPTLVSNLPPASPCAQVEAPGGHCLDQRPRPQRPFGAHRRLQGEWVFLARGPRRAV

SEQ ID NO: 20487 - protein, 137 aa, Homo sapiens
  Payload ID: 4138
  Gene Symbol:
  Gene Name: CTD-3214H19.16
  ENSP ID: ENSP00000469811
  MOD_RES (1)..(1): Any amino acid
XVQACEERQKRGWDSVQQSITMVRSKIDRLETTLAGIKNIDTKVQKILEVLQKMPRWRRHGGALHAREVGAAGARAGAAAHRGEPERLRTAVLRAGTALPEPRLLRGRAAVAPGRAGPPGGRARAGCAGGARKGCPA

SEQ ID NO: 20488 - protein, 48 aa, Homo sapiens
  Payload ID: 4139
  Gene Symbol:
  Gene Name: CTD-3214H19.4
  ENSP ID: ENSP00000469553
  MOD_RES (1)..(1): Any amino acid
XGVKLEIFRMIIYLTFPVAMFWVSNQAEWFEDDVIQRKRELWPPEKKF

SEQ ID NO: 20489 - protein, 51 aa, Homo sapiens
  Payload ID: 4139
  Gene Symbol:
  Gene Name: CTD-3214H19.4
  ENSP ID: ENSP00000470078
MGVKLEIFRMIIYLTFPVAMFWVSNQAEWFEDDVIQRKRELWPPEKFLGAE

SEQ ID NO: 20490 - protein, 61 aa, Homo sapiens
  Payload ID: 4139
  Gene Symbol:
  Gene Name: CTD-3214H19.4
  ENSP ID: ENSP00000472796
MGVKLEIFRRELWPPEKGPRGHSPVGPRRPGQAERLQGRHSQSGRGPRENPLPAADNGPGS

SEQ ID NO: 20491 - protein, 427 aa, Homo sapiens
  Payload ID: 4140
  Gene Symbol:
  Gene Name: CTD-3222D19.2
  ENSP ID: ENSP00000386951
MTAAPASPQQIRDRLLQAIDPQSNEVRCETTVIRNMVAVLEVISSLEKYPITKEALEETRLGKLINDVRKKTKNEELAKRAKKLLRSWQKLIEPAHQHEAALRGLAGATGSANGGAHNCRPEVGAAGPPRSIHDLKSRNDLQRLPGQRLDRLGSRKRRGDQRDLGHPGPPPKVSKASHDPLVPNSSPLPTNGISGSPESFASSLDGSGHAGPEGSRLERDENDKHSGKIPVNAVRPHTSSPGLGKPPGPCLQPKASVLQQLDRVDETPGPPHPKGPPRCSFSPRNSRHEGSFARQQSLYAPKGSVPSPSPRPQALDATQVPSPLPLAQPSTPPVRRLELLPSAESPVCWLEQPESHQRLAGPGCKAGLSPAEPLLSRAGFSPDSSKADSDAASSGGSDSKKKKRSCEIHGSTISGCSTSWAATPSSL

SEQ ID NO: 20492 - protein, 440 aa, Homo sapiens
  Payload ID: 4141
  Gene Symbol: CTBP1
  Gene Name: C-terminal binding protein 1
  Uniprot ID: Q13363
  ENSP ID: ENSP00000290921
MGSSHLLNKGLPLGVRPPIMNGPLHPRPLVALLDGRDCTVEMPILKDVATVAFCDAQSTQEIHEKVLNEAVGALMYHTITLTREDLEKFKALRIIVRIGSGFDNIDIKSAGDLGIAVCNVPAASVEETADSTLCHILNLYRRATWLHQALREGTRVQSVEQIREVASGAARIRGETLGIIGLGRVGQAVALRAKAFGFNVLFYDPYLSDGVERALGLQRVSTLQDLLFHSDCVTLHCGLNEHNHHLINDFTVKQMRQGAFLVNTARGGLVDEKALAQALKEGRIRGAALDVHESEPFSFSQGPLKDAPNLICTPHAAWYSEQASIEMREEAAREIRRAITGRIPDSLKNCVNKDHLTAATHWASMDPAVVHPELNGAAYRYPPGVVGVAPTGIPAAVEGIVPSAMSLSHGLPPVAHPPHAPSPGQTVKPEADRDHASDQL

SEQ ID NO: 20493 - protein, 429 aa, Homo sapiens
  Payload ID: 4141
  Gene Symbol: CTBP1
  Gene Name: C-terminal binding protein 1
  Uniprot ID: Q13363
  ENSP ID: ENSP00000372411
MSGVRPPIMNGPLHPRPLVALLDGRDCTVEMPILKDVATVAFCDAQSTQEIHEKVLNEAVGALMYHTITLTREDLEKFKALRIIVRIGSGFDNIDIKSAGDLGIAVCNVPAASVEETADSTLCHILNLYRRATWLHQALREGTRVQSVEQIREVASGAARIRGETLGIIGLGRVGQAVALRAKAFGFNVLFYDPYLSDGVERALGLQRVSTLQDLLFHSDCVTLHCGLNEHNHHLINDFTVKQMRQGAFLVNTARGGLVDEKALAQALKEGRIRGAALDVHESEPFSFSQGPLKDAPNLICTPHAAWYSEQASIEMREEAAREIRRAITGRIPDSLKNCVNKDHLTAATHWASMDPAVVHPELNGAAYRYPPGVVGVAPTGIPAAVEGIVPSAMSLSHGLPPVAHPPHAPSPGQTVKPEADRDHASDQL

SEQ ID NO: 20494 - protein, 145 aa, Homo sapiens
  Payload ID: 4141
  Gene Symbol: CTBP1
  Gene Name: C-terminal binding protein 1
  ENSP ID: ENSP00000420983
MSGVRPPIMNGPLHPRPLVALLDGRDCTVEMPILKDVATVAFCDAQSTQEIHEKVLNEAVGALMYHTITLTREDLEKFKALRIIVRIGSGFDNIDIKSAGDLGIAVCNVPAASVEETADSTLCHILNLYRRATWLHQALREGTRV

SEQ ID NO: 20495 - protein, 184 aa, Homo sapiens
  Payload ID: 4141
  Gene Symbol: CTBP1
  Gene Name: C-terminal binding protein 1
  ENSP ID: ENSP00000422148
  MOD_RES (1)..(1): Any amino acid
XAFLVNTARGGLVDEKALAQALKEGRIRGAALDVHESEPFSFSQGPLKDAPNLICTPHAAWYSEQASIEMREEAAREIRRAITGRIPDSLKNCVNKDHLTAATHWASMDPAVVHPELNGAAYSRYPPGVVGVAPTGIPAAVEGIVPSAMSLSHGLPPVAHPPHAPSPGQTVKPEADRDHASDQL

SEQ ID NO: 20496 - protein, 287 aa, Homo sapiens
  Payload ID: 4141
  Gene Symbol: CTBP1
  Gene Name: C-terminal binding protein 1
  ENSP ID: ENSP00000422364
  MOD_RES (1)..(1): Any amino acid
XLEKFKALRIIVRIGSGFDNIDIKSAGDLGRVGQAVALRAKAFGFNVLFYDPYLSDGVERALGLQRVSTLQDLLFHSDCVTLHCGLNEHNHHLINDFTVKQMRQGAFLVNTARGGLVDEKALAQALKEGRIRGAALDVHESEPFSFSQGPLKDAPNLICTPHAAWYSEQASIEMREEAAREIRRAITGRIPDSLKNCVNKDHLTAATHWASMDPAVVHPELNGAAYRYPPGVVGVAPTGIPAAVEGIVPSAMSLSHGLPPVAHPPHAPSPGQTVKPEADRDHASDQL

SEQ ID NO: 20497 - protein, 24 aa, Homo sapiens
  Payload ID: 4141
  Gene Symbol: CTBP1
  Gene Name: C-terminal binding protein 1
  ENSP ID: ENSP00000422730
  MOD_RES (1)..(1): Any amino acid
XIRGETLGIIGLGAHRKTLYTFTP

SEQ ID NO: 20498 - protein, 168 aa, Homo sapiens
  Payload ID: 4141
  Gene Symbol: CTBP1
  Gene Name: C-terminal binding protein 1
  ENSP ID: ENSP00000423872
MSGVRPPIMNGPLHPRPLVALLDGRDCTVEMPILKDVATVAFCDAQSTQEIHEKVPPRGRLGLAEPHVGGSWRDGSTAGPGHSRSGCHWGRSSLCPSRPAPSGGGHGVFPGHHQEVDIGFALSPIRRWTRGFPCAPSGGGHHVCPEPHQEVDIRFALCPIRRWTRGFP

SEQ ID NO: 20499 - protein, 145 aa, Homo sapiens
  Payload ID: 4141
  Gene Symbol: CTBP1
  Gene Name: C-terminal binding protein 1
  ENSP ID: ENSP00000424575
  MOD_RES (1)..(1): Any amino acid
XGETLGIIGLGRVGQAVALRAKAFGFNVLFYDPYLSDGVERALGLQRVSTLQDLLFHSDCVTLHCGLNEHNHHLINDFTVKQMRQGAFLVNTARGGLVDEKALAQALKEGRIRGAALDVHESEPFRCPHGQCRPPALPCPPSCRP

SEQ ID NO: 20500 - protein, 186 aa, Homo sapiens
  Payload ID: 4141
  Gene Symbol: CTBP1
  Gene Name: C-terminal binding protein 1
  ENSP ID: ENSP00000424684
MCRRLSDGVRPPIMNGPLHPRPLVALLDGRDCTVEMPILKDVATVAFCDAQSTQEIHEKVLNEAVGALMYHTITLTREDLEKFKALRIIVRIGSGFDNIDIKSAGDLGIAVCNVPAASVEETADSTLCHILNLYRRATWLHQALREGTRVQSVEQIREVASGAARIRGETLGIIGLGRVGQAVALR

SEQ ID NO: 20501 - protein, 171 aa, Homo sapiens
  Payload ID: 4141
  Gene Symbol: CTBP1
  Gene Name: C-terminal binding protein 1
  ENSP ID: ENSP00000425053
MSGVRPPIMNGPLHPRPLVALLDGRDCTVEMPILKDVATVAFCDAQSTQEIHEKVLNEAVGALMYHTITLTREDLEKFKALRIIVRIGSGFDNIDIKSAGDLGIAVCNVPAASVEETADSTLCHILNLYRRATWLHQALREGTRVQSVEQIREVASGAARIRGETLGIIGL

SEQ ID NO: 20502 - protein, 202 aa, Homo sapiens
  Payload ID: 4141
  Gene Symbol: CTBP1
  Gene Name: C-terminal binding protein 1
  ENSP ID: ENSP00000426470
MSGVRPPIMNGPLHPRPLVALLDGRDCTVEMPILKDVATVAFCDAQSTQEIHEKVLNEAVGALMYHTITLTREDLEKFKALRIIVRIGSGFDNIDIKSAGDLGIAVCNVPAASVEETADSTLCHILNLYRRATWLHQALREGTRVQSVEQIREVASGAARIRGETLGIIGLGSPLLLTAVLVPPAFGESDVSGGLGEAATPR

SEQ ID NO: 20503 - protein, 69 aa, Homo sapiens
  Payload ID: 4141
  Gene Symbol: CTBP1
  Gene Name: C-terminal binding protein 1
  ENSP ID: ENSP00000487417
APSGGGHGVFPAHHQEVDTRFVLSPIRRWTLGLPCAPSGGGHSVYPEPHQEVDTRFALCPIRRWTLGFS

SEQ ID NO: 20504 - protein, 985 aa, Homo sapiens
  Payload ID: 4142
  Gene Symbol: CTBP2
  Gene Name: C-terminal binding protein 2
  Uniprot ID: P56545
  ENSP ID: ENSP00000311825
MPVPSRHINIGRSQSWDAAGWYEGPWENAESLRPLGRRSSLTYGTAEGTWFEPNHRPQDAALPVAAEPYLYREAVYNSVAARKGSTPDFTFYDSRQAVMSGRSPLLPREYYSDPSGAARVPKEPPLYRDPGVSRPVPSYGVLGSRTSWDPMQGRSPALQDAGHLYRDPGGKMIPQGRQTQSRAASPGRYGREQPDTRYGAEVPAYPLSQVFSDISERPIDPAPARQVAPTCLVVDPSSAAAPEGSTGVAPGALNRGYGPARESIPSKMAYETYEADLSTFQGPGGKRTVLPEFLAFLRAEGLAEATLGALLQQGFDSPAVLATLEDADIKSVAPNLGQARVLSRLANSCRTEMQLRRQDRGGPLPRARSSSFSHRSELLHGDLASLGAAAPLQTASPRAGDPARRPSSAPSQHLLETAATYSAPGVGTHAPHFPSNSGYSSPTPCALTARLSPTYPLQAGVALTNPGPSNPLHPGPRTAYSTAYTVPMELLKRERNVAASPLPSPHGSPQVLRKPGAPLGPSTLPPASQSLHTPHSPYQKVARRTGAPIIVSTMLAPEPSIRPQIMNGPLHPRPLVALLDGRDCTVEMPILKDLATVAFCDAQSTQEIHEKVLNEAVGAMMYHTITLTREDLEKFKALRVIVRIGSGYDNVDIKAAGELGIAVCNIPSAAVEETADSTICHILNLYRRNTWLYQALREGTRVQSVEQIREVASGAARIRGETLGLIGFGRTGQAVAVRAKAFGFSVIFYDPYLQDGIERSLGVQRVYTLQDLLYQSDCVSLHCNLNEHNHHLINDFTIKQMRQGAFLVNAARGGLVDEKALAQALKEGRIRGAALDVHESEPFSFAQGPLKDAPNLICTPHTAWYSEQASLEMREAAATEIRRAITGRIPESLRNCVNKEFFVTSAPWSVIDQQAIHPELNGATYRYPPGIVGVAPGGLPAAMEGIIPGGIPVTHNLPTVAHPSQAPSPNQPTKHGDNREHPNEQ

SEQ ID NO: 20505 - protein, 445 aa, Homo sapiens
  Payload ID: 4142
  Gene Symbol: CTBP2
  Gene Name: C-terminal binding protein 2
  Uniprot ID: P56545
  ENSP ID: ENSP00000338615
MALVDKHKVKRQRLDRICEGIRPQIMNGPLHPRPLVALLDGRDCTVEMPILKDLATVAFCDAQSTQEIHEKVLNEAVGAMMYHTITLTREDLEKFKALRVIVRIGSGYDNVDIKAAGELGIAVCNIPSAAVEETADSTICHILNLYRRNTWLYQALREGTRVQSVEQIREVASGAARIRGETLGLIGFGRTGQAVAVRAKAFGFSVIFYDPYLQDGIERSLGVQRVYTLQDLLYQSDCVSLHCNLNEHNHHLINDFTIKQMRQGAFLVNAARGGLVDEKALAQALKEGRIRGAALDVHESEPFSFAQGPLKDAPNLICTPHTAWYSEQASLEMREAAATEIRRAITGRIPESLRNCVNKEFFVTSAPWSVIDQQAIHPELNGATYRYPPGIVGVAPGGLPAAMEGIIPGGIPVTHNLPTVAHPSQAPSPNQPTKHGDNREHPNEQ

SEQ ID NO: 20506 - protein, 513 aa, Homo sapiens
  Payload ID: 4142
  Gene Symbol: CTBP2
  Gene Name: C-terminal binding protein 2
  ENSP ID: ENSP00000357816
MRPGLPGPTGLCAQTSSRGQKSVLKQKESCGIWQLYHFLSRKQEPRWEPCVSGSSSGDGAVADLADELRGYPALCCTLPVHSYRSWAGIRPQIMNGPLHPRPLVALLDGRDCTVEMPILKDLATVAFCDAQSTQEIHEKVLNEAVGAMMYHTITLTREDLEKFKALRVIVRIGSGYDNVDIKAAGELGIAVCNIPSAAVEETADSTICHILNLYRRNTWLYQALREGTRVQSVEQIREVASGAARIRGETLGLIGFGRTGQAVAVRAKAFGFSVIFYDPYLQDGIERSLGVQRVYTLQDLLYQSDCVSLHCNLNEHNHHLINDFTIKQMRQGAFLVNAARGGLVDEKALAQALKEGRIRGAALDVHESEPFSFAQGPLKDAPNLICTPHTAWYSEQASLEMREAAATEIRRAITGRIPESLRNCVNKEFFVTSAPWSVIDQQAIHPELNGATYRYPPGIVGVAPGGLPAAMEGIIPGGIPVTHNLPTVAHPSQAPSPNQPTKHGDNREHPNEQ

SEQ ID NO: 20507 - protein, 445 aa, Homo sapiens; identical to SEQ ID NO: 20505
  Payload ID: 4142
  Gene Symbol: CTBP2
  Gene Name: C-terminal binding protein 2
  Uniprot ID: P56545
  ENSP ID: ENSP00000410474

SEQ ID NO: 20508 - protein, 3 aa, Homo sapiens
  Payload ID: 4142
  Gene Symbol: CTBP2
  Gene Name: C-terminal binding protein 2
  ENSP ID: ENSP00000434424
MAL

SEQ ID NO: 20509 - protein, 445 aa, Homo sapiens; identical to SEQ ID NO: 20505
  Payload ID: 4142
  Gene Symbol: CTBP2
  Gene Name: C-terminal binding protein 2
  Uniprot ID: P56545
  ENSP ID: ENSP00000434630

SEQ ID NO: 20510 - protein, 445 aa, Homo sapiens; identical to SEQ ID NO: 20505
  Payload ID: 4142
  Gene Symbol: CTBP2
  Gene Name: C-terminal binding protein 2
  Uniprot ID: P56545
  ENSP ID: ENSP00000436285

SEQ ID NO: 20511 - protein, 117 aa, Homo sapiens
  Payload ID: 4142
  Gene Symbol: CTBP2
  Gene Name: C-terminal binding protein 2
  ENSP ID: ENSP00000481909
  MOD_RES (1)..(1): Any amino acid
XGYDNVDIKAAGELGIAVCNIPSAAVEETADSTICHILNLYRRNTWLYQALREGTRVQSVEQIREVASGAARIRGETLGLIGFGWDRAVPGRAEGLHPAGFAVSERLRLLALQSQRT

SEQ ID NO: 20512 - protein, 591 aa, Homo sapiens
  Payload ID: 4143
  Gene Symbol: CTPS1
  Gene Name: CTP synthase 1
  Uniprot ID: P17812
  ENSP ID: ENSP00000361699
MKYILVTGGVISGIGKGIIASSVGTILKSCGLHVTSIKIDPYINIDAGTFSPYEHGEVFVLDDGGEVDLDLGNYERFLDIRLTKDNNLTTGKIYQYVINKERKGDYLGKTVQVVPHITDAIQEWVMRQALIPVDEDGLEPQVCVIELGGTVGDIESMPFIEAFRQFQFKVKRENFCNIHVSLVPQPSSTGEQKTKPTQNSVRELRGLGLSPDLVVCRCSNPLDTSVKEKISMFCHVEPEQVICVHDVSSIYRVPLLLEEQGVVDYFLRRLDLPIERQPRKMLMKWKEMADRYDRLLETCSIALVGKYTKFSDSYASVIKALEHSALAINHKLEIKYIDSADLEPITSQEEPVRYHEAWQKLCSAHGVLVPGGFGVRGTEGKIQAIAWARNQKKPFLGVCLGMQLAVVEFSRNVLGWQDANSTEFDPTTSHPVVVDMPEHNPGQMGGTMRLGKRRTLFQTKNSVMRKLYGDADYLEERHRHRFEVNPVWKKCLEEQGLKFVGQDVEGERMEIVELEDHPFFVGVQYHPEFLSRPIKPSPPYFGLLLASVGRLSHYLQKGCRLSPRDTYSDRSGSSSPDSEITELKFPSINHD

SEQ ID NO: 20513 - protein, 591 aa, Homo sapiens; identical to SEQ ID NO: 20512
  Payload ID: 4143
  Gene Symbol: CTPS1
  Gene Name: CTP synthase 1
  Uniprot ID: P17812
  ENSP ID: ENSP00000361704

SEQ ID NO: 20514 - protein, 586 aa, Homo sapiens
  Payload ID: 4144
  Gene Symbol: CTPS2
  Gene Name: CTP synthase 2
  Uniprot ID: Q9NRF8
  ENSP ID: ENSP00000352222
MKYILVTGGVISGIGKGIIASSIGTILKSCGLRVTAIKIDPYINIDAGTFSPYEHGEVFVLNDGGEVDLDLGNYERFLDINLYKDNNITTGKIYQHVINKERRGDYLGKTVQVVPHITDAVQEWVMNQAKVPVDGNKEEPQICVIELGGTIGDIEGMPFVEAFRQFQFKAKRENFCNIHVSLVPQLSATGEQKTKPTQNSVRALRGLGLSPDLIVCRSSTPIEMAVKEKISMFCHVNPEQVICIHDVSSTYRVPVLLEEQSIVKYFKERLHLPIGDSASNLLFKWRNMADRYERLQKICSIALVGKYTKLRDCYASVFKALEHSALAINHKLNLMYIDSIDLEKITETEDPVKFHEAWQKLCKADGILVPGGFGIRGTLGKLQAISWARTKKIPFLGVCLGMQLAVIEFARNCLNLKDADSTEFRPNAPVPLVIDMPEHNPGNLGGTMRLGIRRTVFKTENSILRKLYGDVPFIEERHRHRFEVNPNLIKQFEQNDLSFVGQDVDGDRMEIIELANHPYFVGVQFHPEFSSRPMKPSPPYLGLLLAATGNLNAYLQQGCKLSSSDRYSDASDDSFSEPRIAELEIS

SEQ ID NO: 20515 - protein, 586 aa, Homo sapiens; identical to SEQ ID NO: 20514
  Payload ID: 4144
  Gene Symbol: CTPS2
  Gene Name: CTP synthase 2
  Uniprot ID: Q9NRF8
  ENSP ID: ENSP00000369590

SEQ ID NO: 20516 - protein, 132 aa, Homo sapiens
  Payload ID: 4144
  Gene Symbol: CTPS2
  Gene Name: CTP synthase 2
  ENSP ID: ENSP00000400431
  MOD_RES (1)..(1): Any amino acid
XGKLQAISWARTKKIPFLGVCLGMQLAVIEFARNCLNLKDADSTEFRPNAPVPLVIDMPEHNPGNLGGTMRLGIRRTVFKTENSILISLSLGLASVEHTECPSAFDLRDSLFIGLFCELPMLLEMNLDWDLD

SEQ ID NO: 20517 - protein, 586 aa, Homo sapiens; identical to SEQ ID NO: 20514
  Payload ID: 4144
  Gene Symbol: CTPS2
  Gene Name: CTP synthase 2
  Uniprot ID: Q9NRF8
  ENSP ID: ENSP00000401264

SEQ ID NO: 20518 - protein, 1173 aa, Homo sapiens
  Payload ID: 4145
  Gene Symbol: CTR9
  Gene Name: CTR9 homolog, Paf1/RNA polymerase II complex component
  Uniprot ID: Q6PD62
  ENSP ID: ENSP00000355013
MSRGSIEIPLRDTDEVIELDFDQLPEGDEVISILKQEHTQLHIWIALALEYYKQGKTEEFVKLLEAARIDGNLDYRDHEKDQMTCLDTLAAYYVQQARKEKNKDNKKDLITQATLLYTMADKIIMYDQNHLLGRACFCLLEGDKMDQADAQFHFVLNQSPNNIPALLGKACISFNKKDYRGALAYYKKALRTNPGCPAEVRLGMGHCFVKLNKLEKARLAFSRALELNSKCVGALVGLAVLELNNKEADSIKNGVQLLSRAYTIDPSNPMVLNHLANHFFFKKDYSKVQHLALHAFHNTEVEAMQAESCYQLARSFHVQEDYDQAFQYYYQATQFASSSFVLPFFGLGQMYIYRGDKENASQCFEKVLKAYPNNYETMKILGSLYAASEDQEKRDIAKGHLKKVTEQYPDDVEAWIELAQILEQTDIQGALSAYGTATRILQEKVQADVPPEILNNVGALHFRLGNLGEAKKYFLASLDRAKAEAEHDEHYYNAISVTTSYNLARLYEAMCEFHEAEKLYKNILREHPNYVDCYLRLGAMARDKGNFYEASDWFKEALQINQDHPDAWSLIGNLHLAKQEWGPGQKKFERILKQPSTQSDTYSMLALGNVWLQTLHQPTRDREKEKRHQDRALAIYKQVLRNDAKNLYAANGIGAVLAHKGYFREARDVFAQVREATADISDVWLNLAHIYVEQKQYISAVQMYENCLRKFYKHQNTEVVLYLARALFKCGKLQECKQTLLKARHVAPSDTVLMFNVALVLQRLATSVLKDEKSNLKEVLNAVKELELAHRYFSYLSKVGDKMRFDLALAATEARQCSDLLSQAQYHVARARKQDEEERELRAKQEQEKELLRQKLLKEQEEKRLREKEEQKKLLEQRAQYVEKTKNILMFTGETEATKEKKRGGGGGRRSKKGGEFDEFVNDDTDDDLPISKKKKRRKGSGSEQEGEDEEGGERKKKKRRRHPKGEEGSDDDETENGPKPKKRRPPKAEKKKAPKPERLPPSMKGKIKSKAIISSSDDSSDEDKLKIADEGHPRNSNSNSDSDEDEQRKKCASSESDSDENQNKSGSEAGSPRRPRRQRSDQDSDSDQPSRKRRPSGSEQSDNESVQSGRSHSGVSENDSRPASPSAESDHESERGSDNEGSGQGSGNESEPEGSNNEASDRGSEHGSDDSD

SEQ ID NO: 20519 - protein, 300 aa, Homo sapiens
  Payload ID: 4145
  Gene Symbol: CTR9
  Gene Name: CTR9 homolog, Paf1/RNA polymerase II complex component
  ENSP ID: ENSP00000431458
DEVIELDFDQLPEGDEVISILKQEHTQLHIWIALALEYYKQGKTEEFVKLLEAARIDGNLDYRDHEKDQMTCLDTLAAYYVQQARKEKNKDNKKDLITQATLLYTMADKIIMYDQNHLLGRACFCLLEGDKMDQADAQFHFVLNQSPNNIPALLGKACISFNKKDYRGALAYYKKALRTNPGCPAEVRLGMGHCFVKLNKLEKARLAFSRALELNSKCVGALVGLAVLELNNKEDYSKVQHLALHAFHNTEVEAMQAESCYQLARSFHVQEDYDQAFQYYYQATQFASSSFVLPFFGLGQ

SEQ ID NO: 20520 - protein, 1217 aa, Homo sapiens
  Payload ID: 4146
  Gene Symbol: CTC1
  Gene Name: CTS telomere maintenance complex component 1
  Uniprot ID: Q2NKJ3
  ENSP ID: ENSP00000313759
MAAGRAQVPSSEQAWLEDAQVFIQKTLCPAVKEPNVQLTPLVIDCVKTVWLSQGRNQGSTLPLSYSFVSVQDLKTHQRLPCCSHLSWSSSAYQAWAQEAGPNGNPLPREQLLLLGTLTDLSADLEQECRNGSLYVRDNTGVLSCELIDLDLSWLGHLFLFPRWSYLPPARWNSSGEGHLELWDAPVPVFPLTISPGPVTPIPVLYPESASCLLRLRNKLRGVQRNLAGSLVRLSALVKSKQKAYFILSLGRSHPAVTHVSIIVQVPAQLVWHRALRPGTAYVLTELRVSKIRGQRQHVWMTSQSSRLLLLKPECVQELELELEGPLLEADPKPLPMPSNSEDKKDPESLVRYSRLLSYSGAVTGVLNEPAGLYELDGQLGLCLAYQQFRGLRRVMRPGVCLQLQDVHLLQSVGGGTRRPVLAPCLRGAVLLQSFSRQKPGAHSSRQAYGASLYEQLVWERQLGLPLYLWATKALEELACKLCPHVLRHHQFLQHSSPGSPSLGLQLLAPTLDLLAPPGSPVRNAHNEILEEPHHCPLQKYTRLQTPSSFPTLATLKEEGQRKAWASFDPKALLPLPEASYLPSCQLNRRLAWSWLCLLPSAFCPAQVLLGVLVASSHKGCLQLRDQSGSLPCLLLAKHSQPLSDPRLIGCLVRAERFQLIVERDVRSSFPSWKELSMPGFIQKQQARVYVQFFLADALILPVPRPCLHSATPSTPQTDPTGPEGPHLGQSRLFLLCHKEALMKRNFCVPPGASPEVPKPALSFYVLGSWLGGTQRKEGTGWGLPEPQGNDDNDQKVHLIFFGSSVRWFEFLHPGQVYRLIAPGPATPMLFEKDGSSCISRRPLELAGCASCLTVQDNWTLELESSQDIQDVLDANKSLPESSLTDLLSDNFTDSLVSFSAEILSRTLCEPLVASLWMKLGNTGAMRRCVKLTVALETAECEFPPHLDVYIEDPHLPPSLGLLPGARVHFSQLEKRVSRSHNVYCCFRSSTYVQVLSFPPETTISIPLPHIYLAELLQGGQSPFQATASCHIVSVFSLQLFWVCAYCTSICRQGKCTRLGSTCPTQTAISQAIIRLLVEDGTAEAVVTCRNHHVAAALGLCPREWASLLDFVQVPGRVVLQFAGPGAQLESSARVDEPMTMFLWTLCTSPSVLRPIVLSFELERKPSKIVPLEPPRLQRFQCGELPFLTHVNPRLRLSCLSIRESEYSSSLGILASSC

SEQ ID NO: 20521 - protein, 1031 aa, Homo sapiens
  Payload ID: 4146
  Gene Symbol: CTC1
  Gene Name: CTS telomere maintenance complex component 1
  Uniprot ID: Q2NKJ3
  ENSP ID: ENSP00000396018
MAAGRAQVPSSEQAWLEDAQVFIQKTLCPAVKEPNVQLTPLVIDCVKTVWLSQGRNQGSTLPLSYSFVSVQDLKTHQRLPCCSHLSWSSSAYQAWAQEAGPNGNPLPREQLLLLGTLTDLSADLEQECRNGSLYVRDNTGVLSCELIDLDLSWLGHLFLFPRWSYLPPARWNSSGEGHLELWDAPVPVFPLTISPGPVTPIPVLYPESASCLLRLRSHPAVTHVSIIVQVPAQLVWHRALRPGTAYVLTELRVSKIRGQRQHVWMTSQSSRLLLLKPECVQELELELEGPLLEADPKPLPMPSNSEDKKDPESLVRYSRLLSYSGAVTGVLNEPAGLYELDGQLGLCLAYQQFRGLRRVMRPGVCLQLQDVHLLQSVGGGTRRPVLAPCLRGAVLLQSFSRQKPGAHSSRQAYGASLYEQLVWERQLGLPLYLWATKALEELACKLCPHVLRHHQFLQHSSPGSPSLGLQLLAPTLDLLAPPGSPVRNAHNEILEEPHHCPLQKYTRLQTPSSFPTLATLKEEGQRKAWASFDPKALLPLPEASYLPSCQLNRRLAWSWLCLLPSAFCPAQVLLGVLVASSHKGCLQLRDQSGSLPCLLLAKHSQPLSDPRLIGCLVRAERFQLIVERDVRSSFPSWKELSMPGFIQKQQARVYVQFFLADALILPVPRPCLHSATPSTPQTDPTGPEGPHLGQSRLFLLCHKEALMKRNFCVPPGASPEVPKPALSFYVLGSWLGGTQRKEGTGWGLPEPQGNDDNDQKVHLIFFGSSVRWFEFLHPGQVYRLIAPGPATPMLFEKDGSSCISRRPLELAGCASCLTVQDNWTLELESSQDIQDVLDANKSLPESSLTDLLSDNFTDSLVSFSAEILSRTLCEPLVASLWMKLGNTGAMRRCVKLTVALETAECEFPPHLDVYIEDPHLPPSLGLLPGARVHFSQLEKRVSRSHNVYCCFRSSTYVQVLSFPPETTISIPLPHIYLAELLQGGQSPFQATASCHIVSVFSLQLFWVCAYCTSICRQAPGGGWDCRSRGDL

SEQ ID NO: 20522 - protein, 125 aa, Homo sapiens
  Payload ID: 4146
  Gene Symbol: CTC1
  Gene Name: CTS telomere maintenance complex component 1
  ENSP ID: ENSP00000462607
PHLDVYIEDPHLPPSLGLLPGARVHFSQLEKRVSRSHNVYCCFRSSTYVQVLSFPPETTISIPLPHIYLAELLQGGQSPFQATASCHIVSVFSLQLFWSSARVDEPMTMFLWTLCTSPSVLRPIV

SEQ ID NO: 20523 - protein, 123 aa, Homo sapiens
  Payload ID: 4146
  Gene Symbol: CTC1
  Gene Name: CTS telomere maintenance complex component 1
  ENSP ID: ENSP00000462720
  MOD_RES (1)..(1): Any amino acid
XGQSPFQATASCHIVSVFSLQLFWVCAYCTSICRQSSARVDEPMTMFLWTLCTSPSVLRPIVLSFELERKPSKIVPLEPPRLQRFQCGELPFLTHVNPRLRLSCLSIRESEYSSSLGILASSC

SEQ ID NO: 20524 - protein, 134 aa, Homo sapiens
  Payload ID: 4146
  Gene Symbol: CTC1
  Gene Name: CTS telomere maintenance complex component 1
  ENSP ID: ENSP00000463230
  MOD_RES (1)..(1): Any amino acid
XPRPCLHSATPSTPQTDPTGPEGPHLGQSRLFLLCHKEALMKRNFCVPPGASPEVPKPALSFYVLGSWLGGTQRKEGTGWGLPEPQGNDDNDQKVHLIFFGSSVRWFEFLHPGQVYRLIAPGPAFHRFLGVFLR

SEQ ID NO: 20525 - protein, 639 aa, Homo sapiens
  Payload ID: 4147
  Gene Symbol: CTTNBP2NL
  Gene Name: CTTNBP2 N-terminal like
  Uniprot ID: Q9P2B4
  ENSP ID: ENSP00000271277
MNLEKLSKPELLTLFSILEGELEARDLVIEALKAQHRDTFIEERYGKYNISDPLMALQRDFETLKEKNDGEKQPVCTNPLSILKVVMKQCKNMQERMLSQLAAAESRHRKVILDLEEERQRHAQDTAEGDDVTYMLEKERERLTQQLEFEKSQVKKFEKEQKKLSSQLEEERSRHKQLSSMLVLECKKATNKAAEEGQKAGELSLKLEKEKSRVSKLEEELAAERKRGLQTEAQVEKQLSEFDIEREQLRAKLNREENRTKTLKEEMESLKKIVKDLEASHQHSSPNEQLKKPVTVSKGTATEPLMLMSVFCQTESFPAERTHGSNIAKMTNTGLPGPATPAYSYAKTNGHCDPEIQTTRELTAGNNVENQVPPREKSVALAQEKPVENGGCPVGIETPVPMPSPLSSSGSSLSPSSTASSSLTSSPCSSPVLTKRLLGSSASSPGYQSSYQVGINQRFHAARHKFQSQADQDQQASGLQSPPSRDLSPTLIDNSAAKQLARNTVTQVLSRFTSQQGPIKPVSPNSSPFGTDYRNLANTANPRGDTSHSPTPGKVSSPLSPLSPGIKSPTIPRAERGNPPPIPPKKPGLTPSPSATTPLTKTHSQAASLTTAEDLASSCSSNTVVANGKDVELLLPTSS

SEQ ID NO: 20526 - protein, 271 aa, Homo sapiens
  Payload ID: 4147
  Gene Symbol: CTTNBP2NL
  Gene Name: CTTNBP2 N-terminal like
  ENSP ID: ENSP00000390976
MNLEKLSKPELLTLFSILEGELEARDLVIEALKAQHRDTFIEERYGKYNISDPLMALQRDFETLKEKNDGEKQPVCTNPLSILKVVMKQCKNMQERMLSQLAAAESRHRKVILDLEEERQRHAQDTAEGDDVTYMLEKERERLTQQLEFEKSQVKKFEKEQKKLSSQLEEERSRHKQLSSMLVLECKKATNKAAEEGQKAGELSLKLEKEKSRVSKLEEELAAERKRGLQTEAQVEKQLSEFDIEREQLRAKLNREENRTKTLKEEMESLK

SEQ ID NO: 20527 - protein, 280 aa, Homo sapiens
  Payload ID: 4148
  Gene Symbol: CLEC1A
  Gene Name: C-type lectin domain family 1, member A
  Uniprot ID: Q8NC01
  ENSP ID: ENSP00000326407
MQAKYSSTRDMLDDDGDTTMSLHSQGSATTRHPEPRRTEHRAPSSTWRPVALTLLTLCLVLLIGLAALGLLFFQYYQLSNTGQDTISQMEERLGNTSQELQSLQVQNIKLAGSLQHVAEKLCRELYNKAGAHRCSPCTEQWKWHGDNCYQFYKDSKSWEDCKYFCLSENSTMLKINKQEDLEFAASQSYSEFFYSYWTGLLRPDSGKAWLWMDGTPFTSELFHIIIDVTSPRSRDCVAILNGMIFSKDCKELKRCVCERRAGMVKPESLHVPPETLGEGD

SEQ ID NO: 20528 - protein, 70 aa, Homo sapiens
  Payload ID: 4148
  Gene Symbol: CLEC1A
  Gene Name: C-type lectin domain family 1, member A
  ENSP ID: ENSP00000396272
MQAKYSSTRDMLDDDGDTTMSLHSQGSATTRHPEPRRTEHRAPSSTWRPVALTLLTLCLVLLIGLAALGL

SEQ ID NO: 20529 - protein, 247 aa, Homo sapiens
  Payload ID: 4148
  Gene Symbol: CLEC1A
  Gene Name: C-type lectin domain family 1, member A
  ENSP ID: ENSP00000415048
MQAKYSSTRDMLDDDGDTTMSLHSQGSATTRHPEPRRTVFQYYQLSNTGQDTISQMEERLGNTSQELQSLQVQNIKLAGSLQHVAEKLCRELYNKAGAHRCSPCTEQWKWHGDNCYQFYKDSKSWEDCKYFCLSENSTMLKINKQEDLEFAASQSYSEFFYSYWTGLLRPDSGKAWLWMDGTPFTSELFHIIIDVTSPRSRDCVAILNGMIFSKDCKELKRCVCERRAGMVKPESLHVPPETLGEGD

SEQ ID NO: 20530 - protein, 188 aa, Homo sapiens
  Payload ID: 4148
  Gene Symbol: CLEC1A
  Gene Name: C-type lectin domain family 1, member A
  ENSP ID: ENSP00000417010
MQAKYSSTRDMLDDDGDTTMSLHSQGSATTRHPEPRRTAHRCSPCTEQWKWHGDNCYQFYKDSKSWEDCKYFCLSENSTMLKINKQEDLEFAASQSYSEFFYSYWTGLLRPDSGKAWLWMDGTPFTSELFHIIIDVTSPRSRDCVAILNGMIFSKDCKELKRCVCERRAGMVKPESLHVPPETLGEGD

SEQ ID NO: 20531 - protein, 66 aa, Homo sapiens
  Payload ID: 4148
  Gene Symbol: CLEC1A
  Gene Name: C-type lectin domain family 1, member A
  ENSP ID: ENSP00000438408
MQAKYSSTRDMLDDDGDTTMSLHSQGSATTRHPEPRRTGWSRVARSRLTAALTSLAQAILPPQPSE

SEQ ID NO: 20532 - protein, 229 aa, Homo sapiens
  Payload ID: 4149
  Gene Symbol: CLEC1B
  Gene Name: C-type lectin domain family 1, member B
  Uniprot ID: Q9P126
  ENSP ID: ENSP00000298527
MQDEDGYITLNIKTRKPALISVGSASSSWWRVMALILLILCVGMVVGLVALGIWSVMQRNYLQGENENRTGTLQQLAKRFCQYVVKQSELKGTFKGHKCSPCDTNWRYYGDSCYGFFRHNLTWEESKQYCTDMNATLLKIDNRNIVEYIKARTHLIRWVGLSRQKSNEVWKWEDGSVISENMFEFLEDGKGNMNCAYFHNGKMHPTFCENKHYLMCERKAGMTKVDQLP

SEQ ID NO: 20533 - protein, 196 aa, Homo sapiens
  Payload ID: 4149
  Gene Symbol: CLEC1B
  Gene Name: C-type lectin domain family 1, member B
  Uniprot ID: Q9P126
  ENSP ID: ENSP00000327169
MQDEDGYITLNIKTRKPALISAVMQRNYLQGENENRTGTLQQLAKRFCQYVVKQSELKGTFKGHKCSPCDTNWRYYGDSCYGFFRHNLTWEESKQYCTDMNATLLKIDNRNIVEYIKARTHLIRWVGLSRQKSNEVWKWEDGSVISENMFEFLEDGKGNMNCAYFHNGKMHPTFCENKHYLMCERKAGMTKVDQLP

SEQ ID NO: 20534 - protein, 96 aa, Homo sapiens
  Payload ID: 4149
  Gene Symbol: CLEC1B
  Gene Name: C-type lectin domain family 1, member B
  ENSP ID: ENSP00000381910
FKGHKCSPCDTNWRYYGDSCYGFFRHNLTWEESKQYCTDMNATLLKIDNRNIVEYIKARTHLIRWVGLSRQKSNEVWKWEDGSVISENMKTQIMIF

SEQ ID NO: 20535 - protein, 196 aa, Homo sapiens; identical to SEQ ID NO: 20533
  Payload ID: 4149
  Gene Symbol: CLEC1B
  Gene Name: C-type lectin domain family 1, member B
  Uniprot ID: Q9P126
  ENSP ID: ENSP00000406338

SEQ ID NO: 20536 - protein, 316 aa, Homo sapiens
  Payload ID: 4150
  Gene Symbol: CLEC10A
  Gene Name: C-type lectin domain family 10, member A
  Uniprot ID: Q8IUN9
  ENSP ID: ENSP00000254868
MTRTYENFQYLENKVKVQGFKNGPLPLQSLLQRLCSGPCHLLLSLGLGLLLLVIICVVGFQNSKFQRDLVTLRTDFSNFTSNTVAEIQALTSQGSSLEETIASLKAEVEGFKQERQAGVSELQEHTTQKAHLGHCPHCPSVCVPVHSEMLLRVQQLVQDLKKLTCQVATLNNNASTEGTCCPVNWVEHQDSCYWFSHSGMSWAEAEKYCQLKNAHLVVINSREEQNFVQKYLGSAYTWMGLSDPEGAWKWVDGTDYATGFQNWKPGQPDDWQGHGLGGGEDCAHFHPDGRWNDDVCQRPYHWVCEAGLGQTSQESH

SEQ ID NO: 20537 - protein, 289 aa, Homo sapiens
  Payload ID: 4150
  Gene Symbol: CLEC10A
  Gene Name: C-type lectin domain family 10, member A
  ENSP ID: ENSP00000414938
MTRTYENFQYLENKVKVQGFKNGPLPLQSLLQRLCSGPCHLLLSLGLGLLLLVIICVVGFQNSKFQRDLVTLRTDFSNFTSNTVAEIQALTSQGSSLEETIASLKAEVEGFKQERQAVHSEMLLRVQQLVQDLKKLTCQVATLNNNASTEGTCCPVNWVEHQDSCYWFSHSGMSWAEAEKYCQLKNAHLVVINSREEQNFVQKYLGSAYTWMGLSDPEGAWKWVDGTDYATGFQNWKPGQPDDWQGHGLGGGEDCAHFHPDGRWNDDVCQRPYHWVCEAGLGQTSQESH

SEQ ID NO: 20538 - protein, 256 aa, Homo sapiens
  Payload ID: 4150
  Gene Symbol: CLEC10A
  Gene Name: C-type lectin domain family 10, member A
  Uniprot ID: Q8IUN9
  ENSP ID: ENSP00000458728
MTRTYENFQYLENKVKVQGFKNGPLPLQSLLQRLCSGPCHLLLSLGLGLLLLVIICVVGFQNSKFQRDLVTLRTDFSNFTSNTVAEIQALTSQGSSLEETIASLKAEVEGFKQERQAVHSEMLLRVQQLVQDLKKLTCQVATLNNNASTEGTCCPVNWVEHQDSCYWFSHSGMSWAEAEKYCQLKNAHLVVINSREEQVRASGTQFLRHVPFREMVLKLGRTLESSGSFQNDCHLCHTLRDLIGLSIQRNISKLLS

SEQ ID NO: 20539 - protein, 292 aa, Homo sapiens
  Payload ID: 4150
  Gene Symbol: CLEC10A
  Gene Name: C-type lectin domain family 10, member A
  Uniprot ID: Q8IUN9
  ENSP ID: ENSP00000460252
MTRTYENFQYLENKVKVQGFKNGPLPLQSLLQRLCSGPCHLLLSLGLGLLLLVIICVVGFQNSKFQRDLVTLRTDFSNFTSNTVAEIQALTSQGSSLEETIASLKAEVEGFKQERQAVHSEMLLRVQQLVQDLKKLTCQVATLNNNGEEASTEGTCCPVNWVEHQDSCYWFSHSGMSWAEAEKYCQLKNAHLVVINSREEQNFVQKYLGSAYTWMGLSDPEGAWKWVDGTDYATGFQNWKPGQPDDWQGHGLGGGEDCAHFHPDGRWNDDVCQRPYHWVCEAGLGQTSQESH

SEQ ID NO: 20540 - protein, 136 aa, Homo sapiens
  Payload ID: 4150
  Gene Symbol: CLEC10A
  Gene Name: C-type lectin domain family 10, member A
  ENSP ID: ENSP00000461800
  MOD_RES (1)..(1): Any amino acid
XSSLEETIASLKAEVEGFKQERQAVHSEMLLRVQQLVQDLKKLTCQVATLNNNASTEGTCCPVNWVEHQDSCYWFSHSGMSWAEAEKYCQLKNAHLVVINSREEQELEARPARRLAGARAGWRRGLCSLPSRRQVE

SEQ ID NO: 20541 - protein, 323 aa, Homo sapiens
  Payload ID: 4151
  Gene Symbol: CLEC11A
  Gene Name: C-type lectin domain family 11, member A
  Uniprot ID: Q9Y240
  ENSP ID: ENSP00000250340
MQAAWLLGALVVPQLLGFGHGARGAEREWEGGWGGAQEEEREREALMLKHLQEALGLPAGRGDENPAGTVEGKEDWEMEEDQGEEEEEEATPTPSSGPSPSPTPEDIVTYILGRLAGLDAGLHQLHVRLHALDTRVVELTQGLRQLRNAAGDTRDAVQALQEAQGRAEREHGRLEGCLKGLRLGHKCFLLSRDFEAQAAAQARCTARGGSLAQPADRQQMEALTRYLRAALAPYNWPVWLGVHDRRAEGLYLFENGQRVSFFAWHRSPRPELGAQPSASPHPLSPDQPNGGTLENCVAQASDDGSWWDHDCQRRLYYVCEFPF

SEQ ID NO: 20542 - protein, 317 aa, Homo sapiens
  Payload ID: 4151
  Gene Symbol: CLEC11A
  Gene Name: C-type lectin domain family 11, member A
  ENSP ID: ENSP00000471075
MQAAWLLGALVVPQLLGFGHGARGAEREWEGGWGGAQEEEREREALMLKHLQEALGLPAGRGDENPAGTVEGKEDWEMEEDQGEEEEEEATPTPSSGPSPSPTPEDIVTYILGRLAGLDAGLHQLHVRLHALDTRVVELTQGLRQLRNAAGDTRDAVQALQEAQGRAEREHGRLEDSECMTPPPSLPGPAHRLPEGAAPGPQVLPALARLRSSGGGAGAVHGAGREPGAAGRPPADGGAHSVPARGARSLQLARVAGRARSARRGPLPLRKRPARVLLRLASLTPPRARRPAQRLAASAQPGPAQRWHARELRGAGL

SEQ ID NO: 20543 - protein, 245 aa, Homo sapiens
  Payload ID: 4151
  Gene Symbol: CLEC11A
  Gene Name: C-type lectin domain family 11, member A
  ENSP ID: ENSP00000480599
MQAAWLLGALVVPQLLGFGHGARGAEREWEGGWGGAQEEEREREALMLKHLQEALGLPAGRGDENPAGTVEGKEDWEMEEDQGEEEEEEATPTPSSGPSPSPTPEDIVTYILGRLAGLDAGLHQLHVRLHALDTRVVELTQGLRQLRNAAGDTRDAVQALQEAQGRAEREHGRLEGCLKGLRLGHKCFLLSRDFEAQPSASPHPLSPDQPNGGTLENCVAQASDDGSWWDHDCQRRLYYVCEFPF

SEQ ID NO: 20544 - protein, 265 aa, Homo sapiens
  Payload ID: 4152
  Gene Symbol: CLEC12A
  Gene Name: C-type lectin domain family 12, member A
  Uniprot ID: Q5QGZ9
  ENSP ID: ENSP00000302804
MSEEVTYADLQFQNSSEMEKIPEIGKFGEKAPPAPSHVWRPAALFLTLLCLLLLIGLGVLASMFHVTLKIEMKKMNKLQNISEELQRNISLQLMSNMNISNKIRNLSTTLQTIATKLCRELYSKEQEHKCKPCPRRWIWHKDSCYFLSDDVQTWQESKMACAAQNASLLKINNKNALEFIKSQSRSYDYWLGLSPEEDSTRGMRVDNIINSSAWVIRNAPDLNNMYCGYINRLYVQYYHCTYKKRMICEKMANPVQLGSTYFREA

SEQ ID NO: 20545 - protein, 232 aa, Homo sapiens
  Payload ID: 4152
  Gene Symbol: CLEC12A
  Gene Name: C-type lectin domain family 12, member A
  Uniprot ID: Q5QGZ9
  ENSP ID: ENSP00000345448
MSEEVTYADLQFQNSSEMEKIPEIGKFGEKVHVTLKIEMKKMNKLQNISEELQRNISLQLMSNMNISNKIRNLSTTLQTIATKLCRELYSKEQEHKCKPCPRRWIWHKDSCYFLSDDVQTWQESKMACAAQNASLLKINNKNALEFIKSQSRSYDYWLGLSPEEDSTRGMRVDNIINSSAWVIRNAPDLNNMYCGYINRLYVQYYHCTYKKRMICEKMANPVQLGSTYFREA

SEQ ID NO: 20546 - protein, 275 aa, Homo sapiens
  Payload ID: 4152
  Gene Symbol: CLEC12A
  Gene Name: C-type lectin domain family 12, member A
  Uniprot ID: Q5QGZ9
  ENSP ID: ENSP00000347916
MWIDFFTYSSMSEEVTYADLQFQNSSEMEKIPEIGKFGEKAPPAPSHVWRPAALFLTLLCLLLLIGLGVLASMFHVTLKIEMKKMNKLQNISEELQRNISLQLMSNMNISNKIRNLSTTLQTIATKLCRELYSKEQEHKCKPCPRRWIWHKDSCYFLSDDVQTWQESKMACAAQNASLLKINNKNALEFIKSQSRSYDYWLGLSPEEDSTRGMRVDNIINSSAWVIRNAPDLNNMYCGYINRLYVQYYHCTYKKRMICEKMANPVQLGSTYFREA

SEQ ID NO: 20547 - protein, 165 aa, Homo sapiens
  Payload ID: 4152
  Gene Symbol: CLEC12A
  Gene Name: C-type lectin domain family 12, member A
  ENSP ID: ENSP00000379764
MSEEVTYADLQFQNSSEMEKIPEIGKFGEKAPPAPSHVWRPAALFLTLLCLLLLIGLGVLASMFHVTLKIEMKKMNKLQNISEELQRNISLQLMSNMNISNKIRNLSTTLQTIATKLCRELYSKEQEHKCKPCPRRWIWHKDSCYFLSDDVQTWQESKMACAAQN

SEQ ID NO: 20548 - protein, 213 aa, Homo sapiens
  Payload ID: 4152
  Gene Symbol: CLEC12A
  Gene Name: C-type lectin domain family 12, member A
  Uniprot ID: Q5QGZ9
  ENSP ID: ENSP00000405244
MSEEVTYADLQFQNSSEMEKIPEIGKFGEKAPPAPSHVWRPAALFLTLLCLLLLIGLGVLASMFHVTLKIEMKKMNKLQNISEELQRNISLQLMSNMNISNKIRNLSTTLQTIATKLCRELYSKEQEHKCKPCPRRWIWHKDSCYFLSDDVQTWQESKMACAAQNASLLKINNKNALEFIKSQSRSYDYWLGLSPEEDSTRGMRVDNIINSSA

SEQ ID NO: 20549 - protein, 276 aa, Homo sapiens
  Payload ID: 4153
  Gene Symbol: CLEC12B
  Gene Name: C-type lectin domain family 12, member B
  Uniprot ID: Q2HXU8
  ENSP ID: ENSP00000344563
MSEEVTYATLTFQDSAGARNNRDGNNLRKRGHPAPSPIWRHAALGLVTLCLMLLIGLVTLGMMFLQISNDINSDSEKLSQLQKTIQQQQDNLSQQLGNSNNLSMEEEFLKSQISSVLKRQEQMAIKLCQELIIHTSDHRCNPCPKMWQWYQNSCYYFTTNEEKTWANSRKDCIDKNSTLVKIDSLEEKDFLMSQPLLMFSFFWLGLSWDSSGRSWFWEDGSVPSPSLFSTKELDQINGSKGCAYFQKGNIYISRCSAEIFWICEKTAAPVKTEDLD

SEQ ID NO: 20550 - protein, 232 aa, Homo sapiens
  Payload ID: 4153
  Gene Symbol: CLEC12B
  Gene Name: C-type lectin domain family 12, member B
  Uniprot ID: Q2HXU8
  ENSP ID: ENSP00000379759
MSEEVTYATLTFQDSAGARNNRDGNNLRKRGHPAPSPIWRHAALGLVTLCLMLLIGLVTLGMMFLQISNDINSDSEKLSQLQKTIQQQQDNLSQQLGNSNNLSMEEEFLKSQISSVLKRQEQMAIKLCQELIIHTSDHRCNPCPKMWQWYQNSCYYFTTNEEKTWANSRKDCIDKNSTLVKIDSLEEKDFLMSQPLLMFSFFWLGLSWDSSGRSWFWEDGSVPSPSLYVSNY

SEQ ID NO: 20551 - protein, 232 aa, Homo sapiens; identical to SEQ ID NO: 20550
  Payload ID: 4153
  Gene Symbol: CLEC12B
  Gene Name: C-type lectin domain family 12, member B
  Uniprot ID: Q2HXU8
  ENSP ID: ENSP00000439561

SEQ ID NO: 20552 - protein, 65 aa, Homo sapiens
  Payload ID: 4153
  Gene Symbol: CLEC12B
  Gene Name: C-type lectin domain family 12, member B
  ENSP ID: ENSP00000444909
MSEEVTYATLTFQDSAGARNNRDGNNLRKRGHPAPSPIWRHAALGLVTLCLMLLIGLVTLGMMYI

SEQ ID NO: 20553 - protein, 490 aa, Homo sapiens
  Payload ID: 4154
  Gene Symbol: CLEC14A
  Gene Name: C-type lectin domain family 14, member A
  Uniprot ID: Q86T13
  ENSP ID: ENSP00000353013
MRPAFALCLLWQALWPGPGGGEHPTADRAGCSASGACYSLHHATMKRQAAEEACILRGGALSTVRAGAELRAVLALLRAGPGPGGGSKDLLFWVALERRRSHCTLENEPLRGFSWLSSDPGGLESDTLQWVEEPQRSCTARRCAVLQATGGVEPAGWKEMRCHLRANGYLCKYQFEVLCPAPRPGAASNLSYRAPFQLHSAALDFSPPGTEVSALCRGQLPISVTCIADEIGARWDKLSGDVLCPCPGRYLRAGKCAELPNCLDDLGGFACECATGFELGKDGRSCVTSGEGQPTLGGTGVPTRRPPATATSPVPQRTWPIRVDEKLGETPLVPEQDNSVTSIPEIPRWGSQSTMSTLQMSLQAESKATITPSGSVISKFNSTTSSATPQAFDSSSAVVFIFVSTAVVVLVILTMTVLGLVKLCFHESPSSQPRKESMGPPGLESDPEPAALGSSSAHCTNNGVKVGDCDLRDRAEGALLAESPLGSSDA

SEQ ID NO: 20554 - protein, 152 aa, Homo sapiens
  Payload ID: 4155
  Gene Symbol: CLEC16A
  Gene Name: C-type lectin domain family 16, member A
  ENSP ID: ENSP00000261657
  MOD_RES (1)..(1): Any amino acid
XKGRIQARRMKMQRIAALLDLPIQPTTEVLGFGLGSSTSTQHLPFRFYDQGRRGSSDPTVQRSVFASVDKVPGFAVAQCINQHSSPSLSSQSPPSASGSPSGSGSTSHCDSGGTSSSSTPSTAQSPAVRSGRKGRRRVFSLSEADSHGGHWV

SEQ ID NO: 20555 - protein, 906 aa, Homo sapiens
  Payload ID: 4155
  Gene Symbol: CLEC16A
  Gene Name: C-type lectin domain family 16, member A
  Uniprot ID: Q2KHT3
  ENSP ID: ENSP00000386495
MFGRSRSWVGGGHGKTSRNIHSLDHLKYLYHVLTKNTTVTEQNRNLLVETIRSITEILIWGDQNDSSVFDFFLEKNMFVFFLNILRQKSGRYVCVQLLQTLNILFENISHETSLYYLLSNNYVNSIIVHKFDFSDEEIMAYYISFLKTLSLKLNNHTVHFFYNEHTNDFALYTEAIKFFNHPESMVRIAVRTITLNVYKVDNQAMLHYIRDKTAVPYFSNLVWFIGSHVIELDDCVQTDEEHRNRGKLSDLVAEHLDHLHYLNDILIINCEFLNDVLTDHLLNRLFLPLYVYSLENQDKGGERPKISLPVSLYLLSQVFLIIHHAPLVNSLAEVILNGDLSEMYAKTEQDIQRSSAKPSIRCFIKPTETLERSLEMNKHKGKRRVQKRPNYKNVGEEEDEEKGPTEDAQEDAEKAKEIEMVIMERSKLSELAASTSVQEQNTTDEEKSAAATCSESTQWSRPFLDMVYHALDSPDDDYHALFVLCLLYAMSHNKGMDPEKLERIQLPVPNAAEKTTYNHPLAERLIRIMNNAAQPDGKIRLATLELSCLLLKQQVLMSAGCIMKDVHLACLEGAREESVHLVRHFYKGEDIFLDMFEDEYRSMTMKPMNVEYLMMDASILLPPTGTPLTGIDFVKRLPCGDVEKTRRAIRVFFMLRSLSLQLRGEPETQLPLTREEDLIKTDDVLDLNNSDLIACTVITKDGGMVQRFLAVDIYQMSLVEPDVSRLGWGVVKFAGLLQDMQVTGVEDDSRALNITIHKPASSPHSKPFPILQATFIFSDHIRCIIAKQRLAKGRIQARRMKMQRIAALLDLPIQPTTEVLGFGLGSSTSTQHLPFRFYDQGRRGSSDPTVQRSVFASVDKVPGEPAPRPAPQLVHHGGRSRSFSLWSLCELPFLSQKPRRLAAPAS

SEQ ID NO: 20556 - protein, 1053 aa, Homo sapiens
  Payload ID: 4155
  Gene Symbol: CLEC16A
  Gene Name: C-type lectin domain family 16, member A
  Uniprot ID: Q2KHT3
  ENSP ID: ENSP00000387122
MFGRSRSWVGGGHGKTSRNIHSLDHLKYLYHVLTKNTTVTEQNRNLLVETIRSITEILIWGDQNDSSVFDFFLEKNMFVFFLNILRQKSGRYVCVQLLQTLNILFENISHETSLYYLLSNNYVNSIIVHKFDFSDEEIMAYYISFLKTLSLKLNNHTVHFFYNEHTNDFALYTEAIKFFNHPESMVRIAVRTITLNVYKVSLDNQAMLHYIRDKTAVPYFSNLVWFIGSHVIELDDCVQTDEEHRNRGKLSDLVAEHLDHLHYLNDILIINCEFLNDVLTDHLLNRLFLPLYVYSLENQDKGGERPKISLPVSLYLLSQVFLIIHHAPLVNSLAEVILNGDLSEMYAKTEQDIQRSSAKPSIRCFIKPTETLERSLEMNKHKGKRRVQKRPNYKNVGEEEDEEKGPTEDAQEDAEKAKGTEGGSKGIKTSGESEEIEMVIMERSKLSELAASTSVQEQNTTDEEKSAAATCSESTQWSRPFLDMVYHALDSPDDDYHALFVLCLLYAMSHNKGMDPEKLERIQLPVPNAAEKTTYNHPLAERLIRIMNNAAQPDGKIRLATLELSCLLLKQQVLMSAGCIMKDVHLACLEGAREESVHLVRHFYKGEDIFLDMFEDEYRSMTMKPMNVEYLMMDASILLPPTGTPLTGIDFVKRLPCGDVEKTRRAIRVFFMLRSLSLQLRGEPETQLPLTREEDLIKTDDVLDLNNSDLIACTVITKDGGMVQRFLAVDIYQMSLVEPDVSRLGWGVVKFAGLLQDMQVTGVEDDSRALNITIHKPASSPHSKPFPILQATFIFSDHIRCIIAKQRLAKGRIQARRMKMQRIAALLDLPIQPTTEVLGFGLGSSTSTQHLPFRFYDQGRRGSSDPTVQRSVFASVDKVPGFAVAQCINQHSSPSLSSQSPPSASGSPSGSGSTSHCDSGGTSSSSTPSTAQSPADAPMSPELPKPHLPDQLVIVNETEADSKPSKNVARSAAVETASLSPSLVPARQPTISLLCEDTADTLSVESLTLVPPVDPHSLRSLTGMPPLSTPAAACTEPVGEEAACAEPVGTAED

SEQ ID NO: 20557 - protein, 128 aa, Homo sapiens
  Payload ID: 4155
  Gene Symbol: CLEC16A
  Gene Name: C-type lectin domain family 16, member A
  ENSP ID: ENSP00000389743
  MOD_RES (1)..(1): Any amino acid
XMQVTGVEDDSRALNITIHKPASSPHSKPFPILQATFIFSDHIRCIIAKQRLAKGRIQARRMKMQRIAALLDLPIQPTTEVLGFGLGSSTSTQHLPFRFYDQGRRGSSDPTVQRSVFASVDKVPGFQG

SEQ ID NO: 20558 - protein, 118 aa, Homo sapiens
  Payload ID: 4155
  Gene Symbol: CLEC16A
  Gene Name: C-type lectin domain family 16, member A
  ENSP ID: ENSP00000389963
LAKGRIQARRMKMQRIAALLDLPIQPTTEVLGFGLGSSTSTQHLPFRFYDQGRRGSSDPTVQRSVFASVDKVPALLTAAVERQPRWPLPSLLVPWLTDCCGGLCLLIYRRFSRIVFKI

SEQ ID NO: 20559 - protein, 265 aa, Homo sapiens
  Payload ID: 4156
  Gene Symbol: CLEC17A
  Gene Name: C-type lectin domain family 17, member A
  Uniprot ID: Q6ZS10
  ENSP ID: ENSP00000341620
MHNLYSITGYPDPPGTMEEEEEDDDYENSTPPYKDLPPKPGTMEEEEEDDDYENSTPPYKDLPPKPGTMEEEEEDDDYENSTPPYKDLPPKPGSSAPPRPPRAAKETEKPPLPCKPRNMTGLDLAAVTCPPPQLAVNLEPSPLQPSLAATPVPWLNQRSGGPGCCQKRWMVYLCLLVVTSLFLGCLGLTVTLIKYQELMEELRMLSFQQMTWRTNMTGMAGLAGLKHDIARVRADTNQSLVELWGLLEFCGQGPWLSTGVLAGAE

SEQ ID NO: 20560 - protein, 378 aa, Homo sapiens
  Payload ID: 4156
  Gene Symbol: CLEC17A
  Gene Name: C-type lectin domain family 17, member A
  Uniprot ID: Q6ZS10
  ENSP ID: ENSP00000393719
MHNLYSITGYPDPPGTMEEEEEDDDYENSTPPYKDLPPKPGTMEEEEEDDDYENSTPPYKDLPPKPGTMEEEEEDDDYENSTPPYKDLPPKPGSSAPPRPPRAAKETEKPPLPCKPRNMTGLDLAAVTCPPPQLAVNLEPSPLQPSLAATPVPWLNQRSGGPGCCQKRWMVYLCLLVVTSLFLGCLGLTVTLIKYQELMEELRMLSFQQMTWRTNMTGMAGLAGLKHDIARVRADTNQSLVELWGLLDCRRITCPEGWLPFEGKCYYFSPSTKSWDEARMFCQENYSHLVIINSFAEHNFVAKAHGSPRVYWLGLNDRAQEGDWRWLDGSPVTLSFWEPEEPNNIHDEDCATMNKGGTWNDLSCYKTTYWICERKCSC

SEQ ID NO: 20561 - protein, 227 aa, Homo sapiens
  Payload ID: 4156
  Gene Symbol: CLEC17A
  Gene Name: C-type lectin domain family 17, member A
  ENSP ID: ENSP00000447424
MHNLYSITGYPDPPGTMEEEEEDDDYENSTPPYKDLPPKPGTMEEEEEDDDYENSTPPYKDLPPKPGTMEEEEEDDDYENSTPPYKDLPPKPGSSAPPRPPRAAKETEKPPLPCKPRNMTGLDLAAVTCPPPQLAVNLEPSPLQPSLAATPVPWLNQRSGGPGCCQKRWMVYLCLLVVTSLFLGCLGLTVTLIKYQELMEELRMLSFQQMTWRTNIRGGWVGWVLSL

SEQ ID NO: 20562 - protein, 306 aa, Homo sapiens
  Payload ID: 4156
  Gene Symbol: CLEC17A
  Gene Name: C-type lectin domain family 17, member A
  Uniprot ID: Q6ZS10
  ENSP ID: ENSP00000450065
MHNLYSITGYPDPPGTMEEEEEDDDYENSTPPYKDLPPKPGTMEEEEEDDDYENSTPPYKDLPPKPGTMEEEEEDDDYENSTPPYKDLPPKPGSSAPPRPPRAAKETEKPPLPCKPRNMTGLDLAAVTCPPPQLAVNLEPSPLQPSLAATPVPWLNQRSGGPGCCQKRWMVYLCLLVVTSLFLGCLGLTVTLIKYQELMEELRMLSFQQMTWRTNMTGMAGLAGLKHDIARVRADTNQSLVELWGLLDCRRITCPEGWLPFEGKCYYFSPSTKSWDEARMFCQENYSHLVIINSFAEHLLGARGTQ

SEQ ID NO: 20563 - protein, 446 aa, Homo sapiens
  Payload ID: 4157
  Gene Symbol: CLEC18A
  Gene Name: C-type lectin domain family 18, member A
  Uniprot ID: A5D8T8
  ENSP ID: ENSP00000288040
MLHPETSPGRGHLLAVLLALLGTAWAEVWPPQLQEQAPMAGALNRKESFLLLSLHNRLRSWVQPPAADMRRLDWSDSLAQLAQARAALCGTPTPSLASGLWRTLQVGWNMQLLPAGLVSFVEVVSLWFAEGQRYSHAAGECARNATCTHYTQLVWATSSQLGCGRHLCSAGQAAIEAFVCAYSPRGNWEVNGKTIVPYKKGAWCSLCTASVSGCFKAWDHAGGLCEVPRNPCRMSCQNHGRLNISTCHCHCPPGYTGRYCQVRCSLQCVHGRFREEECSCVCDIGYGGAQCATKVHFPFHTCDLRIDGDCFMVSSEADTYYRARMKCQRKGGVLAQIKSQKVQDILAFYLGRLETTNEVIDSDFETRNFWIGLTYKTAKDSFRWATGEHQAFTSFAFGQPDNHGFGNCVELQASAAFNWNDQRCKTRNRYICQFAQEHISRWGPGS

SEQ ID NO: 20564 - protein, 446 aa, Homo sapiens; identical to SEQ ID NO: 20563
  Payload ID: 4157
  Gene Symbol: CLEC18A
  Gene Name: C-type lectin domain family 18, member A
  Uniprot ID: A5D8T8
  ENSP ID: ENSP00000377304

SEQ ID NO: 20565 - protein, 455 aa, Homo sapiens
  Payload ID: 4157
  Gene Symbol: CLEC18A
  Gene Name: C-type lectin domain family 18, member A
  ENSP ID: ENSP00000413990
MLHPETSPGRGHLLAVLLALLGTAWAEVWPPQLQEQAPMAGALNRKESFLLLSLHNRLRSWVQPPAADMRRLDWSDSLAQLAQARAALCGTPTPSLASGLWRTLQVGWNMQLLPAGLVSFVEVVSLWFAEGQRYSHAAGECARNATCTHYTQLVWATSSQLGCGRHLCSAGQAAIEAFVCAYSPRGNWEVNGKTIVPYKKGAWCSLCTASVSGCFKAWDHAGGLCEVPRNPCRMSCQNHGRLNISTCHCHCPPGYTGRYCQVRCSLQCVHGRFREEECSCVCDIGYGGAQCATKVHFPFHTCDLRIDGDCFMVSSEADTYYRARMKCQRKGGVLAQIKSQKVQDILAFYLGRLETTNEVIDSDFETRNFWIGLTYKTAKDSFRWATGEHQAFTSFAFGQPDNHGLVWLSAAMGFGNCVELQASAAFNWNDQRCKTRNRYICQFAQEHISRWGPGS

SEQ ID NO: 20566 - protein, 446 aa, Homo sapiens; identical to SEQ ID NO: 20563
  Payload ID: 4157
  Gene Symbol: CLEC18A
  Gene Name: C-type lectin domain family 18, member A
  Uniprot ID: A5D8T8
  ENSP ID: ENSP00000454685

SEQ ID NO: 20567 - protein, 66 aa, Homo sapiens
  Payload ID: 4157
  Gene Symbol: CLEC18A
  Gene Name: C-type lectin domain family 18, member A
  ENSP ID: ENSP00000454976
MRRLLVWATSSQLGCGRHLCSAGQAAIEAFVCAYSPRGNWEVNGKTIVPYKKGAWCSLCTASVSGC

SEQ ID NO: 20568 - protein, 299 aa, Homo sapiens
  Payload ID: 4157
  Gene Symbol: CLEC18A
  Gene Name: C-type lectin domain family 18, member A
  ENSP ID: ENSP00000478435
MLHPETSPGRGHLLAVLLALLGTAWAEVWPPQLQEQAPMAGALNRKESFLLLSLHNRLRSWVQPPAADMRRLDWSDSLAQLAQGSPLWNPNPEPGVRPVAHPASGLEHAAAPRAWCPLSKWSLWFAEGQRYSHAAGECARNATCTHYTQLVWATSSQLGCGRHLCSAGQAAIEAFVCAYSPRGNWEVNGKTIVPYKKGAWCSLCTASVSGCFKAWDHAGGLCEVPRNPCRMSCQNHGRLNISTCHCHCPPGYTGRYCQVRCSLQCVHGRFREEECSCVCDIGYEPSVPPRCIFPSTPVT

SEQ ID NO: 20569 - protein, 303 aa, Homo sapiens
  Payload ID: 4157
  Gene Symbol: CLEC18A
  Gene Name: C-type lectin domain family 18, member A
  ENSP ID: ENSP00000483531
MLHPETSPGRGHLLAVLLALLGTAWAEVWPPQLQEQAPMAGALNRKESFLLLSLHNRLRSWVQPPAADMRRLDWSDSLAQLAQARAALCGTPTPSLASGLWRTLQVGWNMQLLPAGLVSFVEVVSLWFAEGQRYSHAAGECARNATCTHYTQLVWATSSQLGCGRHLCSAGQAAIEAFVCAYSPRGNWEVNGKTIVPYKKGAWCSLCTASVSGCFKAWDHAGGLCEVPRNPCRMSCQNHGRLNISTCHCHCPPGYTGRYCQVRCSLQCVHGRFREEECSCVCDIGYGEPSVPPRCIFPSTPVT

SEQ ID NO: 20570 - protein, 446 aa, Homo sapiens; identical to SEQ ID NO: 20563
  Payload ID: 4157
  Gene Symbol: CLEC18A
  Gene Name: C-type lectin domain family 18, member A
  Uniprot ID: A5D8T8
  ENSP ID: ENSP00000484176

SEQ ID NO: 20571 - protein, 455 aa, Homo sapiens
  Payload ID: 4158
  Gene Symbol: CLEC18B
  Gene Name: C-type lectin domain family 18, member B
  Uniprot ID: Q6UXF7
  ENSP ID: ENSP00000341051
MLHPETSPGRGHLLAVLLALLGTTWAEVWPPQLQEQAPMAGALNRKESFLLLSLHNRLRSWVQPPAADMRRLDWSDSLAQLAQARAALCGIPTPSLASGLWRTLQVGWNMQLLPAGLASFVEVVSLWFAEGQRYSHAAGECARNATCTHYTQLVWATSSQLGCGRHLCSAGQTAIEAFVCAYSPGGNWEVNGKTIIPYKKGAWCSLCTASVSGCFKAWDHAGGLCEVPRNPCRMSCQNHGRLNISTCHCHCPPGYTGRYCQVRCSLQCVHGRFREEECSCVCDIGYGGAQCATKVHFPFHTCDLRIDGDCFMVSSEADTYYRARMKCQRKGGVLAQIKSQKVQDILAFYLGRLETTNEVIDSDFETRNFWIGLTYKTAKDSFRWATGEHQAFTSFAFGQPDNHGLVWLSAAMGFGNCVELQASAAFNWNDQRCKTRNRYICQFAQEHISRWGPGS

SEQ ID NO: 20572 - protein, 303 aa, Homo sapiens [sequence omitted]

SEQ ID NO: 20573 - protein, 446 aa, Homo sapiens
  Payload ID: 4158
  Gene Symbol: CLEC18B
  Gene Name: C-type lectin domain family 18, member B
  ENSP ID: ENSP00000482974
MLHPETSPGRGHLLAVLLALLGTTWAEVWPPQLQEQAPMAGALNRKESFLLLSLHNRLRSWVQPPAADMRRLDWSDSLAQLAQARAALCGIPTPSLASGLWRTLQVGWNMQLLPAGLASFVEVVSLWFAEGQRYSHAAGECARNATCTHYTQLVWATSSQLGCGRHLCSAGQTAIEAFVCAYSPRGNWEVNGKTIIPYKKGAWCSLCTASVSGCFKAWDHAGGLCEVPRNPCRMSCQNHGRLNISTCHCHCPPGYTGRYCQVRCSLQCVHGRFREEECSCVCDIGYGGAQCATKVHFPFHTCDLRIDGDCFMVSSEADTYYRARMKCQRKGGVLAQIKSQKVQDILAFYLGRLETTNEVIDSDFETRNFWIGLTYKTAKDSFRWATGEHQAFTSFAFGQPDNHGFGNCVELQASAAFNWNDQRCKTRNRYICQFAQEHISRWGPGS

SEQ ID NO: 20574 - protein, 446 aa, Homo sapiens; identical to SEQ ID NO: 20573
  Payload ID: 4158
  Gene Symbol: CLEC18B
  Gene Name: C-type lectin domain family 18, member B
  ENSP ID: ENSP00000483587

SEQ ID NO: 20575 - protein, 446 aa, Homo sapiens
  Payload ID: 4159
  Gene Symbol: CLEC18C
  Gene Name: C-type lectin domain family 18, member C
  Uniprot ID: Q8NCF0
  ENSP ID: ENSP00000326538
MLHPETSPGRGHLLAVLLALLGTAWAEVWPPQLQEQAPMAGALNRKESFLLLSLHNRLRSWVQPPAADMRRLDWSDSLAQLAQARAALCGIPTPSLASGLWRTLQVGWNMQLLPAGLASFVEVVSLWFAEGQRYSHAAGECARNATCTHYTQLVWATSSQLGCGRHLCSAGQAAIEAFVCAYSPRGNWEVNGKTIVPYKKGAWCSLCTASVSGCFKAWDHAGGLCEVPRNPCRMSCQNHGRLNISTCHCHCPPGYTGRYCQVRCSLQCVHGRFREEECSCVCDIGYGGAQCATKVHFPFHTCDLRIDGDCFMVSSEADTYYRARMKCQRKGGVLAQIKSQKVQDILAFYLGRLETTNEVIDSDFETRNFWIGLTYKTAKDSFRWATGEHQAFTSFAFGQPDNHGFGNCVELQASAAFNWNNQRCKTRNRYICQFAQEHISRWGPGS

SEQ ID NO: 20576 - protein, 455 aa, Homo sapiens
  Payload ID: 4159
  Gene Symbol: CLEC18C
  Gene Name: C-type lectin domain family 18, member C
  ENSP ID: ENSP00000444726
MLHPETSPGRGHLLAVLLALLGTAWAEVWPPQLQEQAPMAGALNRKESFLLLSLHNRLRSWVQPPAADMRRLDWSDSLAQLAQARAALCGIPTPSLASGLWRTLQVGWNMQLLPAGLASFVEVVSLWFAEGQRYSHAAGECARNATCTHYTQLVWATSSQLGCGRHLCSAGQAAIEAFVCAYSPRGNWEVNGKTIVPYKKGAWCSLCTASVSGCFKAWDHAGGLCEVPRNPCRMSCQNHGRLNISTCHCHCPPGYTGRYCQVRCSLQCVHGRFREEECSCVCDIGYGGAQCATKVHFPFHTCDLRIDGDCFMVSSEADTYYRARMKCQRKGGVLAQIKSQKVQDILAFYLGRLETTNEVIDSDFETRNFWIGLTYKTAKDSFRWATGEHQAFTSFAFGQPDNHGLVWLSAAMGFGNCVELQASAAFNWNNQRCKTRNRYICQFAQEHISRWGPGS

SEQ ID NO: 20577 - protein, 446 aa, Homo sapiens; identical to SEQ ID NO: 20575
  Payload ID: 4159
  Gene Symbol: CLEC18C
  Gene Name: C-type lectin domain family 18, member C
  Uniprot ID: Q8NCF0
  ENSP ID: ENSP00000444875

SEQ ID NO: 20578 - protein, 446 aa, Homo sapiens; identical to SEQ ID NO: 20575
  Payload ID: 4159
  Gene Symbol: CLEC18C
  Gene Name: C-type lectin domain family 18, member C
  Uniprot ID: Q8NCF0
  ENSP ID: ENSP00000455920

SEQ ID NO: 20579 - protein, 134 aa, Homo sapiens
  Payload ID: 4159
  Gene Symbol: CLEC18C
  Gene Name: C-type lectin domain family 18, member C
  ENSP ID: ENSP00000456676
MLHPETSPGRGHLLAVLLALLGTAWAEVWPPQLQEQAPMAGALNRKESFLLLSLHNRLRSWVQPPAADMRRLLVWATSSQLGCGRHLCSAGQAAIEAFVCAYSPRGNWEVNGKTIVPYKKGAWCSLCTASVSGC

SEQ ID NO: 20580 - protein, 119 aa, Homo sapiens
  Payload ID: 4159
  Gene Symbol: CLEC18C
  Gene Name: C-type lectin domain family 18, member C
  ENSP ID: ENSP00000457584
MLHPETSPGRGHLLAVLLALLGTAWAEVWPPQLQEQAPMAGALNRKESFLLLSLHNRLRSWVQPPAADMRRLDWSDSLAQLAQARAALCGIPTPSLASGLWRTLQVGWNMQLLPAGLAS

SEQ ID NO: 20581 - protein, 446 aa, Homo sapiens; identical to SEQ ID NO: 20575
  Payload ID: 4159
  Gene Symbol: CLEC18C
  Gene Name: C-type lectin domain family 18, member C
  Uniprot ID: Q8NCF0
  ENSP ID: ENSP00000477846

SEQ ID NO: 20582 - protein, 302 aa, Homo sapiens
  Payload ID: 4159
  Gene Symbol: CLEC18C
  Gene Name: C-type lectin domain family 18, member C
  ENSP ID: ENSP00000478195
MLHPETSPGRGHLLAVLLALLGTAWAEVWPPQLQEQAPMAGALNRKESFLLLSLHNRLRSWVQPPAADMRRLDWSDSLAQLAQARAALCGIPTPSLASGLWRTLQVGWNMQLLPAGLASFVEVVSLWFAEGQRYSHAAGECARNATCTHYTQLVWATSSQLGCGRHLCSAGQAAIEAFVCAYSPRGNWEVNGKTIVPYKKGAWCSLCTASVSGCFKAWDHAGGLCEVPRNPCRMSCQNHGRLNISTCHCHCPPGYTGRYCQVRCSLQCVHGRFREEECSCVCDIGYEPSVPPRCIFPSTPVT

SEQ ID NO: 20583 - protein, 301 aa, Homo sapiens
  Payload ID: 4159
  Gene Symbol: CLEC18C
  Gene Name: C-type lectin domain family 18, member C
  ENSP ID: ENSP00000478937
MLHPETSPGRGHLLAVLLALLGTAWAEVWPPQLQEQAPMAGALNRKESFLLLSLHNRLRSWVQPPAADMRRLDWSDSLANWLKPGSPLWNPNPEPGVRPVAHPASGLEHAACPRAWRPLLKWSLWFAEGQRYSHAAGECARNATCTHYTQLVWATSSQLGCGRHLCSAGQAAIEAFVCAYSPRGNWEVNGKTIVPYKKGAWCSLCTASVSGCFKAWDHAGGLCEVPRNPCRMSCQNHGRLNISTCHCHCPPGYTGRYCQVRCSLQCVHGRFREEECSCVCDIGYGEPSVPPRCIFPSTPVT

SEQ ID NO: 20584 - protein, 136 aa, Homo sapiens
  Payload ID: 4160
  Gene Symbol: CLEC19A
  Gene Name: C-type lectin domain family 19, member A
  Uniprot ID: Q6UXS0
  ENSP ID: ENSP00000455948
MQRWTLWAAAFLTLHSAQAFPQTDISISPALPELPLPSLCPLFWMEFKGHCYRFFPLNKTWAEADLYCSEFSVGRKSAKLASIHSWEENVFVYDLVNSCVPGIPADVWTGLHDHRQVRKQWPLGPLGSSSQDSILI

SEQ ID NO: 20585 - protein, 65 aa, Homo sapiens
  Payload ID: 4160
  Gene Symbol: CLEC19A
  Gene Name: C-type lectin domain family 19, member A
  ENSP ID: ENSP00000455961
MQRWTLWAAAFLTLHSAQAFPQTDISISPVCFLSAPSPARAAPAFPVPPVLDGVQRPLLSILPSQ

SEQ ID NO: 20586 - protein, 86 aa, Homo sapiens
  Payload ID: 4160
  Gene Symbol: CLEC19A
  Gene Name: C-type lectin domain family 19, member A
  ENSP ID: ENSP00000455985
MQRWTLWAAAFLTLHSAQAFPQTDISISPALPELPLPSLCPLFWMEFKGHCYRFFPLNKTWAEADLYCSEFSVGRKSAKLASIHSL

SEQ ID NO: 20587 - protein, 160 aa, Homo sapiens
  Payload ID: 4161
  Gene Symbol: CLEC2A
  Gene Name: C-type lectin domain family 2, member A
  Uniprot ID: Q6UVW9
  ENSP ID: ENSP00000339732
MINPELRDGRADGFIHRIVPKLIQNWKIGLMCFLSIIITTVCIIMIATWSKHAKPVACSGDWLGVRDKCFYFSDDTRNWTASKIFCSLQKAELAQIDTQEDMEFLKRYAGTDMHWIGLSRKQGDSWKWTNGTTFNGWPSNSKWSCNWSLRQWLLLLGPLR

SEQ ID NO: 20588 - protein, 174 aa, Homo sapiens
  Payload ID: 4161
  Gene Symbol: CLEC2A
  Gene Name: C-type lectin domain family 2, member A
  Uniprot ID: Q6UVW9
  ENSP ID: ENSP00000396163
MINPELRDGRADGFIHRIVPKLIQNWKIGLMCFLSIIITTVCIIMIATWSKHAKPVACSGDWLGVRDKCFYFSDDTRNWTASKIFCSLQKAELAQIDTQEDMEFLKRYAGTDMHWIGLSRKQGDSWKWTNGTTFNGWFEIIGNGSFAFLSADGVHSSRGFIDIKWICSKPKYFL

SEQ ID NO: 20589 - protein, 149 aa, Homo sapiens
  Payload ID: 4162
  Gene Symbol: CLEC2B
  Gene Name: C-type lectin domain family 2, member B
  Uniprot ID: Q92478
  ENSP ID: ENSP00000228438
MMTKHKKCFIIVGVLITTNIITLIVKLTRDSQSLCPYDWIGFQNKCYYFSKEEGDWNSSKYNCSTQHADLTIIDNIEEMNFLRRYKCSSDHWIGLKMAKNRTGQWVDGATFTKSFGMRGSEGCAYLSDDGAATARCYTERKWICRKRIH

SEQ ID NO: 20590 - protein, 80 aa, Homo sapiens
  Payload ID: 4162
  Gene Symbol: CLEC2B
  Gene Name: C-type lectin domain family 2, member B
  ENSP ID: ENSP00000437946
MILKLILSLKNFLRRYKCSSDHWIGLKMAKNRTGQWVDGATFTKSFGMRGSEGCAYLSDDGAATARCYTERKWICRKRIH

SEQ ID NO: 20591 - protein, 154 aa, Homo sapiens
  Payload ID: 4163
  Gene Symbol: CLEC2D
  Gene Name: C-type lectin domain family 2, member D
  Uniprot ID: Q9UHP7
  ENSP ID: ENSP00000261339
MHDSNNVEKDITPSELPANPAIRANCHQEPSVCLQAACPESWIGFQRKCFYFSDDTKNWTSSQRFCDSQDADLAQVESFQELNFLLRYKGPSDHWIGLSREQGQPWKWINGTEWTRQFPILGAGECAYLNDKGASSARHYTERKWICSKSDIHV

SEQ ID NO: 20592 - protein, 194 aa, Homo sapiens
  Payload ID: 4163
  Gene Symbol: CLEC2D
  Gene Name: C-type lectin domain family 2, member D
  Uniprot ID: Q9UHP7
  ENSP ID: ENSP00000261340
MHDSNNVEKDITPSELPANPGCLHSKEHSIKATLIWRLFFLIMFLTIIVCGMVAALSAIRANCHQEPSVCLQAACPESWIGFQRKCFYFSDDTKNWTSSQRFCDSQDADLAQVESFQELNFLLRYKGPSDHWIGLSREQGQPWKWINGTEWTRQLVMKEDGANLYVAKVSQVPRMNPRPVMVSYPGSRRVCLFE

SEQ ID NO: 20593 - protein, 191 aa, Homo sapiens
  Payload ID: 4163
  Gene Symbol: CLEC2D
  Gene Name: C-type lectin domain family 2, member D
  Uniprot ID: Q9UHP7
  ENSP ID: ENSP00000290855
MHDSNNVEKDITPSELPANPGCLHSKEHSIKATLIWRLFFLIMFLTIIVCGMVAALSAIRANCHQEPSVCLQAACPESWIGFQRKCFYFSDDTKNWTSSQRFCDSQDADLAQVESFQELNFLLRYKGPSDHWIGLSREQGQPWKWINGTEWTRQFPILGAGECAYLNDKGASSARHYTERKWICSKSDIHV

SEQ ID NO: 20594 - protein, 122 aa, Homo sapiens
  Payload ID: 4163
  Gene Symbol: CLEC2D
  Gene Name: C-type lectin domain family 2, member D
  ENSP ID: ENSP00000371409
MHDSNNVEKDITPSELPANPGCLHSKEHSIKATLIWRLFFLIMFLTIIVCGMVAALSAIRANCHQEPSVCLQAACPESWIGFQRKCFYFSDDTKNWTSSQRFCDSQDADLAQVESFQELVRK

SEQ ID NO: 20595 - protein, 122 aa, Homo sapiens; identical to SEQ ID NO: 20594
  Payload ID: 4163
  Gene Symbol: CLEC2D
  Gene Name: C-type lectin domain family 2, member D
  ENSP ID: ENSP00000399744

SEQ ID NO: 20596 - protein, 173 aa, Homo sapiens
  Payload ID: 4163
  Gene Symbol: CLEC2D
  Gene Name: C-type lectin domain family 2, member D
  ENSP ID: ENSP00000413045
CLHSKEHSIKATLIWRLFFLIMFLTIIVCGMVAALSAIRANCHQEPSVCLQAACPESWIGFQRKCFYFSDDTKNWTSSQRFCDSQDADLAQVESFQELNFLLRYKGPSDHWIGLSREQGQPWKWINGTEWTRQLVMKEDGANLYVAKVSQVPRMNPRPVMVSYPGSRRVCLFE

SEQ ID NO: 20597 - protein, 106 aa, Homo sapiens
  Payload ID: 4163
  Gene Symbol: CLEC2D
  Gene Name: C-type lectin domain family 2, member D
  ENSP ID: ENSP00000437861
EHSIKATLIWRLFFLIMFLTIIVCGMVAALSAIRANCHQEPSVCLQAACPESWIGFQRKCFYFSDDTKNWTSSQRFCDSQDADLAQVESFQELVSYPGSRRVCLFE

SEQ ID NO: 20598 - protein, 80 aa, Homo sapiens
  Payload ID: 4163
  Gene Symbol: CLEC2D
  Gene Name: C-type lectin domain family 2, member D
  ENSP ID: ENSP00000438735
MFLTIIVCGMVAALSAIRANCHQEPSVCLQAACPESWIGFQRKCFYFSDDTKNWTSSQRFCDSQDADLAQVESFQELVRK

SEQ ID NO: 20599 - protein, 154 aa, Homo sapiens
  Payload ID: 4163
  Gene Symbol: CLEC2D
  Gene Name: C-type lectin domain family 2, member D
  Uniprot ID: Q9UHP7
  ENSP ID: ENSP00000441653
MHDSNNVEKDITPSELPANPGCLHSKEHSIKATLIWRLFFLIMFLTIIVCGMVAALSAIRANCHQEPSVCLQAACPESWIGFQRKCFYFSDDTKNWTSSQRFCDSQDADLAQVESFQELNFLLRYKGPSDHWIGLSREQGQPWKWINGTEWTRQ

SEQ ID NO: 20600 - protein, 132 aa, Homo sapiens
  Payload ID: 4163
  Gene Symbol: CLEC2D
  Gene Name: C-type lectin domain family 2, member D
  Uniprot ID: Q9UHP7
  ENSP ID: ENSP00000443065
MHDSNNVEKDITPSELPANPGCLHSKEHSIKATLIWRLFFLIMFLTIIVCGMVAALSAIRANCHQEPSVCLQAACPESWIGFQRKCFYFSDDTKNWTSSQRFCDSQDADLAQVESFQELVSYPGSRRVCLFE

SEQ ID NO: 20601 - protein, 54 aa, Homo sapiens
  Payload ID: 4163
  Gene Symbol: CLEC2D
  Gene Name: C-type lectin domain family 2, member D
  ENSP ID: ENSP00000443110
MHDSNNVEKDITPSELPANPGTSVSCCHVKKNTFASSSTIIVVCIQKSILLKLP

SEQ ID NO: 20602 - protein, 133 aa, Homo sapiens
  Payload ID: 4163
  Gene Symbol: CLEC2D
  Gene Name: C-type lectin domain family 2, member D
  ENSP ID: ENSP00000443177
AIRANCHQEPSVCLQAACPESWIGFQRKCFYFSDDTKNWTSSQRFCDSQDADLAQVESFQELNFLLRYKGPSDHWIGLSREQGQPWKWINGTEWTRQDRVLLCYPGWSAVVPSWLTAALTSLAQVSLPSQPPE

SEQ ID NO: 20603 - protein, 80 aa, Homo sapiens; identical to SEQ ID NO: 20598
  Payload ID: 4163
  Gene Symbol: CLEC2D
  Gene Name: C-type lectin domain family 2, member D
  ENSP ID: ENSP00000443627

SEQ ID NO: 20604 - protein, 95 aa, Homo sapiens
  Payload ID: 4163
  Gene Symbol: CLEC2D
  Gene Name: C-type lectin domain family 2, member D
  Uniprot ID: Q9UHP7
  ENSP ID: ENSP00000444818
MHDSNNVEKDITPSELPANPAIRANCHQEPSVCLQAACPESWIGFQRKCFYFSDDTKNWTSSQRFCDSQDADLAQVESFQELVSYPGSRRVCLFE

SEQ ID NO: 20605 - protein, 140 aa, Homo sapiens
  Payload ID: 4163
  Gene Symbol: CLEC2D
  Gene Name: C-type lectin domain family 2, member D
  ENSP ID: ENSP00000446028
VEKDITPSELPANPAIRANCHQEPSVCLQAACPESWIGFQRKCFYFSDDTKNWTSSQRFCDSQDADLAQVESFQELNFLLRYKGPSDHWIGLSREQGQPWKWINGTEWTRQLVMKEDGANLYVAKVSQVPRMNPRPVMVR

SEQ ID NO: 20606 - protein, 214 aa, Homo sapiens
  Payload ID: 4164
  Gene Symbol: CLEC2L
  Gene Name: C-type lectin domain family 2, member L
  Uniprot ID: P0C7M8
  ENSP ID: ENSP00000390661
MEPAREPPSRARPPPPLAARPAPAPAAPRPRSPAEAEARGPEGLLRRSGSGYEGSTSWKAALEDTTTRLLLGAIAVLLFAILVVMSILASKGCIKCEAPCPEDWLLYGRKCYFFSEEPRDWNTGRQYCHTHEAVLAVIQSQKELEFMFKFTRREPWIGLRRVGDEFHWVNGDPFDPDTFTIAGPGECVFVEPTRLVSTECLMTRPWVCSKMAYT

SEQ ID NO: 20607 - protein, 108 aa, Homo sapiens
  Payload ID: 4164
  Gene Symbol: CLEC2L
  Gene Name: C-type lectin domain family 2, member L
  ENSP ID: ENSP00000428508
  MOD_RES (1)..(1): Any amino acid
XEGSTSWKAALEASKGCIKCEAPCPEDWLLYGRKCYFFSEEPRDWNTGRQYCHTHEAVLAVIQSQKELEFMFKFTRREPWIGLRRVGDEFHWVNGDPFDPDTFTIAGP

SEQ ID NO: 20608 - protein, 206 aa, Homo sapiens
  Payload ID: 4165
  Gene Symbol: CLEC3A
  Gene Name: C-type lectin domain family 3, member A
  ENSP ID: ENSP00000299642
MAQQACPRAMAKNGLVICILVITLLLDQTTSHTSRLKARKHSKRRVRDKDGDLKTQIEKLWTEVNALKEIQALQTVCLRGTKVHKKCYLASEGLKHFHEANEDCISKGGILVIPRNSDEINALQDYGKRSLPGVNDFWLGINDMVTEGKFVDVNGIAISFLNWDRAQPNGGKRENCVLFSQSAQGKWSDEACRSSKRYICEFTIPQ

SEQ ID NO: 20609 - protein, 50 aa, Homo sapiens
  Payload ID: 4165
  Gene Symbol: CLEC3A
  Gene Name: C-type lectin domain family 3, member A
  ENSP ID: ENSP00000457211
MAQQACPRAMAKNGLVICILVITLLLDQTTSHTSRLKARKHSKRRVRGIC

SEQ ID NO: 20610 - protein, 202 aa, Homo sapiens
  Payload ID: 4166
  Gene Symbol: CLEC3B
  Gene Name: C-type lectin domain family 3, member B
  Uniprot ID: P05452
  ENSP ID: ENSP00000296130
MELWGAYLLLCLFSLLTQVTTEPPTQKPKKIVNAKKDVVNTKMFEELKSRLDTLAQEVALLKEQQALQTVCLKGTKVHMKCFLAFTQTKTFHEASEDCISRGGTLGTPQTGSENDALYEYLRQSVGNEAEIWLGLNDMAAEGTWVDMTGARIAYKNWETEITAQPDGGKTENCAVLSGAANGKWFDKRCRDQLPYICQFGIV

SEQ ID NO: 20611 - protein, 160 aa, Homo sapiens
  Payload ID: 4166
  Gene Symbol: CLEC3B
  Gene Name: C-type lectin domain family 3, member B
  ENSP ID: ENSP00000396013
MFEELKSRLDTLAQEVALLKEQQALQTVCLKGTKVHMKCFLAFTQTKTFHEASEDCISRGGTLGTPQTGSENDALYEYLRQSVGNEAEIWLGLNDMAAEGTWVDMTGARIAYKNWETEITAQPDGGKTENCAVLSGAANGKWFDKRCRDQLPYICQFGIV

SEQ ID NO: 20612 - protein, 237 aa, Homo sapiens
  Payload ID: 4167
  Gene Symbol: CLEC4A
  Gene Name: C-type lectin domain family 4, member A
  Uniprot ID: Q9UMR7
  ENSP ID: ENSP00000229332
MTSEITYAEVRFKNEFKSSGINTASSAASKERTAPHKSNTGFPKLLCASLLIFFLLLAISFFIAFVIFFQKYSQLLEKKTTKELVHTTLECVKKNMPVEETAWSCCPKNWKSFSSNCYFISTESASWQDSEKDCARMEAHLLVINTQEEQDFIFQNLQEESAYFVGLSDPEGQRHWQWVDQTPYNESSTFWHPREPSDPNERCVVLNFRKSPKRWGWNDVNCLGPQRSVCEMMKIHL

SEQ ID NO: 20613 - protein, 204 aa, Homo sapiens
  Payload ID: 4167
  Gene Symbol: CLEC4A
  Gene Name: C-type lectin domain family 4, member A
  Uniprot ID: Q9UMR7
  ENSP ID: ENSP00000247243
MTSEITYAEVRFKNEFKSSGINTASSAASKERTAPHKSNTGFPKLLCASLLIFFLLLAISFFIAFVKTAWSCCPKNWKSFSSNCYFISTESASWQDSEKDCARMEAHLLVINTQEEQDFIFQNLQEESAYFVGLSDPEGQRHWQWVDQTPYNESSTFWHPREPSDPNERCVVLNFRKSPKRWGWNDVNCLGPQRSVCEMMKIHL

SEQ ID NO: 20614 - protein, 165 aa, Homo sapiens
  Payload ID: 4167
  Gene Symbol: CLEC4A
  Gene Name: C-type lectin domain family 4, member A
  Uniprot ID: Q9UMR7
  ENSP ID: ENSP00000344646
MTSEITYAEVRFKNEFKSSGINTASSAETAWSCCPKNWKSFSSNCYFISTESASWQDSEKDCARMEAHLLVINTQEEQDFIFQNLQEESAYFVGLSDPEGQRHWQWVDQTPYNESSTFWHPREPSDPNERCVVLNFRKSPKRWGWNDVNCLGPQRSVCEMMKIHL

SEQ ID NO: 20615 - protein, 198 aa, Homo sapiens
  Payload ID: 4167
  Gene Symbol: CLEC4A
  Gene Name: C-type lectin domain family 4, member A
  Uniprot ID: Q9UMR7
  ENSP ID: ENSP00000353690
MTSEITYAEVRFKNEFKSSGINTASSAVFFQKYSQLLEKKTTKELVHTTLECVKKNMPVEETAWSCCPKNWKSFSSNCYFISTESASWQDSEKDCARMEAHLLVINTQEEQDFIFQNLQEESAYFVGLSDPEGQRHWQWVDQTPYNESSTFWHPREPSDPNERCVVLNFRKSPKRWGWNDVNCLGPQRSVCEMMKIHL

SEQ ID NO: 20616 - protein, 84 aa, Homo sapiens
  Payload ID: 4167
  Gene Symbol: CLEC4A
  Gene Name: C-type lectin domain family 4, member A
  ENSP ID: ENSP00000443082
FKNEFKSSGINTASSAASKERTAPHKSNTGFPKLLCASLLIFFLLLAISFFIAFVRFHLPESARRICLFCGALRSRRSATLAMG

SEQ ID NO: 20617 - protein, 182 aa, Homo sapiens
  Payload ID: 4168
  Gene Symbol: CLEC4C
  Gene Name: C-type lectin domain family 4, member C
  Uniprot ID: Q8WTT0
  ENSP ID: ENSP00000346648
MVPEEEPQDRVPHNFMYSKTVKRLSKLREYQQYHPSLTCVMEGKDIEDWSCCPTPWTSFQSSCYFISTGMQSWTKSQKNCSVMGADLVVINTREEQDFIIQNLKRNSSYFLGLSDPGGRRHWQWVDQTPYNENVTFWHSGEPNNLDERCAIINFRSSEEWGWNDIHCHVPQKSICKMKKIYI

SEQ ID NO: 20618 - protein, 213 aa, Homo sapiens
  Payload ID: 4168
  Gene Symbol: CLEC4C
  Gene Name: C-type lectin domain family 4, member C
  Uniprot ID: Q8WTT0
  ENSP ID: ENSP00000353500
MVPEEEPQDREKGLWWFQLKVWSMAVVSILLLSVCFTVSSVVPHNFMYSKTVKRLSKLREYQQYHPSLTCVMEGKDIEDWSCCPTPWTSFQSSCYFISTGMQSWTKSQKNCSVMGADLVVINTREEQDFIIQNLKRNSSYFLGLSDPGGRRHWQWVDQTPYNENVTFWHSGEPNNLDERCAIINFRSSEEWGWNDIHCHVPQKSICKMKKIYI

SEQ ID NO: 20619 - protein, 88 aa, Homo sapiens
  Payload ID: 4168
  Gene Symbol: CLEC4C
  Gene Name: C-type lectin domain family 4, member C
  ENSP ID: ENSP00000438649
DWSCCPTPWTSFQSSCYFISTGMQSWTKSQKNCSVMGADLVVINTREEQDFIIQNLKRNSSYFLGLSDPGGRRHWQWVDQTPYNENVT

SEQ ID NO: 20620 - protein, 213 aa, Homo sapiens; identical to SEQ ID NO: 20618
  Payload ID: 4168
  Gene Symbol: CLEC4C
  Gene Name: C-type lectin domain family 4, member C
  Uniprot ID: Q8WTT0
  ENSP ID: ENSP00000440428

SEQ ID NO: 20621 - protein, 138 aa, Homo sapiens
  Payload ID: 4168
  Gene Symbol: CLEC4C
  Gene Name: C-type lectin domain family 4, member C
  ENSP ID: ENSP00000442457
EEEPQDREKGLWWFQLKVWSMAVVSILLLSVCFTVSSVDWSCCPTPWTSFQSSCYFISTGMQSWTKSQKNCSVMGADLVVINTREEQDFIIQNLKRNSSYFLGLSDPGGRRHWQWVDQTPYNENVTFWHSGEPNNLDE

SEQ ID NO: 20622 - protein, 182 aa, Homo sapiens; identical to SEQ ID NO: 20617
  Payload ID: 4168
  Gene Symbol: CLEC4C
  Gene Name: C-type lectin domain family 4, member C
  Uniprot ID: Q8WTT0
  ENSP ID: ENSP00000445338

SEQ ID NO: 20623 - protein, 215 aa, Homo sapiens
  Payload ID: 4169
  Gene Symbol: CLEC4D
  Gene Name: C-type lectin domain family 4, member D
  Uniprot ID: Q8WXI8
  ENSP ID: ENSP00000299665
MGLEKPQSKLEGGMHPQLIPSVIAVVFILLLSVCFIASCLVTHHNFSRCKRGTGVHKLEHHAKLKCIKEKSELKSAEGSTWNCCPIDWRAFQSNCYFPLTDNKTWAESERNCSGMGAHLMTISTEAEQNFIIQFLDRRLSYFLGLRDENAKGQWRWVDQTPFNPRRVFWHKNEPDNSQGENCVVLVYNQDKWAWNDVPCNFEASRICKIPGTTLN

SEQ ID NO: 20624 - protein, 144 aa, Homo sapiens
  Payload ID: 4169
  Gene Symbol: CLEC4D
  Gene Name: C-type lectin domain family 4, member D
  ENSP ID: ENSP00000371496
MGLEKPQSKLEGGMHPQLIPSVIAVVFILLLSVCFIASCLVTHHNFSRCKRGTGVHKLEHHAKLKCIKEKSELKSAEGSTWNCCPIDWRAFQSNCYFPLTDNKTWAESERNCSGMGAHLMTISTEAEQNFIIQFLDRRLSYFLG

SEQ ID NO: 20625 - protein, 219 aa, Homo sapiens
  Payload ID: 4170
  Gene Symbol: CLEC4E
  Gene Name: C-type lectin domain family 4, member E
  Uniprot ID: Q9ULY5
  ENSP ID: ENSP00000299663
MNSSKSSETQCTERGCFSSQMFLWTVAGIPILFLSACFITRCVVTFRIFQTCDEKKFQLPENFTELSCYNYGSGSVKNCCPLNWEYFQSSCYFFSTDTISWALSLKNCSAMGAHLVVINSQEEQEFLSYKKPKMREFFIGLSDQVVEGQWQWVDGTPLTKSLSFWDVGEPNNIATLEDCATMRDSSNPRQNWNDVTCFLNYFRICEMVGINPLNKGKSL

SEQ ID NO: 20626 - protein, 92 aa, Homo sapiens
  Payload ID: 4170
  Gene Symbol: CLEC4E
  Gene Name: C-type lectin domain family 4, member E
  ENSP ID: ENSP00000387737
MNSSKSSETQCTERGCFSSQMFLWTVAGIPILFLSACFITRCVVTFRIFQTCDEKKFQLPENFTELSCYNYGSGIIVPKVNIKIYKATFSGF

SEQ ID NO: 20627 - protein, 92 aa, Homo sapiens; identical to SEQ ID NO: 20626
  Payload ID: 4170
  Gene Symbol: CLEC4E
  Gene Name: C-type lectin domain family 4, member E
  ENSP ID: ENSP00000404994

SEQ ID NO: 20628 - protein, 174 aa, Homo sapiens
  Payload ID: 4170
  Gene Symbol: CLEC4E
  Gene Name: C-type lectin domain family 4, member E
  ENSP ID: ENSP00000443034
MNSSKSSETQCTERGCFSSQMFLWTVAGIPILFLSACFITRCVVTFRIFQTCDEKKFQLPENFTELSCYNYGSGIIVPKEFLSYKKPKMREFFIGLSDQVVEGQWQWVDGTPLTKSLSFWDVGEPNNIATLEDCATMRDSSNPRQNWNDVTCFLNYFRICEMVGINPLNKGKSL

SEQ ID NO: 20629 - protein, 94 aa, Homo sapiens
  Payload ID: 4170
  Gene Symbol: CLEC4E
  Gene Name: C-type lectin domain family 4, member E
  ENSP ID: ENSP00000443328
  MOD_RES (1)..(1): Any amino acid
XNFTELSCYNYGSGSVKNCCPLNWEYFQSSCYFFSTDTISWALSLKNCSAMGAHLVVINSQEEQLLGCRGAQQHSYPGGLCHHERLFKPKAKLE

SEQ ID NO: 20630 - protein, 589 aa, Homo sapiens
  Payload ID: 4171
  Gene Symbol: CLEC4F
  Gene Name: C-type lectin domain family 4, member F
  Uniprot ID: Q8N1N0
  ENSP ID: ENSP00000272367
MDGEAVRFCTDNQCVSLHPQEVDSVAMAPAAPKIPRLVQATPAFMAVTLVFSLVTLFVVVQQQTRPVPKPVQAVILGDNITGHLPFEPNNHHHFGREAEMRELIQTFKGHMENSSAWVVEIQMLKCRVDNVNSQLQVLGDHLGNTNADIQMVKGVLKDATTLSLQTQMLRSSLEGTNAEIQRLKEDLEKADALTFQTLNFLKSSLENTSIELHVLSRGLENANSEIQMLNASLETANTQAQLANSSLKNANAEIYVLRGHLDSVNDLRTQNQVLRNSLEGANAEIQGLKENLQNTNALNSQTQAFIKSSFDNTSAEIQFLRGHLERAGDEIHVLKRDLKMVTAQTQKANGRLDQTDTQIQVFKSEMENVNTLNAQIQVLNGHMKNASREIQTLKQGMKNASALTSQTQMLDSNLQKASAEIQRLRGDLENTKALTMEIQQEQSRLKTLHVVITSQEQLQRTQSQLLQMVLQGWKFNGGSLYYFSSVKKSWHEAEQFCVSQGAHLASVASKEEQAFLVEFTSKVYYWIGLTDRGTEGSWRWTDGTPFNAAQNKAPGSKGSCPLRKYIIVNSGMGACSFIDTPPCPWILSN

SEQ ID NO: 20631 - protein, 567 aa, Homo sapiens
  Payload ID: 4171
  Gene Symbol: CLEC4F
  Gene Name: C-type lectin domain family 4, member F
  Uniprot ID: Q8N1N0
  ENSP ID: ENSP00000390581
MDGEAVRFCTDNQCVSLHPQEVDSVAMAPAAPKIPRLVQATPAFMAVTLVFSLVTLFVVVQQQTRPVPKPVQAVILGDNITGHLPFEPNNHHHFGREAEMRELIQTFKGHMENSSAWVVEIQMLKCRVDNVNSQLQVLGDHLGNTNADIQMVKGVLKDATTLSLQTQMLRSSLEGTNAEIQRLKEDLEKADALTFQTLNFLKSSLENTSIELHVLSRGLENANSEIQMLNASLETANTQAQLANSSLKNANAEIYVLRGHLDSVNDLRTQNQVLRNSLEGANAEIQGLKENLQNTNALNSQTQAFIKSSFDNTSAEIQFLRGHLERAGDEIHVLKRDLKMVTAQTQKANGRLDQTDTQIQVFKSEMENVNTLNAQIQVLNGHMKNASREIQTLKQGMKNASALTSQTQMLDSNLQKASAEIQRLRGDLENTKALTMEIQQEQSRLKTLHVVITSQEQLQRTQSQLLQMVLQGWKFNGGSLYYFSSVKKSWHEAEQFCVSQGAHLASVASKEEQAFLVEFTSKVYYWIGLTDRGTEGSWRWTDGTPFNAAQNKASHSTRKGCCLHLTV

SEQ ID NO: 20632 - protein, 293 aa, Homo sapiens
  Payload ID: 4172
  Gene Symbol: CLEC4G
  Gene Name: C-type lectin domain family 4, member G
  Uniprot ID: Q6UXB4
  ENSP ID: ENSP00000327599
MDTTRYSKWGGSSEEVPGGPWGRWVHWSRRPLFLALAVLVTTVLWAVILSILLSKASTERAALLDGHDLLRTNASKQTAALGALKEEVGDCHSCCSGTQAQLQTTRAELGEAQAKLMEQESALRELRERVTQGLAEAGRGREDVRTELFRALEAVRLQNNSCEPCPTSWLSFEGSCYFFSVPKTTWAAAQDHCADASAHLVIVGGLDEQGFLTRNTRGRGYWLGLRAVRHLGKVQGYQWVDGVSLSFSHWNQGEPNDAWGRENCVMMLHTGLWNDAPCDSEKDGWICEKRHNC

SEQ ID NO: 20633 - protein, 149 aa, Homo sapiens
  Payload ID: 4172
  Gene Symbol: CLEC4G
  Gene Name: C-type lectin domain family 4, member G
  ENSP ID: ENSP00000472374
MPRNEGLVILPRLVWSGTPGLSDPSMSASQSAGITGLGACIAMDTTRYSKWGGSSEEVPGGPWGRWVHWSRRPLFLALAVLVTTVLWAVILSILLSKASTERAALLDGHDLLRTNASKQTAALGALKEEVGDCHSCCSGTQAQLQTTRA

SEQ ID NO: 20634 - protein, 252 aa, Homo sapiens
  Payload ID: 4172
  Gene Symbol: CLEC4G
  Gene Name: C-type lectin domain family 4, member G
  ENSP ID: ENSP00000483109
MEQESALRELRERVTQGLAEAGRGREDVRTELFRALEAVRLQNNSCEPCPTSWLSFEGSCYFFSVPKTTWAAAQDHCADASAHLVIVGGLDEQGFLTRNTRGRGYWLGLRAVRHLGKVQGYQWVDGVSLSFSHWNQGEPNDAWGRENCVMMLHTGLWNDAPCDSEKDGWICEKRHLLTPPSALEPRPLQHVVSWGLLTSLAPGADCQRVFSSSSTAAESQKHLAQHSPVQPSAWALGPPCRPHPNSTHADPT

SEQ ID NO: 20635 - protein, 376 aa, Homo sapiens
  Payload ID: 4173
  Gene Symbol: CLEC4M
  Gene Name: C-type lectin domain family 4, member M
  Uniprot ID: Q9H2X3
  ENSP ID: ENSP00000248228
MSDSKEPRVQQLGLLEEDPTTSGIRLFPRDFQFQQIHGHKSSTGCLGHGALVLQLLSFMLLAGVLVAILVQVSKVPSSLSQEQSEQDAIYQNLTQLKAAVGELSEKSKLQEIYQELTQLKAAVGELPEKSKLQEIYQELTRLKAAVGELPEKSKLQEIYQELTRLKAAVGELPEKSKLQEIYQELTELKAAVGELPEKSKLQEIYQELTQLKAAVGELPDQSKQQQIYQELTDLKTAFERLCRHCPKDWTFFQGNCYFMSNSQRNWHDSVTACQEVRAQLVVIKTAEEQNFLQLQTSRSNRFSWMGLSDLNQEGTWQWVDGSPLSPSFQRYWNSGEPNNSGNEDCAEFSGSGWNDNRCDVDNYWICKKPAACFRDE

SEQ ID NO: 20636 - protein, 399 aa, Homo sapiens
  Payload ID: 4173
  Gene Symbol: CLEC4M
  Gene Name: C-type lectin domain family 4, member M
  Uniprot ID: Q9H2X3
  ENSP ID: ENSP00000316228
MSDSKEPRVQQLGLLEEDPTTSGIRLFPRDFQFQQIHGHKSSTGCLGHGALVLQLLSFMLLAGVLVAILVQVSKVPSSLSQEQSEQDAIYQNLTQLKAAVGELSEKSKLQEIYQELTQLKAAVGELPEKSKLQEIYQELTRLKAAVGELPEKSKLQEIYQELTRLKAAVGELPEKSKLQEIYQELTRLKAAVGELPEKSKLQEIYQELTELKAAVGELPEKSKLQEIYQELTQLKAAVGELPDQSKQQQIYQELTDLKTAFERLCRHCPKDWTFFQGNCYFMSNSQRNWHDSVTACQEVRAQLVVIKTAEEQNFLQLQTSRSNRFSWMGLSDLNQEGTWQWVDGSPLSPSFQRYWNSGEPNNSGNEDCAEFSGSGWNDNRCDVDNYWICKKPAACFRDE

SEQ ID NO: 20637 - protein, 348 aa, Homo sapiens
  Payload ID: 4173
  Gene Symbol: CLEC4M
  Gene Name: C-type lectin domain family 4, member M
  ENSP ID: ENSP00000335228
MSDSKEPRVQQLGLLGCLGHGALVLQLLSFMLLAGVLVAILVQVSKVPSSLSQEQSEQDAIYQNLTQLKAAVGELSEKSKLQEIYQELTQLKAAVGELPEKSKLQEIYQELTRLKAAVGELPEKSKLQEIYQELTRLKAAVGELPEKSKLQEIYQELTELKAAVGELPEKSKLQEIYQELTQLKAAVGELPDQSKQQQIYQELTDLKTAFERLCRHCPKDWTFFQGNCYFMSNSQRNWHDSVTACQEVRAQLVVIKTAEEQNFLQLQTSRSNRFSWMGLSDLNQEGTWQWVDGSPLSPSFQRYWNSGEPNNSGNEDCAEFSGSGWNDNRCDVDNYWICKKPAACFRDE

SEQ ID NO: 20638 - protein, 332 aa, Homo sapiens
  Payload ID: 4173
  Gene Symbol: CLEC4M
  Gene Name: C-type lectin domain family 4, member M
  Uniprot ID: Q9H2X3
  ENSP ID: ENSP00000351954
MSDSKEPRVQQLGLLEEDPTTSGIRLFPRDFQFQQIHGHKSSTVPFLLGPVSKVPSSLSQEQSEQDAIYQNLTQLKAAVGELSEKSKLQEIYQELTQLKAAVGELPEKSKLQEIYQELTRLKAAVGELPEKSKLQEIYQELTRLKAAVGELPEKSKLQEIYQELTELKAAVGELPEKSKLQEIYQELTQLKAAVERLCRHCPKDWTFFQGNCYFMSNSQRNWHDSVTACQEVRAQLVVIKTAEEQNFLQLQTSRSNRFSWMGLSDLNQEGTWQWVDGSPLSPSFQRYWNSGEPNNSGNEDCAEFSGSGWNDNRCDVDNYWICKKPAACFRDE

SEQ ID NO: 20639 - protein, 387 aa, Homo sapiens
  Payload ID: 4173
  Gene Symbol: CLEC4M
  Gene Name: C-type lectin domain family 4, member M
  ENSP ID: ENSP00000377680
MSDSKEPRVQQLGLLEEDPTTNFQFQQIHGHKSSTGCLGHGALVLQLLSFMLLAGVLPRLSKVPSSLSQEQSEQDAIYQNLTQLKAAVGELSEKSKLQEIYQELTQLKAAVGELPEKSKLQEIYQELTRLKAAVGELPEKSKLQEIYQELTRLKAAVGELPEKSKLQEIYQELTRLKAAVGELPEKSKLQEIYQELTELKAAVGELPEKSKLQEIYQELTQLKAAVGELPDQSKQQQIYQELTDLKTAFERLCRHCPKDWTFFQGNCYFMSNSQRNWHDSVTACQEVRAQLVVIKTAEEQNFLQLQTSRSNRFSWMGLSDLNQEGTWQWVDGSPLSPSFQRYWNSGEPNNSGNEDCAEFSGSGWNDNRCDVDNYWICKKPAACFRDE

SEQ ID NO: 20640 - protein, 263 aa, Homo sapiens
  Payload ID: 4173
  Gene Symbol: CLEC4M
  Gene Name: C-type lectin domain family 4, member M
  Uniprot ID: Q9H2X3
  ENSP ID: ENSP00000470132
MSDSKEPRVQQLGLLEEDPTTSGIRLFPRDFQFQQIHGHKSSTVPFLLGPVSKVPSSLSQEQSEQDAIYQNLTQLKAAVGELSEKSKLQEIYQELTQLKAAVGELPEKSKLQEIYQELTRLKAAVERLCRHCPKDWTFFQGNCYFMSNSQRNWHDSVTACQEVRAQLVVIKTAEEQNFLQLQTSRSNRFSWMGLSDLNQEGTWQWVDGSPLSPSFQRYWNSGEPNNSGNEDCAEFSGSGWNDNRCDVDNYWICKKPAACFRDE

SEQ ID NO: 20641 - protein, 332 aa, Homo sapiens
  Payload ID: 4173
  Gene Symbol: CLEC4M
  Gene Name: C-type lectin domain family 4, member M
  ENSP ID: ENSP00000470137
MSDSKEPRVQQLGLLEEDPTTSGIRLFPRDFQFQQIHGHKSSTVPFLLGPVSKVPSSLSQEQSEQDAIYQNLTQLKAAVGELSEKSKLQEIYQELTQLKAAVGELPEKSKLQEIYQELTRLKAAVGELPEKSKLQEIYQELTRLKAAVGELPEKSKLQEIYQELTRLKAAVGELPEKSKLQEIYQELTELKAAVERLCRHCPKDWTFFQGNCYFMSNSQRNWHDSVTACQEVRAQLVVIKTAEEQNFLQLQTSRSNRFSWMGLSDLNQEGTWQWVDGSPLSPSFQRYWNSGEPNNSGNEDCAEFSGSGWNDNRCDVDNYWICKKPAACFRDE

SEQ ID NO: 20642 - protein, 282 aa, Homo sapiens
  Payload ID: 4173
  Gene Symbol: CLEC4M
  Gene Name: C-type lectin domain family 4, member M
  ENSP ID: ENSP00000470286
MSDSKEPRVQQLGLLEEDPTTSGIRLFPRDFQFQQIHGHKSSTVSKVPSSLSQEQSEQDAIYQNLTQLKAAVGELSEKSKLQEIYQELTQLKAAVGELPEKSKLQEIYQELTRLKAAVGELPEKSKLQEIYQELTRLKAAVGELPEKSKLQEIYQELTRLKAAVGELPEKSKLQEIYQELTELKAAVGELPEKSKLQEIYQELTQLKAAVGELPDQSKQQQIYQELTDLKTAFERLCRHCPKDWTFFQGNCYFMSNSQRNWHDSVTACQEVRAQLVVIKTAE

SEQ ID NO: 20643 - protein, 296 aa, Homo sapiens
  Payload ID: 4173
  Gene Symbol: CLEC4M
  Gene Name: C-type lectin domain family 4, member M
  Uniprot ID: Q9H2X3
  ENSP ID: ENSP00000471125
MSDSKEPRVQQLGLLGCLGHGALVLQLLSFMLLAGVLVAILVQVSKVPSSLSQEQSEQDAIYQNLTQLKAAVGELSEKSKLQEIYQELTQLKAAVGELPEKSKLQEIYQELTRLKAAVGELPEKSKLQEIYQELTRLKAAVGELPEKSKLQEIYQELTRLKAAVGELPEKSKLQEIYQELTELKAAVGELPEKSKLQEIYQELTQLKAAVGELPDQSKQQQIYQELTDLKTAFERLCRHCPKDWTFFQGNCYFMSNSQRNWHDSVTACQEVRAQLVVIKTAEEQLPAVLEQWRTQQ

SEQ ID NO: 20644 - protein, 232 aa, Homo sapiens
  Payload ID: 4173
  Gene Symbol: CLEC4M
  Gene Name: C-type lectin domain family 4, member M
  Uniprot ID: Q9H2X3
  ENSP ID: ENSP00000471132
MSDSKEPRVQQLGLLEEDPTTSGIRLFPRDFQFQQIHGHKSSTGCLGHGALVLQLLSFMLLAGVLVAILVQVSKVPSSLSQEQSEQDAIYQNLTQLKAAVGELSEKSKLQEIYQELTQLKAAVGELPEKSKLQEIYQELTRLKAAVGELPEKSKLQEIYQELTRLKAAVERLCRHCPKDWTFFQGNCYFMSNSQRNWHDSVTACQEVRAQLVVIKTAEEQLPAVLEQWRTQQ

SEQ ID NO: 20645 - protein, 53 aa, Homo sapiens
  Payload ID: 4174
  Gene Symbol: CLEC5A
  Gene Name: C-type lectin domain family 5, member A
  ENSP ID: ENSP00000392561
MNWHMIISGLIVVVLKVVGMTLFLLYFPQIFNKSNDGFTTTRSYGTEVSSGHN

SEQ ID NO: 20646 - protein, 84 aa, Homo sapiens
  Payload ID: 4174
  Gene Symbol: CLEC5A
  Gene Name: C-type lectin domain family 5, member A
  ENSP ID: ENSP00000395258
MVSPPPGAMEQKFLQDITDAEKYFIGLIYHREEKRWRWINNSVFNGNVTNQNQNFNCATIGLTKTFDAASCDISYRRICEKNAK

SEQ ID NO: 20647 - protein, 155 aa, Homo sapiens
  Payload ID: 4174
  Gene Symbol: CLEC5A
  Gene Name: C-type lectin domain family 5, member A
  ENSP ID: ENSP00000414897
MNWHMIISGLIVVVLKVVGMTLFLLYFPQIFNKSNDGFTTTRSYGTVCPKDWEFYQARCFFLSTSESSWNESRDFCKGKGSTLAIVNTPEKLKFLQDITDAEKYFIGLIYHREEKRWRWINNSVFNGKYVNMPQFPGDLGLLQKTKPEIAGFTLE

SEQ ID NO: 20648 - protein, 165 aa, Homo sapiens
  Payload ID: 4174
  Gene Symbol: CLEC5A
  Gene Name: C-type lectin domain family 5, member A
  ENSP ID: ENSP00000446890
MNWHMIISGLIVVVLKVVGMTLFLLYFPQIFNKSNDGFTTTRSYGTVCPKDWEFYQARCFFLSTSESSWNESRDFCKGKGSTLAIVNTPEKLKFLQDITDAEKYFIGLIYHREEKRWRWINNSVFNGNVTNQNQNFNCATIGLTKTFDAASCDISYRRICEKNAK

SEQ ID NO: 20649 - protein, 188 aa, Homo sapiens
  Payload ID: 4174
  Gene Symbol: CLEC5A
  Gene Name: C-type lectin domain family 5, member A
  Uniprot ID: Q9NY25
  ENSP ID: ENSP00000449999
MNWHMIISGLIVVVLKVVGMTLFLLYFPQIFNKSNDGFTTTRSYGTVSQIFGSSSPSPNGFITTRSYGTVCPKDWEFYQARCFFLSTSESSWNESRDFCKGKGSTLAIVNTPEKLKFLQDITDAEKYFIGLIYHREEKRWRWINNSVFNGNVTNQNQNFNCATIGLTKTFDAASCDISYRRICEKNAK

SEQ ID NO: 20650 - protein, 209 aa, Homo sapiens
  Payload ID: 4175
  Gene Symbol: CLEC6A
  Gene Name: C-type lectin domain family 6, member A
  Uniprot ID: Q6EIG7
  ENSP ID: ENSP00000371505
MMQEQQPQSTEKRGWLSLRLWSVAGISIALLSACFIVSCVVTYHFTYGETGKRLSELHSYHSSLTCFSEGTKVPAWGCCPASWKSFGSSCYFISSEEKVWSKSEQNCVEMGAHLVVFNTEAEQNFIVQQLNESFSYFLGLSDPQGNNNWQWIDKTPYEKNVRFWHLGEPNHSAEQCASIVFWKPTGWGWNDVICETRRNSICEMNKIYL

SEQ ID NO: 20651 - protein, 201 aa, Homo sapiens
  Payload ID: 4176
  Gene Symbol: CLEC7A
  Gene Name: C-type lectin domain family 7, member A
  Uniprot ID: Q9BXN2
  ENSP ID: ENSP00000266456
MEYHPDLENLDEDGYTQLHFDSQSNTRIAVVSEKGSCAASPPWRLIAVILGILCLVILVIAVVLGTMGVLSSPCPPNWIIYEKSCYLFSMSLNSWDGSKRQCWQLGSNLLKIDSSNELGFIVKQVSSQPDNSFWIGLSRPQTEVPWLWEDGSTFSSNLFQIRTTATQENPSPNCVWIHVSVIYDQLCSVPSYSICEKKFSM

SEQ ID NO: 20652 - protein, 143 aa, Homo sapiens
  Payload ID: 4176
  Gene Symbol: CLEC7A
  Gene Name: C-type lectin domain family 7, member A
  Uniprot ID: Q9BXN2
  ENSP ID: ENSP00000298523
MEYHPDLENLDEDGYTQLHFDSQSNTRIAVVSEKGSCAASPPWRLIAVILGILCLVILVIAVVLGTMGVLSSPCPPNWIIYEKSCYLFSMSLNSWDGSKRQCWQLGSNLLKIDSSNELISDQNHSYPRKPISKLCMDSRVSHL

SEQ ID NO: 20653 - protein, 247 aa, Homo sapiens
  Payload ID: 4176
  Gene Symbol: CLEC7A
  Gene Name: C-type lectin domain family 7, member A
  Uniprot ID: Q9BXN2
  ENSP ID: ENSP00000302569
MEYHPDLENLDEDGYTQLHFDSQSNTRIAVVSEKGSCAASPPWRLIAVILGILCLVILVIAVVLGTMAIWRSNSGSNTLENGYFLSRNKENHSQPTQSSLEDSVTPTKAVKTTGVLSSPCPPNWIIYEKSCYLFSMSLNSWDGSKRQCWQLGSNLLKIDSSNELGFIVKQVSSQPDNSFWIGLSRPQTEVPWLWEDGSTFSSNLFQIRTTATQENPSPNCVWIHVSVIYDQLCSVPSYSICEKKFSM

SEQ ID NO: 20654 - protein, 77 aa, Homo sapiens
  Payload ID: 4176
  Gene Symbol: CLEC7A
  Gene Name: C-type lectin domain family 7, member A
  Uniprot ID: Q9BXN2
  ENSP ID: ENSP00000312089
MEYHPDLENLDEDGYTQLHFDSQSNTRIAVVSEKGSCAASPPWRLIAVILGILCLVILVIAVVLGTMAGFKAVEFKG

SEQ ID NO: 20655 - protein, 45 aa, Homo sapiens
  Payload ID: 4176
  Gene Symbol: CLEC7A
  Gene Name: C-type lectin domain family 7, member A
  Uniprot ID: Q9BXN2
  ENSP ID: ENSP00000344723
MEYHPDLENLDEDGYTQLHFDSQSNTRIAVVSEKGIYSKTSVFPT

SEQ ID NO: 20656 - protein, 168 aa, Homo sapiens
  Payload ID: 4176
  Gene Symbol: CLEC7A
  Gene Name: C-type lectin domain family 7, member A
  Uniprot ID: Q9BXN2
  ENSP ID: ENSP00000379743
MEYHPDLENLDEDGYTQLHFDSQSNTRIAVVSEKGVLSSPCPPNWIIYEKSCYLFSMSLNSWDGSKRQCWQLGSNLLKIDSSNELGFIVKQVSSQPDNSFWIGLSRPQTEVPWLWEDGSTFSSNLFQIRTTATQENPSPNCVWIHVSVIYDQLCSVPSYSICEKKFSM

SEQ ID NO: 20657 - protein, 189 aa, Homo sapiens
  Payload ID: 4176
  Gene Symbol: CLEC7A
  Gene Name: C-type lectin domain family 7, member A
  Uniprot ID: Q9BXN2
  ENSP ID: ENSP00000431461
MEYHPDLENLDEDGYTQLHFDSQSNTRIAVVSEKGSCAASPPWRLIAVILGILCLVILVIAVVLGTMAIWRSNSGSNTLENGYFLSRNKENHSQPTQSSLEDSVTPTKAVKTTGVLSSPCPPNWIIYEKSCYLFSMSLNSWDGSKRQCWQLGSNLLKIDSSNELISDQNHSYPRKPISKLCMDSRVSHL

SEQ ID NO: 20658 - protein, 247 aa, Homo sapiens; identical to SEQ ID NO: 20653
  Payload ID: 4176
  Gene Symbol: CLEC7A
  Gene Name: C-type lectin domain family 7, member A
  Uniprot ID: Q9BXN2
  ENSP ID: ENSP00000432876

SEQ ID NO: 20659 - protein, 192 aa, Homo sapiens
  Payload ID: 4176
  Gene Symbol: CLEC7A
  Gene Name: C-type lectin domain family 7, member A
  Uniprot ID: Q9BXN2
  ENSP ID: ENSP00000434392
MEYHPDLENLDEDGYTQLHFDSQSNTRIAVVSEKGSCAASPPWRLIAVILGILCLVILVIAVVLGTMAIWRSNSGSNTLENGYFLSRNKENHSQPTQSSLEDSVTPTKAVKTTGVLSSPCPPNWIIYEKSCYLFSMSLNSWDGSKRQCWQLGSNLLKIDSSNELSLTLLPKLECSEAATSQAQVILPPQLPE

SEQ ID NO: 20660 - protein, 136 aa, Homo sapiens
  Payload ID: 4176
  Gene Symbol: CLEC7A
  Gene Name: C-type lectin domain family 7, member A
  ENSP ID: ENSP00000434954
MEYHPDLENLDEDGYTQLHFDSQSNTRIAVVSEKGSCAASPPWRLIAVILGILCLVILVIAVVLGTMGEYLVEEINNRQFSKQLLCARHSFKGLTCIIYFNLYIIWFYLYWVGAVNAHFTYKGCERLRGYFTFPGL

SEQ ID NO: 20661 - protein, 116 aa, Homo sapiens
  Payload ID: 4176
  Gene Symbol: CLEC7A
  Gene Name: C-type lectin domain family 7, member A
  Uniprot ID: Q9BXN2
  ENSP ID: ENSP00000436923
MEYHPDLENLDEDGYTQLHFDSQSNTRIAVVSEKGSCAASPPWRLIAVILGILCLVILVIAVVLGTMGTGQFLKDLSFLNNRRKLFGDPIQEATHWRMATFYQEIKRTTVNPHNHL

SEQ ID NO: 20662 - protein, 241 aa, Homo sapiens
  Payload ID: 4177
  Gene Symbol: CLEC9A
  Gene Name: C-type lectin domain family 9, member A
  Uniprot ID: Q6UXN8
  ENSP ID: ENSP00000348074
MHEEEIYTSLQWDSPAPDTYQKCLSSNKCSGACCLVMVISCVFCMGLLTASIFLGVKLLQVSTIAMQQQEKLIQQERALLNFTEWKRSCALQMKYCQAFMQNSLSSAHNSSPCPNNWIQNRESCYYVSEIWSIWHTSQENCLKEGSTLLQIESKEEMDFITGSLRKIKGSYDYWVGLSQDGHSGRWLWQDGSSPSPGLLPAERSQSANQVCGYVKSNSLLSSNCSTWKYFICEKYALRSSV

SEQ ID NO: 20663 - protein, 167 aa, Homo sapiens
  Payload ID: 4178
  Gene Symbol: CLECL1
  Gene Name: C-type lectin-like 1
  Uniprot ID: Q8IZS7
  ENSP ID: ENSP00000331766
MVSNFFHVIQVFEKSATLISKTEHIGFVIYSWRKSTTHLGSRRKFAISIYLSEVSLQKYDCPFSGTSFVVFSLFLICAMAGDVVYADIKTVRTSPLELAFPLQRSVSFNFSTVHKSCPAKDWKVHKGKCYWIAETKKSWNKSQNDCAINNSYLMVIQDITAMVRFNI

SEQ ID NO: 20664 - protein, 119 aa, Homo sapiens
  Payload ID: 4178
  Gene Symbol: CLECL1
  Gene Name: C-type lectin-like 1
  ENSP ID: ENSP00000438981
  MOD_RES (1)..(1): Any amino acid
XYLSEVSLQKYDCPFSGTSFVVFSLFLICAMAGDVVYADIKTVRTSPLELAFPLQRSVSFNFSTVHKSCPAKDWKVHKGKCYWIAETKKSWNKSQNDCAINNSYLMVIQDITAMKSNLF

SEQ ID NO: 20665 - protein, 35 aa, Homo sapiens
  Payload ID: 4178
  Gene Symbol: CLECL1
  Gene Name: C-type lectin-like 1
  ENSP ID: ENSP00000444947
QDITAMLITFLLYLQMAFLQCVYISDVSVYPNFFL

SEQ ID NO: 20666 - protein, 191 aa, Homo sapiens
  Payload ID: 4178
  Gene Symbol: CLECL1
  Gene Name: C-type lectin-like 1
  ENSP ID: ENSP00000483624
MVSNFFHVIQVFEKSATLISKTEHIGFVIYSWRKSTTHLGSRRKFAISIYLSEVSLQKYDCPFSGTSFVVFSLFLICAMAGDVVYADIKTVRTSPLELAFPLQRSVSFNFSTVHKSCPAKDWKVHKGKCYWIAETKKSWNKSQNDCAINNSYLMVIQDITAMLITFLLYLQMAFLQCVYISDVSVYPNFFL

SEQ ID NO: 20667 - protein, 18 aa, Homo sapiens
  Payload ID: 4179
  Gene Symbol:
  Gene Name: CU104787.1
  ENSP ID: ENSP00000485388
AAGSVLLCLLTELLRARL

SEQ ID NO: 20668 - protein, 2967 aa, Homo sapiens
  Payload ID: 4180
  Gene Symbol: CSMD1
  Gene Name: CUB and Sushi multiple domains 1
  ENSP ID: ENSP00000334828
  MOD_RES (1)..(1): Any amino acid
XEIEKGGCGDPGIPAYGKRTGSSFLHGDTLTFECPAAFELVGERVITCQQNNQWSGNKPSCVFSCFFNFTASSGIILSPNYPEEYGNNMNCVWLIISEPGSRIHLIFNDFDVEPQFDFLAVKDDGISDITVLGTFSGNEVPSQLASSGHIVRLEFQSDHSTTGRGFNITYTTFGQNECHDPGIPINGRRFGDRFLLGSSVSFHCDDGFVKTQGSESITCILQDGNVVWSSTVPRCEAPCGGHLTASSGVILPPGWPGYYKDSLHCEWIIEAKPGHSIKITFDRFQTEVNYDTLEVRDGPASSSPLIGEYHGTQAPQFLISTGNFMYLLFTTDNSRSSIGFLIHYESVTLESDSCLDPGIPVNGHRHGGDFGIRSTVTFSCDPGYTLSDDEPLVCERNHQWNHALPSCDALCGGYIQGKSGTVLSPGFPDFYPNSLNCTWTIEVSHGKGVQMIFHTFHLESSHDYLLITEDGSFSEPVARLTGSVLPHTIKAGLFGNFTAQLRFISDFSISYEGFNITFSEYDLEPCDDPGVPAFSRRIGFHFGVGDSLTFSCFLGYRLEGATKLTCLGGGRRVWSAPLPRCVAECGASVKGNEGTLLSPNFPSNYDNNHECIYKIETEAGKGIHLRTRSFQLFEGDTLKVYDGKDSSSRPLGTFTKNELLGLILNSTSNHLWLEFNTNGSDTDQGFQLTYTSFDLVKCEDPGIPNYGYRIRDEGHFTDTVVLYSCNPGYAMHGSNTLTCLSGDRRVWDKPLPSCIAECGGQIHAATSGRILSPGYPAPYDNNLHCTWIIEADPGKTISLHFIVFDTEMAHDILKVWDGPVDSDILLKEWSGSALPEDIHSTFNSLTLQFDSDFFISKSGFSIQFSTSIAATCNDPGMPQNGTRYGDSREAGDTVTFQCDPGYQLQGQAKITCVQLNNRFFWQPDPPTCIAACGGNLTGPAGVILSPNYPQPYPPGKECDWRVKVNPDFVIALIFKSFNMEPSYDFLHIYEGEDSNSPLIGSYQGSQAPERIESSGNSLFLAFRSDASVGLSGFAIEFKEKPREACFDPGNIMNGTRVGTDFKLGSTITYQCDSGYKILDPSSITCVIGADGKPSWDQVLPSCNAPCGGQYTGSEGVVLSPNYPHNYTAGQICLYSITVPKEFVVFGQFAYFQTALNDLAELFDGTHAQARLLSSLSGSHSGETLPLATSNQILLRFSAKSGASARGFHFVYQAVPRTSDTQCSSVPEPRYGRRIGSEFSAGSIVRFECNPGYLLQGSTALHCQSVPNALAQWNDTIPSCVVPCSGNFTQRRGTILSPGYPEPYGNNLNCIWKIIVTEGSGIQIQVISFATEQNWDSLEIHDGGDVTAPRLGSFSGTTVPALLNSTSNQLYLHFQSDISVAAAGFHLEYKTVGLAACQEPALPSNSIKIGDRYMVNDVLSFQCEPGYTLQGRSHISCMPGTVRRWNYPSPLCIATCGGTLSTLGGVILSPGFPGSYPNNLDCTWRISLPIGYGAHIQFLNFSTEANHDFLEIQNGPYHTSPMIGQFSGTDLPAALLSTTHETLIHFYSDHSQNRQGFKLAYQAYELQNCPDPPPFQNGYMINSDYSVGQSVSFECYPGYILIGHPVLTCQHGINRNWNYPFPRCDAPCGYNVTSQNGTIYSPGFPDEYPILKDCIWLITVPPGHGVYINFTLLQTEAVNDYIAVWDGPDQNSPQLGVFSGNTALETAYSSTNQVLLKFHSDFSNGGFFVLNFHAFQLKKCQPPPAVPQAEMLTEDDDFEIGDFVKYQCHPGYTLVGTDILTCKLSSQLQFEGSLPTCEGSSGQSPLLVVLSGNHTEQSNFTSRSNQLYLRWSTDHATSKKGFKIRYAAPYCSLTHPLKNGGILNRTAGAVGSKVHYFCKPGYRMVGHSNATCRRNPLGMYQWDSLTPLCQAVSCGIPESPGNGSFTGNEFTLDSKVVYECHEGFKLESSQQATAVCQEDGLWSNKGKPPTCKPVACPSIEAQLSEHVIWRLVSGSLNEYGAQVLLSCSPGYYLEGWRLLRCQANGTWNIGDERPSCRVISCGSLSFPPNGNKIGTLTVYGATAIFTCNTGYTLVGSHVRECLANGLWSGSETRCLAGHCGSPDPIVNGHISGDGFSYRDTVVYQCNPGFRLVGTSVRICLQDHKWSGQTPVCVPITCGHPGNPAHGFTNGSEFNLNDVVNFTCNTGYLLQGVSRAQCRSNGQWSSPLPTCRVVNCSDPGFVENAIRHGQQNFPESFEYGMSILYHCKKGFYLLGSSALTCMANGLWDRSLPKCLAISCGHPGVPANAVLTGELFTYGAVVHYSCRGSESLIGNDTRVCQEDSHWSGALPHCTGNNPGFCGDPGTPAHGSRLGDDFKTKSLLRFSCEMGHQLRGSPERTCLLNGSWSGLQPVCEAVSCGNPGTPTNGMIVSSDGILFSSSVIYACWEGYKTSGLMTRHCTANGTWTGTAPDCTIISCGDPGTLANGIQFGTDFTFNKTVSYQCNPGYVMEAVTSATIRCTKDGRWNPSKPVCKAVLCPQPPPVQNGTVEGSDFRWGSSISYSCMDGYQLSHSAILSCEGRGVWKGEIPQCLPVFCGDPGIPAEGRLSGKSFTYKSEVFFQCKSPFILVGSSRRVCQADGTWSGIQPTCIDPAHNTCPDPGTPHFGIQNSSRGYEVGSTVFFRCRKGYHIQGSTTRTCLANLTWSGIQTECIPHACRQPETPAHADVRAIDLPTFGYTLVYTCHPGFFLAGGSEHRTCKADMKWTGKSPVCKIPSDVFFVNSLWKGYYEYLGKRQPATLTVDWFNATSSKVNATFSEASPVELKLTGIYKKEEAHLLLKAFQIKGQADIFVSKFENDNWGLDGYVSSGLERGGFTFQGDIHGKDFGKFKLERQDPLNPDQDSSSHYHGTSSGSVAAAILVPFFALILSGFAFYLYKHRTRPKVQYNGYAGHENSNGQASFENPMYDTNLKPTEAKAVRFDTTLNTVCTVV

SEQ ID NO: 20669 - protein, 3388 aa, Homo sapiens
  Payload ID: 4180
  Gene Symbol: CSMD1
  Gene Name: CUB and Sushi multiple domains 1
  ENSP ID: ENSP00000383047
MTAWRRFQSLLLLLGLLVLCARLLTAAKGQNCGGLVQGPNGTIESPGFPHGYPNYANCTWIIITGERNRIQLSFHTFALEEDFDILSVYDGQPQQGNLKVRLSGFQLPSSIVSTGSILTLWFTTDFAVSAQGFKALYEVLPSHTCGNPGEILKGVLHGTRFNIGDKIRYSCLPGYILEGHAILTCIVSPGNGASWDFPAPFCRAEGACGGTLRGTSSSISSPHFPSEYENNADCTWTILAEPGDTIALVFTDFQLEEGYDFLEISGTEAPSIWLTGMNLPSPVISSKNWLRLHFTSDSNHRRKGFNAQFQVKKAIELKSRGVKMLPSKDGSHKNSVLSQGGVALVSDMCPDPGIPENGRRAGSDFSRVGANVQFSCEDNYVLQGSKSITCQRVTETLAAWSDHRPICRARTCGSNLRGPSGVITSPNYPVQYEDNAHCVWVITTTDPDKVIKLAFEEFELERGYDTLTVGDAGKVGDTRSVLYVLTGSSVPDLIVSMSNQMWLHLQSDDSIGSPGFKAVYQEIEKGGCGDPGIPAYGKRTGSSFLHGDTLTFECPAAFELVGERVITCQQNNQWSGNKPSCVFSCFFNFTASSGIILSPNYPEEYGNNMNCVWLIISEPGSRIHLIFNDFDVEPQFDFLAVKDDGISDITVLGTFSGNEVPSQLASSGHIVRLEFQSDHSTTGRGFNITYTTFGQNECHDPGIPINGRRFGDRFLLGSSVSFHCDDGFVKTQGSESITCILQDGNVVWSSTVPRCEAPCGGHLTASSGVILPPGWPGYYKDSLHCEWIIEAKPGHSIKITFDRFQTEVNYDTLEVRDGPASSSPLIGEYHGTQAPQFLISTGNFMYLLFTTDNSRSSIGFLIHYESVTLESDSCLDPGIPVNGHRHGGDFGIRSTVTFSCDPGYTLSDDEPLVCERNHQWNHALPSCDALCGGYIQGKSGTVLSPGFPDFYPNSLNCTWTIEVSHGKGVQMIFHTFHLESSHDYLLITEDGSFSEPVARLTGSVLPHTIKAGLFGNFTAQLRFISDFSISYEGFNITFSEYDLEPCDDPGVPAFSRRIGFHFGVGDSLTFSCFLGYRLEGATKLTCLGGGRRVWSAPLPRCVAECGASVKGNEGTLLSPNFPSNYDNNHECIYKIETEAGKGIHLRTRSFQLFEGDTLKVYDGKDSSSRPLGTFTKNELLGLILNSTSNHLWLEFNTNGSDTDQGFQLTYTSFDLVKCEDPGIPNYGYRIRDEGHFTDTVVLYSCNPGYAMHGSNTLTCLSGDRRVWDKPLPSCIAECGGQIHAATSGRILSPGYPAPYDNNLHCTWIIEADPGKTISLHFIVFDTEMAHDILKVWDGPVDSDILLKEWSGSALPEDIHSTFNSLTLQFDSDFFISKSGFSIQFSTSIAATCNDPGMPQNGTRYGDSREAGDTVTFQCDPGYQLQGQAKITCVQLNNRFFWQPDPPTCIAACGGNLTGPAGVILSPNYPQPYPPGKECDWRVKVNPDFVIALIFKSFNMEPSYDFLHIYEGEDSNSPLIGSYQGSQAPERIESSGNSLFLAFRSDASVGLSGFAIEFKEKPREACFDPGNIMNGTRVGTDFKLGSTITYQCDSGYKILDPSSITCVIGADGKPSWDQVLPSCNAPCGGQYTGSEGVVLSPNYPHNYTAGQICLYSITVPKEFVVFGQFAYFQTALNDLAELFDGTHAQARLLSSLSGSHSGETLPLATSNQILLRFSAKSGASARGFHFVYQAVPRTSDTQCSSVPEPRYGRRIGSEFSAGSIVRFECNPGYLLQGSTALHCQSVPNALAQWNDTIPSCVVPCSGNFTQRRGTILSPGYPEPYGNNLNCIWKIIVTEGSGIQIQVISFATEQNWDSLEIHDGGDVTAPRLGSFSGTTVPALLNSTSNQLYLHFQSDISVAAAGFHLEYKTVGLAACQEPALPSNSIKIGDRYMVNDVLSFQCEPGYTLQGRSHISCMPGTVRRWNYPSPLCIATCGGTLSTLGGVILSPGFPGSYPNNLDCTWRISLPIGYGAHIQFLNFSTEANHDFLEIQNGPYHTSPMIGQFSGTDLPAALLSTTHETLIHFYSDHSQNRQGFKLAYQAYELQNCPDPPPFQNGYMINSDYSVGQSVSFECYPGYILIGHPVLTCQHGINRNWNYPFPRCDAPCGYNVTSQNGTIYSPGFPDEYPILKDCIWLITVPPGHGVYINFTLLQTEAVNDYIAVWDGPDQNSPQLGVFSGNTALETAYSSTNQVLLKFHSDFSNGGFFVLNFHAFQLKKCQPPPAVPQAEMLTEDDDFEIGDFVKYQCHPGYTLVGTDILTCKLSSQLQFEGSLPTCEAQCPANEVRTGSSGVILSPGYPGNYFNSQTCSWSIKVEPNYNITIFVDTFQSEKQFDALEVFDGSSGQSPLLVVLSGNHTEQSNFTSRSNQLYLRWSTDHATSKKGFKIRYAAPYCSLTHPLKNGGILNRTAGAVGSKVHYFCKPGYRMVGHSNATCRRNPLGMYQWDSLTPLCQAVSCGIPESPGNGSFTGNEFTLDSKVVYECHEGFKLESSQQATAVCQEDGLWSNKGKPPTCKPVACPSIEAQLSEHVIWRLVSGSLNEYGAQVLLSCSPGYYLEGWRLLRCQANGTWNIGDERPSCRAGHCGSPDPIVNGHISGDGFSYRDTVVYQCNPGFRLVGTSVRICLQDHKWSGQTPVCVPITCGHPGNPAHGFTNGSEFNLNDVVNFTCNTGYLLQGVSRAQCRSNGQWSSPLPTCRVVNCSDPGFVENAIRHGQQNFPESFEYGMSILYHCKKGFYLLGSSALTCMANGLWDRSLPKCLAISCGHPGVPANAVLTGELFTYGAVVHYSCRGSESLIGNDTRVCQEDSHWSGALPHCTGNNPGFCGDPGTPAHGSRLGDDFKTKSLLRFSCEMGHQLRGSPERTCLLNGSWSGLQPVCEAVLCPQPPPVQNGTVEGSDFRWGSSISYSCMDGYQLSHSAILSCEGRGVWKGEIPQCLPVFCGDPGIPAEGRLSGKSFTYKSEVFFQCKSPFILVGSSRRVCQADGTWSGIQPTCIDPAHNTCPDPGTPHFGIQNSSRGYEVGSTVFFRCRKGYHIQGSTTRTCLANLTWSGIQTECIPHACRQPETPAHADVRAIDLPTFGYTLVYTCHPGFFLAGGSEHRTCKADMKWTGKSPVCKSKGVREVNETVTKTPVPSDVFFVNSLWKGYYEYLGKRQPATLTVDWFNATSSKVNATFSEASPVELKLTGIYKKEEAHLLLKAFQIKGQADIFVSKFENDNWGLDGYVSSGLERGGFTFQGDIHGKDFGKFKLERQDPLNPDQDSSSHYHGTSSGSVAAAILVPFFALILSGFAFYLYKHRTRPKVQYNGYAGHENSNGQASFENPMYDTNLKPTEAKAVRFDTTLNTVCTVV

SEQ ID NO: 20670 - protein, 3565 aa, Homo sapiens
  Payload ID: 4180
  Gene Symbol: CSMD1
  Gene Name: CUB and Sushi multiple domains 1
  ENSP ID: ENSP00000430733
MTAWRRFQSLLLLLGLLVLCARLLTAAKGQNCGGLVQGPNGTIESPGFPHGYPNYANCTWIIITGERNRIQLSFHTFALEEDFDILSVYDGQPQQGNLKVRLSGFQLPSSIVSTGSILTLWFTTDFAVSAQGFKALYEVLPSHTCGNPGEILKGVLHGTRFNIGDKIRYSCLPGYILEGHAILTCIVSPGNGASWDFPAPFCRAEGACGGTLRGTSSSISSPHFPSEYENNADCTWTILAEPGDTIALVFTDFQLEEGYDFLEISGTEAPSIWLTGMNLPSPVISSKNWLRLHFTSDSNHRRKGFNAQFQVKKAIELKSRGVKMLPSKDGSHKNSVLSQGGVALVSDMCPDPGIPENGRRAGSDFSRVGANVQFSCEDNYVLQGSKSITCQRVTETLAAWSDHRPICRARTCGSNLRGPSGVITSPNYPVQYEDNAHCVWVITTTDPDKVIKLAFEEFELERGYDTLTVGDAGKVGDTRSVLYVLTGSSVPDLIVSMSNQMWLHLQSDDSIGSPGFKAVYQEIEKGGCGDPGIPAYGKRTGSSFLHGDTLTFECPAAFELVGERVITCQQNNQWSGNKPSCVFSCFFNFTASSGIILSPNYPEEYGNNMNCVWLIISEPGSRIHLIFNDFDVEPQFDFLAVKDDGISDITVLGTFSGNEVPSQLASSGHIVRLEFQSDHSTTGRGFNITYTTFGQNECHDPGIPINGRRFGDRFLLGSSVSFHCDDGFVKTQGSESITCILQDGNVVWSSTVPRCEAPCGGHLTASSGVILPPGWPGYYKDSLHCEWIIEAKPGHSIKITFDRFQTEVNYDTLEVRDGPASSSPLIGEYHGTQAPQFLISTGNFMYLLFTTDNSRSSIGFLIHYESVTLESDSCLDPGIPVNGHRHGGDFGIRSTVTFSCDPGYTLSDDEPLVCERNHQWNHALPSCDALCGGYIQGKSGTVLSPGFPDFYPNSLNCTWTIEVSHGKGVQMIFHTFHLESSHDYLLITEDGSFSEPVARLTGSVLPHTIKAGLFGNFTAQLRFISDFSISYEGFNITFSEYDLEPCDDPGVPAFSRRIGFHFGVGDSLTFSCFLGYRLEGATKLTCLGGGRRVWSAPLPRCVAECGASVKGNEGTLLSPNFPSNYDNNHECIYKIETEAGKGIHLRTRSFQLFEGDTLKVYDGKDSSSRPLGTFTKNELLGLILNSTSNHLWLEFNTNGSDTDQGFQLTYTSFDLVKCEDPGIPNYGYRIRDEGHFTDTVVLYSCNPGYAMHGSNTLTCLSGDRRVWDKPLPSCIAECGGQIHAATSGRILSPGYPAPYDNNLHCTWIIEADPGKTISLHFIVFDTEMAHDILKVWDGPVDSDILLKEWSGSALPEDIHSTFNSLTLQFDSDFFISKSGFSIQFSTSIAATCNDPGMPQNGTRYGDSREAGDTVTFQCDPGYQLQGQAKITCVQLNNRFFWQPDPPTCIAACGGNLTGPAGVILSPNYPQPYPPGKECDWRVKVNPDFVIALIFKSFNMEPSYDFLHIYEGEDSNSPLIGSYQGSQAPERIESSGNSLFLAFRSDASVGLSGFAIEFKEKPREACFDPGNIMNGTRVGTDFKLGSTITYQCDSGYKILDPSSITCVIGADGKPSWDQVLPSCNAPCGGQYTGSEGVVLSPNYPHNYTAGQICLYSITVPKEFVVFGQFAYFQTALNDLAELFDGTHAQARLLSSLSGSHSGETLPLATSNQILLRFSAKSGASARGFHFVYQAVPRTSDTQCSSVPEPRYGRRIGSEFSAGSIVRFECNPGYLLQGSTALHCQSVPNALAQWNDTIPSCVVPCSGNFTQRRGTILSPGYPEPYGNNLNCIWKIIVTEGSGIQIQVISFATEQNWDSLEIHDGGDVTAPRLGSFSGTTVPALLNSTSNQLYLHFQSDISVAAAGFHLEYKTVGLAACQEPALPSNSIKIGDRYMVNDVLSFQCEPGYTLQGRSHISCMPGTVRRWNYPSPLCIATCGGTLSTLGGVILSPGFPGSYPNNLDCTWRISLPIGYGAHIQFLNFSTEANHDFLEIQNGPYHTSPMIGQFSGTDLPAALLSTTHETLIHFYSDHSQNRQGFKLAYQAYELQNCPDPPPFQNGYMINSDYSVGQSVSFECYPGYILIGHPVLTCQHGINRNWNYPFPRCDAPCGYNVTSQNGTIYSPGFPDEYPILKDCIWLITVPPGHGVYINFTLLQTEAVNDYIAVWDGPDQNSPQLGVFSGNTALETAYSSTNQVLLKFHSDFSNGGFFVLNFHAFQLKKCQPPPAVPQAEMLTEDDDFEIGDFVKYQCHPGYTLVGTDILTCKLSSQLQFEGSLPTCEAQCPANEVRTGSSGVILSPGYPGNYFNSQTCSWSIKVEPNYNITIFVDTFQSEKQFDALEVFDGSSGQSPLLVVLSGNHTEQSNFTSRSNQLYLRWSTDHATSKKGFKIRYAAPYCSLTHPLKNGGILNRTAGAVGSKVHYFCKPGYRMVGHSNATCRRNPLGMYQWDSLTPLCQAVSCGIPESPGNGSFTGNEFTLDSKVVYECHEGFKLESSQQATAVCQEDGLWSNKGKPPTCKPVACPSIEAQLSEHVIWRLVSGSLNEYGAQVLLSCSPGYYLEGWRLLRCQANGTWNIGDERPSCRVISCGSLSFPPNGNKIGTLTVYGATAIFTCNTGYTLVGSHVRECLANGLWSGSETRCLAGHCGSPDPIVNGHISGDGFSYRDTVVYQCNPGFRLVGTSVRICLQDHKWSGQTPVCVPITCGHPGNPAHGFTNGSEFNLNDVVNFTCNTGYLLQGVSRAQCRSNGQWSSPLPTCRVVNCSDPGFVENAIRHGQQNFPESFEYGMSILYHCKKGFYLLGSSALTCMANGLWDRSLPKCLAISCGHPGVPANAVLTGELFTYGAVVHYSCRGSESLIGNDTRVCQEDSHWSGALPHCTGNNPGFCGDPGTPAHGSRLGDDFKTKSLLRFSCEMGHQLRGSPERTCLLNGSWSGLQPVCEAVSCGNPGTPTNGMIVSSDGILFSSSVIYACWEGYKTSGLMTRHCTANGTWTGTAPDCTIISCGDPGTLANGIQFGTDFTFNKTVSYQCNPGYVMEAVTSATIRCTKDGRWNPSKPVCKAVLCPQPPPVQNGTVEGSDFRWGSSISYSCMDGYQLSHSAILSCEGRGVWKGEIPQCLPVFCGDPGIPAEGRLSGKSFTYKSEVFFQCKSPFILVGSSRRVCQADGTWSGIQPTCIDPAHNTCPDPGTPHFGIQNSSRGYEVGSTVFFRCRKGYHIQGSTTRTCLANLTWSGIQTECIPHACRQPETPAHADVRAIDLPTFGYTLVYTCHPGFFLAGGSEHRTCKADMKWTGKSPVCKSKGVREVNETVTKTPVPSDVFFVNSLWKGYYEYLGKRQPATLTVDWFNATSSKVNATFSEASPVELKLTGIYKKEEAHLLLKAFQIKGQADIFVSKFENDNWGLDGYVSSGLERGGFTFQGDIHGKDFGKFKLERQDPLNPDQDSSSHYHGTSSGSVAAAILVPFFALILSGFAFYLYKHRTRPKVQYNGYAGHENSNGQASFENPMYDTNLKPTEAKAVRFDTTLNTVCTVV

SEQ ID NO: 20671 - protein, 3426 aa, Homo sapiens
  Payload ID: 4180
  Gene Symbol: CSMD1
  Gene Name: CUB and Sushi multiple domains 1
  ENSP ID: ENSP00000441462
VLPSHTCGNPGEILKGVLHGTRFNIGDKIRYSCLPGYILEGHAILTCIVSPGNGASWDFPAPFCRAEGACGGTLRGTSSSISSPHFPSEYENNADCTWTILAEPGDTIALVFTDFQLEEGYDFLEISGTEAPSIWLTGMNLPSPVISSKNWLRLHFTSDSNHRRKGFNAQFQVKKAIELKSRGVKMLPSKDGSHKNSVLSQGGVALVSDMCPDPGIPENGRRAGSDFRVGANVQFSCEDNYVLQGSKSITCQRVTETLAAWSDHRPICRARTCGSNLRGPSGVITSPNYPVQYEDNAHCVWVITTTDPDKVIKLAFEEFELERGYDTLTVGDAGKVGDTRSVLYVLTGSSVPDLIVSMSNQMWLHLQSDDSIGSPGFKAVYQEIEKGGCGDPGIPAYGKRTGSSFLHGDTLTFECPAAFELVGERVITCQQNNQWSGNKPSCVFSCFFNFTASSGIILSPNYPEEYGNNMNCVWLIISEPGSRIHLIFNDFDVEPQFDFLAVKDDGISDITVLGTFSGNEVPSQLASSGHIVRLEFQSDHSTTGRGFNITYTTFGQNECHDPGIPINGRRFGDRFLLGSSVSFHCDDGFVKTQGSESITCILQDGNVVWSSTVPRCEAPCGGHLTASSGVILPPGWPGYYKDSLHCEWIIEAKPGHSIKITFDRFQTEVNYDTLEVRDGPASSSPLIGEYHGTQAPQFLISTGNFMYLLFTTDNSRSSIGFLIHYESVTLESDSCLDPGIPVNGHRHGGDFGIRSTVTFSCDPGYTLSDDEPLVCERNHQWNHALPSCDALCGGYIQGKSGTVLSPGFPDFYPNSLNCTWTIEVSHGKGVQMIFHTFHLESSHDYLLITEDGSFSEPVARLTGSVLPHTIKAGLFGNFTAQLRFISDFSISYEGFNITFSEYDLEPCDDPGVPAFSRRIGFHFGVGDSLTFSCFLGYRLEGATKLTCLGGGRRVWSAPLPRCVAECGASVKGNEGTLLSPNFPSNYDNNHECIYKIETEAGKGIHLRTRSFQLFEGDTLKVYDGKDSSSRPLGTFTKNELLGLILNSTSNHLWLEFNTNGSDTDQGFQLTYTSFDLVKCEDPGIPNYGYRIRDEGHFTDTVVLYSCNPGYAMHGSNTLTCLSGDRRVWDKPLPSCIAECGGQIHAATSGRILSPGYPAPYDNNLHCTWIIEADPGKTISLHFIVFDTEMAHDILKVWDGPVDSDILLKEWSGSALPEDIHSTFNSLTLQFDSDFFISKSGFSIQFSTSIAATCNDPGMPQNGTRYGDSREAGDTVTFQCDPGYQLQGQAKITCVQLNNRFFWQPDPPTCIAACGGNLTGPAGVILSPNYPQPYPPGKECDWRVKVNPDFVIALIFKSFNMEPSYDFLHIYEGEDSNSPLIGSYQGSQAPERIESSGNSLFLAFRSDASVGLSGFAIEFKEKPREACFDPGNIMNGTRVGTDFKLGSTITYQCDSGYKILDPSSITCVIGADGKPSWDQVLPSCNAPCGGQYTGSEGVVLSPNYPHNYTAGQICLYSITVPKEFVVFGQFAYFQTALNDLAELFDGTHAQARLLSSLSGSHSGETLPLATSNQILLRFSAKSGASARGFHFVYQAVPRTSDTQCSSVPEPRYGRRIGSEFSAGSIVRFECNPGYLLQGSTALHCQSVPNALAQWNDTIPSCVVPCSGNFTQRRGTILSPGYPEPYGNNLNCIWKIIVTEGSGIQIQVISFATEQNWDSLEIHDGGDVTAPRLGSFSGTTVPALLNSTSNQLYLHFQSDISVAAAGFHLEYKTVGLAACQEPALPSNSIKIGDRYMVNDVLSFQCEPGYTLQGRSHISCMPGTVRRWNYPSPLCIATCGGTLSTLGGVILSPGFPGSYPNNLDCTWRISLPIGYGAHIQFLNFSTEANHDFLEIQNGPYHTSPMIGQFSGTDLPAALLSTTHETLIHFYSDHSQNRQGFKLAYQAYELQNCPDPPPFQNGYMINSDYSVGQSVSFECYPGYILIGHPVLTCQHGINRNWNYPFPRCDAPCGYNVTSQNGTIYSPGFPDEYPILKDCIWLITVPPGHGVYINFTLLQTEAVNDYIAVWDGPDQNSPQLGVFSGNTALETAYSSTNQVLLKFHSDFSNGGFFVLNFHAFQLKKCQPPPAVPQAEMLTEDDDFEIGDFVKYQCHPGYTLVGTDILTCKLSSQLQFEGSLPTCEAQCPANEVRTGSSGVILSPGYPGNYFNSQTCSWSIKVEPNYNITIFVDTFQSEKQFDALEVFDGSSGQSPLLVVLSGNHTEQSNFTSRSNQLYLRWSTDHATSKKGFKIRYAAPYCSLTHPLKNGGILNRTAGAVGSKVHYFCKPGYRMVGHSNATCRRNPLGMYQWDSLTPLCQAVSCGIPESPGNGSFTGNEFTLDSKVVYECHEGFKLESSQQATAVCQEDGLWSNKGKPPTCKPVACPSIEAQLSEHVIWRLVSGSLNEYGAQVLLSCSPGYYLEGWRLLRCQANGTWNIGDERPSCRVISCGSLSFPPNGNKIGTLTVYGATAIFTCNTGYTLVGSHVRECLANGLWSGSETRCLAGHCGSPDPIVNGHISGDGFSYRDTVVYQCNPGFRLVGTSVRICLQDHKWSGQTPVCVPITCGHPGNPAHGFTNGSEFNLNDVVNFTCNTGYLLQGVSRAQCRSNGQWSSPLPTCRVVNCSDPGFVENAIRHGQQNFPESFEYGMSILYHCKKGFYLLGSSALTCMANGLWDRSLPKCLAISCGHPGVPANAVLTGELFTYGAVVHYSCRGSESLIGNDTRVCQEDSHWSGALPHCTGNNPGFCGDPGTPAHGSRLGDDFKTKSLLRFSCEMGHQLRGSPERTCLLNGSWSGLQPVCEAVSCGNPGTPTNGMIVSSDGILFSSSVIYACWEGYKTSGLMTRHCTANGTWTGTAPDCTIISCGDPGTLANGIQFGTDFTFNKTVSYQCNPGYVMEAVTSATIRCTKDGRWNPSKPVCKAVLCPQPPPVQNGTVEGSDFRWGSSISYSCMDGYQLSHSAILSCEGRGVWKGEIPQCLPVFCGDPGIPAEGRLSGKSFTYKSEVFFQCKSPFILVGSSRRVCQADGTWSGIQPTCIDPAHNTCPDPGTPHFGIQNSSRGYEVGSTVFFRCRKGYHIQGSTTRTCLANLTWSGIQTECIPHACRQPETPAHADVRAIDLPTFGYTLVYTCHPGFFLAGGSEHRTCKADMKWTGKSPVCKSKGVREVNETVTKTPVPSDVFFVNSLWKGYYEYLGKRQPATLTVDWFNATSSKVNATFSEASPVELKLTGIYKKEEAHLLLKAFQIKGQADIFVSKFENDNWGLDGYVSSGLERGGFTFQGDIHGKDFGKFKLERQDPLNPDQDSSSHYHGTSSGSVAAAILVPFFALILSGFAFYLYKHRTRPKVQYNGYAGHENSNGQASFENPMYDTNLKPTEAKAVRFDTTLNTVCTVV

SEQ ID NO: 20672 - protein, 3565 aa, Homo sapiens; identical to SEQ ID NO: 20670
  Payload ID: 4180
  Gene Symbol: CSMD1
  Gene Name: CUB and Sushi multiple domains 1
  ENSP ID: ENSP00000473359

SEQ ID NO: 20673 - protein, 3388 aa, Homo sapiens; identical to SEQ ID NO: 20669
  Payload ID: 4180
  Gene Symbol: CSMD1
  Gene Name: CUB and Sushi multiple domains 1
  ENSP ID: ENSP00000473617

SEQ ID NO: 20674 - protein, 3564 aa, Homo sapiens
  Payload ID: 4180
  Gene Symbol: CSMD1
  Gene Name: CUB and Sushi multiple domains 1
  ENSP ID: ENSP00000489225
MTAWRRFQSLLLLLGLLVLCARLLTAAKGQNCGGLVQGPNGTIESPGFPHGYPNYANCTWIIITGERNRIQLSFHTFALEEDFDILSVYDGQPQQGNLKVRLSGFQLPSSIVSTGSILTLWFTTDFAVSAQGFKALYEVLPSHTCGNPGEILKGVLHGTRFNIGDKIRYSCLPGYILEGHAILTCIVSPGNGASWDFPAPFCRAEGACGGTLRGTSSSISSPHFPSEYENNADCTWTILAEPGDTIALVFTDFQLEEGYDFLEISGTEAPSIWLTGMNLPSPVISSKNWLRLHFTSDSNHRRKGFNAQFQVKKAIELKSRGVKMLPSKDGSHKNSVLSQGGVALVSDMCPDPGIPENGRRAGSDFRVGANVQFSCEDNYVLQGSKSITCQRVTETLAAWSDHRPICRARTCGSNLRGPSGVITSPNYPVQYEDNAHCVWVITTTDPDKVIKLAFEEFELERGYDTLTVGDAGKVGDTRSVLYVLTGSSVPDLIVSMSNQMWLHLQSDDSIGSPGFKAVYQEIEKGGCGDPGIPAYGKRTGSSFLHGDTLTFECPAAFELVGERVITCQQNNQWSGNKPSCVFSCFFNFTASSGIILSPNYPEEYGNNMNCVWLIISEPGSRIHLIFNDFDVEPQFDFLAVKDDGISDITVLGTFSGNEVPSQLASSGHIVRLEFQSDHSTTGRGFNITYTTFGQNECHDPGIPINGRRFGDRFLLGSSVSFHCDDGFVKTQGSESITCILQDGNVVWSSTVPRCEAPCGGHLTASSGVILPPGWPGYYKDSLHCEWIIEAKPGHSIKITFDRFQTEVNYDTLEVRDGPASSSPLIGEYHGTQAPQFLISTGNFMYLLFTTDNSRSSIGFLIHYESVTLESDSCLDPGIPVNGHRHGGDFGIRSTVTFSCDPGYTLSDDEPLVCERNHQWNHALPSCDALCGGYIQGKSGTVLSPGFPDFYPNSLNCTWTIEVSHGKGVQMIFHTFHLESSHDYLLITEDGSFSEPVARLTGSVLPHTIKAGLFGNFTAQLRFISDFSISYEGFNITFSEYDLEPCDDPGVPAFSRRIGFHFGVGDSLTFSCFLGYRLEGATKLTCLGGGRRVWSAPLPRCVAECGASVKGNEGTLLSPNFPSNYDNNHECIYKIETEAGKGIHLRTRSFQLFEGDTLKVYDGKDSSSRPLGTFTKNELLGLILNSTSNHLWLEFNTNGSDTDQGFQLTYTSFDLVKCEDPGIPNYGYRIRDEGHFTDTVVLYSCNPGYAMHGSNTLTCLSGDRRVWDKPLPSCIAECGGQIHAATSGRILSPGYPAPYDNNLHCTWIIEADPGKTISLHFIVFDTEMAHDILKVWDGPVDSDILLKEWSGSALPEDIHSTFNSLTLQFDSDFFISKSGFSIQFSTSIAATCNDPGMPQNGTRYGDSREAGDTVTFQCDPGYQLQGQAKITCVQLNNRFFWQPDPPTCIAACGGNLTGPAGVILSPNYPQPYPPGKECDWRVKVNPDFVIALIFKSFNMEPSYDFLHIYEGEDSNSPLIGSYQGSQAPERIESSGNSLFLAFRSDASVGLSGFAIEFKEKPREACFDPGNIMNGTRVGTDFKLGSTITYQCDSGYKILDPSSITCVIGADGKPSWDQVLPSCNAPCGGQYTGSEGVVLSPNYPHNYTAGQICLYSITVPKEFVVFGQFAYFQTALNDLAELFDGTHAQARLLSSLSGSHSGETLPLATSNQILLRFSAKSGASARGFHFVYQAVPRTSDTQCSSVPEPRYGRRIGSEFSAGSIVRFECNPGYLLQGSTALHCQSVPNALAQWNDTIPSCVVPCSGNFTQRRGTILSPGYPEPYGNNLNCIWKIIVTEGSGIQIQVISFATEQNWDSLEIHDGGDVTAPRLGSFSGTTVPALLNSTSNQLYLHFQSDISVAAAGFHLEYKTVGLAACQEPALPSNSIKIGDRYMVNDVLSFQCEPGYTLQGRSHISCMPGTVRRWNYPSPLCIATCGGTLSTLGGVILSPGFPGSYPNNLDCTWRISLPIGYGAHIQFLNFSTEANHDFLEIQNGPYHTSPMIGQFSGTDLPAALLSTTHETLIHFYSDHSQNRQGFKLAYQAYELQNCPDPPPFQNGYMINSDYSVGQSVSFECYPGYILIGHPVLTCQHGINRNWNYPFPRCDAPCGYNVTSQNGTIYSPGFPDEYPILKDCIWLITVPPGHGVYINFTLLQTEAVNDYIAVWDGPDQNSPQLGVFSGNTALETAYSSTNQVLLKFHSDFSNGGFFVLNFHAFQLKKCQPPPAVPQAEMLTEDDDFEIGDFVKYQCHPGYTLVGTDILTCKLSSQLQFEGSLPTCEAQCPANEVRTGSSGVILSPGYPGNYFNSQTCSWSIKVEPNYNITIFVDTFQSEKQFDALEVFDGSSGQSPLLVVLSGNHTEQSNFTSRSNQLYLRWSTDHATSKKGFKIRYAAPYCSLTHPLKNGGILNRTAGAVGSKVHYFCKPGYRMVGHSNATCRRNPLGMYQWDSLTPLCQAVSCGIPESPGNGSFTGNEFTLDSKVVYECHEGFKLESSQQATAVCQEDGLWSNKGKPPTCKPVACPSIEAQLSEHVIWRLVSGSLNEYGAQVLLSCSPGYYLEGWRLLRCQANGTWNIGDERPSCRVISCGSLSFPPNGNKIGTLTVYGATAIFTCNTGYTLVGSHVRECLANGLWSGSETRCLAGHCGSPDPIVNGHISGDGFSYRDTVVYQCNPGFRLVGTSVRICLQDHKWSGQTPVCVPITCGHPGNPAHGFTNGSEFNLNDVVNFTCNTGYLLQGVSRAQCRSNGQWSSPLPTCRVVNCSDPGFVENAIRHGQQNFPESFEYGMSILYHCKKGFYLLGSSALTCMANGLWDRSLPKCLAISCGHPGVPANAVLTGELFTYGAVVHYSCRGSESLIGNDTRVCQEDSHWSGALPHCTGNNPGFCGDPGTPAHGSRLGDDFKTKSLLRFSCEMGHQLRGSPERTCLLNGSWSGLQPVCEAVSCGNPGTPTNGMIVSSDGILFSSSVIYACWEGYKTSGLMTRHCTANGTWTGTAPDCTIISCGDPGTLANGIQFGTDFTFNKTVSYQCNPGYVMEAVTSATIRCTKDGRWNPSKPVCKAVLCPQPPPVQNGTVEGSDFRWGSSISYSCMDGYQLSHSAILSCEGRGVWKGEIPQCLPVFCGDPGIPAEGRLSGKSFTYKSEVFFQCKSPFILVGSSRRVCQADGTWSGIQPTCIDPAHNTCPDPGTPHFGIQNSSRGYEVGSTVFFRCRKGYHIQGSTTRTCLANLTWSGIQTECIPHACRQPETPAHADVRAIDLPTFGYTLVYTCHPGFFLAGGSEHRTCKADMKWTGKSPVCKSKGVREVNETVTKTPVPSDVFFVNSLWKGYYEYLGKRQPATLTVDWFNATSSKVNATFSEASPVELKLTGIYKKEEAHLLLKAFQIKGQADIFVSKFENDNWGLDGYVSSGLERGGFTFQGDIHGKDFGKFKLERQDPLNPDQDSSSHYHGTSSGSVAAAILVPFFALILSGFAFYLYKHRTRPKVQYNGYAGHENSNGQASFENPMYDTNLKPTEAKAVRFDTTLNTVCTVV

SEQ ID NO: 20675 - protein, 3487 aa, Homo sapiens
  Payload ID: 4181
  Gene Symbol: CSMD2
  Gene Name: CUB and Sushi multiple domains 2
  Uniprot ID: Q7Z408
  ENSP ID: ENSP00000241312
MRLISIAPGPRWQVQSHHPRSAGQNCTFQLHGPNGTVESPGFPYGYPNYANCTWTITAEEQHRIQLVFQSFALEEDFDVLSVFDGPPQPENLRTRLTGFQLPATIVSAATTLSLRLISDYAVSAQGFHATYEVLPSHTCGNPGRLPNGIQQGSTFNLGDKVRYSCNLGFFLEGHAVLTCHAGSENSATWDFPLPSCRADDACGGTLRGQSGIISSPHFPSEYHNNADCTWTILAELGDTIALVFIDFQLEDGYDFLEVTGTEGSSLWFTGASLPAPVISSKNWLRLHFTSDGNHRQRGFSAQYQVKKQIELKSRGVKLMPSKDNSQKTSVLTQVGVSQGHNMCPDPGIPERGKRLGSDFRLGSSVQFTCNEGYDLQGSKRITCMKVSDMFAAWSDHRPVCRARMCDAHLRGPSGIITSPNFPIQYDNNAHCVWIITALNPSKVIKLAFEEFDLERGYDTLTVGDGGQDGDQKTVLYILTGTSVPDLIVSTNHQMWLLFQTDGSGSSLGFKASYEEIEQGSCGDPGIPAYGRREGSRFHHGDTLKFECQPAFELVGQKAITCQKNNQWSAKKPGCVFSCFFNFTSPSGVVLSPNYPEDYGNHLHCVWLILARPESRIHLAFNDIDVEPQFDFLVIKDGATAEAPVLGTFSGNQLPSSITSSGHVARLEFQTDHSTGKRGFNITFTTFRHNECPDPGVPVNGKRFGDSLQLGSSISFLCDEGFLGTQGSETITCVLKEGSVVWNSAVLRCEAPCGGHLTSPSGTILSPGWPGFYKDALSCAWVIEAQPGYPIKITFDRFKTEVNYDTLEVRDGRTYSAPLIGVYHGTQVPQFLISTSNYLYLLFSTDKSHSDIGFQLRYETITLQSDHCLDPGIPVNGQRHGNDFYVGALVTFSCDSGYTLSDGEPLECEPNFQWSRALPSCEALCGGFIQGSSGTILSPGFPDFYPNNLNCTWIIETSHGKGVFFTFHTFHLESGHDYLLITENGSFTQPLRQLTGSRLPAPISAGLYGNFTAQVRFISDFSMSYEGFNITFSEYDLEPCEEPEVPAYSIRKGLQFGVGDTLTFSCFPGYRLEGTARITCLGGRRRLWSSPLPRCVAECGNSVTGTQGTLLSPNFPVNYNNNHECIYSIQTQPGKGIQLKARAFELSEGDVLKVYDGNNNSARLLGVFSHSEMMGVTLNSTSSSLWLDFITDAENTSKGFELHFSSFELIKCEDPGTPKFGYKVHDEGHFAGSSVSFSCDPGYSLRGSEELLCLSGERRTWDRPLPTCVAECGGTVRGEVSGQVLSPGYPAPYEHNLNCIWTIEAEAGCTIGLHFLVFDTEEVHDVLRIWDGPVESGVLLKELSGPALPKDLHSTFNSVVLQFSTDFFTSKQGFAIQFSVSTATSCNDPGIPQNGSRSGDSWEAGDSTVFQCDPGYALQGSAEISCVKIENRFFWQPSPPTCIAPCGGDLTGPSGVILSPNYPEPYPPGKECDWKVTVSPDYVIALVFNIFNLEPGYDFLHIYDGRDSLSPLIGSFYGSQLPGRIESSSNSLFLAFRSDASVSNAGFVIDYTENPRESCFDPGSIKNGTRVGSDLKLGSSVTYYCHGGYEVEGTSTLSCILGPDGKPVWNNPRPVCTAPCGGQYVGSDGVVLSPNYPQNYTSGQICLYFVTVPKDYVVFGQFAFFHTALNDVVEVHDGHSQHSRLLSSLSGSHTGESLPLATSNQVLIKFSAKGLAPARGFHFVYQAVPRTSATQCSSVPEPRYGKRLGSDFSVGAIVRFECNSGYALQGSPEIECLPVPGALAQWNVSAPTCVVPCGGNLTERRGTILSPGFPEPYLNSLNCVWKIVVPEGAGIQIQVVSFVTEQNWDSLEVFDGADNTVTMLGSFSGTTVPALLNSTSNQLYLHFYSDISVSAAGFHLEYKTVGLSSCPEPAVPSNGVKTGERYLVNDVVSFQCEPGYALQGHAHISCMPGTVRRWNYPPPLCIAQCGGTVEEMEGVILSPGFPGNYPSNMDCSWKIALPVGFGAHIQFLNFSTEPNHDYIEIRNGPYETSRMMGRFSGSELPSSLLSTSHETTVYFHSDHSQNRPGFKLEYQDLTYSHQISSFLRGFDLSELERTNSTPPVAASYVWDLDPGCEAYELQECPDPEPFANGIVRGAGYNVGQSVTFECLPGYQLTGHPVLTCQHGTNRNWDHPLPKCEVPCGGNITSSNGTVYSPGFPSPYSSSQDCVWLITVPIGHGVRLNLSLLQTEPSGDFITIWDGPQQTAPRLGVFTRSMAKKTVQSSSNQVLLKFHRDAATGGIFAIAFSAYPLTKCPPPTILPNAEVVTENEEFNIGDIVRYRCLPGFTLVGNEILTCKLGTYLQFEGPPPICEVHCPTNELLTDSTGVILSQSYPGSYPQFQTCSWLVRVEPDYNISLTVEYFLSEKQYDEFEIFDGPSGQSPLLKALSGNYSAPLIVTSSSNSVYLRWSSDHAYNRKGFKIRYSAPYCSLPRAPLHGFILGQTSTQPGGSIHFGCNAGYRLVGHSMAICTRHPQGYHLWSEAIPLCQALSCGLPEAPKNGMVFGKEYTVGTKAMYSCSEGYHLQAGAEATAECLDTGLWSNRNVPPQCVPVTCPDVSSISVEHGRWRLIFETQYQFQAQLMLICDPGYYYTGQRVIRCQANGKWSLGDSTPTCRIISCGELPIPPNGHRIGTLSVYGATAIFSCNSGYTLVGSRVRECMANGLWSGSEVRCLAGHCGTPEPIVNGHINGENYSYRGSVVYQCNAGFRLIGMSVRICQQDHHWSGKTPFCVLVSCGHPGSPPHSQMSGDSYTVGAVVRYSCIGKRTLVGNSTRMCGLDGHWTGSLPHCSGTSVGVCGDPGIPAHGIRLGDSFDPGTVMRFSCEAGHVLRGSSERTCQANGSWSGSQPECGVISCGNPGTPSNARVVFSDGLVFSSSIVYECREGYYATGLLSRHCSVNGTWTGSDPECLVINCGDPGIPANGLRLGNDFRYNKTVTYQCVPGYMMESHRVSVLSCTKDRTWNGTKPVCKALMCKPPPLIPNGKVVGSDFMWGSSVTYACLEGYQLSLPAVFTCEGNGSWTGELPQCFPVFCGDPGVPSRGRREDRGFSYRSSVSFSCHPPLVLVGSPRRFCQSDGTWSGTQPSCIDPTLTTCADPGVPQFGIQNNSQGYQVGSTVLFRCQKGYLLQGSTTRTCLPNLTWSGTPPDCVPHHCRQPETPTHANVGALDLPSMGYTLIYSCQEGFSLKGGSEHRTCKADGSWTGKPPICLEVRPSGRPINTAREPPLTQALIPGDVFAKNSLWKGAYEYQGKKQPAMLRVTGFQVANSKVNATMIDHSGVELHLAGTYKKEDFHLLLQVYQITGPVEIFMNKFKDDHWALDGHVSSESSGATFIYQGSVKGQGFGQFGFQRLDLRLLESDPESIGRHFASNSSSVAAAILVPFIALIIAGFVLYLYKHRRRPKVPFNGYAGHENTNVRATFENPMYDRNIQPTDIMASEAEFTVSTVCTAV

SEQ ID NO: 20676 - protein, 225 aa, Homo sapiens
  Payload ID: 4181
  Gene Symbol: CSMD2
  Gene Name: CUB and Sushi multiple domains 2
  ENSP ID: ENSP00000340311
MCDAHLRGPSGIITSPNFPIQYDNNAHCVWIITALNPSKAGGDPGNIQCNKEGLSVETQSLRLRNRSCLLGNSKDNGCCVPNPVHGTGLQVIKLAFEEFDLERGYDTLTVGDGGQDGDQKTVLYILTGTSVPDLIVSTNHQMWLLFQTDGSGSSLGFKASYEEIEQGSCGDPGIPAYGRREGSRFHHGDTLKFECQPAFELVGQKAITCQKNNQWSAKKPGCVCK

SEQ ID NO: 20677 - protein, 426 aa, Homo sapiens
  Payload ID: 4181
  Gene Symbol: CSMD2
  Gene Name: CUB and Sushi multiple domains 2
  ENSP ID: ENSP00000362475
MLGSFSGTTVPALLNSTSNQLYLHFYSDISVSAAGFHLEYKTVGLSSCPEPAVPSNGVKTGERYLVNDVVSFQCEPGYALQGHAHISCMPGTVRRWNYPPPLCIAQCGGTVEEMEGVILSPGFPGNYPSNMDCSWKIALPVGFGAHIQFLNFSTEPNHDYIEIRNGPYETSRMMGRFSGSELPSSLLSTSHETTVYFHSDHSQNRPGFKLEYQAYELQECPDPEPFANGIVRGAGYNVGQSVTFECLPGYQLTGHPVLTCQHGTNRNWDHPLPKCEVPCGGNITSSNGTVYSPGFPSPYSSSQDCVWLITVPIGHGVRLNLSLLQTEPSGDFITIWDGPQQTAPRLGVFTRSMAKKTVQSSSNQVLLKFHRDAATGGIFAIAFSDHCRYFNQKSGKLDFTPSSTLGQLCKTLHRSLPHLRLQFLHL

SEQ ID NO: 20678 - protein, 1167 aa, Homo sapiens
  Payload ID: 4181
  Gene Symbol: CSMD2
  Gene Name: CUB and Sushi multiple domains 2
  Uniprot ID: Q7Z408
  ENSP ID: ENSP00000362478
MVIVILFPAECGNSVTGTQGTLLSPNFPVNYNNNHECIYSIQTQPGKGIQLKARAFELSEGDVLKVYDGNNNSARLLGVFSHSEMMGVTLNSTSSSLWLDFITDAENTSKGFELHFSSFELIKCEDPGTPKFGYKVHDEGHFAGSSVSFSCDPGYSLRGSEELLCLSGERRTWDRPLPTCVAECGGTVRGEVSGQVLSPGYPAPYEHNLNCIWTIEAEAGCTIGLHFLVFDTEEVHDVLRIWDGPVESGVLLKELSGPALPKDLHSTFNSVVLQFSTDFFTSKQGFAIQFSVSTATSCNDPGIPQNGSRSGDSWEAGDSTVFQCDPGYALQGSAEISCVKIENRFFWQPSPPTCIAPCGGDLTGPSGVILSPNYPEPYPPGKECDWKVTVSPDYVIALVFNIFNLEPGYDFLHIYDGRDSLSPLIGSFYGSQLPGRIESSSNSLFLAFRSDASVSNAGFVIDYTENPRESCFDPGSIKNGTRVGSDLKLGSSVTYYCHGGYEVEGTSTLSCILGPDGKPVWNNPRPVCTAPCGGQYVGSDGVVLSPNYPQNYTSGQICLYFVTVPKDYVVFGQFAFFHTALNDVVEVHDGHSQHSRLLSSLSGSHTGESLPLATSNQVLIKFSAKGLAPARGFHFVYQAVPRTSATQCSSVPEPRYGKRLGSDFSVGAIVRFECNSGYALQGSPEIECLPVPGALAQWNVSAPTCVVPCGGNLTERRGTILSPGFPEPYLNSLNCVWKIVVPEGAGIQIQVVSFVTEQNWDSLEVFDGADNTVTMLGSFSGTTVPALLNSTSNQLYLHFYSDISVSAAGFHLEYKTVGLSSCPEPAVPSNGVKTGERYLVNDVVSFQCEPGYALQGHAHISCMPGTVRRWNYPPPLCIAQCGGTVEEMEGVILSPGFPGNYPSNMDCSWKIALPVGFGAHIQFLNFSTEPNHDYIEIRNGPYETSRMMGRFSGSELPSSLLSTSHETTVYFHSDHSQNRPGFKLEYQAYELQECPDPEPFANGIVRGAGYNVGQSVTFECLPGYQLTGHPVLTCQHGTNRNWDHPLPKCEVPCGGNITSSNGTVYSPGFPSPYSSSQDCVWLITVPIGHGVRLNLSLLQTEPSGDFITIWDGPQQTAPRLGVFTRSMAKKTVQSSSNQVLLKFHRDAATGGIFAIAFSGHLAAVCTL

SEQ ID NO: 20679 - protein, 3631 aa, Homo sapiens
  Payload ID: 4181
  Gene Symbol: CSMD2
  Gene Name: CUB and Sushi multiple domains 2
  Uniprot ID: Q7Z408
  ENSP ID: ENSP00000362479
MPRSRGRELGRCGCPAGRARGETGISALVPGAGSRWGRPPPPTPPPLLLLLGCGLLSVSAAAGQNCTFQLHGPNGTVESPGFPYGYPNYANCTWTITAEEQHRIQLVFQSFALEEDFDVLSVFDGPPQPENLRTRLTGFQLPATIVSAATTLSLRLISDYAVSAQGFHATYEVLPSHTCGNPGRLPNGIQQGSTFNLGDKVRYSCNLGFFLEGHAVLTCHAGSENSATWDFPLPSCRADDACGGTLRGQSGIISSPHFPSEYHNNADCTWTILAELGDTIALVFIDFQLEDGYDFLEVTGTEGSSLWFTGASLPAPVISSKNWLRLHFTSDGNHRQRGFSAQYQVKKQIELKSRGVKLMPSKDNSQKTSVLTQVGVSQGHNMCPDPGIPERGKRLGSDFRLGSSVQFTCNEGYDLQGSKRITCMKVSDMFAAWSDHRPVCRARMCDAHLRGPSGIITSPNFPIQYDNNAHCVWIITALNPSKVIKLAFEEFDLERGYDTLTVGDGGQDGDQKTVLYILTGTSVPDLIVSTNHQMWLLFQTDGSGSSLGFKASYEEIEQGSCGDPGIPAYGRREGSRFHHGDTLKFECQPAFELVGQKAITCQKNNQWSAKKPGCVFSCFFNFTSPSGVVLSPNYPEDYGNHLHCVWLILARPESRIHLAFNDIDVEPQFDFLVIKDGATAEAPVLGTFSGNQLPSSITSSGHVARLEFQTDHSTGKRGFNITFTTFRHNECPDPGVPVNGKRFGDSLQLGSSISFLCDEGFLGTQGSETITCVLKEGSVVWNSAVLRCEAPCGGHLTSPSGTILSPGWPGFYKDALSCAWVIEAQPGYPIKITFDRFKTEVNYDTLEVRDGRTYSAPLIGVYHGTQVPQFLISTSNYLYLLFSTDKSHSDIGFQLRYETITLQSDHCLDPGIPVNGQRHGNDFYVGALVTFSCDSGYTLSDGEPLECEPNFQWSRALPSCEALCGGFIQGSSGTILSPGFPDFYPNNLNCTWIIETSHGKGVFFTFHTFHLESGHDYLLITENGSFTQPLRQLTGSRLPAPISAGLYGNFTAQVRFISDFSMSYEGFNITFSEYDLEPCEEPEVPAYSIRKGLQFGVGDTLTFSCFPGYRLEGTARITCLGGRRRLWSSPLPRCVAECGNSVTGTQGTLLSPNFPVNYNNNHECIYSIQTQPGKGIQLKARAFELSEGDVLKVYDGNNNSARLLGVFSHSEMMGVTLNSTSSSLWLDFITDAENTSKGFELHFSSFELIKCEDPGTPKFGYKVHDEGHFAGSSVSFSCDPGYSLRGSEELLCLSGERRTWDRPLPTCVAECGGTVRGEVSGQVLSPGYPAPYEHNLNCIWTIEAEAGCTIGLHFLVFDTEEVHDVLRIWDGPVESGVLLKELSGPALPKDLHSTFNSVVLQFSTDFFTSKQGFAIQFSVSTATSCNDPGIPQNGSRSGDSWEAGDSTVFQCDPGYALQGSAEISCVKIENRFFWQPSPPTCIAPCGGDLTGPSGVILSPNYPEPYPPGKECDWKVTVSPDYVIALVFNIFNLEPGYDFLHIYDGRDSLSPLIGSFYGSQLPGRIESSSNSLFLAFRSDASVSNAGFVIDYTENPRESCFDPGSIKNGTRVGSDLKLGSSVTYYCHGGYEVEGTSTLSCILGPDGKPVWNNPRPVCTAPCGGQYVGSDGVVLSPNYPQNYTSGQICLYFVTVPKDYVVFGQFAFFHTALNDVVEVHDGHSQHSRLLSSLSGSHTGESLPLATSNQVLIKFSAKGLAPARGFHFVYQAVPRTSATQCSSVPEPRYGKRLGSDFSVGAIVRFECNSGYALQGSPEIECLPVPGALAQWNVSAPTCVVPCGGNLTERRGTILSPGFPEPYLNSLNCVWKIVVPEGAGIQIQVVSFVTEQNWDSLEVFDGADNTVTMLGSFSGTTVPALLNSTSNQLYLHFYSDISVSAAGFHLEYKTVGLSSCPEPAVPSNGVKTGERYLVNDVVSFQCEPGYALQGHAHISCMPGTVRRWNYPPPLCIAQCGGTVEEMEGVILSPGFPGNYPSNMDCSWKIALPVGFGAHIQFLNFSTEPNHDYIEIRNGPYETSRMMGRFSGSELPSSLLSTSHETTVYFHSDHSQNRPGFKLEYQAYELQECPDPEPFANGIVRGAGYNVGQSVTFECLPGYQLTGHPVLTCQHGTNRNWDHPLPKCEVPCGGNITSSNGTVYSPGFPSPYSSSQDCVWLITVPIGHGVRLNLSLLQTEPSGDFITIWDGPQQTAPRLGVFTRSMAKKTVQSSSNQVLLKFHRDAATGGIFAIAFSAYPLTKCPPPTILPNAEVVTENEEFNIGDIVRYRCLPGFTLVGNEILTCKLGTYLQFEGPPPICEVHCPTNELLTDSTGVILSQSYPGSYPQFQTCSWLVRVEPDYNISLTVEYFLSEKQYDEFEIFDGPSGQSPLLKALSGNYSAPLIVTSSSNSVYLRWSSDHAYNRKGFKIRYSAPYCSLPRAPLHGFILGQTSTQPGGSIHFGCNAGYRLVGHSMAICTRHPQGYHLWSEAIPLCQALSCGLPEAPKNGMVFGKEYTVGTKAMYSCSEGYHLQAGAEATAECLDTGLWSNRNVPPQCVPVTCPDVSSISVEHGRWRLIFETQYQFQAQLMLICDPGYYYTGQRVIRCQANGKWSLGDSTPTCRIISCGELPIPPNGHRIGTLSVYGATAIFSCNSGYTLVGSRVRECMANGLWSGSEVRCLATQTKLHSIFYKLLFDVLSSPSLTKAGHCGTPEPIVNGHINGENYSYRGSVVYQCNAGFRLIGMSVRICQQDHHWSGKTPFCVPITCGHPGNPVNGLTQGNQFNLNDVVKFVCNPGYMAEGAARSQCLASGQWSDMLPTCRIINCTDPGHQENSVRQVHASGPHRFSFGTTVSYRCNHGFYLLGTPVLSCQGDGTWDRPRPQCLLVSCGHPGSPPHSQMSGDSYTVGAVVRYSCIGKRTLVGNSTRMCGLDGHWTGSLPHCSGTSVGVCGDPGIPAHGIRLGDSFDPGTVMRFSCEAGHVLRGSSERTCQANGSWSGSQPECGVISCGNPGTPSNARVVFSDGLVFSSSIVYECREGYYATGLLSRHCSVNGTWTGSDPECLVINCGDPGIPANGLRLGNDFRYNKTVTYQCVPGYMMESHRVSVLSCTKDRTWNGTKPVCKALMCKPPPLIPNGKVVGSDFMWGSSVTYACLEGYQLSLPAVFTCEGNGSWTGELPQCFPVFCGDPGVPSRGRREDRGFSYRSSVSFSCHPPLVLVGSPRRFCQSDGTWSGTQPSCIDPTLTTCADPGVPQFGIQNNSQGYQVGSTVLFRCQKGYLLQGSTTRTCLPNLTWSGTPPDCVPHHCRQPETPTHANVGALDLPSMGYTLIYSCQEGFSLKGGSEHRTCKADGSWTGKPPICLEVRPSGRPINTAREPPLTQALIPGDVFAKNSLWKGAYEYQGKKQPAMLRVTGFQVANSKVNATMIDHSGVELHLAGTYKKEDFHLLLQVYQITGPVEIFMNKFKDDHWALDGHVSSESSGATFIYQGSVKGQGFGQFGFQRLDLRLLESDPESIGRHFASNSSSVAAAILVPFIALIIAGFVLYLYKHRRRPKVPFNGYAGHENTNVRATFENPMYDRNIQPTDIMASEAEFTVSTVCTAV

SEQ ID NO: 20680 - protein, 3487 aa, Homo sapiens; identical to SEQ ID NO: 20675
  Payload ID: 4181
  Gene Symbol: CSMD2
  Gene Name: CUB and Sushi multiple domains 2
  Uniprot ID: Q7Z408
  ENSP ID: ENSP00000362486

SEQ ID NO: 20681 - protein, 3591 aa, Homo sapiens
  Payload ID: 4181
  Gene Symbol: CSMD2
  Gene Name: CUB and Sushi multiple domains 2
  ENSP ID: ENSP00000483463
MRLISIAPGPRWQVQSHHPRSAGQNCTFQLHGPNGTVESPGFPYGYPNYANCTWTITAEEQHRIQLVFQSFALEEDFDVLSVFDGPPQPENLRTRLTGFQLPATIVSAATTLSLRLISDYAVSAQGFHATYEVLPSHTCGNPGRLPNGIQQGSTFNLGDKVRYSCNLGFFLEGHAVLTCHAGSENSATWDFPLPSCRADDACGGTLRGQSGIISSPHFPSEYHNNADCTWTILAELGDTIALVFIDFQLEDGYDFLEVTGTEGSSLWFTGASLPAPVISSKNWLRLHFTSDGNHRQRGFSAQYQVKKQIELKSRGVKLMPSKDNSQKTSVLTQVGVSQGHNMCPDPGIPERGKRLGSDFRLGSSVQFTCNEGYDLQGSKRITCMKVSDMFAAWSDHRPVCRARMCDAHLRGPSGIITSPNFPIQYDNNAHCVWIITALNPSKVIKLAFEEFDLERGYDTLTVGDGGQDGDQKTVLYILTGTSVPDLIVSTNHQMWLLFQTDGSGSSLGFKASYEEIEQGSCGDPGIPAYGRREGSRFHHGDTLKFECQPAFELVGQKAITCQKNNQWSAKKPGCVFSCFFNFTSPSGVVLSPNYPEDYGNHLHCVWLILARPESRIHLAFNDIDVEPQFDFLVIKDGATAEAPVLGTFSGNQLPSSITSSGHVARLEFQTDHSTGKRGFNITFTTFRHNECPDPGVPVNGKRFGDSLQLGSSISFLCDEGFLGTQGSETITCVLKEGSVVWNSAVLRCEAPCGGHLTSPSGTILSPGWPGFYKDALSCAWVIEAQPGYPIKITFDRFKTEVNYDTLEVRDGRTYSAPLIGVYHGTQVPQFLISTSNYLYLLFSTDKSHSDIGFQLRYETITLQSDHCLDPGIPVNGQRHGNDFYVGALVTFSCDSGYTLSDGEPLECEPNFQWSRALPSCEALCGGFIQGSSGTILSPGFPDFYPNNLNCTWIIETSHGKGVFFTFHTFHLESGHDYLLITENGSFTQPLRQLTGSRLPAPISAGLYGNFTAQVRFISDFSMSYEGFNITFSEYDLEPCEEPEVPAYSIRKGLQFGVGDTLTFSCFPGYRLEGTARITCLGGRRRLWSSPLPRCVAECGNSVTGTQGTLLSPNFPVNYNNNHECIYSIQTQPGKGIQLKARAFELSEGDVLKVYDGNNNSARLLGVFSHSEMMGVTLNSTSSSLWLDFITDAENTSKGFELHFSSFELIKCEDPGTPKFGYKVHDEGHFAGSSVSFSCDPGYSLRGSEELLCLSGERRTWDRPLPTCVAECGGTVRGEVSGQVLSPGYPAPYEHNLNCIWTIEAEAGCTIGLHFLVFDTEEVHDVLRIWDGPVESGVLLKELSGPALPKDLHSTFNSVVLQFSTDFFTSKQGFAIQFSVSTATSCNDPGIPQNGSRSGDSWEAGDSTVFQCDPGYALQGSAEISCVKIENRFFWQPSPPTCIAPCGGDLTGPSGVILSPNYPEPYPPGKECDWKVTVSPDYVIALVFNIFNLEPGYDFLHIYDGRDSLSPLIGSFYGSQLPGRIESSSNSLFLAFRSDASVSNAGFVIDYTENPRESCFDPGSIKNGTRVGSDLKLGSSVTYYCHGGYEVEGTSTLSCILGPDGKPVWNNPRPVCTAPCGGQYVGSDGVVLSPNYPQNYTSGQICLYFVTVPKDYVVFGQFAFFHTALNDVVEVHDGHSQHSRLLSSLSGSHTGESLPLATSNQVLIKFSAKGLAPARGFHFVYQAVPRTSATQCSSVPEPRYGKRLGSDFSVGAIVRFECNSGYALQGSPEIECLPVPGALAQWNVSAPTCVVPCGGNLTERRGTILSPGFPEPYLNSLNCVWKIVVPEGAGIQIQVVSFVTEQNWDSLEVFDGADNTVTMLGSFSGTTVPALLNSTSNQLYLHFYSDISVSAAGFHLEYKTVGLSSCPEPAVPSNGVKTGERYLVNDVVSFQCEPGYALQGHAHISCMPGTVRRWNYPPPLCIAQCGGTVEEMEGVILSPGFPGNYPSNMDCSWKIALPVGFGAHIQFLNFSTEPNHDYIEIRNGPYETSRMMGRFSGSELPSSLLSTSHETTVYFHSDHSQNRPGFKLEYQAYELQECPDPEPFANGIVRGAGYNVGQSVTFECLPGYQLTGHPVLTCQHGTNRNWDHPLPKCEVPCGGNITSSNGTVYSPGFPSPYSSSQDCVWLITVPIGHGVRLNLSLLQTEPSGDFITIWDGPQQTAPRLGVFTRSMAKKTVQSSSNQVLLKFHRDAATGGIFAIAFSAYPLTKCPPPTILPNAEVVTENEEFNIGDIVRYRCLPGFTLVGNEILTCKLGTYLQFEGPPPICEVHCPTNELLTDSTGVILSQSYPGSYPQFQTCSWLVRVEPDYNISLTVEYFLSEKQYDEFEIFDGPSGQSPLLKALSGNYSAPLIVTSSSNSVYLRWSSDHAYNRKGFKIRYSAPYCSLPRAPLHGFILGQTSTQPGGSIHFGCNAGYRLVGHSMAICTRHPQGYHLWSEAIPLCQALSCGLPEAPKNGMVFGKEYTVGTKAMYSCSEGYHLQAGAEATAECLDTGLWSNRNVPPQCVPVTCPDVSSISVEHGRWRLIFETQYQFQAQLMLICDPGYYYTGQRVIRCQANGKWSLGDSTPTCRIISCGELPIPPNGHRIGTLSVYGATAIFSCNSGYTLVGSRVRECMANGLWSGSEVRCLATQTKLHSIFYKLLFDVLSSPSLTKAGHCGTPEPIVNGHINGENYSYRGSVVYQCNAGFRLIGMSVRICQQDHHWSGKTPFCVPITCGHPGNPVNGLTQGNQFNLNDVVKFVCNPGYMAEGAARSQCLASGQWSDMLPTCRIINCTDPGHQENSVRQVHASGPHRFSFGTTVSYRCNHGFYLLGTPVLSCQGDGTWDRPRPQCLLVSCGHPGSPPHSQMSGDSYTVGAVVRYSCIGKRTLVGNSTRMCGLDGHWTGSLPHCSGTSVGVCGDPGIPAHGIRLGDSFDPGTVMRFSCEAGHVLRGSSERTCQANGSWSGSQPECGVISCGNPGTPSNARVVFSDGLVFSSSIVYECREGYYATGLLSRHCSVNGTWTGSDPECLVINCGDPGIPANGLRLGNDFRYNKTVTYQCVPGYMMESHRVSVLSCTKDRTWNGTKPVCKALMCKPPPLIPNGKVVGSDFMWGSSVTYACLEGYQLSLPAVFTCEGNGSWTGELPQCFPVFCGDPGVPSRGRREDRGFSYRSSVSFSCHPPLVLVGSPRRFCQSDGTWSGTQPSCIDPTLTTCADPGVPQFGIQNNSQGYQVGSTVLFRCQKGYLLQGSTTRTCLPNLTWSGTPPDCVPHHCRQPETPTHANVGALDLPSMGYTLIYSCQEGFSLKGGSEHRTCKADGSWTGKPPICLEVRPSGRPINTAREPPLTQALIPGDVFAKNSLWKGAYEYQGKKQPAMLRVTGFQVANSKVNATMIDHSGVELHLAGTYKKEDFHLLLQVYQITGPVEIFMNKFKDDHWALDGHVSSESSGATFIYQGSVKGQGFGQFGFQRLDLRLLESDPESIGRHFASNSSSVAAAILVPFIALIIAGFVLYLYKHRRRPKVPFNGYAGHENTNVRATFENPMYDRNIQPTDIMASEAEFTVSTVCTAV

SEQ ID NO: 20682 - protein, 3707 aa, Homo sapiens
  Payload ID: 4182
  Gene Symbol: CSMD3
  Gene Name: CUB and Sushi multiple domains 3
  Uniprot ID: Q7Z407
  ENSP ID: ENSP00000297405
MKGIRKGESRAKESKPWEPGKRRCAKCGRLDFILMKKMGIKSGFTFWNLVFLLTVSCVKGFIYTCGGTLKGLNGTIESPGFPYGYPNGANCTWVIIAEERNRIQIVFQSFALEEEYDYLSLYDGHPHPTNFRTRLTGFHLPPPVTSTKSVFSLRLTSDFAVSAHGFKVYYEELQSSSCGNPGVPPKGVLYGTRFDVGDKIRYSCVTGYILDGHPQLTCIANSVNTASWDFPVPICRAEDACGGTMRGSSGIISSPSFPNEYHNNADCTWTIVAEPGDTISLIFTDFQMEEKYDYLEIEGSEPPTIWLSGMNIPPPIISNKNWLRLHFVTDSNHRYRGFSAPYQGSSTLTHTTSTGELEEHNRTTTGAIAVASTPADVTVSSVTAVTIHRLSEEQRVQVTSLRNSGLDPNTSKDGLSPHPADTQSTRRRPRHAEQIERTKELAVVTHRVKKAIDFKSRGFKLFPGKDNSNKFSILNEGGIKTASNLCPDPGEPENGKRIGSDFSLGSTVQFSCDEDYVLQGAKSITCQRIAEVFAAWSDHRPVCKVKTCGSNLQGPSGTFTSPNFPFQYDSNAQCVWVITAVNTNKVIQINFEEFDLEIGYDTLTIGDGGEVGDPRTVLQVLTGSFVPDLIVSMSSQMWLHLQTDESVGSVGFKVNYKEIEKESCGDPGTPLYGIREGDGFSNRDVLRFECQFGFELIGEKSIVCQENNQWSANIPICIFPCLSNFTAPMGTVLSPDYPEGYGNNLNCIWTIISDPGSRIHLSFNDFDLESQFDFLAVKDGDSPESPILGTFTGAEVPSHLTSNSHILRLEFQADHSMSGRGFNITYNTFGHNECPDPGIPINARRFGDNFQLGSSISVICEEGFIKTQGTETITCILMDGKVMWSGLIPKCGAPCGGHFSAPSGVILSPGWPGYYKDSLNCEWVIEAEPGHSIKITFERFQTELNYDVLEVHDGPNLLSPLLGSYNGTQVPQFLFSSSNFIYLLFTTDNSRSNNGFKIHYESVTVNTYSCLDPGIPVHGRRYGHDFSIGSTVSFSCDSGYRLSHEEPLLCEKNHWWSHPLPTCDALCGGDVRGPSGTILSPGYPEFYPNSLNCTWTVDVTHGKGVQFNFHTFHLEDHHDYLLITENGSFTQPLARLTGSDLPPTINAGLYGNFRAQLRFISDFSISYEGFNITFSEYNLEPCEDPGIPQYGSRIGFNFGIGDTLTFSCSSGYRLEGTSEIICLGGGRRVWSAPLPRCVAECGASATNNEGILLSPNYPLNYENNHECIYSIQVQAGKGINISARTFHLAQGDVLKIYDGKDKTTHLLGAFTGASMRGLTLSSTSNQLWLEFNSDTEGTDEGFQLVYTSFELSHCEDPGIPQFGYKISDQGHFAGSTIIYGCNPGYTLHGSSLLKCMTGERRAWDYPLPSCIAECGGRFKGESSGRILSPGYPFPYDNNLRCMWMIEVDPGNIVSLQFLAFDTEASHDILRVWDGPPENDMLLKEISGSLIPEGIHSTLNIVTIQFDTDFYISKSGFAIQFSSSVATACRDPGVPMNGTRNGDGREPGDTVVFQCDPGYELQGEERITCIQVENRYFWQPSPPVCIAPCGGNLTGSSGFILSPNFPHPYPHSRDCDWTITVNADYVISLAFISFSIEPNYDFLYIYDGPDSNSPLIGSFQDSKLPERIESSSNTMHLAFRSDGSVSYTGFHLEYKAKLRESCFDPGNIMNGTRLGMDYKLGSTVTYYCDAGYVLQGYSTLTCIMGDDGRPGWNRALPSCHAPCGSRSTGSEGTVLSPNYPKNYSVGHNCVYSIAVPKEFVVFGQFVFFQTSLHDVVEVYDGPTQQSSLLSSLSGSHSGESLPLSSGNQITIRFTSVGPITAKGFHFVYQAVPRTSSTQCSSVPEPRFGRRIGNEFAVGSSVLFDCNPGYILHGSIAIRCETVPNSLAQWNDSLPTCIVPCGGILTKRKGTILSPGYPEPYDNNLNCVWKITVPEGAGIQVQVVSFATEHNWDSLDFYDGGDNNAPRLGSYSGTTIPHLLNSTSNNLYLNFQSDISVSAAGFHLEYTAIGLDSCPEPQTPSSGIKIGDRYMVGDVVSFQCDQGYSLQGHSHITCMPGPVRRWNYPIPICLAQCGGAMSDFSGVILSPGFPGNYPSSLDCTWTINLPIGFGVHLQFVNFSTETIHDYLEVRSGSSETSTVIGRLSGPQIPSSLFSTTHETSLYFHSDYSQNKQGFHIVYQAYQLQSCPDPRPFRNGFVIGNDFTVGQTISFECFPGYTLIGNSALTCLHGVSRNWNHPLPRCEALCGGNITAMNGTIYSPGYPDEYPNFQDCFWLVRVPPGNGIYINFTVLQTEPIYDFITVWDGPDQNSPQIGQFSGNTALESVYSTSNQILIKFHSDFTTSGFFVLSYHAYQLRVCQPPPPVPNAEILTEDDEFEIGDIIRYQCLPGFTLVGNAILTCRLGERLQMDGAPPVCQVLCPANELRLDSTGVILSPGYPDSYPNLQMCAWSISVEKGYNITMFVEFFQTEKEFDVLQVYDGPNIQSPVLISLSGDYSSAFNITSNGHEVFLQWSADHGNNKKGFRIRYIAFYCSTPESPPHGYIISQTGGQLNSVVRWACDRGFRLVGKSSAVCRKSSYGYHAWDAPVPACQAISCGIPKAPTNGGILTTDYLVGTRVTYFCNDGYRLSSKELTTAVCQSDGTWSNHNKTPRCVVVTCPSINSFILEHGRWRIVNGSHYEYKTKVVFSCDPGYHGLGPASIECLPNGTWSWRNERPYCQIISCGELPTPPNGNKIGTQTSYGSTAIFTCDLGFMLVGSAVRECLSSGLWSESETRCLAGHCGIPELIVNGQVIGENYGYRDTVVYQCNPGFRLIGSSVRICQQDHNWSGQLPSCVPVSCGHPGSPIYGRTSGNGFNFNDVVTFSCNIGYLMQGPTKAQCQANRQWSHPPPMCKVVNCSDPGIPANSKRESKIEHGNFTYGTVVFYDCNPGYFLFGSSVLICQPNGQWDKPLPECIMIDCGHPGVPPNAVLSGEKYTFGSTVHYSCTGKRSLLGQSSRTCQLNGHWSGSQPHCSGDATGTCGDPGTPGHGSRQESNFRTKSTVRYACDTGYILHGSEERTCLANGSWTGRQPECKAVQCGNPGTTANGKVFRIDGTTFSSSVIYSCMEGYILSGPSVRQCTANGTWSGTLPNCTIISCGDPGIPANGLRYGDDYVVGQNVSYMCQPGYTMELNGSRIRTCTINGTWSGVMPTCRAVTCPTPPQISNGRLEGTNFDWGFSISYICSPGYELSFPAVLTCVGNGTWSGEVPQCLPKFCGDPGIPAQGKREGKSFIYQSEVSFSCNFPFILVGSSTRICQADGTWSGSSPHCIEPTQTSCENPGVPRHGSQNNTFGFQVGSVVQFHCKKGHLLQGSTTRTCLPDLTWSGIQPECIPHSCKQPETPAHANVVGMDLPSHGYTLIYTCQPGFFLAGGTEHRVCRSDNTWTGKVPICEAGSKILVKDPRPALGTPSPKLSVPDDVFAQNYIWKGSYNFKGRKQPMTLTVTSFNASTGRVNATLSNSNMELLLSGVYKSQEARLMLRIYLIKVPAHASVKKMKEENWAMDGFVSAEPDGATYVFQGFIQGKDYGQFGLQRLGLNMSEGSNSSNQPHGTNSSSVAIAILVPFFALIFAGFGFYLYKQRTAPKTQYTGCSVHENNNGQAAFENPMYDTNAKSVEGKAVRFDPNLNTVCTMV

SEQ ID NO: 20683 - protein, 2977 aa, Homo sapiens
  Payload ID: 4182
  Gene Symbol: CSMD3
  Gene Name: CUB and Sushi multiple domains 3
  ENSP ID: ENSP00000341558
KESCGDPGTPLYGIREGDGFSNRDVLRFECQFGFELIGEKSIVCQENNQWSANIPICIFPCLSNFTAPMGTVLSPDYPEGYGNNLNCIWTIISDPGSRIHLSFNDFDLESQFDFLAVKDGDSPESPILGTFTGAEVPSHLTSNSHILRLEFQADHSMSGRGFNITYNTFGHNECPDPGIPINARRFGDNFQLGSSISVICEEGFIKTQGTETITCILMDGKVMWSGLIPKCGAPCGGHFSAPSGVILSPGWPGYYKDSLNCEWVIEAEPGHSIKITFERFQTELNYDVLEVHDGPNLLSPLLGSYNGTQVPQFLFSSSNFIYLLFTTDNSRSNNGFKIHYESVTVNTYSCLDPGIPVHGRRYGHDFSIGSTVSFSCDSGYRLSHEEPLLCEKNHWWSHPLPTCDALCGGDVRGPSGTILSPGYPEFYPNSLNCTWTVDVTHGKGVQFNFHTFHLEDHHDYLLITENGSFTQPLARLTGSDLPPTINAGLYGNFRAQLRFISDFSISYEGFNITFSEYNLEPCEDPGIPQYGSRIGFNFGIGDTLTFSCSSGYRLEGTSEIICLGGGRRVWSAPLPRCVAECGASATNNEGILLSPNYPLNYENNHECIYSIQVQAGKGINISARTFHLAQGDVLKIYDGKDKTTHLLGAFTGASMRGLTLSSTSNQLWLEFNSDTEGTDEGFQLVYTSFELSHCEDPGIPQFGYKISDQGHFAGSTIIYGCNPGYTLHGSSLLKCMTGERRAWDYPLPSCIAECGGRFKGESSGRILSPGYPFPYDNNLRCMWMIEVDPGNIVSLQFLAFDTEASHDILRVWDGPPENDMLLKEISGSLIPEGIHSTLNIVTIQFDTDFYISKSGFAIQFSSSVATACRDPGVPMNGTRNGDGREPGDTVVFQCDPGYELQGEERITCIQVENRYFWQPSPPVCIAPCGGNLTGSSGFILSPNFPHPYPHSRDCDWTITVNADYVISLAFISFSIEPNYDFLYIYDGPDSNSPLIGSFQDSKLPERIESSSNTMHLAFRSDGSVSYTGFHLEYKAKLRESCFDPGNIMNGTRLGMDYKLGSTVTYYCDAGYVLQGYSTLTCIMGDDGRPGWNRALPSCHAPCGSRSTGSEGTVLSPNYPKNYSVGHNCVYSIAVPKEFAVPRTSSTQCSSVPEPRFGRRIGNEFAVGSSVLFDCNPGYILHGSIAIRCETVPNSLAQWNDSLPTCIVPCGGILTKRKGTILSPGYPEPYDNNLNCVWKITVPEGAGIQVQVVSFATEHNWDSLDFYDGGDNNAPRLGSYSGTTIPHLLNSTSNNLYLNFQSDISVSAAGFHLEYTAIGLDSCPEPQTPSSGIKIGDRYMVGDVVSFQCDQGYSLQGHSHITCMPGPVRRWNYPIPICLAQCGGAMSDFSGVILSPGFPGNYPSSLDCTWTINLPIGFGVHLQFVNFSTETIHDYLEVRSGSSETSTVIGRLSGPQIPSSLFSTTHETSLYFHSDYSQNKQGFHIVYQAYQLQSCPDPRPFRNGFVIGNDFTVGQTISFECFPGYTLIGNSALTCLHGVSRNWNHPLPRCEALCGGNITAMNGTIYSPGYPDEYPNFQDCFWLVRVPPGNGIYINFTVLQTEPIYDFITVWDGPDQNSPQIGQFSGNTALESVYSTSNQILIKFHSDFTTSGFFVLSYHAYQLRVCQPPPPVPNAEILTEDDEFEIGDIIRYQCLPGFTLVGNAILTCRLGERLQMDGAPPVCQVLCPANELRLDSTGVILSPGYPDSYPNLQMCAWSISVEKGYNITMFVEFFQTEKEFDVLQVYDGPNIQSPVLISLSGDYSSAFNITSNGHEVFLQWSADHGNNKKGFRIRYIAFYCSTPESPPHGYIISQTGGQLNSVVRWACDRGFRLVGKSSAVCRKSSYGYHAWDAPVPACQAISCGIPKAPTNGGILTTDYLVGTRVTYFCNDGYRLSSKELTTAVCQSDGTWSNHNKTPRCVVVTCPSINSFILEHGRWRIVNGSHYEYKTKVVFSCDPGYHGLGPASIECLPNGTWSWRNERPYCQIISCGELPTPPNGNKIGTQTSYGSTAIFTCDLGFMLVGSAVRECLSSGLWSESETRCLAGHCGIPELIVNGQVIGENYGYRDTVVYQCNPGFRLIGSSVRICQQDHNWSGQLPSCVPVSCGHPGSPIYGRTSGNGFNFNDVVTFSCNIGYLMQGPTKAQCQANRQWSHPPPMCKVVNCSDPGIPANSKRESKIEHGNFTYGTVVFYDCNPGYFLFGSSVLICQPNGQWDKPLPECIMIDCGHPGVPPNAVLSGEKYTFGSTVHYSCTGKRSLLGQSSRTCQLNGHWSGSQPHCSGDATGTCGDPGTPGHGSRQESNFRTKSTVRYACDTGYILHGSEERTCLANGSWTGRQPECKAVQCGNPGTTANGKVFRIDGTTFSSSVIYSCMEGYILSGPSVRQCTANGTWSGTLPNCTIISCGDPGIPANGLRYGDDYVVGQNVSYMCQPGYTMELNGSRIRTCTINGTWSGVMPTCRAVTCPTPPQISNGRLEGTNFDWGFSISYICSPGYELSFPAVLTCVGNGTWSGEVPQCLPKFCGDPGIPAQGKREGKSFIYQSEVSFSCNFPFILVGSSTRICQADGTWSGSSPHCIEPTQTSCENPGVPRHGSQNNTFGFQVGSVVQFHCKKGHLLQGSTTRTCLPDLTWSGIQPECIPHSCKQPETPAHANVVGMDLPSHGYTLIYTCQPGFFLAGGTEHRVCRSDNTWTGKVPICEAGSKILVKDPRPALGTPSPKLSVPDDVFAQNYIWKGSYNFKGRKQPMTLTVTSFNASTGRVNATLSNSNMELLLSGVYKSQEARLMLRIYLIKVPAHASVKKMKEENWAMDGFVSAEPDGATYVFQGFIQGKDYGQFGLQRLGLNMSEGSNSSNQPHGTNSSSVAIAILVPFFALIFAGFGFYLYKQRTAPKTQYTGCSVHENNNGQAAFENPMYDTNAKSVEGKAVRFDPNLNTVCTMV

SEQ ID NO: 20684 - protein, 3667 aa, Homo sapiens
  Payload ID: 4182
  Gene Symbol: CSMD3
  Gene Name: CUB and Sushi multiple domains 3
  Uniprot ID: Q7Z407
  ENSP ID: ENSP00000345799
MWSWFLCWKPVQLDRQTASGFIYTCGGTLKGLNGTIESPGFPYGYPNGANCTWVIIAEERNRIQIVFQSFALEEEYDYLSLYDGHPHPTNFRTRLTGFHLPPPVTSTKSVFSLRLTSDFAVSAHGFKVYYEELQSSSCGNPGVPPKGVLYGTRFDVGDKIRYSCVTGYILDGHPQLTCIANSVNTASWDFPVPICRAEDACGGTMRGSSGIISSPSFPNEYHNNADCTWTIVAEPGDTISLIFTDFQMEEKYDYLEIEGSEPPTIWLSGMNIPPPIISNKNWLRLHFVTDSNHRYRGFSAPYQGSSTLTHTTSTGELEEHNRTTTGAIAVASTPADVTVSSVTAVTIHRLSEEQRVQVTSLRNSGLDPNTSKDGLSPHPADTQSTRRRPRHAEQIERTKELAVVTHRVKKAIDFKSRGFKLFPGKDNSNKFSILNEGGIKTASNLCPDPGEPENGKRIGSDFSLGSTVQFSCDEDYVLQGAKSITCQRIAEVFAAWSDHRPVCKVKTCGSNLQGPSGTFTSPNFPFQYDSNAQCVWVITAVNTNKVIQINFEEFDLEIGYDTLTIGDGGEVGDPRTVLQVLTGSFVPDLIVSMSSQMWLHLQTDESVGSVGFKVNYKEIEKESCGDPGTPLYGIREGDGFSNRDVLRFECQFGFELIGEKSIVCQENNQWSANIPICIFPCLSNFTAPMGTVLSPDYPEGYGNNLNCIWTIISDPGSRIHLSFNDFDLESQFDFLAVKDGDSPESPILGTFTGAEVPSHLTSNSHILRLEFQADHSMSGRGFNITYNTFGHNECPDPGIPINARRFGDNFQLGSSISVICEEGFIKTQGTETITCILMDGKVMWSGLIPKCGAPCGGHFSAPSGVILSPGWPGYYKDSLNCEWVIEAEPGHSIKITFERFQTELNYDVLEVHDGPNLLSPLLGSYNGTQVPQFLFSSSNFIYLLFTTDNSRSNNGFKIHYESVTVNTYSCLDPGIPVHGRRYGHDFSIGSTVSFSCDSGYRLSHEEPLLCEKNHWWSHPLPTCDALCGGDVRGPSGTILSPGYPEFYPNSLNCTWTVDVTHGKGVQFNFHTFHLEDHHDYLLITENGSFTQPLARLTGSDLPPTINAGLYGNFRAQLRFISDFSISYEGFNITFSEYNLEPCEDPGIPQYGSRIGFNFGIGDTLTFSCSSGYRLEGTSEIICLGGGRRVWSAPLPRCVAECGASATNNEGILLSPNYPLNYENNHECIYSIQVQAGKGINISARTFHLAQGDVLKIYDGKDKTTHLLGAFTGASMRGLTLSSTSNQLWLEFNSDTEGTDEGFQLVYTSFELSHCEDPGIPQFGYKISDQGHFAGSTIIYGCNPGYTLHGSSLLKCMTGERRAWDYPLPSCIAECGGRFKGESSGRILSPGYPFPYDNNLRCMWMIEVDPGNIVSLQFLAFDTEASHDILRVWDGPPENDMLLKEISGSLIPEGIHSTLNIVTIQFDTDFYISKSGFAIQFSSSVATACRDPGVPMNGTRNGDGREPGDTVVFQCDPGYELQGEERITCIQVENRYFWQPSPPVCIAPCGGNLTGSSGFILSPNFPHPYPHSRDCDWTITVNADYVISLAFISFSIEPNYDFLYIYDGPDSNSPLIGSFQDSKLPERIESSSNTMHLAFRSDGSVSYTGFHLEYKAKLRESCFDPGNIMNGTRLGMDYKLGSTVTYYCDAGYVLQGYSTLTCIMGDDGRPGWNRALPSCHAPCGSRSTGSEGTVLSPNYPKNYSVGHNCVYSIAVPKEFVVFGQFVFFQTSLHDVVEVYDGPTQQSSLLSSLSGSHSGESLPLSSGNQITIRFTSVGPITAKGFHFVYQAVPRTSSTQCSSVPEPRFGRRIGNEFAVGSSVLFDCNPGYILHGSIAIRCETVPNSLAQWNDSLPTCIVPCGGILTKRKGTILSPGYPEPYDNNLNCVWKITVPEGAGIQVQVVSFATEHNWDSLDFYDGGDNNAPRLGSYSGTTIPHLLNSTSNNLYLNFQSDISVSAAGFHLEYTAIGLDSCPEPQTPSSGIKIGDRYMVGDVVSFQCDQGYSLQGHSHITCMPGPVRRWNYPIPICLAQCGGAMSDFSGVILSPGFPGNYPSSLDCTWTINLPIGFGVHLQFVNFSTETIHDYLEVRSGSSETSTVIGRLSGPQIPSSLFSTTHETSLYFHSDYSQNKQGFHIVYQAYQLQSCPDPRPFRNGFVIGNDFTVGQTISFECFPGYTLIGNSALTCLHGVSRNWNHPLPRCEALCGGNITAMNGTIYSPGYPDEYPNFQDCFWLVRVPPGNGIYINFTVLQTEPIYDFITVWDGPDQNSPQIGQFSGNTALESVYSTSNQILIKFHSDFTTSGFFVLSYHAYQLRVCQPPPPVPNAEILTEDDEFEIGDIIRYQCLPGFTLVGNAILTCRLGERLQMDGAPPVCQVLCPANELRLDSTGVILSPGYPDSYPNLQMCAWSISVEKGYNITMFVEFFQTEKEFDVLQVYDGPNIQSPVLISLSGDYSSAFNITSNGHEVFLQWSADHGNNKKGFRIRYIAFYCSTPESPPHGYIISQTGGQLNSVVRWACDRGFRLVGKSSAVCRKSSYGYHAWDAPVPACQAISCGIPKAPTNGGILTTDYLVGTRVTYFCNDGYRLSSKELTTAVCQSDGTWSNHNKTPRCVVVTCPSINSFILEHGRWRIVNGSHYEYKTKVVFSCDPGYHGLGPASIECLPNGTWSWRNERPYCQIISCGELPTPPNGNKIGTQTSYGSTAIFTCDLGFMLVGSAVRECLSSGLWSESETRCLAGHCGIPELIVNGQVIGENYGYRDTVVYQCNPGFRLIGSSVRICQQDHNWSGQLPSCVPVSCGHPGSPIYGRTSGNGFNFNDVVTFSCNIGYLMQGPTKAQCQANRQWSHPPPMCKVVNCSDPGIPANSKRESKIEHGNFTYGTVVFYDCNPGYFLFGSSVLICQPNGQWDKPLPECIMIDCGHPGVPPNAVLSGEKYTFGSTVHYSCTGKRSLLGQSSRTCQLNGHWSGSQPHCSGDATGTCGDPGTPGHGSRQESNFRTKSTVRYACDTGYILHGSEERTCLANGSWTGRQPECKAVQCGNPGTTANGKVFRIDGTTFSSSVIYSCMEGYILSGPSVRQCTANGTWSGTLPNCTIISCGDPGIPANGLRYGDDYVVGQNVSYMCQPGYTMELNGSRIRTCTINGTWSGVMPTCRAVTCPTPPQISNGRLEGTNFDWGFSISYICSPGYELSFPAVLTCVGNGTWSGEVPQCLPKFCGDPGIPAQGKREGKSFIYQSEVSFSCNFPFILVGSSTRICQADGTWSGSSPHCIEPTQTSCENPGVPRHGSQNNTFGFQVGSVVQFHCKKGHLLQGSTTRTCLPDLTWSGIQPECIPHSCKQPETPAHANVVGMDLPSHGYTLIYTCQPGFFLAGGTEHRVCRSDNTWTGKVPICEAGSKILVKDPRPALGTPSPKLSVPDDVFAQNYIWKGSYNFKGRKQPMTLTVTSFNASTGRVNATLSNSNMELLLSGVYKSQEARLMLRIYLIKVPAHASVKKMKEENWAMDGFVSAEPDGATYVFQGFIQGKDYGQFGLQRLGLNMSEGSNSSNQPHGTNSSSVAIAILVPFFALIFAGFGFYLYKQRTAPKTQYTGCSVHENNNGQAAFENPMYDTNAKSVEGKAVRFDPNLNTVCTMV

SEQ ID NO: 20685 - protein, 3538 aa, Homo sapiens
  Payload ID: 4182
  Gene Symbol: CSMD3
  Gene Name: CUB and Sushi multiple domains 3
  Uniprot ID: Q7Z407
  ENSP ID: ENSP00000412263
MKGIRKGESRAKESKPWEPGKRRCAKCGRLDFILMKKMGIKSGFTFWNLVFLLTVSCVKGFIYTCGGTLKGLNGTIESPGFPYGYPNGANCTWVIIAEERNRIQIVFQSFALEEEYDYLSLYDGHPHPTNFRTRLTGFHLPPPVTSTKSVFSLRLTSDFAVSAHGFKVYYEELQSSSCGNPGVPPKGVLYGTRFDVGDKIRYSCVTGYILDGHPQLTCIANSVNTASWDFPVPICRAEDACGGTMRGSSGIISSPSFPNEYHNNADCTWTIVAEPGDTISLIFTDFQMEEKYDYLEIEGSEPPTIWLSGMNIPPPIISNKNWLRLHFVTDSNHRYRGFSAPYQVKKAIDFKSRGFKLFPGKDNSNKFSILNEGGIKTASNLCPDPGEPENGKRIGSDFSLGSTVQFSCDEDYVLQGAKSITCQRIAEVFAAWSDHRPVCKVKTCGSNLQGPSGTFTSPNFPFQYDSNAQCVWVITAVNTNKVIQINFEEFDLEIGYDTLTIGDGGEVGDPRTVLQVLTGSFVPDLIVSMSSQMWLHLQTDESVGSVGFKVNYKEIEKESCGDPGTPLYGIREGDGFSNRDVLRFECQFGFELIGEKSIVCQENNQWSANIPICIFPCLSNFTAPMGTVLSPDYPEGYGNNLNCIWTIISDPGSRIHLSFNDFDLESQFDFLAVKDGDSPESPILGTFTGAEVPSHLTSNSHILRLEFQADHSMSGRGFNITYNTFGHNECPDPGIPINARRFGDNFQLGSSISVICEEGFIKTQGTETITCILMDGKVMWSGLIPKCGAPCGGHFSAPSGVILSPGWPGYYKDSLNCEWVIEAEPGHSIKITFERFQTELNYDVLEVHDGPNLLSPLLGSYNGTQVPQFLFSSSNFIYLLFTTDNSRSNNGFKIHYESVTVNTYSCLDPGIPVHGRRYGHDFSIGSTVSFSCDSGYRLSHEEPLLCEKNHWWSHPLPTCDALCGGDVRGPSGTILSPGYPEFYPNSLNCTWTVDVTHGKGVQFNFHTFHLEDHHDYLLITENGSFTQPLARLTGSDLPPTINAGLYGNFRAQLRFISDFSISYEGFNITFSEYNLEPCEDPGIPQYGSRIGFNFGIGDTLTFSCSSGYRLEGTSEIICLGGGRRVWSAPLPRCVAECGASATNNEGILLSPNYPLNYENNHECIYSIQVQAGKGINISARTFHLAQGDVLKIYDGKDKTTHLLGAFTGASMRGLTLSSTSNQLWLEFNSDTEGTDEGFQLVYTSFELSHCEDPGIPQFGYKISDQGHFAGSTIIYGCNPGYTLHGSSLLKCMTGERRAWDYPLPSCIAECGGRFKGESSGRILSPGYPFPYDNNLRCMWMIEVDPGNIVSLQFLAFDTEASHDILRVWDGPPENDMLLKEISGSLIPEGIHSTLNIVTIQFDTDFYISKSGFAIQFSSSVATACRDPGVPMNGTRNGDGREPGDTVVFQCDPGYELQGEERITCIQVENRYFWQPSPPVCIAPCGGNLTGSSGFILSPNFPHPYPHSRDCDWTITVNADYVISLAFISFSIEPNYDFLYIYDGPDSNSPLIGSFQDSKLPERIESSSNTMHLAFRSDGSVSYTGFHLEYKAKLRESCFDPGNIMNGTRLGMDYKLGSTVTYYCDAGYVLQGYSTLTCIMGDDGRPGWNRALPSCHAPCGSRSTGSEGTVLSPNYPKNYSVGHNCVYSIAVPKEFVVFGQFVFFQTSLHDVVEVYDGPTQQSSLLSSLSGSHSGESLPLSSGNQITIRFTSVGPITAKGFHFVYQAVPRTSSTQCSSVPEPRFGRRIGNEFAVGSSVLFDCNPGYILHGSIAIRCETVPNSLAQWNDSLPTCIVPCGGILTKRKGTILSPGYPEPYDNNLNCVWKITVPEGAGIQVQVVSFATEHNWDSLDFYDGGDNNAPRLGSYSGTTIPHLLNSTSNNLYLNFQSDISVSAAGFHLEYTAIGLDSCPEPQTPSSGIKIGDRYMVGDVVSFQCDQGYSLQGHSHITCMPGPVRRWNYPIPICLAQCGGAMSDFSGVILSPGFPGNYPSSLDCTWTINLPIGFGVHLQFVNFSTETIHDYLEVRSGSSETSTVIGRLSGPQIPSSLFSTTHETSLYFHSDYSQNKQGFHIVYQAYQLQSCPDPRPFRNGFVIGNDFTVGQTISFECFPGYTLIGNSALTCLHGVSRNWNHPLPRCEALCGGNITAMNGTIYSPGYPDEYPNFQDCFWLVRVPPGNGIYINFTVLQTEPIYDFITVWDGPDQNSPQIGQFSGNTALESVYSTSNQILIKFHSDFTTSGFFVLSYHAYQLRVCQPPPPVPNAEILTEDDEFEIGDIIRYQCLPGFTLVGNAILTCRLGERLQMDGAPPVCQVLCPANELRLDSTGVILSPGYPDSYPNLQMCAWSISVEKGYNITMFVEFFQTEKEFDVLQVYDGPNIQSPVLISLSGDYSSAFNITSNGHEVFLQWSADHGNNKKGFRIRYIAFYCSTPESPPHGYIISQTGGQLNSVVRWACDRGFRLVGKSSAVCRKSSYGYHAWDAPVPACQAISCGIPKAPTNGGILTTDYLVGTRVTYFCNDGYRLSSKELTTAVCQSDGTWSNHNKTPRCVVISCGELPTPPNGNKIGTQTSYGSTAIFTCDLGFMLVGSAVRECLSSGLWSESETRCLAGHCGIPELIVNGQVIGENYGYRDTVVYQCNPGFRLIGSSVRICQQDHNWSGQLPSCVPVSCGHPGSPIYGRTSGNGFNFNDVVTFSCNIGYLMQGPTKAQCQANRQWSHPPPMCKVVNCSDPGIPANSKRESKIEHGNFTYGTVVFYDCNPGYFLFGSSVLICQPNGQWDKPLPECIMIDCGHPGVPPNAVLSGEKYTFGSTVHYSCTGKRSLLGQSSRTCQLNGHWSGSQPHCSGDATGTCGDPGTPGHGSRQESNFRTKSTVRYACDTGYILHGSEERTCLANGSWTGRQPECKAVQCGNPGTTANGKVFRIDGTTFSSSVIYSCMEGYILSGPSVRQCTANGTWSGTLPNCTIISCGDPGIPANGLRYGDDYVVGQNVSYMCQPGYTMELNGSRIRTCTINGTWSGVMPTCRAVTCPTPPQISNGRLEGTNFDWGFSISYICSPGYELSFPAVLTCVGNGTWSGEVPQCLPKFCGDPGIPAQGKREGKSFIYQSEVSFSCNFPFILVGSSTRICQADGTWSGSSPHCIEPTQTSCENPGVPRHGSQNNTFGFQVGSVVQFHCKKGHLLQGSTTRTCLPDLTWSGIQPECIPHSCKQPETPAHANVVGMDLPSHGYTLIYTCQPGFFLAGGTEHRVCRSDNTWTGKVPICEAGSKILVKDPRPALGTPSPKLSVPDDVFAQNYIWKGSYNFKGRKQPMTLTVTSFNASTGRVNATLSNSNMELLLSGVYKSQEARLMLRIYLIKVPAHASVKKMKEENWAMDGFVSAEPDGATYVFQGFIQGKDYGQFGLQRLGLNMSEGSNSSNQPHGTNSSSVAIAILVPFFALIFAGFGFYLYKQRTAPKTQYTGCSVHENNNGQAAFENPMYDTNAKSVEGKAVRFDPNLNTVCTMV

SEQ ID NO: 20686 - protein, 47 aa, Homo sapiens
  Payload ID: 4183
  Gene Symbol: CUZD1
  Gene Name: CUB and zona pellucida-like domains 1
  ENSP ID: ENSP00000340905
MELVRRLMPLTLLILSCLAELTMAEAEGRRSVNYLHQYNHLFCILNF

SEQ ID NO: 20687 - protein, 52 aa, Homo sapiens
  Payload ID: 4183
  Gene Symbol: CUZD1
  Gene Name: CUB and zona pellucida-like domains 1
  ENSP ID: ENSP00000357896
MELVRRLMPLTLLILSCLAELTMAEAEGLIQMEAVKVKTLKSLTEPPAMGLC

SEQ ID NO: 20688 - protein, 52 aa, Homo sapiens; identical to SEQ ID NO: 20687
  Payload ID: 4183
  Gene Symbol: CUZD1
  Gene Name: CUB and zona pellucida-like domains 1
  ENSP ID: ENSP00000357897

SEQ ID NO: 20689 - protein, 607 aa, Homo sapiens
  Payload ID: 4183
  Gene Symbol: CUZD1
  Gene Name: CUB and zona pellucida-like domains 1
  Uniprot ID: Q86UP6
  ENSP ID: ENSP00000357900
MELVRRLMPLTLLILSCLAELTMAEAEGNASCTVSLGGANMAETHKAMILQLNPSENCTWTIERPENKSIRIIFSYVQLDPDGSCESENIKVFDGTSSNGPLLGQVCSKNDYVPVFESSSSTLTFQIVTDSARIQRTVFVFYYFFSPNISIPNCGGYLDTLEGSFTSPNYPKPHPELAYCVWHIQVEKDYKIKLNFKEIFLEIDKQCKFDFLAIYDGPSTNSGLIGQVCGRVTPTFESSSNSLTVVLSTDYANSYRGFSASYTSIYAENINTTSLTCSSDRMRVIISKSYLEAFNSNGNNLQLKDPTCRPKLSNVVEFSVPLNGCGTIRKVEDQSITYTNIITFSASSTSEVITRQKQLQIIVKCEMGHNSTVEIIYITEDDVIQSQNALGKYNTSMALFESNSFEKTILESPYYVDLNQTLFVQVSLHTSDPNLVVFLDTCRASPTSDFASPTYDLIKSGCSRDETCKVYPLFGHYGRFQFNAFKFLRSMSSVYLQCKVLICDSSDHQSRCNQGCVSRSKRDISSYKWKTDSIIGPIRLKRDRSASGNSGFQHETHAEETPNQPFNSVHLFSFMVLALNVVTVATITVRHFVNQRADYKYQKLQNY

SEQ ID NO: 20690 - protein, 607 aa, Homo sapiens; identical to SEQ ID NO: 20689
  Payload ID: 4183
  Gene Symbol: CUZD1
  Gene Name: CUB and zona pellucida-like domains 1
  Uniprot ID: Q86UP6
  ENSP ID: ENSP00000376540

SEQ ID NO: 20691 - protein, 356 aa, Homo sapiens
  Payload ID: 4183
  Gene Symbol: CUZD1
  Gene Name: CUB and zona pellucida-like domains 1
  ENSP ID: ENSP00000441590
MPILTGDFASYTSIYAENINTTSLTCSSDRMRVIISKSYLEAFNSNGNNLQLKDPTCRPKLSNVVEFSVPLNGCGTIRKVEDQSITYTNIITFSASSTSEVITRQKQLQIIVKCEMGHNSTVEIIYITEDDVIQSQNALGKYNTSMALFESNSFEKTILESPYYVDLNQTLFVQVSLHTSDPNLVVFLDTCRASPTSDFASPTYDLIKSGCSRDETCKVYPLFGHYGRFQFNAFKFLRSMSSVYLQCKVLICDSSDHQSRCNQGCVSRSKRDISSYKWKTDSIIGPIRLKRDRSASGNSGFQHETHAEETPNQPFNSVHLFSFMVLALNVVTVATITVRHFVNQRADYKYQKLQNY

SEQ ID NO: 20692 - protein, 836 aa, Homo sapiens
  Payload ID: 4184
  Gene Symbol: CDCP1
  Gene Name: CUB domain containing protein 1
  Uniprot ID: Q9H5V8
  ENSP ID: ENSP00000296129
MAGLNCGVSIALLGVLLLGAARLPRGAEAFEIALPRESNITVLIKLGTPTLLAKPCYIVISKRHITMLSIKSGERIVFTFSCQSPENHFVIEIQKNIDCMSGPCPFGEVQLQPSTSLLPTLNRTFIWDVKAHKSIGLELQFSIPRLRQIGPGESCPDGVTHSISGRIDATVVRIGTFCSNGTVSRIKMQEGVKMALHLPWFHPRNVSGFSIANRSSIKRLCIIESVFEGEGSATLMSANYPEGFPEDELMTWQFVVPAHLRASVSFLNFNLSNCERKEERVEYYIPGSTTNPEVFKLEDKQPGNMAGNFNLSLQGCDQDAQSPGILRLQFQVLVQHPQNESNKIYVVDLSNERAMSLTIEPRPVKQSRKFVPGCFVCLESRTCSSNLTLTSGSKHKISFLCDDLTRLWMNVEKTISCTDHRYCQRKSYSLQVPSDILHLPVELHDFSWKLLVPKDRLSLVLVPAQKLQQHTHEKPCNTSFSYLVASAIPSQDLYFGSFCPGGSIKQIQVKQNISVTLRTFAPSFQQEASRQGLTVSFIPYFKEEGVFTVTPDTKSKVYLRTPNWDRGLPSLTSVSWNISVPRDQVACLTFFKERSGVVCQTGRAFMIIQEQRTRAEEIFSLDEDVLPKPSFHHHSFWVNISNCSPTSGKQLDLLFSVTLTPRTVDLTVILIAAVGGGVLLLSALGLIICCVKKKKKKTNKGPAVGIYNDNINTEMPRQPKKFQKGRKDNDSHVYAVIEDTMVYGHLLQDSSGSFLQPEVDTYRPFQGTMGVCPPSPPTICSRAPTAKLATEEPPPRSPPESESEPYTFSHPNNGDVSSKDTDIPLLNTQEPMEPAE

SEQ ID NO: 20693 - protein, 343 aa, Homo sapiens
  Payload ID: 4184
  Gene Symbol: CDCP1
  Gene Name: CUB domain containing protein 1
  Uniprot ID: Q9H5V8
  ENSP ID: ENSP00000399342
MAGLNCGVSIALLGVLLLGAARLPRGAEAFEIALPRESNITVLIKLGTPTLLAKPCYIVISKRHITMLSIKSGERIVFTFSCQSPENHFVIEIQKNIDCMSGPCPFGEVQLQPSTSLLPTLNRTFIWDVKAHKSIGLELQFSIPRLRQIGPGESCPDGVTHSISGRIDATVVRIGTFCSNGTVSRIKMQEGVKMALHLPWFHPRNVSGFSIANRSSIKRLCIIESVFEGEGSATLMSANYPEGFPEDELMTWQFVVPAHLRASVSFLNFNLSNCERKEERVEYYIPGSTTNPEVFKLEDKQPGNMAGNFNLSLQGCDQDAQSPGILRLQFQVLVQHPQNESSE

SEQ ID NO: 20694 - protein, 449 aa, Homo sapiens
  Payload ID: 4185
  Gene Symbol: CDCP2
  Gene Name: CUB domain containing protein 2
  Uniprot ID: Q5VXM1
  ENSP ID: ENSP00000360381
MLAEWGACLLLAVALLGPGLQAQAMEGVKCGGVLSAPSGNFSSPNFPRLYPYNTECSWLIVVAEGSSVLLTFHAFDLEYHDTCSFDFLEIYNGASPDKGNLLGRFCGKVPPPPFTSSWHVMSVIFHSDKHVASHGFSAGYQKDVCGGVLTGLSGVLTSPEYPNNYPNSMECHWVIRAAGPAHVKLVFVDFQVEGNEECTYDYVAVLGGPGPTRGHHYCGSTRPPTLVSLGHELQVVFKSDFNIGGRGFKAYYFSGECQEVYMAMRGNFSSPQYPSSYPNNIRCHWTIRLPPGYQVKVFFLDLDLEEPNSLTKTCDFDHLAAFDGASEEAPLLGNWCGHHLPPPVTSSHNQLLLLLHTDRSTTRRGFSVAYIGGQLGCGSGSTEGEGEALQPQSLQSPSSIPPVCPAPPMNGLLQLLLHWLHPCPLSGPLRLDGTAPACFHYCRASFPSF

SEQ ID NO: 20695 - protein, 170 aa, Homo sapiens
  Payload ID: 4186
  Gene Symbol: CUBN
  Gene Name: cubilin (intrinsic factor-cobalamin receptor)
  ENSP ID: ENSP00000367054
MMNMSLPFLWSLLTLLIFAEVNGEAGELELQRQKRSINLQQPRMATERGNLVFLTGSAQNIEFRTGSLGKIKLNDEDLSECLHQIQKNKEDIIELKGSAIGLPQNISSQIYQLNSKLVDLERKFQGLQQTVDKKVCSSNPCQNGGTCLNLHDSFFCICPPQWKVSHLLFG

SEQ ID NO: 20696 - protein, 3623 aa, Homo sapiens
  Payload ID: 4186
  Gene Symbol: CUBN
  Gene Name: cubilin (intrinsic factor-cobalamin receptor)
  Uniprot ID: O60494
  ENSP ID: ENSP00000367064
MMNMSLPFLWSLLTLLIFAEVNGEAGELELQRQKRSINLQQPRMATERGNLVFLTGSAQNIEFRTGSLGKIKLNDEDLSECLHQIQKNKEDIIELKGSAIGLPQNISSQIYQLNSKLVDLERKFQGLQQTVDKKVCSSNPCQNGGTCLNLHDSFFCICPPQWKGPLCSADVNECEIYSGTPLSCQNGGTCVNTMGSYSCHCPPETYGPQCASKYDDCEGGSVARCVHGICEDLMREQAGEPKYSCVCDAGWMFSPNSPACTLDRDECSFQPGPCSTLVQCFNTQGSFYCGACPTGWQGNGYICEDINECEINNGGCSVAPPVECVNTPGSSHCQACPPGYQGDGRVCTLTDICSVSNGGCHPDASCSSTLGSLPLCTCLPGYTGNGYGPNGCVQLSNICLSHPCLNGQCIDTVSGYFCKCDSGWTGVNCTENINECLSNPCLNGGTCVDGVDSFSCECTRLWTGALCQVPQQVCGESLSGINGSFSYRSPDVGYVHDVNCFWVIKTEMGKVLRITFTFFRLESMDNCPHEFLQVYDGDSSSAFQLGRFCGSSLPHELLSSDNALYFHLYSEHLRNGRGFTVRWETQQPECGGILTGPYGSIKSPGYPGNYPPGRDCVWIVVTSPDLLVTFTFGTLSLEHHDDCNKDYLEIRDGPLYQDPLLGKFCTTFSVPPLQTTGPFARIHFHSDSQISDQGFHITYLTSPSDLRCGGNYTDPEGELFLPELSGPFTHTRQCVYMMKQPQGEQIQINFTHVELQCQSDSSQNYIEVRDGETLLGKVCGNGTISHIKSITNSVWIRFKIDASVEKASFRAVYQVACGDELTGEGVIRSPFFPNVYPGERTCRWTIHQPQSQVILLNFTVFEIGSSAHCETDYVEIGSSSILGSPENKKYCGTDIPSFITSVYNFLYVTFVKSSSTENHGFMAKFSAEDLACGEILTESTGTIQSPGHPNVYPHGINCTWHILVQPNHLIHLMFETFHLEFHYNCTNDYLEVYDTDSETSLGRYCGKSIPPSLTSSGNSLMLVFVTDSDLAYEGFLINYEAISAATACLQDYTDDLGTFTSPNFPNNYPNNWECIYRITVRTGQLIAVHFTNFSLEEAIGNYYTDFLEIRDGGYEKSPLLGIFYGSNLPPTIISHSNKLWLKFKSDQIDTRSGFSAYWDGSSTGCGGNLTTSSGTFISPNYPMPYYHSSECYWWLKSSHGSAFELEFKDFHLEHHPNCTLDYLAVYDGPSSNSHLLTQLCGDEKPPLIRSSGDSMFIKLRTDEGQQGRGFKAEYRQTCENVVIVNQTYGILESIGYPNPYSENQHCNWTIRATTGNTVNYTFLAFDLEHHINCSTDYLELYDGPRQMGRYCGVDLPPPGSTTSSKLQVLLLTDGVGRREKGFQMQWFVYGCGGELSGATGSFSSPGFPNRYPPNKECIWYIRTDPGSSIQLTIHDFDVEYHSRCNFDVLEIYGGPDFHSPRIAQLCTQRSPENPMQVSSTGNELAIRFKTDLSINGRGFNASWQAVTGGCGGIFQAPSGEIHSPNYPSPYRSNTDCSWVIRVDRNHRVLLNFTDFDLEPQDSCIMAYDGLSSTMSRLARTCGREQLANPIVSSGNSLFLRFQSGPSRQNRGFRAQFRQACGGHILTSSFDTVSSPRFPANYPNNQNCSWIIQAQPPLNHITLSFTHFELERSTTCARDFVEILDGGHEDAPLRGRYCGTDMPHPITSFSSALTLRFVSDSSISAGGFHTTVTASVSACGGTFYMAEGIFNSPGYPDIYPPNVECVWNIVSSPGNRLQLSFISFQLEDSQDCSRDFVEIREGNATGHLVGRYCGNSFPLNYSSIVGHTLWVRFISDGSGSGTGFQATFMKIFGNDNIVGTHGKVASPFWPENYPHNSNYQWTVNVNASHVVHGRILEMDIEEIQNCYYDKLRIYDGPSIHARLIGAYCGTQTESFSSTGNSLTFHFYSDSSISGKGFLLEWFAVDAPDGVLPTIAPGACGGFLRTGDAPVFLFSPGWPDSYSNRVDCTWLIQAPDSTVELNILSLDIESHRTCAYDSLVIRDGDNNLAQQLAVLCGREIPGPIRSTGEYMFIRFTSDSSVTRAGFNASFHKSCGGYLHADRGIITSPKYPETYPSNLNCSWHVLVQSGLTIAVHFEQPFQIPNGDSSCNQGDYLVLRNGPDICSPPLGPPGGNGHFCGSHASSTLFTSDNQMFVQFISDHSNEGQGFKIKYEAKSLACGGNVYIHDADSAGYVTSPNHPHNYPPHADCIWILAAPPETRIQLQFEDRFDIEVTPNCTSNYLELRDGVDSDAPILSKFCGTSLPSSQWSSGEVMYLRFRSDNSPTHVGFKAKYSIAQCGGRVPGQSGVVESIGHPTLPYRDNLFCEWHLQGLSGHYLTISFEDFNLQNSSGCEKDFVEIWDNHTSGNILGRYCGNTIPDSIDTSSNTAVVRFVTDGSVTASGFRLRFESSMEECGGDLQGSIGTFTSPNYPNPNPHGRICEWRITAPEGRRITLMFNNLRLATHPSCNNEHVIVFNGIRSNSPQLEKLCSSVNVSNEIKSSGNTMKVIFFTDGSRPYGGFTASYTSSEDAVCGGSLPNTPEGNFTSPGYDGVRNYSRNLNCEWTLSNPNQGNSSISIHFEDFYLESHQDCQFDVLEFRVGDADGPLMWRLCGPSKPTLPLVIPYSQVWIHFVTNERVEHIGFHAKYSFTDCGGIQIGDSGVITSPNYPNAYDSLTHCSSLLEAPQGHTITLTFSDFDIEPHTTCAWDSVTVRNGGSPESPIIGQYCGNSNPRTIQSGSNQLVVTFNSDHSLQGGGFYATWNTQTLGCGGIFHSDNGTIRSPHWPQNFPENSRCSWTAITHKSKHLEISFDNNFLIPSGDGQCQNSFVKVWAGTEEVDKALLATGCGNVAPGPVITPSNTFTAVFQSQEAPAQGFSASFVSRCGSNFTGPSGYIISPNYPKQYDNNMNCTYVIEANPLSVVLLTFVSFHLEARSAVTGSCVNDGVHIIRGYSVMSTPFATVCGDEMPAPLTIAGPVLLNFYSNEQITDFGFKFSYRIISCGGVFNFSSGIITSPAYSYADYPNDMHCLYTITVSDDKVIELKFSDFDVVPSTSCSHDYLAIYDGANTSDPLLGKFCGSKRPPNVKSSNNSMLLVFKTDSFQTAKGWKMSFRQTLGPQQGCGGYLTGSNNTFASPDSDSNGMYDKNLNCVWIIIAPVNKVIHLTFNTFALEAASTRQRCLYDYVKLYDGDSENANLAGTFCGSTVPAPFISSGNFLTVQFISDLTLEREGFNATYTIMDMPCGGTYNATWTPQNISSPNSSDPDVPFSICTWVIDSPPHQQVKITVWALQLTSQDCTQNYLQLQDSPQGHGNSRFQFCGRNASAVPVFYSSMSTAMVIFKSGVVNRNSRMSFTYQIADCNRDYHKAFGNLRSPGWPDNYDNDKDCTVTLTAPQNHTISLFFHSLGIENSVECRNDFLEVRNGSNSNSPLLGKYCGTLLPNPVFSQNNELYLRFKSDSVTSDRGYEIIWTSSPSGCGGTLYGDRGSFTSPGYPGTYPNNTYCEWVLVAPAGRLVTINFYFISIDDPGDCVQNYLTLYDGPNASSPSSGPYCGGDTSIAPFVASSNQVFIKFHADYARRPSAFRLTWDS

SEQ ID NO: 20697 - protein, 88 aa, Homo sapiens
  Payload ID: 4186
  Gene Symbol: CUBN
  Gene Name: cubilin (intrinsic factor-cobalamin receptor)
  ENSP ID: ENSP00000391830
STGNELAIRFKTDLSINGRGFNASWQAVTGGCGGIFQAPSGEIHSPNYPSPYRSNTDCSWVIRVDRNHRVLLNFTDFDLEPQDSCIMV

SEQ ID NO: 20698 - protein, 105 aa, Homo sapiens
  Payload ID: 4186
  Gene Symbol: CUBN
  Gene Name: cubilin (intrinsic factor-cobalamin receptor)
  ENSP ID: ENSP00000415970
NSKLVDLERKFQGLQQTVDKKVCSSNPCQNGGTCLNLHDSFFCICPPQWKGPLCSADVNECEIYSGTPLSCQNGGTCVNTMGSYRNPCSNIPKEPEEGSRDWHRE

SEQ ID NO: 20699 - protein, 386 aa, Homo sapiens
  Payload ID: 4187
  Gene Symbol: CUEDC1
  Gene Name: CUE domain containing 1
  Uniprot ID: Q9NWM3
  ENSP ID: ENSP00000353373
MTSLFRRSSSGSGGGGTAGARGGGGGTAAPQELNNSRPARQVRRLEFNQAMDDFKTMFPNMDYDIIECVLRANSGAVDATIDQLLQMNLEGGGSSGGVYEDSSDSEDSIPPEILERTLEPDSSDEEPPPVYSPPAYHMHVFDRPYPLAPPTPPPRIDALGSGAPTSQRRYRNWNPPLLGNLPDDFLRILPQQLDSIQGNAGGPKPGSGEGCPPAMAGPGPGDQESRWKQYLEDERIALFLQNEEFMKELQRNRDFLLALERDRLKYESQKSKSSSVAVGNDFGFSSPVPGTGDANPAVSEDALFRDKLKHMGKSTRRKLFELARAFSEKTKMRKSKRKHLLKHQSLGAAASTANLLDDVEGHACDEDFRGRRQEAPKVEEGLREGQ

SEQ ID NO: 20700 - protein, 386 aa, Homo sapiens; identical to SEQ ID NO: 20699
  Payload ID: 4187
  Gene Symbol: CUEDC1
  Gene Name: CUE domain containing 1
  Uniprot ID: Q9NWM3
  ENSP ID: ENSP00000384712

SEQ ID NO: 20701 - protein, 53 aa, Homo sapiens
  Payload ID: 4187
  Gene Symbol: CUEDC1
  Gene Name: CUE domain containing 1
  ENSP ID: ENSP00000462045
  MOD_RES (1)..(1): Any amino acid
XERDRLKYESQKSKSSSVAVGNDFGFSSPVPDEDFRGRRQEAPKVEEGLREGQ

SEQ ID NO: 20702 - protein, 42 aa, Homo sapiens
  Payload ID: 4187
  Gene Symbol: CUEDC1
  Gene Name: CUE domain containing 1
  ENSP ID: ENSP00000462177
  MOD_RES (1)..(1): Any amino acid
XLGAAASTANLLDDVEGHACDEDFRGRRQEAPKVEEGLREGQ

SEQ ID NO: 20703 - protein, 386 aa, Homo sapiens; identical to SEQ ID NO: 20699
  Payload ID: 4187
  Gene Symbol: CUEDC1
  Gene Name: CUE domain containing 1
  Uniprot ID: Q9NWM3
  ENSP ID: ENSP00000462717

SEQ ID NO: 20704 - protein, 162 aa, Homo sapiens
  Payload ID: 4187
  Gene Symbol: CUEDC1
  Gene Name: CUE domain containing 1
  ENSP ID: ENSP00000462789
MDDFKTMFPNMDYDIIECVLRANSGAVDATIDQLLQMNLEGGGSSGGVYEDSSDSEDSIPPEILERTLEPDSSDEEPPPVYSPPAYHMHVFDRPYPLAPPTPPPRIDALGSGAPTSQRRYRNWNPPLLGNLPDDFLRILPQQLDSIQGNAGGPKPGSGEGCP

SEQ ID NO: 20705 - protein, 249 aa, Homo sapiens
  Payload ID: 4187
  Gene Symbol: CUEDC1
  Gene Name: CUE domain containing 1
  ENSP ID: ENSP00000463666
MHVFDRPYPLAPPTPPPRIDALGSGAPTSQRRYRNWNPPLLGNLPDDFLRILPQQLDSIQGNAGGPKPGSGEGCPPAMAGPGPGDQESRWKQYLEDERIALFLQNEEFMKELQRNRDFLLALERDRLKYESQKSKSSSVAVGNDFGFSSPVPGTGDANPAVSEDALFRDKLKHMGKSTRRKLFELARAFSEKTKMRKSKRKHLLKHQSLGAAASTANLLDDVEGHACDEDFRGRRQEAPKVEEGLREGQ

SEQ ID NO: 20706 - protein, 287 aa, Homo sapiens
  Payload ID: 4188
  Gene Symbol: CUEDC2
  Gene Name: CUE domain containing 2
  Uniprot ID: Q9H467
  ENSP ID: ENSP00000358953
MELERIVSAALLAFVQTHLPEADLSGLDEVIFSYVLGVLEDLGPSGPSEENFDMEAFTEMMEAYVPGFAHIPRGTIGDMMQKLSGQLSDARNKENLQPQSSGVQGQVPISPEPLQRPEMLKEETRSSAAAAADTQDEATGAEEELLPGVDVLLEVFPTCSVEQAQWVLAKARGDLEEAVQMLVEGKEEGPAAWEGPNQDLPRRLRGPQKDELKSFILQKYMMVDSAEDQKIHRPMAPKEAPKKLIRYIDNQVVSTKGERFKDVRNPEAEEMKATYINLKPARKYRFH

SEQ ID NO: 20707 - protein, 482 aa, Homo sapiens
  Payload ID: 4189
  Gene Symbol: CELF1
  Gene Name: CUGBP, Elav-like family member 1
  Uniprot ID: Q92879
  ENSP ID: ENSP00000308386
MNGTLDHPDQPDLDAIKMFVGQVPRTWSEKDLRELFEQYGAVYEINVLRDRSQNPPQSKGCCFVTFYTRKAALEAQNALHNMKVLPGMHHPIQMKPADSEKNNAVEDRKLFIGMISKKCTENDIRVMFSSFGQIEECRILRGPDGLSRGCAFVTFTTRAMAQTAIKAMHQAQTMEGCSSPMVVKFADTQKDKEQKRMAQQLQQQMQQISAASVWGNLAGLNTLGPQYLALLQQTASSGNLNTLSSLHPMGGLNAMQLQNLAALAAAASAAQNTPSGTNALTTSSSPLSVLTSSGSSPSSSSSNSVNPIASLGALQTLAGATAGLNVGSLAGMAALNGGLGSSGLSNGTGSTMEALTQAYSGIQQYAAAALPTLYNQNLLTQQSIGAAGSQKEGPEGANLFIYHLPQEFGDQDLLQMFMPFGNVVSAKVFIDKQTNLSKCFGFVSYDNPVSAQAAIQSMNGFQIGMKRLKVQLKRSKNDSKPY

SEQ ID NO: 20708 - protein, 486 aa, Homo sapiens
  Payload ID: 4189
  Gene Symbol: CELF1
  Gene Name: CUGBP, Elav-like family member 1
  Uniprot ID: Q92879
  ENSP ID: ENSP00000351409
MNGTLDHPDQPDLDAIKMFVGQVPRTWSEKDLRELFEQYGAVYEINVLRDRSQNPPQSKGCCFVTFYTRKAALEAQNALHNMKVLPGMHHPIQMKPADSEKNNAVEDRKLFIGMISKKCTENDIRVMFSSFGQIEECRILRGPDGLSRGCAFVTFTTRAMAQTAIKAMHQAQTMEGCSSPMVVKFADTQKDKEQKRMAQQLQQQMQQISAASVWGNLAGLNTLGPQYLALYLQLLQQTASSGNLNTLSSLHPMGGLNAMQLQNLAALAAAASAAQNTPSGTNALTTSSSPLSVLTSSGSSPSSSSSNSVNPIASLGALQTLAGATAGLNVGSLAGMAALNGGLGSSGLSNGTGSTMEALTQAYSGIQQYAAAALPTLYNQNLLTQQSIGAAGSQKEGPEGANLFIYHLPQEFGDQDLLQMFMPFGNVVSAKVFIDKQTNLSKCFGFVSYDNPVSAQAAIQSMNGFQIGMKRLKVQLKRSKNDSKPY

SEQ ID NO: 20709 - protein, 483 aa, Homo sapiens
  Payload ID: 4189
  Gene Symbol: CELF1
  Gene Name: CUGBP, Elav-like family member 1
  Uniprot ID: Q92879
  ENSP ID: ENSP00000354639
MNGTLDHPDQPDLDAIKMFVGQVPRTWSEKDLRELFEQYGAVYEINVLRDRSQNPPQSKGCCFVTFYTRKAALEAQNALHNMKVLPGMHHPIQMKPADSEKNNAVEDRKLFIGMISKKCTENDIRVMFSSFGQIEECRILRGPDGLSRGCAFVTFTTRAMAQTAIKAMHQAQTMEGCSSPMVVKFADTQKDKEQKRMAQQLQQQMQQISAASVWGNLAGLNTLGPQYLALLQQTASSGNLNTLSSLHPMGGLNAMQLQNLAALAAAASAAQNTPSGTNALTTSSSPLSVLTSSAGSSPSSSSSNSVNPIASLGALQTLAGATAGLNVGSLAGMAALNGGLGSSGLSNGTGSTMEALTQAYSGIQQYAAAALPTLYNQNLLTQQSIGAAGSQKEGPEGANLFIYHLPQEFGDQDLLQMFMPFGNVVSAKVFIDKQTNLSKCFGFVSYDNPVSAQAAIQSMNGFQIGMKRLKVQLKRSKNDSKPY

SEQ ID NO: 20710 - protein, 485 aa, Homo sapiens
  Payload ID: 4189
  Gene Symbol: CELF1
  Gene Name: CUGBP, Elav-like family member 1
  Uniprot ID: Q92879
  ENSP ID: ENSP00000378705
MNGTLDHPDQPDLDAIKMFVGQVPRTWSEKDLRELFEQYGAVYEINVLRDRSQNPPQSKGCCFVTFYTRKAALEAQNALHNMKVLPGMHHPIQMKPADSEKNNVEDRKLFIGMISKKCTENDIRVMFSSFGQIEECRILRGPDGLSRGCAFVTFTTRAMAQTAIKAMHQAQTMEGCSSPMVVKFADTQKDKEQKRMAQQLQQQMQQISAASVWGNLAGLNTLGPQYLALYLQLLQQTASSGNLNTLSSLHPMGGLNAMQLQNLAALAAAASAAQNTPSGTNALTTSSSPLSVLTSSGSSPSSSSSNSVNPIASLGALQTLAGATAGLNVGSLAGMAALNGGLGSSGLSNGTGSTMEALTQAYSGIQQYAAAALPTLYNQNLLTQQSIGAAGSQKEGPEGANLFIYHLPQEFGDQDLLQMFMPFGNVVSAKVFIDKQTNLSKCFGFVSYDNPVSAQAAIQSMNGFQIGMKRLKVQLKRSKNDSKPY

SEQ ID NO: 20711 - protein, 483 aa, Homo sapiens; identical to SEQ ID NO: 20709
  Payload ID: 4189
  Gene Symbol: CELF1
  Gene Name: CUGBP, Elav-like family member 1
  Uniprot ID: Q92879
  ENSP ID: ENSP00000378706

SEQ ID NO: 20712 - protein, 95 aa, Homo sapiens
  Payload ID: 4189
  Gene Symbol: CELF1
  Gene Name: CUGBP, Elav-like family member 1
  ENSP ID: ENSP00000433986
MNGTLDHPDQPDLDAIKMFVGQVPRTWSEKDLRELFEQYGAVYEINVLRDRSQNPPQSKGCCFVTFYTRKAALEAQNALHNMKVLPGMHHPIQMK

SEQ ID NO: 20713 - protein, 114 aa, Homo sapiens
  Payload ID: 4189
  Gene Symbol: CELF1
  Gene Name: CUGBP, Elav-like family member 1
  ENSP ID: ENSP00000435320
MAAFKLDFLPEMMVDHCSLNSSPVSKKMNGTLDHPDQPDLDAIKMFVGQVPRTWSEKDLRELFEQYGAVYEINVLRDRSQNPPQSKGCCFVTFYTRKAALEAQNALHNMKVLPG

SEQ ID NO: 20714 - protein, 56 aa, Homo sapiens
  Payload ID: 4189
  Gene Symbol: CELF1
  Gene Name: CUGBP, Elav-like family member 1
  ENSP ID: ENSP00000435423
MNGTLDHPDQPDLDAIKMFVGQVPRTWSEKDLRELFEQYGAVYEINVLRDRSQNPP

SEQ ID NO: 20715 - protein, 512 aa, Homo sapiens
  Payload ID: 4189
  Gene Symbol: CELF1
  Gene Name: CUGBP, Elav-like family member 1
  Uniprot ID: Q92879
  ENSP ID: ENSP00000435926
MAAFKLDFLPEMMVDHCSLNSSPVSKKMNGTLDHPDQPDLDAIKMFVGQVPRTWSEKDLRELFEQYGAVYEINVLRDRSQNPPQSKGCCFVTFYTRKAALEAQNALHNMKVLPGMHHPIQMKPADSEKNNVEDRKLFIGMISKKCTENDIRVMFSSFGQIEECRILRGPDGLSRGCAFVTFTTRAMAQTAIKAMHQAQTMEGCSSPMVVKFADTQKDKEQKRMAQQLQQQMQQISAASVWGNLAGLNTLGPQYLALYLQLLQQTASSGNLNTLSSLHPMGGLNAMQLQNLAALAAAASAAQNTPSGTNALTTSSSPLSVLTSSGSSPSSSSSNSVNPIASLGALQTLAGATAGLNVGSLAGMAALNGGLGSSGLSNGTGSTMEALTQAYSGIQQYAAAALPTLYNQNLLTQQSIGAAGSQKEGPEGANLFIYHLPQEFGDQDLLQMFMPFGNVVSAKVFIDKQTNLSKCFGFVSYDNPVSAQAAIQSMNGFQIGMKRLKVQLKRSKNDSKPY

SEQ ID NO: 20716 - protein, 87 aa, Homo sapiens
  Payload ID: 4189
  Gene Symbol: CELF1
  Gene Name: CUGBP, Elav-like family member 1
  ENSP ID: ENSP00000436191
MNGTLDHPDQPDLDAIKMFVGQVPRTWSEKDLRELFEQYGAVYEINVLRDRSQNPPQSKGCCFVTFYTRKAALEAQNALHNMKVLPG

SEQ ID NO: 20717 - protein, 514 aa, Homo sapiens
  Payload ID: 4189
  Gene Symbol: CELF1
  Gene Name: CUGBP, Elav-like family member 1
  ENSP ID: ENSP00000436864
MAAFKLDFLPEMMVDHCSLNSSPVSKKMNGTLDHPDQPDLDAIKMFVGQVPRTWSEKDLRELFEQYGAVYEINVLRDRSQNPPQSKGCCFVTFYTRKAALEAQNALHNMKVLPGMHHPIQMKPADSEKNNAVEDRKLFIGMISKKCTENDIRVMFSSFGQIEECRILRGPDGLSRGCAFVTFTTRAMAQTAIKAMHQAQTMEGCSSPMVVKFADTQKDKEQKRMAQQLQQQMQQISAASVWGNLAGLNTLGPQYLALYLQLLQQTASSGNLNTLSSLHPMGGLNAMQLQNLAALAAAASAAQNTPSGTNALTTSSSPLSVLTSSAGSSPSSSSSNSVNPIASLGALQTLAGATAGLNVGSLAGMAALNGGLGSSGLSNGTGSTMEALTQAYSGIQQYAAAALPTLYNQNLLTQQSIGAAGSQKEGPEGANLFIYHLPQEFGDQDLLQMFMPFGNVVSAKVFIDKQTNLSKCFGFVSYDNPVSAQAAIQSMNGFQIGMKRLKVQLKRSKNDSKPY

SEQ ID NO: 20718 - protein, 103 aa, Homo sapiens
  Payload ID: 4189
  Gene Symbol: CELF1
  Gene Name: CUGBP, Elav-like family member 1
  ENSP ID: ENSP00000438044
MAAFKLDFLPEMMVDHCSLNSSPVSKKMNGTLDHPDQPDLDAIKMFVGQVPRTWSEKDLRELFEQYGAVYEINVLRDRSQNPPQSKGCCFVTFYTRKAALEAQ

SEQ ID NO: 20719 - protein, 37 aa, Homo sapiens
  Payload ID: 4189
  Gene Symbol: CELF1
  Gene Name: CUGBP, Elav-like family member 1
  ENSP ID: ENSP00000438862
MAAFKLDFLPEMMVDHCSLNSSPVSKKMNGTLDHPDQ

SEQ ID NO: 20720 - protein, 14 aa, Homo sapiens
  Payload ID: 4189
  Gene Symbol: CELF1
  Gene Name: CUGBP, Elav-like family member 1
  ENSP ID: ENSP00000442415
MNGTLDHPDQPDLD

SEQ ID NO: 20721 - protein, 78 aa, Homo sapiens
  Payload ID: 4189
  Gene Symbol: CELF1
  Gene Name: CUGBP, Elav-like family member 1
  ENSP ID: ENSP00000444825
MNGTLDHPDQPDLDAIKMFVGQVPRTWSEKDLRELFEQYGAVYEINVLRDRSQNPPQSKGCCFVTFYTRKAALEAQNA

SEQ ID NO: 20722 - protein, 502 aa, Homo sapiens
  Payload ID: 4190
  Gene Symbol: CELF2
  Gene Name: CUGBP, Elav-like family member 2
  ENSP ID: ENSP00000346971
MNGALDHSDQPDPDAIKMFVGQIPRSWSEKELKELFEPYGAVYQINVLRDRSQNPPQSKGCCFVTFYTRKAALEAQNALHNIKTLPGMHHPIQMKPADSEKSNAVEDRKLFIGMVSKKCNENDIRVMFSPFGQIEECRILRGPDGLSRGCAFVTFSTRAMAQNAIKAMHQSQTMEGCSSPIVVKFADTQKDKEQRRLQQQLAQQMQQLNTATWGNLTGLGGLTPQYLALLQQATSSSNLGAFSGIQQMAGMNALQLQNLATLAAAAAAAQTSATSTNANPLSTTSSALGALTSPVAASTPNSTAGAAMNSLTSLGTLQGLAGATVGLNNINALAGTINTPRSKRLLLPKDNNGMAALNGGLGATGLTNGTAGTMDALTQAYSGIQQYAAAALPTLYSQSLLQQQSAAGSQKEGPEGANLFIYHLPQEFGDQDILQMFMPFGNVISAKVFIDKQTNLSKCFGFVSYDNPVSAQAAIQAMNGFQIGMKRLKVQLKRSKNDSKPY

SEQ ID NO: 20723 - protein, 490 aa, Homo sapiens
  Payload ID: 4190
  Gene Symbol: CELF2
  Gene Name: CUGBP, Elav-like family member 2
  Uniprot ID: O95319
  ENSP ID: ENSP00000382743
MNGALDHSDQPDPDAIKMFVGQIPRSWSEKELKELFEPYGAVYQINVLRDRSQNPPQSKGCCFVTFYTRKAALEAQNALHNIKTLPGMHHPIQMKPADSEKSNAVEDRKLFIGMVSKKCNENDIRVMFSPFGQIEECRILRGPDGLSRGCAFVTFSTRAMAQNAIKAMHQSQTMEGCSSPIVVKFADTQKDKEQRRLQQQLAQQMQQLNTATWGNLTGLGGLTPQYLALLQQATSSSNLGAFSGIQQMAGMNALQLQNLATLAAAAAAAQTSATSTNANPLSTTSSALGALTSPVAASTPNSTAGAAMNSLTSLGTLQGLAGATVGLNNINALAVAQMLSGMAALNGGLGATGLTNGTAGTMDALTQAYSGIQQYAAAALPTLYSQSLLQQQSAAGSQKEGPEGANLFIYHLPQEFGDQDILQMFMPFGNVISAKVFIDKQTNLSKCFGFVSYDNPVSAQAAIQAMNGFQIGMKRLKVQLKRSKNDSKPY

SEQ ID NO: 20724 - protein, 490 aa, Homo sapiens; identical to SEQ ID NO: 20723
  Payload ID: 4190
  Gene Symbol: CELF2
  Gene Name: CUGBP, Elav-like family member 2
  Uniprot ID: O95319
  ENSP ID: ENSP00000404834

SEQ ID NO: 20725 - protein, 508 aa, Homo sapiens
  Payload ID: 4190
  Gene Symbol: CELF2
  Gene Name: CUGBP, Elav-like family member 2
  Uniprot ID: O95319
  ENSP ID: ENSP00000406451
MRCPKSAVTMRNEELLLSNGTANKMNGALDHSDQPDPDAIKMFVGQIPRSWSEKELKELFEPYGAVYQINVLRDRSQNPPQSKGCCFVTFYTRKAALEAQNALHNIKTLPGMHHPIQMKPADSEKSNAVEDRKLFIGMVSKKCNENDIRVMFSPFGQIEECRILRGPDGLSRGCAFVTFSTRAMAQNAIKAMHQSQTMEGCSSPIVVKFADTQKDKEQRRLQQQLAQQMQQLNTATWGNLTGLGGLTPQYLALLQQATSSSNLGAFSGIQQMAGMNALQLQNLATLAAAAAAAQTSATSTNANPLSTTSSALGALTSPVAASTPNSTAGAAMNSLTSLGTLQGLAGATVGLNNINALAGMAALNGGLGATGLTNGTAGTMDALTQAYSGIQQYAAAALPTLYSQSLLQQQSAAGSQKEGPEGANLFIYHLPQEFGDQDILQMFMPFGNVISAKVFIDKQTNLSKCFGFVSYDNPVSAQAAIQAMNGFQIGMKRLKVQLKRSKNDSKPY

SEQ ID NO: 20726 - protein, 521 aa, Homo sapiens
  Payload ID: 4190
  Gene Symbol: CELF2
  Gene Name: CUGBP, Elav-like family member 2
  ENSP ID: ENSP00000443926
MTSAFKLDFLPDMMVEGRLLVPDRINGTANKMNGALDHSDQPDPDAIKMFVGQIPRSWSEKELKELFEPYGAVYQINVLRDRSQNPPQSKGCCFVTFYTRKAALEAQNALHNIKTLPGMHHPIQMKPADSEKSNAVEDRKLFIGMVSKKCNENDIRVMFSPFGQIEECRILRGPDGLSRGCAFVTFSTRAMAQNAIKAMHQSQTMEGCSSPIVVKFADTQKDKEQRRLQQQLAQQMQQLNTATWGNLTGLGGLTPQYLALLQQATSSSNLGAFSGIQQMAGMNALQLQNLATLAAAAAAAQTSATSTNANPLSTTSSALGALTSPVAASTPNSTAGAAMNSLTSLGTLQGLAGATVGLNNINALAVAQMLSGMAALNGGLGATGLTNGTAGTMDALTQAYSGIQQYAAAALPTLYSQSLLQQQSAAGSQKEGPEGANLFIYHLPQEFGDQDILQMFMPFGNVISAKVFIDKQTNLSKCFGFVSYDNPVSAQAAIQAMNGFQIGMKRLKVQLKRSKNDSKPY

SEQ ID NO: 20727 - protein, 70 aa, Homo sapiens
  Payload ID: 4190
  Gene Symbol: CELF2
  Gene Name: CUGBP, Elav-like family member 2
  ENSP ID: ENSP00000476392
MNGALDHSDQPDPDAIKMFVGQIPRSWSEKELKELFEPYGAVYQINVLRDRSQNPPQSKDASSHSDETCR

SEQ ID NO: 20728 - protein, 440 aa, Homo sapiens
  Payload ID: 4190
  Gene Symbol: CELF2
  Gene Name: CUGBP, Elav-like family member 2
  ENSP ID: ENSP00000476656
MNGALDHSDQPDPDAIKMFVGQIPRSWSEKELKELFEPYGAVYQINVLRDRSQNPPQSKGCCFVTFYTRKAALEAQNALHNIKTLPGMHHPIQMKPADSEKSNAVEDRKLFIGMVSKKCNENDIRVMFSPFGQIEECRILRGPDGLSRGCAFVTFSTRAMAQNAIKAMHQSQTMEGCSSPIVVKFADTQKDKEQRRLQQQLAQQMQQLNTATWGNLTGLGGLTPQYLALLQQATSSSNLGAFSGIQQMAGMNALQLQNLATLAAAAAAAQTSATSTNANPLSTTSSALGALTSPVAASTPNSTAGAAMNSLTSLGTLQGLAGATVGLNNINALAGTINSMAALNGGLGATGLTNGTAGTMDALTQAYSGIQQYAAAALPTLYSQSLLQQQSAAGSQKEGFVSYDNPVSAQAAIQAMNGFQIGMKRLKVQLKRSKNDSKPY

SEQ ID NO: 20729 - protein, 488 aa, Homo sapiens
  Payload ID: 4190
  Gene Symbol: CELF2
  Gene Name: CUGBP, Elav-like family member 2
  Uniprot ID: O95319
  ENSP ID: ENSP00000476999
MNGALDHSDQPDPDAIKMFVGQIPRSWSEKELKELFEPYGAVYQINVLRDRSQNPPQSKGCCFVTFYTRKAALEAQNALHNIKTLPGMHHPIQMKPADSEKSNAVEDRKLFIGMVSKKCNENDIRVMFSPFGQIEECRILRGPDGLSRGCAFVTFSTRAMAQNAIKAMHQSQTMEGCSSPIVVKFADTQKDKEQRRLQQQLAQQMQQLNTATWGNLTGLGGLTPQYLALLQQATSSSNLGAFSGIQQMAGMNALQLQNLATLAAAAAAAQTSATSTNANPLSTTSSALGALTSPVAASTPNSTAGAAMNSLTSLGTLQGLAGATVGLNNINALAGTINSMAALNGGLGATGLTNGTAGTMDALTQAYSGIQQYAAAALPTLYSQSLLQQQSAAGSQKEGPEGANLFIYHLPQEFGDQDILQMFMPFGNVISAKVFIDKQTNLSKCFGFVSYDNPVSAQAAIQAMNGFQIGMKRLKVQLKRSKNDSKPY

SEQ ID NO: 20730 - protein, 490 aa, Homo sapiens; identical to SEQ ID NO: 20723
  Payload ID: 4190
  Gene Symbol: CELF2
  Gene Name: CUGBP, Elav-like family member 2
  Uniprot ID: O95319
  ENSP ID: ENSP00000487802

SEQ ID NO: 20731 - protein, 514 aa, Homo sapiens
  Payload ID: 4190
  Gene Symbol: CELF2
  Gene Name: CUGBP, Elav-like family member 2
  ENSP ID: ENSP00000488268
MRCPKSAVTMRNEELLLSNGTANKMNGALDHSDQPDPDAIKMFVGQIPRSWSEKELKELFEPYGAVYQINVLRDRSQNPPQSKGCCFVTFYTRKAALEAQNALHNIKTLPGMHHPIQMKPADSEKSNAVEDRKLFIGMVSKKCNENDIRVMFSPFGQIEECRILRGPDGLSRGCAFVTFSTRAMAQNAIKAMHQSQTMEGCSSPIVVKFADTQKDKEQRRLQQQLAQQMQQLNTATWGNLTGLGGLTPQYLALLQQATSSSNLGAFSGIQQMAGMNALQLQNLATLAAAAAAAQTSATSTNANPLSTTSSALGALTSPVAASTPNSTAGAAMNSLTSLGTLQGLAGATVGLNNINALAVAQMLSGMAALNGGLGATGLTNGTAGTMDALTQAYSGIQQYAAAALPTLYSQSLLQQQSAAGSQKEGPEGANLFIYHLPQEFGDQDILQMFMPFGNVISAKVFIDKQTNLSKCFGFVSYDNPVSAQAAIQAMNGFQIGMKRLKVQLKRSKNDSKPY

SEQ ID NO: 20732 - protein, 533 aa, Homo sapiens
  Payload ID: 4190
  Gene Symbol: CELF2
  Gene Name: CUGBP, Elav-like family member 2
  ENSP ID: ENSP00000488422
MTSAFKLDFLPDMMVEGRLLVPDRINGTANKMNGALDHSDQPDPDAIKMFVGQIPRSWSEKELKELFEPYGAVYQINVLRDRSQNPPQSKGCCFVTFYTRKAALEAQNALHNIKTLPGMHHPIQMKPADSEKSNAVEDRKLFIGMVSKKCNENDIRVMFSPFGQIEECRILRGPDGLSRGCAFVTFSTRAMAQNAIKAMHQSQTMEGCSSPIVVKFADTQKDKEQRRLQQQLAQQMQQLNTATWGNLTGLGGLTPQYLALLQQATSSSNLGAFSGIQQMAGMNALQLQNLATLAAAAAAAQTSATSTNANPLSTTSSALGALTSPVAASTPNSTAGAAMNSLTSLGTLQGLAGATVGLNNINALAGTINTPRSKRLLLPKDNNGMAALNGGLGATGLTNGTAGTMDALTQAYSGIQQYAAAALPTLYSQSLLQQQSAAGSQKEGPEGANLFIYHLPQEFGDQDILQMFMPFGNVISAKVFIDKQTNLSKCFGFVSYDNPVSAQAAIQAMNGFQIGMKRLKVQLKRSKNDSKPY

SEQ ID NO: 20733 - protein, 94 aa, Homo sapiens
  Payload ID: 4190
  Gene Symbol: CELF2
  Gene Name: CUGBP, Elav-like family member 2
  ENSP ID: ENSP00000488438
MRCPKSAVTMRNEELLLSNGTANKMNGALDHSDQPDPDAIKMFVGQIPRSWSEKELKELFEPYGAVYQINVLRDRSQNPPQSKDASSHSDETCR

SEQ ID NO: 20734 - protein, 508 aa, Homo sapiens; identical to SEQ ID NO: 20725
  Payload ID: 4190
  Gene Symbol: CELF2
  Gene Name: CUGBP, Elav-like family member 2
  Uniprot ID: O95319
  ENSP ID: ENSP00000488582

SEQ ID NO: 20735 - protein, 521 aa, Homo sapiens; identical to SEQ ID NO: 20726
  Payload ID: 4190
  Gene Symbol: CELF2
  Gene Name: CUGBP, Elav-like family member 2
  ENSP ID: ENSP00000488690

SEQ ID NO: 20736 - protein, 465 aa, Homo sapiens
  Payload ID: 4191
  Gene Symbol: CELF3
  Gene Name: CUGBP, Elav-like family member 3
  Uniprot ID: Q5SZQ8
  ENSP ID: ENSP00000290583
MKEPDAIKLFVGQIPRHLEEKDLKPIFEQFGRIFELTVIKDKYTGLHKGCAFLTYCARDSALKAQSALHEQKTLPGMNRPIQVKPADSESRGEDRKLFVGMLGKQQTDEDVRKMFEPFGTIDECTVLRGPDGTSKGCAFVKFQTHAEAQAAINTLHSSRTLPGASSSLVVKFADTEKERGLRRMQQVATQLGMFSPIALQFGAYSAYTQALMQQQAALVAAHSAYLSPMATMAAVQMQHMAAINANGLIATPITPSSGTSTPPAIAATPVSAIPAALGVNGYSPVPTQPTGQPAPDALYPNGVHPYPAQSPAAPVDPLQQAYAGMQHYTAAYPAAYSLVAPAFPQPPALVAQQPPPPPQQQQQQQQQQQQQQQREGPDGCNIFIYHLPQEFTDSEILQMFVPFGHVISAKVFVDRATNQSKCFGFVSFDNPASAQAAIQAMNGFQIGMKRLKVQLKRPKDANRPY

SEQ ID NO: 20737 - protein, 415 aa, Homo sapiens
  Payload ID: 4191
  Gene Symbol: CELF3
  Gene Name: CUGBP, Elav-like family member 3
  Uniprot ID: Q5SZQ8
  ENSP ID: ENSP00000290585
MKEPDAIKLFVGQIPRHLEEKDLKPIFEQFGRIFELTVIKDKYTGLHKGCAFLTYCARDSALKAQSALHEQKTLPGMNRPIQVKPADSESRGEDRKLFVGMLGKQQTDEDVRKMFEPFGTIDECTVLRGPDGTSKGCAFVKFQTHAEAQAAINTLHSSRTLPGASSSLVVKFADTEKERGLRRMQQVATQLGMFSPIALQFGAYSAYTQALMQQQAALVAAHSAYLSPMATMAAVQMQHMAAINANGLIATPITPSSAQSPAAPVDPLQQAYAGMQHYTAAYPAAYSLVAPAFPQPPALVAQQPPPPPQQQQQQQQQQQQQQQREGPDGCNIFIYHLPQEFTDSEILQMFVPFGHVISAKVFVDRATNQSKCFGFVSFDNPASAQAAIQAMNGFQIGMKRLKVQLKRPKDANRPY

SEQ ID NO: 20738 - protein, 466 aa, Homo sapiens
  Payload ID: 4191
  Gene Symbol: CELF3
  Gene Name: CUGBP, Elav-like family member 3
  ENSP ID: ENSP00000402503
  MOD_RES (1)..(1): Any amino acid
XVEESAAGEQSSGTQIPRHLEEKDLKPIFEQFGRIFELTVIKDKYTGLHKGCAFLTYCARDSALKAQSALHEQKTLPGMNRPIQVKPADSESRGDRKLFVGMLGKQQTDEDVRKMFEPFGTIDECTVLRGPDGTSKGCAFVKFQTHAEAQAAINTLHSSRTLPGASSSLVVKFADTEKERGLRRMQQVATQLGMFSPIALQFGAYSAYTQALMQQQAALVAAHSAYLSPMATMAAVQMQHMAAINANGLIATPITPSSGTSTPPAIAATPVSAIPAALGVNGYSPVPTQPTGQPAPDALYPNGVHPYPAQSPAAPVDPLQQAYAGMQHYTAAYPAAYSLVAPAFPQPPALVAQQPPPPPQQQQQQQQQQQQQQQREGPDGCNIFIYHLPQEFTDSEILQMFVPFGHVISAKVFVDRATNQSKCFGFVSFDNPASAQAAIQAMNGFQIGMKRLKVQLKRPKDANRPY

SEQ ID NO: 20739 - protein, 448 aa, Homo sapiens
  Payload ID: 4192
  Gene Symbol: CELF4
  Gene Name: CUGBP, Elav-like family member 4
  Uniprot ID: Q9BZC1
  ENSP ID: ENSP00000335631
MYIKMATLANGQADNASLSTNGLGSSPGSAGHMNGLSHSPGNPSTIPMKDHDAIKLFIGQIPRNLDEKDLKPLFEEFGKIYELTVLKDRFTGMHKGCAFLTYCERESALKAQSALHEQKTLPGMNRPIQVKPADSESRGEDRKLFVGMLNKQQSEDDVRRLFEAFGNIEECTILRGPDGNSKGCAFVKYSSHAEAQAAINALHGSQTMPGASSSLVVKFADTDKERTMRRMQQMAGQMGMFNPMAIPFGAYGAYAQALMQQQAALMASVAQGGYLNPMAAFAAAQMQQMAALNMNGLAAAPMTPTSGGSTPPGITAPAVPSIPSPIGVNGFTGLPPQANGQPAAEAVFANGIHPYPAQSPTAADPLQQAYAGVQQYAGPAAYPAAYGQISQAFPQPPPMIPQQQREGFVSFDNPASAQTAIQAMNGFQIGMKRLKVQLKRPKDANRPY

SEQ ID NO: 20740 - protein, 484 aa, Homo sapiens
  Payload ID: 4192
  Gene Symbol: CELF4
  Gene Name: CUGBP, Elav-like family member 4
  Uniprot ID: Q9BZC1
  ENSP ID: ENSP00000355089
MYIKMATLANGQADNASLSTNGLGSSPGSAGHMNGLSHSPGNPSTIPMKDHDAIKLFIGQIPRNLDEKDLKPLFEEFGKIYELTVLKDRFTGMHKGCAFLTYCERESALKAQSALHEQKTLPGMNRPIQVKPADSESRGGSSCLRQPPSHRKLFVGMLNKQQSEDDVRRLFEAFGNIEECTILRGPDGNSKGCAFVKYSSHAEAQAAINALHGSQTMPGASSSLVVKFADTDKERTMRRMQQMAGQMGMFNPMAIPFGAYGAYAQAMQQQAALMASVAQGGYLNPMAAFAAAQMQQMAALNMNGLAAAPMTPTSGGSTPPGITAPAVPSIPSPIGVNGFTGLPPQANGQPAAEAVFANGIHPYPAQSPTAADPLQQAYAGVQQYAGPAAYPAAYGQISQAFPQPPPMIPQQQREGPEGCNLFIYHLPQEFGDAELMQMFLPFGFVSFDNPASAQTAIQAMNGFQIGMKRLKVQLKRPKDANRPY

SEQ ID NO: 20741 - protein, 486 aa, Homo sapiens
  Payload ID: 4192
  Gene Symbol: CELF4
  Gene Name: CUGBP, Elav-like family member 4
  Uniprot ID: Q9BZC1
  ENSP ID: ENSP00000410584
MYIKMATLANGQADNASLSTNGLGSSPGSAGHMNGLSHSPGNPSTIPMKDHDAIKLFIGQIPRNLDEKDLKPLFEEFGKIYELTVLKDRFTGMHKGCAFLTYCERESALKAQSALHEQKTLPGMNRPIQVKPADSESRGGSSCLRQPPSQDRKLFVGMLNKQQSEDDVRRLFEAFGNIEECTILRGPDGNSKGCAFVKYSSHAEAQAAINALHGSQTMPGASSSLVVKFADTDKERTMRRMQQMAGQMGMFNPMAIPFGAYGAYAQALMQQQAALMASVAQGGYLNPMAAFAAAQMQQMAALNMNGLAAAPMTPTSGGSTPPGITAPAVPSIPSPIGVNGFTGLPPQANGQPAAEAVFANGIHPYPAQSPTAADPLQQAYAGVQQYAGPAAYPAAYGQISQAFPQPPPMIPQQQREGPEGCNLFIYHLPQEFGDAELMQMFLPFGFVSFDNPASAQTAIQAMNGFQIGMKRLKVQLKRPKDANRPY

SEQ ID NO: 20742 - protein, 486 aa, Homo sapiens; identical to SEQ ID NO: 20741
  Payload ID: 4192
  Gene Symbol: CELF4
  Gene Name: CUGBP, Elav-like family member 4
  Uniprot ID: Q9BZC1
  ENSP ID: ENSP00000464794

SEQ ID NO: 20743 - protein, 484 aa, Homo sapiens
  Payload ID: 4192
  Gene Symbol: CELF4
  Gene Name: CUGBP, Elav-like family member 4
  Uniprot ID: Q9BZC1
  ENSP ID: ENSP00000464917
MYIKMATLANGQADNASLSTNGLGSSPGSAGHMNGLSHSPGNPSTIPMKDHDAIKLFIGQIPRNLDEKDLKPLFEEFGKIYELTVLKDRFTGMHKGCAFLTYCERESALKAQSALHEQKTLPGMNRPIQVKPADSESRGGSSCLRQPPSHRKLFVGMLNKQQSEDDVRRLFEAFGNIEECTILRGPDGNSKGCAFVKYSSHAEAQAAINALHGSQTMPGASSSLVVKFADTDKERTMRRMQQMAGQMGMFNPMAIPFGAYGAYAQALMQQQAALMASVAQGGYLNPMAAFAAAQMQQMAALNMNGLAAAPMTPTSGGSTPPGITAPAVPSIPSPIGVNGFTGLPPQANGQPAAEAVFANGIHPYPAQSPTAADPLQQAYAGVQQYAAAAYPAAYGQISQAFPQPPPMIPQQQREGPEGCNLFIYHLPQEFGDAELMQMFLPFGFVSFDNPASAQTAIQAMNGFQIGMKRLKVQLKRPKDANRPY

SEQ ID NO: 20744 - protein, 138 aa, Homo sapiens
  Payload ID: 4192
  Gene Symbol: CELF4
  Gene Name: CUGBP, Elav-like family member 4
  ENSP ID: ENSP00000464996
MTPTSGGSTPPGITAPAVPSIPSPIGVNGFTGLPPQANGQPAAEAVFANGIHPYPAQSPTAADPLQQAYAGVQQYAGPAYPAAYGQISQAFPQPPPMIPQQQREGFVSFDNPASAQTAIQAMNGFQIGMKRLKVQLKR

SEQ ID NO: 20745 - protein, 181 aa, Homo sapiens
  Payload ID: 4192
  Gene Symbol: CELF4
  Gene Name: CUGBP, Elav-like family member 4
  ENSP ID: ENSP00000465125
MTPTSGGSTPPGITAPAVPSIPSPIGVNGFTGLPPQANGQPAAEAVFANGIHPYPAQSPTAADPLQQAYAGVQQYAGPAAYPAAYGQISQAFPQPPPMIPQQQREGPEGCNLFIYHLPQEFGDAELMQMFLPFGNVISSKVFVDRATNQSKCFGFVSFDNPASAQTAIQAMNGFQIGMKRL

SEQ ID NO: 20746 - protein, 162 aa, Homo sapiens
  Payload ID: 4192
  Gene Symbol: CELF4
  Gene Name: CUGBP, Elav-like family member 4
  ENSP ID: ENSP00000465211
MNRPIQVKPADSESRGGSSCLRQPPSQDRKLFVGMLNKQQSEDDVRRLFEAFGNIEECTILRGPDGNSKGCAFVKYSSHAEAQAAINALHGSQTMPGASSSLVVKFADTDKERTMRRMQQMAGQMGMFNPMAIPFGAYGAYAQALMQQQAALMASVAQGGYL

SEQ ID NO: 20747 - protein, 115 aa, Homo sapiens
  Payload ID: 4192
  Gene Symbol: CELF4
  Gene Name: CUGBP, Elav-like family member 4
  ENSP ID: ENSP00000465348
  MOD_RES (1)..(1): Any amino acid
XGGSTPPGITAPAVPSIPSPIGVNGFTGLPPQANGQPAAEAVFANGIHPYPAQSPTAADPLQQAYAGVQQYAGRFVSFDNPASAQTAIQAMNGFQIGMKRLKVQLKRPKDANRPY

SEQ ID NO: 20748 - protein, 132 aa, Homo sapiens
  Payload ID: 4192
  Gene Symbol: CELF4
  Gene Name: CUGBP, Elav-like family member 4
  ENSP ID: ENSP00000467056
MTPTSGGSTPPGITAPAVPSIPSPIGVNGFTGLPPQANGQPAAEAVFANGIHPYPAQSPTAADPLQQAYAGVQQYAAAAYPAAYGQISQAFPQPPPMIPQQQREGPEGCNLFIYHLPQEFGDAELMQMFLPF

SEQ ID NO: 20749 - protein, 67 aa, Homo sapiens
  Payload ID: 4192
  Gene Symbol: CELF4
  Gene Name: CUGBP, Elav-like family member 4
  ENSP ID: ENSP00000467571
MNRPIQVKPADSESRGGKDRKLFVGMLNKQQSEDDVRRLFEAFGNIEECTILRGPDGNSKGCAFVKY

SEQ ID NO: 20750 - protein, 154 aa, Homo sapiens
  Payload ID: 4192
  Gene Symbol: CELF4
  Gene Name: CUGBP, Elav-like family member 4
  ENSP ID: ENSP00000467732
MNRPIQVKPADSESRGDRKLFVGMLNKQQSEDDVRRLFEAFGNIEECTILRGPDGNSKGCAFVKYSSHAEAQAAINALHGSQTMPGASSSLVVKFADTDKERTMRRMQQMAGQMGMFNPMAIPFGAYGAYAQALMQQQAALMASVAQGGYLNPM

SEQ ID NO: 20751 - protein, 454 aa, Homo sapiens
  Payload ID: 4192
  Gene Symbol: CELF4
  Gene Name: CUGBP, Elav-like family member 4
  ENSP ID: ENSP00000468109
MYIKMATLANGQADNASLSTNGLGSSPGSAGHMNGLSHSPGNPSTIPMKDHDAIKLFIGQIPRNLDEKDLKPLFEEFGKIYELTVLKDRFTGMHKGCAFLTYCERESALKAQSALHEQKTLPGMNRPIQVKPADSESRGDRKLFVGMLNKQQSEDDVRRLFEAFGNIEECTILRGPDGNSKGCAFVKYSSHAEAQAAINALHGSQTMPGASSSLVVKFADTDKERTMRRMQQMAGQMGMFNPMAIPFGAYGAYAQALMQQQAALMASVAQGGYLNPMAAFAAAQMQQMAALNMNGLAAAPMTPTSGGSTPPGITAPAVPSIPSPIGVNGFTGLPPQANGQPAAEAVFANGIHPYPAQSPTAADPLQQAYAGVQQYAGPAYPAAYGQISQAFPQPPPMIPQQQREGPEGCNLFIYHLPQEFGDAELMQMFLPFGNVISSKVFVDRATNQSKCFGG

SEQ ID NO: 20752 - protein, 151 aa, Homo sapiens
  Payload ID: 4192
  Gene Symbol: CELF4
  Gene Name: CUGBP, Elav-like family member 4
  ENSP ID: ENSP00000468256
AAAPMTPTSGGSTPPGITAPAVPSIPSPIGVNGFTGLPPQANGQPAAEAVFANGIHPYPAQSPTAADPLQQAYAGVQQYAGPAAYPAAYGQISQAFPQPPPMIPQQQREGFVSFDNPASAQTAIQAMNGFQIGMKRLKVQLKRPKDANRPY

SEQ ID NO: 20753 - protein, 250 aa, Homo sapiens
  Payload ID: 4192
  Gene Symbol: CELF4
  Gene Name: CUGBP, Elav-like family member 4
  ENSP ID: ENSP00000468428
MNRPIQVKPADSESRGDRKLFVGMLNKQQSEDDVRRLFEAFGNIEECTILRGPDGNSKGCAFVKYSSHAEAQAAINALHGSQTMPVSAGPLGRGRGQRRAETPAPATPRRLSSLPKRQESMTLIPGLRQGRGSPGMLRNWPEVTQVENARGGVHTSFPWASADAASSKAPRGAGGVGAGQRHRQLRAEALEQVGLTRRPGRREPRPVWWSSSPTPTRSARCGECSRWLARWACSTPWPSLSGPTAPTLRQ

SEQ ID NO: 20754 - protein, 484 aa, Homo sapiens
  Payload ID: 4192
  Gene Symbol: CELF4
  Gene Name: CUGBP, Elav-like family member 4
  ENSP ID: ENSP00000469627
MYIKMATLANGQADNASLSTNGLGSSPGSAGHMNGLSHSPGNPSTIPMKDHDAIKLFIGQIPRNLDEKDLKPLFEEFGKIYELTVLKDRFTGMHKGCAFLTYCERESALKAQSALHEQKTLPGMNRPIQVKPADSESRGGSSCLRQPPSHRKLFVGMLNKQQSEDDVRRLFEAFGNIEECTILRGPDGNSKGCAFVKYSSHAEAQAAINALHGSQTMPGASSSLVVKFADTDKERTMRRMQQMAGQMGMFNPMAIPFGAYGAYAQLMQQQAALMASVAQGGYLNPMAAFAAAQMQQMAALNMNGLAAAPMTPTSGGSTPPGITAPAVPSIPSPIGVNGFTGLPPQANGQPAAEAVFANGIHPYPAQSPTAADPLQQAYAGVQQYAGPAAYPAAYGQISQAFPQPPPMIPQQQREGPEGCNLFIYHLPQEFGDAELMQMFLPFGFVSFDNPASAQTAIQAMNGFQIGMKRLKVQLKRPKDANRPY

SEQ ID NO: 20755 - protein, 294 aa, Homo sapiens
  Payload ID: 4192
  Gene Symbol: CELF4
  Gene Name: CUGBP, Elav-like family member 4
  ENSP ID: ENSP00000470649
MYIKMATLANGQADNASLSTNGLGSSPGSAGHMNGLSHSPGNPSTIPMKDHDAIKLFIGQIPRNLDEKDLKPLFEEFGKIYELTVLKDRFTGMHKGCAFLTYCERESALKAQSALHEQKTLPGMNRPIQVKPADSESRGEDRKLFVGMLNKQQSEDDVRRLFEAFGNIEECTILRGPDGNSKGCAFVKYSSHAEAQAAINALHGSQTMPGASSSLVVKFADTDKERTMRRMQQMAGQMGMFNPMAIPFGAYGAYAQALMQQQAALMASVAQGGYLNPMAAFAAAQMQQMAALNM

SEQ ID NO: 20756 - protein, 69 aa, Homo sapiens
  Payload ID: 4192
  Gene Symbol: CELF4
  Gene Name: CUGBP, Elav-like family member 4
  ENSP ID: ENSP00000471616
  MOD_RES (1)..(1): Any amino acid
XAYPAAYGQISQAFPQPPPMIPQQQREGFVSFDNPASAQTAIQAMNGFQIGMKRLKVQLKRPKDANRPY

SEQ ID NO: 20757 - protein, 485 aa, Homo sapiens
  Payload ID: 4192
  Gene Symbol: CELF4
  Gene Name: CUGBP, Elav-like family member 4
  ENSP ID: ENSP00000474788
MYIKMATLANGQADNASLSTNGLGSSPGSAGHMNGLSHSPGNPSTIPMKDHDAIKLFIGQIPRNLDEKDLKPLFEEFGKIYELTVLKDRFTGMHKGCAFLTYCERESALKAQSALHEQKTLPGMNRPIQVKPADSESRGGSSCLRQPPSQDRKLFVGMLNKQQSEDDVRRLFEAFGNIEECTILRGPDGNSKGCAFVKYSSHAEAQAAINALHGSQTMPGASSSLVVKFADTDKERTMRRMQQMAGQMGMFNPMAIPFGAYGAYAQAMQQQAALMASVAQGGYLNPMAAFAAAQMQQMAALNMNGLAAAPMTPTSGGSTPPGITAPAVPSIPSPIGVNGFTGLPPQANGQPAAEAVFANGIHPYPAQSPTAADPLQQAYAGVQQYAGPAAYPAAYGQISQAFPQPPPMIPQQQREGPEGCNLFIYHLPQEFGDAELMQMFLPFGFVSFDNPASAQTAIQAMNGFQIGMKRLKVQLKRPKDANRPY

SEQ ID NO: 20758 - protein, 485 aa, Homo sapiens
  Payload ID: 4193
  Gene Symbol: CELF5
  Gene Name: CUGBP, Elav-like family member 5
  Uniprot ID: Q8N6W0
  ENSP ID: ENSP00000292672
MARLTESEARRQQQQLLQPRPSPVGSSGPEPPGGQPDGMKDLDAIKLFVGQIPRHLDEKDLKPLFEQFGRIYELTVLKDPYTGMHKGCAFLTYCARDSAIKAQTALHEQKTLPGMARPIQVKPADSESRGGRDRKLFVGMLNKQQSEEDVLRLFQPFGVIDECTVLRGPDGSSKGCAFVKFSSHTEAQAAIHALHGSQTMPGASSSLVVKFADTDKERTLRRMQQMVGQLGILTPSLTLPFSPYSAYAQALMQQQTTVLSTSGSYLSPGVAFSPCHIQQIGAVSLNGLPATPIAPASGLHSPPLLGTTAVPGLVAPITNGFAGVVPFPGGHPALETVYANGLVPYPAQSPTVAETLHPAFSGVQQYTAMYPTAAITPIAHSVPQPPPLLQQQQREGPEGCNLFIYHLPQEFGDTELTQMFLPFGNIISSKVFMDRATNQSKCFGFVSFDNPASAQAAIQAMNGFQIGMKRLKVQLKRPKDPGHPY

SEQ ID NO: 20759 - protein, 320 aa, Homo sapiens
  Payload ID: 4193
  Gene Symbol: CELF5
  Gene Name: CUGBP, Elav-like family member 5
  ENSP ID: ENSP00000335182
MARPIQVKPADSESRGGRDRKLFVGMLNKQQSEEDVLRLFQPFGVIDECTVLRGPDGSSKGCAFVKFSSHTEAQAAIHALHGSQTMPGASSSLVVKFADTDKERTLRRMQQMVGQLGILTPSLTLPFSPYSAYAQALMQQQTTVLSTSGSYLSPGVAFSPCHIQQIGAVSLNGLPATPIAPASGLHSPPLLGTTAVPGLVAPITNGFAGVVPFPGGHPALETVYANGLVPYPAQSPTVAETLHPAFSGVQQYTAMYPTAAITPIAHSVPQPPPLLQQQQREGVWRHGADADVPTLRQYHFLQGVYGSSYQPEQVFRLREL

SEQ ID NO: 20760 - protein, 409 aa, Homo sapiens
  Payload ID: 4193
  Gene Symbol: CELF5
  Gene Name: CUGBP, Elav-like family member 5
  Uniprot ID: Q8N6W0
  ENSP ID: ENSP00000443498
MARLTESEARRQQQQLLQPRPSPVGSSGPEPPGGQPDGMKDLDAIKLFVGQIPRHLDEKDLKPLFEQFGRIYELTVLKDPYTGMHKGCAFLTYCARDSAIKAQTALHEQKTLPGMARPIQVKPADSESRGGRDRKLFVGMLNKQQSEEDVLRLFQPFGVIDECTVLRGPDGSSKGCAFVKFSSHTEAQAAIHALHGSQTMPGASSSLVVKFADTDKERTLRRMQQMVGQLGILTPSLTLPFSPYSAYAQALMQQQTTVLSTSGSYLSPGVAFSPCHIQQIGAVSLNGLPATPIAPASGVVPFPGGHPALETVYANGLVPYPAQSPTVAETLHPAFSGVQQYTAMYPTAAITPIAHSVPQPPPLLQQQQREGVWRHGADADVPTLRQYHFLQGVYGSSYQPEQVFRLREL

SEQ ID NO: 20761 - protein, 295 aa, Homo sapiens
  Payload ID: 4193
  Gene Symbol: CELF5
  Gene Name: CUGBP, Elav-like family member 5
  ENSP ID: ENSP00000468503
MLNKQQSEEDVLRLFQPFGVIDECTVLRGPDGSSKGCAFVKFSSHTEAQAAIHALHGSQTMPGASSSLVVKFADTDKERTLRRMQQMVGQLGILTPSLTLPFSPYSAYAQALMQQQTTVLSTSGSYLSPGVAFSPCHIQQIGAVSLNGLPATPIAPASGLHSPPLLGTTAVPGLVAPITNGFAGVVPFPGGHPALETVYANGLVPYPAQSPTVAETLHPAFSGVQQYTAMYPTAAITPIAHSVPQPPPLLQQQQREGVWRHGADADVPTLRQYHFLQGVYGSSYQPEQVFRLREL

SEQ ID NO: 20762 - protein, 481 aa, Homo sapiens
  Payload ID: 4194
  Gene Symbol: CELF6
  Gene Name: CUGBP, Elav-like family member 6
  Uniprot ID: Q96J87
  ENSP ID: ENSP00000287202
MAAAPGGSAQPAGPGPRLGFSTADSGVGMSGLNPGPAVPMKDHDAIKLFVGQIPRGLDEQDLKPLFEEFGRIYELTVLKDRLTGLHKGCAFLTYCARDSALKAQSALHEQKTLPGMNRPIQVKPAASEGRGEDRKLFVGMLGKQQGEEDVRRLFQPFGHIEECTVLRSPDGTSKGCAFVKFGSQGEAQAAIRGLHGSRTMAGASSSLVVKLADTDRERALRRMQQMAGHLGAFHPAPLPLGACGAYTTAILQHQAALLAAAQGPGLGPVAAVAAQMQHVAAFSLVAAPLLPAAAANSPPGSGPGTLPGLPAPIGVNGFGPLTPQTNGQPGSDTLYNNGLSPYPAQSPGVADPLQQAYAGMHHYAAAYPSAYAPVSTAFPQQPSALPQQQREGPEGCNLFIYHLPQEFGDAELIQTFLPFGAVVSAKVFVDRATNQSKCFGFVSFDNPTSAQTAIQAMNGFQIGMKRLKVQLKRPKDANRPY

SEQ ID NO: 20763 - protein, 368 aa, Homo sapiens
  Payload ID: 4194
  Gene Symbol: CELF6
  Gene Name: CUGBP, Elav-like family member 6
  Uniprot ID: Q96J87
  ENSP ID: ENSP00000378677
MISDPPSNNSWNSVLYLLEDRKLFVGMLGKQQGEEDVRRLFQPFGHIEECTVLRSPDGTSKGCAFVKFGSQGEAQAAIRGLHGSRTMAGASSSLVVKLADTDRERALRRMQQMAGHLGAFHPAPLPLGACGAYTTAILQHQAALLAAAQGPGLGPVAAVAAQMQHVAAFSLVAAPLLPAAAANSPPGSGPGTLPGLPAPIGVNGFGPLTPQTNGQPGSDTLYNNGLSPYPAQSPGVADPLQQAYAGMHHYAAAYPSAYAPVSTAFPQQPSALPQQQREGPEGCNLFIYHLPQEFGDAELIQTFLPFGAVVSAKVFVDRATNQSKCFGFVSFDNPTSAQTAIQAMNGFQIGMKRLKVQLKRPKDANRPY

SEQ ID NO: 20764 - protein, 133 aa, Homo sapiens
  Payload ID: 4194
  Gene Symbol: CELF6
  Gene Name: CUGBP, Elav-like family member 6
  ENSP ID: ENSP00000400439
SGLNPGPAVPMKDHDAIKLFVGQIPRGLDEQDLKPLFEEFGRIYELTVLKDRLTGLHKGCAFLTYCARDSALKAQSALHEQKTLPGRTESCLWGCWASSRVRRTSDACSSPLATSRSARSCGVLTAPVKAVPL

SEQ ID NO: 20765 - protein, 344 aa, Homo sapiens
  Payload ID: 4194
  Gene Symbol: CELF6
  Gene Name: CUGBP, Elav-like family member 6
  Uniprot ID: Q96J87
  ENSP ID: ENSP00000439956
MNRPIQVKPAASEGRGEDRKLFVGMLGKQQGEEDVRRLFQPFGHIEECTVLRSPDGTSKGCAFVKFGSQGEAQAAIRGLHGSRTMAGASSSLVVKLADTDRERALRRMQQMAGHLGAFHPAPLPLGACGAYTTAILQHQAALLAAAQGPGLGPVAAVAAQMQHVAAFSLVAAPLLPAAANSPPGSGPGTLPGLPAPIGVNGFGPLTPQTNGQPGSDTLYNNGLSPYPAAYPSAYAPVSTAFPQQPSALPQQQREGPEGCNLFIYHLPQEFGDAELIQTFLPFGAVVSAKVFVDRATNQSKCFGFVSFDNPTSAQTAIQAMNGFQIGMKRLKVQLKRPKDANRPY

SEQ ID NO: 20766 - protein, 454 aa, Homo sapiens
  Payload ID: 4194
  Gene Symbol: CELF6
  Gene Name: CUGBP, Elav-like family member 6
  Uniprot ID: Q96J87
  ENSP ID: ENSP00000457863
MAAAPGGSAQPAGPGPRLGFSTADSGVGMSGLNPGPAVPMKDHDAIKLFVGQIPRGLDEQDLKPLFEEFGRIYELTVLKDRLTGLHKGCAFLTYCARDSALKAQSALHEQKTLPGMNRPIQVKPAASEGRGEDRKLFVGMLGKQQGEEDVRRLFQPFGHIEECTVLRSPDGTSKGCAFVKFGSQGEAQAAIRGLHGSRTMAGASSSLVVKLADTDRERALRRMQQMAGHLGAFHPAPLPLGACGAYTTAILQHQAALLAAAQGPGLGPVAAVAAQMQHVAAFSLVAAPLLPAAAANSPPGSGPGTLPGLPAPIGVNGFGPLTPQTNGQPGSDTLYNNGLSPYPAQSPGVADPLQQAYAGMHHYAGPEGCNLFIYHLPQEFGDAELIQTFLPFGAVVSAKVFVDRATNQSKCFGFVSFDNPTSAQTAIQAMNGFQIGMKRLKVQLKRPKDANRPY

SEQ ID NO: 20767 - protein, 776 aa, Homo sapiens
  Payload ID: 4195
  Gene Symbol: CUL1
  Gene Name: cullin 1
  Uniprot ID: Q13616
  ENSP ID: ENSP00000326804
MSSTRSQNPHGLKQIGLDQIWDDLRAGIQQVYTRQSMAKSRYMELYTHVYNYCTSVHQSNQARGAGVPPSKSKKGQTPGGAQFVGLELYKRLKEFLKNYLTNLLKDGEDLMDESVLKFYTQQWEDYRFSSKVLNGICAYLNRHWVRRECDEGRKGIYEIYSLALVTWRDCLFRPLNKQVTNAVLKLIEKERNGETINTRLISGVVQSYVELGLNEDDAFAKGPTLTVYKESFESQFLADTERFYTRESTEFLQQNPVTEYMKKAEARLLEEQRRVQVYLHESTQDELARKCEQVLIEKHLEIFHTEFQNLLDADKNEDLGRMYNLVSRIQDGLGELKKLLETHIHNQGLAAIEKCGEAALNDPKMYVQTVLDVHKKYNALVMSAFNNDAGFVAALDKACGRFINNNAVTKMAQSSSKSPELLARYCDSLLKKSSKNPEEAELEDTLNQVMVVFKYIEDKDVFQKFYAKMLAKRLVHQNSASDDAEASMISKLKQACGFEYTSKLQRMFQDIGVSKDLNEQFKKHLTNSEPLDLDFSIQVLSSGSWPFQQSCTFALPSELERSYQRFTAFYASRHSGRKLTWLYQLSKGELVTNCFKNRYTLQASTFQMAILLQYNTEDAYTVQQLTDSTQIKMDILAQVLQILLKSKLLVLEDENANVDEVELKPDTLIKLYLGYKNKKLRVNINVPMKTEQKQEQETTHKNIEEDRKLLIQAAIVRIMKMRKVLKHQQLLGEVLTQLSSRFKPRVPVIKKCIDILIEKEYLERVDGEKDTYSYLA

SEQ ID NO: 20768 - protein, 776 aa, Homo sapiens; identical to SEQ ID NO: 20767
  Payload ID: 4195
  Gene Symbol: CUL1
  Gene Name: cullin 1
  Uniprot ID: Q13616
  ENSP ID: ENSP00000387160

SEQ ID NO: 20769 - protein, 776 aa, Homo sapiens; identical to SEQ ID NO: 20767
  Payload ID: 4195
  Gene Symbol: CUL1
  Gene Name: cullin 1
  Uniprot ID: Q13616
  ENSP ID: ENSP00000473318

SEQ ID NO: 20770 - protein, 752 aa, Homo sapiens
  Payload ID: 4195
  Gene Symbol: CUL1
  Gene Name: cullin 1
  ENSP ID: ENSP00000482123
MSSTRSQNPHGLKQIGLDQIWDDLRAGIQQVYTRQSMAKSRYMELYTHVYNYCTSVHQFVGLELYKRLKEFLKNYLTNLLKDGEDLMDESVLKFYTQQWEDYRFSSKVLNGICAYLNRHWVRRECDEGRKGIYEIYSLALVTWRDCLFRPLNKQVTNAVLKLIEKERNGETINTRLISGVVQSYVELGLNEDDAFAKGPTLTVYKESFESQFLADTERFYTRESTEFLQQNPVTEYMKKAEARLLEEQRRVQVYLHESTQDELARKCEQVLIEKHLEIFHTEFQNLLDADKNEDLGRMYNLVSRIQDGLGELKKLLETHIHNQGLAAIEKCGEAALNDPKMYVQTVLDVHKKYNALVMSAFNNDAGFVAALDKACGRFINNNAVTKMAQSSSKSPELLARYCDSLLKKSSKNPEEAELEDTLNQVMVVFKYIEDKDVFQKFYAKMLAKRLVHQNSASDDAEASMISKLKQACGFEYTSKLQRMFQDIGVSKDLNEQFKKHLTNSEPLDLDFSIQVLSSGSWPFQQSCTFALPSELERSYQRFTAFYASRHSGRKLTWLYQLSKGELVTNCFKNRYTLQASTFQMAILLQYNTEDAYTVQQLTDSTQIKMDILAQVLQILLKSKLLVLEDENANVDEVELKPDTLIKLYLGYKNKKLRVNINVPMKTEQKQEQETTHKNIEEDRKLLIQAAIVRIMKMRKVLKHQQLLGEVLTQLSSRFKPRVPVIKKCIDILIEKEYLERVDGEKDTYSYLA

SEQ ID NO: 20771 - protein, 706 aa, Homo sapiens
  Payload ID: 4196
  Gene Symbol: CUL2
  Gene Name: cullin 2
  ENSP ID: ENSP00000363878
MSLKPRVVDFDETWNKLLTTIKAVVMLEYVERATWNDRFSDIYALCVAYPEPLGERLYTETKIFLENHVRHLHKRVLESEEQVLVMYHRYWEEYSKGADYMDCLYRYLNTQFIKKNKLTEADLQYGYGGVDMNEPLMEIGELALDMWRKLMVEPLQAILIRMLLREIKNDRGGEDPNQKVIHGVINSFVHVEQYKKKFPLKFYQEIFESPFLTETGEYYKQEASNLLQESNCSQYMEKVLGRLKDEEIRCRKYLHPSSYTKVIHECQQRMVADHLQFLHAECHNIIRQEKKNDMANMYVLLRAVSTGLPHMIQELQNHIHDEGLRATSNLTQENMPTLFVESVLEVHGKFVQLINTVLNGDQHFMSALDKALTSVVNYREPKSVCKAPELLAKYCDNLLKKSAKGMTENEVEDRLTSFITVFKYIDDKDVFQKFYARMLAKRLIHGLSMSMDSEEAMINKLKQACGYEFTSKLHRMYTDMSVSADLNNKFNNFIKNQDTVIDLGISFQIYVLQAGAWPLTQAPSSTFAIPQELEKSVQMFELFYSQHFSGRKLTWLHYLCTGEVKMNYLGKPYVAMVTTYQMAVLLAFNNSETVSYKELQDSTQMNEKELTKTIKSLLDVKMINHDSEKEDIDAESSFSLNMNFSSKRTKFKITTSMQKDTPQVISQSRARFNPSISMIKKCIEVLIDKQYIERSQASADEYSYVA

SEQ ID NO: 20772 - protein, 745 aa, Homo sapiens
  Payload ID: 4196
  Gene Symbol: CUL2
  Gene Name: cullin 2
  Uniprot ID: Q13617
  ENSP ID: ENSP00000363880
MSLKPRVVDFDETWNKLLTTIKAVVMLEYVERATWNDRFSDIYALCVAYPEPLGERLYTETKIFLENHVRHLHKRVLESEEQVLVMYHRYWEEYSKGADYMDCLYRYLNTQFIKKNKLTEADLQYGYGGVDMNEPLMEIGELALDMWRKLMVEPLQAILIRMLLREIKNDRGGEDPNQKVIHGVINSFVHVEQYKKKFPLKFYQEIFESPFLTETGEYYKQEASNLLQESNCSQYMEKVLGRLKDEEIRCRKYLHPSSYTKVIHECQQRMVADHLQFLHAECHNIIRQEKKNDMANMYVLLRAVSTGLPHMIQELQNHIHDEGLRATSNLTQENMPTLFVESVLEVHGKFVQLINTVLNGDQHFMSALDKALTSVVNYREPKSVCKAPELLAKYCDNLLKKSAKGMTENEVEDRLTSFITVFKYIDDKDVFQKFYARMLAKRLIHGLSMSMDSEEAMINKLKQACGYEFTSKLHRMYTDMSVSADLNNKFNNFIKNQDTVIDLGISFQIYVLQAGAWPLTQAPSSTFAIPQELEKSVQMFELFYSQHFSGRKLTWLHYLCTGEVKMNYLGKPYVAMVTTYQMAVLLAFNNSETVSYKELQDSTQMNEKELTKTIKSLLDVKMINHDSEKEDIDAESSFSLNMNFSSKRTKFKITTSMQKDTPQEMEQTRSAVDEDRKMYLQAAIVRIMKARKVLRHNALIQEVISQSRARFNPSISMIKKCIEVLIDKQYIERSQASADEYSYVA

SEQ ID NO: 20773 - protein, 745 aa, Homo sapiens; identical to SEQ ID NO: 20772
  Payload ID: 4196
  Gene Symbol: CUL2
  Gene Name: cullin 2
  Uniprot ID: Q13617
  ENSP ID: ENSP00000363881

SEQ ID NO: 20774 - protein, 745 aa, Homo sapiens; identical to SEQ ID NO: 20772
  Payload ID: 4196
  Gene Symbol: CUL2
  Gene Name: cullin 2
  Uniprot ID: Q13617
  ENSP ID: ENSP00000363883

SEQ ID NO: 20775 - protein, 90 aa, Homo sapiens
  Payload ID: 4196
  Gene Symbol: CUL2
  Gene Name: cullin 2
  ENSP ID: ENSP00000363886
MSLKPRVVDFDETWNKLLTTIKAVVMLEYVERATWNDRFSDIYALCVAYPEPLGERLYTETKIFLENHVRHLHKVLGRIQQGCRLYGLLI

SEQ ID NO: 20776 - protein, 764 aa, Homo sapiens
  Payload ID: 4196
  Gene Symbol: CUL2
  Gene Name: cullin 2
  Uniprot ID: Q13617
  ENSP ID: ENSP00000414095
MYRVTWSTFWLRFQHYTCTMSLKPRVVDFDETWNKLLTTIKAVVMLEYVERATWNDRFSDIYALCVAYPEPLGERLYTETKIFLENHVRHLHKRVLESEEQVLVMYHRYWEEYSKGADYMDCLYRYLNTQFIKKNKLTEADLQYGYGGVDMNEPLMEIGELALDMWRKLMVEPLQAILIRMLLREIKNDRGGEDPNQKVIHGVINSFVHVEQYKKKFPLKFYQEIFESPFLTETGEYYKQEASNLLQESNCSQYMEKVLGRLKDEEIRCRKYLHPSSYTKVIHECQQRMVADHLQFLHAECHNIIRQEKKNDMANMYVLLRAVSTGLPHMIQELQNHIHDEGLRATSNLTQENMPTLFVESVLEVHGKFVQLINTVLNGDQHFMSALDKALTSVVNYREPKSVCKAPELLAKYCDNLLKKSAKGMTENEVEDRLTSFITVFKYIDDKDVFQKFYARMLAKRLIHGLSMSMDSEEAMINKLKQACGYEFTSKLHRMYTDMSVSADLNNKFNNFIKNQDTVIDLGISFQIYVLQAGAWPLTQAPSSTFAIPQELEKSVQMFELFYSQHFSGRKLTWLHYLCTGEVKMNYLGKPYVAMVTTYQMAVLLAFNNSETVSYKELQDSTQMNEKELTKTIKSLLDVKMINHDSEKEDIDAESSFSLNMNFSSKRTKFKITTSMQKDTPQEMEQTRSAVDEDRKMYLQAAIVRIMKARKVLRHNALIQEVISQSRARFNPSISMIKKCIEVLIDKQYIERSQASADEYSYVA

SEQ ID NO: 20777 - protein, 758 aa, Homo sapiens
  Payload ID: 4196
  Gene Symbol: CUL2
  Gene Name: cullin 2
  ENSP ID: ENSP00000444856
MVPGKEFQHYTCTMSLKPRVVDFDETWNKLLTTIKAVVMLEYVERATWNDRFSDIYALCVAYPEPLGERLYTETKIFLENHVRHLHKRVLESEEQVLVMYHRYWEEYSKGADYMDCLYRYLNTQFIKKNKLTEADLQYGYGGVDMNEPLMEIGELALDMWRKLMVEPLQAILIRMLLREIKNDRGGEDPNQKVIHGVINSFVHVEQYKKKFPLKFYQEIFESPFLTETGEYYKQEASNLLQESNCSQYMEKVLGRLKDEEIRCRKYLHPSSYTKVIHECQQRMVADHLQFLHAECHNIIRQEKKNDMANMYVLLRAVSTGLPHMIQELQNHIHDEGLRATSNLTQENMPTLFVESVLEVHGKFVQLINTVLNGDQHFMSALDKALTSVVNYREPKSVCKAPELLAKYCDNLLKKSAKGMTENEVEDRLTSFITVFKYIDDKDVFQKFYARMLAKRLIHGLSMSMDSEEAMINKLKQACGYEFTSKLHRMYTDMSVSADLNNKFNNFIKNQDTVIDLGISFQIYVLQAGAWPLTQAPSSTFAIPQELEKSVQMFELFYSQHFSGRKLTWLHYLCTGEVKMNYLGKPYVAMVTTYQMAVLLAFNNSETVSYKELQDSTQMNEKELTKTIKSLLDVKMINHDSEKEDIDAESSFSLNMNFSSKRTKFKITTSMQKDTPQEMEQTRSAVDEDRKMYLQAAIVRIMKARKVLRHNALIQEVISQSRARFNPSISMIKKCIEVLIDKQYIERSQASADEYSYVA

SEQ ID NO: 20778 - protein, 706 aa, Homo sapiens; identical to SEQ ID NO: 20771
  Payload ID: 4196
  Gene Symbol: CUL2
  Gene Name: cullin 2
  ENSP ID: ENSP00000485986

SEQ ID NO: 20779 - protein, 768 aa, Homo sapiens
  Payload ID: 4197
  Gene Symbol: CUL3
  Gene Name: cullin 3
  Uniprot ID: Q13618
  ENSP ID: ENSP00000264414
MSNLSKGTGSRKDTKMRIRAFPMTMDEKYVNSIWDLLKNAIQEIQRKNNSGLSFEELYRNAYTMVLHKHGEKLYTGLREVVTEHLINKVREDVLNSLNNNFLQTLNQAWNDHQTAMVMIRDILMYMDRVYVQQNNVENVYNLGLIIFRDQVVRYGCIRDHLRQTLLDMIARERKGEVVDRGAIRNACQMLMILGLEGRSVYEEDFEAPFLEMSAEFFQMESQKFLAENSASVYIKKVEARINEEIERVMHCLDKSTEEPIVKVVERELISKHMKTIVEMENSGLVHMLKNGKTEDLGCMYKLFSRVPNGLKTMCECMSSYLREQGKALVSEEGEGKNPVDYIQGLLDLKSRFDRFLLESFNNDRLFKQTIAGDFEYFLNLNSRSPEYLSLFIDDKLKKGVKGLTEQEVETILDKAMVLFRFMQEKDVFERYYKQHLARRLLTNKSVSDDSEKNMISKLKTECGCQFTSKLEGMFRDMSISNTTMDEFRQHLQATGVSLGGVDLTVRVLTTGYWPTQSATPKCNIPPAPRHAFEIFRRFYLAKHSGRQLTLQHHMGSADLNATFYGPVKKEDGSEVGVGGAQVTGSNTRKHILQVSTFQMTILMLFNNREKYTFEEIQQETDIPERELVRALQSLACGKPTQRVLTKEPKSKEIENGHIFTVNDQFTSKLHRVKIQTVAAKQGESDPERKETRQKVDDDRKHEIEAAIVRIMKSRKKMQHNVLVAEVTQQLKARFLPSPVVIKKRIEGLIEREYLARTPEDRKVYTYVA

SEQ ID NO: 20780 - protein, 702 aa, Homo sapiens
  Payload ID: 4197
  Gene Symbol: CUL3
  Gene Name: cullin 3
  Uniprot ID: Q13618
  ENSP ID: ENSP00000343601
MSNLSKGTGSRKDTKMRIRAFPVREDVLNSLNNNFLQTLNQAWNDHQTAMVMIRDILMYMDRVYVQQNNVENVYNLGLIIFRDQVVRYGCIRDHLRQTLLDMIARERKGEVVDRGAIRNACQMLMILGLEGRSVYEEDFEAPFLEMSAEFFQMESQKFLAENSASVYIKKVEARINEEIERVMHCLDKSTEEPIVKVVERELISKHMKTIVEMENSGLVHMLKNGKTEDLGCMYKLFSRVPNGLKTMCECMSSYLREQGKALVSEEGEGKNPVDYIQGLLDLKSRFDRFLLESFNNDRLFKQTIAGDFEYFLNLNSRSPEYLSLFIDDKLKKGVKGLTEQEVETILDKAMVLFRFMQEKDVFERYYKQHLARRLLTNKSVSDDSEKNMISKLKTECGCQFTSKLEGMFRDMSISNTTMDEFRQHLQATGVSLGGVDLTVRVLTTGYWPTQSATPKCNIPPAPRHAFEIFRRFYLAKHSGRQLTLQHHMGSADLNATFYGPVKKEDGSEVGVGGAQVTGSNTRKHILQVSTFQMTILMLFNNREKYTFEEIQQETDIPERELVRALQSLACGKPTQRVLTKEPKSKEIENGHIFTVNDQFTSKLHRVKIQTVAAKQGESDPERKETRQKVDDDRKHEIEAAIVRIMKSRKKMQHNVLVAEVTQQLKARFLPSPVVIKKRIEGLIEREYLARTPEDRKVYTYVA

SEQ ID NO: 20781 - protein, 744 aa, Homo sapiens
  Payload ID: 4197
  Gene Symbol: CUL3
  Gene Name: cullin 3
  Uniprot ID: Q13618
  ENSP ID: ENSP00000386525
MDEKYVNSIWDLLKNAIQEIQRKNNSGLSFEELYRNAYTMVLHKHGEKLYTGLREVVTEHLINKVREDVLNSLNNNFLQTLNQAWNDHQTAMVMIRDILMYMDRVYVQQNNVENVYNLGLIIFRDQVVRYGCIRDHLRQTLLDMIARERKGEVVDRGAIRNACQMLMILGLEGRSVYEEDFEAPFLEMSAEFFQMESQKFLAENSASVYIKKVEARINEEIERVMHCLDKSTEEPIVKVVERELISKHMKTIVEMENSGLVHMLKNGKTEDLGCMYKLFSRVPNGLKTMCECMSSYLREQGKALVSEEGEGKNPVDYIQGLLDLKSRFDRFLLESFNNDRLFKQTIAGDFEYFLNLNSRSPEYLSLFIDDKLKKGVKGLTEQEVETILDKAMVLFRFMQEKDVFERYYKQHLARRLLTNKSVSDDSEKNMISKLKTECGCQFTSKLEGMFRDMSISNTTMDEFRQHLQATGVSLGGVDLTVRVLTTGYWPTQSATPKCNIPPAPRHAFEIFRRFYLAKHSGRQLTLQHHMGSADLNATFYGPVKKEDGSEVGVGGAQVTGSNTRKHILQVSTFQMTILMLFNNREKYTFEEIQQETDIPERELVRALQSLACGKPTQRVLTKEPKSKEIENGHIFTVNDQFTSKLHRVKIQTVAAKQGESDPERKETRQKVDDDRKHEIEAAIVRIMKSRKKMQHNVLVAEVTQQLKARFLPSPVVIKKRIEGLIEREYLARTPEDRKVYTYVA

SEQ ID NO: 20782 - protein, 744 aa, Homo sapiens; identical to SEQ ID NO: 20781
  Payload ID: 4197
  Gene Symbol: CUL3
  Gene Name: cullin 3
  Uniprot ID: Q13618
  ENSP ID: ENSP00000387200

SEQ ID NO: 20783 - protein, 43 aa, Homo sapiens
  Payload ID: 4197
  Gene Symbol: CUL3
  Gene Name: cullin 3
  ENSP ID: ENSP00000400558
HILQVSTFQMTILMLFNNREKYTFELLPNKVNPTQRGKKQGRK

SEQ ID NO: 20784 - protein, 192 aa, Homo sapiens
  Payload ID: 4197
  Gene Symbol: CUL3
  Gene Name: cullin 3
  ENSP ID: ENSP00000400935
  MOD_RES (1)..(1): Any amino acid
XVESDKSQGQSSQGENDLNGSGKVVYKRCRGIMFSKRKLRYTEMTMDEKYVNSIWDLLKNAIQEIQRKNNSGLSFEELYRNAYTMVLHKHGEKLYTGLREVVTEHLINKVREDVLNSLNNNFLQTLNQAWNDHQTAMVMIRDILMYMDRVYVQQNNVENVYNLGLIIFRDQVVRYGCIRDHLRQTLLDMIAR

SEQ ID NO: 20785 - protein, 111 aa, Homo sapiens
  Payload ID: 4197
  Gene Symbol: CUL3
  Gene Name: cullin 3
  ENSP ID: ENSP00000410575
  MOD_RES (1)..(1): Any amino acid
XLTLQHHMGSADLNATFYGPVKKEDGSEVGVGGAQVTGSNTRKHILQVSTFQMTILMLFNNREKYTFEVTQQLKARFLPSPVVIKKRIEGLIEREYLARTPEDRKVYTYVA

SEQ ID NO: 20786 - protein, 342 aa, Homo sapiens
  Payload ID: 4197
  Gene Symbol: CUL3
  Gene Name: cullin 3
  ENSP ID: ENSP00000477851
MYLNVIINNTWQGDFSQIKVFLMTLKNMISKLKTECGCQFTSKLEGMFRDMSISNTTMDEFRQHLQATGVSLGGVDLTVRVLTTGYWPTQSATPKCNIPPAPRHAFEIFRRFYLAKHSGRQLTLQHHMGSADLNATFYGPVKKEDGSEVGVGGAQVTGSNTRKHILQVSTFQMTILMLFNNREKYTFEEIQQETDIPERELVRALQSLACGKPTQRVLTKEPKSKEIENGHIFTVNDQFTSKLHRVKIQTVAAKQGESDPERKETRQKVDDDRKHEIEAAIVRIMKSRKKMQHNVLVAEVTQQLKARFLPSPVVIKKRIEGLIEREYLARTPEDRKVYTYVA

SEQ ID NO: 20787 - protein, 55 aa, Homo sapiens
  Payload ID: 4197
  Gene Symbol: CUL3
  Gene Name: cullin 3
  ENSP ID: ENSP00000484410
DLLKNAIQEIQRKNNSGLSFEELYRNAYTMVLHKHGEKLYTGLREVVTEHLINKE

SEQ ID NO: 20788 - protein, 667 aa, Homo sapiens
  Payload ID: 4198
  Gene Symbol: CUL4A
  Gene Name: cullin 4A
  ENSP ID: ENSP00000322132
MLYKQLRQACEDHVQAQILPFREDSLDSVLFLKKINTCWQDHCRQMIMIRSIFLFLDRTYVLQNSTLPSICPVSYCLYRDMGLELFRTHIISDKMVQSKTIDGILLLIERERSGEAVDRSLLRSLLGMLSDLQVYKDSFELKFLEETNCLYAAEGQRLMQEREVPEYLNHVSKRLEEEGDRVITYLDHSTQKPLIACVEKQLLGEHLTAILQKGLDHLLDENRVPDLAQMYQLFSRVRGGQQALLQHWSEYIKTFGTAIVINPEKDKDMVQDLLDFKDKVDHVIEVCFQKNERFVNLMKESFETFINKRPNKPAELIAKHVDSKLRAGNKEATDEELERTLDKIMILFRFIHGKDVFEAFYKKDLAKRLLVGKSASVDAEKSMLSKLKHECGAAFTSKLEGMFKDMELSKDIMVHFKQHMQNQSDSGPIDLTVNILTMGYWPTYTPMEVHLTPEMIKLQEVFKAFYLGKHSGRKLQWQTTLGHAVLKAEFKEGKKEFQVSLFQTLVLLMFNEGDGFSFEEIKMATGIEDSELRRTLQSLACGKARVLIKSPKGKEVEDGDKFIFNGEFKHKLFRIKINQIQMKETVEEQVSTTERVFQDRQYQIDAAIVRIMKMRKTLGHNLLVSELYNQLKFPVKPGDLKKRIESLIDRDYMERDKDNPNQYHYVA

SEQ ID NO: 20789 - protein, 759 aa, Homo sapiens
  Payload ID: 4198
  Gene Symbol: CUL4A
  Gene Name: cullin 4A
  Uniprot ID: Q13619
  ENSP ID: ENSP00000364589
MADEAPRKGSFSALVGRTNGLTKPAALAAAPAKPGGAGGSKKLVIKNFRDRPRLPDNYTQDTWRKLHEAVRAVQSSTSIRYNLEELYQAVENLCSHKVSPMLYKQLRQACEDHVQAQILPFREDSLDSVLFLKKINTCWQDHCRQMIMIRSIFLFLDRTYVLQNSTLPSIWDMGLELFRTHIISDKMVQSKTIDGILLLIERERSGEAVDRSLLRSLLGMLSDLQVYKDSFELKFLEETNCLYAAEGQRLMQEREVPEYLNHVSKRLEEEGDRVITYLDHSTQKPLIACVEKQLLGEHLTAILQKGLDHLLDENRVPDLAQMYQLFSRVRGGQQALLQHWSEYIKTFGTAIVINPEKDKDMVQDLLDFKDKVDHVIEVCFQKNERFVNLMKESFETFINKRPNKPAELIAKHVDSKLRAGNKEATDEELERTLDKIMILFRFIHGKDVFEAFYKKDLAKRLLVGKSASVDAEKSMLSKLKHECGAAFTSKLEGMFKDMELSKDIMVHFKQHMQNQSDSGPIDLTVNILTMGYWPTYTPMEVHLTPEMIKLQEVFKAFYLGKHSGRKLQWQTTLGHAVLKAEFKEGKKEFQVSLFQTLVLLMFNEGDGFSFEEIKMATGIEDSELRRTLQSLACGKARVLIKSPKGKEVEDGDKFIFNGEFKHKLFRIKINQIQMKETVEEQVSTTERVFQDRQYQIDAAIVRIMKMRKTLGHNLLVSELYNQLKFPVKPGDLKKRIESLIDRDYMERDKDNPNQYHYVA

SEQ ID NO: 20790 - protein, 659 aa, Homo sapiens
  Payload ID: 4198
  Gene Symbol: CUL4A
  Gene Name: cullin 4A
  Uniprot ID: Q13619
  ENSP ID: ENSP00000364590
MLYKQLRQACEDHVQAQILPFREDSLDSVLFLKKINTCWQDHCRQMIMIRSIFLFLDRTYVLQNSTLPSIWDMGLELFRTHIISDKMVQSKTIDGILLLIERERSGEAVDRSLLRSLLGMLSDLQVYKDSFELKFLEETNCLYAAEGQRLMQEREVPEYLNHVSKRLEEEGDRVITYLDHSTQKPLIACVEKQLLGEHLTAILQKGLDHLLDENRVPDLAQMYQLFSRVRGGQQALLQHWSEYIKTFGTAIVINPEKDKDMVQDLLDFKDKVDHVIEVCFQKNERFVNLMKESFETFINKRPNKPAELIAKHVDSKLRAGNKEATDEELERTLDKIMILFRFIHGKDVFEAFYKKDLAKRLLVGKSASVDAEKSMLSKLKHECGAAFTSKLEGMFKDMELSKDIMVHFKQHMQNQSDSGPIDLTVNILTMGYWPTYTPMEVHLTPEMIKLQEVFKAFYLGKHSGRKLQWQTTLGHAVLKAEFKEGKKEFQVSLFQTLVLLMFNEGDGFSFEEIKMATGIEDSELRRTLQSLACGKARVLIKSPKGKEVEDGDKFIFNGEFKHKLFRIKINQIQMKETVEEQVSTTERVFQDRQYQIDAAIVRIMKMRKTLGHNLLVSELYNQLKFPVKPGDLKKRIESLIDRDYMERDKDNPNQYHYVA

SEQ ID NO: 20791 - protein, 659 aa, Homo sapiens; identical to SEQ ID NO: 20790
  Payload ID: 4198
  Gene Symbol: CUL4A
  Gene Name: cullin 4A
  Uniprot ID: Q13619
  ENSP ID: ENSP00000389118

SEQ ID NO: 20792 - protein, 174 aa, Homo sapiens
  Payload ID: 4198
  Gene Symbol: CUL4A
  Gene Name: cullin 4A
  ENSP ID: ENSP00000480367
MADEAPRKGSFSALVGRTNGLTKPAALAAAPAKPGGAGGSKKLVIKNFRDRPRLPDNYTQDTWRKLHEAVRAVQSSTSIRYNLEELYQAVENLCSHKVSPMLYKQLRQACEDHVQAQILPFREDSLDSVLFLKKINTCWQDHCRQMIMIRSIFLFLDRTYVLQNSTLPSICQNH

SEQ ID NO: 20793 - protein, 659 aa, Homo sapiens; identical to SEQ ID NO: 20790
  Payload ID: 4198
  Gene Symbol: CUL4A
  Gene Name: cullin 4A
  Uniprot ID: Q13619
  ENSP ID: ENSP00000481782

SEQ ID NO: 20794 - protein, 900 aa, Homo sapiens
  Payload ID: 4199
  Gene Symbol: CUL4B
  Gene Name: cullin 4B
  ENSP ID: ENSP00000338919
MKSVCPVTSGFSSPSPSAAAAAQEVRSATDGNTSTTPPTSAKKRKLNSSSSSSSNSSNEREDFDSTSSSSSTPPLQPRDSASPSTSSFCLGVSVAASSHVPIQKKLRFEDTLEFVGFDAKMAEESSSSSSSSSPTAATSQQQQLKNKSILISSVASVHHANGLAKSSTTVSSFANSKPGSAKKLVIKNFKDKPKLPENYTDETWQKLKEAVEAIQNSTSIKYNLEELYQAVENLCSYKISANLYKQLRQICEDHIKAQIHQFREDSLDSVLFLKKIDRCWQNHCRQMIMIRSIFLFLDRTYVLQNSMLPSIWDMGLELFRAHIISDQKVQNKTIDGILLLIERERNGEAIDRSLLRSLLSMLSDLQIYQDSFEQRFLEETNRLYAAEGQKLMQEREVPEYLHHVNKRLEEEADRLITYLDQTTQKSLIATVEKQLLGEHLTAILQKGLNNLLDENRIQDLSLLYQLFSRVRGGVQVLLQQWIEYIKAFGSTIVINPEKDKTMVQELLDFKDKVDHIIDICFLKNEKFINAMKEAFETFINKRPNKPAELIAKYVDSKLRAGNKEATDEELEKMLDKIMIIFRFIYGKDVFEAFYKKDLAKRLLVGKSASVDAEKSMLSKLKHECGAAFTSKLEGMFKDMELSKDIMIQFKQYMQNQNVPGNIELTVNILTMGYWPTYVPMEVHLPPEMVKLQEIFKTFYLGKHSGRKLQWQSTLGHCVLKAEFKEGKKELQVSLFQTLVLLMFNEGEEFSLEEIKQATGIEDGELRRTLQSLACGKARVLAKNPKGKDIEDGDKFICNDDFKHKLFRIKINQIQMKETVEEQASTTERVFQDRQYQIDAAIVRIMKMRKTLSHNLLVSEVYNQLKFPVKPADLKKRIESLIDRDYMERDKENPNQYNYIA

SEQ ID NO: 20795 - protein, 895 aa, Homo sapiens
  Payload ID: 4199
  Gene Symbol: CUL4B
  Gene Name: cullin 4B
  Uniprot ID: Q13620
  ENSP ID: ENSP00000360373
MFPTGFSSPSPSAAAAAQEVRSATDGNTSTTPPTSAKKRKLNSSSSSSSNSSNEREDFDSTSSSSSTPPLQPRDSASPSTSSFCLGVSVAASSHVPIQKKLRFEDTLEFVGFDAKMAEESSSSSSSSSPTAATSQQQQLKNKSILISSVASVHHANGLAKSSTTVSSFANSKPGSAKKLVIKNFKDKPKLPENYTDETWQKLKEAVEAIQNSTSIKYNLEELYQAVENLCSYKISANLYKQLRQICEDHIKAQIHQFREDSLDSVLFLKKIDRCWQNHCRQMIMIRSIFLFLDRTYVLQNSMLPSIWDMGLELFRAHIISDQKVQNKTIDGILLLIERERNGEAIDRSLLRSLLSMLSDLQIYQDSFEQRFLEETNRLYAAEGQKLMQEREVPEYLHHVNKRLEEEADRLITYLDQTTQKSLIATVEKQLLGEHLTAILQKGLNNLLDENRIQDLSLLYQLFSRVRGGVQVLLQQWIEYIKAFGSTIVINPEKDKTMVQELLDFKDKVDHIIDICFLKNEKFINAMKEAFETFINKRPNKPAELIAKYVDSKLRAGNKEATDEELEKMLDKIMIIFRFIYGKDVFEAFYKKDLAKRLLVGKSASVDAEKSMLSKLKHECGAAFTSKLEGMFKDMELSKDIMIQFKQYMQNQNVPGNIELTVNILTMGYWPTYVPMEVHLPPEMVKLQEIFKTFYLGKHSGRKLQWQSTLGHCVLKAEFKEGKKELQVSLFQTLVLLMFNEGEEFSLEEIKQATGIEDGELRRTLQSLACGKARVLAKNPKGKDIEDGDKFICNDDFKHKLFRIKINQIQMKETVEEQASTTERVFQDRQYQIDAAIVRIMKMRKTLSHNLLVSEVYNQLKFPVKPADLKKRIESLIDRDYMERDKENPNQYNYIA

SEQ ID NO: 20796 - protein, 234 aa, Homo sapiens
  Payload ID: 4199
  Gene Symbol: CUL4B
  Gene Name: cullin 4B
  ENSP ID: ENSP00000360374
MIDPDFADKPKLPENYTDETWQKLKEAVEAIQNSTSIKYNLEELYQAVENLCSYKISANLYKQLRQICEDHIKAQIHQFREDSLDSVLFLKKIDRCWQNHCRQMIMIRSIFLFLDRTYVLQNSMLPSIWDMGLELFRAHIISDQKVQNKTIDGILLLIERERNGEAIDRSLLRSLLSMLSDLQIYQDSFEQRFLEETNRLYAAEGQKLMQEREVPEYLHHVNKRLEEEADRLIT

SEQ ID NO: 20797 - protein, 913 aa, Homo sapiens
  Payload ID: 4199
  Gene Symbol: CUL4B
  Gene Name: cullin 4B
  Uniprot ID: Q13620
  ENSP ID: ENSP00000384109
MMSQSSGSGDGNDDEATTSKDGGFSSPSPSAAAAAQEVRSATDGNTSTTPPTSAKKRKLNSSSSSSSNSSNEREDFDSTSSSSSTPPLQPRDSASPSTSSFCLGVSVAASSHVPIQKKLRFEDTLEFVGFDAKMAEESSSSSSSSSPTAATSQQQQLKNKSILISSVASVHHANGLAKSSTTVSSFANSKPGSAKKLVIKNFKDKPKLPENYTDETWQKLKEAVEAIQNSTSIKYNLEELYQAVENLCSYKISANLYKQLRQICEDHIKAQIHQFREDSLDSVLFLKKIDRCWQNHCRQMIMIRSIFLFLDRTYVLQNSMLPSIWDMGLELFRAHIISDQKVQNKTIDGILLLIERERNGEAIDRSLLRSLLSMLSDLQIYQDSFEQRFLEETNRLYAAEGQKLMQEREVPEYLHHVNKRLEEEADRLITYLDQTTQKSLIATVEKQLLGEHLTAILQKGLNNLLDENRIQDLSLLYQLFSRVRGGVQVLLQQWIEYIKAFGSTIVINPEKDKTMVQELLDFKDKVDHIIDICFLKNEKFINAMKEAFETFINKRPNKPAELIAKYVDSKLRAGNKEATDEELEKMLDKIMIIFRFIYGKDVFEAFYKKDLAKRLLVGKSASVDAEKSMLSKLKHECGAAFTSKLEGMFKDMELSKDIMIQFKQYMQNQNVPGNIELTVNILTMGYWPTYVPMEVHLPPEMVKLQEIFKTFYLGKHSGRKLQWQSTLGHCVLKAEFKEGKKELQVSLFQTLVLLMFNEGEEFSLEEIKQATGIEDGELRRTLQSLACGKARVLAKNPKGKDIEDGDKFICNDDFKHKLFRIKINQIQMKETVEEQASTTERVFQDRQYQIDAAIVRIMKMRKTLSHNLLVSEVYNQLKFPVKPADLKKRIESLIDRDYMERDKENPNQYNYIA

SEQ ID NO: 20798 - protein, 780 aa, Homo sapiens
  Payload ID: 4200
  Gene Symbol: CUL5
  Gene Name: cullin 5
  Uniprot ID: Q93034
  ENSP ID: ENSP00000376808
MATSNLLKNKGSLQFEDKWDFMRPIVLKLLRQESVTKQQWFDLFSDVHAVCLWDDKGPAKIHQALKEDILEFIKQAQARVLSHQDDTALLKAYIVEWRKFFTQCDILPKPFCQLEITLMGKQGSNKKSNVEDSIVRKLMLDTWNESIFSNIKNRLQDSAMKLVHAERLGEAFDSQLVIGVRESYVNLCSNPEDKLQIYRDNFEKAYLDSTERFYRTQAPSYLQQNGVQNYMKYADAKLKEEEKRALRYLETRRECNSVEALMECCVNALVTSFKETILAECQGMIKRNETEKLHLMFSLMDKVPNGIEPMLKDLEEHIISAGLADMVAAAETITTDSEKYVEQLLTLFNRFSKLVKEAFQDDPRFLTARDKAYKAVVNDATIFKLELPLKQKGVGLKTQPESKCPELLANYCDMLLRKTPLSKKLTSEEIEAKLKEVLLVLKYVQNKDVFMRYHKAHLTRRLILDISADSEIEENMVEWLREVGMPADYVNKLARMFQDIKVSEDLNQAFKEMHKNNKLALPADSVNIKILNAGAWSRSSEKVFVSLPTELEDLIPEVEEFYKKNHSGRKLHWHHLMSNGIITFKNEVGQYDLEVTTFQLAVLFAWNQRPREKISFENLKLATELPDAELRRTLWSLVAFPKLKRQVLLYEPQVNSPKDFTEGTLFSVNQEFSLIKNAKVQKRGKINLIGRLQLTTERMREEENEGIVQLRILRTQEAIIQIMKMRKKISNAQLQTELVEILKNMFLPQKKMIKEQIEWLIEHKYIRRDESDINTFIYMA

SEQ ID NO: 20799 - protein, 130 aa, Homo sapiens
  Payload ID: 4200
  Gene Symbol: CUL5
  Gene Name: cullin 5
  ENSP ID: ENSP00000431221
  MOD_RES (1)..(1): Any amino acid
XDVHAVCLWDDKGPAKIHQALKEDILEFIKQAQALMLDTWNESIFSNIKNRLQDSAMKLVHAERLGEAFDSQLVIGVRESYVNLCSNPEDKLQIYRDNFEKAYLDSTERFYRTQAPSYLQQNGVQNYMKY

SEQ ID NO: 20800 - protein, 780 aa, Homo sapiens; identical to SEQ ID NO: 20798
  Payload ID: 4200
  Gene Symbol: CUL5
  Gene Name: cullin 5
  Uniprot ID: Q93034
  ENSP ID: ENSP00000435376

SEQ ID NO: 20801 - protein, 47 aa, Homo sapiens
  Payload ID: 4200
  Gene Symbol: CUL5
  Gene Name: cullin 5
  ENSP ID: ENSP00000436494
MATSNLLKNKGSLQFEDKWDFMRPIVLKLLRQESVTKQQWFDLFSEY

SEQ ID NO: 20802 - protein, 1698 aa, Homo sapiens
  Payload ID: 4201
  Gene Symbol: CUL7
  Gene Name: cullin 7
  Uniprot ID: Q14999
  ENSP ID: ENSP00000265348
MVGELRYREFRVPLGPGLHAYPDELIRQRVGHDGHPEYQIRWLILRRGDEGDGGSGQVDCKAEHILLWMSKDEIYANCHKMLGEDGQVIGPSQESAGEVGALDKSVLEEMETDVKSLIQRALRQLEECVGTIPPAPLLHTVHVLSAYASIEPLTGVFKDPRVLDLLMHMLSSPDYQIRWSAGRMIQALSSHDAGTRTQILLSLSQQEAIEKHLDFDSRCALLALFAQATLSEHPMSFEGIQLPQVPGRVLFSLVKRYLHVTSLLDQLNDSAAEPGAQNTSAPEELSGERGQLELEFSMAMGTLISELVQAMRWDQASDRPRSSARSPGSIFQPQLADVSPGLPAAQAQPSFRRSRRFRPRSEFASGNTYALYVRDTLQPGMRVRMLDDYEEISAGDEGEFRQSNNGVPPVQVFWESTGRTYWVHWHMLEILGFEEDIEDMVEADEYQGAVASRVLGRALPAWRWRPMTELYAVPYVLPEDEDTEECEHLTLAEWWELLFFIKKLDGPDHQEVLQILQENLDGEILDDEILAELAVPIELAQDLLLTLPQRLNDSALRDLINCHVYKKYGPEALAGNQAYPSLLEAQEDVLLLDAQAQAKDSEDAAKVEAKEPPSQSPNTPLQRLVEGYGPAGKILLDLEQALSSEGTQENKVKPLLLQLQRQPQPFLALMQSLDTPETNRTLHLTVLRILKQLVDFPEALLLPWHEAVDACMACLRSPNTDREVLQELIFFLHRLTSVSRDYAVVLNQLGARDAISKALEKHLGKLELAQELRDMVFKCEKHAHLYRKLITNILGGCIQMVLGQIEDHRRTHQPINIPFFDVFLRYLCQGSSVEVKEDKCWEKVEVSSNPHRASKLTDHNPKTYWESNGSAGSHYITLHMRRGILIRQLTLLVASEDSSYMPARVVVCGGDSTSSLHTELNSVNVMPSASRVILLENLTRFWPIIQIRIKRCQQGGIDTRIRGLEILGPKPTFWPVFREQLCRHTRLFYMVRAQAWSQDMAEDRRSLLHLSSRLNGALRQEQNFADRFLPDDEAAQALGKTCWEALVSPVVQNITSPDEDGISPLGWLLDQYLECQEAVFNPQSRGPAFFSRVRRLTHLLVHVEPCEAPPPVVATPRPKGRNRSHDWSSLATRGLPSSIMRNLTRCWRAVVEKQVNNFLTSSWRDDDFVPRYCEHFNILQNSSSELFGPRAAFLLALQNGCAGALLKLPFLKAAHVSEQFARHIDQQIQGSRIGGAQEMERLAQLQQCLQAVLIFSGLEIATTFEHYYQHYMADRLLGVVSSWLEGAVLEQIGPCFPNRLPQQMLQSLSTSKELQRQFHVYQLQQLDQELLKLEDTEKKIQVGLGASGKEHKSEKEEEAGAAAVVDVAEGEEEEEENEDLYYEGAMPEVSVLVLSRHSWPVASICHTLNPRTCLPSYLRGTLNRYSNFYNKSQSHPALERGSQRRLQWTWLGWAELQFGNQTLHVSTVQMWLLLYLNDLKAVSVESLLAFSGLSADMLNQAIGPLTSSRGPLDLHEQKDIPGGVLKIRDGSKEPRSRWDIVRLIPPQTYLQAEGEDGQNLEKRRNLLNCLIVRILKAHGDEGLHIDQLVCLVLEAWQKGPCPPRGLVSSLGKGSACSSTDVLSCILHLLGKGTLRRHDDRPQVLSYAVPVTVMEPHTESLNPGSSGPNPPLTFHTLQIRSRGVPYASCTATQSFSTFR

SEQ ID NO: 20803 - protein, 1782 aa, Homo sapiens
  Payload ID: 4201
  Gene Symbol: CUL7
  Gene Name: cullin 7
  Uniprot ID: Q14999
  ENSP ID: ENSP00000438788
MSRGFWLAEPLAGTGPHPAPVAADSRGCSSVPRRHAPSRLSVSTPSRGPGARMVGELRYREFRVPLGPGLHAYPDELIRQRVGHDGHPEYQIRWLILRRGDEGDGGSGQVDCKAEHILLWMSKDEIYANCHKMLGEDGQVIGPSQESAGEVGALDKSVLEEMETDVKSLIQRALRQLEECVGTIPPAPLLHTVHVLSAYASIEPLTGVFKDPRVLDLLMHMLSSPDYQIRWSAGRMIQALSSHDAGEGQCGEEGKAGEGLGRLRDSQDTVAGASDLIRTRTQILLSLSQQEAIEKHLDFDSRCALLALFAQATLSEHPMSFEGIQLPQVPGRVLFSLVKRYLHVTSLLDQLNDSAAEPGAQNTSAPEELSGERGQLELEFSMAMGTLISELVQAMRWDQASDRPRSSARSPGSIFQPQLADVSPGLPAAQAQPSFRRSRRFRPRSEFASGNTYALYVRDTLQPGMRVRMLDDYEEISAGDEGEFRQSNNGVPPVQVFWESTGRTYWVHWHMLEILGFEEDIEDMVEADEYQGAVASRVLGRALPAWRWRPMTELYAVPYVLPEDEDTEECEHLTLAEWWELLFFIKKLDGPDHQEVLQILQENLDGEILDDEILAELAVPIELAQDLLLTLPQRLNDSALRDLINCHVYKKYGPEALAGNQAYPSLLEAQEDVLLLDAQAQAKDSEDAAKVEAKEPPSQSPNTPLQRLVEGYGPAGKILLDLEQALSSEGTQENKVKPLLLQLQRQPQPFLALMQSLDTPETNRTLHLTVLRILKQLVDFPEALLLPWHEAVDACMACLRSPNTDREVLQELIFFLHRLTSVSRDYAVVLNQLGARDAISKALEKHLGKLELAQELRDMVFKCEKHAHLYRKLITNILGGCIQMVLGQIEDHRRTHQPINIPFFDVFLRYLCQGSSVEVKEDKCWEKVEVSSNPHRASKLTDHNPKTYWESNGSAGSHYITLHMRRGILIRQLTLLVASEDSSYMPARVVVCGGDSTSSLHTELNSVNVMPSASRVILLENLTRFWPIIQIRIKRCQQGGIDTRIRGLEILGPKPTFWPVFREQLCRHTRLFYMVRAQAWSQDMAEDRRSLLHLSSRLNGALRQEQNFADRFLPDDEAAQALGKTCWEALVSPVVQNITSPDEDGISPLGWLLDQYLECQEAVFNPQSRGPAFFSRVRRLTHLLVHVEPCEAPPPVVATPRPKGRNRSHDWSSLATRGLPSSIMRNLTRCWRAVVEKQVNNFLTSSWRDDDFVPRYCEHFNILQNSSSELFGPRAAFLLALQNGCAGALLKLPFLKAAHVSEQFARHIDQQIQGSRIGGAQEMERLAQLQQCLQAVLIFSGLEIATTFEHYYQHYMADRLLGVVSSWLEGAVLEQIGPCFPNRLPQQMLQSLSTSKELQRQFHVYQLQQLDQELLKLEDTEKKIQVGLGASGKEHKSEKEEEAGAAAVVDVAEGEEEEEENEDLYYEGAMPEVSVLVLSRHSWPVASICHTLNPRTCLPSYLRGTLNRYSNFYNKSQSHPALERGSQRRLQWTWLGWAELQFGNQTLHVSTVQMWLLLYLNDLKAVSVESLLAFSGLSADMLNQAIGPLTSSRGPLDLHEQKDIPGGVLKIRDGSKEPRSRWDIVRLIPPQTYLQAEGEDGQNLEKRRNLLNCLIVRILKAHGDEGLHIDQLVCLVLEAWQKGPCPPRGLVSSLGKGSACSSTDVLSCILHLLGKGTLRRHDDRPQVLSYAVPVTVMEPHTESLNPGSSGPNPPLTFHTLQIRSRGVPYASCTATQSFSTFR

SEQ ID NO: 20804 - protein, 2517 aa, Homo sapiens
  Payload ID: 4202
  Gene Symbol: CUL9
  Gene Name: cullin 9
  Uniprot ID: Q8IWT3
  ENSP ID: ENSP00000252050
MVGERHAGDLMVPLGPRLQAYPEELIRQRPGHDGHPEYLIRWSVLKCGEVGKVGVEEGKAEHILMWLSAPEVYANCPGLLGERALSKGLQHEPAGVSGSFPRDPGGLDEVAMGEMEADVQALVRRAARQLAESGTPSLTAAVLHTIHVLSAYASIGPLTGVFRETGALDLLMHMLCNPEPQIRRSAGKMLQALAAHDAGSRAHVLLSLSQQDGIEQHMDFDSRYTLLELFAETTSSEEHCMAFEGIHLPQIPGKLLFSLVKRYLCVTSLLDQLNSSPELGAGDQSSPCATREKSRGQRELEFSMAVGNLISELVRSMGWARNLSEQGMSPPRPTRSIFQPYISGPSLLLPTIVTTPRRQGWVFRQRSEFSSRSGYGEYVQQTLQPGMRVRMLDDYEEISAGDEGEFRQSNNGIPPVQVFWQSTGRTYWVHWHMLEILGPEEATEDKASAAVEKGAGATVLGTAFPSWDWNPMDGLYPLPYLQPEPQKNERVGYLTQAEWWELLFFIKKLDLCEQQPIFQNLWKNLDETLGEKALGEISVSVEMAESLLQVLSSRFEGSTLNDLLNSQIYTKYGLLSNEPSSSSTSRNHSCTPDPEEESKSEASFSEEETESLKAKAEAPKTEAEPTKTRTETPMAQSDSQLFNQLLVTEGMTLPTEMKEAASEMARALRGPGPRSSLDQHVAAVVATVQISSLDTNLQLSGLSALSQAVEEVTERDHPLVRPDRSLREKLVKMLVELLTNQVGEKMVVVQALRLLYLLMTKHEWRPLFAREGGIYAVLVCMQEYKTSVLVQQAGLAALKMLAVASSSEIPTFVTGRDSIHSLFDAQMTREIFASIDSATRPGSESLLLTVPAAVILMLNTEGCSSAARNGLLLLNLLLCNHHTLGDQIITQELRDTLFRHSGIAPRTEPMPTTRTILMMLLNRYSEPPGSPERAALETPIIQGQDGSPELLIRSLVGGPSAELLLDLERVLCREGSPGGAVRPLLKRLQQETQPFLLLLRTLDAPGPNKTLLLSVLRVITRLLDFPEAMVLPWHEVLEPCLNCLSGPSSDSEIVQELTCFLHRLASMHKDYAVVLCCLGAKEILSKVLDKHSAQLLLGCELRDLVTECEKYAQLYSNLTSSILAGCIQMVLGQIEDHRRTHQPINIPFFDVFLRHLCQGSSVEVKEDKCWEKVEVSSNPHRASKLTDHNPKTYWESNGSTGSHYITLHMHRGVLVRQLTLLVASEDSSYMPARVVVFGGDSTSCIGTELNTVNVMPSASRVILLENLNRFWPIIQIRIKRCQQGGIDTRVRGVEVLGPKPTFWPLFREQLCRRTCLFYTIRAQAWSRDIAEDHRRLLQLCPRLNRVLRHEQNFADRFLPDDEAAQALGKTCWEALVSPLVQNITSPDAEGVSALGWLLDQYLEQRETSRNPLSRAASFASRVRRLCHLLVHVEPPPGPSPEPSTRPFSKNSKGRDRSPAPSPVLPSSSLRNITQCWLSVVQEQVSRFLAAAWRAPDFVPRYCKLYEHLQRAGSELFGPRAAFMLALRSGFSGALLQQSFLTAAHMSEQFARYIDQQIQGGLIGGAPGVEMLGQLQRHLEPIMVLSGLELATTFEHFYQHYMADRLLSFGSSWLEGAVLEQIGLCFPNRLPQLMLQSLSTSEELQRQFHLFQLQRLDKLFLEQEDEEEKRLEEEEEEEEEEEAEKELFIEDPSPAISILVLSPRCWPVSPLCYLYHPRKCLPTEFCDALDRFSSFYSQSQNHPVLDMGPHRRLQWTWLGRAELQFGKQILHVSTVQMWLLLKFNQTEEVSVETLLKDSDLSPELLLQALVPLTSGNGPLTLHEGQDFPHGGVLRLHEPGPQRSGEALWLIPPQAYLNVEKDEGRTLEQKRNLLSCLLVRILKAHGEKGLHIDQLVCLVLEAWQKGPNPPGTLGHTVAGGVACTSTDVLSCILHLLGQGYVKRRDDRPQILMYAAPEPMGPCRGQADVPFCGSQSETSKPSPEAVATLASLQLPAGRTMSPQEVEGLMKQTVRQVQETLNLEPDVAQHLLAHSHWGAEQLLQSYSEDPEPLLLAAGLCVHQAQAVPVRPDHCPVCVSPLGCDDDLPSLCCMHYCCKSCWNEYLTTRIEQNLVLNCTCPIADCPAQPTGAFIRAIVSSPEVISKYEKALLRGYVESCSNLTWCTNPQGCDRILCRQGLGCGTTCSKCGWASCFNCSFPEAHYPASCGHMSQWVDDGGYYDGMSVEAQSKHLAKLISKRCPSCQAPIEKNEGCLHMTCAKCNHGFCWRCLKSWKPNHKDYYNCSAMVSKAARQEKRFQDYNERCTFHHQAREFAVNLRNRVSAIHEVPPPRSFTFLNDACQGLEQARKVLAYACVYSFYSQDAEYMDVVEQQTENLELHTNALQILLEETLLRCRDLASSLRLLRADCLSTGMELLRRIQERLLAILQHSAQDFRVGLQSPSVEAWEAKGPNMPGSQPQASSGPEAEEEEEDDEDDVPEWQQDEFDEELDNDSFSYDESENLDQETFFFGDEEEDEDEAYD

SEQ ID NO: 20805 - protein, 2489 aa, Homo sapiens
  Payload ID: 4202
  Gene Symbol: CUL9
  Gene Name: cullin 9
  ENSP ID: ENSP00000361730
MVGERHAGDLMVPLGPRLQAYPEELIRQRPGHDGHPEYLIRWSVLKCGEVGKVGVEEGKAEHILMWLSAPEVYANCPGLLGERALSKGLQHEPAGVSGSFPRDPGGLDEVAMGEMEADVQALVRRAARQLAESGTPSLTAAVLHTIHVLSAYASIGPLTGVFRETGALDLLMHMLCNPEPQIRRSAGKMLQALAAHDAGSRAHVLLSLSQQDGIEQHMDFDSRYTLLELFAETTSSEEHCMAFEGIHLPQIPGKLLFSLVKRYLCVTSLLDQLNSSPELGAGDQSSPCATREKSRGQRELEFSMAVGNLISELVRSMGWARNLSEQGMSPPRPTRSIFQPYISGPSLLLPTIVTTPRRQGWVFRQRSEFSSRSGYGEYVQQTLQPGMRVRMLDDYEEISAGDEGEFRQSNNGIPPVQVFWQSTGRTYWVHWHMLEILGPEEATEDKASAAVEKGAGATVLGTAFPSWDWNPMDGLYPLPYLQPEPQKNERVGYLTQAEWWELLFFIKKLDLCEQQPIFQNLWKNLDETLGEKALGEISVSVEMAESLLQVLSSRFEGSTLNDLLNSQIYTKYGLLSNEPSSSSTSRNHSCTPDPEEESKSEASFSEEETESLKAKAEAPKTEAEPTKTRTETPMAQSDSQLFNQLLVTEGMTLPTEMKEAASEMARALRGPGPRSSLDQHVAAVVATVQISSLDTNLQLSGLSALSQAVEEVTERDHPLVRPDRSLREKLVKMLVELLTNQVGEKMVVVQALRLLYLLMTKHEWRPLFAREGGIYAVLVCMQEYKTSVLVQQAGLAALKMLAVASSSEIPTFVTGRDSIHSLFDAQMTREIFASIDSATRPGSESLLLTVPAAVILMLNTEGCSSAARNGLLLLNLLLCNHHTLGDQIITQELRDTLFRHSGIAPRTEPMPTTRTILMMLLNRYSEPPGSPERAALETPIIQGQDGSPELLIRSLVGGPSAELLLDLERVLCREGSPGGAVRPLLKRLQQETQPFLLLLRTLDAPGPNKTLLLSVLRVITRLLDFPEAMVLPWHEVLEPCLNCLSGPSSDSEIVQELTCFLHRLASMHKDYAVVLCCLGAKEILSKVLDKHSAQLLLGCELRDLVTECEKYAQLYSNLTSSILAGCIQMVLGQIEDHRRTHQPINIPFFDVFLRHLCQGSSVEVKEDKCWEKVEVSSNPHRASKLTDHNPKTYWESNGSTGSHYITLHMHRGVLVRQLTLLVASEDSSYMPARVVVFGGDSTSCIGTELNTVNVMPSASRVILLENLNRFWPIIQIRIKRCQQGGIDTRVRGVEVLGPKPTFWPLFREQLCRRTCLFYTIRAQAWSRDIAEDHRRLLQLCPRLNRVLRHEQNFADRFLPDDEAAQALGKTCWEALVSPLVQNITSPDAEGVSALGWLLDQYLEQRETSRNPLSRAASFASRVRRLCHLLVHVEPPPGPSPEPSTRPFSKNSKGRDRSPAPSPVLPSSSLRNITQCWLSVVQEQVSRFLAAAWRAPDFVPRYCKLYEHLQRAGSELFGPRAAFMLALRSGFSGALLQQSFLTAAHMSEQFARYIDQQIQGGLIGGAPGVEMLGQLQRHLEPIMVLSGLELATTFEHFYQHYMADRLLSFGSSWLEGAVLEQIGLCFPNRLPQLMLQSLSTSEELQRQFHLFQLQRLDKLFLEQEDEEEKRLEEEEEEEEEEEAEKELFIEDPSPAISILVLSPRCWPVSPLCYLYHPRKCLPTEFCDALDRFSSFYSQSQNHPVLDMGPHRRLQWTWLGRAELQFGKQILHVSTVQMWLLLKFNQTEEVSVETLLKDSDLSPELLLQALVPLTSGNGPLTLHEGQDFPHGEKDEGRTLEQKRNLLSCLLVRILKAHGEKGLHIDQLVCLVLEAWQKGPNPPGTLGHTVAGGVACTSTDVLSCILHLLGQGYVKRRDDRPQILMYAAPEPMGPCRGQADVPFCGSQSETSKPSPEAVATLASLQLPAGRTMSPQEVEGLMKQTVRQVQETLNLEPDVAQHLLAHSHWGAEQLLQSYSEDPEPLLLAAGLCVHQAQAVPVRPDHCPVCVSPLGCDDDLPSLCCMHYCCKSCWNEYLTTRIEQNLVLNCTCPIADCPAQPTGAFIRAIVSSPEVISKYEKALLRGYVESCSNLTWCTNPQGCDRILCRQGLGCGTTCSKCGWASCFNCSFPEAHYPASCGHMSQWVDDGGYYDGMSVEAQSKHLAKLISKRCPSCQAPIEKNEGCLHMTCAKCNHGFCWRCLKSWKPNHKDYYNCSAMVSKAARQEKRFQDYNERCTFHHQAREFAVNLRNRVSAIHEVPPPRSFTFLNDACQGLEQARKVLAYACVYSFYSQDAEYMDVVEQQTENLELHTNALQILLEETLLRCRDLASSLRLLRADCLSTGMELLRRIQERLLAILQHSAQDFRVGLQSPSVEAWEAKGPNMPGSQPQASSGPEAEEEEEDDEDDVPEWQQDEFDEELDNDSFSYDESENLDQETFFFGDEEEDEDEAYD

SEQ ID NO: 20806 - protein, 93 aa, Homo sapiens
  Payload ID: 4202
  Gene Symbol: CUL9
  Gene Name: cullin 9
  ENSP ID: ENSP00000421116
CFPNRLPQLMLQSLSTSEELQRQFHLFQLQRLDKLFLEQEDEEEKRLEEEEVRTIQSWTWDHIGDCSGRGWAGLSCSLGSRYCMCPPCRCGCC

SEQ ID NO: 20807 - protein, 195 aa, Homo sapiens
  Payload ID: 4202
  Gene Symbol: CUL9
  Gene Name: cullin 9
  ENSP ID: ENSP00000425649
QKRNLLSCLLVRILKAHGEKGLHIDQLVCLVLEAWQKGPNPPGTLGHTVAGGVACTSTDVLSCILHLLGQGYVKRRDDRPQILMYAAPEPMGPCRGQADVPFCGSQSETSKPSPEAVATLASLQLPAGRTMSPQEVEGLMKQTVRQVQETLNLEPDVAQHLLAHSHWGAEQLLQSYSEDPEPLLLAAGLLAGMST

SEQ ID NO: 20808 - protein, 54 aa, Homo sapiens
  Payload ID: 4203
  Gene Symbol: CAND1
  Gene Name: cullin-associated and neddylation-dissociated 1
  ENSP ID: ENSP00000437594
MATNDLMTELQKDSIKLDDDSERKVVKMILKLLEDKNGEVQNLAVKCLGPLVSK

SEQ ID NO: 20809 - protein, 1230 aa, Homo sapiens
  Payload ID: 4203
  Gene Symbol: CAND1
  Gene Name: cullin-associated and neddylation-dissociated 1
  Uniprot ID: Q86VP6
  ENSP ID: ENSP00000442318
MASASYHISNLLEKMTSSDKDFRFMATNDLMTELQKDSIKLDDDSERKVVKMILKLLEDKNGEVQNLAVKCLGPLVSKVKEYQVETIVDTLCTNMLSDKEQLRDISSIGLKTVIGELPPASSGSALAANVCKKITGRLTSAIAKQEDVSVQLEALDIMADMLSRQGGLLVNFHPSILTCLLPQLTSPRLAVRKRTIIALGHLVMSCGNIVFVDLIEHLLSELSKNDSMSTTRTYIQCIAAISRQAGHRIGEYLEKIIPLVVKFCNVDDDELREYCIQAFESFVRRCPKEVYPHVSTIINICLKYLTYDPNYNYDDEDEDENAMDADGGDDDDQGSDDEYSDDDDMSWKVRRAAAKCLDAVVSTRHEMLPEFYKTVSPALISRFKEREENVKADVFHAYLSLLKQTRPVQSWLCDPDAMEQGETPLTMLQSQVPNIVKALHKQMKEKSVKTRQCCFNMLTELVNVLPGALTQHIPVLVPGIIFSLNDKSSSSNLKIDALSCLYVILCNHSPQVFHPHVQALVPPVVACVGDPFYKITSEALLVTQQLVKVIRPLDQPSSFDATPYIKDLFTCTIKRLKAADIDQEVKERAISCMGQIICNLGDNLGSDLPNTLQIFLERLKNEITRLTTVKALTLIAGSPLKIDLRPVLGEGVPILASFLRKNQRALKLGTLSALDILIKNYSDSLTAAMIDAVLDELPPLISESDMHVSQMAISFLTTLAKVYPSSLSKISGSILNELIGLVRSPLLQGGALSAMLDFFQALVVTGTNNLGYMDLLRMLTGPVYSQSTALTHKQSYYSIAKCVAALTRACPKEGPAVVGQFIQDVKNSRSTDSIRLLALLSLGEVGHHIDLSGQLELKSVILEAFSSPSEEVKSAASYALGSISVGNLPEYLPFVLQEITSQPKRQYLLLHSLKEIISSASVVGLKPYVENIWALLLKHCECAEEGTRNVVAECLGKLTLIDPETLLPRLKGYLISGSSYARSSVVTAVKFTISDHPQPIDPLLKNCIGDFLKTLEDPDLNVRRVALVTFNSAAHNKPSLIRDLLDTVLPHLYNETKVRKELIREVEMGPFKHTVDDGLDIRKAAFECMYTLLDSCLDRLDIFEFLNHVEDGLKDHYDIKMLTFLMLVRLSTLCPSAVLQRLDRLVEPLRATCTTKVKANSVKQEFEKQDELKRSAMRAVAALLTIPEAEKSPLMSEFQSQISSNPELAAIFESIQKDSSSTNLESMDTS

SEQ ID NO: 20810 - protein, 770 aa, Homo sapiens
  Payload ID: 4203
  Gene Symbol: CAND1
  Gene Name: cullin-associated and neddylation-dissociated 1
  ENSP ID: ENSP00000444089
HVSTIINICLKYLTYDPNYNYDDEDEDENAMDADGGDDDDQGSDDEYSDDDDMSWKVRRAAAKCLDAVVSTRHEMLPEFYKTVSPALISRFKEREENVKADVFHAYLSLLKQTRPVQSWLCDPDAMEQGETPLTMLQSQVPNIVKALHKQMKEKSVKTRQCCFNMLTTVKALTLIAGSPLKIDLRPVLGEGVPILASFLRKNQRALKLGTLSALDILIKNYSDSLTAAMIDAVLDELPPLISESDMHVSQMAISFLTTLAKVYPSSLSKISGSILNELIGLVRSPLLQGGALSAMLDFFQALVVTGTNNLGYMDLLRMLTGPVYSQSTALTHKQSYYSIAKCVAALTRACPKEGPAVVGQFIQDVKNSRSTDSIRLLALLSLGEVGHHIDLSGQLELKSVILEAFSSPSEEVKSAASYALGSISVGNLPEYLPFVLQEITSQPKRQYLLLHSLKEIISSASVVGLKPYVENIWALLLKHCECAEEGTRNVVAECLGKLTLIDPETLLPRLKGYLISGSSYARSSVVTAVKFTISDHPQPIDPLLKNCIGDFLKTLEDPDLNVRRVALVTFNSAAHNKPSLIRDLLDTVLPHLYNETKVRKELIREVEMGPFKHTVDDGLDIRKAAFECMYTLLDSCLDRLDIFEFLNHVEDGLKDHYDIKMLTFLMLVRLSTLCPSAVLQRLDRLVEPLRATCTTKVKANSVKQEFEKQDELKRSAMRAVAALLTIPEAEKSPLMSEFQSQISSNPELAAIFESIQKDSSSTNLESMDTS

SEQ ID NO: 20811 - protein, 442 aa, Homo sapiens
  Payload ID: 4203
  Gene Symbol: CAND1
  Gene Name: cullin-associated and neddylation-dissociated 1
  ENSP ID: ENSP00000445794
LIHAGSALAANVCKKITGRLTSAIAKQEDVSVQLEALDIMADMLSRQGGLLVNFHPSILTCLLPQLTSPRLAVRKRTIIALGHLVMSCGNIVFVDLIEHLLSELSKNDSMSTTRTYIQCIAAISRQAGHRIGEYLEKIIPLVVKFCNVDDDELREYCIQAFESFVRRCPKEVYPHVSTIINICLKYLTYDPNYNYDDEDEDENAMDADGGDDDDQGSDDEYSDDDDMSWKVRRAAAKCLDAVVSTRHEMLPEFYKTVSPALISRFKEREENVKADVFHAYLSLLKQTRPVQSWLCDPDAMEQGETPLTMLQSQVPNIVKALHKQMKEKSVKTRQCCFNMLTELVNVLPGALTQHIPVLVPGIIFSLNDKSSSSNLKIDALSCLYVILCNHSPQVFHPHVQALVPPVVACVGDPFYKITSEALLVTQQLVKAHHMPEAQWLRL

SEQ ID NO: 20812 - protein, 1119 aa, Homo sapiens
  Payload ID: 4204
  Gene Symbol: CAND2
  Gene Name: cullin-associated and neddylation-dissociated 2 (putative)
  Uniprot ID: O75155
  ENSP ID: ENSP00000295989
MSTAAFHISSLLEKMTSSDKDFRFMATSDLMSELQKDSIQLDEDSERKVVKMLLRLLEDKNGEVQNLAVKWLGVPLGAFHASLLHCLLPQLSSPRLAVRKRAVGALGHLAAACSTDLFVELADHLLDRLPGPRVPTSPTAIRTLIQCLGSVGRQAGHRLGAHLDRLVPLVEDFCNLDDDELRESCLQAFEAFLRKCPKEMGPHVPNVTSLCLQYIKHDPNYNYDSDEDEEQMETEDSEFSEQESEDEYSDDDDMSWKVRRAAAKCIAALISSRPDLLPDFHCTLAPVLIRRFKEREENVKADVFTAYIVLLRQTQPPKGWLEAMEEPTQTGSNLHMLRGQVPLVVKALQRQLKDRSVRARQGCFSLLTELAGVLPGSLAEHMPVLVSGIIFSLADRSSSSTIRMDALAFLQGLLGTEPAEAFHPHLPILLPPVMACVADSFYKIAAEALVVLQELVRALWPLHRPRMLDPEPYVGEMSAVTLARLRATDLDQEVKERAISCMGHLVGHLGDRLGDDLEPTLLLLLDRLRNEITRLPAIKALTLVAVSPLQLDLQPILAEALHILASFLRKNQRALRLATLAALDALAQSQGLSLPPSAVQAVLAELPALVNESDMHVAQLAVDFLATVTQAQPASLVEVSGPVLSELLRLLRSPLLPAGVLAAAEGFLQALVGTRPPCVDYAKLISLLTAPVYEQAVDGGPGLHKQVFHSLARCVAALSAACPQEAASTASRLVCDARSPHSSTGVKVLAFLSLAEVGQVAGPGHQRELKAVLLEALGSPSEDVRAAASYALGRVGAGSLPDFLPFLLEQIEAEPRRQYLLLHSLREALGAAQPDSLKPYAEDIWALLFQRCEGAEEGTRGVVAECIGKLVLVNPSFLLPRLRKQLAAGRPHTRSTVITAVKFLISDQPHPIDPLLKSFIAVHNKPSLVRDLLDDILPLLYQETKIRRDLIREVEMGPFKHTVDDGLDVRKAAFECMYSLLESCLGQLDICEFLNHVEDGLKDHYDIRMLTFIMVARLATLCPAPVLQRVDRLIEPLRATCTAKVKAGSVKQEFEKQDELKRSAMRAVAALLTIPEVGKSPIMADFSSQIRSNPELAALFESIQKDSASAPSTDSMELS

SEQ ID NO: 20813 - protein, 1236 aa, Homo sapiens
  Payload ID: 4204
  Gene Symbol: CAND2
  Gene Name: cullin-associated and neddylation-dissociated 2 (putative)
  Uniprot ID: O75155
  ENSP ID: ENSP00000387641
MSTAAFHISSLLEKMTSSDKDFRFMATSDLMSELQKDSIQLDEDSERKVVKMLLRLLEDKNGEVQNLAVKCLGPLVVKVKEYQVETIVDTLCTNMRSDKEQLRDIAGIGLKTVLSELPPAATGSGLATNVCRKITGQLTSAIAQQEDVAVQLEALDILSDMLSRLGVPLGAFHASLLHCLLPQLSSPRLAVRKRAVGALGHLAAACSTDLFVELADHLLDRLPGPRVPTSPTAIRTLIQCLGSVGRQAGHRLGAHLDRLVPLVEDFCNLDDDELRESCLQAFEAFLRKCPKEMGPHVPNVTSLCLQYIKHDPNYNYDSDEDEEQMETEDSEFSEQESEDEYSDDDDMSWKVRRAAAKCIAALISSRPDLLPDFHCTLAPVLIRRFKEREENVKADVFTAYIVLLRQTQPPKGWLEAMEEPTQTGSNLHMLRGQVPLVVKALQRQLKDRSVRARQGCFSLLTELAGVLPGSLAEHMPVLVSGIIFSLADRSSSSTIRMDALAFLQGLLGTEPAEAFHPHLPILLPPVMACVADSFYKIAAEALVVLQELVRALWPLHRPRMLDPEPYVGEMSAVTLARLRATDLDQEVKERAISCMGHLVGHLGDRLGDDLEPTLLLLLDRLRNEITRLPAIKALTLVAVSPLQLDLQPILAEALHILASFLRKNQRALRLATLAALDALAQSQGLSLPPSAVQAVLAELPALVNESDMHVAQLAVDFLATVTQAQPASLVEVSGPVLSELLRLLRSPLLPAGVLAAAEGFLQALVGTRPPCVDYAKLISLLTAPVYEQAVDGGPGLHKQVFHSLARCVAALSAACPQEAASTASRLVCDARSPHSSTGVKVLAFLSLAEVGQVAGPGHQRELKAVLLEALGSPSEDVRAAASYALGRVGAGSLPDFLPFLLEQIEAEPRRQYLLLHSLREALGAAQPDSLKPYAEDIWALLFQRCEGAEEGTRGVVAECIGKLVLVNPSFLLPRLRKQLAAGRPHTRSTVITAVKFLISDQPHPIDPLLKSFIGEFMESLQDPDLNVRRATLAFFNSAVHNKPSLVRDLLDDILPLLYQETKIRRDLIREVEMGPFKHTVDDGLDVRKAAFECMYSLLESCLGQLDICEFLNHVEDGLKDHYDIRMLTFIMVARLATLCPAPVLQRVDRLIEPLRATCTAKVKAGSVKQEFEKQDELKRSAMRAVAALLTIPEVGKSPIMADFSSQIRSNPELAALFESIQKDSASAPSTDSMELS

SEQ ID NO: 20814 - protein, 110 aa, Homo sapiens
  Payload ID: 4204
  Gene Symbol: CAND2
  Gene Name: cullin-associated and neddylation-dissociated 2 (putative)
  ENSP ID: ENSP00000390996
MSTAAFHISSLLEKMTSSDKDFRFMATSDLMSELQKDSIQLDEDSERKVVKMLLRLLEDKNGEVQNLAVKCCRAPLLQGPLSCHNPGKEAGREWGEGRSLAQVARGVRSA

SEQ ID NO: 20815 - protein, 163 aa, Homo sapiens
  Payload ID: 4204
  Gene Symbol: CAND2
  Gene Name: cullin-associated and neddylation-dissociated 2 (putative)
  ENSP ID: ENSP00000403093
MGPFKHTVDDGLDVRKAAFECMYSLLESCLGQLDICEFLNHVEDGLKDHYDIRMLTFIMVARLATLCPAPVLQRVDRLIEPLRATCTAKEPNANSVAWNTQCEDMHALLLGRRLPQHQSQHLPYAPAEAAGLCGRLQWLQDLLPPCLLHFCRGGAADWRGRRP

SEQ ID NO: 20816 - protein, 110 aa, Homo sapiens; identical to SEQ ID NO: 20814
  Payload ID: 4204
  Gene Symbol: CAND2
  Gene Name: cullin-associated and neddylation-dissociated 2 (putative)
  ENSP ID: ENSP00000486760

SEQ ID NO: 20817 - protein, 111 aa, Homo sapiens
  Payload ID: 4205
  Gene Symbol: CUTA
  Gene Name: cutA divalent cation tolerance homolog (E. coli)
  ENSP ID: ENSP00000363608
  MOD_RES (1)..(1): Any amino acid
XSSTVTWCALFSNHVAATQASLLLSFVWMPALLPVASRLLLLPRVLLTMASGSPPTQPSPASDSGSGYVPGSVSAAFVTCPNEKVAKEIARAVVEKRLAACVNLIPQITSM

SEQ ID NO: 20818 - protein, 156 aa, Homo sapiens
  Payload ID: 4205
  Gene Symbol: CUTA
  Gene Name: cutA divalent cation tolerance homolog (E. coli)
  Uniprot ID: O60888
  ENSP ID: ENSP00000363620
MPALLPVASRLLLLPRVLLTMASGSPPTQPSPASDSGSGYVPGSVSAAFVTCPNEKVAKEIARAVVEKRLAACVNLIPQITSIYEWKGKIEEDSEVLMMIKTQSSLVPALTDFVRSVHPYEVAEVIALPVEQGNFPYLQWVRQVTESVSDSITVLP

SEQ ID NO: 20819 - protein, 198 aa, Homo sapiens
  Payload ID: 4205
  Gene Symbol: CUTA
  Gene Name: cutA divalent cation tolerance homolog (E. coli)
  Uniprot ID: O60888
  ENSP ID: ENSP00000363624
MIGSGLAGSGGAGGPSSTVTWCALFSNHVAATQASLLLSFVWMPALLPVASRLLLLPRVLLTMASGSPPTQPSPASDSGSGYVPGSVSAAFVTCPNEKVAKEIARAVVEKRLAACVNLIPQITSIYEWKGKIEEDSEVLMMIKTQSSLVPALTDFVRSVHPYEVAEVIALPVEQGNFPYLQWVRQVTESVSDSITVLP

SEQ ID NO: 20820 - protein, 198 aa, Homo sapiens; identical to SEQ ID NO: 20819
  Payload ID: 4205
  Gene Symbol: CUTA
  Gene Name: cutA divalent cation tolerance homolog (E. coli)
  Uniprot ID: O60888
  ENSP ID: ENSP00000391509

SEQ ID NO: 20821 - protein, 179 aa, Homo sapiens
  Payload ID: 4205
  Gene Symbol: CUTA
  Gene Name: cutA divalent cation tolerance homolog (E. coli)
  Uniprot ID: O60888
  ENSP ID: ENSP00000400114
MSGGRAPAVLLGGVASLLLSFVWMPALLPVASRLLLLPRVLLTMASGSPPTQPSPASDSGSGYVPGSVSAAFVTCPNEKVAKEIARAVVEKRLAACVNLIPQITSIYEWKGKIEEDSEVLMMIKTQSSLVPALTDFVRSVHPYEVAEVIALPVEQGNFPYLQWVRQVTESVSDSITVLP

SEQ ID NO: 20822 - protein, 156 aa, Homo sapiens; identical to SEQ ID NO: 20818
  Payload ID: 4205
  Gene Symbol: CUTA
  Gene Name: cutA divalent cation tolerance homolog (E. coli)
  Uniprot ID: O60888
  ENSP ID: ENSP00000403268

SEQ ID NO: 20823 - protein, 179 aa, Homo sapiens; identical to SEQ ID NO: 20821
  Payload ID: 4205
  Gene Symbol: CUTA
  Gene Name: cutA divalent cation tolerance homolog (E. coli)
  Uniprot ID: O60888
  ENSP ID: ENSP00000417544

SEQ ID NO: 20824 - protein, 42 aa, Homo sapiens
  Payload ID: 4205
  Gene Symbol: CUTA
  Gene Name: cutA divalent cation tolerance homolog (E. coli)
  ENSP ID: ENSP00000417823
MSGGRAPAVLLGGVVSDRPRPAPSGPRSLDRYPHPKSQRLAP

SEQ ID NO: 20825 - protein, 155 aa, Homo sapiens
  Payload ID: 4205
  Gene Symbol: CUTA
  Gene Name: cutA divalent cation tolerance homolog (E. coli)
  ENSP ID: ENSP00000418612
MSGGRAPAVLLGGVASLLLSFVWMPALLPVASRLLLLPRVLLTMASGSPPTQPSPASDSGSGYVPGSVSAAFVTCPNEKVAKEIARAVVEKRLAACVNLIPQITSIYEWKGKIEEDSEVLMFCAPLRSGRGNCIACGTGELSVPAVGAPGHRVSF

SEQ ID NO: 20826 - protein, 135 aa, Homo sapiens
  Payload ID: 4205
  Gene Symbol: CUTA
  Gene Name: cutA divalent cation tolerance homolog (E. coli)
  ENSP ID: ENSP00000418659
MPALLPVASRLLLLPRVLLTMASGSPPTQPSPASDSGSGYVPGSVSAAFVTCPNEKVAKEIARAVVEKRLAACVNLIPQITSIYEWKGKIEEDSEVLMMIKTQSSLVPALTDFVRSVHPYEVAESCHDEPCSCSS

SEQ ID NO: 20827 - protein, 156 aa, Homo sapiens; identical to SEQ ID NO: 20818
  Payload ID: 4205
  Gene Symbol: CUTA
  Gene Name: cutA divalent cation tolerance homolog (E. coli)
  Uniprot ID: O60888
  ENSP ID: ENSP00000432744

SEQ ID NO: 20828 - protein, 42 aa, Homo sapiens; identical to SEQ ID NO: 20824
  Payload ID: 4205
  Gene Symbol: CUTA
  Gene Name: cutA divalent cation tolerance homolog (E. coli)
  ENSP ID: ENSP00000433963

SEQ ID NO: 20829 - protein, 111 aa, Homo sapiens; identical to SEQ ID NO: 20817
  Payload ID: 4205
  Gene Symbol: CUTA
  Gene Name: cutA divalent cation tolerance homolog (E. coli)
  ENSP ID: ENSP00000434163
  MOD_RES (1)..(1): Any amino acid

SEQ ID NO: 20830 - protein, 156 aa, Homo sapiens; identical to SEQ ID NO: 20818
  Payload ID: 4205
  Gene Symbol: CUTA
  Gene Name: cutA divalent cation tolerance homolog (E. coli)
  Uniprot ID: O60888
  ENSP ID: ENSP00000475963

SEQ ID NO: 20831 - protein, 156 aa, Homo sapiens; identical to SEQ ID NO: 20818
  Payload ID: 4205
  Gene Symbol: CUTA
  Gene Name: cutA divalent cation tolerance homolog (E. coli)
  Uniprot ID: O60888
  ENSP ID: ENSP00000480360

SEQ ID NO: 20832 - protein, 745 aa, Homo sapiens
  Payload ID: 4206
  Gene Symbol: CTAGE1
  Gene Name: cutaneous T-cell lymphoma-associated antigen 1
  Uniprot ID: Q96RT6
  ENSP ID: ENSP00000375220
MRPDSHPYGFPWELVIRAAVAGFFAVLFLWRSFRSVTSRLYVRREKKFAVALSGLIEEKCKLLEKFSLVQKEYEGYEVESSLKNASFEKEATEAQSLEATCEKLNRFNSELVHEILCLEKELKEEKSKHSEQNELMADISKRIQSLEDESKSLKSQVAEAKMTFKRFQANEERLEIEIQDAWKENSELQESQKQLLQEAEVWKEQVSELIKQKRTFEDSKVHAEQVLNDKENHIKTLTERLLKMKDGVAMLEEDVTDDDNLELEMNSESEDGAYLDNPPKGALKKLIHAAKLNASLKTLEGERNQIYIQLSEVDKTKEELTEHIKNLQTEQASLQSENTHFESENQKLQQKLKVMTELYQENEMKLYRKLIVEEKCRLEKEEKLSKVDEMISHATEELETYRKRAKDLKEFEKTIHFYQKKIILHEKKAHDNWSAAWTAERNLNDLRKENAHNRQKLTEIEFKIKLLEKDPYGLDVPNTAFGRQHSPYGPSPLGWPSSETRASLYPPTLLEGPLRLSPLLPRGGGRGSRGPGNPPDHQITKERGESSCDRLTDPHRAPSDAGPLAPPWEQDYRMMFPPPGQSYPDSALPPQRQDRFYSNCARLSGPAELRSFNMPSLDKMDGSMPSEMESSRNDTKDNLGNLKVPDSSLPAENEATGPGFVPPPLAPIRGLLFPVDTRGPFIRRGPPFPPPPPGTVFGASPDYFSPRDVPGPPRAPFAMRNVYLPRGFLPYRPPRPAFFPPAPTF

SEQ ID NO: 20833 - protein, 74 aa, Homo sapiens
  Payload ID: 4206
  Gene Symbol: CTAGE1
  Gene Name: cutaneous T-cell lymphoma-associated antigen 1
  Uniprot ID: Q9HC47
  ENSP ID: ENSP00000436900
MFVIISLHNCVVISFVLFLFGGNNFIQNFYLPQNYIDQFLLTSFPTFTSVGVLIVLVLCSAFLLLWQGEGVNLR

SEQ ID NO: 20834 - protein, 745 aa, Homo sapiens; identical to SEQ ID NO: 20832
  Payload ID: 4206
  Gene Symbol: CTAGE1
  Gene Name: cutaneous T-cell lymphoma-associated antigen 1
  ENSP ID: ENSP00000489019

SEQ ID NO: 20835 - protein, 74 aa, Homo sapiens; identical to SEQ ID NO: 20833
  Payload ID: 4206
  Gene Symbol: CTAGE1
  Gene Name: cutaneous T-cell lymphoma-associated antigen 1
  ENSP ID: ENSP00000489506

SEQ ID NO: 20836 - protein, 144 aa, Homo sapiens
  Payload ID: 4207
  Gene Symbol: CUTC
  Gene Name: cutC copper transporter
  ENSP ID: ENSP00000359503
MGVLQVVKQSVQIPVFVMIRPRGGDFLYSDREIEVMKADIRLAKLYGADGLVFGALTEDGHIDKELCMSLMAICRPLPVTFHRAFDMVHDPMAALETLLTLGFERVLTSGCDSSALEGLPLIKRLIEQAKGRIVVMPGGGITDR

SEQ ID NO: 20837 - protein, 273 aa, Homo sapiens
  Payload ID: 4207
  Gene Symbol: CUTC
  Gene Name: cutC copper transporter
  Uniprot ID: Q9NTM9
  ENSP ID: ENSP00000359507
MKRQGASSERKRARIPSGKAGAANGFLMEVCVDSVESAVNAERGGADRIELCSGLSEGGTTPSMGVLQVVKQSVQIPVFVMIRPRGGDFLYSDREIEVMKADIRLAKLYGADGLVFGALTEDGHIDKELCMSLMAICRPLPVTFHRAFDMVHDPMAALETLLTLGFERVLTSGCDSSALEGLPLIKRLIEQAKGRIVVMPGGGITDRNLQRILEGSGATEFHCSARSTRDSGMKFRNSSVAMGASLSCSEYSLKVTDVTKVRTLNAIAKNILV

SEQ ID NO: 20838 - protein, 194 aa, Homo sapiens
  Payload ID: 4207
  Gene Symbol: CUTC
  Gene Name: cutC copper transporter
  ENSP ID: ENSP00000433900
MKRQGASSERKRARIPSGKAGAANGFLMEVCVDSVESAVNAERGGADRIELCSGLSEGGTTPSMGVLQVVKQSVQIPVFVMIRPRGGDFLYSDREIEVMKADIRLAKLYGADGLVFGALTEDGHIDKELCMSLMAICRPLPVTFHRAFDMVHDPMAALETLLTLGFERVLTSGCDSSALEGLPLIKRLIEQEVV

SEQ ID NO: 20839 - protein, 1505 aa, Homo sapiens
  Payload ID: 4208
  Gene Symbol: CUX1
  Gene Name: cut-like homeobox 1
  Uniprot ID: P39880
  ENSP ID: ENSP00000292535
MLCVAGARLKRELDATATVLANRQDESEQSRKRLIEQSREFKKNTPEDLRKQVAPLLKSFQGEIDALSKRSKEAEAAFLNVYKRLIDVPDPVPALDLGQQLQLKVQRLHDIETENQKLRETLEEYNKEFAEVKNQEVTIKALKEKIREYEQTLKNQAETIALEKEQKLQNDFAEKERKLQETQMSTTSKLEEAEHKVQSLQTALEKTRTELFDLKTKYDEETTAKADEIEMIMTDLERANQRAEVAQREAETLREQLSSANHSLQLASQIQKAPDVEQAIEVLTRSSLEVELAAKEREIAQLVEDVQRLQASLTKLRENSASQISQLEQQLSAKNSTLKQLEEKLKGQADYEEVKKELNILKSMEFAPSEGAGTQDAAKPLEVLLLEKNRSLQSENAALRISNSDLSGSARRKGKDQPESRRPGSLPAPPPSQLPRNPGEQASNTNGTHQFSPAGLSQDFFSSSLASPSLPLASTGKFALNSLLQRQLMQSFYSKAMQEAGSTSMIFSTGPYSTNSISSQSPLQQSPDVNGMAPSPSQSESAGSVSEGEEMDTAEIARQVKEQLIKHNIGQRIFGHYVLGLSQGSVSEILARPKPWNKLTVRGKEPFHKMKQFLSDEQNILALRSIQGRQRENPGQSLNRLFQEVPKRRNGSEGNITTRIRASETGSDEAIKSILEQAKRELQVQKTAEPAQPSSASGSGNSDDAIRSILQQARREMEAQQAALDPALKQAPLSQSDITILTPKLLSTSPMPTVSSYPPLAISLKKPSAAPEAGASALPNPPALKKEAQDAPGLDPQGAADCAQGVLRQVKNEVGRSGAWKDHWWSAVQPERRNAASSEEAKAEETGGGKEKGSGGSGGGSQPRAERSQLQGPSSSEYWKEWPSAESPYSQSSELSLTGASRSETPQNSPLPSSPIVPMSKPTKPSVPPLTPEQYEVYMYQEVDTIELTRQVKEKLAKNGICQRIFGEKVLGLSQGSVSDMLSRPKPWSKLTQKGREPFIRMQLWLNGELGQGVLPVQGQQQGPVLHSVTSLQDPLQQGCVSSESTPKTSASCSPAPESPMSSSESVKSLTELVQQPCPPIEASKDSKPPEPSDPPASDSQPTTPLPLSGHSALSIQELVAMSPELDTYGITKRVKEVLTDNNLGQRLFGETILGLTQGSVSDLLARPKPWHKLSLKGREPFVRMQLWLNDPNNVEKLMDMKRMEKKAYMKRRHSSVSDSQPCEPPSVGTEYSQGASPQPQHQLKKPRVVLAPEEKEALKRAYQQKPYPSPKTIEDLATQLNLKTSTVINWFHNYRSRIRRELFIEEIQAGSQGQAGASDSPSARSGRAAPSSEGDSCDGVEATEGPGSADTEEPKSQGEAEREEVPRPAEQTEPPPSGTPGPDDARDDDHEGGPVEGPGPLPSPASATATAAPAAPEDAATSAAAAPGEGPAAPSSAPPPSNSSSSSAPRRPSSLQSLFGLPEAAGARDSRDNPLRKKKAANLNSIIHRLEKAASREEPIEWEF

SEQ ID NO: 20840 - protein, 678 aa, Homo sapiens
  Payload ID: 4208
  Gene Symbol: CUX1
  Gene Name: cut-like homeobox 1
  Uniprot ID: Q13948
  ENSP ID: ENSP00000292538
MAANVGSMFQYWKRFDLQQLQRELDATATVLANRQDESEQSRKRLIEQSREFKKNTPEDLRKQVAPLLKSFQGEIDALSKRSKEAEAAFLNVYKRLIDVPDPVPALDLGQQLQLKVQRLHDIETENQKLRETLEEYNKEFAEVKNQEVTIKALKEKIREYEQTLKNQAETIALEKEQKLQNDFAEKERKLQETQMSTTSKLEEAEHKVQSLQTALEKTRTELFDLKTKYDEETTAKADEIEMIMTDLERANQRAEVAQREAETLREQLSSANHSLQLASQIQKAPDVEQAIEVLTRSSLEVELAAKEREIAQLVEDVQRLQASLTKLRENSASQISQLEQQLSAKNSTLKQLEEKLKGQADYEEVKKELNILKSMEFAPSEGAGTQDAAKPLEVLLLEKNRSLQSENAALRISNSDLSGRCAELQVRITEAVATATEQRELIARLEQDLSIIQSIQRPDAEGAAEHRLEKIPEPIKEATALFYGPAAPASGALPEGQVDSLLSIISSQRERFRARNQELEAENRLAQHTLQALQSELDSLRADNIKLFEKIKFLQSYPGRGSGSDDTELRYSSQYEERLDPFSSFSKRERQRKYLSLSPWDKATLSMGRLVLSNKMARTIGFFYTLFLHCLVFLVLYKLAWSESMERDCATFCAKKFADHLHKFHENDNGAAAGDLWQ

SEQ ID NO: 20841 - protein, 1516 aa, Homo sapiens
  Payload ID: 4208
  Gene Symbol: CUX1
  Gene Name: cut-like homeobox 1
  Uniprot ID: P39880
  ENSP ID: ENSP00000353401
MAANVGSMFQYWKRFDLQQLQRELDATATVLANRQDESEQSRKRLIEQSREFKKNTPEDLRKQVAPLLKSFQGEIDALSKRSKEAEAAFLNVYKRLIDVPDPVPALDLGQQLQLKVQRLHDIETENQKLRETLEEYNKEFAEVKNQEVTIKALKEKIREYEQTLKNQAETIALEKEQKLQNDFAEKERKLQETQMSTTSKLEEAEHKVQSLQTALEKTRTELFDLKTKYDEETTAKADEIEMIMTDLERANQRAEVAQREAETLREQLSSANHSLQLASQIQKAPDVEQAIEVLTRSSLEVELAAKEREIAQLVEDVQRLQASLTKLRENSASQISQLEQQLSAKNSTLKQLEEKLKGQADYEEVKKELNILKSMEFAPSEGAGTQDAAKPLEVLLLEKNRSLQSENAALRISNSDLSGSARRKGKDQPESRRPGSLPAPPPSQLPRNPGEQASNTNGTHQFSPAGLSQDFFSSSLASPSLPLASTGKFALNSLLQRQLMQSFYSKAMQEAGSTSMIFSTGPYSTNSISSQSPLQQSPDVNGMAPSPSQSESAGSVSEGEEMDTAEIARQVKEQLIKHNIGQRIFGHYVLGLSQGSVSEILARPKPWNKLTVRGKEPFHKMKQFLSDEQNILALRSIQGRQRENPGQSLNRLFQEVPKRRNGSEGNITTRIRASETGSDEAIKSILEQAKRELQVQKTAEPAQPSSASGSGNSDDAIRSILQQARREMEAQQAALDPALKQAPLSQSDITILTPKLLSTSPMPTVSSYPPLAISLKKPSAAPEAGASALPNPPALKKEAQDAPGLDPQGAADCAQGVLRQVKNEVGRSGAWKDHWWSAVQPERRNAASSEEAKAEETGGGKEKGSGGSGGGSQPRAERSQLQGPSSSEYWKEWPSAESPYSQSSELSLTGASRSETPQNSPLPSSPIVPMSKPTKPSVPPLTPEQYEVYMYQEVDTIELTRQVKEKLAKNGICQRIFGEKVLGLSQGSVSDMLSRPKPWSKLTQKGREPFIRMQLWLNGELGQGVLPVQGQQQGPVLHSVTSLQDPLQQGCVSSESTPKTSASCSPAPESPMSSSESVKSLTELVQQPCPPIEASKDSKPPEPSDPPASDSQPTTPLPLSGHSALSIQELVAMSPELDTYGITKRVKEVLTDNNLGQRLFGETILGLTQGSVSDLLARPKPWHKLSLKGREPFVRMQLWLNDPNNVEKLMDMKRMEKKAYMKRRHSSVSDSQPCEPPSVGTEYSQGASPQPQHQLKKPRVVLAPEEKEALKRAYQQKPYPSPKTIEDLATQLNLKTSTVINWFHNYRSRIRRELFIEEIQAGSQGQAGASDSPSARSGRAAPSSEGDSCDGVEATEGPGSADTEEPKSQGEAEREEVPRPAEQTEPPPSGTPGPDDARDDDHEGGPVEGPGPLPSPASATATAAPAAPEDAATSAAAAPGEGPAAPSSAPPPSNSSSSSAPRRPSSLQSLFGLPEAAGARDSRDNPLRKKKAANLNSIIHRLEKAASREEPIEWEF

SEQ ID NO: 20842 - protein, 639 aa, Homo sapiens
  Payload ID: 4208
  Gene Symbol: CUX1
  Gene Name: cut-like homeobox 1
  Uniprot ID: Q13948
  ENSP ID: ENSP00000377410
MAANVGSMFQYWKRFDLQQLQDLRKQVAPLLKSFQGEIDALSKRSKEAEAAFLNVYKRLIDVPDPVPALDLGQQLQLKVQRLHDIETENQKLRETLEEYNKEFAEVKNQEVTIKALKEKIREYEQTLKNQAETIALEKEQKLQNDFAEKERKLQETQMSTTSKLEEAEHKVQSLQTALEKTRTELFDLKTKYDEETTAKADEIEMIMTDLERANQRAEVAQREAETLREQLSSANHSLQLASQIQKAPDVAIEVLTRSSLEVELAAKEREIAQLVEDVQRLQASLTKLRENSASQISQLEQQLSAKNSTLKQLEEKLKGQADYEEVKKELNILKSMEFAPSEGAGTQDAAKPLEVLLLEKNRSLQSENAALRISNSDLSGRCAELQVRITEAVATATEQRELIARLEQDLSIIQSIQRPDAEGAAEHRLEKIPEPIKEATALFYGPAAPASGALPEGQVDSLLSIISSQRERFRARNQELEAENRLAQHTLQALQSELDSLRADNIKLFEKIKFLQSYPGRGSGSDDTELRYSSQYEERLDPFSSFSKRERQRKYLSLSPWDKATLSMGRLVLSNKMARTIGFFYTLFLHCLVFLVLYKLAWSESMERDCATFCAKKFADHLHKFHENDNGAAAGDLWQ

SEQ ID NO: 20843 - protein, 632 aa, Homo sapiens
  Payload ID: 4208
  Gene Symbol: CUX1
  Gene Name: cut-like homeobox 1
  Uniprot ID: P39880
  ENSP ID: ENSP00000409745
MAANVGSMFQYWKRFDLQQLQRELDATATVLANRQDESEQSRKRLIEQSREFKKNTPEDLRKQVAPLLKSFQGEIDALSKRSKEAEAAFLNVYKRLIDVPEVTIKALKEKIREYEQTLKNQAETIALEKEQKLQNDFAEKERKLQETQMSTTSKLEEAEHKVQSLQTALEKTRTELFDLKTKYDEETTAKADEIEMIMTDLERANQRAEVAQREAETLREQLSSANHSLQLASQIQKAPDVEQAIEVLTRSSLEVELAAKEREIAQLVEDVQRLQASLTKLRENSASQISQLEQQLSAKNSTLKQLEEKLKGQADYEEVKKELNILKSMEFAPSEGAGTQDAAKPLEVLLLEKNRSLQSENAALRISNSDLSGRCAELQVRITEAVATATEQRELIARLEQDLSIIQSIQRPDAEGAAEHRLEKIPEPIKEATALFYGPAAPASGALPEGQVDSLLSIISSQRERFRARNQELEAENRLAQHTLQALQSELDSLRADNIKLFEKIKFLQSYPGRGSGSDDTELRYSSQYEERLDPFSSFSKRERQRKYLSLSPWDKATLSMGRLVLSNKMARTIGFFYTLFLHCLVFLVLYKLAWSESMERDCATFCAKKFADHLHKFHENDNGAAAGDLWQ

SEQ ID NO: 20844 - protein, 678 aa, Homo sapiens; identical to SEQ ID NO: 20840
  Payload ID: 4208
  Gene Symbol: CUX1
  Gene Name: cut-like homeobox 1
  Uniprot ID: Q13948
  ENSP ID: ENSP00000414091

SEQ ID NO: 20845 - protein, 1483 aa, Homo sapiens
  Payload ID: 4208
  Gene Symbol: CUX1
  Gene Name: cut-like homeobox 1
  Uniprot ID: P39880
  ENSP ID: ENSP00000446630
MLCVAGARLKRELDATATVLANRQDESEQSRKRLIEQSREFKKNTPEDLRKQVAPLLKSFQGEIDALSKRSKEAEAAFLNVYKRLIDVPDPVPALDLGQQLQLKVQRLHDIETENQKLRETLEEYNKEFAEVKNQEVTIKALKEKIREYEQTLKNQAETIALEKEQKLQNDFAEKERKLQETQMSTTSKLEEAEHKVQSLQTALEKTRTELFDLKTKYDEETTAKADEIEMIMTDLERANQRAEVAQREAETLREQLSSANHSLQLASQIQKAPDVEQAIEVLTRSSLEVELAAKEREIAQLVEDVQRLQASLTKLRENSASQISQLEQQLSAKNSTLKQLEEKLKGQADYEEVKKELNILKSMEFAPSEGAGTQDAAKPLEVLLLEKNRSLQSENAALRISNSDLSGSARRKGKDQPESRRPGSLPAPPPSQLPRNPGEQASNTNGTHQFSPAGLSQDFFSSSLASPSLPLASTGKFALNSLLQRQLMQSFYSKAMQEAGSTSMIFSTGPYSTNSISSQSPLQQSPDVNGMAPSPSQSESAGSVSEGEEMDTAEIARQVKEQLIKHNIGQRIFGHYVLGLSQGSVSEILARPKPWNKLTVRGKEPFHKMKQFLSDEQNILALRSIQGRQRGNITTRIRASETGSDEAIKSILEQAKRELQVQKTAEPAQPSSASGSGNSDDAIRSILQQARREMEAQQAALDPALKQAPLSQSDITILTPKLLSTSPMPTVSSYPPLAISLKKPSAAPEAGASALPNPPALKKEAQDAPGLDPQGAADCAQGVLRQVKNEVGRSGAWKDHWWSAVQPERRNAASSEEAKAEETGGGKEKGSGGSGGGSQPRAERSQLQGPSSSEYWKEWPSAESPYSQSSELSLTGASRSETPQNSPLPSSPIVPMSKPTKPSVPPLTPEQYEVYMYQEVDTIELTRQVKEKLAKNGICQRIFGEKVLGLSQGSVSDMLSRPKPWSKLTQKGREPFIRMQLWLNGELGQGVLPVQGQQQGPVLHSVTSLQDPLQQGCVSSESTPKTSASCSPAPESPMSSSESVKSLTELVQQPCPPIEASKDSKPPEPSDPPASDSQPTTPLPLSGHSALSIQELVAMSPELDTYGITKRVKEVLTDNNLGQRLFGETILGLTQGSVSDLLARPKPWHKLSLKGREPFVRMQLWLNDPNNVEKLMDMKRMEKKAYMKRRHSSVSDSQPCEPPSVGTEYSQGASPQPQHQLKKPRVVLAPEEKEALKRAYQQKPYPSPKTIEDLATQLNLKTSTVINWFHNYRSRIRRELFIEEIQAGSQGQAGASDSPSARSGRAAPSSEGDSCDGVEATEGPGSADTEEPKSQGEAEREEVPRPAEQTEPPPSGTPGPDDARDDDHEGGPVEGPGPLPSPASATATAAPAAPEDAATSAAAAPGEGPAAPSSAPPPSNSSSSSAPRRPSSLQSLFGLPEAAGARDSRDNPLRKKKAANLNSIIHRLEKAASREEPIEWEF

SEQ ID NO: 20846 - protein, 1449 aa, Homo sapiens
  Payload ID: 4208
  Gene Symbol: CUX1
  Gene Name: cut-like homeobox 1
  Uniprot ID: P39880
  ENSP ID: ENSP00000447373
MLCVAGARLKRELDATATVLANRQDESEQSRKRLIEQSREFKKNTPEDLRKQVAPLLKSFQGEIDALSKRSKEAEAAFLNVYKRLIDVPDPVPALDLGQQLQLKVQRLHDIETENQKLRETLEEYNKEFAEVKNQEVTIKALKEKIREYEQTLKNQAETIALEKEQKLQNDFAEKERKLQETQMSTTSKLEEAEHKVQSLQTALEKTRTELFDLKTKYDEETTAKADEIEMIMTDLERANQRAEVAQREAETLREQLSSANHSLQLASQIQKAPDVEQAIEVLTRSSLEVELAAKEREIAQLVEDVQRLQASLTKLRENSASQISQLEQQLSAKNSTLKQLEEKLKGQADYEEVKKELNILKSMEFAPSEGAGTQDAAKPLEVLLLEKNRSLQSENAALRISNSDLSGSARRKGKDQPESRRPGSLPAPPPSQLPRNPGEQASNTNGTHQFSPAGLSQDFFSSSLASPSLPLASTGKFALNSLLQRQLMQSFYSKAMQEAGSTSMIFSTGPYSTNSISSQSPLQQSPDVNGMAPSPSQSESAGSVSEGEEMDTAEIARQVKEQLIKHNIGQRIFGHYVLGLSQGSVSEILARPKPWNKLTVRGKEPFHKMKQFLSDEQNILALRSIQGRQRAEPAQPSSASGSGNSDDAIRSILQQARREMEAQQAALDPALKQAPLSQSDITILTPKLLSTSPMPTVSSYPPLAISLKKPSAAPEAGASALPNPPALKKEAQDAPGLDPQGAADCAQGVLRQVKNEVGRSGAWKDHWWSAVQPERRNAASSEEAKAEETGGGKEKGSGGSGGGSQPRAERSQLQGPSSSEYWKEWPSAESPYSQSSELSLTGASRSETPQNSPLPSSPIVPMSKPTKPSVPPLTPEQYEVYMYQEVDTIELTRQVKEKLAKNGICQRIFGEKVLGLSQGSVSDMLSRPKPWSKLTQKGREPFIRMQLWLNGELGQGVLPVQGQQQGPVLHSVTSLQDPLQQGCVSSESTPKTSASCSPAPESPMSSSESVKSLTELVQQPCPPIEASKDSKPPEPSDPPASDSQPTTPLPLSGHSALSIQELVAMSPELDTYGITKRVKEVLTDNNLGQRLFGETILGLTQGSVSDLLARPKPWHKLSLKGREPFVRMQLWLNDPNNVEKLMDMKRMEKKAYMKRRHSSVSDSQPCEPPSVGTEYSQGASPQPQHQLKKPRVVLAPEEKEALKRAYQQKPYPSPKTIEDLATQLNLKTSTVINWFHNYRSRIRRELFIEEIQAGSQGQAGASDSPSARSGRAAPSSEGDSCDGVEATEGPGSADTEEPKSQGEAEREEVPRPAEQTEPPPSGTPGPDDARDDDHEGGPVEGPGPLPSPASATATAAPAAPEDAATSAAAAPGEGPAAPSSAPPPSNSSSSSAPRRPSSLQSLFGLPEAAGARDSRDNPLRKKKAANLNSIIHRLEKAASREEPIEWEF

SEQ ID NO: 20847 - protein, 662 aa, Homo sapiens
  Payload ID: 4208
  Gene Symbol: CUX1
  Gene Name: cut-like homeobox 1
  Uniprot ID: Q13948
  ENSP ID: ENSP00000449371
MAANVGSMFQYWKRFDLQQLQRELDATATVLANRQDESEQSRKRLIEQSREFKKNTPEIDALSKRSKEAEAAFLNVYKRLIDVPDPVPALDLGQQLQLKVQRLHDIETENQKLRETLEEYNKEFAEVKNQEVTIKALKEKIREYEQTLKNQAETIALEKEQKLQNDFAEKERKLQETQMSTTSKLEEAEHKVQSLQTALEKTRTELFDLKTKYDEETTAKADEIEMIMTDLERANQRAEVAQREAETLREQLSSANHSLQLASQIQKAPDVEQAIEVLTRSSLEVELAAKEREIAQLVEDVQRLQASLTKLRENSASQISQLEQQLSAKNSTLKQLEEKLKGQADYEEVKKELNILKSMEFAPSEGAGTQDAAKPLEVLLLEKNRSLQSENAALRISNSDLSGRCAELQVRITEAVATATEQRELIARLEQDLSIIQSIQRPDAEGAAEHRLEKIPEPIKEATALFYGPAAPASGALPEGQVDSLLSIISSQRERFRARNQELEAENRLAQHTLQALQSELDSLRADNIKLFEKIKFLQSYPGRGSGSDDTELRYSSQYEERLDPFSSFSKRERQRKYLSLSPWDKATLSMGRLVLSNKMARTIGFFYTLFLHCLVFLVLYKLAWSESMERDCATFCAKKFADHLHKFHENDNGAAAGDLWQ

SEQ ID NO: 20848 - protein, 1403 aa, Homo sapiens
  Payload ID: 4208
  Gene Symbol: CUX1
  Gene Name: cut-like homeobox 1
  Uniprot ID: P39880
  ENSP ID: ENSP00000450125
MLCVAGARLKRELDATATVLANRQDESEQSRKRLIEQSREFKKNTPEDLRKQVAPLLKSFQGEIDALSKRSKEAEAAFLNVYKRLIDVPDPVPALDLGQQLQLKVQRLHDIETENQKLRETLEEYNKEFAEVKNQEVTIKALKEKIREYEQTLKNQAETIALEKEQKLQNDFAEKERKLQETQMSTTSKLEEAEHKVQSLQTALEKTRTELFDLKTKYDEETTAKADEIEMIMTDLERANQRAEVAQREAETLREQLSSANHSLQLASQIQKAPDVEQAIEVLTRSSLEVELAAKEREIAQLVEDVQRLQASLTKLRENSASQISQLEQQLSAKNSTLKQLEEKLKGQADYEEVKKELNILKSMEFAPSEGAGTQDAAKPLEVLLLEKNRSLQSENAALRISNSDLSGPYSTNSISSQSPLQQSPDVNGMAPSPSQSESAGSVSEGEEMDTAEIARQVKEQLIKHNIGQRIFGHYVLGLSQGSVSEILARPKPWNKLTVRGKEPFHKMKQFLSDEQNILALRSIQGRQRENPGQSLNRLFQEVPKRRNGSEGNITTRIRASETGSDEAIKSILEQAKRELQVQKTAEPAQPSSASGSGNSDDAIRSILQQARREMEAQQAALDPALKQAPLSQSDITILTPKLLSTSPMPTVSSYPPLAISLKKPSAAPEAGASALPNPPALKKEAQDAPGLDPQGAADCAQGVLRQVKNEVGRSGAWKDHWWSAVQPERRNAASSEEAKAEETGGGKEKGSGGSGGGSQPRAERSQLQGPSSSEYWKEWPSAESPYSQSSELSLTGASRSETPQNSPLPSSPIVPMSKPTKPSVPPLTPEQYEVYMYQEVDTIELTRQVKEKLAKNGICQRIFGEKVLGLSQGSVSDMLSRPKPWSKLTQKGREPFIRMQLWLNGELGQGVLPVQGQQQGPVLHSVTSLQDPLQQGCVSSESTPKTSASCSPAPESPMSSSESVKSLTELVQQPCPPIEASKDSKPPEPSDPPASDSQPTTPLPLSGHSALSIQELVAMSPELDTYGITKRVKEVLTDNNLGQRLFGETILGLTQGSVSDLLARPKPWHKLSLKGREPFVRMQLWLNDPNNVEKLMDMKRMEKKAYMKRRHSSVSDSQPCEPPSVGTEYSQGASPQPQHQLKKPRVVLAPEEKEALKRAYQQKPYPSPKTIEDLATQLNLKTSTVINWFHNYRSRIRRELFIEEIQAGSQGQAGASDSPSARSGRAAPSSEGDSCDGVEATEGPGSADTEEPKSQGEAEREEVPRPAEQTEPPPSGTPGPDDARDDDHEGGPVEGPGPLPSPASATATAAPAAPEDAATSAAAAPGEGPAAPSSAPPPSNSSSSSAPRRPSSLQSLFGLPEAAGARDSRDNPLRKKKAANLNSIIHRLEKAASREEPIEWEF

SEQ ID NO: 20849 - protein, 1347 aa, Homo sapiens
  Payload ID: 4208
  Gene Symbol: CUX1
  Gene Name: cut-like homeobox 1
  Uniprot ID: P39880
  ENSP ID: ENSP00000451558
MLCVAGARLKRELDATATVLANRQDESEQSRKRLIEQSREFKKNTPEDLRKQVAPLLKSFQGEIDALSKRSKEAEAAFLNVYKRLIDVPDPVPALDLGQQLQLKVQRLHDIETENQKLRETLEEYNKEFAEVKNQEVTIKALKEKIREYEQTLKNQAETIALEKEQKLQNDFAEKERKLQETQMSTTSKLEEAEHKVQSLQTALEKTRTELFDLKTKYDEETTAKADEIEMIMTDLERANQRAEVAQREAETLREQLSSANHSLQLASQIQKAPDVEQAIEVLTRSSLEVELAAKEREIAQLVEDVQRLQASLTKLRENSASQISQLEQQLSAKNSTLKQLEEKLKGQADYEEVKKELNILKSMEFAPSEGAGTQDAAKPLEVLLLEKNRSLQSENAALRISNSDLSGPYSTNSISSQSPLQQSPDVNGMAPSPSQSESAGSVSEGEEMDTAEIARQVKEQLIKHNIGQRIFGHYVLGLSQGSVSEILARPKPWNKLTVRGKEPFHKMKQFLSDEQNILALRSIQGRQRAEPAQPSSASGSGNSDDAIRSILQQARREMEAQQAALDPALKQAPLSQSDITILTPKLLSTSPMPTVSSYPPLAISLKKPSAAPEAGASALPNPPALKKEAQDAPGLDPQGAADCAQGVLRQVKNEVGRSGAWKDHWWSAVQPERRNAASSEEAKAEETGGGKEKGSGGSGGGSQPRAERSQLQGPSSSEYWKEWPSAESPYSQSSELSLTGASRSETPQNSPLPSSPIVPMSKPTKPSVPPLTPEQYEVYMYQEVDTIELTRQVKEKLAKNGICQRIFGEKVLGLSQGSVSDMLSRPKPWSKLTQKGREPFIRMQLWLNGELGQGVLPVQGQQQGPVLHSVTSLQDPLQQGCVSSESTPKTSASCSPAPESPMSSSESVKSLTELVQQPCPPIEASKDSKPPEPSDPPASDSQPTTPLPLSGHSALSIQELVAMSPELDTYGITKRVKEVLTDNNLGQRLFGETILGLTQGSVSDLLARPKPWHKLSLKGREPFVRMQLWLNDPNNVEKLMDMKRMEKKAYMKRRHSSVSDSQPCEPPSVGTEYSQGASPQPQHQLKKPRVVLAPEEKEALKRAYQQKPYPSPKTIEDLATQLNLKTSTVINWFHNYRSRIRRELFIEEIQAGSQGQAGASDSPSARSGRAAPSSEGDSCDGVEATEGPGSADTEEPKSQGEAEREEVPRPAEQTEPPPSGTPGPDDARDDDHEGGPVEGPGPLPSPASATATAAPAAPEDAATSAAAAPGEGPAAPSSAPPPSNSSSSSAPRRPSSLQSLFGLPEAAGARDSRDNPLRKKKAANLNSIIHRLEKAASREEPIEWEF

SEQ ID NO: 20850 - protein, 676 aa, Homo sapiens
  Payload ID: 4208
  Gene Symbol: CUX1
  Gene Name: cut-like homeobox 1
  Uniprot ID: Q13948
  ENSP ID: ENSP00000484760
MAANVGSMFQYWKRFDLQQLQRELDATATVLANRQDESEQSRKRLIEQSREFKKNTPEDLRKQVAPLLKSFQGEIDALSKRSKEAEAAFLNVYKRLIDVPDPVPALDLGQQLQLKVQRLHDIETENQKLRETLEEYNKEFAEVKNQEVTIKALKEKIREYEQTLKNQAETIALEKEQKLQNDFAEKERKLQETQMSTTSKLEEAEHKVQSLQTALEKTRTELFDLKTKYDEETTAKADEIEMIMTDLERANQRAEVAQREAETLREQLSSANHSLQLASQIQKAPDVAIEVLTRSSLEVELAAKEREIAQLVEDVQRLQASLTKLRENSASQISQLEQQLSAKNSTLKQLEEKLKGQADYEEVKKELNILKSMEFAPSEGAGTQDAAKPLEVLLLEKNRSLQSENAALRISNSDLSGRCAELQVRITEAVATATEQRELIARLEQDLSIIQSIQRPDAEGAAEHRLEKIPEPIKEATALFYGPAAPASGALPEGQVDSLLSIISSQRERFRARNQELEAENRLAQHTLQALQSELDSLRADNIKLFEKIKFLQSYPGRGSGSDDTELRYSSQYEERLDPFSSFSKRERQRKYLSLSPWDKATLSMGRLVLSNKMARTIGFFYTLFLHCLVFLVLYKLAWSESMERDCATFCAKKFADHLHKFHENDNGAAAGDLWQ

SEQ ID NO: 20851 - protein, 1486 aa, Homo sapiens
  Payload ID: 4209
  Gene Symbol: CUX2
  Gene Name: cut-like homeobox 2
  Uniprot ID: O14529
  ENSP ID: ENSP00000261726
MAANVGSMFQYWKRFDLRRLQKELNSVASELSARQEESEHSHKHLIELRREFKKNVPEEIREMVAPVLKSFQAEVVALSKRSQEAEAAFLSVYKQLIEAPDPVPVFEAARSLDDRLQPPSFDPSGQPRRDLHTSWKRNPELLSPKEQREGTSPAGPTLTEGSRLPGIPGKALLTETLLQRNEAEKQKGLQEVQITLAARLGEAEEKIKVLHSALKATQAELLELRRKYDEEAASKADEVGLIMTNLEKANQRAEAAQREVESLREQLASVNSSIRLACCSPQGPSGDKVNFTLCSGPRLEAALASKDREILRLLKDVQHLQSSLQELEEASANQIADLERQLTAKSEAIEKLEEKLQAQSDYEEIKTELSILKAMKLASSTCSLPQGMAKPEDSLLIAKEAFFPTQKFLLEKPSLLASPEEDPSEDDSIKDSLGTEQSYPSPQQLPPPPGPEDPLSPSPGQPLLGPSLGPDGTRTFSLSPFPSLASGERLMMPPAAFKGEAGGLLVFPPAFYGAKPPTAPATPAPGPEPLGGPEPADGGGGGAAGPGAEEEQLDTAEIAFQVKEQLLKHNIGQRVFGHYVLGLSQGSVSEILARPKPWRKLTVKGKEPFIKMKQFLSDEQNVLALRTIQVRQRGSITPRIRTPETGSDDAIKSILEQAKKEIESQKGGEPKTSVAPLSIANGTTPASTSEDAIKSILEQARREMQAQQQALLEMEVAPRGRSVPPSPPERPSLATASQNGAPALVKQEEGSGGPAQAPLPVLSPAAFVQSIIRKVKSEIGDAGYFDHHWASDRGLLSRPYASVSPSLSSSSSSGYSGQPNGRAWPRGDEAPVPPEDEAAAGAEDEPPRTGELKAEGATAEAGARLPYYPAYVPRTLKPTVPPLTPEQYELYMYREVDTLELTRQVKEKLAKNGICQRIFGEKVLGLSQGSVSDMLSRPKPWSKLTQKGREPFIRMQLWLSDQLGQAVGQQPGASQASPTEPRSSPSPPPSPTEPEKSSQEPLSLSLESSKENQQPEGRSSSSLSGKMYSGSQAPGGIQEIVAMSPELDTYSITKRVKEVLTDNNLGQRLFGESILGLTQGSVSDLLSRPKPWHKLSLKGREPFVRMQLWLNDPHNVEKLRDMKKLEKKAYLKRRYGLISTGSDSESPATRSECPSPCLQPQDLSLLQIKKPRVVLAPEEKEALRKAYQLEPYPSQQTIELLSFQLNLKTNTVINWFHNYRSRMRREMLVEGTQDEPDLDPSGGPGILPPGHSHPDPTPQSPDSETEDQKPTVKELELQEGPEENSTPLTTQDKAQVRIKQEQMEEDAEEEAGSQPQDSGELDKGQGPPKEEHPDPPGNDGLPKVAPGPLLPGGSTPDCPSLHPQQESEAGERLHPDPLSFKSASESSRCSLEVSLNSPSAASSPGLMMSVSPVPSSSAPISPSPPGAPPAKVPSASPTADMAGALHPSAKVNPNLQRRHEKMANLNNIIYRVERAANREEALEWEF

SEQ ID NO: 20852 - protein, 251 aa, Homo sapiens
  Payload ID: 4209
  Gene Symbol: CUX2
  Gene Name: cut-like homeobox 2
  ENSP ID: ENSP00000380765
MCSPHMGEQDWTCRDPGWEQNLRQLRVLWEGNGFIAAFRFYFCTFAFYLPVVLLTGPRSGAVSGHFWEPWTALERRQELPRKELNSVASELSARQEESEHSHKHLIELRREFKKNVPEEIREMVAPVLKSFQAEVVALSKRSQEAEAAFLSVYKQLIEAPDPVPVFEAARSLDDRLQPPSFDPSGQPRRDLHTSWKRNPELLSPKEQREGTSPAGPTLTEGSRLPGIPGKALLTETLLQRNEAEKQKGLQE

SEQ ID NO: 20853 - protein, 229 aa, Homo sapiens
  Payload ID: 4210
  Gene Symbol: CWC15
  Gene Name: CWC15 spliceosome-associated protein
  Uniprot ID: Q9P013
  ENSP ID: ENSP00000475615
MTTAARPTFEPARGGRGKGEGDLSQLSKQYSSRDLPSHTKIKYRQTTQDAPEEVRNRDFRRELEERERAAAREKNRDRPTREHTTSSSVSKKPRLDQIPAANLDADDPLTDEEDEDFEEESDDDDTAALLAELEKIKKERAEEQARKEQEQKAEEERIRMENILSGNPLLNLTGPSQPQANFKVKRRWDDDVVFKNCAKGVDDQKKDKRFVNDTLRSEFHKKFMEKYIK

SEQ ID NO: 20854 - protein, 745 aa, Homo sapiens
  Payload ID: 4211
  Gene Symbol: CWC22
  Gene Name: CWC22 spliceosome-associated protein
  ENSP ID: ENSP00000384159
MKSSVAQIKPSSGHDRRENLNSYQRNSSPEDRYEEQERSPRDRDYFDYSRSDYEHSRRGRSYDSSMESRNRDREKRRERERDTDRKRSRKSPSPGRRNPETSVTQSSSAQDEPATKKKKDELDPLLTRTGGAYIPPAKLRMMQEQITDKNSLAYQRMSWEALKKSINGLINKVNISNISIIIQELLQENIVRGRGLLSRSVLQAQSASPIFTHVYAALVAIINSKFPQIGELILKRLILNFRKGYRRNDKQLCLTASKFVAHLINQNVAHEVLCLEMLTLLLERPTDDSVEVAIGFLKECGLKLTQVSPRGINAIFERLRNILHESEIDKRVQYMIEVMFAVRKDGFKDHPIILEGLDLVEEDDQFTHMLPLEDDYNPEDVLNVFKMDPNFMENEEKYKAIKKEILDEGDTDSNTDQDAGSSEEDEEEEEEEGEEDEEGQKVTIHDKTEINLVSFRRTIYLAIQSSLDFEECAHKLLKMEFPESQTKELCNMILDCCAQQRTYEKFFGLLAGRFCMLKKEYMESFEGIFKEQYDTIHRLETNKLRNVAKMFAHLLYTDSLPWSVLECIKLSEETTTSSSRIFVKIFFQELCEYMGLPKLNARLKDETLQPFFEGLLPRDNPRNTRFAINFFTSIGLGGLTDELREHLKNTPKVIVAQKPDVEQNKSSPSSSSSASSSSESDSSDSDSDSSDSSSESSSEESDSSSISSHSSASANDVRKKGHGKTRSKEVDKLIRNQQTNDRKQK

SEQ ID NO: 20855 - protein, 908 aa, Homo sapiens
  Payload ID: 4211
  Gene Symbol: CWC22
  Gene Name: CWC22 spliceosome-associated protein
  Uniprot ID: Q9HCG8
  ENSP ID: ENSP00000387006
MKSSVAQIKPSSGHDRRENLNSYQRNSSPEDRYEEQERSPRDRDYFDYSRSDYEHSRRGRSYDSSMESRNRDREKRRERERDTDRKRSRKSPSPGRRNPETSVTQSSSAQDEPATKKKKDELDPLLTRTGGAYIPPAKLRMMQEQITDKNSLAYQRMSWEALKKSINGLINKVNISNISIIIQELLQENIVRGRGLLSRSVLQAQSASPIFTHVYAALVAIINSKFPQIGELILKRLILNFRKGYRRNDKQLCLTASKFVAHLINQNVAHEVLCLEMLTLLLERPTDDSVEVAIGFLKECGLKLTQVSPRGINAIFERLRNILHESEIDKRVQYMIEVMFAVRKDGFKDHPIILEGLDLVEEDDQFTHMLPLEDDYNPEDVLNVFKMDPNFMENEEKYKAIKKEILDEGDTDSNTDQDAGSSEEDEEEEEEEGEEDEEGQKVTIHDKTEINLVSFRRTIYLAIQSSLDFEECAHKLLKMEFPESQTKELCNMILDCCAQQRTYEKFFGLLAGRFCMLKKEYMESFEGIFKEQYDTIHRLETNKLRNVAKMFAHLLYTDSLPWSVLECIKLSEETTTSSSRIFVKIFFQELCEYMGLPKLNARLKDETLQPFFEGLLPRDNPRNTRFAINFFTSIGLGGLTDELREHLKNTPKVIVAQKPDVEQNKSSPSSSSSASSSSESDSSDSDSDSSDSSSESSSEESDSSSISSHSSASANDVRKKGHGKTRSKEVDKLIRNQQTNDRKQKERRQEHGHQETRTERERRSEKHRDQNSSGSNWRDPITKYTSDKDVPSERNNYSRVANDRDQEMHIDLENKHGDPKKKRGERRNSFSENEKHTHRIKDSENFRRKDRSKSKEMNRKHSGSRSDEDRYQNGAERRWEKSSRYSEQSRESKKNQDRRREKSPAKQK

SEQ ID NO: 20856 - protein, 425 aa, Homo sapiens
  Payload ID: 4212
  Gene Symbol: CWC25
  Gene Name: CWC25 spliceosome-associated protein homolog
  Uniprot ID: Q9NXE8
  ENSP ID: ENSP00000477799
MGGGDLNLKKSWHPQTLRNVEKVWKAEQKHEAERKKIEELQRELREERAREEMQRYAEDVGAVKKKEEKLDWMYQGPGGMVNRDEYLLGRPIDKYVFEKMEEKEAGCSSETGLLPGSIFAPSGANSLLDMASKIREDPLFIIRKKEEEKKREVLNNPVKMKKIKELLQMSLEKKEKKKKKEKKKKHKKHKHRSSSSDRSSSEDEHSAGRSQKKMANSSPVLSKVPGYGLQVRNSDRNQGLQGPLTAEQKRGHGMKNHSRSRSSSHSPPRHASKKSTREAGSRDRRSRSLGRRSRSPRPSKLHNSKVNRRETGQTRSPSPKKEVYQRRHAPGYTRKLSAEELERKRQEMMENAKWREEERLNILKRHAKDEEREQRLEKLDSRDGKFIHRMKLESASTSSLEDRVKRNIYSLQRTSVALEKNFMKR

SEQ ID NO: 20857 - protein, 425 aa, Homo sapiens; identical to SEQ ID NO: 20856
  Payload ID: 4212
  Gene Symbol: CWC25
  Gene Name: CWC25 spliceosome-associated protein homolog
  Uniprot ID: Q9NXE8
  ENSP ID: ENSP00000478070

SEQ ID NO: 20858 - protein, 3 aa, Homo sapiens
  Payload ID: 4212
  Gene Symbol: CWC25
  Gene Name: CWC25 spliceosome-associated protein homolog
  ENSP ID: ENSP00000478244
  MOD_RES (1)..(1): Any amino acid
XWK

SEQ ID NO: 20859 - protein, 59 aa, Homo sapiens
  Payload ID: 4212
  Gene Symbol: CWC25
  Gene Name: CWC25 spliceosome-associated protein homolog
  ENSP ID: ENSP00000479527
LQMSLEKKEKKKKKEKKKKHKKHKHRSSSSDRSSSEDEHSAGRHEHLPCAGSCQVLGIQ

SEQ ID NO: 20860 - protein, 68 aa, Homo sapiens
  Payload ID: 4212
  Gene Symbol: CWC25
  Gene Name: CWC25 spliceosome-associated protein homolog
  ENSP ID: ENSP00000481539
MGGGDLNLKKSWHPQTLRNVEKVWKAEQKHEAERKKIEELQRELREERAREEMQRYAEDVGAVKSSWK

SEQ ID NO: 20861 - protein, 68 aa, Homo sapiens; identical to SEQ ID NO: 20860
  Payload ID: 4212
  Gene Symbol: CWC25
  Gene Name: CWC25 spliceosome-associated protein homolog
  ENSP ID: ENSP00000482247

SEQ ID NO: 20862 - protein, 68 aa, Homo sapiens; identical to SEQ ID NO: 20860
  Payload ID: 4212
  Gene Symbol: CWC25
  Gene Name: CWC25 spliceosome-associated protein homolog
  ENSP ID: ENSP00000487854

SEQ ID NO: 20863 - protein, 3 aa, Homo sapiens
  Payload ID: 4212
  Gene Symbol: CWC25
  Gene Name: CWC25 spliceosome-associated protein homolog
  ENSP ID: ENSP00000488038
  MOD_RES (1)..(1): Any amino acid
XWK

SEQ ID NO: 20864 - protein, 59 aa, Homo sapiens; identical to SEQ ID NO: 20859
  Payload ID: 4212
  Gene Symbol: CWC25
  Gene Name: CWC25 spliceosome-associated protein homolog
  ENSP ID: ENSP00000488629

SEQ ID NO: 20865 - protein, 68 aa, Homo sapiens; identical to SEQ ID NO: 20860
  Payload ID: 4212
  Gene Symbol: CWC25
  Gene Name: CWC25 spliceosome-associated protein homolog
  ENSP ID: ENSP00000488869

SEQ ID NO: 20866 - protein, 472 aa, Homo sapiens
  Payload ID: 4213
  Gene Symbol: CWC27
  Gene Name: CWC27 spliceosome-associated protein homolog
  Uniprot ID: Q6UX04
  ENSP ID: ENSP00000370460
MSNIYIQEPPTNGKVLLKTTAGDIDIELWSKEAPKACRNFIQLCLEAYYDNTIFHRVVPGFIVQGGDPTGTGSGGESIYGAPFKDEFHSRLRFNRRGLVAMANAGSHDNGSQFFFTLGRADELNNKHTIFGKVTGDTVYNMLRLSEVDIDDDERPHNPHKIKSCEVLFNPFDDIIPREIKRLKKEKPEEEVKKLKPKGTKNFSLLSFGEEAEEEEEEVNRVSQSMKGKSKSSHDLLKDDPHLSSVPVVESEKGDAPDLVDDGEDESAEHDEYIDGDEKNLMRERIAKKLKKDTSANVKSAGEGEVEKKSVSRSEELRKEARQLKRELLAAKQKKVENAAKQAEKRSEEEEAPPDGAVAEYRREKQKYEALRKQQSKKGTSREDQTLALLNQFKSKLTQAIAETPENDIPETEVEDDEGWMSHVLQFEDKSRKVKDASMQDSDTFEIYDPRNPVNKRRREESKKLMREKKERR

SEQ ID NO: 20867 - protein, 381 aa, Homo sapiens
  Payload ID: 4213
  Gene Symbol: CWC27
  Gene Name: CWC27 spliceosome-associated protein homolog
  ENSP ID: ENSP00000426802
MSNIYIQEPPTNGKVLLKTTAGDIDIELWSKEAPKACRNFIQLCLEAYYDNTIFHRVVPGFIVQGGDPTGTGSGGESIYGAPFKDEFHSRLRFNRRGLVAMANAGSHDNGSQFFFTLGRADELNNKHTIFGKVTGDTVYNMLRLSEVDIDDDERPHNPHKIKSCEVLFNPFDDIIPREIKRLKKEKPEEEVKKLKPKGTKNFSLLSFGEEAEEEEEEVNRVSQSMKGKSKSSHDLLKDDPHLSSVPVVESEKGDAPDLVDDGEDESAEHDEYIDGDEKNLMRERIAKKLKKDTSANVKSAGEGEVEKKSVSRSPPSLCLYLDYWIQLSRITQAYTSWYYYGFLDSSLSCVSSASLLLTRHNVYFTLQTHSTDHLAACFFMK

SEQ ID NO: 20868 - protein, 538 aa, Homo sapiens
  Payload ID: 4214
  Gene Symbol: CWF19L1
  Gene Name: CWF19-like 1, cell cycle control (S. pombe)
  Uniprot ID: Q69YN2
  ENSP ID: ENSP00000326411
MAQKPLRLLACGDVEGKFDILFNRVQAIQKKSGNFDLLLCVGNFFGSTQDAEWEEYKTGIKKAPIQTYVLGANNQETVKYFQDADGCELAENITYLGRKGIFTGSSGLQIVYLSGTESLNEPVPGYSFSPKDVSSLRMMLCTTSQFKGVDILLTSPWPKCVGNFGNSSGEVDTKKCGSALVSSLATGLKPRYHFAALEKTYYERLPYRNHIILQENAQHATRFIALANVGNPEKKKYLYAFSIVPMKLMDAAELVKQPPDVTENPYRKSGQEASIGKQILAPVEESACQFFFDLNEKQGRKRSSTGRDSKSSPHPKQPRKPPQPPGPCWFCLASPEVEKHLVVNIGTHCYLALAKGGLSDDHVLILPIGHYQSVVELSAEVVEEVEKYKATLRRFFKSRGKWCVVFERNYKSHHLQLQVIPVPISCSTTDDIKDAFITQAQEQQIELLEIPEHSDIKQIAQPGAAYFYVELDTGEKLFHRIKKNFPLQFGREVLASEAILNVPDKSDWRQCQISKEDEETLARRFRKDFEPYDFTLDD

SEQ ID NO: 20869 - protein, 253 aa, Homo sapiens
  Payload ID: 4214
  Gene Symbol: CWF19L1
  Gene Name: CWF19-like 1, cell cycle control (S. pombe)
  ENSP ID: ENSP00000359405
MKLMDAAELVKQPPDVTENPYRKSGQEASIGKQILAPVEESACQFFFDLNEKQGRKRSSTGRDSKSSPHPKQPRKPPQPPGPCWFCLASPEVEKHLVVNIGTHCYLALAKGGLSDDHVLILPIGHYQSVVELSAEVVEEVEKYKATLRRFFKSRGKWCVVFERNYKSHHLQLQIAQPGAAYFYVELDTGEKLFHRIKKNFPLQFGREVLASEAILNVPDKSDWRQCQISKEDEETLARRFRKDFEPYDFTLDD

SEQ ID NO: 20870 - protein, 894 aa, Homo sapiens
  Payload ID: 4215
  Gene Symbol: CWF19L2
  Gene Name: CWF19-like 2, cell cycle control (S. pombe)
  Uniprot ID: Q2TBE0
  ENSP ID: ENSP00000282251
MATSMAAASGRFESAKSIEERKEQTRNARAEVLRQAKANFEKEERRKELKRLRGEDTWMLPDVNERIEQFSQEHSVKKKKKKDKHSKKAKKEKKKKSKKQKYEKNNESSDSSSSSEDEWVEAVPSQTPDKEKAWKVKDEKSGKDDTQIIKRDEWMTVDFMSVKTVSSSSLKAEKETMRKIEQEKNQALEQSKLMERELNPYWKDGGTGLPPEDCSVSSITKVSVVEDGGLSWLRKSYLRMKEQAEKQSRNFEDIVAERYGSMEIFQSKLEDAEKAASTKEDYRRERWRKPTYSDKAQNCQESRESDLVKYGNSSRDRYATTDTAKNSNNEKFIGDEKDKRPGSLETCRRESNPRQNQEFSFGNLRAKFLRPSDDEELSFHSKGRKFEPLSSSSALVAQGSLCSGFRKPTKNSEERLTSWSRSDGRGDKKHSNQKPSETSTDEHQHVPEDPREKSQDEVLRDDPPKKEHLRDTKSTFAGSPERESIHILSVDEKNKLGAKIIKAEMMGNMELAEQLKVQLEKANKFKETITQIPKKSGVENEDQQEVILVRTDQSGRVWPVNTPGKSLESQGGRRKRQMVSTHEERERVRYFHDDDNLSLNDLVKNEKMGTAENQNKLFMRMASKFMGKTDGDYYTLDDMFVSKAAERERLGEEEENQRKKAIAEHRSLAAQMEKCLYCFDSSQFPKHLIVAIGVKVYLCLPNVRSLTEGHCLIVPLQHHRAATLLDEDIWEEIQMFRKSLVKMFEDKGLDCIFLETNMSMKKQYHMVYECIPLPKEVGDMAPIYFKKAIMESDEEWSMNKKLIDLSSKDIRKSVPRGLPYFSVDFGLHGGFAHVIEDQHKFPHYFGKEIIGGMLDIEPRLWRKGIRESFEDQRKKALQFAQWWKPYDFTKSKNY

SEQ ID NO: 20871 - protein, 623 aa, Homo sapiens
  Payload ID: 4215
  Gene Symbol: CWF19L2
  Gene Name: CWF19-like 2, cell cycle control (S. pombe)
  ENSP ID: ENSP00000411736
VEAVPSQTPDKEKAWKVKDEKSGKDDTQIIKRDEWMTVDFMSVKTVSSSSLKAEKETMRKIEQEKNQALEQSKLMERELNPYWKDGGTGLPPEDCSVSSITKVSVVEDGGLSWLRKSYLRMKEQAEKQSRNFEDIVAERYGSMEIFQSKLEDAEKAASTKEDYRRERWRKPTYSDKAQNCQESRESDLVKYGNSSRDRYATTDTAKNSNNEKFIGDEKDKRPGSLETCRRESNPRQNQEFSFGNLRAKFLRPSDDEELSFHSKGRKFEPLSSSSALVAQGSLCSGFRKPTKNSEERLTSWSRSDGRGDKKHSNQKPSETSTDEHQHVPEDPREKSQDEVLRDDPPKKEHLRDTKSTFAGSPERESIHILSVDEKNKLGAKIIKAEMMGNMELAEQLKVQLEKANKFKETITQIPKKSGVENEDQQEVILVRTDQSGRVWPVNTPGKSLESQGGRRKRQMVSTHEERERVRYFHDDDNLSLNDLVKNEKMGTAENQNKLFMRMASKFMGKTDGDYYTLDDMFVSKAAERERLGEEEENQRKKAIAEHRSLAAQMEKCLYCFDSSQFPKHLIVAIGVKVYLCLPNVRSLTEGHCLIVPLQHHRAATLLDEDIWEEIQIKSRTVIQ

SEQ ID NO: 20872 - protein, 553 aa, Homo sapiens
  Payload ID: 4215
  Gene Symbol: CWF19L2
  Gene Name: CWF19-like 2, cell cycle control (S. pombe)
  ENSP ID: ENSP00000434704
VEAVPSQTPDKEKAWKVKDEKSGKDDTQIIKRDEWMTVDFMSVKTVSSSSLKAEKETMRKIEQEKNQALEQSKLMERELNPYWKDGGTGLPPEDCSVSSITKVSVVEDGGLSWLRKSYLRMKEQAEKQSRNFEDIVAERYGSMEIFQSKLEDAEKAASTKEDYRRERWRKPTYSDKAQNCQESRESDLVKYGNSSRDRYATTDTAKNSNNEKFIGDEKDKRPGSLETCRRESNPRQNQEFSFGNLRAKFLRPSDDEELSFHSKGRKFEPLSSSSALVAQGSLCSGFRKPTKNSEERLTSWSRSDGRGDKKHSNQKPSETSTDEHQHVPEDPREKSQDEVLRDDPPKKEHLRDTKSTFAGSPERESIHILSVDEKNKLGAKIIKAEMMGNMELAEQLKVQLEKANKFKETITQIPKKSGVENEDQQEVILVRTDQSGRVWPVNTPGKSLESQGGRRKRQMVSTHEERERVRYFHDDDNLSLNDLVKNEKMGTAENQNKLFMRMASKQLRENVLVKRKRTKGKKLLLSIGVLLHKWKNVCIVLTALNFPSILLLQ

SEQ ID NO: 20873 - protein, 47 aa, Homo sapiens
  Payload ID: 4216
  Gene Symbol: CMC1
  Gene Name: C-x(9)-C motif containing 1
  ENSP ID: ENSP00000334960
MALDPAGTGAGSGVCRGASPRVSRRGPCGLDADLGKTSISDMSKKMF

SEQ ID NO: 20874 - protein, 76 aa, Homo sapiens
  Payload ID: 4216
  Gene Symbol: CMC1
  Gene Name: C-x(9)-C motif containing 1
  ENSP ID: ENSP00000404581
MALDPADFTKCCKNSGVLMVVKCRKENSALKECLTAYYNDPAFYEECKMEYLKEREEFRKTGIPTKKRLQKLPTSM

SEQ ID NO: 20875 - protein, 113 aa, Homo sapiens
  Payload ID: 4216
  Gene Symbol: CMC1
  Gene Name: C-x(9)-C motif containing 1
  ENSP ID: ENSP00000411302
  MOD_RES (1)..(1): Any amino acid
XRVNSSTKLSSGANQHLRHVEKDVLIPKIMREKAKERCSEQVQDFTKCCKNSGVLMVVKCRKENSALKECLTAYYNDPAFYEECKMEYLKEREEFRKTGIPTKKRLQKLPTSM

SEQ ID NO: 20876 - protein, 106 aa, Homo sapiens
  Payload ID: 4216
  Gene Symbol: CMC1
  Gene Name: C-x(9)-C motif containing 1
  Uniprot ID: Q7Z7K0
  ENSP ID: ENSP00000418348
MALDPADQHLRHVEKDVLIPKIMREKAKERCSEQVQDFTKCCKNSGVLMVVKCRKENSALKECLTAYYNDPAFYEECKMEYLKEREEFRKTGIPTKKRLQKLPTSM

SEQ ID NO: 20877 - protein, 79 aa, Homo sapiens
  Payload ID: 4217
  Gene Symbol: CMC2
  Gene Name: C-x(9)-C motif containing 2
  Uniprot ID: Q9NRP2
  ENSP ID: ENSP00000219400
MHPDLSPHLHTEECNVLINLLKECHKNHNILKFFGYCNDVDRELRKCLKNEYVENRTKSREHGIAMRKKLFNPPEESEK

SEQ ID NO: 20878 - protein, 55 aa, Homo sapiens
  Payload ID: 4217
  Gene Symbol: CMC2
  Gene Name: C-x(9)-C motif containing 2
  ENSP ID: ENSP00000454240
MHPDLSPHLHTEECNVLINLLKECHKNYVENRTKSREHGIAMRKKLFNPPEESEK

SEQ ID NO: 20879 - protein, 74 aa, Homo sapiens
  Payload ID: 4217
  Gene Symbol: CMC2
  Gene Name: C-x(9)-C motif containing 2
  ENSP ID: ENSP00000454396
MHPDLSPHLHTEECNVLINLLKECHKNHNILKFFGYCNDVDRELRKCLKNEVLALSPKLECSRVIVTHGSLKLK

SEQ ID NO: 20880 - protein, 36 aa, Homo sapiens
  Payload ID: 4217
  Gene Symbol: CMC2
  Gene Name: C-x(9)-C motif containing 2
  ENSP ID: ENSP00000454658
MHPDLSPHLHTEECNVLINLLKECHKNDSVQDTHYT

SEQ ID NO: 20881 - protein, 51 aa, Homo sapiens
  Payload ID: 4217
  Gene Symbol: CMC2
  Gene Name: C-x(9)-C motif containing 2
  ENSP ID: ENSP00000454709
MHPDLSPHLHTEECNVLINLLKECHKNGTRTVIFSADTSDYNGIILKVSAL

SEQ ID NO: 20882 - protein, 74 aa, Homo sapiens; identical to SEQ ID NO: 20879
  Payload ID: 4217
  Gene Symbol: CMC2
  Gene Name: C-x(9)-C motif containing 2
  ENSP ID: ENSP00000454938

SEQ ID NO: 20883 - protein, 51 aa, Homo sapiens; identical to SEQ ID NO: 20881
  Payload ID: 4217
  Gene Symbol: CMC2
  Gene Name: C-x(9)-C motif containing 2
  ENSP ID: ENSP00000455177

SEQ ID NO: 20884 - protein, 55 aa, Homo sapiens; identical to SEQ ID NO: 20878
  Payload ID: 4217
  Gene Symbol: CMC2
  Gene Name: C-x(9)-C motif containing 2
  ENSP ID: ENSP00000455404

SEQ ID NO: 20885 - protein, 79 aa, Homo sapiens; identical to SEQ ID NO: 20877
  Payload ID: 4217
  Gene Symbol: CMC2
  Gene Name: C-x(9)-C motif containing 2
  Uniprot ID: Q9NRP2
  ENSP ID: ENSP00000455457

SEQ ID NO: 20886 - protein, 79 aa, Homo sapiens; identical to SEQ ID NO: 20877
  Payload ID: 4217
  Gene Symbol: CMC2
  Gene Name: C-x(9)-C motif containing 2
  Uniprot ID: Q9NRP2
  ENSP ID: ENSP00000455723

SEQ ID NO: 20887 - protein, 54 aa, Homo sapiens
  Payload ID: 4217
  Gene Symbol: CMC2
  Gene Name: C-x(9)-C motif containing 2
  ENSP ID: ENSP00000455880
  MOD_RES (1)..(1): Any amino acid
XLHTEECNVLINLLKECHKNHNILKFFGYCNDVDRELRKCLKNEGPSGLPLEMS

SEQ ID NO: 20888 - protein, 50 aa, Homo sapiens
  Payload ID: 4217
  Gene Symbol: CMC2
  Gene Name: C-x(9)-C motif containing 2
  ENSP ID: ENSP00000456177
MHPDLSPHLHTEECNVLINLLKECHKNVLALSPKLECSRVIVTHGSLKLK

SEQ ID NO: 20889 - protein, 79 aa, Homo sapiens; identical to SEQ ID NO: 20877
  Payload ID: 4217
  Gene Symbol: CMC2
  Gene Name: C-x(9)-C motif containing 2
  Uniprot ID: Q9NRP2
  ENSP ID: ENSP00000456841

SEQ ID NO: 20890 - protein, 93 aa, Homo sapiens
  Payload ID: 4217
  Gene Symbol: CMC2
  Gene Name: C-x(9)-C motif containing 2
  ENSP ID: ENSP00000457106
MHPDLSPHLHTEECNVLINLLKECHKNETCIISATYSVQKKSSGVYHNILKFFGYCNDVDRELRKCLKNEVLALSPKLECSRVIVTHGSLKLK

SEQ ID NO: 20891 - protein, 74 aa, Homo sapiens; identical to SEQ ID NO: 20879
  Payload ID: 4217
  Gene Symbol: CMC2
  Gene Name: C-x(9)-C motif containing 2
  ENSP ID: ENSP00000457938

SEQ ID NO: 20892 - protein, 93 aa, Homo sapiens; identical to SEQ ID NO: 20890
  Payload ID: 4217
  Gene Symbol: CMC2
  Gene Name: C-x(9)-C motif containing 2
  ENSP ID: ENSP00000487053

SEQ ID NO: 20893 - protein, 68 aa, Homo sapiens
  Payload ID: 4218
  Gene Symbol: CMC4
  Gene Name: C-x(9)-C motif containing 4
  Uniprot ID: P56277
  ENSP ID: ENSP00000358491
MPQKDPCQKQACEIQKCLQANSYMESKCQAVIQELRKCCAQYPKGRSVVCSGFEKEEEENLTRKSASK

SEQ ID NO: 20894 - protein, 68 aa, Homo sapiens; identical to SEQ ID NO: 20893
  Payload ID: 4218
  Gene Symbol: CMC4
  Gene Name: C-x(9)-C motif containing 4
  Uniprot ID: P56277
  ENSP ID: ENSP00000358496

SEQ ID NO: 20895 - protein, 373 aa, Homo sapiens
  Payload ID: 4219
  Gene Symbol: CLMP
  Gene Name: CXADR-like membrane protein
  Uniprot ID: Q9H6B4
  ENSP ID: ENSP00000405577
MSLLLLLLLVSYYVGTLGTHTEIKRVAEEKVTLPCHHQLGLPEKDTLDIEWLLTDNEGNQKVVITYSSRHVYNNLTEEQKGRVAFASNFLAGDASLQIEPLKPSDEGRYTCKVKNSGRYVWSHVILKVLVRPSKPKCELEGELTEGSDLTLQCESSSGTEPIVYYWQRIREKEGEDERLPPKSRIDYNHPGRVLLQNLTMSYSGLYQCTAGNEAGKESCVVRVTVQYVQSIGMVAGAVTGIVAGALLIFLLVWLLIRRKDKERYEEEERPNEIREDAEAPKARLVKPSSSSSGSRSSRSGSSSTRSTANSASRSQRTLSTDAAPQPGLATQAYSLVGPEVRGSEPKKVHHANLTKAETTPSMIPSQSRAFQTV

SEQ ID NO: 20896 - protein, 656 aa, Homo sapiens
  Payload ID: 4220
  Gene Symbol: CXXC1
  Gene Name: CXXC finger protein 1
  Uniprot ID: Q9P0U4
  ENSP ID: ENSP00000285106
MEGDGSDPEPPDAGEDSKSENGENAPIYCICRKPDINCFMIGCDNCNEWFHGDCIRITEKMAKAIREWYCRECREKDPKLEIRYRHKKSRERDGNERDSSEPRDEGGGRKRPVPDPDLQRRAGSGTGVGAMLARGSASPHKSSPQPLVATPSQHHQQQQQQIKRSARMCGECEACRRTEDCGHCDFCRDMKKFGGPNKIRQKCRLRQCQLRARESYKYFPSSLSPVTPSESLPRPRRPLPTQQQPQPSQKLGRIREDEGAVASSTVKEPPEATATPEPLSDEDLPLDPDLYQDFCAGAFDDHGLPWMSDTEESPFLDPALRKRAVKVKHVKRREKKSEKKKEERYKRHRQKQKHKDKWKHPERADAKDPASLPQCLGPGCVRPAQPSSKYCSDDCGMKLAANRIYEILPQRIQQWQQSPCIAEEHGKKLLERIRREQQSARTRLQEMERRFHELEAIILRAKQQAVREDEESNEGDSDDTDLQIFCVSCGHPINPRVALRHMERCYAKYESQTSFGSMYPTRIEGATRLFCDVYNPQSKTYCKRLQVLCPEHSRDPKVPADEVCGCPLVRDVFELTGDFCRLPKRQCNRHYCWEKLRRAEVDLERVRVWYKLDELFEQERNVRTAMTNRAGLLALMLHQTIQHDPLTTDLRSSADR

SEQ ID NO: 20897 - protein, 660 aa, Homo sapiens
  Payload ID: 4220
  Gene Symbol: CXXC1
  Gene Name: CXXC finger protein 1
  Uniprot ID: Q9P0U4
  ENSP ID: ENSP00000390475
MEGDGSDPEPPDAGEDSKSENGENAPIYCICRKPDINCFMIGCDNCNEWFHGDCIRITEKMAKAIREWYCRECREKDPKLEIRYRHKKSRERDGNERDSSEPRDEGGGRKRPVPDPDLQRRAGSGTGVGAMLARGSASPHKSSPQPLVATPSQHHQQQQQQIKRSARMCGECEACRRTEDCGHCDFCRDMKKFGGPNKIRQKCRLRQCQLRARESYKYFPSSLSPVTPSESLPRPRRPLPTQQQPQPSQKLGRIREDEGAVASSTVKEPPEATATPEPLSDEDLPLDPDLYQDFCAGAFDDHGLPWMSDTEESPFLDPALRKRAVKVKHVKRREKKSEKKVMERKEERYKRHRQKQKHKDKWKHPERADAKDPASLPQCLGPGCVRPAQPSSKYCSDDCGMKLAANRIYEILPQRIQQWQQSPCIAEEHGKKLLERIRREQQSARTRLQEMERRFHELEAIILRAKQQAVREDEESNEGDSDDTDLQIFCVSCGHPINPRVALRHMERCYAKYESQTSFGSMYPTRIEGATRLFCDVYNPQSKTYCKRLQVLCPEHSRDPKVPADEVCGCPLVRDVFELTGDFCRLPKRQCNRHYCWEKLRRAEVDLERVRVWYKLDELFEQERNVRTAMTNRAGLLALMLHQTIQHDPLTTDLRSSADR

SEQ ID NO: 20898 - protein, 231 aa, Homo sapiens
  Payload ID: 4220
  Gene Symbol: CXXC1
  Gene Name: CXXC finger protein 1
  ENSP ID: ENSP00000465284
MEGDGSDPEPPDAGEDSKSENGENAPIYCICRKPDINCFMIGCDNCNEWFHGDCIRITEKMAKAIREWYCRECREKDPKLEIRYRHKKSRERDGNERDSSEPRDEGGGRKRPVPDPDLQRRAGSGTGVGAMLARGSASPHKSSPQPLVATPSQHHQQQQQQIKRSARMCGECEACRRTEDCGHCDFCRDMKKFGGPNKIRQKCRLRQCQLRARESYKYFPSSLSPVTPSES

SEQ ID NO: 20899 - protein, 250 aa, Homo sapiens
  Payload ID: 4220
  Gene Symbol: CXXC1
  Gene Name: CXXC finger protein 1
  ENSP ID: ENSP00000465849
MHHQQQQQQIKRSARMCGECEACRRTEDCGHCDFCRDMKKFGGPNKIRQKCRLRQCQLRARESYKYFPSSLSPVTPSESLPRPRRPLPTQQQPQPSQKLGRIREDEGAVASSTVKEPPEATATPEPLSDEDLPLDPDLYQDFCAGAFDDHGLPWMSDTEESPFLDPALRKRAVKVKHVKRREKKSEKKVMERKEERYKRHRQKQKHKDKWKHPERADAKDPASLPQCLGPGCVRPAQPSSKYCSDDCGMK

SEQ ID NO: 20900 - protein, 613 aa, Homo sapiens
  Payload ID: 4220
  Gene Symbol: CXXC1
  Gene Name: CXXC finger protein 1
  ENSP ID: ENSP00000467634
MEGDGSDPEPPDAGEDSKSENGENAPIYCICRKPDINCFMIGCDNCNEWFHGDCIRITEKMAKAIREWYCRECREKDPKLEIRYRHKKSRERDGNERDSSEPRDEGGGRKRPVPDPDLQRRAGSGTGVGAMLARGSASPHKSSPQPLVATPSQHHQQQQQQIKRSARMCGECEACRRTEDCGHCDFCRDMKKFGGPNKIRQKCRLRQCQLRARESYKYFPSSLSPVTPSESLPRPRRPLPTQQQPQPSQKLGRIREDEGAVASSTVKEPPEATATPEPLSDEDLPLDPDLYQDFCAGAFDDHGLPWMSDTEESPFLDPALRKRAVKVKHVKRREKKSEKKKEERYKRHRQKQKHKDKWKHPERADAKDPASLPQCLGPGCVRPAQPSSKYCSDDCGMKLAANRIYEILPQRIQQWQQSPCIAEEHGKKLLERIRREQQSARTRLQEMERRFHELEAIILRAKQQAVREDEESNEGDSDDTDLQIFCVSCGHPINPRVALRHMERCYAKYESQTSFGSMYPTRIEGAKHTVSGSRCCAPSTHGTPKCQLTRYAGAPLYVMSLSSRVTSAACPSASAIAITAGRSCGVRKWTWSACVCGTSWTSCLSRSAMCAQP

SEQ ID NO: 20901 - protein, 252 aa, Homo sapiens
  Payload ID: 4220
  Gene Symbol: CXXC1
  Gene Name: CXXC finger protein 1
  ENSP ID: ENSP00000468038
MEGDGSDPEPPDAGEDSKSENGENAPIYCICRKPDINCFMIGCDNCNEWFHGDCIRITEKMAKAIREWYCRECREKDPKLEIRYRHKKSRERDGNERDSSEPRDEGGGRKRPVPDPDLQRRAGSGTGVGAMLARGSASPHKSSPQPLVATPSQHHQQQQQQIKRSARMCGECEACRRTEDCGHCDFCRDMKKFGGPNKIRQKCRLRQCQLRARLSPVTPSESLPRPRRPLPTQQQPQPSQKLGRIREDEGAV

SEQ ID NO: 20902 - protein, 367 aa, Homo sapiens
  Payload ID: 4221
  Gene Symbol: CXXC4
  Gene Name: CXXC finger protein 4
  ENSP ID: ENSP00000378248
MNTNVCVEPGPSPEAPGLPKESHLPEGALNSLVDYNSEMERYRSFATSFYKTNGGAFPQAAKIARITTPIFPSSAAAAAAAARIGMSPWNCDNAATAAAATAMLWGSGGGGGGGGGGGGGGGGGGGGGGGGGGGRKSSSAAASSSASSSSAILPAGGGGGGGGGGSRTSMHHRNDSQRLGKAGCPPEPSLQMANTNFLSTLSPEHCRPLAGECMNKLKCGAAEAEIMNLPERVGTFSAIPALGGISLPPGVIVMTALHSPAAASAAVTDSAFQIANLADCPQNHSSSSSSSSGGAGGANPAKKKRKRCGVCVPCKRLINCGVCSSCRNRKTGHQICKFRKCEELKKKPGTSLERTPVPSAEAFRWFF

SEQ ID NO: 20903 - protein, 322 aa, Homo sapiens
  Payload ID: 4222
  Gene Symbol: CXXC5
  Gene Name: CXXC finger protein 5
  Uniprot ID: Q7LFL8
  ENSP ID: ENSP00000302543
MSSLGGGSQDAGGSSSSSTNGSGGSGSSGPKAGAADKSAVVAAAAPASVADDTPPPERRNKSGIISEPLNKSLRRSRPLSHYSSFGSSGGSGGGSMMGGESADKATAAAAAASLLANGHDLAAAMAVDKSNPTSKHKSGAVASLLSKAERATELAAEGQLTLQQFAQSTEMLKRVVQEHLPLMSEAGAGLPDMEAVAGAEALNGQSDFPYLGAFPINPGLFIMTPAGVFLAESALHMAGLAEYPMQGELASAISSGKKKRKRCGMCAPCRRRINCEQCSSCRNRKTGHQICKFRKCEELKKKPSAALEKVMLPTGAAFRWFQ

SEQ ID NO: 20904 - protein, 83 aa, Homo sapiens
  Payload ID: 4222
  Gene Symbol: CXXC5
  Gene Name: CXXC finger protein 5
  ENSP ID: ENSP00000421057
MSSLGGGSQDAGGSSSSSTNGSGGSGSSGPKAGAADKSAVVAAAAPASVADDTPPPERRNKSGIISEPLNKSLRRSRPLSHYS

SEQ ID NO: 20905 - protein, 8 aa, Homo sapiens
  Payload ID: 4222
  Gene Symbol: CXXC5
  Gene Name: CXXC finger protein 5
  ENSP ID: ENSP00000421866
MSSLGGGS

SEQ ID NO: 20906 - protein, 102 aa, Homo sapiens
  Payload ID: 4222
  Gene Symbol: CXXC5
  Gene Name: CXXC finger protein 5
  ENSP ID: ENSP00000422883
MSSLGGGSQDAGGSSSSSTNGSGGSGSSGPKAGAADKSAVVAAAAPASVADDTPPPERRNKSGIISEPLNKSLRRSRPLSHYSSFGSSGGSGGGSMMGGESA

SEQ ID NO: 20907 - protein, 73 aa, Homo sapiens
  Payload ID: 4222
  Gene Symbol: CXXC5
  Gene Name: CXXC finger protein 5
  ENSP ID: ENSP00000423365
MSSLGGGSQDAGGSSSSSTNGSGGSGSSGPKAGAADKSAVVAAAAPASVADDTPPPERRNKSGIISEPLNKSL

SEQ ID NO: 20908 - protein, 181 aa, Homo sapiens
  Payload ID: 4222
  Gene Symbol: CXXC5
  Gene Name: CXXC finger protein 5
  ENSP ID: ENSP00000424219
MSSLGGGSQDAGGSSSSSTNGSGGSGSSGPKAGAADKSAVVAAAAPASVADDTPPPERRNKSGIISEPLNKSLRRSRPLSHYSSFGSSGGSGGGSMMGGESADKATAAAAAASLLANGHDLAAAMAVDKSNPTSKHKSGAVASLLSKAERATELAAEGQLTLQQFAQSTEMLKRVVQEHLP

SEQ ID NO: 20909 - protein, 161 aa, Homo sapiens
  Payload ID: 4222
  Gene Symbol: CXXC5
  Gene Name: CXXC finger protein 5
  ENSP ID: ENSP00000425203
MSSLGGGSQDAGGSSSSSTNGSGGSGSSGPKAGAADKSAVVAAAAPASVADDTPPPERRNKSGIISEPLNKSLRRSRPLSHYSSFGSSGGSGGGSMMGGESADKATAAAAAASLLANGHDLAAAMAVDKSNPTSKHKSGAVASLLSKAERATELAAEGQLT

SEQ ID NO: 20910 - protein, 80 aa, Homo sapiens
  Payload ID: 4222
  Gene Symbol: CXXC5
  Gene Name: CXXC finger protein 5
  ENSP ID: ENSP00000426124
MSSLGGGSQDAGGSSSSSTNGSGGSGSSGPKAGAADKSAVVAAAAPASVADDTPPPERRNKSGIISEPLNKSLRRSRPLS

SEQ ID NO: 20911 - protein, 68 aa, Homo sapiens
  Payload ID: 4222
  Gene Symbol: CXXC5
  Gene Name: CXXC finger protein 5
  ENSP ID: ENSP00000427127
MSSLGGGSQDAGGSSSSSTNGSGGSGSSGPKAGAADKSAVVAAAAPASVADDTPPPERRNKSGIISEP

SEQ ID NO: 20912 - protein, 11 aa, Homo sapiens
  Payload ID: 4222
  Gene Symbol: CXXC5
  Gene Name: CXXC finger protein 5
  ENSP ID: ENSP00000427253
MSSLGGGSQDA

SEQ ID NO: 20913 - protein, 322 aa, Homo sapiens; identical to SEQ ID NO: 20903
  Payload ID: 4222
  Gene Symbol: CXXC5
  Gene Name: CXXC finger protein 5
  Uniprot ID: Q7LFL8
  ENSP ID: ENSP00000427379

SEQ ID NO: 20914 - protein, 98 aa, Homo sapiens
  Payload ID: 4222
  Gene Symbol: CXXC5
  Gene Name: CXXC finger protein 5
  ENSP ID: ENSP00000427440
MSSLGGGSQDAGGSSSSSTNGSGGSGSSGPKAGAADKSAVVAAAAPASVADDTPPPERRNKSGIISEPLNKSLRRSRPLSHYSSFGSSGGSGGGSMMG

SEQ ID NO: 20915 - protein, 137 aa, Homo sapiens
  Payload ID: 4222
  Gene Symbol: CXXC5
  Gene Name: CXXC finger protein 5
  ENSP ID: ENSP00000430522
MSSLGGGSQDAGGSSSSSTNGSGGSGSSGPKAGAADKSAVVAAAAPASVADDTPPPERRNKSGIISEPLNKSLRRSRPLSHYSSFGSSGGSGGGSMMGGESADKATAAAAAASLLANGHDLAAAMAVDKSNPTSKHK

SEQ ID NO: 20916 - protein, 196 aa, Homo sapiens
  Payload ID: 4222
  Gene Symbol: CXXC5
  Gene Name: CXXC finger protein 5
  ENSP ID: ENSP00000430949
MSSLGGGSQDAGGSSSSSTNGSGGSGSSGPKAGAADKSAVVAAAAPASVADDTPPPERRNKSGIISEPLNKSLRRSRPLSHYSSFGSSGGSGGGSMMGGESADKATAAAAAASLLANGHDLAAAMAVDKSNPTSKHKSGAVASLLSKAERATELAAEGQLTLQQFAQSTEMLKRVVQEHLPLMSEAGAGLPDMEAV

SEQ ID NO: 20917 - protein, 161 aa, Homo sapiens
  Payload ID: 4223
  Gene Symbol: CNBD1
  Gene Name: cyclic nucleotide binding domain containing 1
  ENSP ID: ENSP00000427742
  MOD_RES (1)..(1): Any amino acid
XGCCNIYRSIIGFVKLRSNKVKRSQKLVYMGKLKEKESFGEISVLLQVPFTCTIITKKEVEMAIIEDKDLFELDPVTKQLMLQTAKPTFGHLTDEDVKNEYLKKEQQKEWKDFKIASWTKEITDFICLYEKHQDNFTLPKIAHLERITKRIKNNSILIHLE

SEQ ID NO: 20918 - protein, 436 aa, Homo sapiens
  Payload ID: 4223
  Gene Symbol: CNBD1
  Gene Name: cyclic nucleotide binding domain containing 1
  Uniprot ID: Q8NA66
  ENSP ID: ENSP00000430073
MPMSSLPAAILSHMTAINNVPPPPLHSIPNLKKSKHINYGQLNALCHIRGQHSRSMSNILSAHDTFMKQYPKVFLHQKPRLPKLFKQEEQRELNEGKEESQHQQPDDSNNIAVHVQRAHGGHILYRPKRATEKFEEFLAILKKLPIHRTPYEHKTVWKFLKTIPDLTFQLNDKHLKTLSKTVFSETWLKGSTVVANDGFYVILKGLARPQTNVYKNLIEGSDSPDSFISQSFHSFIWSEEFKNSTLAEMYLPSYDSMLSKWSTFGTLEVMPQNESETQMFSVVTEDDCEILKIPAKGYAKIKEEKIKLENMQKLKLIRMCPYYEEWPTLSIYELIALLKWKKFPPGHVIVESGNIISFVGYINSGCCNIYRSIIGFVKLRSNKVKRSQKLVYMGKLKEKESFGEISVLLQVPFTCTIITKKEVEMAIIEDKDLFVA

SEQ ID NO: 20919 - protein, 207 aa, Homo sapiens
  Payload ID: 4223
  Gene Symbol: CNBD1
  Gene Name: cyclic nucleotide binding domain containing 1
  ENSP ID: ENSP00000430986
  MOD_RES (1)..(1): Any amino acid
XNMQKLKLIRMCPYYEEWPTLSIYELIALLKWKKFPPGHVIVESGNIISFVGYINSGCCNIYRSIIGFVKLRSNKVKRSQKLVYMGKLKEKESFGEISVLLQVPFTCTIITKKEVEMAIIEDKDLFELDPVTKQLMLQTAKPTFGHLTDEDVKNEYLKKEQQKEWKDFKDKTVKNSLYYKGIIPGFGKWDHYCTSIPRNLKDTLVNY

SEQ ID NO: 20920 - protein, 292 aa, Homo sapiens [sequence omitted]

SEQ ID NO: 20921 - protein, 572 aa, Homo sapiens
  Payload ID: 4224
  Gene Symbol: CNBD2
  Gene Name: cyclic nucleotide binding domain containing 2
  Uniprot ID: Q96M20
  ENSP ID: ENSP00000340954
MRRHMVTYAWQLLKKELGLYQLAMDIIIMIRVCKMFRQGLRGFREYQIIETAHWKHPIFSFWDKKMQSRVTFDTMDFIAEEGHFPPKAIQIMQKKPSWRTEDEIQAVCNILQVLDSYRNYAEPLQLLLAKVMRFERFGRRRVIIKKGQKGNSFYFIYLGTVAITKDEDGSSAFLDPHPKLLHKGSCFGEMDVLHASVRRSTIVCMEETEFLVVDREDFFANKLDQEVQKDAQYRFEFFRKMELFASWSDEKLWQLVAMAKIERFSYGQLISKDFGESPFIMFISKGSCEVLRLLDLGASPSYRRWIWQHLELIDGRPLKTHLSEYSPMERFKEFQIKSYPLQDFSSLKLPHLKKAWGLQGTSFSRKIRTSGDTLPKMLGPKIQSRPAQSIKCAMINIKPGELPKEAAVGAYVKVHTVEQGEILAFLPEGECDTRPLILMSLGNELIRIRKEIFYELIDNDDEMIKKLLKLNIAFPSDEDMCQKFLQQNSWNIFRKDLLQLLVEPCQSQLFTPNRPKKREIYNPKSVVLDLCSINKTTKPRYPIFMAPQKYLPPLRIVQAIKAPRYKIRELLA

SEQ ID NO: 20922 - protein, 576 aa, Homo sapiens
  Payload ID: 4224
  Gene Symbol: CNBD2
  Gene Name: cyclic nucleotide binding domain containing 2
  Uniprot ID: Q96M20
  ENSP ID: ENSP00000363084
MRRHMVTYAWQLLKKELGLYQLAMDIIIMIRVCKMFRQGLRGFREYQIIETAHWKHPIFSFWDKKMQSRVTFDTMDFIAEEGHFPPKAIQIMQKKPSWRTEDEIQAVCNILQVLDSYRNYAEPLQLLLAKVMRFERFGRRRVIIKKGQKGNSFYFIYLGTVAITKDEDGSSAFLDPHPKLLHKGSCFGEMDVLHASVRRSTIVCMEETEFLVVDREDFFANKLDQEVQKDAQYRFEFFRKMELFASWSDEKLWQLVAMAKIERFSYGQLISKDFGESPFIMFISKGSCEVLRLLDLGASPSYRRWIWQHLELIDGRPLKTHLSEYSPMERFKEFQIKSYPLQDFSSLKLPHLKKAWGLQGTSFSRKIRTSGDTLPKMLGPKIQSRPAQSIKCAMINIKPGELPKEAAVGAYVKVHTVEQGEILGLHQAFLPEGECDTRPLILMSLGNELIRIRKEIFYELIDNDDEMIKKLLKLNIAFPSDEDMCQKFLQQNSWNIFRKDLLQLLVEPCQSQLFTPNRPKKREIYNPKSVVLDLCSINKTTKPRYPIFMAPQKYLPPLRIVQAIKAPRYKIRELLA

SEQ ID NO: 20923 - protein, 423 aa, Homo sapiens
  Payload ID: 4224
  Gene Symbol: CNBD2
  Gene Name: cyclic nucleotide binding domain containing 2
  Uniprot ID: Q96M20
  ENSP ID: ENSP00000442729
MRRHMVTYAWQLLKKELGLYQLAMDIIIMIRVCKMFRQGLRGFREYQIIETAHWKHPIFSFWDKKMQSRVTFDTMDFIAEEGHFPPKAIQIMQKKPSWRTEDEIQAVCNILQVLDSYRNYAEPLQLLLAKVMRFERFGRRRVIIKKGQKGNSFYFIYLGTVAITKDEDGSSAFLDPHPKLLHKGSCFGEMDVLHASVRRSTIVCMEETEFLVVDREDFFANKLDQEVQKDAQYRFEFFRKMELFASWSDEKLWQLVAMAKIERFSYGQLISKDFGESPFIMFISKGSCEVLRLLDLGASPSYRRWIWQHLELIDGRPLKTHLSEYSPMERFKEFQIKSYPLQDFSSLKLPHLKKAWGLQGTSFSRKIRTSGDTLPKMLGPKIQSRPAQSIKCAMINIKPGELPKEAAVGAYVKVHTVEQGEIL

SEQ ID NO: 20924 - protein, 144 aa, Homo sapiens
  Payload ID: 4224
  Gene Symbol: CNBD2
  Gene Name: cyclic nucleotide binding domain containing 2
  ENSP ID: ENSP00000476014
MRRHMVTYAWQLLKKELGLYQLAMDIIIMIRVCKMFRQGLRGFREYQIIETAHWKHPIFSFWDKKMQSRVTFDTMDFIAEEGHFPPKAIQIMQKKPSWRTEDEIQAVCNILQVLDSYRNYAEPLQLLLAKVMRFERKWTFCMLQ

SEQ ID NO: 20925 - protein, 25 aa, Homo sapiens
  Payload ID: 4224
  Gene Symbol: CNBD2
  Gene Name: cyclic nucleotide binding domain containing 2
  ENSP ID: ENSP00000478833
  MOD_RES (1)..(1): Any amino acid
XDFKSRTLSVRRFGLQVTFACGRPF

SEQ ID NO: 20926 - protein, 181 aa, Homo sapiens
  Payload ID: 4224
  Gene Symbol: CNBD2
  Gene Name: cyclic nucleotide binding domain containing 2
  ENSP ID: ENSP00000479333
MRRLLPSRCGRASCAWPGLLPNGGASERQFEEESEEEPECLEIDFKSRTLSVRRFGLQIEKPRCQKMKDWSKIRKLGLYQLAMDIIIMIRVCKMFRQGLRGFREYQIIETAHWKHPIFSFWDKKMQSRVTFDTMDFIAEEGHFPPKAIQIMQKKPSWRTEDEIQAVCNILQVLDSYRNYAE

SEQ ID NO: 20927 - protein, 100 aa, Homo sapiens
  Payload ID: 4224
  Gene Symbol: CNBD2
  Gene Name: cyclic nucleotide binding domain containing 2
  ENSP ID: ENSP00000480804
MRRHMVTYAWQLLKKELGLYQLAMDIIIMIRVCKMFRQGLRGFREYQIIETAHWKHPIFSFWDVSSWAQQDYEGSKKPNKLHPTSWPKLRTEKEDKRKSR

SEQ ID NO: 20928 - protein, 690 aa, Homo sapiens
  Payload ID: 4225
  Gene Symbol: CNGA1
  Gene Name: cyclic nucleotide gated channel alpha 1
  Uniprot ID: P29973
  ENSP ID: ENSP00000351320
MKLSMKNNIINTQQSFVTMPNVIVPDIEKEIRRMENGACSSFSEDDDSASTSEESENENPHARGSFSYKSLRKGGPSQREQYLPGAIALFNVNNSSNKDQEPEEKKKKKKEKKSKSDDKNENKNDPEKKKKKKDKEKKKKEEKSKDKKEEEKKEVVVIDPSGNTYYNWLFCITLPVMYNWTMVIARACFDELQSDYLEYWLILDYVSDIVYLIDMFVRTRTGYLEQGLLVKEELKLINKYKSNLQFKLDVLSLIPTDLLYFKLGWNYPEIRLNRLLRFSRMFEFFQRTETRTNYPNIFRISNLVMYIVIIIHWNACVFYSISKAIGFGNDTWVYPDINDPEFGRLARKYVYSLYWSTLTLTTIGETPPPVRDSEYVFVVVDFLIGVLIFATIVGNIGSMISNMNAARAEFQARIDAIKQYMHFRNVSKDMEKRVIKWFDYLWTNKKTVDEKEVLKYLPDKLRAEIAINVHLDTLKKVRIFADCEAGLLVELVLKLQPQVYSPGDYICKKGDIGREMYIIKEGKLAVVADDGVTQFVVLSDGSYFGEISILNIKGSKAGNRRTANIKSIGYSDLFCLSKDDLMEALTEYPDAKTMLEEKGKQILMKDGLLDLNIANAGSDPKDLEEKVTRMEGSVDLLQTRFARILAEYESMQQKLKQRLTKVEKFLKPLIDTEFSSIEGPGAESGPIDST

SEQ ID NO: 20929 - protein, 759 aa, Homo sapiens
  Payload ID: 4225
  Gene Symbol: CNGA1
  Gene Name: cyclic nucleotide gated channel alpha 1
  Uniprot ID: P29973
  ENSP ID: ENSP00000384264
MESRSSPRLECSGAISAHCSLHLPDSSDFQLIFVFLVEMGFHHVGQAGLELLISSDLPTSASQSAGITDMKLSMKNNIINTQQSFVTMPNVIVPDIEKEIRRMENGACSSFSEDDDSASTSEESENENPHARGSFSYKSLRKGGPSQREQYLPGAIALFNVNNSSNKDQEPEEKKKKKKEKKSKSDDKNENKNDPEKKKKKKDKEKKKKEEKSKDKKEEEKKEVVVIDPSGNTYYNWLFCITLPVMYNWTMVIARACFDELQSDYLEYWLILDYVSDIVYLIDMFVRTRTGYLEQGLLVKEELKLINKYKSNLQFKLDVLSLIPTDLLYFKLGWNYPEIRLNRLLRFSRMFEFFQRTETRTNYPNIFRISNLVMYIVIIIHWNACVFYSISKAIGFGNDTWVYPDINDPEFGRLARKYVYSLYWSTLTLTTIGETPPPVRDSEYVFVVVDFLIGVLIFATIVGNIGSMISNMNAARAEFQARIDAIKQYMHFRNVSKDMEKRVIKWFDYLWTNKKTVDEKEVLKYLPDKLRAEIAINVHLDTLKKVRIFADCEAGLLVELVLKLQPQVYSPGDYICKKGDIGREMYIIKEGKLAVVADDGVTQFVVLSDGSYFGEISILNIKGSKAGNRRTANIKSIGYSDLFCLSKDDLMEALTEYPDAKTMLEEKGKQILMKDGLLDLNIANAGSDPKDLEEKVTRMEGSVDLLQTRFARILAEYESMQQKLKQRLTKVEKFLKPLIDTEFSSIEGPGAESGPIDST

SEQ ID NO: 20930 - protein, 690 aa, Homo sapiens; identical to SEQ ID NO: 20928
  Payload ID: 4225
  Gene Symbol: CNGA1
  Gene Name: cyclic nucleotide gated channel alpha 1
  Uniprot ID: P29973
  ENSP ID: ENSP00000389881

SEQ ID NO: 20931 - protein, 99 aa, Homo sapiens
  Payload ID: 4225
  Gene Symbol: CNGA1
  Gene Name: cyclic nucleotide gated channel alpha 1
  ENSP ID: ENSP00000421110
MKLSMKNNIINTQQSFVTMPNVIVPDIEKEIRRMENGACSSFSEDDDSASTSEESENENPHARGSFSYKSLRKGGPSQREQYLPGAIALFNVNNSSNKD

SEQ ID NO: 20932 - protein, 99 aa, Homo sapiens; identical to SEQ ID NO: 20931
  Payload ID: 4225
  Gene Symbol: CNGA1
  Gene Name: cyclic nucleotide gated channel alpha 1
  ENSP ID: ENSP00000423327

SEQ ID NO: 20933 - protein, 128 aa, Homo sapiens
  Payload ID: 4225
  Gene Symbol: CNGA1
  Gene Name: cyclic nucleotide gated channel alpha 1
  ENSP ID: ENSP00000423721
MKLSMKNNIINTQQSFVTMPNVIVPDIEKEIRRMENGACSSFSEDDDSASTSEESENENPHARGSFSYKSLRKGGPSQREQYLPGAIALFNVNNSSNKDQEPEEKKKKKKEKKSKSDDKNENKNDPEK

SEQ ID NO: 20934 - protein, 690 aa, Homo sapiens; identical to SEQ ID NO: 20928
  Payload ID: 4225
  Gene Symbol: CNGA1
  Gene Name: cyclic nucleotide gated channel alpha 1
  Uniprot ID: P29973
  ENSP ID: ENSP00000426862

SEQ ID NO: 20935 - protein, 759 aa, Homo sapiens; identical to SEQ ID NO: 20929
  Payload ID: 4225
  Gene Symbol: CNGA1
  Gene Name: cyclic nucleotide gated channel alpha 1
  Uniprot ID: P29973
  ENSP ID: ENSP00000443401

SEQ ID NO: 20936 - protein, 664 aa, Homo sapiens
  Payload ID: 4226
  Gene Symbol: CNGA2
  Gene Name: cyclic nucleotide gated channel alpha 2
  Uniprot ID: Q16280
  ENSP ID: ENSP00000328478
MTEKTNGVKSSPANNHNHHAPPAIKANGKDDHRTSSRPHSAADDDTSSELQRLADVDAPQQGRSGFRRIVRLVGIIREWANKNFREEEPRPDSFLERFRGPELQTVTTQEGDGKGDKDGEDKGTKKKFELFVLDPAGDWYYCWLFVIAMPVLYNWCLLVARACFSDLQKGYYLVWLVLDYVSDVVYIADLFIRLRTGFLEQGLLVKDTKKLRDNYIHTLQFKLDVASIIPTDLIYFAVDIHSPEVRFNRLLHFARMFEFFDRTETRTNYPNIFRISNLVLYILVIIHWNACIYYAISKSIGFGVDTWVYPNITDPEYGYLAREYIYCLYWSTLTLTTIGETPPPVKDEEYLFVIFDFLIGVLIFATIVGNVGSMISNMNATRAEFQAKIDAVKHYMQFRKVSKGMEAKVIRWFDYLWTNKKTVDEREILKNLPAKLRAEIAINVHLSTLKKVRIFHDCEAGLLVELVLKLRPQVFSPGDYICRKGDIGKEMYIIKEGKLAVVADDGVTQYALLSAGSCFGEISILNIKGSKMGNRRTANIRSLGYSDLFCLSKDDLMEAVTEYPDAKKVLEERGREILMKEGLLDENEVATSMEVDVQEKLGQLETNMETLYTRFGRLLAEYTGAQQKLKQRITVLETKMKQNNEDDYLSDGMNSPELAAADEP

SEQ ID NO: 20937 - protein, 694 aa, Homo sapiens
  Payload ID: 4227
  Gene Symbol: CNGA3
  Gene Name: cyclic nucleotide gated channel alpha 3
  Uniprot ID: Q16281
  ENSP ID: ENSP00000272602
MAKINTQYSHPSRTHLKVKTSDRDLNRAENGLSRAHSSSEETSSVLQPGIAMETRGLADSGQGSFTGQGIARLSRLIFLLRRWAARHVHHQDQGPDSFPDRFRGAELKEVSSQESNAQANVGSQEPADRGRSAWPLAKCNTNTSNNTEEEKKTKKKDAIVVDPSSNLYYRWLTAIALPVFYNWYLLICRACFDELQSEYLMLWLVLDYSADVLYVLDVLVRARTGFLEQGLMVSDTNRLWQHYKTTTQFKLDVLSLVPTDLAYLKVGTNYPEVRFNRLLKFSRLFEFFDRTETRTNYPNMFRIGNLVLYILIIIHWNACIYFAISKFIGFGTDSWVYPNISIPEHGRLSRKYIYSLYWSTLTLTTIGETPPPVKDEEYLFVVVDFLVGVLIFATIVGNVGSMISNMNASRAEFQAKIDSIKQYMQFRKVTKDLETRVIRWFDYLWANKKTVDEKEVLKSLPDKLKAEIAINVHLDTLKKVRIFQDCEAGLLVELVLKLRPTVFSPGDYICKKGDIGKEMYIINEGKLAVVADDGVTQFVVLSDGSYFGEISILNIKGSKSGNRRTANIRSIGYSDLFCLSKDDLMEALTEYPEAKKALEEKGRQILMKDNLIDEELARAGADPKDLEEKVEQLGSSLDTLQTRFARLLAEYNATQMKMKQRLSQLESQVKGGGDKPLADGEVPGDATKTEDKQQ

SEQ ID NO: 20938 - protein, 694 aa, Homo sapiens; identical to SEQ ID NO: 20937
  Payload ID: 4227
  Gene Symbol: CNGA3
  Gene Name: cyclic nucleotide gated channel alpha 3
  Uniprot ID: Q16281
  ENSP ID: ENSP00000377140

SEQ ID NO: 20939 - protein, 698 aa, Homo sapiens
  Payload ID: 4227
  Gene Symbol: CNGA3
  Gene Name: cyclic nucleotide gated channel alpha 3
  Uniprot ID: Q16281
  ENSP ID: ENSP00000386761
METRGLADSGQGSFTGQGIARFGRIQKKSQPEKVVRAASRGRPLIGWTQWCAEDGGDESEMALAGSPGCSSGPQGRLSRLIFLLRRWAARHVHHQDQGPDSFPDRFRGAELKEVSSQESNAQANVGSQEPADRGRSAWPLAKCNTNTSNNTEEEKKTKKKDAIVVDPSSNLYYRWLTAIALPVFYNWYLLICRACFDELQSEYLMLWLVLDYSADVLYVLDVLVRARTGFLEQGLMVSDTNRLWQHYKTTTQFKLDVLSLVPTDLAYLKVGTNYPEVRFNRLLKFSRLFEFFDRTETRTNYPNMFRIGNLVLYILIIIHWNACIYFAISKFIGFGTDSWVYPNISIPEHGRLSRKYIYSLYWSTLTLTTIGETPPPVKDEEYLFVVVDFLVGVLIFATIVGNVGSMISNMNASRAEFQAKIDSIKQYMQFRKVTKDLETRVIRWFDYLWANKKTVDEKEVLKSLPDKLKAEIAINVHLDTLKKVRIFQDCEAGLLVELVLKLRPTVFSPGDYICKKGDIGKEMYIINEGKLAVVADDGVTQFVVLSDGSYFGEISILNIKGSKSGNRRTANIRSIGYSDLFCLSKDDLMEALTEYPEAKKALEEKGRQILMKDNLIDEELARAGADPKDLEEKVEQLGSSLDTLQTRFARLLAEYNATQMKMKQRLSQLESQVKGGGDKPLADGEVPGDATKTEDKQQ

SEQ ID NO: 20940 - protein, 676 aa, Homo sapiens
  Payload ID: 4227
  Gene Symbol: CNGA3
  Gene Name: cyclic nucleotide gated channel alpha 3
  Uniprot ID: Q16281
  ENSP ID: ENSP00000410070
MAKINTQYSHPSRTHLKVKTSDRDLNRAENGLSRAHSSSEETSSVLQPGIAMETRGLADSGQGSFTGQGIARLSRLIFLLRRWAARHVHHQDQGPDSFPDRFRGAELKEVSSQESNAQANVGSQEPADRGRRKKTKKKDAIVVDPSSNLYYRWLTAIALPVFYNWYLLICRACFDELQSEYLMLWLVLDYSADVLYVLDVLVRARTGFLEQGLMVSDTNRLWQHYKTTTQFKLDVLSLVPTDLAYLKVGTNYPEVRFNRLLKFSRLFEFFDRTETRTNYPNMFRIGNLVLYILIIIHWNACIYFAISKFIGFGTDSWVYPNISIPEHGRLSRKYIYSLYWSTLTLTTIGETPPPVKDEEYLFVVVDFLVGVLIFATIVGNVGSMISNMNASRAEFQAKIDSIKQYMQFRKVTKDLETRVIRWFDYLWANKKTVDEKEVLKSLPDKLKAEIAINVHLDTLKKVRIFQDCEAGLLVELVLKLRPTVFSPGDYICKKGDIGKEMYIINEGKLAVVADDGVTQFVVLSDGSYFGEISILNIKGSKSGNRRTANIRSIGYSDLFCLSKDDLMEALTEYPEAKKALEEKGRQILMKDNLIDEELARAGADPKDLEEKVEQLGSSLDTLQTRFARLLAEYNATQMKMKQRLSQLESQVKGGGDKPLADGEVPGDATKTEDKQQ

SEQ ID NO: 20941 - protein, 575 aa, Homo sapiens
  Payload ID: 4228
  Gene Symbol: CNGA4
  Gene Name: cyclic nucleotide gated channel alpha 4
  Uniprot ID: Q8IV77
  ENSP ID: ENSP00000369268
MSQDTKVKTTESSPPAPSKARKLLPVLDPSGDYYYWWLNTMVFPVMYNLIILVCRACFPDLQHGYLVAWLVLDYTSDLLYLLDMVVRFHTGFLEQGILVVDKGRISSRYVRTWSFFLDLASLMPTDVVYVRLGPHTPTLRLNRFLRAPRLFEAFDRTETRTAYPNAFRIAKLMLYIFVVIHWNSCLYFALSRYLGFGRDAWVYPDPAQPGFERLRRQYLYSFYFSTLILTTVGDTPPPAREEEYLFMVGDFLLAVMGFATIMGSMSSVIYNMNTADAAFYPDHALVKKYMKLQHVNRKLERRVIDWYQHLQINKKMTNEVAILQHLPERLRAEVAVSVHLSTLSRVQIFQNCEASLLEELVLKLQPQTYSPGEYVCRKGDIGQEMYIIREGQLAVVADDGITQYAVLGAGLYFGEISIINIKGNMSGNRRTANIKSLGYSDLFCLSKEDLREVLSEYPQAQTIMEEKGREILLKMNKLDVNAEAAEIALQEATESRLRGLDQQLDDLQTKFARLLAELESSALKIAYRIERLEWQTREWPMPEDLAEADDEGEPEEGTSKDEEGRASQEGPPGPE

SEQ ID NO: 20942 - protein, 225 aa, Homo sapiens
  Payload ID: 4228
  Gene Symbol: CNGA4
  Gene Name: cyclic nucleotide gated channel alpha 4
  ENSP ID: ENSP00000433399
MVFPVMYNLIILVCRACFPDLQHGYLVAWLVLDYTSDLLYLLDMVVRFHTDHALVKKYMKLQHVNRKLERRVIDWYQHLQINKKMTNEVAILQHLPERLRAEVAVSVHLSTLSRVQIFQNCEASLLEELVLKLQPQTYSPGEYVCRKGDIGQEMYIIREGQLAVVADDGITQYAVLGAGLYFGEISIINIKGGYPSICSRDKDGWGRGEQQSPVLGPDSTSGLNF

SEQ ID NO: 20943 - protein, 1251 aa, Homo sapiens
  Payload ID: 4229
  Gene Symbol: CNGB1
  Gene Name: cyclic nucleotide gated channel beta 1
  Uniprot ID: Q14028
  ENSP ID: ENSP00000251102
MLGWVQRVLPQPPGTPRKTKMQEEEEVEPEPEMEAEVEPEPNPEEAETESESMPPEESFKEEEVAVADPSPQETKEAALTSTISLRAQGAEISEMNSPSRRVLTWLMKGVEKVIPQPVHSITEDPAQILGHGSTGDTGCTDEPNEALEAQDTRPGLRLLLWLEQNLERVLPQPPKSSEVWRDEPAVATGAASDPAPPGRPQEMGPKLQARETPSLPTPIPLQPKEEPKEAPAPEPQPGSQAQTSSLPPTRDPARLVAWVLHRLEMALPQPVLHGKIGEQEPDSPGICDVQTISILPGGQVEPDLVLEEVEPPWEDAHQDVSTSPQGTEVVPAYEEENKAVEKMPRELSRIEEEKEDEEEEEEEEEEEEEEEVTEVLLDSCVVSQVGVGQSEEDGTRPQSTSDQKLWEEVGEEAKKEAEEKAKEEAEEVAEEEAEKEPQDWAETKEEPEAEAEAASSGVPATKQHPEVQVEDTDADSCPLMAEENPPSTVLPPPSPAKSDTLIVPSSASGTHRKKLPSEDDEAEELKALSPAESPVVAWSDPTTPKDTDGQDRAASTASTNSAIINDRLQELVKLFKERTEKVKEKLIDPDVTSDEESPKPSPAKKAPEPAPDTKPAEAEPVEEEHYCDMLCCKFKHRPWKKYQFPQSIDPLTNLMYVLWLFFVVMAWNWNCWLIPVRWAFPYQTPDNIHHWLLMDYLCDLIYFLDITVFQTRLQFVRGGDIITDKKDMRNNYLKSRRFKMDLLSLLPLDFLYLKVGVNPLLRLPRCLKYMAFFEFNSRLESILSKAYVYRVIRTTAYLLYSLHLNSCLYYWASAYQGLGSTHWVYDGVGNSYIRCYYFAVKTLITIGGLPDPKTLFEIVFQLLNYFTGVFAFSVMIGQMRDVVGAATAGQTYYRSCMDSTVKYMNFYKIPKSVQNRVKTWYEYTWHSQGMLDESELMVQLPDKMRLDLAIDVNYNIVSKVALFQGCDRQMIFDMLKRLRSVVYLPNDYVCKKGEIGREMYIIQAGQVQVLGGPDGKSVLVTLKAGSVFGEISLLAVGGGNRRTANVVAHGFTNLFILDKKDLNEILVHYPESQKLLRKKARRMLRSNNKPKEEKSVLILPPRAGTPKLFNAALAMTGKMGGKGAKGGKLAHLRARLKELAALEAAAKQQELVEQAKSSQDVKGEEGSAAPDQHTHPKEAATDPPAPRTPPEPPGSPPSSPPPASLGRPEGEEEGPAEPEEHSVRICMSPGPEPGEQILSVKMPEEREEKAE

SEQ ID NO: 20944 - protein, 299 aa, Homo sapiens
  Payload ID: 4229
  Gene Symbol: CNGB1
  Gene Name: cyclic nucleotide gated channel beta 1
  Uniprot ID: Q14028
  ENSP ID: ENSP00000311670
MLGWVQRVLPQPPGTPRKTKMQEEEEVEPEPEMEAEVEPEPNPEEAETESESMPPEESFKEEEVAVADPSPQETKEAALTSTISLRAQGAEISEMNSPSRRVLTWLMKGVEKVIPQPVHSITEDPAQILGHGSTGDTGCTDEPNEALEAQDTRPGLRLLLWLEQNLERVLPQPPKSSEVWRDEPAVATGAASDPAPPGRPQEMGPKLQARETPSLPTPIPLQPKEEPKEAPAPEPQPGSQAQTSSLPPTRDPARLVAWVLHRLEMALPQPVLHGKIGEQEPDSPGICDVQTRVMGAGGL

SEQ ID NO: 20945 - protein, 1245 aa, Homo sapiens
  Payload ID: 4229
  Gene Symbol: CNGB1
  Gene Name: cyclic nucleotide gated channel beta 1
  Uniprot ID: Q14028
  ENSP ID: ENSP00000454633
MLGWVQRVLPQPPGTPRKTKMQEEEEVEPEPEMEAEVEPEPNPEEAETESESMPPEESFKEEEVAVADPSPQETKEAALTSTISLRAQGAEISEMNSPSRRVLTWLMKGVEKVIPQPVHSITEDPAQILGHGSTGDTGCTDEPNEALEAQDTRPGLRLLLWLEQNLERVLPQPPKSSEVWRDEPAVATAPPGRPQEMGPKLQARETPSLPTPIPLQPKEEPKEAPAPEPQPGSQAQTSSLPPTRDPARLVAWVLHRLEMALPQPVLHGKIGEQEPDSPGICDVQTISILPGGQVEPDLVLEEVEPPWEDAHQDVSTSPQGTEVVPAYEEENKAVEKMPRELSRIEEEKEDEEEEEEEEEEEEEEEVTEVLLDSCVVSQVGVGQSEEDGTRPQSTSDQKLWEEVGEEAKKEAEEKAKEEAEEVAEEEAEKEPQDWAETKEEPEAEAEAASSGVPATKQHPEVQVEDTDADSCPLMAEENPPSTVLPPPSPAKSDTLIVPSSASGTHRKKLPSEDDEAEELKALSPAESPVVAWSDPTTPKDTDGQDRAASTASTNSAIINDRLQELVKLFKERTEKVKEKLIDPDVTSDEESPKPSPAKKAPEPAPDTKPAEAEPVEEEHYCDMLCCKFKHRPWKKYQFPQSIDPLTNLMYVLWLFFVVMAWNWNCWLIPVRWAFPYQTPDNIHHWLLMDYLCDLIYFLDITVFQTRLQFVRGGDIITDKKDMRNNYLKSRRFKMDLLSLLPLDFLYLKVGVNPLLRLPRCLKYMAFFEFNSRLESILSKAYVYRVIRTTAYLLYSLHLNSCLYYWASAYQGLGSTHWVYDGVGNSYIRCYYFAVKTLITIGGLPDPKTLFEIVFQLLNYFTGVFAFSVMIGQMRDVVGAATAGQTYYRSCMDSTVKYMNFYKIPKSVQNRVKTWYEYTWHSQGMLDESELMVQLPDKMRLDLAIDVNYNIVSKVALFQGCDRQMIFDMLKRLRSVVYLPNDYVCKKGEIGREMYIIQAGQVQVLGGPDGKSVLVTLKAGSVFGEISLLAVGGGNRRTANVVAHGFTNLFILDKKDLNEILVHYPESQKLLRKKARRMLRSNNKPKEEKSVLILPPRAGTPKLFNAALAMTGKMGGKGAKGGKLAHLRARLKELAALEAAAKQQELVEQAKSSQDVKGEEGSAAPDQHTHPKEAATDPPAPRTPPEPPGSPPSSPPPASLGRPEGEEEGPAEPEEHSVRICMSPGPEPGEQILSVKMPEEREEKAE

SEQ ID NO: 20946 - protein, 214 aa, Homo sapiens
  Payload ID: 4229
  Gene Symbol: CNGB1
  Gene Name: cyclic nucleotide gated channel beta 1
  ENSP ID: ENSP00000455708
MLGWVQRVLPQPPGTPRKTKMQEEEEVEPEPEMEAEVEPEPNPEEAETESESMPPEESFKEEEVAVADPSPQETKEAALTSTISLRAQGAEISEMNSPSRRVLTWLMKGVEKVIPQPVHSITEDPAQILGHGSTGDTGCTDEPNEALEAQDTRPGLRLLLWLEQNLERVLPQPPKSSEVWRDEPAVATGAASDPAPPGRPQEMGPKLQARETPS

SEQ ID NO: 20947 - protein, 126 aa, Homo sapiens
  Payload ID: 4229
  Gene Symbol: CNGB1
  Gene Name: cyclic nucleotide gated channel beta 1
  ENSP ID: ENSP00000455964
  MOD_RES (1)..(1): Any amino acid
XNDYVCKKGEIGREMYIIQAGQVQVLGGPDGKSVLVTLKAGSVFGEISLLAVGGGNRRTANVVAHGFTNLFILDKKDLNEILVHYPESQKLLRKKARPRARKTSRERKAPPPQTSTRTQRRPPPTH

SEQ ID NO: 20948 - protein, 809 aa, Homo sapiens
  Payload ID: 4230
  Gene Symbol: CNGB3
  Gene Name: cyclic nucleotide gated channel beta 3
  Uniprot ID: Q9NQW8
  ENSP ID: ENSP00000316605
MFKSLTKVNKVKPIGENNENEQSSRRNEEGSHPSNQSQQTTAQEENKGEEKSLKTKSTPVTSEEPHTNIQDKLSKKNSSGDLTTNPDPQNAAEPTGTVPEQKEMDPGKEGPNSPQNKPPAAPVINEYADAQLHNLVKRMRQRTALYKKKLVEGDLSSPEASPQTAKPTAVPPVKESDDKPTEHYYRLLWFKVKKMPLTEYLKRIKLPNSIDSYTDRLYLLWLLLVTLAYNWNCCFIPLRLVFPYQTADNIHYWLIADIICDIIYLYDMLFIQPRLQFVRGGDIIVDSNELRKHYRTSTKFQLDVASIIPFDICYLFFGFNPMFRANRMLKYTSFFEFNHHLESIMDKAYIYRVIRTTGYLLFILHINACVYYWASNYEGIGTTRWVYDGEGNEYLRCYYWAVRTLITIGGLPEPQTLFEIVFQLLNFFSGVFVFSSLIGQMRDVIGAATANQNYFRACMDDTIAYMNNYSIPKLVQKRVRTWYEYTWDSQRMLDESDLLKTLPTTVQLALAIDVNFSIISKVDLFKGCDTQMIYDMLLRLKSVLYLPGDFVCKKGEIGKEMYIIKHGEVQVLGGPDGTKVLVTLKAGSVFGEISLLAAGGGNRRTANVVAHGFANLLTLDKKTLQEILVHYPDSERILMKKARVLLKQKAKTAEATPPRKDLALLFPPKEETPKLFKTLLGGTGKASLARLLKLKREQAAQKKENSEGGEEEGKENEDKQKENEDKQKENEDKGKENEDKDKGREPEEKPLDRPECTASPIAVEEEPHSVRRTVLPRGTSRQSLIISMAPSAEGGEEVLTIEVKEKAKQ

SEQ ID NO: 20949 - protein, 111 aa, Homo sapiens
  Payload ID: 4230
  Gene Symbol: CNGB3
  Gene Name: cyclic nucleotide gated channel beta 3
  ENSP ID: ENSP00000428329
AHGFANLLTLDKKTLQEILVHYPDSERILMKKARVLLKQKAKTAEATPPRKDLALLFPPKEETPKLFKTLLGGTGKASLARLLKLKREQAAQGQFLPVSFTAGIFLGHLRL

SEQ ID NO: 20950 - protein, 465 aa, Homo sapiens
  Payload ID: 4231
  Gene Symbol: CCNA1
  Gene Name: cyclin A1
  Uniprot ID: P78396
  ENSP ID: ENSP00000255465
METGFPAIMYPGSFIGGWGEEYLSWEGPGLPDFVFQQQPVESEAMHCSNPKSGVVLATVARGPDACQILTRAPLGQDPPQRTVLGLLTANGQYRRTCGQGITRIRCYSGSENAFPPAGKKALPDCGVQEPPKQGFDIYMDELEQGDRDSCSVREGMAFEDVYEVDTGTLKSDLHFLLDFNTVSPMLVDSSLLSQSEDISSLGTDVINVTEYAEEIYQYLREAEIRHRPKAHYMKKQPDITEGMRTILVDWLVEVGEEYKLRAETLYLAVNFLDRFLSCMSVLRGKLQLVGTAAMLLASKYEEIYPPEVDEFVYITDDTYTKRQLLKMEHLLLKVLAFDLTVPTTNQFLLQYLRRQGVCVRTENLAKYVAELSLLEADPFLKYLPSLIAAAAFCLANYTVNKHFWPETLAAFTGYSLSEIVPCLSELHKAYLDIPHRPQQAIREKYKASKYLCVSLMEPPAVLLLQ

SEQ ID NO: 20951 - protein, 421 aa, Homo sapiens
  Payload ID: 4231
  Gene Symbol: CCNA1
  Gene Name: cyclin A1
  Uniprot ID: P78396
  ENSP ID: ENSP00000400666
MHCSNPKSGVVLATVARGPDACQILTRAPLGQDPPQRTVLGLLTANGQYRRTCGQGITRIRCYSGSENAFPPAGKKALPDCGVQEPPKQGFDIYMDELEQGDRDSCSVREGMAFEDVYEVDTGTLKSDLHFLLDFNTVSPMLVDSSLLSQSEDISSLGTDVINVTEYAEEIYQYLREAEIRHRPKAHYMKKQPDITEGMRTILVDWLVEVGEEYKLRAETLYLAVNFLDRFLSCMSVLRGKLQLVGTAAMLLASKYEEIYPPEVDEFVYITDDTYTKRQLLKMEHLLLKVLAFDLTVPTTNQFLLQYLRRQGVCVRTENLAKYVAELSLLEADPFLKYLPSLIAAAAFCLANYTVNKHFWPETLAAFTGYSLSEIVPCLSELHKAYLDIPHRPQQAIREKYKASKYLCVSLMEPPAVLLLQ

SEQ ID NO: 20952 - protein, 464 aa, Homo sapiens
  Payload ID: 4231
  Gene Symbol: CCNA1
  Gene Name: cyclin A1
  Uniprot ID: P78396
  ENSP ID: ENSP00000486017
METGFPAIMYPGSFIGGWGEEYLSWEGPGLPDFVFQQPVESEAMHCSNPKSGVVLATVARGPDACQILTRAPLGQDPPQRTVLGLLTANGQYRRTCGQGITRIRCYSGSENAFPPAGKKALPDCGVQEPPKQGFDIYMDELEQGDRDSCSVREGMAFEDVYEVDTGTLKSDLHFLLDFNTVSPMLVDSSLLSQSEDISSLGTDVINVTEYAEEIYQYLREAEIRHRPKAHYMKKQPDITEGMRTILVDWLVEVGEEYKLRAETLYLAVNFLDRFLSCMSVLRGKLQLVGTAAMLLASKYEEIYPPEVDEFVYITDDTYTKRQLLKMEHLLLKVLAFDLTVPTTNQFLLQYLRRQGVCVRTENLAKYVAELSLLEADPFLKYLPSLIAAAAFCLANYTVNKHFWPETLAAFTGYSLSEIVPCLSELHKAYLDIPHRPQQAIREKYKASKYLCVSLMEPPAVLLLQ

SEQ ID NO: 20953 - protein, 421 aa, Homo sapiens; identical to SEQ ID NO: 20951
  Payload ID: 4231
  Gene Symbol: CCNA1
  Gene Name: cyclin A1
  Uniprot ID: P78396
  ENSP ID: ENSP00000486482

SEQ ID NO: 20954 - protein, 432 aa, Homo sapiens
  Payload ID: 4232
  Gene Symbol: CCNA2
  Gene Name: cyclin A2
  Uniprot ID: P20248
  ENSP ID: ENSP00000274026
MLGNSAPGPATREAGSALLALQQTALQEDQENINPEKAAPVQQPRTRAALAVLKSGNPRGLAQQQRPKTRRVAPLKDLPVNDEHVTVPPWKANSKQPAFTIHVDEAEKEAQKKPAESQKIEREDALAFNSAISLPGPRKPLVPLDYPMDGSFESPHTMDMSIILEDEKPVSVNEVPDYHEDIHTYLREMEVKCKPKVGYMKKQPDITNSMRAILVDWLVEVGEEYKLQNETLHLAVNYIDRFLSSMSVLRGKLQLVGTAAMLLASKFEEIYPPEVAEFVYITDDTYTKKQVLRMEHLVLKVLTFDLAAPTVNQFLTQYFLHQQPANCKVESLAMFLGELSLIDADPYLKYLPSVIAGAAFHLALYTVTGQSWPESLIRKTGYTLESLKPCLMDLHQTYLKAPQHAQQSIREKYKNSKYHGVSLLNPPETLNL

SEQ ID NO: 20955 - protein, 432 aa, Homo sapiens; identical to SEQ ID NO: 20954
  Payload ID: 4232
  Gene Symbol: CCNA2
  Gene Name: cyclin A2
  Uniprot ID: P20248
  ENSP ID: ENSP00000481380

SEQ ID NO: 20956 - protein, 951 aa, Homo sapiens
  Payload ID: 4233
  Gene Symbol: CNNM1
  Gene Name: cyclin and CBS domain divalent metal cation transport mediator 1
  Uniprot ID: Q9NRU3
  ENSP ID: ENSP00000349147
MAAAAAAAAAVGVRLRDCCSRGAVLLLFFSLSPRPPAAAAWLLGLRPEDTAGGRVSLEGGTLRAAEGTSFLLRVYFQPGPPATAAPVPSPTLNSGENGTGDWAPRLVFIEEPPGGGGVAPSAVPTRPPGPQRCREQSDWASDVEVLGPLRPGGVAGSALVQVRVRELRKGEAERGGAGGGGKLFSLCAWDGRAWHHHGAAGGFLLRVRPRLYGPGGDLLPPAWLRALGALLLLALSALFSGLRLSLLSLDPVELRVLRNSGSAAEQEQARRVQAVRGRGTHLLCTLLLGQAGANAALAGWLYTSLPPGFGGTGEDYSEEGIHFPWLPALVCTGAVFLGAEICPYSVCSRHGLAIASHSVCLTRLLMAAAFPVCYPLGRLLDWALRQEISTFYTREKLLETLRAADPYSDLVKEELNIIQGALELRTKVVEEVLTPLGDCFMLRSDAVLDFATVSEILRSGYTRIPVYEGDQRHNIVDILFVKDLAFVDPDDCTPLLTVTRFYNRPLHCVFNDTRLDTVLEEFKKGKSHLAIVQRVNNEGEGDPFYEVMGIVTLEDIIEEIIKSEILDETDLYTDNRKKQRVPQRERKRHDFSLFKLSDTEMRVKISPQLLLATHRFMATEVEPFKSLYLSEKILLRLLKHPNVIQELKFDEKNKKAPEHYLYQRNRPVDYFVLLLQGKVEVEVGKEGLRFENGAFTYYGVPAIMTTACSDNDVRKVGSLAGSSVFLNRSPSRCSGLNRSESPNRERSDFGGSNTQLYSSSNNLYMPDYSVHILSDVQFVKITRQQYQNALTACHMDSSPQSPDMEAFTDGDSTKAPTTRGTPQTPKDDPAITLLNNRNSLPCSRSDGLRSPSEVVYLRMEELAFTQEEMTDFEEHSTQQLTLSPAAVPTRAASDSECCNINLDTETSPCSSDFEENVGKKLLRTLSGQKRKRSPEGERTSEDNSNLTPLIT

SEQ ID NO: 20957 - protein, 552 aa, Homo sapiens
  Payload ID: 4234
  Gene Symbol: CNNM2
  Gene Name: cyclin and CBS domain divalent metal cation transport mediator 2
  Uniprot ID: Q9H8M5
  ENSP ID: ENSP00000358891
MIGCGACEPKVKMAGGQAAAALPTWKMAARRSLSARGRGILQAAAGRLLPLLLLSCCCGAGGCAAVGENEETVIIGLRLEDTNDVSFMEGGALRVSERTRVKLRVYGQNINNETWSRIAFTEHERRRHSPGERGLGGPAPPEPDSGPQRCGIRTSDIIILPHIILNRRTSGIIEIEIKPLRKMEKSKSYYLCTSLSTPALGAGGSGSTGGAVGGKGGSGVAGLPPPPWAETTWIYHDGEDTKMIVGEEKKFLLPFWLQVIFISLLLCLSGMFSGLNLGLMALDPMELRIVQNCGTEKEKNYAKRIEPVRRQGNYLLCSLLLGNVLVNTTLTILLDDIAGSGLVAVVVSTIGIVIFGEIVPQAICSRHGLAVGANTIFLTKFFMMMTFPASYPVSKLLDCVLGQEIGTVYNREKLLEMLRVTDPYNDLVKEELNIIQGALELRTKTVEDVMTPLRDCFMITGEAILDFNTMSEIMESGYTRIPVFEGERSNIVDLLFVKDLAFVDPDDCTPLKTITKFYNHPLHFVFNDTKLDAMLEEFKKEHTNKKPKSYQH

SEQ ID NO: 20958 - protein, 875 aa, Homo sapiens
  Payload ID: 4234
  Gene Symbol: CNNM2
  Gene Name: cyclin and CBS domain divalent metal cation transport mediator 2
  Uniprot ID: Q9H8M5
  ENSP ID: ENSP00000358894
MIGCGACEPKVKMAGGQAAAALPTWKMAARRSLSARGRGILQAAAGRLLPLLLLSCCCGAGGCAAVGENEETVIIGLRLEDTNDVSFMEGGALRVSERTRVKLRVYGQNINNETWSRIAFTEHERRRHSPGERGLGGPAPPEPDSGPQRCGIRTSDIIILPHIILNRRTSGIIEIEIKPLRKMEKSKSYYLCTSLSTPALGAGGSGSTGGAVGGKGGSGVAGLPPPPWAETTWIYHDGEDTKMIVGEEKKFLLPFWLQVIFISLLLCLSGMFSGLNLGLMALDPMELRIVQNCGTEKEKNYAKRIEPVRRQGNYLLCSLLLGNVLVNTTLTILLDDIAGSGLVAVVVSTIGIVIFGEIVPQAICSRHGLAVGANTIFLTKFFMMMTFPASYPVSKLLDCVLGQEIGTVYNREKLLEMLRVTDPYNDLVKEELNIIQGALELRTKTVEDVMTPLRDCFMITGEAILDFNTMSEIMESGYTRIPVFEGERSNIVDLLFVKDLAFVDPDDCTPLKTITKFYNHPLHFVFNDTKLDAMLEEFKKGKSHLAIVQRVNNEGEGDPFYEVLGIVTLEDVIEEIIKSEILDETDLYTDNRTKKKVAHRERKQDFSAFKQTDSEMKVKISPQLLLAMHRFLATEVEAFSPSQMSEKILLRLLKHPNVIQELKYDEKNKKAPEYYLYQRNKPVDYFVLILQGKVEVEAGKEGMKFEASAFSYYGVMALTASPVPLSLSRTFVVSRTELLAAGSPGENKSPPRPCGLNHSDSLSRSDRIDAVTPTLGSSNNQLNSSLLQVYIPDYSVRALSDLQFVKISRQQYQNALMASRMDKTPQSSDSENTKIELTLTELHDGLPDETANLLNEQNCVTHSKANHSLHNEGAI

SEQ ID NO: 20959 - protein, 853 aa, Homo sapiens
  Payload ID: 4234
  Gene Symbol: CNNM2
  Gene Name: cyclin and CBS domain divalent metal cation transport mediator 2
  Uniprot ID: Q9H8M5
  ENSP ID: ENSP00000392875
MIGCGACEPKVKMAGGQAAAALPTWKMAARRSLSARGRGILQAAAGRLLPLLLLSCCCGAGGCAAVGENEETVIIGLRLEDTNDVSFMEGGALRVSERTRVKLRVYGQNINNETWSRIAFTEHERRRHSPGERGLGGPAPPEPDSGPQRCGIRTSDIIILPHIILNRRTSGIIEIEIKPLRKMEKSKSYYLCTSLSTPALGAGGSGSTGGAVGGKGGSGVAGLPPPPWAETTWIYHDGEDTKMIVGEEKKFLLPFWLQVIFISLLLCLSGMFSGLNLGLMALDPMELRIVQNCGTEKEKNYAKRIEPVRRQGNYLLCSLLLGNVLVNTTLTILLDDIAGSGLVAVVVSTIGIVIFGEIVPQAICSRHGLAVGANTIFLTKFFMMMTFPASYPVSKLLDCVLGQEIGTVYNREKLLEMLRVTDPYNDLVKEELNIIQGALELRTKTVEDVMTPLRDCFMITGEAILDFNTMSEIMESGYTRIPVFEGERSNIVDLLFVKDLAFVDPDDCTPLKTITKFYNHPLHFVFNDTKLDAMLEEFKKGKSHLAIVQRVNNEGEGDPFYEVLGIVTLEDVIEEIIKSEILDETDLYTDNRTKKKVAHRERKQDFSAFKQTDSEMKVKISPQLLLAMHRFLATEVEAFSPSQMSEKILLRLLKHPNVIQELKYDEKNKKAPEYYLYQRNKPVDYFVLILQGKVEVEAGKEGMKFEASAFSYYGVMALTASPGENKSPPRPCGLNHSDSLSRSDRIDAVTPTLGSSNNQLNSSLLQVYIPDYSVRALSDLQFVKISRQQYQNALMASRMDKTPQSSDSENTKIELTLTELHDGLPDETANLLNEQNCVTHSKANHSLHNEGAI

SEQ ID NO: 20960 - protein, 707 aa, Homo sapiens
  Payload ID: 4235
  Gene Symbol: CNNM3
  Gene Name: cyclin and CBS domain divalent metal cation transport mediator 3
  Uniprot ID: Q8NE01
  ENSP ID: ENSP00000305449
MAAAVAAAGRLGWLFAALCLGNAAGEAAPGPRVLGFCLEEDGAAGAGWVRGGAARDTPDATFLLRLFGPGFANSSWSWVAPEGAGCREEAASPAGEWRALLRLRLRAEAVRPHSALLAVRVEPGGGAAEEAAPPWALGLGAAGLLALAALARGLQLSALALAPAEVQVLRESGSEAERAAARRLEPARRWAGCALGALLLLASLAQAALAVLLYRAAGQRAVPAVLGSAGLVFLVGEVVPAAVSGRWTLALAPRALGLSRLAVLLTLPVALPVGQLLELAARPGRLRERVLELARGGGDPYSDLSKGVLRCRTVEDVLTPLEDCFMLDASTVLDFGVLASIMQSGHTRIPVYEEERSNIVDMLYLKDLAFVDPEDCTPLSTITRFYNHPLHFVFNDTKLDAVLEEFKRGKSHLAIVQKVNNEGEGDPFYEVLGLVTLEDVIEEIIRSEILDESEDYRDTVVKRKPASLMAPLKRKEEFSLFKVSDDEYKVTISPQLLLATQRFLSREVDVFSPLRISEKVLLHLLKHPSVNQEVRFDESNRLATHHYLYQRSQPVDYFILILQGRVEVEIGKEGLKFENGAFTYYGVSALTVPSSVHQSPVSSLQPIRHDLQPDPGDGTHSSAYCPDYTVRALSDLQLIKVTRLQYLNALLATRAQNLPQSPENTDLQVIPGSQTRLLGEKTTTAAGSSHSRPGVPVEGSPGRNPGV

SEQ ID NO: 20961 - protein, 659 aa, Homo sapiens
  Payload ID: 4235
  Gene Symbol: CNNM3
  Gene Name: cyclin and CBS domain divalent metal cation transport mediator 3
  Uniprot ID: Q8NE01
  ENSP ID: ENSP00000366260
MAAAVAAAGRLGWLFAALCLGNAAGEAAPGPRVLGFCLEEDGAAGAGWVRGGAARDTPDATFLLRLFGPGFANSSWSWVAPEGAGCREEAASPAGEWRALLRLRLRAEAVRPHSALLAVRVEPGGGAAEEAAPPWALGLGAAGLLALAALARGLQLSALALAPAEVQVLRESGSEAERAAARRLEPARRWAGCALGALLLLASLAQAALAVLLYRAAGQRAVPAVLGSAGLVFLVGEVVPAAVSGRWTLALAPRALGLSRLAVLLTLPVALPVGQLLELAARPGRLRERVLELARGGGDPYSDLSKGVLRCRTVEDVLTPLEDCFMLDASTVLDFGVLASIMQSGHTRIPVYEEERSNIVDMLYLKDLAFVDPEDCTPLSTITRFYNHPLHFVFNDTKLDAVLEEFKRGDTVVKRKPASLMAPLKRKEEFSLFKVSDDEYKVTISPQLLLATQRFLSREVDVFSPLRISEKVLLHLLKHPSVNQEVRFDESNRLATHHYLYQRSQPVDYFILILQGRVEVEIGKEGLKFENGAFTYYGVSALTVPSSVHQSPVSSLQPIRHDLQPDPGDGTHSSAYCPDYTVRALSDLQLIKVTRLQYLNALLATRAQNLPQSPENTDLQVIPGSQTRLLGEKTTTAAGSSHSRPGVPVEGSPGRNPGV

SEQ ID NO: 20962 - protein, 775 aa, Homo sapiens
  Payload ID: 4236
  Gene Symbol: CNNM4
  Gene Name: cyclin and CBS domain divalent metal cation transport mediator 4
  Uniprot ID: Q6P4Q7
  ENSP ID: ENSP00000366275
MAPVGGGGRPVGGPARGRLLLAAPVLLVLLWALGARGQGSPQQGTIVGMRLASCNKSCGTNPDGIIFVSEGSTVNLRLYGYSLGNISSNLISFTEVDDAETLHKSTSCLELTKDLVVQQLVNVSRGNTSGVLVVLTKFLRRSESMKLYALCTRAQPDGPWLKWTDKDSLLFMVEEPGRFLPLWLHILLITVLLVLSGIFSGLNLGLMALDPMELRIVQNCGTEKERRYARKIEPIRRKGNYLLCSLLLGNVLVNTSLTILLDNLIGSGLMAVASSTIGIVIFGEILPQALCSRHGLAVGANTILLTKFFMLLTFPLSFPISKLLDFFLGQEIRTVYNREKLMEMLKVTEPYNDLVKEELNMIQGALELRTKTVEDIMTQLQDCFMIRSDAILDFNTMSEIMESGYTRIPVFEDEQSNIVDILYVKDLAFVDPDDCTPLKTITRFYNHPVHFVFHDTKLDAMLEEFKKGKSHLAIVQKVNNEGEGDPFYEVLGLVTLEDVIEEIIKSEILDESDMYTDNRSRKRVSEKNKRDFSAFKDADNELKVKISPQLLLAAHRFLATEVSQFSPSLISEKILLRLLKYPDVIQELKFDEHNKYYARHYLYTRNKPADYFILILQGKVEVEAGKENMKFETGAFSYYGTMALTSVPSDRSPAHPTPLSRSASLSYPDRTDVSTAATLAGSSNQFGSSVLGQYISDFSVRALVDLQYIKITRQQYQNGLLASRMENSPQFPIDGCTTHMENLAEKSELPVVDETTTLLNERNSLLHKASHENAI

SEQ ID NO: 20963 - protein, 433 aa, Homo sapiens
  Payload ID: 4237
  Gene Symbol: CCNB1
  Gene Name: cyclin B1
  Uniprot ID: P14635
  ENSP ID: ENSP00000256442
MALRVTRNSKINAENKAKINMAGAKRVPTAPAATSKPGLRPRTALGDIGNKVSEQLQAKMPMKKEAKPSATGKVIDKKLPKPLEKVPMLVPVPVSEPVPEPEPEPEPEPVKEEKLSPEPILVDTASPSPMETSGCAPAEEDLCQAFSDVILAVNDVDAEDGADPNLCSEYVKDIYAYLRQLEEEQAVRPKYLLGREVTGNMRAILIDWLVQVQMKFRLLQETMYMTVSIIDRFMQNNCVPKKMLQLVGVTAMFIASKYEEMYPPEIGDFAFVTDNTYTKHQIRQMEMKILRALNFGLGRPLPLHFLRRASKIGEVDVEQHTLAKYLMELTMLDYDMVHFPPSQIAAGAFCLALKILDNGEWTPTLQHYLSYTEESLLPVMQHLAKNVVMVNQGLTKHMTVKNKYATSKHAKISTLPQLNSALVQDLAKAVAKV

SEQ ID NO: 20964 - protein, 401 aa, Homo sapiens
  Payload ID: 4237
  Gene Symbol: CCNB1
  Gene Name: cyclin B1
  ENSP ID: ENSP00000423387
MALRVTRNSKINAENKAKINMAGAKRVPTAPAATSKPGLRPRTALGDIGNKVSEQLQAKMPMKKEAKPSATGKVIDKKLPKPLEKVPMLVPVPVSEPVPEPEPEPEPEPVKEEKLSPEPILVDTASPSPMETSGCAPAEEDLCQAFSDVILAVNDVDAEDGADPNLCSEYVKDIYAYLRQLEEEQAVRPKYLLGREVTGNMRAILIDWLVQVQMKFRLLQETMYMTVSIIDRFMQNNCVPKKMLQLVGVTAMFIASKYEEMYPPEIGDFAFVTDNTYTKHQIRQMEMKILRALNFGLGRPLPLHFLRRASKIGEVDVEQHTLAKYLMELTMLDYDMVHFPPSQIAAGAFCLALKILDNGEWTPTLQHYLSYTEESLLPVMQHLAKNVVMVNQGLTKHMVSQ

SEQ ID NO: 20965 - protein, 396 aa, Homo sapiens
  Payload ID: 4237
  Gene Symbol: CCNB1
  Gene Name: cyclin B1
  Uniprot ID: P14635
  ENSP ID: ENSP00000424588
MALRVTRNSKINAENKAKINMAGAKRVPTAPAATSKPGLRPRTALGDIGNKVSEQLQAKMPMKKEAKPSATGKVIDKKLPKPLEKVPMLVPVPVSEPVPEPEPEPEPEPVKEEKLSPEPILVDTASPSPMETSGCAPAEEDLCQAFSDVILAVNDVDAEDGADPNLCSEYVKDIYAYLRQLEEEQAVRPKYLLGREVTGNMRAILIDWLVQVQMKFRLLQETMYMTVSIIDRFMQNNCVPKKMLQLVGVTAMFIASKYEEMYPPEIGDFAFVTDNTYTKHQIRQMEMKILRALNFGLGRPLPLHFLRRASKIGEVDVEQHTLAKYLMELTMLDYDMVHFPPSQIAAGAFCLALKILDNGEWTVKNKYATSKHAKISTLPQLNSALVQDLAKAVAKV

SEQ ID NO: 20966 - protein, 61 aa, Homo sapiens
  Payload ID: 4237
  Gene Symbol: CCNB1
  Gene Name: cyclin B1
  ENSP ID: ENSP00000425103
ALRVTRVSRFGLRTNAAFLAAACSPCLACGSLPSGRGPQERFGEEGGRGLTKRAPRWAQAW

SEQ ID NO: 20967 - protein, 244 aa, Homo sapiens
  Payload ID: 4237
  Gene Symbol: CCNB1
  Gene Name: cyclin B1
  ENSP ID: ENSP00000426092
MALRVTRNSKINAENKAKINMAGAKRVPTAPAATSKPGLRPRTALGDIGNKVSEQLQAKMPMKKEAKPSATGKVIDKKLPKPLEKVPMLVPVPVSEPVPEPEPEPEPEPVKEEKLSPEPILVDTASPSPMETSGCAPAEEDLCQAFSDVILAVNDVDAEDGADPNLCSEYVKDIYAYLRQLENNCVPKKMLQLVGVTAMFIASKYEEMYPPEIGDFAFVTDNTYTKHQIRQMEMKILRALNFGL

SEQ ID NO: 20968 - protein, 185 aa, Homo sapiens
  Payload ID: 4237
  Gene Symbol: CCNB1
  Gene Name: cyclin B1
  ENSP ID: ENSP00000426230
QAVRPKYLLGREVTGNMRAILIDWLVQVQMKFRLLQETMYMTVSIIDRFMQNNCVPKKMLQLVGVTAMFIASKYEEMYPPEIGDFAFVTDNTYTKHQIRQMEMKILRALNFGLGRPLPLHFLRRASKIGEVDVEQHTLAKYLMELTMLDYDMVHFPPSQIAAGAFCLALKILDNGEWLCSTWLRM

SEQ ID NO: 20969 - protein, 277 aa, Homo sapiens
  Payload ID: 4238
  Gene Symbol: CCNB1IP1
  Gene Name: cyclin B1 interacting protein 1, E3 ubiquitin protein ligase
  Uniprot ID: Q9NPC3
  ENSP ID: ENSP00000337396
MSLCEDMLLCNYRKCRIKLSGYAWVTACSHIFCDQHGSGEFSRSPAICPACNSTLSGKLDIVRTELSPSEEYKAMVLAGLRPEIVLDISSRALAFWTYQVHQERLYQEYNFSKAEGHLKQMEKIYTQQIQSKDVELTSMKGEVTSMKKVLEEYKKKFSDISEKLMERNRQYQKLQGLYDSLRLRNITIANHEGTLEPSMIAQSGVLGFPLGNNSKFPLDNTPVRNRGDGDGDFQFRPFFAGSPTAPEPSNSFFSFVSPSRELEQQQVSSRAFKVKRI

SEQ ID NO: 20970 - protein, 277 aa, Homo sapiens; identical to SEQ ID NO: 20969
  Payload ID: 4238
  Gene Symbol: CCNB1IP1
  Gene Name: cyclin B1 interacting protein 1, E3 ubiquitin protein ligase
  Uniprot ID: Q9NPC3
  ENSP ID: ENSP00000351810

SEQ ID NO: 20971 - protein, 277 aa, Homo sapiens; identical to SEQ ID NO: 20969
  Payload ID: 4238
  Gene Symbol: CCNB1IP1
  Gene Name: cyclin B1 interacting protein 1, E3 ubiquitin protein ligase
  Uniprot ID: Q9NPC3
  ENSP ID: ENSP00000381226

SEQ ID NO: 20972 - protein, 277 aa, Homo sapiens; identical to SEQ ID NO: 20969
  Payload ID: 4238
  Gene Symbol: CCNB1IP1
  Gene Name: cyclin B1 interacting protein 1, E3 ubiquitin protein ligase
  Uniprot ID: Q9NPC3
  ENSP ID: ENSP00000381229

SEQ ID NO: 20973 - protein, 277 aa, Homo sapiens; identical to SEQ ID NO: 20969
  Payload ID: 4238
  Gene Symbol: CCNB1IP1
  Gene Name: cyclin B1 interacting protein 1, E3 ubiquitin protein ligase
  Uniprot ID: Q9NPC3
  ENSP ID: ENSP00000381235

SEQ ID NO: 20974 - protein, 277 aa, Homo sapiens; identical to SEQ ID NO: 20969
  Payload ID: 4238
  Gene Symbol: CCNB1IP1
  Gene Name: cyclin B1 interacting protein 1, E3 ubiquitin protein ligase
  Uniprot ID: Q9NPC3
  ENSP ID: ENSP00000409896

SEQ ID NO: 20975 - protein, 64 aa, Homo sapiens
  Payload ID: 4238
  Gene Symbol: CCNB1IP1
  Gene Name: cyclin B1 interacting protein 1, E3 ubiquitin protein ligase
  ENSP ID: ENSP00000450914
  MOD_RES (1)..(1): Any amino acid
XEFSRSPAICPACNSTLSGKLDIVRTELSPSEEYKAMVLAGLRPEIVLDISSRALAFWTYQYFL

SEQ ID NO: 20976 - protein, 31 aa, Homo sapiens
  Payload ID: 4238
  Gene Symbol: CCNB1IP1
  Gene Name: cyclin B1 interacting protein 1, E3 ubiquitin protein ligase
  ENSP ID: ENSP00000451122
  MOD_RES (1)..(1): Any amino acid
XTLAPERWPSGHIRLVSNSWVQAILPPQPPE

SEQ ID NO: 20977 - protein, 4 aa, Homo sapiens
  Payload ID: 4238
  Gene Symbol: CCNB1IP1
  Gene Name: cyclin B1 interacting protein 1, E3 ubiquitin protein ligase
  ENSP ID: ENSP00000452182
MSLC

SEQ ID NO: 20978 - protein, 67 aa, Homo sapiens
  Payload ID: 4238
  Gene Symbol: CCNB1IP1
  Gene Name: cyclin B1 interacting protein 1, E3 ubiquitin protein ligase
  ENSP ID: ENSP00000452312
MFAFLNVVVTLAWPSQLLLPLFSFWRPHYPIMSLCEDMLLCNYRKCRIKLSGYAWVTACSHIFCDQH

SEQ ID NO: 20979 - protein, 102 aa, Homo sapiens
  Payload ID: 4238
  Gene Symbol: CCNB1IP1
  Gene Name: cyclin B1 interacting protein 1, E3 ubiquitin protein ligase
  ENSP ID: ENSP00000452463
MSLCEDMLLCNYRKCRIKLSGYAWVTACSHIFCDQHGSGEFSRSPAICPACNSTLSGKLDIVRTELSPSEEYKAMVLAGLRPEIVLDISSRALAFWTYQYFL

SEQ ID NO: 20980 - protein, 154 aa, Homo sapiens
  Payload ID: 4238
  Gene Symbol: CCNB1IP1
  Gene Name: cyclin B1 interacting protein 1, E3 ubiquitin protein ligase
  ENSP ID: ENSP00000452486
MSLCEDMLLCNYRKCRIKLSGYAWVTACSHIFCDQHGSGEFSRSPAICPACNSTLSGKLDIVRTELSPSEEYKAMVLAGLRPEIVLDISSRALAFWTYQVHQERLYQEYNFSKAEGHLKQMEKIYTQQIQSKDVELTSMKGEVTSMKKVLEEYK

SEQ ID NO: 20981 - protein, 398 aa, Homo sapiens
  Payload ID: 4239
  Gene Symbol: CCNB2
  Gene Name: cyclin B2
  Uniprot ID: O95067
  ENSP ID: ENSP00000288207
MALLRRPTVSSDLENIDTGVNSKVKSHVTIRRTVLEEIGNRVTTRAAQVAKKAQNTKVPVQPTKTTNVNKQLKPTASVKPVQMEKLAPKGPSPTPEDVSMKEENLCQAFSDALLCKIEDIDNEDWENPQLCSDYVKDIYQYLRQLEVLQSINPHFLDGRDINGRMRAILVDWLVQVHSKFRLLQETLYMCVGIMDRFLQVQPVSRKKLQLVGITALLLASKYEEMFSPNIEDFVYITDNAYTSSQIREMETLILKELKFELGRPLPLHFLRRASKAGEVDVEQHTLAKYLMELTLIDYDMVHYHPSKVAAAASCLSQKVLGQGKWNLKQQYYTGYTENEVLEVMQHMAKNVVKVNENLTKFIAIKNKYASSKLLKISMIPQLNSKAVKDLASPLIGRS

SEQ ID NO: 20982 - protein, 270 aa, Homo sapiens
  Payload ID: 4239
  Gene Symbol: CCNB2
  Gene Name: cyclin B2
  ENSP ID: ENSP00000453685
MALLRRPTGPSPTPEDVSMKEENLCQAFSDALLCKIEDIDNEDWENPQLCSDYVKDIYQYLRQLEVLQSINPHFLDGRDINGRMRAILVDWLVQVHSKFRLLQETLYMCVGIMDRFLQVQPVSRKKLQLVGITALLLASKYEEMFSPNIEDFVYITDNAYTSSQIREMETLILKELKFELGRPLPLHFLRRASKAGENLKQQYYTGYTENEVLEVMQHMAKNVVKVNENLTKFIAIKNKYASSKLLKISMIPQLNSKAVKDLASPLIGRS

SEQ ID NO: 20983 - protein, 374 aa, Homo sapiens
  Payload ID: 4239
  Gene Symbol: CCNB2
  Gene Name: cyclin B2
  ENSP ID: ENSP00000480809
MALLRRPTVSSDLENIDTGVNSKVKSHVTIRRTVLEEIGNRVTTRAAQVAKKAQNTKVPVQPTKTTNVNKQLKPTASVKPVQMEKLAPKGPSPTPEDVSMKEENLCQAFSDALLCKIEDIDNEDWENPQLCSDYVKDIYQYLRQLEVLQSINPHFLDGRDINGRMRAILVDWLVQVHSKFRLLQETLYMCVGIMDRFLQVQPVSRKKLQLVGITALLLASKYEEMFSPNIEDFVYITDNAYTSSQIREMETLILKELKFELGRPLPLHFLRRASKAGEVDVEQHTLAKYLMELTLIDYDMVHYHPSKVAAAASCLSQKVLGQGKWNLKQQYYTGYTENEVLEVMQHMAKNVVKVNENLTKFIVSTTVFLSCGKL

SEQ ID NO: 20984 - protein, 1395 aa, Homo sapiens
  Payload ID: 4240
  Gene Symbol: CCNB3
  Gene Name: cyclin B3
  Uniprot ID: Q8WWL7
  ENSP ID: ENSP00000276014
MLLPLPPQSSKPVPKKSQSSKIVPSHHDPSEKTGENCQTKISPSSLQESPSSLQGALKKRSAFEDLTNASQCQPVQPKKEANKEFVKVVSKKINRNTHALGLAKKNKRNLKWHKLEVTPVVASTTVVPNIMEKPLILDISTTSKTPNTEEASLFRKPLVLKEEPTIEDETLINKSLSLKKCSNHEEVSLLEKLQPLQEESDSDDAFVIEPMTFKKTHKTEEAAITKKTLSLKKKMCASQRKQSCQEESLAVQDVNMEEDSFFMESMSFKKKPKTEESIPTHKLSSLKKKCTIYGKICHFRKPPVLQTTICGAMSSIKKPTTEKETLFQELSVLQEKHTTEHEMSILKKSLALQKTNFKEDSLVKESLAFKKKPSTEEAIMMPVILKEQCMTEGKRSRLKPLVLQEITSGEKSLIMKPLSIKEKPSTEKESFSQEPSALQKKHTTQEEVSILKEPSSLLKSPTEESPFDEALAFTKKCTIEEAPPTKKPLILKRKHATQGTMSHLKKPLILQTTSGEKSLIKEPLPFKEEKVSLKKKCTTQEMMSICPELLDFQDMIGEDKNSFFMEPMSFRKNPTTEETVLTKTSLSLQEKKITQGKMSHLKKPLVLQKITSEEESFYKKLLPFKMKSTTEEKFLSQEPSALKEKHTTLQEVSLSKESLAIQEKATTEEEFSQELFSLHVKHTNKSGSLFQEALVLQEKTDAEEDSLKNLLALQEKSTMEEESLINKLLALKEELSAEAATNIQTQLSLKKKSTSHGKVFFLKKQLALNETINEEEFLNKQPLALEGYPSIAEGETLFKKLLAMQEEPSIEKEAVLKEPTIDTEAHFKEPLALQEEPSTEKEAVLKEPSVDTEAHFKETLALQEKPSIEQEALFKRHSALWEKPSTEKETIFKESLDLQEKPSIKKETLLKKPLALKMSTINEAVLFEDMIALNEKPTTGKELSFKEPLALQESPTYKEDTFLKTLLVPQVGTSPNVSSTAPESITSKSSIATMTSVGKSGTINEAFLFEDMITLNEKPTTGKELSFKEPLALQESPTCKEDTFLETFLIPQIGTSPYVFSTTPESITEKSSIATMTSVGKSRTTTESSACESASDKPVSPQAKGTPKEITPREDIDEDSSDPSFNPMYAKEIFSYMKEREEQFILTDYMNRQIEITSDMRAILVDWLVEVQVSFEMTHETLYLAVKLVDLYLMKAVCKKDKLQLLGATAFMIAAKFEEHNSPRVDDFVYICDDNYQRSEVLSMEINILNVLKCDINIPIAYHFLRRYARCIHTNMKTLTLSRYICEMTLQEYHYVQEKASKLAAASLLLALYMKKLGYWVPFLEHYSGYSISELHPLVRQLNKLLTFSSYDSLKAVYYKYSHPVFFEVAKIPALDMLKLEEILNCDCEAQGLVL

SEQ ID NO: 20985 - protein, 291 aa, Homo sapiens
  Payload ID: 4240
  Gene Symbol: CCNB3
  Gene Name: cyclin B3
  Uniprot ID: Q8WWL7
  ENSP ID: ENSP00000338682
MLLPLPPQSSKPVPKKSQSSKIVPSHHDPSEKTGENCQTKISPSSLQESPSSLQGALKKRSAFEDLTNVSFEMTHETLYLAVKLVDLYLMKAVCKKDKLQLLGATAFMIAAKFEEHNSPRVDDFVYICDDNYQRSEVLSMEINILNVLKCDINIPIAYHFLRRYARCIHTNMKTLTLSRYICEMTLQEYHYVQEKASKLAAASLLLALYMKKLGYWVPFLEHYSGYSISELHPLVRQLNKLLTFSSYDSLKAVYYKYSHPVFFEVAKIPALDMLKLEEILNCDCEAQGLVL

SEQ ID NO: 20986 - protein, 291 aa, Homo sapiens; identical to SEQ ID NO: 20985
  Payload ID: 4240
  Gene Symbol: CCNB3
  Gene Name: cyclin B3
  Uniprot ID: Q8WWL7
  ENSP ID: ENSP00000365206

SEQ ID NO: 20987 - protein, 1395 aa, Homo sapiens; identical to SEQ ID NO: 20984
  Payload ID: 4240
  Gene Symbol: CCNB3
  Gene Name: cyclin B3
  Uniprot ID: Q8WWL7
  ENSP ID: ENSP00000365210

SEQ ID NO: 20988 - protein, 111 aa, Homo sapiens
  Payload ID: 4240
  Gene Symbol: CCNB3
  Gene Name: cyclin B3
  Uniprot ID: Q8WWL7
  ENSP ID: ENSP00000431645
MLLPLPPQSSKPVPKKSQSSKIVPSHHDPSEKTGENCQTKISPSSLQESPSSLQGALKKRSAFEDLTNASQCQPVQPKKEANKEFVKVVSKKINRNTHALGLAKKNKRNLK

SEQ ID NO: 20989 - protein, 202 aa, Homo sapiens
  Payload ID: 4241
  Gene Symbol: CCNC
  Gene Name: cyclin C
  ENSP ID: ENSP00000319027
MAGNFWQSSHYLQWILDKQDLLKERQKDLKFLSEEEYWKLQIFFTNVIQALGEHLKLRQQVIATATVYFKRFYARYSLKSIDPVLMAPTCVFLASKVEEFGVVSNTRLIAAATSVLKTRFSYAFPKEFPYRMNHILECEFYLLELMDCCLIVYHPYRPLLQYVQDMGQEDMLLPLAWRIVNDTYRTDLCLLYPPFMIALVID

SEQ ID NO: 20990 - protein, 282 aa, Homo sapiens
  Payload ID: 4241
  Gene Symbol: CCNC
  Gene Name: cyclin C
  ENSP ID: ENSP00000358222
MAGNFWQSSHYLQWILDKQDLLKERQKDLKFLSEEEYWKLQIFFTNVIQALGEHLKLRQQVIATATVYFKRFYARYSLKSIDPVLMAPTCVFLASKVEEFGVVSNTRLIAAATSVLKTRFSYAFPKEFPYRMNHILECEFYLLELMDCCLIVYHPYRPLLQYVQDMGQEDMLLPLAWIVNDTYRTDLCLLYPPFMIALACLHVACVVQQKDARQWFAELSVDMEKILEIIRVILKLYEQWKNFDERKEMATILSKMPKPKPPPNSEGEQGPNGSQNSSYSQS

SEQ ID NO: 20991 - protein, 143 aa, Homo sapiens
  Payload ID: 4241
  Gene Symbol: CCNC
  Gene Name: cyclin C
  ENSP ID: ENSP00000417072
MAGNFWQSSHYLQWILDKQDLLKERQKDLKFLSEEEYWKLQIFFTNVIQALGEHLKLRQQVIATATVYFKRFYARYSLKSIDPVLMAPTCVFLASKVEEFGVVSNTRLIAAATSVCKCKKYICFKDVILKKAPEYIDFFFFSL

SEQ ID NO: 20992 - protein, 162 aa, Homo sapiens
  Payload ID: 4241
  Gene Symbol: CCNC
  Gene Name: cyclin C
  ENSP ID: ENSP00000427885
MAPTCVFLASKVEEFGVVSNTRLIAAATSVLKTRFSYAFPKEFPYRMNHILECEFYLLELMDCCLIVYHPYRPLLQYVQDMGQEDMLLPLAWRIVNDTYRTDLCLLYPPFMIALACLHVACVVQQKDARQWFAELSVDMEKILEIIRVILKLYEQWKNFDER

SEQ ID NO: 20993 - protein, 192 aa, Homo sapiens
  Payload ID: 4241
  Gene Symbol: CCNC
  Gene Name: cyclin C
  ENSP ID: ENSP00000428472
MAGNFWQSSHYPKRRDHFALLKSLEQSWSFLSGKGNECGRQDNSGKTNEKIMKGHCLSLQWILDKQDLLKERQKDLKFLSEEEYWKLQIFFTNVIQALGEHLKLRQQVIATATVYFKRFYARYSLKSIDPVLMAPTCVFLASKVEEFGVVSNTRLIAAATSVLKTRFSYAFPKEFPYRMNHILECEFYLLEL

SEQ ID NO: 20994 - protein, 49 aa, Homo sapiens
  Payload ID: 4241
  Gene Symbol: CCNC
  Gene Name: cyclin C
  ENSP ID: ENSP00000428577
MAGNFWQSSHYLQWILDKQDLLKERQKDLKFLSEEEYWKLQIFFTNGIL

SEQ ID NO: 20995 - protein, 283 aa, Homo sapiens
  Payload ID: 4241
  Gene Symbol: CCNC
  Gene Name: cyclin C
  Uniprot ID: P24863
  ENSP ID: ENSP00000428982
MAGNFWQSSHYLQWILDKQDLLKERQKDLKFLSEEEYWKLQIFFTNVIQALGEHLKLRQQVIATATVYFKRFYARYSLKSIDPVLMAPTCVFLASKVEEFGVVSNTRLIAAATSVLKTRFSYAFPKEFPYRMNHILECEFYLLELMDCCLIVYHPYRPLLQYVQDMGQEDMLLPLAWRIVNDTYRTDLCLLYPPFMIALACLHVACVVQQKDARQWFAELSVDMEKILEIIRVILKLYEQWKNFDERKEMATILSKMPKPKPPPNSEGEQGPNGSQNSSYSQS

SEQ ID NO: 20996 - protein, 198 aa, Homo sapiens
  Payload ID: 4241
  Gene Symbol: CCNC
  Gene Name: cyclin C
  Uniprot ID: P24863
  ENSP ID: ENSP00000430014
MAPTCVFLASKVEEFGVVSNTRLIAAATSVLKTRFSYAFPKEFPYRMNHILECEFYLLELMDCCLIVYHPYRPLLQYVQDMGQEDMLLPLAWRIVNDTYRTDLCLLYPPFMIALACLHVACVVQQKDARQWFAELSVDMEKILEIIRVILKLYEQWKNFDERKEMATILSKMPKPKPPPNSEGEQGPNGSQNSSYSQS

SEQ ID NO: 20997 - protein, 228 aa, Homo sapiens
  Payload ID: 4241
  Gene Symbol: CCNC
  Gene Name: cyclin C
  ENSP ID: ENSP00000430077
LKLRQQVIATATVYFKRFYARYSLKSIDPVLMAPTCVFLASKVEEFGVVSNTRLIAAATSVLKTRFSYAFPKEFPYRMNHILECEFYLLELMDCCLIVYHPYRPLLQYVQDMGQEDMLLPLAWRIVNDTYRTDLCLLYPPFMIALACLHVACVVQQKDARQWFAELSVDMEKILEIIRVILKLYEQWKNFDERKEMATILSKMPKPKPPPNRNSLSDSPLVAGPEAAR

SEQ ID NO: 20998 - protein, 198 aa, Homo sapiens; identical to SEQ ID NO: 20996
  Payload ID: 4241
  Gene Symbol: CCNC
  Gene Name: cyclin C
  Uniprot ID: P24863
  ENSP ID: ENSP00000430119

SEQ ID NO: 20999 - protein, 282 aa, Homo sapiens
  Payload ID: 4241
  Gene Symbol: CCNC
  Gene Name: cyclin C
  ENSP ID: ENSP00000430294
MAGNFWQSSHYLQWILDKQDLLKERQKDLKFLSEEEYWKLQIFFTNVIQALGEHLKLRQQVIATATVYFKRFYARYSLKSIDPVLMAPTCVFLASKVEEFGVVSNTRLIAAATSVLKTRFSYAFPKEFPYRMNHILECEFYLLELMDCCLIVYHPYRPLLQYVQDMGQEDMLLPLAWRIVNDTYRTDLCLLYPPFMIALACLHVACVVQQKDARQWFAELSVDMEKILEIIRVILKLYEQWKNFDERKEMATILSKMPKPKPPPNRNSLSDSPLVAGPEAAR

SEQ ID NO: 21000 - protein, 282 aa, Homo sapiens; identical to SEQ ID NO: 20999
  Payload ID: 4241
  Gene Symbol: CCNC
  Gene Name: cyclin C
  ENSP ID: ENSP00000430381

SEQ ID NO: 21001 - protein, 114 aa, Homo sapiens
  Payload ID: 4241
  Gene Symbol: CCNC
  Gene Name: cyclin C
  ENSP ID: ENSP00000430718
MAGNFWQSSHYLQWILDKQDLLKERQKDLKFLSEEEYWKLQIFFTNVIQALGEHLKLRQQVIATATVYFKRFYARYSLKSIDPVLMAPTCVFLASKVEEFGVVSNTRLIAAATS

SEQ ID NO: 21002 - protein, 202 aa, Homo sapiens; identical to SEQ ID NO: 20989
  Payload ID: 4241
  Gene Symbol: CCNC
  Gene Name: cyclin C
  ENSP ID: ENSP00000487040

SEQ ID NO: 21003 - protein, 760 aa, Homo sapiens
  Payload ID: 4242
  Gene Symbol: DMTF1
  Gene Name: cyclin D binding myb-like transcription factor 1
  Uniprot ID: Q9Y222
  ENSP ID: ENSP00000332171
MSTVEEDSDTVTVETVNSVTLTQDTEGNLILHCPQNEADEIDSEDSIEPPHKRLCLSSEDDQSIDDSTPCISVVALPLSENDQSFEVTMTATTEVADDEVTEGTVTQIQILQNEQLDEISPLGNEEVSAVSQAWFTTKEDKDSLTNKGHKWKQGMWSKEEIDILMNNIERYLKARGIKDATEIIFEMSKDERKDFYRTIAWGLNRPLFAVYRRVLRMYDDRNHVGKYTPEEIEKLKELRIKHGNDWATIGAALGRSASSVKDRCRLMKDTCNTGKWTEEEEKRLAEVVHELTSTEPGDIVTQGVSWAAVAERVGTRSEKQCRSKWLNYLNWKQSGGTEWTKEDEINLILRIAELDVADENDINWDLLAEGWSSVRSPQWLRSKWWTIKRQIANHKDVSFPVLIKGLKQLHENQKNNPTLLENKSGSGVPNSNTNSSVQHVQIRVARLEDNTAISSSPMAALQIPVQITHVSSADSPATVDSETITLNSGTLQTFEILPSFHLQPTGTPGTYLLQTSSSQGLPLTLTASPTVTLTAAAPASPEQIIVHALSPEHLLNTSDNVTVQCHTPRVIIQTVATEDITSSISQAELTVDSDIQSSDFPEPPDALEADTFPDEIHHPKMTVEPSFNDAHVSKFSDQNSTELMNSVMVRTEEEISDTDLKQEESPSDLASAYVTEGLESPTIEEQVDQTIDDETILIVPSPHGFIQASDVIDTESVLPLTTLTDPILQHHQEESNIIGSSLGSPVSEDSKDVEDLVNCH

SEQ ID NO: 21004 - protein, 760 aa, Homo sapiens; identical to SEQ ID NO: 21003
  Payload ID: 4242
  Gene Symbol: DMTF1
  Gene Name: cyclin D binding myb-like transcription factor 1
  Uniprot ID: Q9Y222
  ENSP ID: ENSP00000378193

SEQ ID NO: 21005 - protein, 136 aa, Homo sapiens
  Payload ID: 4242
  Gene Symbol: DMTF1
  Gene Name: cyclin D binding myb-like transcription factor 1
  ENSP ID: ENSP00000387712
MSTVEEDSDTVTVETVNSVTLTQDTEGNLILHCPQNEADEIDSEDSIEPPHKRLCLSSEDDQSIDDSTPCISVVALPLSENDQSFEVTMTATTEVADDEVTEGTVTQIQILQNEQLDEISPLGNEEVSAVSQAWFT

SEQ ID NO: 21006 - protein, 285 aa, Homo sapiens
  Payload ID: 4242
  Gene Symbol: DMTF1
  Gene Name: cyclin D binding myb-like transcription factor 1
  Uniprot ID: Q9Y222
  ENSP ID: ENSP00000389774
MSTVEEDSDTVTVETVNSVTLTQDTEGNLILHCPQNEADEIDSEDSIEPPHKRLCLSSEDDQSIDDSTPCISVVALPLSENDQSFEVTMTATTEVADDEVTEGTVTQIQILQNEQLDEISPLGNEEVSAVSQAWFTTKEDKDSLTNKGHKWKQGMWSKEEIDILMNNIERYLKARGIKDATEIIFEMSKDERKDFYRTIAWGLNRPLFAVYRRVLRMYDDRNHVGKYTPEEIEKLKEKKAIAACFFFTHRQLWTPKKGHTFKLWLSKYCCPQLPNQSNGKKKNEE

SEQ ID NO: 21007 - protein, 96 aa, Homo sapiens
  Payload ID: 4242
  Gene Symbol: DMTF1
  Gene Name: cyclin D binding myb-like transcription factor 1
  ENSP ID: ENSP00000393370
MSTVEEDSDTVTVETVNSVTLTQDTEGNLILHCPQNEADEIDSEDSIEPPHKRLCLSSEDDQSIDDSTPCISVVALPLSENDQSFEVTMTATTEVA

SEQ ID NO: 21008 - protein, 90 aa, Homo sapiens
  Payload ID: 4242
  Gene Symbol: DMTF1
  Gene Name: cyclin D binding myb-like transcription factor 1
  ENSP ID: ENSP00000397490
MSTVEEDSDTVTVETVNSVTLTQDTEGNLILHCPQNEADEIDSEDSIEPPHKRLCLSSEDDQSIDDSTPCISVVALPLSENDQSFEVTMT

SEQ ID NO: 21009 - protein, 85 aa, Homo sapiens
  Payload ID: 4242
  Gene Symbol: DMTF1
  Gene Name: cyclin D binding myb-like transcription factor 1
  ENSP ID: ENSP00000401129
MSTVEEDSDTVTVETVNSVTLTQDTEGNLILHCPQNEADEIDSEDSIEPPHKRLCLSSEDDQSIDDSTPCISVVALPLSENDQSF

SEQ ID NO: 21010 - protein, 690 aa, Homo sapiens
  Payload ID: 4242
  Gene Symbol: DMTF1
  Gene Name: cyclin D binding myb-like transcription factor 1
  ENSP ID: ENSP00000402627
MSTVEEDSDTVTVETVNSVTLTQDTEGNLILHCPQNEADEIDSEDSIEPPHKRLCLSSEDDQSIDDSTPCISVVALPLSENDQSFEVTMTATTEVADDEVTEGTVTQIQILQNEQLDEISPLGNEEVSAVSQAWFTTKEDKDSLTNKGHKWKQGMWSKEEIDILMNNIERYLKARGIKDATEIIFEMSKDERKDFYRTIAWGLNRPLFAVYRRVLRMYDDRNHVGKYTPEEIEKLKELRIKHGNDWATIGAALGRSASSVKDRCRLMKDTCNTGKWTEEEEKRLAEVVHELTSTEPGDIVTQGVSWAAVAERVGTRSEKQCRSKWLNYLNWKQSGGTEWTKEDEINLILRIAELDVADENDINWDLLAEGWSSVRSPQWLRSKWWTIKRQIANHKDVSFPASADSPATVDSETITLNSGTLQTFEILPSFHLQPTGTPGTYLLQTSSSQGLPLTLTASPTVTLTAAAPASPEQIIVHALSPEHLLNTSDNVTVQCHTPRVIIQTVATEDITSSISQAELTVDSDIQSSDFPEPPDALEADTFPDEIHHPKMTVEPSFNDAHVSKFSDQNSTELMNSVMVRTEEEISDTDLKQEESPSDLASAYVTEGLESPTIEEQVDQTIDDETILIVPSPHGFIQASDVIDTESVLPLTTLTDPILQHHQEESNIIGSSLGSPVSEDSKDVEDLVNCH

SEQ ID NO: 21011 - protein, 10 aa, Homo sapiens
  Payload ID: 4242
  Gene Symbol: DMTF1
  Gene Name: cyclin D binding myb-like transcription factor 1
  ENSP ID: ENSP00000406384
MTATTEVADD

SEQ ID NO: 21012 - protein, 272 aa, Homo sapiens
  Payload ID: 4242
  Gene Symbol: DMTF1
  Gene Name: cyclin D binding myb-like transcription factor 1
  Uniprot ID: Q9Y222
  ENSP ID: ENSP00000407941
MSTVEEDSDTVTVETVNSVTLTQDTEGNLILHCPQNEADEIDSEDSIEPPHKRLCLSSEDDQSIDDSTPCISVVALPLSENDQSFEVTMTATTEVADDEVTEGTVTQIQILQNEQLDEISPLGNEEVSAVSQAWFTTKEDKDSLTNKGHKWKQGMWSKEEIDILMNNIERYLKARGIKDATEIIFEMSKDERKDFYRTIAWGLNRPLFAVYRRVLRMYDDRNHVGKYTPEEIEKLKEQLWTPKKGHTFKLWLSKYCCPQLPNQSNGKKKNEE

SEQ ID NO: 21013 - protein, 176 aa, Homo sapiens
  Payload ID: 4242
  Gene Symbol: DMTF1
  Gene Name: cyclin D binding myb-like transcription factor 1
  ENSP ID: ENSP00000410288
  MOD_RES (1)..(1): Any amino acid
XTAAAPASPEQIIVHALSPEHLLNTSDNVTVQCHTPRVIIQTVATEDITSSISQAELTVDSDIQSSDFPEPPDALEADTFPDEIHHPKMTVEPSFNDAHVSKFSDQNSTELMNSVMVRTEEEISDTDLKQEESPSDLASAYVTEIPYSNIIRKNQISLDHPWAVLFQKIQRMSKIW

SEQ ID NO: 21014 - protein, 49 aa, Homo sapiens
  Payload ID: 4242
  Gene Symbol: DMTF1
  Gene Name: cyclin D binding myb-like transcription factor 1
  ENSP ID: ENSP00000411858
MSTVEEDSDTVTVETVNSVTLTQDTEGNLILHCPQNEADEIDSEDSIEP

SEQ ID NO: 21015 - protein, 244 aa, Homo sapiens
  Payload ID: 4242
  Gene Symbol: DMTF1
  Gene Name: cyclin D binding myb-like transcription factor 1
  Uniprot ID: Q9Y222
  ENSP ID: ENSP00000411908
MSTVEEDSDTVTVETVNSVTLTQDTEGNLILHCPQNVSENDQSFEVTMTATTEVADDEVTEGTVTQIQILQNEQLDEISPLGNEEVSAVSQAWFTTKEDKDSLTNKGHKWKQGMWSKEEIDILMNNIERYLKARGIKDATEIIFEMSKDERKDFYRTIAWGLNRPLFAVYRRVLRMYDDRNHVGKYTPEEIEKLKEKKAIAACFFFTHRQLWTPKKGHTFKLWLSKYCCPQLPNQSNGKKKNEE

SEQ ID NO: 21016 - protein, 672 aa, Homo sapiens
  Payload ID: 4242
  Gene Symbol: DMTF1
  Gene Name: cyclin D binding myb-like transcription factor 1
  Uniprot ID: Q9Y222
  ENSP ID: ENSP00000412532
MTATTEVADDEVTEGTVTQIQILQNEQLDEISPLGNEEVSAVSQAWFTTKEDKDSLTNKGHKWKQGMWSKEEIDILMNNIERYLKARGIKDATEIIFEMSKDERKDFYRTIAWGLNRPLFAVYRRVLRMYDDRNHVGKYTPEEIEKLKELRIKHGNDWATIGAALGRSASSVKDRCRLMKDTCNTGKWTEEEEKRLAEVVHELTSTEPGDIVTQGVSWAAVAERVGTRSEKQCRSKWLNYLNWKQSGGTEWTKEDEINLILRIAELDVADENDINWDLLAEGWSSVRSPQWLRSKWWTIKRQIANHKDVSFPVLIKGLKQLHENQKNNPTLLENKSGSGVPNSNTNSSVQHVQIRVARLEDNTAISSSPMAALQIPVQITHVSSADSPATVDSETITLNSGTLQTFEILPSFHLQPTGTPGTYLLQTSSSQGLPLTLTASPTVTLTAAAPASPEQIIVHALSPEHLLNTSDNVTVQCHTPRVIIQTVATEDITSSISQAELTVDSDIQSSDFPEPPDALEADTFPDEIHHPKMTVEPSFNDAHVSKFSDQNSTELMNSVMVRTEEEISDTDLKQEESPSDLASAYVTEGLESPTIEEQVDQTIDDETILIVPSPHGFIQASDVIDTESVLPLTTLTDPILQHHQEESNIIGSSLGSPVSEDSKDVEDLVNCH

SEQ ID NO: 21017 - protein, 49 aa, Homo sapiens; identical to SEQ ID NO: 21014
  Payload ID: 4242
  Gene Symbol: DMTF1
  Gene Name: cyclin D binding myb-like transcription factor 1
  ENSP ID: ENSP00000412734

SEQ ID NO: 21018 - protein, 27 aa, Homo sapiens
  Payload ID: 4242
  Gene Symbol: DMTF1
  Gene Name: cyclin D binding myb-like transcription factor 1
  ENSP ID: ENSP00000413118
MSTVEEDSDTVTVETVNSVTLTQDTEG

SEQ ID NO: 21019 - protein, 40 aa, Homo sapiens
  Payload ID: 4242
  Gene Symbol: DMTF1
  Gene Name: cyclin D binding myb-like transcription factor 1
  ENSP ID: ENSP00000413722
MSTVEEDSDTVTVETVNSVTLTQDTEGNLILHCPQNEADE

SEQ ID NO: 21020 - protein, 73 aa, Homo sapiens
  Payload ID: 4242
  Gene Symbol: DMTF1
  Gene Name: cyclin D binding myb-like transcription factor 1
  ENSP ID: ENSP00000415382
MSTVEEDSDTVTVETVNSVTLTQDTEGNLILHCPQNEADEIDSEDSIEPPHKRLCLSSEDDQSIDDSTPCISV

SEQ ID NO: 21021 - protein, 175 aa, Homo sapiens
  Payload ID: 4242
  Gene Symbol: DMTF1
  Gene Name: cyclin D binding myb-like transcription factor 1
  ENSP ID: ENSP00000416307
MSTVEEDSDTVTVETVNSVTLTQDTEGNLILHCPQNEADEIDSEDSIEPPHKRLCLSSEDDQSIDDSTPCISVVALPLSENDQSFEVTMTATTEVADDEVTEGTVTQIQILQNEQLDEISPLGNEEVSAVSQAWFTTKEDKDSLTNKGHKWKQGMWSKEEIDILMNNIERYLKAR

SEQ ID NO: 21022 - protein, 191 aa, Homo sapiens
  Payload ID: 4242
  Gene Symbol: DMTF1
  Gene Name: cyclin D binding myb-like transcription factor 1
  ENSP ID: ENSP00000416499
MSTVEEDSDTVTVETVNSVTLTQDTEGNLILHCPQNEADEIDSEDSIEPPHKRLCLSSEDDQSIDDSTPCISVVALPLSENDQSFEVTMTATTEVADDEVTEGTVTQIQILQNEQLDEISPLGNEEVSAVSQAWFTTKEDKDSLTNKGHKWKQGMWSKEEIDILMNNIERYLKARGIKDATEIIFEMSKDE

SEQ ID NO: 21023 - protein, 378 aa, Homo sapiens
  Payload ID: 4242
  Gene Symbol: DMTF1
  Gene Name: cyclin D binding myb-like transcription factor 1
  ENSP ID: ENSP00000448775
MSTVEEDSDTVTVETVNSVTLTQDTEGNLILHCPQNEADEIDSEDSIEPPHKRLCLSSEDDQSIDDSTPCISVVALPLSENDQSFEVTMTATTEVADDEVTEGTVTQIQILQNEQLDEISPLGNEEVSAVSQAWFTTKEDKDSLTNKGHKWKQGMWSKEEIDILMNNIERYLKARGIKDATEIIFEMSKDERKDFYRTIAWGLNRPLFAVYRRVLRMYDDRNHVGKYTPEEIEKLKELRIKHGNDWATIGAALGRSASSVKDRCRLMKDTCNTGKWTEEEEKRLAEVVHELTSTEPGDIVTQGVSWAAVAERVGTRSEKQCRSKWLNYLNWKQSGGTEWTKEDEINLILSGFSAHAKYQIEGVETEVLSISTEQDSRT

SEQ ID NO: 21024 - protein, 34 aa, Homo sapiens
  Payload ID: 4242
  Gene Symbol: DMTF1
  Gene Name: cyclin D binding myb-like transcription factor 1
  ENSP ID: ENSP00000461920
MSTVEEDSDTVTVETVNSVTLTQDTEGNLILHCP

SEQ ID NO: 21025 - protein, 178 aa, Homo sapiens
  Payload ID: 4242
  Gene Symbol: DMTF1
  Gene Name: cyclin D binding myb-like transcription factor 1
  ENSP ID: ENSP00000463239
PEHLLNTSDNVTVQCHTPRVIIQTVATEDITSSISQAELTVDSDIQSSDFPEPPDALEADTFPDEIHHPKMTVEPSFNDAHVSKFSDQNSTELMNSVMVRTEEEISDTDLKQEESPSDLASAYVTEGLESPTIEEQVDQTIDDETILIVPSPHGFIQASDVIDTESVLPLTTLTGTVI

SEQ ID NO: 21026 - protein, 365 aa, Homo sapiens
  Payload ID: 4242
  Gene Symbol: DMTF1
  Gene Name: cyclin D binding myb-like transcription factor 1
  ENSP ID: ENSP00000463638
MSTVEEDSDTVTVETVNSVTLTQDTEGNLILHCPQNVSENDQSFEVTMTATTEVADDEVTEGTVTQIQILQNEQLDEISPLGNEEVSAVSQAWFTTKEDKDSLTNKGHKWKQGMWSKEEIDILMNNIERYLKARGIKDATEIIFEMSKDERKDFYRTIAWGLNRPLFAVYRRVLRMYDDRNHVGKYTPEEIEKLKELRIKHGNDWATIGAALGRSASSVKDRCRLMKDTCNTGKWTEEEEKRLAEVVHELTSTEPGDIVTQGVSWAAVAERVGTRSEKQCRSKWLNYLNWKQSGGTEWTKEDEINLILRIAELDVADENDINWDLLAEGWSSVRSPQWLRSKWWTIKRQIANHKDVSFPVCSMFR

SEQ ID NO: 21027 - protein, 16 aa, Homo sapiens
  Payload ID: 4242
  Gene Symbol: DMTF1
  Gene Name: cyclin D binding myb-like transcription factor 1
  ENSP ID: ENSP00000463735
MSTVEEDSDTVTVETV

SEQ ID NO: 21028 - protein, 272 aa, Homo sapiens; identical to SEQ ID NO: 21012
  Payload ID: 4242
  Gene Symbol: DMTF1
  Gene Name: cyclin D binding myb-like transcription factor 1
  Uniprot ID: Q9Y222
  ENSP ID: ENSP00000464092

SEQ ID NO: 21029 - protein, 272 aa, Homo sapiens; identical to SEQ ID NO: 21012
  Payload ID: 4242
  Gene Symbol: DMTF1
  Gene Name: cyclin D binding myb-like transcription factor 1
  Uniprot ID: Q9Y222
  ENSP ID: ENSP00000464596

SEQ ID NO: 21030 - protein, 295 aa, Homo sapiens
  Payload ID: 4243
  Gene Symbol: CCND1
  Gene Name: cyclin D1
  Uniprot ID: P24385
  ENSP ID: ENSP00000227507
MEHQLLCCEVETIRRAYPDANLLNDRVLRAMLKAEETCAPSVSYFKCVQKEVLPSMRKIVATWMLEVCEEQKCEEEVFPLAMNYLDRFLSLEPVKKSRLQLLGATCMFVASKMKETIPLTAEKLCIYTDNSIRPEELLQMELLLVNKLKWNLAAMTPHDFIEHFLSKMPEAEENKQIIRKHAQTFVALCATDVKFISNPPSMVAAGSVVAAVQGLNLRSPNNFLSYYRLTRFLSRVIKCDPDCLRACQEQIEALLESSLRQAQQNMDPKAAEEEEEEEEEVDLACTPTDVRDVDI

SEQ ID NO: 21031 - protein, 67 aa, Homo sapiens
  Payload ID: 4243
  Gene Symbol: CCND1
  Gene Name: cyclin D1
  ENSP ID: ENSP00000438482
MEHQLLCCEVETIRRAYPDANLLNDRVLRAMLKAEETCAPSVSYFKCVQKEVLPSMRKIVATWMLEM

SEQ ID NO: 21032 - protein, 289 aa, Homo sapiens
  Payload ID: 4244
  Gene Symbol: CCND2
  Gene Name: cyclin D2
  Uniprot ID: P30279
  ENSP ID: ENSP00000261254
MELLCHEVDPVRRAVRDRNLLRDDRVLQNLLTIEERYLPQCSYFKCVQKDIQPYMRRMVATWMLEVCEEQKCEEEVFPLAMNYLDRFLAGVPTPKSHLQLLGAVCMFLASKLKETSPLTAEKLCIYTDNSIKPQELLEWELVVLGKLKWNLAAVTPHDFIEHILRKLPQQREKLSLIRKHAQTFIALCATDFKFAMYPPSMIATGSVGAAICGLQQDEEVSSLTCDALTELLAKITNTDVDCLKACQEQIEAVLLNSLQQYRQDQRDGSKSEDELDQASTPTDVRDIDL

SEQ ID NO: 21033 - protein, 170 aa, Homo sapiens
  Payload ID: 4244
  Gene Symbol: CCND2
  Gene Name: cyclin D2
  ENSP ID: ENSP00000442807
  MOD_RES (1)..(1): Any amino acid
XRFLAGVPTPKSHLQLLGAVCMFLASKLKETSPLTAEKLCIYTDNSIKPQELLEWELVVLGKLKWNLAAVTPHDFIEHILRKLPQQREKLSLIRKHAQTFIALCATAQQVGQGKGKGCNQEMPQERLRGVSKSQRPAPDSISASFRVARRLLLLRHVCHVQHSSQTHSLD

SEQ ID NO: 21034 - protein, 242 aa, Homo sapiens
  Payload ID: 4245
  Gene Symbol: CCND3
  Gene Name: cyclin D3
  ENSP ID: ENSP00000362078
MKSAGGSGRSLLPSPRVCEEQRCEEEVFPLAMNYLDRYLSCVPTRKAQLQLLGAVCMLLASKLRETTPLTIEKLCIYTDHAVSPRQLRDWEVLVLGKLKWDLAAVIAHDFLAFILHRLSLPRDRQALVKKHAQTFLALCATDYTFAMYPPSMIATGSIGAAVQGLGACSMSGDELTELLAGITGTEVDCLRACQEQIEAALRESLREASQTSSSPAPKAPRGSSSQGPSQTSTPTDVTAIHL

SEQ ID NO: 21035 - protein, 211 aa, Homo sapiens
  Payload ID: 4245
  Gene Symbol: CCND3
  Gene Name: cyclin D3
  Uniprot ID: P30281
  ENSP ID: ENSP00000362079
MNYLDRYLSCVPTRKAQLQLLGAVCMLLASKLRETTPLTIEKLCIYTDHAVSPRQLRDWEVLVLGKLKWDLAAVIAHDFLAFILHRLSLPRDRQALVKKHAQTFLALCATDYTFAMYPPSMIATGSIGAAVQGLGACSMSGDELTELLAGITGTEVDCLRACQEQIEAALRESLREASQTSSSPAPKAPRGSSSQGPSQTSTPTDVTAIHL

SEQ ID NO: 21036 - protein, 292 aa, Homo sapiens
  Payload ID: 4245
  Gene Symbol: CCND3
  Gene Name: cyclin D3
  Uniprot ID: P30281
  ENSP ID: ENSP00000362082
MELLCCEGTRHAPRAGPDPRLLGDQRVLQSLLRLEERYVPRASYFQCVQREIKPHMRKMLAYWMLEVCEEQRCEEEVFPLAMNYLDRYLSCVPTRKAQLQLLGAVCMLLASKLRETTPLTIEKLCIYTDHAVSPRQLRDWEVLVLGKLKWDLAAVIAHDFLAFILHRLSLPRDRQALVKKHAQTFLALCATDYTFAMYPPSMIATGSIGAAVQGLGACSMSGDELTELLAGITGTEVDCLRACQEQIEAALRESLREASQTSSSPAPKAPRGSSSQGPSQTSTPTDVTAIHL

SEQ ID NO: 21037 - protein, 220 aa, Homo sapiens
  Payload ID: 4245
  Gene Symbol: CCND3
  Gene Name: cyclin D3
  Uniprot ID: P30281
  ENSP ID: ENSP00000397545
MELLCCEGTRHAPRAGPDPRLLGDQRVLQSLLRLEERYVPRASYFQCVQREIKPHMRKMLAYWMLEDWEVLVLGKLKWDLAAVIAHDFLAFILHRLSLPRDRQALVKKHAQTFLALCATDYTFAMYPPSMIATGSIGAAVQGLGACSMSGDELTELLAGITGTEVDCLRACQEQIEAALRESLREASQTSSSPAPKAPRGSSSQGPSQTSTPTDVTAIHL

SEQ ID NO: 21038 - protein, 96 aa, Homo sapiens
  Payload ID: 4245
  Gene Symbol: CCND3
  Gene Name: cyclin D3
  Uniprot ID: P30281
  ENSP ID: ENSP00000401595
MYPPSMIATGSIGAAVQGLGACSMSGDELTELLAGITGTEVDCLRACQEQIEAALRESLREASQTSSSPAPKAPRGSSSQGPSQTSTPTDVTAIHL

SEQ ID NO: 21039 - protein, 46 aa, Homo sapiens
  Payload ID: 4245
  Gene Symbol: CCND3
  Gene Name: cyclin D3
  ENSP ID: ENSP00000420991
MKSAGGSGRSLLPSPRVCEEQRCEEEVFPLAMNYLDRYLSCVPTRK

SEQ ID NO: 21040 - protein, 175 aa, Homo sapiens
  Payload ID: 4245
  Gene Symbol: CCND3
  Gene Name: cyclin D3
  ENSP ID: ENSP00000421511
VCEEQRCEEEVFPLAMNYLDRYLSCVPTRKAQLQLLGAVCMLLASKLRETTPLTIEKLCIYTDHAVSPRQLRDWEVLVLGKLKWDLAAVIAHDFLAFILHRLSLPRDRQALVKKHAQTFLALCATDYTFAMYPPSMIATGSIGAAVQGLGACSMSGDELTELLAGITGTEVVSAG

SEQ ID NO: 21041 - protein, 10 aa, Homo sapiens
  Payload ID: 4245
  Gene Symbol: CCND3
  Gene Name: cyclin D3
  ENSP ID: ENSP00000423242
MYPPSMIATG

SEQ ID NO: 21042 - protein, 43 aa, Homo sapiens
  Payload ID: 4245
  Gene Symbol: CCND3
  Gene Name: cyclin D3
  ENSP ID: ENSP00000425334
MNYLDRYLSCVPTRKAQLQLLGAVCMLLASKLRETTPLTIEKL

SEQ ID NO: 21043 - protein, 118 aa, Homo sapiens
  Payload ID: 4245
  Gene Symbol: CCND3
  Gene Name: cyclin D3
  ENSP ID: ENSP00000425830
MNYLDRYLSCVPTRKAQLQLLGAVCMLLASKLRETTPLTIEKLCIYTDHAVSPRQLRDWEVLVLGKLKWDLAAVIAHDFLAFILHRLSLPRDRQALVKKHAQTFLALCATDYTFAMYP

SEQ ID NO: 21044 - protein, 195 aa, Homo sapiens
  Payload ID: 4245
  Gene Symbol: CCND3
  Gene Name: cyclin D3
  ENSP ID: ENSP00000425986
MNYLDRYLSCVPTRKAQLQLLGAVCMLLASKLRETTPLTIEKLCIYTDHAVSPRQLRDWEVLVLGKLKWDLAAVIAHDFLAFILHRLSLPRDRQALVKKHAQTFLALCATGLPAGLSGADRSCTQGEPQGSLSDQLQPSAQSPPGLQQPRAQPDQHSYRCHSHTPVALERPSGVATKQRRGRCHPPPCLQEPHHI

SEQ ID NO: 21045 - protein, 211 aa, Homo sapiens; identical to SEQ ID NO: 21035
  Payload ID: 4245
  Gene Symbol: CCND3
  Gene Name: cyclin D3
  Uniprot ID: P30281
  ENSP ID: ENSP00000426212

SEQ ID NO: 21046 - protein, 96 aa, Homo sapiens; identical to SEQ ID NO: 21038
  Payload ID: 4245
  Gene Symbol: CCND3
  Gene Name: cyclin D3
  Uniprot ID: P30281
  ENSP ID: ENSP00000484424

SEQ ID NO: 21047 - protein, 360 aa, Homo sapiens
  Payload ID: 4246
  Gene Symbol: CCNDBP1
  Gene Name: cyclin D-type binding-protein 1
  Uniprot ID: O95273
  ENSP ID: ENSP00000300213
MASATAPAAAVPTLASPLEQLRHLAEELRLLLPRVRVGEAQETTEEFNREMFWRRLNEAAVTVSREATTLTIVFSQLPLPSPQETQKFCEQVHAAIKAFIAVYYLLPKDQGITLRKLVRGATLDIVDGMAQLMEVLSVTPTQSPENNDLISYNSVWVACQQMPQIPRDNKAAALLMLTKNVDFVKDAHEEMEQAVEECDPYSGLLNDTEENNSDNHNHEDDVLGFPSNQDLYWSEDDQELIIPCLALVRASKACLKKIRMLVAENGKKDQVAQLDDIVDISDEISPSVDDLALSIYPPMCHLTVRINSAKLVSVLKKALEITKASHVTPQPEDSWIPLLINAIDHCMNRIKELTQSELEL

SEQ ID NO: 21048 - protein, 62 aa, Homo sapiens
  Payload ID: 4246
  Gene Symbol: CCNDBP1
  Gene Name: cyclin D-type binding-protein 1
  ENSP ID: ENSP00000454420
MASATAPAAAVPTLASPLEQLRHLAEELRLLLPRVRVGEAQETTEEFNREMFWRRLRNPEVL

SEQ ID NO: 21049 - protein, 309 aa, Homo sapiens
  Payload ID: 4246
  Gene Symbol: CCNDBP1
  Gene Name: cyclin D-type binding-protein 1
  Uniprot ID: O95273
  ENSP ID: ENSP00000455419
MASATAPAAAVPTLASPLEQLRHLAEELRLLLPRVRVGEAQETTEEFNREMFWRRLNEAAVTVSREATTLTIVFSQLPLPSPQETQKFCEQVHAAIKAFIAVYYLLPKDQGITLRKLVRGATLDIVDGMAQLMEVLSVTPTQSPENNDLISYNSVWVACQQMPQIPRDNKAAALLMLTKNVDFVKDAHEEMEQAVEECDPYSGLLNDTEENNSDNHNHEDDVLGFPSNQDLYWSEDDQELIIPCLALVRASKACLKKIRMLVAENGKKDQVAQLDDIVDISDEISPSVDDLALSIYPPMCHLTVRINEP

SEQ ID NO: 21050 - protein, 62 aa, Homo sapiens; identical to SEQ ID NO: 21048
  Payload ID: 4246
  Gene Symbol: CCNDBP1
  Gene Name: cyclin D-type binding-protein 1
  ENSP ID: ENSP00000455687

SEQ ID NO: 21051 - protein, 142 aa, Homo sapiens
  Payload ID: 4246
  Gene Symbol: CCNDBP1
  Gene Name: cyclin D-type binding-protein 1
  ENSP ID: ENSP00000456041
MASATAPAAAVPTLASPLEQLRHLAEELRLLLPRVRVGEAQETTEEFNREMFWRRLNEAAVTVSREATTLTIVFSQLPLPSPQETQKFCEQVHAAIKAFIAVYYLLPKDQALRTMTLFPTTVSGLRASRCLRYQEITKLQLF

SEQ ID NO: 21052 - protein, 309 aa, Homo sapiens; identical to SEQ ID NO: 21049
  Payload ID: 4246
  Gene Symbol: CCNDBP1
  Gene Name: cyclin D-type binding-protein 1
  Uniprot ID: O95273
  ENSP ID: ENSP00000456797

SEQ ID NO: 21053 - protein, 42 aa, Homo sapiens
  Payload ID: 4246
  Gene Symbol: CCNDBP1
  Gene Name: cyclin D-type binding-protein 1
  ENSP ID: ENSP00000456839
MASATAPAAAVPTLASPLEQLRHLAEELRLLLPRVRGNPEVL

SEQ ID NO: 21054 - protein, 42 aa, Homo sapiens; identical to SEQ ID NO: 21053
  Payload ID: 4246
  Gene Symbol: CCNDBP1
  Gene Name: cyclin D-type binding-protein 1
  ENSP ID: ENSP00000457611

SEQ ID NO: 21055 - protein, 410 aa, Homo sapiens
  Payload ID: 4247
  Gene Symbol: CCNE1
  Gene Name: cyclin E1
  Uniprot ID: P24864
  ENSP ID: ENSP00000262643
MPRERRERDAKERDTMKEDGGAEFSARSRKRKANVTVFLQDPDEEMAKIDRTARDQCGSQPWDNNAVCADPCSLIPTPDKEDDDRVYPNSTCKPRIIAPSRGSPLPVLSWANREEVWKIMLNKEKTYLRDQHFLEQHPLLQPKMRAILLDWLMEVCEVYKLHRETFYLAQDFFDRYMATQENVVKTLLQLIGISSLFIAAKLEEIYPPKLHQFAYVTDGACSGDEILTMELMIMKALKWRLSPLTIVSWLNVYMQVAYLNDLHEVLLPQYPQQIFIQIAELLDLCVLDVDCLEFPYGILAASALYHFSSSELMQKVSGYQWCDIENCVKWMVPFAMVIRETGSSKLKHFRGVADEDAHNIQTHRDSLDLLDKARAKKAMLSEQNRASPLPSGLLTPPQSGKKQSSGPEMA

SEQ ID NO: 21056 - protein, 350 aa, Homo sapiens
  Payload ID: 4247
  Gene Symbol: CCNE1
  Gene Name: cyclin E1
  ENSP ID: ENSP00000350625
MKEDGGAEFSARSRKRKANVTVFLQDPDEEMAKIDRTARDQCGSQPWDNNAVCADPCSLIPTPDKEDDDRVYPNSTCKPRIIAPSRGSPLPVLSWANREEVWKIMLNKEKTYLRDQHFLEQHPLLQPKMRAILLDWLMEVCEVYKLHRETFYLAQDFFDRYMATQENVVKTLLQLIGISSLFIAAKLEEIYPPKLHQFAYVTDGACSGDEILTMELMIMKLLDLCVLDVDCLEFPYGILAASALYHFSSSELMQKVSGYQWCDIENCVKWMVPFAMVIRETGSSKLKHFRGVADEDAHNIQTHRDSLDLLDKARAKKAMLSEQNRASPLPSGLLTPPQSGKKQSSGPEMA

SEQ ID NO: 21057 - protein, 395 aa, Homo sapiens
  Payload ID: 4247
  Gene Symbol: CCNE1
  Gene Name: cyclin E1
  Uniprot ID: P24864
  ENSP ID: ENSP00000410179
MKEDGGAEFSARSRKRKANVTVFLQDPDEEMAKIDRTARDQCGSQPWDNNAVCADPCSLIPTPDKEDDDRVYPNSTCKPRIIAPSRGSPLPVLSWANREEVWKIMLNKEKTYLRDQHFLEQHPLLQPKMRAILLDWLMEVCEVYKLHRETFYLAQDFFDRYMATQENVVKTLLQLIGISSLFIAAKLEEIYPPKLHQFAYVTDGACSGDEILTMELMIMKALKWRLSPLTIVSWLNVYMQVAYLNDLHEVLLPQYPQQIFIQIAELLDLCVLDVDCLEFPYGILAASALYHFSSSELMQKVSGYQWCDIENCVKWMVPFAMVIRETGSSKLKHFRGVADEDAHNIQTHRDSLDLLDKARAKKAMLSEQNRASPLPSGLLTPPQSGKKQSSGPEMA

SEQ ID NO: 21058 - protein, 215 aa, Homo sapiens
  Payload ID: 4247
  Gene Symbol: CCNE1
  Gene Name: cyclin E1
  ENSP ID: ENSP00000459024
MPRERRERDAKERDTMKEDGGAEFSARSRKRKANVTVDPDEEMAKIDRTARDQCGSQPWDNNAVCADPCSLIPTPDKEDDDRVYPNSTCKPRIIAPSRGSPLPVLSWANREEVWKIMLNKEKTYLRDQHFLEQHPLLQPKMRAILLDWLMEVCEVYKLHRETFYLAQDFFDRYMATQENVVKTLLQLIGISSLFIAAKLEEIYPPKLHQFAYVTD

SEQ ID NO: 21059 - protein, 283 aa, Homo sapiens
  Payload ID: 4247
  Gene Symbol: CCNE1
  Gene Name: cyclin E1
  ENSP ID: ENSP00000460881
DDRVYPNSTCKPRIIAPSRGSPLPVLSWANREEVWKIMLNKEKTYLRDQHFLEQHPLLQPKMRAILLDWLMEVCEVYKLHRETFYLAQDFFDRYMATQENVVKTLLQLIGISSLFIAAKLEEIYPPKLHQFAYVTDGACSGDEILTMELMIMKLLDLCVLDVDCLEFPYGILAASALYHFSSSELMQKVSGYQWCDIENCVKWMVPFAMVIRETGSSKLKHFRGVADEDAHNIQTHRDSLDLLDKARAKKAMLSEQNRASPLPSGLLTPPQSGKKQSSGPEMA

SEQ ID NO: 21060 - protein, 404 aa, Homo sapiens
  Payload ID: 4248
  Gene Symbol: CCNE2
  Gene Name: cyclin E2
  Uniprot ID: O96020
  ENSP ID: ENSP00000309181
MSRRSSRLQAKQQPQPSQTESPQEAQIIQAKKRKTTQDVKKRREEVTKKHQYEIRNCWPPVLSGGISPCIIIETPHKEIGTSDFSRFTNYRFKNLFINPSPLPDLSWGCSKEVWLNMLKKESRYVHDKHFEVLHSDLEPQMRSILLDWLLEVCEVYTLHRETFYLAQDFFDRFMLTQKDINKNMLQLIGITSLFIASKLEEIYAPKLQEFAYVTDGACSEEDILRMELIILKALKWELCPVTIISWLNLFLQVDALKDAPKVLLPQYSQETFIQIAQLLDLCILAIDSLEFQYRILTAAALCHFTSIEVVKKASGLEWDSISECVDWMVPFVNVVKSTSPVKLKTFKKIPMEDRHNIQTHTNYLAMLEEVNYINTFRKGGQLSPVCNGGIMTPPKSTEKPPGKH

SEQ ID NO: 21061 - protein, 374 aa, Homo sapiens
  Payload ID: 4248
  Gene Symbol: CCNE2
  Gene Name: cyclin E2
  ENSP ID: ENSP00000379437
MSRRSSRLQAKQQPQPSQTESPQEAQIIQAKKRKTTQDVKKRREEVTKKHQYEIRNCWPPVLSGGISPCIIIETPHKEIGTSDFSRFTNYRFKNLFINPSPLPDLSWGCSKEVWLNMLKKESRYVHDKHFEVLHSDLEPQMRSILLDWLLEVCEVYTLHRETFYLAQDFFDRFMLTQKDINKNMLQLIGITSLFIASKLEEIYAPKLQEFAYVTDGACSEEDILRMELIILKALKWELCPVTIISWLNLFLQVDALKDAPKVLLPQYSQETFIQIAQLLDLCILAIDSLEFQYRILTAAALCHFTSIEVVKKASGLEWDSISECVDWMVPFVNVVKSTSPVKLKTFKKIPMEDRHNIQTHTNYLAMLCMISSHV

SEQ ID NO: 21062 - protein, 75 aa, Homo sapiens
  Payload ID: 4248
  Gene Symbol: CCNE2
  Gene Name: cyclin E2
  ENSP ID: ENSP00000428988
MSRRSSRLQAKQQPQPSQTESPQEAQIIQAKKRKTTQDVKKRREEVTKKHQYEIRLGMFKRSLAKHVKKGEQICS

SEQ ID NO: 21063 - protein, 404 aa, Homo sapiens; identical to SEQ ID NO: 21060
  Payload ID: 4248
  Gene Symbol: CCNE2
  Gene Name: cyclin E2
  Uniprot ID: O96020
  ENSP ID: ENSP00000429089

SEQ ID NO: 21064 - protein, 152 aa, Homo sapiens
  Payload ID: 4248
  Gene Symbol: CCNE2
  Gene Name: cyclin E2
  ENSP ID: ENSP00000430060
  MOD_RES (1)..(1): Any amino acid
XEPQMRSILLDWLLEVCEVYTLHRETFYLAQDFFDRFMLTQKDINKNMLQLIGITSLFIASKLEEIYAPKLQEFAYVTDGACSEEDILRMELIILKALKWELCPVTIISWLNLFLQVDALKDAPKVLLPQYSQETFIQIAQLFSHFSYLLDQ

SEQ ID NO: 21065 - protein, 61 aa, Homo sapiens
  Payload ID: 4248
  Gene Symbol: CCNE2
  Gene Name: cyclin E2
  ENSP ID: ENSP00000430875
MSRRSSRLQAKQQPQPSQTESPQEAQIIQAKKRKTTQFTNGLFYFPGCQKKKRGGHQETSV

SEQ ID NO: 21066 - protein, 296 aa, Homo sapiens
  Payload ID: 4248
  Gene Symbol: CCNE2
  Gene Name: cyclin E2
  ENSP ID: ENSP00000479777
MSKEVWLNMLKKESRYVHDKHFEVLHSDLEPQMRSILLDWLLEVCEVYTLHRETFYLAQDFFDRFMLTQKDINKNMLQLIGITSLFIASKLEEIYAPKLQEFAYVTDGACSEEDILRMELIILKALKWELCPVTIISWLNLFLQVDALKDAPKVLLPQYSQETFIQIAQLLDLCILAIDSLEFQYRILTAAALCHFTSIEVVKKASGLEWDSISECVDWMVPFVNVVKSTSPVKLKTFKKIPMEDRHNIQTHTNYLAMLEEVNYINTFRKGGQLSPVCNGGIMTPPKSTEKPPGKH

SEQ ID NO: 21067 - protein, 59 aa, Homo sapiens
  Payload ID: 4249
  Gene Symbol: CCNF
  Gene Name: cyclin F
  ENSP ID: ENSP00000293968
MGSGGVVHCRCAKCFCYPTKRRIRRRPRNLTILSLPEDVLFHILKWLSVEDILAVRAGC

SEQ ID NO: 21068 - protein, 786 aa, Homo sapiens
  Payload ID: 4249
  Gene Symbol: CCNF
  Gene Name: cyclin F
  Uniprot ID: P41002
  ENSP ID: ENSP00000380256
MGSGGVVHCRCAKCFCYPTKRRIRRRPRNLTILSLPEDVLFHILKWLSVEDILAVRAVHSQLKDLVDNHASVWACASFQELWPSPGNLKLFERAAEKGNFEAAVKLGIAYLYNEGLSVSDEARAEVNGLKASRFFSLAERLNVGAAPFIWLFIRPPWSVSGSCCKAVVHESLRAECQLQRTHKASILHCLGRVLSLFEDEEKQQQAHDLFEEAAHQGCLTSSYLLWESDRRTDVSDPGRCLHSFRKLRDYAAKGCWEAQLSLAKACANANQLGLEVRASSEIVCQLFQASQAVSKQQVFSVQKGLNDTMRYILIDWLVEVATMKDFTSLCLHLTVECVDRYLRRRLVPRYRLQLLGIACMVICTRFISKEILTIREAVWLTDNTYKYEDLVRMMGEIVSALEGKIRVPTVVDYKEVLLTLVPVELRTQHLCSFLCELSLLHTSLSAYAPARLAAAALLLARLTHGQTQPWTTQLWDLTGFSYEDLIPCVLSLHKKCFHDDAPKDYRQVSLTAVKQRFEDKRYGEISQEEVLSYSQLCAALGVTQDSPDPPTFLSTGEIHAFLSSPSGRRTKRKRENSLQEDRGSFVTTPTAELSSQEETLLGSFLDWSLDCCSGYEGDQESEGEKEGDVTAPSGILDVTVVYLNPEQHCCQESSDEEACPEDKGPQDPQALALDTQIPATPGPKPLVRTSREPGKDVTTSGYSSVSTASPTSSVDGGLGALPQPTSVLSLDSDSHTQPCHHQARKSCLQCRPPSPPESSVPQQQVKRINLCIHSEEEDMNLGLVRL

SEQ ID NO: 21069 - protein, 186 aa, Homo sapiens
  Payload ID: 4249
  Gene Symbol: CCNF
  Gene Name: cyclin F
  ENSP ID: ENSP00000457587
  MOD_RES (1)..(1): Any amino acid
XASSEIVCQLFQASQAVSKQQVFSVQKGLNDTMRYILIDWLVEVATMKDFTSLCLHLTVECVDRYLRRRLVPRYRLQLLGIACMVICTRFISKEILTIREAVWLTDNTYKYEDLVRMMGEIVSALEGKIRPWSRRPRLHHVAICAGALRVQHRREHHPGQTLRWACMRHCTKEPPSAESPHPVPAV

SEQ ID NO: 21070 - protein, 1311 aa, Homo sapiens
  Payload ID: 4250
  Gene Symbol: GAK
  Gene Name: cyclin G associated kinase
  Uniprot ID: O14976
  ENSP ID: ENSP00000314499
MSLLQSALDFLAGPGSLGGASGRDQSDFVGQTVELGELRLRVRRVLAEGGFAFVYEAQDVGSGREYALKRLLSNEEEKNRAIIQEVCFMKKLSGHPNIVQFCSAASIGKEESDTGQAEFLLLTELCKGQLVEFLKKMESRGPLSCDTVLKIFYQTCRAVQHMHRQKPPIIHRDLKVENLLLSNQGTIKLCDFGSATTISHYPDYSWSAQRRALVEEEITRNTTPMYRTPEIIDLYSNFPIGEKQDIWALGCILYLLCFRQHPFEDGAKLRIVNGKYSIPPHDTQYTVFHSLIRAMLQVNPEERLSIAEVVHQLQEIAAARNVNPKSPITELLEQNGGYGSATLSRGPPPPVGPAGSGYSGGLALAEYDQPYGGFLDILRGGTERLFTNLKDTSSKVIQSVANYAKGDLDISYITSRIAVMSFPAEGVESALKNNIEDVRLFLDSKHPGHYAVYNLSPRTYRPSRFHNRVSECGWAARRAPHLHTLYNICRNMHAWLRQDHKNVCVVHCMDGRAASAVAVCSFLCFCRLFSTAEAAVYMFSMKRCPPGIWPSHKRYIEYMCDMVAEEPITPHSKPILVRAVVMTPVPLFSKQRSGCRPFCEVYVGDERVASTSQEYDKMRDFKIEDGKAVIPLGVTVQGDVLIVIYHARSTLGGRLQAKMASMKMFQIQFHTGFVPRNATTVKFAKYDLDACDIQEKYPDLFQVNLEVEVEPRDRPSREAPPWENSSMRGLNPKILFSSREEQQDILSKFGKPELPRQPGSTAQYDAGAGSPEAEPTDSDSPPSSSADASRFLHTLDWQEEKEAETGAENASSKESESALMEDRDESEVSDEGGSPISSEGQEPRADPEPPGLAAGLVQQDLVFEVETPAVLPEPVPQEDGVDLLGLHSEVGAGPAVPPQACKAPSSNTDLLSCLLGPPEAASQGPPEDLLSEDPLLLASPAPPLSVQSTPRGGPPAAADPFGPLLPSSGNNSQPCSNPDLFGEFLNSDSVTVPPSFPSAHSAPPPSCSADFLHLGDLPGEPSKMTASSSNPDLLGGWAAWTETAASAVAPTPATEGPLFSPGGQPAPCGSQASWTKSQNPDPFADLGDLSSGLQGSPAGFPPGGFIPKTATTPKGSSSWQTSRPPAQGASWPPQAKPPPKACTQPRPNYASNFSVIGAREERGVRAPSFAQKPKVSENDFEDLLSNQGFSSRSDKKGPKTIAEMRKQDLAKDTDPLKLKLLDWIEGKERNIRALLSTLHTVLWDGESRWTPVGMADLVAPEQVKKHYRRAVLAVHPDKAAGQPYEQHAKMIFMELNDAWSEFENQGSRPLF

SEQ ID NO: 21071 - protein, 467 aa, Homo sapiens
  Payload ID: 4250
  Gene Symbol: GAK
  Gene Name: cyclin G associated kinase
  ENSP ID: ENSP00000421049
  MOD_RES (1)..(1): Any amino acid
XVGAGPAVPPQACKAPSSNTDLLSCLLGPPEAASQGPPEDLLSEDPLLLASPAPPLSVQSTPRGGPPAAADPFGPLLPSSGNNSQPCSNPDLFGEFLNSDSVTVPPSFPSAHSAPPPSCSADFLHLGDLPGEPSKMTASSSNPDLLGGWAAWTETAASAVAPTPATEGPLFSPGGQPAPCGSQASWTKSQNPDPFADLGDLSSGLQDPQAQSTVSPRGQRVCTCSRRLPTGKLKPGVADTGTAASPHRHCGSPAGFPPGGFIPKTATTPKGSSSWQTSRPPAQGASWPPQAKPPPKACTQPRPNYASNFSVIGAREERGVRAPSFAQKPKVSENDFEDLLSNQGFSSRSDKKGPKTIAEMRKQDLAKDTDPLKLKLLDWIEGKERNIRALLSTLHTVLWDGESRWTPVGMADLVAPEQVKKHYRRAVLAVHPDKAAGQPYEQHAKMIFMELNDAWSEFENQGSRPLF

SEQ ID NO: 21072 - protein, 1232 aa, Homo sapiens
  Payload ID: 4250
  Gene Symbol: GAK
  Gene Name: cyclin G associated kinase
  Uniprot ID: O14976
  ENSP ID: ENSP00000421361
MSLLQSALDFLAGPGSLGGASGRDQSDFVGQTVELGELRLRVRRVLAEGQLVEFLKKMESRGPLSCDTVLKIFYQTCRAVQHMHRQKPPIIHRDLKVENLLLSNQGTIKLCDFGSATTISHYPDYSWSAQRRALVEEEITRNTTPMYRTPEIIDLYSNFPIGEKQDIWALGCILYLLCFRQHPFEDGAKLRIVNGKYSIPPHDTQYTVFHSLIRAMLQVNPEERLSIAEVVHQLQEIAAARNVNPKSPITELLEQNGGYGSATLSRGPPPPVGPAGSGYSGGLALAEYDQPYGGFLDILRGGTERLFTNLKDTSSKVIQSVANYAKGDLDISYITSRIAVMSFPAEGVESALKNNIEDVRLFLDSKHPGHYAVYNLSPRTYRPSRFHNRVSECGWAARRAPHLHTLYNICRNMHAWLRQDHKNVCVVHCMDGRAASAVAVCSFLCFCRLFSTAEAAVYMFSMKRCPPGIWPSHKRYIEYMCDMVAEEPITPHSKPILVRAVVMTPVPLFSKQRSGCRPFCEVYVGDERVASTSQEYDKMRDFKIEDGKAVIPLGVTVQGDVLIVIYHARSTLGGRLQAKMASMKMFQIQFHTGFVPRNATTVKFAKYDLDACDIQEKYPDLFQVNLEVEVEPRDRPSREAPPWENSSMRGLNPKILFSSREEQQDILSKFGKPELPRQPGSTAQYDAGAGSPEAEPTDSDSPPSSSADASRFLHTLDWQEEKEAETGAENASSKESESALMEDRDESEVSDEGGSPISSEGQEPRADPEPPGLAAGLVQQDLVFEVETPAVLPEPVPQEDGVDLLGLHSEVGAGPAVPPQACKAPSSNTDLLSCLLGPPEAASQGPPEDLLSEDPLLLASPAPPLSVQSTPRGGPPAAADPFGPLLPSSGNNSQPCSNPDLFGEFLNSDSVTVPPSFPSAHSAPPPSCSADFLHLGDLPGEPSKMTASSSNPDLLGGWAAWTETAASAVAPTPATEGPLFSPGGQPAPCGSQASWTKSQNPDPFADLGDLSSGLQGSPAGFPPGGFIPKTATTPKGSSSWQTSRPPAQGASWPPQAKPPPKACTQPRPNYASNFSVIGAREERGVRAPSFAQKPKVSENDFEDLLSNQGFSSRSDKKGPKTIAEMRKQDLAKDTDPLKLKLLDWIEGKERNIRALLSTLHTVLWDGESRWTPVGMADLVAPEQVKKHYRRAVLAVHPDKAAGQPYEQHAKMIFMELNDAWSEFENQGSRPLF

SEQ ID NO: 21073 - protein, 75 aa, Homo sapiens
  Payload ID: 4250
  Gene Symbol: GAK
  Gene Name: cyclin G associated kinase
  ENSP ID: ENSP00000421814
MSLLQSALDFLAGPGSLGGASGRDQSDFVGQTVELGELRLRVRRVLAEGGFAFVYEAQDVGSGREYALKGSWWNF

SEQ ID NO: 21074 - protein, 70 aa, Homo sapiens
  Payload ID: 4250
  Gene Symbol: GAK
  Gene Name: cyclin G associated kinase
  ENSP ID: ENSP00000422391
MKKLSGHPNIVQFCSAASIGKEESDTGQAEFLLLTELCKGQLVEFLKKMESRGPLSCDTVLKIFYQTCRA

SEQ ID NO: 21075 - protein, 69 aa, Homo sapiens
  Payload ID: 4250
  Gene Symbol: GAK
  Gene Name: cyclin G associated kinase
  ENSP ID: ENSP00000424553
PKGSSSWQTSRPPAQGASWPPQAKPPPKACTQPRPNYASNFSVIGAREERGVRAPSFGLTRKGQRPLQR

SEQ ID NO: 21076 - protein, 138 aa, Homo sapiens
  Payload ID: 4250
  Gene Symbol: GAK
  Gene Name: cyclin G associated kinase
  ENSP ID: ENSP00000424701
MSLLQSALDFLAGPGSLGGASGRDQSDFVGQTVELGELRLRVRRVLAEGGFAFVYEAQDVGSGREYALKVENLLLSNQGTIKLCDFGSATTISHYPDYSWSAQRRALVEEEITRNTTPMYRTPEIIDLYSNFPIGEKQ

SEQ ID NO: 21077 - protein, 255 aa, Homo sapiens
  Payload ID: 4250
  Gene Symbol: GAK
  Gene Name: cyclin G associated kinase
  ENSP ID: ENSP00000426062
  MOD_RES (1)..(1): Any amino acid
XLPEPVPQEDGVDLLGLHSEVGAGPAVPPQACKAPSSNTDLLSCLLGPPEAASQGPPEDLLSEDPLLLASPAPPLSVQSTPRGGPPAAGNNSQPCSNPDLFGEFLNSDSVTVPPSFPSAHSAPPPSCSADFLHLGDLPGEPSKMTASSSNPDLLGGWAAWTETAASAVAPTPATEGPLFSPGGQPAPCGSQASWTKSQNPDPFADLGDLSSGLQGSPAGFPPGGFIPKTATTPKGSSSWQTSRPPAQGASWPPQA

SEQ ID NO: 21078 - protein, 49 aa, Homo sapiens
  Payload ID: 4250
  Gene Symbol: GAK
  Gene Name: cyclin G associated kinase
  ENSP ID: ENSP00000426728
MSLLQSALDFLAGPGSLGGASGRDQSDFVGQTVELGELRLRVRRVLAEG

SEQ ID NO: 21079 - protein, 118 aa, Homo sapiens
  Payload ID: 4250
  Gene Symbol: GAK
  Gene Name: cyclin G associated kinase
  ENSP ID: ENSP00000426908
MSLLQSALDFLAGPGSLGGASGRDQSDFVGQTVELGELRLRVRRVLAEGGFAFVYEAQDVGSGREYALKRLLSNEEEKNRAIIQEVCFMLCSLGEPAGCLSVGSGGHSHAAASLRTAP

SEQ ID NO: 21080 - protein, 416 aa, Homo sapiens
  Payload ID: 4250
  Gene Symbol: GAK
  Gene Name: cyclin G associated kinase
  ENSP ID: ENSP00000484475
MSLLQSALDFLAGPGSLGGASGRDQSDFVGQTVELGELRLLLASPAPPLSVQSTPRGGPPAAADPFGPLLPSSGNNSQPCSNPDLFGEFLNSDSVTVPPSFPSAHSAPPPSCSADFLHLGDLPGEPSKMTASSSNPDLLGGWAAWTETAASAVAPTPATEGPLFSPGGQPAPCGSQASWTKSQNPDPFADLGDLSSGLQGSPAGFPPGGFIPKTATTPKGSSSWQTSRPPAQGASWPPQAKPPPKACTQPRPNYASNFSVIGAREERGVRAPSFAQKPKVSENDFEDLLSNQGFSSRSDKKGPKTIAEMRKQDLAKDTDPLKLKLLDWIEGKERNIRALLSTLHTVLWDGESRWTPVGMADLVAPEQVKKHYRRAVLAVHPDKAAGQPYEQHAKMIFMELNDAWSEFENQGSRPLF

SEQ ID NO: 21081 - protein, 118 aa, Homo sapiens; identical to SEQ ID NO: 21079
  Payload ID: 4250
  Gene Symbol: GAK
  Gene Name: cyclin G associated kinase
  ENSP ID: ENSP00000486984

SEQ ID NO: 21082 - protein, 295 aa, Homo sapiens
  Payload ID: 4251
  Gene Symbol: CCNG1
  Gene Name: cyclin G1
  Uniprot ID: P51959
  ENSP ID: ENSP00000344635
MIEVLTTTDSQKLLHQLNALLEQESRCQPKVCGLRLIESAHDNGLRMTARLRDFEVKDLLSLTQFFGFDTETFSLAVNLLDRFLSKMKVQPKHLGCVGLSCFYLAVKSIEEERNVPLATDLIRISQYRFTVSDLMRMEKIVLEKVCWKVKATTAFQFLQLYYSLLQENLPLERRNSINFERLEAQLKACHCRIIFSKAKPSVLALSIIALEIQAQKCVELTEGIECLQKHSKINGRDLTFWQELVSKCLTEYSSNKCSKPNVQKLKWIVSGRTARQLKHSYYRITHLPTIPEMVP

SEQ ID NO: 21083 - protein, 295 aa, Homo sapiens; identical to SEQ ID NO: 21082
  Payload ID: 4251
  Gene Symbol: CCNG1
  Gene Name: cyclin G1
  Uniprot ID: P51959
  ENSP ID: ENSP00000377506

SEQ ID NO: 21084 - protein, 114 aa, Homo sapiens
  Payload ID: 4251
  Gene Symbol: CCNG1
  Gene Name: cyclin G1
  ENSP ID: ENSP00000421132
MIEVLTTTDSQKLLHQLNALLEQESRCQPKVCGLRLIESAHDNGLRMTARLRDFEVKDLLSLTQFFGFDTETFSLAVNLLDRFLSKMKVQPKHLGCVGLSCFYLAVKSIEEERN

SEQ ID NO: 21085 - protein, 167 aa, Homo sapiens
  Payload ID: 4251
  Gene Symbol: CCNG1
  Gene Name: cyclin G1
  ENSP ID: ENSP00000422379
MSAKDLMRMEKIVLEKVCWKVKATTAFQFLQLYYSLLQENLPLERRNSINFERLEAQLKACHCRIIFSKAKPSVLALSIIALEIQAQKCVELTEGIECLQKHSKINGRDLTFWQELVSKCLTEYSSNKCSKPNVQKLKWIVSGRTARQLKHSYYRITHLPTIPEMVP

SEQ ID NO: 21086 - protein, 136 aa, Homo sapiens
  Payload ID: 4251
  Gene Symbol: CCNG1
  Gene Name: cyclin G1
  ENSP ID: ENSP00000423791
MIEVLTTTDSQKLLHQLNALLEQESRCQPKVCGLRLIESAHDNGLRMTARLRDFEVKDLLSLTQFFGFDTETFSLAVNLLDRFLSKMKVQPKHLGCVGLSCFYLAVKSIEEERNVPLATDLIRISQYRFTVSDLMR

SEQ ID NO: 21087 - protein, 161 aa, Homo sapiens
  Payload ID: 4251
  Gene Symbol: CCNG1
  Gene Name: cyclin G1
  Uniprot ID: P51959
  ENSP ID: ENSP00000424315
MRMEKIVLEKVCWKVKATTAFQFLQLYYSLLQENLPLERRNSINFERLEAQLKACHCRIIFSKAKPSVLALSIIALEIQAQKCVELTEGIECLQKHSKINGRDLTFWQELVSKCLTEYSSNKCSKPNVQKLKWIVSGRTARQLKHSYYRITHLPTIPEMVP

SEQ ID NO: 21088 - protein, 107 aa, Homo sapiens
  Payload ID: 4251
  Gene Symbol: CCNG1
  Gene Name: cyclin G1
  ENSP ID: ENSP00000427086
MRMEKIVLEKVCWKVKATTAFQFLQLYYSLLQENLPLERRNSINFERLEAQLKACHCRIIFSKAKPSVLALSIIALEIQAQKCVELTEGIECLQKHSKDYYSTKKLL

SEQ ID NO: 21089 - protein, 344 aa, Homo sapiens
  Payload ID: 4252
  Gene Symbol: CCNG2
  Gene Name: cyclin G2
  Uniprot ID: Q16589
  ENSP ID: ENSP00000315743
MKDLGAEHLAGHEGVQLLGLLNVYLEQEERFQPREKGLSLIEATPENDNTLCPGLRNAKVEDLRSLANFFGSCTETFVLAVNILDRFLALMKVKPKHLSCIGVCSFLLAARIVEEDCNIPSTHDVIRISQCKCTASDIKRMEKIISEKLHYELEATTALNFLHLYHTIILCHTSERKEILSLDKLEAQLKACNCRLIFSKAKPSVLALCLLNLEVETLKSVELLEILLLVKKHSKINDTEFFYWRELVSKCLAEYSSPECCKPDLKKLVWIVSRRTAQNLHNSYYSVPELPTIPEGGCFDESESEDSCEDMSCGEESLSSSPPSDQECTFFFNFKVAQTLCFPS

SEQ ID NO: 21090 - protein, 344 aa, Homo sapiens
  Payload ID: 4252
  Gene Symbol: CCNG2
  Gene Name: cyclin G2
  ENSP ID: ENSP00000346379
MKDLGAEHLAGHEGVQLLGLLNVYLEQEERFQPREKGLSLIEATPENDNTLCPGLRNAKVEDLRSLANFFGSCTETFVLAVNILDRFLALMKVKPKHLSCIGVCSFLLAARIVEEDCNIPSTHDVIRISQCKCTASDIKRMEKIISEKLHYELEATTALNFLHLYHTIILCHTSERKEILSLDKLEAQLKACNCRLIFSKAKPSVLALCLLNLEVETLKSVELLEILLLVKKHSKINDTEFFYWRELVSKCLAEYSSPECCKPDLKKLVWIVSRRTAQNLHNSYYSVPELPTIPEGGCFDESESSVAQAGVQWPDLSSFQPPPTRFKRFSCLSLRSSWDYRCWS

SEQ ID NO: 21091 - protein, 344 aa, Homo sapiens; identical to SEQ ID NO: 21089
  Payload ID: 4252
  Gene Symbol: CCNG2
  Gene Name: cyclin G2
  Uniprot ID: Q16589
  ENSP ID: ENSP00000379002

SEQ ID NO: 21092 - protein, 344 aa, Homo sapiens; identical to SEQ ID NO: 21089
  Payload ID: 4252
  Gene Symbol: CCNG2
  Gene Name: cyclin G2
  Uniprot ID: Q16589
  ENSP ID: ENSP00000424665

SEQ ID NO: 21093 - protein, 160 aa, Homo sapiens
  Payload ID: 4252
  Gene Symbol: CCNG2
  Gene Name: cyclin G2
  ENSP ID: ENSP00000426085
MKDLGAEHLAGHEGVQLLGLLNVYLEQEERFQPREKGLSLIEATPENDNTLCPGLRNAKVEDLRSLANFFGSCTETFVLAVNILDRFLALMKVKPKHLSCIGVCSFLLAARIVEEDCNIPSTHDVIRISQCKCTASDIKRMEKIISEKLHYELEATTALN

SEQ ID NO: 21094 - protein, 304 aa, Homo sapiens
  Payload ID: 4252
  Gene Symbol: CCNG2
  Gene Name: cyclin G2
  Uniprot ID: Q16589
  ENSP ID: ENSP00000426476
MKDLGAEHLAGHEGVQLLGLLNVYLEQEERFQPREKGLSLIEATPENDNTLCPGLRNAKVEDLRSLANFFGSCTETFVLAVNILDRFLALMKVKPKHLSCIGVCSFLLAARIVEEDCNIPSTHDVIRISQCKCTASDIKRMEKIISEKLHYELEATTALNFLHLYHTIILCHTSERKEILSLDKLEAQLKACNCRLIFSKAKPSVLALCLLNLEVETLKSVELLEILLLVKKHSKINDTEFFYWRELVSKCLAEYSSPECCKPDLKKLVWIVSRRTAQNLHNSYYSVPELPTIPEGGCFDESER

SEQ ID NO: 21095 - protein, 323 aa, Homo sapiens
  Payload ID: 4253
  Gene Symbol: CCNH
  Gene Name: cyclin H
  Uniprot ID: P51946
  ENSP ID: ENSP00000256897
MYHNSSQKRHWTFSSEEQLARLRADANRKFRCKAVANGKVLPNDPVFLEPHEEMTLCKYYEKRLLEFCSVFKPAMPRSVVGTACMYFKRFYLNNSVMEYHPRIIMLTCAFLACKVDEFNVSSPQFVGNLRESPLGQEKALEQILEYELLLIQQLNFHLIVHNPYRPFEGFLIDLKTRYPILENPEILRKTADDFLNRIALTDAYLLYTPSQIALTAILSSASRAGITMESYLSESLMLKENRTCLSQLLDIMKSMRNLVKKYEPPRSEEVAVLKQKLERCHSAELALNVITKKRKGYEDDDYVSKKSKHEEEEWTDDDLVESL

SEQ ID NO: 21096 - protein, 249 aa, Homo sapiens
  Payload ID: 4253
  Gene Symbol: CCNH
  Gene Name: cyclin H
  ENSP ID: ENSP00000426075
MPRSVVGTACMYFKRFYLNNSVMEYHPRIIMLTCAFLACKVDEFNVSSPQFVGNLRESPLGQEKALEQILEYELLLIQQLNFHLIVHNPYRPFEGFLIDLKTRYPILENPEILRKTADDFLNRIALTDAYLLYTPSQIALTAILSSASRAGITMESYLSESLMLKENRTCLSQLLDIMKSMRNLVKKYEPPRSEEVAVLKQKLERCHSAELALNVITKKRKGYEDDDYVSKKSKHEEEEWTDDDLVESL

SEQ ID NO: 21097 - protein, 255 aa, Homo sapiens
  Payload ID: 4253
  Gene Symbol: CCNH
  Gene Name: cyclin H
  ENSP ID: ENSP00000426454
MPRSVVGTACMYFKRFYLNNSVMEYHPRIIMLTCAFLACKVDEFNVSSPQFVGNLRESPLGQEKALEQILEYELLLIQQLNFHLIVHNPYRPFEGFLIDLKTRYPILENPEILRKTADDFLNRIALTDAYLLYTPSQIALTAILSSASRAGITMESYLSESLMLKENRTCLSQLLDIMKSMRNLVKKYEPPRSEEVAVLKQKLERCHSAELALNVITKKRKGYEDDDYVSKKSKHEEVCFTPKMNSKLFLLYILV

SEQ ID NO: 21098 - protein, 377 aa, Homo sapiens
  Payload ID: 4254
  Gene Symbol: CCNI
  Gene Name: cyclin I
  Uniprot ID: Q14094
  ENSP ID: ENSP00000237654
MKFPGPLENQRLSFLLEKAITREAQMWKVNVRKMPSNQNVSPSQRDEVIQWLAKLKYQFNLYPETFALASSLLDRFLATVKAHPKYLSCIAISCFFLAAKTVEEDERIPVLKVLARDSFCGCSSSEILRMERIILDKLNWDLHTATPLDFLHIFHAIAVSTRPQLLFSLPKLSPSQHLAVLTKQLLHCMACNQLLQFRGSMLALAMVSLEMEKLIPDWLSLTIELLQKAQMDSSQLIHCRELVAHHLSTLQSSLPLNSVYVYRPLKHTLVTCDKGVFRLHPSSVPGPDFSKDNSKPEVPVRGTAAFYHHLPAASGCKQTSTKRKVEEMEVDDFYDGIKRLYNEDNVSENVGSVCGTDLSRQEGHASPCPPLQPVSVM

SEQ ID NO: 21099 - protein, 49 aa, Homo sapiens
  Payload ID: 4254
  Gene Symbol: CCNI
  Gene Name: cyclin I
  ENSP ID: ENSP00000421594
MTPRHHCEAYSSAGEEEEEEEEEKNVSPSQRDEVIQWLAKLKYQFNLYP

SEQ ID NO: 21100 - protein, 56 aa, Homo sapiens
  Payload ID: 4254
  Gene Symbol: CCNI
  Gene Name: cyclin I
  ENSP ID: ENSP00000425360
MKFPGPLENQRLSFLLEKAITREAQMWKVNVRKMPSNQNSSTKGIGKRQFLWMFLI

SEQ ID NO: 21101 - protein, 177 aa, Homo sapiens
  Payload ID: 4254
  Gene Symbol: CCNI
  Gene Name: cyclin I
  ENSP ID: ENSP00000425935
  MOD_RES (1)..(1): Any amino acid
XSEILRMERIILDKLNWDLHTATPLDFLHIMDSSQLIHCRELVAHHLSTLQSSLPLNSVYVYRPLKHTLVTCDKGVFRLHPSSVPGPDFSKDNSKPEVPVRGTAAFYHHLPAASGCKQTSTKRKVEEMEVDDFYDGIKRLYNEDNVSENVGSVCGTDLSRQEGHASPCPPLQPVSVM

SEQ ID NO: 21102 - protein, 80 aa, Homo sapiens
  Payload ID: 4254
  Gene Symbol: CCNI
  Gene Name: cyclin I
  ENSP ID: ENSP00000426235
MKFPGPLENQRLSFLLEKAITREAQMWKVNVRKMPSNQNVSPSQRDEVIQWLAKLKYQFNLYPETFALASSLLDRFLATV

SEQ ID NO: 21103 - protein, 125 aa, Homo sapiens
  Payload ID: 4254
  Gene Symbol: CCNI
  Gene Name: cyclin I
  ENSP ID: ENSP00000426467
MKFPGPLENQRLSFLLEKAITREAQMWKVNVRKMPSNQNVSPSQRDEVIQWLAKLKYQFNLYPETFALASSLLDRFLATVKAHPKYLSCIAISCFFLAAKTVEEDERIPVLKVLARDSFCGCSSS

SEQ ID NO: 21104 - protein, 369 aa, Homo sapiens
  Payload ID: 4255
  Gene Symbol: CCNI2
  Gene Name: cyclin I family, member 2
  Uniprot ID: Q6ZMN8
  ENSP ID: ENSP00000368005
MASGAQLPPQPSSSEVSAVQSPGGRPGAGLEETALGVPLPPSPGEAPLPRSNRSRCPGTRQPGAASLHAASAAVPVRPRRGTAPAGKTADAVPAAAPEQAPRPAPQSRKPRNLEGDLDERRLLCHLQLAQDREARLWRGGKPQDEICDAFEEVVLWLLRLQNTFYFSQSTFNLALTIFGRLLISVKVKEKYLHCATITSLRLAAKVNEEEEFIPQVKDFTKHYGSDYSPNELLRMELAILDRLHWDLYIGTPLDFLTIFHALVVLSWPHVLELLPQRNPSLHVASLTRQLQHCMAGHQLLQFKGSTLALVIITLELERLMPGWCAPISDLLKKAQVGDMQYSCCKELVMQQLRSLQSSSCTDNFVSPAN

SEQ ID NO: 21105 - protein, 385 aa, Homo sapiens
  Payload ID: 4255
  Gene Symbol: CCNI2
  Gene Name: cyclin I family, member 2
  Uniprot ID: Q6ZMN8
  ENSP ID: ENSP00000478257
MASGAQLPPQPSSSEVSAVQSPGGRPGAGLEETALGVPLPPSPGEAPLPRSNRSRCPGTRQPGAASLHAASAAVPVRPRRGTAPAGKTADAVPAAAPEQAPRPAPQSRKPRNLEGDLDERRLLCHLQLAQDREARLWRGGKPQDEICDAFEEVVLWLLRLQNTFYFSQSTFNLALTIFGRLLISVKVKEKYLHCATITSLRLAAKVNEEEEFIPQVKDFTKHYGSDYSPNELLRMELAILDRLHWDLYIGTPLDFLTIEKYGVFCSNIKNHGLQFHALVVLSWPHVLELLPQRNPSLHVASLTRQLQHCMAGHQLLQFKGSTLALVIITLELERLMPGWCAPISDLLKKAQVGDMQYSCCKELVMQQLRSLQSSSCTDNFVSPAN

SEQ ID NO: 21106 - protein, 372 aa, Homo sapiens
  Payload ID: 4256
  Gene Symbol: CCNJ
  Gene Name: cyclin J
  Uniprot ID: Q5T5M9
  ENSP ID: ENSP00000265992
MELEGQWWRGQLAADIHQALRYKELKLPSYKGQSPQLSLRRYFADLIAIVSNRFTLCPSARHLAVYLLDLFMDRYDISIQQLHLVALSCLLLASKFEEKEDSVPKLEQLNSLGCMTNMNLVLTKQNLLHMELLLLETFQWNLCLPTAAHFIEYYLSEAVHETDLHDGWPMICLEKTKLYMAKYADYFLEVSLQVAAACVASSRIILRLSPTWPTRLHRLTAYSWDFLVQCIERLLIAHDNDVKEANKQRGQAGPQSAQLSVFQTASQPSRPVHFQQPQYLHQTHQTSLQYRHPTSEQPSCQQIVSTTHTSSYTLQTCPAGFQTSVQGLGHMQTGVGMSLAIPVEVKPCLSVSYNRSYQINEHYPCITPCFER

SEQ ID NO: 21107 - protein, 371 aa, Homo sapiens
  Payload ID: 4256
  Gene Symbol: CCNJ
  Gene Name: cyclin J
  Uniprot ID: Q5T5M9
  ENSP ID: ENSP00000384498
MELEGQWWRGQLAADIHQALRYKELKLPSYKGQSPQLSLRRYFADLIAIVSNRFTLCPSARHLAVYLLDLFMDRYDISIQQLHLVALSCLLLASKFEEKEDSVPKLEQLNSLGCMTNMNLVLTKQNLLHMELLLLETFQWNLCLPTAAHFIEYYLSEAVHETDLHDGWPMICLEKTKLYMAKYADYFLEVSLQAAACVASSRIILRLSPTWPTRLHRLTAYSWDFLVQCIERLLIAHDNDVKEANKQRGQAGPQSAQLSVFQTASQPSRPVHFQQPQYLHQTHQTSLQYRHPTSEQPSCQQIVSTTHTSSYTLQTCPAGFQTSVQGLGHMQTGVGMSLAIPVEVKPCLSVSYNRSYQINEHYPCITPCFER

SEQ ID NO: 21108 - protein, 383 aa, Homo sapiens
  Payload ID: 4256
  Gene Symbol: CCNJ
  Gene Name: cyclin J
  Uniprot ID: Q5T5M9
  ENSP ID: ENSP00000435373
MELEGQWWRGQLAADIHQALRYKELKLPSYKGQSPQLSLRRYFADLIAIVSNRFTLCPSARHLAVYLLDLFMDRYDISIQQLHLVALSCLLLASKFEEKEDSVPKLEQLNSLGCMTNMNLVLTKQNLLHMELLLLETFQWNLCLPTAAHFIEYYLSEAVHETDLHDGWPMICLEKTKLYMAKYADYFLEVSLQDYAFLNYAPSLVAAACVASSRIILRLSPTWPTRLHRLTAYSWDFLVQCIERLLIAHDNDVKEANKQRGQAGPQSAQLSVFQTASQPSRPVHFQQPQYLHQTHQTSLQYRHPTSEQPSCQQIVSTTHTSSYTLQTCPAGFQTSVQGLGHMQTGVGMSLAIPVEVKPCLSVSYNRSYQINEHYPCITPCFER

SEQ ID NO: 21109 - protein, 387 aa, Homo sapiens
  Payload ID: 4257
  Gene Symbol: CCNJL
  Gene Name: cyclin J-like
  ENSP ID: ENSP00000257536
MMDEPWWEGRVASDVHCTLREKELKLPTFRAHSPLLKSRRFFVDILTLLSSHCQLCPAARHLAVYLLDHFMDRYNVTTSKQLYTVAVSCLLLASKFEDREDHVPKLEQINSTRILSSQNFTLTKKELLSTELLLLEAFSWNLCLPTPAHFLDYYLLASVSQKDHHCHTWPTTCPRKTKECLKEYAHYFLEVTLQDHIFYKFQPSVVAAACVGASRICLQLSPYWTRDLQRISSYSLEHLSTCIEILLVVYDNVLKDAVAVKSQALAMVPGTPPTPTQVLFQPPAYPALGQPATTLAQFQTPVQDLCLAYRDSLQAHRSGSLLSGSTGSSLHTPYQPLQPLDMCPVPVPASLSMHMAIAAEPRHCLATTYGSSYFSGSHMFPTGCFDR

SEQ ID NO: 21110 - protein, 435 aa, Homo sapiens
  Payload ID: 4257
  Gene Symbol: CCNJL
  Gene Name: cyclin J-like
  Uniprot ID: Q8IV13
  ENSP ID: ENSP00000377547
MMDEPWWEGRVASDVHCTLREKELKLPTFRAHSPLLKSRRFFVDILTLLSSHCQLCPAARHLAVYLLDHFMDRYNVTTSKQLYTVAVSCLLLANGVSLLSPRLKCSGMISAHCNLHLPGSSNSPASAPHPPPTPPQVAETTGKFEDREDHVPKLEQINSTRILSSQNFTLTKKELLSTELLLLEAFSWNLCLPTPAHFLDYYLLASVSQKDHHCHTWPTTCPRKTKECLKEYAHYFLEVTLQDHIFYKFQPSVVAAACVGASRICLQLSPYWTRDLQRISSYSLEHLSTCIEILLVVYDNVLKDAVAVKSQALAMVPGTPPTPTQVLFQPPAYPALGQPATTLAQFQTPVQDLCLAYRDSLQAHRSGSLLSGSTGSSLHTPYQPLQPLDMCPVPVPASLSMHMAIAAEPRHCLATTYGSSYFSGSHMFPTGCFDR

SEQ ID NO: 21111 - protein, 252 aa, Homo sapiens
  Payload ID: 4257
  Gene Symbol: CCNJL
  Gene Name: cyclin J-like
  ENSP ID: ENSP00000427960
MMDEPWWEGRVASDVHCTLREKELKLPTFRAHSPLLKSRRFFVDILTLLSSHCQLCPAARHLAVYLLDHFMDRYNVTTSKQLYTVAVSCLLLASKFEDREDHVPKLEQINSTRILSSQNFTLTKKELLSTELLLLEAFSWNLCLPTPAHFLDYYLLASVSQKDHHCHTWPTTCPRKTKECLKEYAHYFLEVTLQDHIFYKFQPSVVAAACVGASRICLQLSPYWTRDLQRISSYSLEHLSTCIEILLVPLFR

SEQ ID NO: 21112 - protein, 189 aa, Homo sapiens
  Payload ID: 4257
  Gene Symbol: CCNJL
  Gene Name: cyclin J-like
  ENSP ID: ENSP00000428836
MGDSPGGAAILGLAGKLRRVWRESLPPIQALRSHFLGQPRLSGGSPDRHPSAPPVLQELKLPTFRAHSPLLKSRRFFVDILTLLSSHCQLCPAARHLAVYLLDHFMDRYNVTTSKQLYTVAVSCLLLASKFEDREDHVPKLEQINSTRILSSQNFTLTKKELLSTELLLLEAFSWNLCLPTPAHFLDYY

SEQ ID NO: 21113 - protein, 416 aa, Homo sapiens
  Payload ID: 4257
  Gene Symbol: CCNJL
  Gene Name: cyclin J-like
  ENSP ID: ENSP00000446367
REKELKLPTFRAHSPLLKSRRFFVDILTLLSSHCQLCPAARHLAVYLLDHFMDRYNVTTSKQLYTVAVSCLLLANGVSLLSPRLKCSGMISAHCNLHLPGSSNSPASAPHPPPTPPQVAETTGKFEDREDHVPKLEQINSTRILSSQNFTLTKKELLSTELLLLEAFSWNLCLPTPAHFLDYYLLASVSQKDHHCHTWPTTCPRKTKECLKEYAHYFLEVTLQDHIFYKFQPSVVAAACVGASRICLQLSPYWTRDLQRISSYSLEHLSTCIEILLVVYDNVLKDAVAVKSQALAMVPGTPPTPTQVLFQPPAYPALGQPATTLAQFQTPVQDLCLAYRDSLQAHRSGSLLSGSTGSSLHTPYQPLQPLDMCPVPVPASLSMHMAIAAEPRHCLATTYGSSYFSGSHMFPTGCFDR

SEQ ID NO: 21114 - protein, 580 aa, Homo sapiens
  Payload ID: 4258
  Gene Symbol: CCNK
  Gene Name: cyclin K
  Uniprot ID: O75909
  ENSP ID: ENSP00000374529
MKENKENSSPSVTSANLDHTKPCWYWDKKDLAHTPSQLEGLDPATEARYRREGARFIFDVGTRLGLHYDTLATGIIYFHRFYMFHSFKQFPRYVTGACCLFLAGKVEETPKKCKDIIKTARSLLNDVQFGQFGDDPKEEVMVLERILLQTIKFDLQVEHPYQFLLKYAKQLKGDKNKIQKLVQMAWTFVNDSLCTTLSLQWEPEIIAVAVMYLAGRLCKFEIQEWTSKPMYRRWWEQFVQDVPVDVLEDICHQILDLYSQGKQQMPHHTPHQLQQPPSLQPTPQVPQVQQSQPSQSSEPSQPQQKDPQQPAQQQQPAQQPKKPSPQPSSPRQVKRAVVVSPKEENKAAEPPPPKIPKIETTHPPLPPAHPPPDRKPPLAAALGEAEPPGPVDATDLPKVQIPPPAHPAPVHQPPPLPHRPPPPPPSSYMTGMSTTSSYMSGEGYQSLQSMMKTEGPSYGALPPAYGPPAHLPYHPHVYPPNPPPPPVPPPPASFPPPAIPPPTPGYPPPPPTYNPNFPPPPPRLPPTHAVPPHPPPGLGLPPASYPPPAVPPGGQPPVPPPIPPPGMPPVGGLGRAAWMR

SEQ ID NO: 21115 - protein, 109 aa, Homo sapiens
  Payload ID: 4258
  Gene Symbol: CCNK
  Gene Name: cyclin K
  ENSP ID: ENSP00000450440
MKENKENSSPSVTSANLDHTKPCWYWDKKDLAHTPSQLEGLDPATEARYRREGARFIFDVGTRLGLHYDTLATGIIYFHRFYMFHSFKQFPRYVTGACCLFLAGKVEET

SEQ ID NO: 21116 - protein, 227 aa, Homo sapiens
  Payload ID: 4258
  Gene Symbol: CCNK
  Gene Name: cyclin K
  ENSP ID: ENSP00000450792
MKENKENSSPSVTSANLDHTKPCWYWDKKDLAHTPSQLEGLDPATEARYRREGARFIFDVGTRLGLHYDTLATGIIYFHRFYMFHSFKQFPRYVTGACCLFLAGKVEETPKKCKDIIKTARSLLNDVQFGQFGDDPKEEVMVLERILLQTIKFDLQVEHPYQFLLKYAKQLKGDKNKIQKLVQMAWTFVNDSLCTTLSLQWEPEIIAVAVMYLAGRLCKFEIQEWTS

SEQ ID NO: 21117 - protein, 378 aa, Homo sapiens
  Payload ID: 4258
  Gene Symbol: CCNK
  Gene Name: cyclin K
  ENSP ID: ENSP00000452307
MKENKENSSPSVTSANLDHTKPCWYWDKKDLAHTPSQLEGLDPATEARYRREGARFIFDVGTRLGLHYDTLATGIIYFHRFYMFHSFKQFPRYVTGACCLFLAGKVEETPKKCKDIIKTARSLLNDVQFGQFGDDPKEEVMVLERILLQTIKFDLQVEHPYQFLLKYAKQLKGDKNKIQKLVQMAWTFVNDSLCTTLSLQWEPEIIAVAVMYLAGRLCKFEIQEWTSKPMYRRWWEQFVQDVPVDVLEDICHQILDLYSQGKQQMPHHTPHQLQQPPSLQPTPQVPQVQQSQPSQSSEPSQPQQKDPQQPAQQQQPAQQPKKPSPQPSSPRQVKRAVVVSPKEENKAAEPPPPKIPKIETTHPPLPPAHPPPASTHPP

SEQ ID NO: 21118 - protein, 172 aa, Homo sapiens
  Payload ID: 4259
  Gene Symbol: CCNL1
  Gene Name: cyclin L1
  Uniprot ID: Q9UK58
  ENSP ID: ENSP00000295925
MASGPHSTATAAAAASSAAPSAGGSSSGTTTTTTTTTGGILIGDRLYSEVSLTIDHSLIPEERLSPTPSMQDGLDLPSETDLRILGCELIQAAGILLRLPQVAMATGQVLFHRFFYSKSFVKHSFEIVAMACINLASKIEEAPRRIRDVINVFHHLRQLRGKSDQLHLPKPG

SEQ ID NO: 21119 - protein, 526 aa, Homo sapiens
  Payload ID: 4259
  Gene Symbol: CCNL1
  Gene Name: cyclin L1
  Uniprot ID: Q9UK58
  ENSP ID: ENSP00000295926
MASGPHSTATAAAAASSAAPSAGGSSSGTTTTTTTTTGGILIGDRLYSEVSLTIDHSLIPEERLSPTPSMQDGLDLPSETDLRILGCELIQAAGILLRLPQVAMATGQVLFHRFFYSKSFVKHSFEIVAMACINLASKIEEAPRRIRDVINVFHHLRQLRGKRTPSPLILDQNYINTKNQVIKAERRVLKELGFCVHVKHPHKIIVMYLQVLECERNQTLVQTAWNYMNDSLRTNVFVRFQPETIACACIYLAARALQIPLPTRPHWFLLFGTTEEEIQEICIETLRLYTRKKPNYELLEKEVEKRKVALQEAKLKAKGLNPDGTPALSTLGGFSPASKPSSPREVKAEEKSPISINVKTVKKEPEDRQQASKSPYNGVRKDSKRSRNSRSASRSRSRTRSRSRSHTPRRHYNNRRSRSGTYSSRSRSRSRSHSESPRRHHNHGSPHLKAKHTRDDLKSSNRHGHKRKKSRSRSQSKSRDHSDAAKKHRHERGHHRDRRERSRSFERSHKSKHHGGSRSGHGRHRR

SEQ ID NO: 21120 - protein, 59 aa, Homo sapiens
  Payload ID: 4259
  Gene Symbol: CCNL1
  Gene Name: cyclin L1
  ENSP ID: ENSP00000417218
  MOD_RES (1)..(1): Any amino acid
XRKKPNYELLEKEVEKRKVALQEAKLKAKGLNPDGTPALSTLGGFSPASKPCKMYLELK

SEQ ID NO: 21121 - protein, 232 aa, Homo sapiens
  Payload ID: 4259
  Gene Symbol: CCNL1
  Gene Name: cyclin L1
  Uniprot ID: Q9UK58
  ENSP ID: ENSP00000417237
MASGPHSTATAAAAASSAAPSAGGSSSGTTTTTTTTTGGILIGDRLYSEVSLTIDHSLIPEERLSPTPSMQDGLDLPSETDLRILGCELIQAAGILLRLPQVAMATGQVLFHRFFYSKSFVKHSFEIVAMACINLASKIEEAPRRIRDVINVFHHLRQLRGKRTPSPLILDQNYINTKNQVIKAERRVLKELGFCVHVKHPHKIIVMYLQVLECERNQTLVQTAWVVHDGKS

SEQ ID NO: 21122 - protein, 172 aa, Homo sapiens; identical to SEQ ID NO: 21118
  Payload ID: 4259
  Gene Symbol: CCNL1
  Gene Name: cyclin L1
  Uniprot ID: Q9UK58
  ENSP ID: ENSP00000417343

SEQ ID NO: 21123 - protein, 172 aa, Homo sapiens; identical to SEQ ID NO: 21118
  Payload ID: 4259
  Gene Symbol: CCNL1
  Gene Name: cyclin L1
  Uniprot ID: Q9UK58
  ENSP ID: ENSP00000418094

SEQ ID NO: 21124 - protein, 172 aa, Homo sapiens; identical to SEQ ID NO: 21118
  Payload ID: 4259
  Gene Symbol: CCNL1
  Gene Name: cyclin L1
  Uniprot ID: Q9UK58
  ENSP ID: ENSP00000418449

SEQ ID NO: 21125 - protein, 428 aa, Homo sapiens
  Payload ID: 4259
  Gene Symbol: CCNL1
  Gene Name: cyclin L1
  ENSP ID: ENSP00000420277
MASGPHSTATAAAAASSAAPSAGGSSSGTTTTTTTTTGGILIGDRLYSEVSLTIDHSLIPEERLSPTPSMQDGLDLPSETDLRILGCELIQAAGILLRLPQVAMATGQVLFHRFFYSKSFVKHSFEIVAMACINLASKIEEAPRRIRDVINVFHHLRQLRGKRTPSPLILDQNYINTKNQVIKAERRVLKELGFCVHVKHPHKIIVMYLQVLECERNQTLVQTAWNYMNDSLRTNVFVRFQPETIACACIYLAARALQIPLPTRPHWFLLFGTTEEEIQEICIETLRLYTRKKPNYELLEKEVEKRKVALQEAKLKAKGLNPDGTPALSTLGGFSPASKPSSPREVKAEEKSPISINVKTVKKEPEDRQQASKSPYNGVRKDSKRSRNSRSASRSRSRTRSRSRSHTPRRQDEVLLRCPGRSRTPGLK

SEQ ID NO: 21126 - protein, 172 aa, Homo sapiens; identical to SEQ ID NO: 21118
  Payload ID: 4259
  Gene Symbol: CCNL1
  Gene Name: cyclin L1
  Uniprot ID: Q9UK58
  ENSP ID: ENSP00000487951

SEQ ID NO: 21127 - protein, 520 aa, Homo sapiens
  Payload ID: 4260
  Gene Symbol: CCNL2
  Gene Name: cyclin L2
  Uniprot ID: Q96S94
  ENSP ID: ENSP00000383611
MAAAAAAAGAAGSAAPAAAAGAPGSGGAPSGSQGVLIGDRLYSGVLITLENCLLPDDKLRFTPSMSSGLDTDTETDLRVVGCELIQAAGILLRLPQVAMATGQVLFQRFFYTKSFVKHSMEHVSMACVHLASKIEEAPRRIRDVINVFHRLRQLRDKKKPVPLLLDQDYVNLKNQIIKAERRVLKELGFCVHVKHPHKIIVMYLQVLECERNQHLVQTSWNYMNDSLRTDVFVRFQPESIACACIYLAARTLEIPLPNRPHWFLLFGATEEEIQEICLKILQLYARKKVDLTHLEGEVEKRKHAIEEAKAQARGLLPGGTQVLDGTSGFSPAPKLVESPKEGKGSKPSPLSVKNTKRRLEGAKKAKADSPVNGLPKGRESRSRSRSREQSYSRSPSRSASPKRRKSDSGSTSGGSKSQSRSRSRSDSPPRQAPRSAPYKGSEIRGSRKSKDCKYPQKPHKSRSRSSSRSRSRSRERADNPGKYKKKSHYYRDQRRERSRSYERTGRRYERDHPGHSRHRR

SEQ ID NO: 21128 - protein, 347 aa, Homo sapiens [sequence omitted]

SEQ ID NO: 21129 - protein, 226 aa, Homo sapiens
  Payload ID: 4260
  Gene Symbol: CCNL2
  Gene Name: cyclin L2
  Uniprot ID: Q96S94
  ENSP ID: ENSP00000386158
MAAAAAAAGAAGSAAPAAAAGAPGSGGAPSGSQGVLIGDRLYSGVLITLENCLLPDDKLRFTPSMSSGLDTDTETDLRVVGCELIQAAGILLRLPQVAMATGQVLFQRFFYTKSFVKHSMEHVSMACVHLASKIEEAPRRIRDVINVFHRLRQLRDKKKPVPLLLDQDYVNLKNQIIKAERRVLKELGFCVHVKHPHKIIVMYLQVLECERNQHLVQTSWVASEGK

SEQ ID NO: 21130 - protein, 180 aa, Homo sapiens
  Payload ID: 4260
  Gene Symbol: CCNL2
  Gene Name: cyclin L2
  ENSP ID: ENSP00000392899
MAAAAAAAGAAGSAAPAAAAGAPGSGGAPSGSQGVLIGDRLYSGVLITLENCLLPDDKLRFTPSMSSGLDTDTETDLRVVGCELIQAAGILLRLPQVRARPRASGPGGHGYRAGVVPAVLLYQVLREALHGACVNGLCPPGFQDRRGPKTHTGRHQCVSPPSTAERQKEARASTTGSRLC

SEQ ID NO: 21131 - protein, 236 aa, Homo sapiens
  Payload ID: 4260
  Gene Symbol: CCNL2
  Gene Name: cyclin L2
  ENSP ID: ENSP00000423734
MAAAAAAAGAAGSAAPAAAAGAPGSGGAPSGSQGVLIGDRLYSGVLITLENCLLPDDKLRFTPSMSSGLDTDTETDLRVVGCELIQAAGILLRLPQVAMATGQVLFQRFFYTKSFVKHSMEHVSMACVHLASKIEEAPRRIRDVINVFHRLRQLRDKKKPVPLLLDQDYVNLKNQIIKAERRVLKELGFCVHVKHPHKIIVMYLQVLECERNQHLVQTSWVASEDPLLKWDSWQRL

SEQ ID NO: 21132 - protein, 227 aa, Homo sapiens
  Payload ID: 4260
  Gene Symbol: CCNL2
  Gene Name: cyclin L2
  ENSP ID: ENSP00000424647
MAAAAAAAGAAGSAAPAAAAGAPGSGGAPSGSQGVLIGDRLYSGVLITLENCLLPDDKLRFTPSMSSGLDTDTETDLRVVGCELIQAAGILLRLPQVAMATGQVLFQRFFYTKSFVKHSMEHVSMACVHLASKIEEAPRRIRDVINVFHRLRQLRDKKKPVPLLLDQDYVNLKNQIIKAERRVLKELGFCVHVKHPHKIIVMYLQVLECERNQHLVQTSWVASEGIT

SEQ ID NO: 21133 - protein, 46 aa, Homo sapiens
  Payload ID: 4260
  Gene Symbol: CCNL2
  Gene Name: cyclin L2
  ENSP ID: ENSP00000462056
  MOD_RES (1)..(1): Any amino acid
XEEAPRRIRDVINVFHRLRQLRDKKPCALSLAGSPCLYYWIKIMLI

SEQ ID NO: 21134 - protein, 85 aa, Homo sapiens
  Payload ID: 4260
  Gene Symbol: CCNL2
  Gene Name: cyclin L2
  ENSP ID: ENSP00000464685
MATGQVLFQRFFYTKSFVKHSMEHVSMACVHLASKIEEAPRRIRDVINVFHRLRQLRDKKKPVPLLLDQDYVNLKNQIIKAERRV

SEQ ID NO: 21135 - protein, 330 aa, Homo sapiens
  Payload ID: 4261
  Gene Symbol: CNTD1
  Gene Name: cyclin N-terminal domain containing 1
  Uniprot ID: Q8N815
  ENSP ID: ENSP00000465204
MDGPMRPRSASLVDFQFGVVATETIEDALLHLAQQNEQAVREASGRLGRFREPQIVEFVFLLSEQWCLEKSVSYQAVEILERFMVKQAENICRQATIQPRDNKRESQNWRALKQQLVNKFTLRLVSCVQLASKLSFRNKIISNITVLNFLQALGYLHTKEELLESELDVLKSLNFRINLPTPLAYVETLLEVLGYNGCLVPAMRLHATCLTLLDLVYLLHEPIYESLLRASIENSTPSQLQGEKFTSVKEDFMLLAVGIIAASAFIQNHECWSQVVGHLQSITGIALASIAEFSYAILTHGVGANTPGRQQSIPPHLAARALKTVASSNT

SEQ ID NO: 21136 - protein, 176 aa, Homo sapiens
  Payload ID: 4261
  Gene Symbol: CNTD1
  Gene Name: cyclin N-terminal domain containing 1
  ENSP ID: ENSP00000465999
MDAGEFVFLLSEQWCLEKSVSYQAVEILERFMVKQAENICRQATIQPRDNKRESQNWRALKQQLVNKFTLRLVSCVQLASKLSFRNKIISNITVLNFLQALGYLHTKEELLESELDVLKSLNFRINLPTPLAYVETLLEVLGYNGCLVPAMRLHATCLTLLDLVYLLHEPIYESLL

SEQ ID NO: 21137 - protein, 113 aa, Homo sapiens
  Payload ID: 4261
  Gene Symbol: CNTD1
  Gene Name: cyclin N-terminal domain containing 1
  ENSP ID: ENSP00000467787
TLLEVLGYNGCLVPAMRLHATCLTLLDLVYLLHEPIYESLLRASIENSTPSQLQGEKFTSVKEDFMLLAVGIIAASAFIQNHECWSQVCTTEQDQHGCGAFAEHHWYCLGKHC

SEQ ID NO: 21138 - protein, 59 aa, Homo sapiens
  Payload ID: 4261
  Gene Symbol: CNTD1
  Gene Name: cyclin N-terminal domain containing 1
  ENSP ID: ENSP00000468459
MDGPMRPRSASLVDFQFGVVATETIEDALLHLAQQNEQAVREASGRLGRFREPQIVGLW

SEQ ID NO: 21139 - protein, 247 aa, Homo sapiens
  Payload ID: 4261
  Gene Symbol: CNTD1
  Gene Name: cyclin N-terminal domain containing 1
  ENSP ID: ENSP00000468725
MVKQAENICRQATIQPRDNKRESQNWRALKQQLVNKFTLRLVSCVQLASKLSFRNKIISNITVLNFLQALGYLHTKEELLESELDVLKSLNFRINLPTPLAYVETLLEVLGYNGCLVPAMRLHATCLTLLDLVYLLHEPIYESLLRASIENSTPSQLQGEKFTSVKEDFMLLAVGIIAASAFIQNHECWSQVVGHLQSITGIALASIAEFSYAILTHGVGANTPGRQQSIPPHLAARALKTVASSNT

SEQ ID NO: 21140 - protein, 155 aa, Homo sapiens
  Payload ID: 4262
  Gene Symbol: CNTD2
  Gene Name: cyclin N-terminal domain containing 2
  Uniprot ID: Q9H8S5
  ENSP ID: ENSP00000221818
MLVRGRDQGSGSRLGPIVRRWAPRPSPLQSLAASLDAEPSSAAVPDGFPAGPTVSPRRLARPPGLEEALSALGLQGEREYAGDIFAEVMEYLGLAGDTLYLAVHLLDSYLSAGRVRLHRLQLLGVACLFVACKMEECVLPEETEVRNLGPFQGRE

SEQ ID NO: 21141 - protein, 307 aa, Homo sapiens
  Payload ID: 4262
  Gene Symbol: CNTD2
  Gene Name: cyclin N-terminal domain containing 2
  Uniprot ID: Q9H8S5
  ENSP ID: ENSP00000396755
MLVRGRDQGSGSRLGPIVRRWAPRPSPLQSLAASLDAEPSSAAVPDGFPAGPTVSPRRLARPPGLEEALSALGLQGEREYAGDIFAEVMVCRVLPLRALPRAVTPEMRALVVDWLVQVHEYLGLAGDTLYLAVHLLDSYLSAGRVRLHRLQLLGVACLFVACKMEECVLPEPAFLCLLSADSFSRAELLRAERRILSRLDFRLHHPGPLLCLGLLAALAGSSPQVMLLATYFLELSLLEAEAAGWEPGRRAAAALSLAHRLLDGAGSRLQPELYRCSLGGGSVWGHRSFRDLPSWSFLRSRRMRDNY

SEQ ID NO: 21142 - protein, 201 aa, Homo sapiens
  Payload ID: 4262
  Gene Symbol: CNTD2
  Gene Name: cyclin N-terminal domain containing 2
  ENSP ID: ENSP00000425529
MRALVVDWLVQVHEYLGLAGDTLYLAVHLLDSYLSAGRVRLHRLQLLGVACLFVACKMEECVLPEPAFLCLLSADSFSRAELLRAERRILSRLDFRLHHPGPLLCLGLLAALAGSSPQVMLLATYFLELSLLEAEAAGWEPGRRAAAALSLAHRLLDGAGSRLQPELYRCSLGGGSVWGHRSFRDLPSWSFLRSRRMRDNY

SEQ ID NO: 21143 - protein, 160 aa, Homo sapiens
  Payload ID: 4262
  Gene Symbol: CNTD2
  Gene Name: cyclin N-terminal domain containing 2
  ENSP ID: ENSP00000470643
PEPAFLCLLSADSFSRAELLRAERRILSRLDFRLHHPGPLLCLGLLAALAGSSPQVMLLATYFLELSLLEAEAAGWEPGRRAAAALSLAHRLLDGAGSRLQPELYSPEELGTLEPCMARAALRGPAPGRAAVFLKYARPQRQGTSLAAACLLRRLQSEPP

SEQ ID NO: 21144 - protein, 350 aa, Homo sapiens
  Payload ID: 4263
  Gene Symbol: CCNO
  Gene Name: cyclin O
  Uniprot ID: P22674
  ENSP ID: ENSP00000282572
MVTPCPTSPSSPAARAGRRDNDQNLRAPVKKSRRPRLRRKQPLHPLNPCPLPGDSGICDLFESPSSGSDGAESPSAARGGSPLPGPAQPVAQLDLQTFRDYGQSCYAFRKAQESHFHPREALARQPQVTAESRCKLLSWLIPVHRQFGLSFESLCLTVNTLDRFLTTTPVAADCFQLLGVTSLLIACKQVEVHPPRVKQLLALCCGAFSRQQLCNLECIVLHKLHFTLGAPTISFFLEHFTHARVEAGQAEASEALEAQALARGVAELSLADYAFTSYSPSLLAICCLALADRMLRVSRPVDLRLGDHPEAALEDCMGKLQLLVAINSTSLTHMLPVQICEKCSLPPSSK

SEQ ID NO: 21145 - protein, 131 aa, Homo sapiens
  Payload ID: 4263
  Gene Symbol: CCNO
  Gene Name: cyclin O
  Uniprot ID: P22674
  ENSP ID: ENSP00000422485
MVTPCPTSPSSPAARAGRRDNDQNLRAPVKKSRRPRLRRKQPLHPLNPCPLPGDSGICDLFESPSSGSDGAESPSAARGGSPLPGPAQPVAQLDLQTFRDYGQSCYAFRKAQESHFHPREALARQPQVRCW

SEQ ID NO: 21146 - protein, 410 aa, Homo sapiens
  Payload ID: 4264
  Gene Symbol: CNPPD1
  Gene Name: cyclin Pas1/PHO80 domain containing 1
  Uniprot ID: Q9BV87
  ENSP ID: ENSP00000353698
MDLTGLLLDEEGTFSLAGFQDFTFLPGHQKLSARIRRRLYYGWDWEADCSLEELSSPVADIAVELLQKAAPSPIRRLQKKYVAHVSREACISPCAMMLALVYIERLRHRNPDYLQHVSSSDLFLISMMVASKYLYDEGEEEEVFNDEWGAAGGVAVPTLNALERGFLSAMDWHLYTDPREIFEVLSWLESCVAEQQGRWRGWYTYTDLCVLLEQPTWQLALGSLCQRLVKLSCLLAVAYVSSVALAVASVAVIHQSLGLSCIPTPGPPDLGLTSRCLLEPCIPSVPQCLPSLANVSSCLEGSMGLRSLWGSLLASLTPPPLPPPDPPAPPTLLHNCHLCQKLQRDSPTCHACLHPNRTVPTALSSPWYHTYGLAPPWPWSPVLLSLPQPQQCSLFSVMELARLKSFVFPG

SEQ ID NO: 21147 - protein, 410 aa, Homo sapiens; identical to SEQ ID NO: 21146
  Payload ID: 4264
  Gene Symbol: CNPPD1
  Gene Name: cyclin Pas1/PHO80 domain containing 1
  Uniprot ID: Q9BV87
  ENSP ID: ENSP00000386277

SEQ ID NO: 21148 - protein, 283 aa, Homo sapiens
  Payload ID: 4264
  Gene Symbol: CNPPD1
  Gene Name: cyclin Pas1/PHO80 domain containing 1
  ENSP ID: ENSP00000405997
MDLTGLLLDEEGTFSLAGFQDFTFLPGHQKLSARIRRRLYYGWDWEADCSLEELSSPVADIAVELLQKAAPSPIRRLQKKYVAHVSREACISPCAMMLALVYIERLRHRNPDYLQHVSSSDLFLISMVRHPLPISLKSQEPAMSSAPPLLVPLQMVASKYLYDEGEEEEVFNDEWGAAGGVAVPTLNALERGFLSAMDWHLYTDPREIFEVLSWLESCVAEQQGRWRGWYTYTDLCVLLEQPTWQLALGSLCQRLVKLSCLLAVAYVSSVALAVASVAVIHQS

SEQ ID NO: 21149 - protein, 308 aa, Homo sapiens
  Payload ID: 4264
  Gene Symbol: CNPPD1
  Gene Name: cyclin Pas1/PHO80 domain containing 1
  ENSP ID: ENSP00000410109
MDLTGLLLDEEGTFSLAGFQDFTFLPGHQKLSARIRRRLYYGWDWEADCSLEELSSPVADIAVELLQKAAPSPIRRLQKKYVAHVSREACISPCAMMLALVYIERLRHRNPDYLQHVSSSDLFLISMMVASKYLYDEGEEEEVFNDEWGAAGGVAVPTLNALERGFLSAMDWHLYTDPREIFEVLSWLESCVAEQQGRWRGWYTYTDLCVLLEQPTWQLALGSLCQRLVKLSCLLAVAYVSSVALAVASVAVIHQSLGLSCIPTPGPPDLGLTSRCLLEPCIPSVPQCLPSLANVSSCLEGSMGLRSL

SEQ ID NO: 21150 - protein, 726 aa, Homo sapiens
  Payload ID: 4265
  Gene Symbol: CCNT1
  Gene Name: cyclin T1
  Uniprot ID: O60563
  ENSP ID: ENSP00000261900
MEGERKNNNKRWYFTREQLENSPSRRFGVDPDKELSYRQQAANLLQDMGQRLNVSQLTINTAIVYMHRFYMIQSFTQFPGNSVAPAALFLAAKVEEQPKKLEHVIKVAHTCLHPQESLPDTRSEAYLQQVQDLVILESIILQTLGFELTIDHPHTHVVKCTQLVRASKDLAQTSYFMATNSLHLTTFSLQYTPPVVACVCIHLACKWSNWEIPVSTDGKHWWEYVDATVTLELLDELTHEFLQILEKTPNRLKRIWNWRACEAAKKTKADDRGTDEKTSEQTILNMISQSSSDTTIAGLMSMSTSTTSAVPSLPVSEESSSNLTSVEMLPGKRWLSSQPSFKLEPTQGHRTSENLALTGVDHSLPQDGSNAFISQKQNSKSVPSAKVSLKEYRAKHAEELAAQKRQLENMEANVKSQYAYAAQNLLSHHDSHSSVILKMPIEGSENPERPFLEKADKTALKMRIPVAGGDKAASSKPEEIKMRIKVHAAADKHNSVEDSVTKSREHKEKHKTHPSNHHHHHNHHSHKHSHSQLPVGTGNKRPGDPKHSSQTSNLAHKTYSLSSSFSSSSSTRKRGPSEETGGAVFDHPAKIAKSTKSSSLNFSFPSLPTMGQMPGHSSDTSGLSFSQPSCKTRVPHSKLDKGPTGANGHNTTQTIDYQDTVNMLHSLLSAQGVQPTQPTAFEFVRPYSDYLNPRSGGISSRSGNTDKPRPPPLPSEPPPPLPPLPK

SEQ ID NO: 21151 - protein, 184 aa, Homo sapiens
  Payload ID: 4265
  Gene Symbol: CCNT1
  Gene Name: cyclin T1
  Uniprot ID: O60563
  ENSP ID: ENSP00000399845
MEGERKNNNKRWYFTREQLENSPSRRFGVDPDKELSYRQQAANLLQDMGQRLNVSQLTINTAIVYMHRFYMIQSFTQFPGNSVAPAALFLAAKVEEQPKKLEHVIKVAHTCLHPQESLPDTRSEAYLQQVQDLVILESIILQTLGFELTIDHPHTHVVKCTQLVRASKDLAQTSYFMATNRTDT

SEQ ID NO: 21152 - protein, 184 aa, Homo sapiens; identical to SEQ ID NO: 21151
  Payload ID: 4265
  Gene Symbol: CCNT1
  Gene Name: cyclin T1
  Uniprot ID: O60563
  ENSP ID: ENSP00000481035

SEQ ID NO: 21153 - protein, 730 aa, Homo sapiens
  Payload ID: 4266
  Gene Symbol: CCNT2
  Gene Name: cyclin T2
  Uniprot ID: O60583
  ENSP ID: ENSP00000264157
MASGRGASSRWFFTREQLENTPSRRCGVEADKELSCRQQAANLIQEMGQRLNVSQLTINTAIVYMHRFYMHHSFTKFNKNIISSTALFLAAKVEEQARKLEHVIKVAHACLHPLEPLLDTKCDAYLQQTQELVILETIMLQTLGFEITIEHPHTDVVKCTQLVRASKDLAQTSYFMATNSLHLTTFCLQYKPTVIACVCIHLACKWSNWEIPVSTDGKHWWEYVDPTVTLELLDELTHEFLQILEKTPNRLKKIRNWRANQAARKPKVDGQVSETPLLGSSLVQNSILVDSVTGVPTNPSFQKPSTSAFPAPVPLNSGNISVQDSHTSDNLSMLATGMPSTSYGLSSHQEWPQHQDSARTEQLYSQKQETSLSGSQYNINFQQGPSISLHSGLHHRPDKISDHSSVKQEYTHKAGSSKHHGPISTTPGIIPQKMSLDKYREKRKLETLDLDVRDHYIAAQVEQQHKQGQSQAASSSSVTSPIKMKIPIANTEKYMADKKEKSGSLKLRIPIPPTDKSASKEELKMKIKVSSSERHSSSDEGSGKSKHSSPHISRDHKEKHKEHPSSRHHTSSHKHSHSHSGSSSGGSKHSADGIPPTVLRSPVGLSSDGISSSSSSSRKRLHVNDASHNHHSKMSKSSKSSGSSSSSSSSVKQYISSHNSVFNHPLPPPPPVTYQVGYGHLSTLVKLDKKPVETNGPDANHEYSTSSQHMDYKDTFDMLDSLLSAQGMNM

SEQ ID NO: 21154 - protein, 663 aa, Homo sapiens
  Payload ID: 4266
  Gene Symbol: CCNT2
  Gene Name: cyclin T2
  Uniprot ID: O60583
  ENSP ID: ENSP00000295238
MASGRGASSRWFFTREQLENTPSRRCGVEADKELSCRQQAANLIQEMGQRLNVSQLTINTAIVYMHRFYMHHSFTKFNKNIISSTALFLAAKVEEQARKLEHVIKVAHACLHPLEPLLDTKCDAYLQQTQELVILETIMLQTLGFEITIEHPHTDVVKCTQLVRASKDLAQTSYFMATNSLHLTTFCLQYKPTVIACVCIHLACKWSNWEIPVSTDGKHWWEYVDPTVTLELLDELTHEFLQILEKTPNRLKKIRNWRANQAARKPKVDGQVSETPLLGSSLVQNSILVDSVTGVPTNPSFQKPSTSAFPAPVPLNSGNISVQDSHTSDNLSMLATGMPSTSYGLSSHQEWPQHQDSARTEQLYSQKQETSLSGSQYNINFQQGPSISLHSGLHHRPDKISDHSSVKQEYTHKAGSSKHHGPISTTPGIIPQKMSLDKYREKRKLETLDLDVRDHYIAAQVEQQHKQGQSQAASSSSVTSPIKMKIPIANTEKYMADKKEKSGSLKLRIPIPPTDKSASKEELKMKIKVSSSERHSSSDEGSGKSKHSSPHISRDHKEKHKEHPSSRHHTSSHKHSHSHSGSSSGGSKHSADGIPPTVLRSPVGLSSDGISSSSSSSRKRLHVNDASHNHHSKMSKSSKSSGGLRTSQHPRETGQEASGDQRS

SEQ ID NO: 21155 - protein, 149 aa, Homo sapiens
  Payload ID: 4266
  Gene Symbol: CCNT2
  Gene Name: cyclin T2
  ENSP ID: ENSP00000387436
  MOD_RES (1)..(1): Any amino acid
XNSLHLTTFCLQYKPTVIACVCIHLACKWSNWEIPVSTDGKHWWEYVDPTVTLELLDELTHEFLQILEKTPNRLKKIRNWRANQAARKPKVDGQVGYGHLSTLVKLDKKPVETNGPDANHEYSTSSQHMDYKDTFDMLDSLLSAQGMNM

SEQ ID NO: 21156 - protein, 131 aa, Homo sapiens
  Payload ID: 4266
  Gene Symbol: CCNT2
  Gene Name: cyclin T2
  ENSP ID: ENSP00000399497
MLQTLASKDLAQTSYFMATNSLHLTTFCLQYKPTVIACVCIHLACKWSNWEIPVSTDGKHWWEYVDPTVTLELLDELTHEFLQILEKTPNRLKKIRNWRANQAARKPKVDGQVSETPLLGSSLVQNSILVD

SEQ ID NO: 21157 - protein, 173 aa, Homo sapiens
  Payload ID: 4266
  Gene Symbol: CCNT2
  Gene Name: cyclin T2
  ENSP ID: ENSP00000400298
MASGRGASSRWFFTREQLENTPSRRCGVEADKELSCRQQAANLIQEMGQRLNVSQLTINTAIVYMHRFYMHHSFTKFNKNIISSTALFLAAKVEEQARKLEHVIKVAHACLHPLEPLLDTKCDAYLQQTQELVILETIMLQTLGFEITIEHPHTDVVKCTQLVRDLWGIARNI

SEQ ID NO: 21158 - protein, 173 aa, Homo sapiens
  Payload ID: 4266
  Gene Symbol: CCNT2
  Gene Name: cyclin T2
  ENSP ID: ENSP00000402512
MASGRGASSRWFFTREQLENTPSRRCGVEADKELSCRQQAANLIQEMGQRLNVSQLTINTAIVYMHRFYMHHSFTKFNKNIISSTALFLAAKVEEQARKLEHVIKVAHACLHPLEPLLDTKCDAYLQQTQELVILETIMLQTLGFEITIEHPHTDVVKCTQLVRGECFIATFS

SEQ ID NO: 21159 - protein, 173 aa, Homo sapiens; identical to SEQ ID NO: 21157
  Payload ID: 4266
  Gene Symbol: CCNT2
  Gene Name: cyclin T2
  ENSP ID: ENSP00000404653

SEQ ID NO: 21160 - protein, 67 aa, Homo sapiens
  Payload ID: 4266
  Gene Symbol: CCNT2
  Gene Name: cyclin T2
  ENSP ID: ENSP00000415120
  MOD_RES (1)..(1): Any amino acid
XIPVSTDGKHWWEYVDPTVTLELLDELTHEFLQILEKTPNRLKKIRNWRVRELTGFNRISVFYVTFT

SEQ ID NO: 21161 - protein, 287 aa, Homo sapiens
  Payload ID: 4267
  Gene Symbol: CCNY
  Gene Name: cyclin Y
  Uniprot ID: Q8ND76
  ENSP ID: ENSP00000265375
MEFNPSDHPRASTIFLSKSQTDVREKRKSLFINHHPPGQIARKYSSCSTIFLDDSTVSQPNLKYTIKCVALAIYYHIKNRDPDGRMLLDIFDENLHPLSKSEVPPDYDKHNPEQKQIYRFVRTLFSAAQLTAECAIVTLVYLERLLTYAEIDICPANWKRIVLGAILLASKVWDDQAVWNVDYCQILKDITVEDMNELERQFLELLQFNINVPSSVYAKYYFDLRSLAEANNLSFPLEPLSRERAHKLEAISRLCEDKYKDLRRSARKRSASADNLTLPRWSPAIIS

SEQ ID NO: 21162 - protein, 316 aa, Homo sapiens
  Payload ID: 4267
  Gene Symbol: CCNY
  Gene Name: cyclin Y
  Uniprot ID: Q8ND76
  ENSP ID: ENSP00000344275
MGNTTSCCVSSSPKLRRNAHSRLESYRPDTDLSREDTGCNLQHISDRENIDVREKRKSLFINHHPPGQIARKYSSCSTIFLDDSTVSQPNLKYTIKCVALAIYYHIKNRDPDGRMLLDIFDENLHPLSKSEVPPDYDKHNPEQKQIYRFVRTLFSAAQLTAECAIVTLVYLERLLTYAEIDICPANWKRIVLGAILLASKVWDDQAVWNVDYCQILKDITVEDMNELERQFLELLQFNINVPSSVYAKYYFDLRSLAEANNLSFPLEPLSRERAHKLEAISRLCEDKYKDLRRSARKRSASADNLTLPRWSPAIIS

SEQ ID NO: 21163 - protein, 341 aa, Homo sapiens
  Payload ID: 4267
  Gene Symbol: CCNY
  Gene Name: cyclin Y
  Uniprot ID: Q8ND76
  ENSP ID: ENSP00000363836
MGNTTSCCVSSSPKLRRNAHSRLESYRPDTDLSREDTGCNLQHISDRENIDDLNMEFNPSDHPRASTIFLSKSQTDVREKRKSLFINHHPPGQIARKYSSCSTIFLDDSTVSQPNLKYTIKCVALAIYYHIKNRDPDGRMLLDIFDENLHPLSKSEVPPDYDKHNPEQKQIYRFVRTLFSAAQLTAECAIVTLVYLERLLTYAEIDICPANWKRIVLGAILLASKVWDDQAVWNVDYCQILKDITVEDMNELERQFLELLQFNINVPSSVYAKYYFDLRSLAEANNLSFPLEPLSRERAHKLEAISRLCEDKYKDLRRSARKRSASADNLTLPRWSPAIIS

SEQ ID NO: 21164 - protein, 287 aa, Homo sapiens; identical to SEQ ID NO: 21161
  Payload ID: 4267
  Gene Symbol: CCNY
  Gene Name: cyclin Y
  Uniprot ID: Q8ND76
  ENSP ID: ENSP00000363838

SEQ ID NO: 21165 - protein, 51 aa, Homo sapiens
  Payload ID: 4267
  Gene Symbol: CCNY
  Gene Name: cyclin Y
  ENSP ID: ENSP00000473487
MEFNPSDHPRASTIFLSKSQTDVREKRKSLFINHHPPGQIARKYSSCSTIF

SEQ ID NO: 21166 - protein, 101 aa, Homo sapiens
  Payload ID: 4267
  Gene Symbol: CCNY
  Gene Name: cyclin Y
  ENSP ID: ENSP00000473625
MEFNPSDHPRASTIFLSKSQTDVREKRKSLFINHHPPGQIARKYSSCSTIFLDDSTVSQPNLKYTIKCVALAIYYHIKNRDPDGRMLLDIFDENLHPLSVI

SEQ ID NO: 21167 - protein, 359 aa, Homo sapiens
  Payload ID: 4268
  Gene Symbol: CCNYL1
  Gene Name: cyclin Y-like 1
  Uniprot ID: Q8N7R7
  ENSP ID: ENSP00000295414
MGNTLTCCVSPNASPKLGRRAGSAELYCASDIYEAVSGDAVAVAPAVVEPAELDFGEGEGHHLQHISDREMPEDLALESNPSDHPRASTIFLSKSQTDVREKRKSNHLNHVSPGQLTKKYSSCSTIFLDDSTVSQPNLRTTVKCVTLAIYYHIKNRDANRSLDIFDERSHPLTREKVPEEYFKHDPEHKFIYRFVRTLFSAAQLTAECAIVTLVYLERLLTYAEIDICPTNWKRIVLGAILLASKVWDDQAVWNVDYCQILKDITVEDMNEMERHFLELLQFNINVPASVYAKYYFDLRSLADDNNLNFLFAPLSKERAQNLEAISRLCEDKDLCRAAMRRSFSADNFIGIQRSKAILS

SEQ ID NO: 21168 - protein, 308 aa, Homo sapiens
  Payload ID: 4268
  Gene Symbol: CCNYL1
  Gene Name: cyclin Y-like 1
  Uniprot ID: Q8N7R7
  ENSP ID: ENSP00000342344
MGNTLTCCVSPNASPKLGRRAGSAELYCASDIYEAVSGDAVAVAPAVVEPAELDFGEGEGHHLQHISDREMPEDLALESNPSDHPRASTIFLSKSQTDVREKRKSNHLNHCDLSNILPHKEQREKVPEEYFKHDPEHKFIYRFVRTLFSAAQLTAECAIVTLVYLERLLTYAEIDICPTNWKRIVLGAILLASKVWDDQAVWNVDYCQILKDITVEDMNEMERHFLELLQFNINVPASVYAKYYFDLRSLADDNNLNFLFAPLSKERAQNLEAISRLCEDKDLCRAAMRRSFSADNFIGIQRSKAILS

SEQ ID NO: 21169 - protein, 289 aa, Homo sapiens
  Payload ID: 4268
  Gene Symbol: CCNYL1
  Gene Name: cyclin Y-like 1
  Uniprot ID: Q8N7R7
  ENSP ID: ENSP00000376045
MPEDLALESNPSDHPRASTIFLSKSQTDVREKRKSNHLNHVSPGQLTKKYSSCSTIFLDDSTVSQPNLRTTVKCVTLAIYYHIKNRDANRSLDIFDERSHPLTREKVPEEYFKHDPEHKFIYRFVRTLFSAAQLTAECAIVTLVYLERLLTYAEIDICPTNWKRIVLGAILLASKVWDDQAVWNVDYCQILKDITVEDMNEMERHFLELLQFNINVPASVYAKYYFDLRSLADDNNLNFLFAPLSKERAQNLEAISRLCEDKDLCRAAMRRSFSADNFIGIQRSKAILS

SEQ ID NO: 21170 - protein, 119 aa, Homo sapiens
  Payload ID: 4268
  Gene Symbol: CCNYL1
  Gene Name: cyclin Y-like 1
  ENSP ID: ENSP00000388992
  MOD_RES (1)..(1): Any amino acid
XREMPEDLALESNPSDHPRASTIFLSKSQTDVREKRKSNHLNHVSPGQLTKKYSSCSTIFLDDSTVSQPNLRTTVKCVTLAIYYHIKNSEKKFQRNTLSMILSTNLFTDLFVLFLVLHS

SEQ ID NO: 21171 - protein, 147 aa, Homo sapiens
  Payload ID: 4268
  Gene Symbol: CCNYL1
  Gene Name: cyclin Y-like 1
  ENSP ID: ENSP00000396072
IYRFVRTLFSAAQLTAECAIVTLVYLERLLTYAEIDICPTNWKRIVLGAILLASKVWDDQAVWNVDYCQILKDITVEDMNEMERHFLELLQFNINVPASVYAKYYFDLRSLADDNNLNFLFAPLSKERAQNLELVTLPFAPFSNGEK

SEQ ID NO: 21172 - protein, 101 aa, Homo sapiens
  Payload ID: 4268
  Gene Symbol: CCNYL1
  Gene Name: cyclin Y-like 1
  ENSP ID: ENSP00000399151
MGNTLTCCVSPNASPKLGRRAGSAELYCASDIYEAVSGDAVAVAPAVVEPAELDFGEGEGHHLQHISDREMPEEKESHCVDQAGLELLAWAQAVLPPQPPE

SEQ ID NO: 21173 - protein, 240 aa, Homo sapiens
  Payload ID: 4269
  Gene Symbol: CDK1
  Gene Name: cyclin-dependent kinase 1
  Uniprot ID: P06493
  ENSP ID: ENSP00000325970
MEDYTKIEKIGEGTYGVVYKGRHKTTGQVVAMKKIRLESEEEGVPSTAIREISLLKELRHPNIVSLQDVLMQDSRLYLIFEFLSMDLKKYLDSIPPGQYMDSSLVKVVTLWYRSPEVLLGSARYSTPVDIWSIGTIFAELATKKPLFHGDSEIDQLFRIFRALGTPNNEVWPEVESLQDYKNTFPKWKPGSLASHVKNLDENGLDLLSKMLIYDPAKRISGKMALNHPYFNDLDNQIKKM

SEQ ID NO: 21174 - protein, 240 aa, Homo sapiens; identical to SEQ ID NO: 21173
  Payload ID: 4269
  Gene Symbol: CDK1
  Gene Name: cyclin-dependent kinase 1
  Uniprot ID: P06493
  ENSP ID: ENSP00000362915

SEQ ID NO: 21175 - protein, 297 aa, Homo sapiens
  Payload ID: 4269
  Gene Symbol: CDK1
  Gene Name: cyclin-dependent kinase 1
  Uniprot ID: P06493
  ENSP ID: ENSP00000378699
MEDYTKIEKIGEGTYGVVYKGRHKTTGQVVAMKKIRLESEEEGVPSTAIREISLLKELRHPNIVSLQDVLMQDSRLYLIFEFLSMDLKKYLDSIPPGQYMDSSLVKSYLYQILQGIVFCHSRRVLHRDLKPQNLLIDDKGTIKLADFGLARAFGIPIRVYTHEVVTLWYRSPEVLLGSARYSTPVDIWSIGTIFAELATKKPLFHGDSEIDQLFRIFRALGTPNNEVWPEVESLQDYKNTFPKWKPGSLASHVKNLDENGLDLLSKMLIYDPAKRISGKMALNHPYFNDLDNQIKKM

SEQ ID NO: 21176 - protein, 297 aa, Homo sapiens
  Payload ID: 4269
  Gene Symbol: CDK1
  Gene Name: cyclin-dependent kinase 1
  ENSP ID: ENSP00000397973
MEDYTKIEKIGEGTYGVVYKGRHKTTGQVVAMKKIRLESEEEGVPSTAIREISLLKELRHPNIVSLQDVLMQDSRLYLIFEFLSMDLKKYLDSIPPGQYMDSSLVKSYLYQILQGIVFCHSRRVLHRDLKPQNLLIDDKGTIKLADFGLARAFGIPIRVYTHEAITLWYRSPEVLLGSARYSTPVDIWSIGTIFAELATKKPLFHGDSEIDQLFRIFRALGTPNNEVWPEVESLQDYKNTFPKWKPGSLASHVKNLDENGLDLLSKMLIYDPAKRISGKMALNHPYFNDLDNQIKKM

SEQ ID NO: 21177 - protein, 189 aa, Homo sapiens
  Payload ID: 4269
  Gene Symbol: CDK1
  Gene Name: cyclin-dependent kinase 1
  ENSP ID: ENSP00000430665
MEDYTKIEKIGEGTYGVVYKGRHKTTGQVVAMKKIRLESEEEGVPSTAIREISLLKELRHPNIVSLQDVLMQDSRLYLIFEFLSMDLKKYLDSIPPGQYMDSSLVKSYLYQILQGIVFCHSRRVLHRDLKPQNLLIDDKGTIKLADFGLARAFGIPIRVYTHEVVTLWYRSPEVLLGSARYSTPVDIWS

SEQ ID NO: 21178 - protein, 224 aa, Homo sapiens
  Payload ID: 4269
  Gene Symbol: CDK1
  Gene Name: cyclin-dependent kinase 1
  ENSP ID: ENSP00000482996
MEDYTKIEKIGEGTYGVVYKGRHKTTGQVVAMKKIRLESEEEGVPSTAIREISLLKELRHPNIVSLQDVLMQDSRLYLIFEFLSMDLKKYLDSIPPGQYMDSSLVKSYLYQILQGIVFCHSRRVLHRDLKPQNLLIDDKGTIKLADFGLARAFGIPIRVYTHEVVTLWYRSPEVLLGSARYSTPVDIWSIGTIFAELATKKPLFHGDSEIDQLFRIFRNFFPVF

SEQ ID NO: 21179 - protein, 313 aa, Homo sapiens
  Payload ID: 4270
  Gene Symbol: CDK10
  Gene Name: cyclin-dependent kinase 10
  ENSP ID: ENSP00000329957
MEPMYQDRARDTQTDEIVALKKVRMDKEKDGIPISSLREITLLLRLRHPNIVELKEVVVGNHLESIFLVMGYCEQDLASLLENMPTPFSEAQVKCIVLQVLRGLQYLHRNFIIHRDLKVSNLLMTDKGCVKTADFGLARAYGVPVKPMTPKVVTLWYRAPELLLGTTTQTTSIDMWAVGCILAELLAHRPLLPGTSEIHQIDLIVQLLGTPSENIWPGFSKLPLVGQYSLRKQPYNNLKHKFPWLSEAGLRLLHFLFMYDPKKRATAGDCLESSYFKEKPLPCEPELMPTFPHHRNKRAAPATSEGQSKRCKP

SEQ ID NO: 21180 - protein, 360 aa, Homo sapiens
  Payload ID: 4270
  Gene Symbol: CDK10
  Gene Name: cyclin-dependent kinase 10
  Uniprot ID: Q15131
  ENSP ID: ENSP00000338673
MAEPDLECEQIRLKCIRKEGFFTVPPEHRLGRCRSVKEFEKLNRIGEGTYGIVYRARDTQTDEIVALKKVRMDKEKDGIPISSLREITLLLRLRHPNIVELKEVVVGNHLESIFLVMGYCEQDLASLLENMPTPFSEAQVKCIVLQVLRGLQYLHRNFIIHRDLKVSNLLMTDKGCVKTADFGLARAYGVPVKPMTPKVVTLWYRAPELLLGTTTQTTSIDMWAVGCILAELLAHRPLLPGTSEIHQIDLIVQLLGTPSENIWPGFSKLPLVGQYSLRKQPYNNLKHKFPWLSEAGLRLLHFLFMYDPKKRATAGDCLESSYFKEKPLPCEPELMPTFPHHRNKRAAPATSEGQSKRCKP

SEQ ID NO: 21181 - protein, 69 aa, Homo sapiens
  Payload ID: 4270
  Gene Symbol: CDK10
  Gene Name: cyclin-dependent kinase 10
  ENSP ID: ENSP00000421597
MAEPDLECEQIRLKCIRKEGFFTVPPEHRGLALSPRLECSGVITAQCIVSLLGSSDLPASASQVLELQA

SEQ ID NO: 21182 - protein, 42 aa, Homo sapiens
  Payload ID: 4270
  Gene Symbol: CDK10
  Gene Name: cyclin-dependent kinase 10
  ENSP ID: ENSP00000423370
MAEPDLECEQIRLKCIRSSALAQAGMQWRDHGSVHRQPPGLK

SEQ ID NO: 21183 - protein, 272 aa, Homo sapiens
  Payload ID: 4270
  Gene Symbol: CDK10
  Gene Name: cyclin-dependent kinase 10
  Uniprot ID: Q15131
  ENSP ID: ENSP00000424415
MDKEKDGIPISSLREITLLLRLRHPNIVELKEVVVGNHLESIFLVMGYCEQDLASLLENMPTPFSEAQVKCIVLQVLRGLQYLHRNFIIHRDLKVSNLLMTDKGCVKTADFGLARAYGVPVKPMTPKVVTLWYRAPELLLGTTTQTTSIDMWAVGCILAELLAHRPLLPGTSEIHQIDLIVQLLGTPSENIWPGFSKLPLVGQYSLRKQPYNNLKHKFPWLSEAGLRLLHFLFMYDPKKRATAGDCLESSYFKEKPLRLPISGVCEGCREPG

SEQ ID NO: 21184 - protein, 56 aa, Homo sapiens
  Payload ID: 4270
  Gene Symbol: CDK10
  Gene Name: cyclin-dependent kinase 10
  ENSP ID: ENSP00000426102
MAEPDLECEQIRLKCIHRGWMTTGATLYSSRRAAGAHRVESRVLDSGVKYWDDAGV

SEQ ID NO: 21185 - protein, 69 aa, Homo sapiens; identical to SEQ ID NO: 21181
  Payload ID: 4270
  Gene Symbol: CDK10
  Gene Name: cyclin-dependent kinase 10
  ENSP ID: ENSP00000426264

SEQ ID NO: 21186 - protein, 42 aa, Homo sapiens
  Payload ID: 4270
  Gene Symbol: CDK10
  Gene Name: cyclin-dependent kinase 10
  ENSP ID: ENSP00000455976
MAEPDLECEQIRLKCIRKEGFFTVPPEHRIGPGTPRQMRLSH

SEQ ID NO: 21187 - protein, 37 aa, Homo sapiens
  Payload ID: 4270
  Gene Symbol: CDK10
  Gene Name: cyclin-dependent kinase 10
  ENSP ID: ENSP00000456788
  MOD_RES (1)..(1): Any amino acid
XELLLGTTTQTTSIDMWAFPSCHWSASTASGSSPTTT

SEQ ID NO: 21188 - protein, 239 aa, Homo sapiens
  Payload ID: 4270
  Gene Symbol: CDK10
  Gene Name: cyclin-dependent kinase 10
  ENSP ID: ENSP00000457055
MDKEKDGIPISSLREITLLLRLRHPNIVELKEVVVGNHLESIFLVMGYCEQDLASLLENMPTPFSEAQVKCIVLQVLRGLQYLHRNFIIHRDLKVSNLLMTDKGCVKTADFGLARAYGVPVKPMTPKVVTLWYRAPELLLGTTTQTTSIDMWVSKGLAAVRSSVPRAGGVSRRLAAVRSTVLCRAVGCILAELLAHRPLLPGTSEIHQIDLIVQLLGTPSENIWPGFSKLPLVGQYSLR

SEQ ID NO: 21189 - protein, 272 aa, Homo sapiens; identical to SEQ ID NO: 21183
  Payload ID: 4270
  Gene Symbol: CDK10
  Gene Name: cyclin-dependent kinase 10
  Uniprot ID: Q15131
  ENSP ID: ENSP00000484357

SEQ ID NO: 21190 - protein, 42 aa, Homo sapiens; identical to SEQ ID NO: 21186
  Payload ID: 4270
  Gene Symbol: CDK10
  Gene Name: cyclin-dependent kinase 10
  ENSP ID: ENSP00000486594

SEQ ID NO: 21191 - protein, 746 aa, Homo sapiens
  Payload ID: 4271
  Gene Symbol: CDK11A
  Gene Name: cyclin-dependent kinase 11A
  ENSP ID: ENSP00000348529
MSQSDDRDSKRDSLEEGELRDHCMEITIRNSPYRREDSMEDRGEEDDSLAIKPPQQMSRKEKVHHRKDEKRKEKCRHHSHSAEGGKHARVKEREHERRKRHREEQDKARREWERQKRREMAREHSRRERDRLEQLERKRERERKMREQQKEQREQKERERRAEERRKEREARREVSAHHRTMREDYSDKVKASHWSRSPPRPPRERFELGDGRKPVKEEKMEERDLLSDLQDISDSERKTSSAESSSAESGSGSEEEEEEEEEEEEEGSTSEESEEEEEEEEEEEEETGSNSEEASEQSAEEVSEEEMSEDEERENENHLLVVPESRFDRDSGESEEAEEEVGEGTPQSSALTEGDYVPDSPALLPIELKQELPKYLPALQGCRSVEEFQCLNRIEEGTYGVVYRAKDKKTDEIVALKRLKMEKEKEGFPITSLREINTILKAQHPNIVTVREIVVGSNMDKIYIVMNYVEHDLKSLMETMKQPFLPGEVKTLMIQLLRGVKHLHDNWILHRDLKTSNLLLSHAGILKVGDFGLAREYGSPLKAYTPVVVTQWYRAPELLLGAKEYSTAVDMWSVGCIFGELLTQKPLFPGNSEIDQINKVFKELGTPSEKIWPGYSELPVVKKMTFSEHPYNNLRKRFGALLSDQGFDLMNKFLTYFPGRRISAEDGLKHEYFRETPLPIDPSMFPTWPAKSEQQRVKRGTSPRPPEGGLGYSQLGDDDLKETGFHLTTTNQGASAAGPGFSLKF

SEQ ID NO: 21192 - protein, 779 aa, Homo sapiens
  Payload ID: 4271
  Gene Symbol: CDK11A
  Gene Name: cyclin-dependent kinase 11A
  ENSP ID: ENSP00000350403
MGDEKDSWKVKTLDEILQEKKRRKEQEEKAEIKRLKNSDDRDSKRDSLEEGELRDHCMEITIRNSPYRREDSMEDRGEEDDSLAIKPPQQMSRKEKVHHRKDEKRKEKWKHARVKEREHERRKRHREEQDKARREWERQKRREMAREHSRRERGNDGVCLFRDRLEQLERKRERERKMREQQKEQREQKERERRAEERRKEREARREVSAHHRTMREDYSDKVKASHWSRSPPRPPRERFELGDGRKPVKEEKMEERDLLSDLQDISDSERKTSSAESSSAESGSGSEEEEEEEEEEEEEGSTSEESEEEEEEEEEEEEETGSNSEEASEQSAEEVSEEEMSEDEERENENHLLVVPESRFDRDSGESEEAEEEVGEGTPQSSALTEGDYVPDSPALLPIELKQELPKYLPALQGCRSVEEFQCLNRIEEGTYGVVYRAKDKKTDEIVALKRLKMEKEKEGFPITSLREINTILKAQHPNIVTVREIVVGSNMDKIYIVMNYVEHDLKSLMETMKQPFLPGEVKTLMIQLLRGVKHLHDNWILHRDLKTSNLLLSHAGILKVGDFGLAREYGSPLKAYTPVVVTQWYRAPELLLGAKEYSTAVDMWSVGCIFGELLTQKPLFPGNSEIDQINKVFKELGTPSEKIWPGYSELPVVKKMTFSEHPYNNLRKRFGALLSDQGFDLMNKFLTYFPGRRISAEDGLKHEYFRETPLPIDPSMFPTWPAKSEQQRVKRGTSPRPPEGGLGYSQLGDDDLKETGFHLTTTNQGASAAGPGFSLKF

SEQ ID NO: 21193 - protein, 770 aa, Homo sapiens
  Payload ID: 4271
  Gene Symbol: CDK11A
  Gene Name: cyclin-dependent kinase 11A
  Uniprot ID: Q9UQ88
  ENSP ID: ENSP00000351629
MGDEKDSWKVKTLDEILQEKKRRKEQEEKAEIKRLKNSDDRDSKRDSLEEGELRDHCMEITIRNSPYRREDSMEDRGEEDDSLAIKPPQQMSRKEKVHHRKDEKRKEKWKHARVKEREHERRKRHREEQDKARREWERQKRREMAREHSRRERDRLEQLERKRERERKMREQQKEQREQKERERRAEERRKEREARREVSAHHRTMREDYSDKVKASHWSRSPPRPPRERFELGDGRKPVKEEKMEERDLLSDLQDISDSERKTSSAESSSAESGSGSEEEEEEEEEEEEEGSTSEESEEEEEEEEEEEEETGSNSEEASEQSAEEVSEEEMSEDEERENENHLLVVPESRFDRDSGESEEAEEEVGEGTPQSSALTEGDYVPDSPALLPIELKQELPKYLPALQGCRSVEEFQCLNRIEEGTYGVVYRAKDKKTDEIVALKRLKMEKEKEGFPITSLREINTILKAQHPNIVTVREIVVGSNMDKIYIVMNYVEHDLKSLMETMKQPFLPGEVKTLMIQLLRGVKHLHDNWILHRDLKTSNLLLSHAGILKVGDFGLAREYGSPLKAYTPVVVTQWYRAPELLLGAKEYSTAVDMWSVGCIFGELLTQKPLFPGNSEIDQINKVFKELGTPSEKIWPGYSELPVVKKMTFSEHPYNNLRKRFGALLSDQGFDLMNKFLTYFPGRRISAEDGLKHEYFRETPLPIDPSMFPTWPAKSEQQRVKRGTSPRPPEGGLGYSQLGDDDLKETGFHLTTTNQGASAAGPGFSLKF

SEQ ID NO: 21194 - protein, 783 aa, Homo sapiens
  Payload ID: 4271
  Gene Symbol: CDK11A
  Gene Name: cyclin-dependent kinase 11A
  Uniprot ID: Q9UQ88
  ENSP ID: ENSP00000367900
MGDEKDSWKVKTLDEILQEKKRRKEQEEKAEIKRLKNSDDRDSKRDSLEEGELRDHCMEITIRNSPYRREDSMEDRGEEDDSLAIKPPQQMSRKEKVHHRKDEKRKEKWKHARVKEREHERRKRHREEQDKARREWERQKRREMAREHSRRERDRLEQLERKRERERKMREQQKEQREQKERERRAEERRKEREARREVSAHHRTMREDYSDKVKASHWSRSPPRPPRERFELGDGRKPGEARPAPAQKPAQLKEEKMEERDLLSDLQDISDSERKTSSAESSSAESGSGSEEEEEEEEEEEEEGSTSEESEEEEEEEEEEEEETGSNSEEASEQSAEEVSEEEMSEDEERENENHLLVVPESRFDRDSGESEEAEEEVGEGTPQSSALTEGDYVPDSPALLPIELKQELPKYLPALQGCRSVEEFQCLNRIEEGTYGVVYRAKDKKTDEIVALKRLKMEKEKEGFPITSLREINTILKAQHPNIVTVREIVVGSNMDKIYIVMNYVEHDLKSLMETMKQPFLPGEVKTLMIQLLRGVKHLHDNWILHRDLKTSNLLLSHAGILKVGDFGLAREYGSPLKAYTPVVVTQWYRAPELLLGAKEYSTAVDMWSVGCIFGELLTQKPLFPGNSEIDQINKVFKELGTPSEKIWPGYSELPVVKKMTFSEHPYNNLRKRFGALLSDQGFDLMNKFLTYFPGRRISAEDGLKHEYFRETPLPIDPSMFPTWPAKSEQQRVKRGTSPRPPEGGLGYSQLGDDDLKETGFHLTTTNQGASAAGPGFSLKF

SEQ ID NO: 21195 - protein, 746 aa, Homo sapiens; identical to SEQ ID NO: 21191
  Payload ID: 4271
  Gene Symbol: CDK11A
  Gene Name: cyclin-dependent kinase 11A
  ENSP ID: ENSP00000367905

SEQ ID NO: 21196 - protein, 37 aa, Homo sapiens
  Payload ID: 4271
  Gene Symbol: CDK11A
  Gene Name: cyclin-dependent kinase 11A
  ENSP ID: ENSP00000383874
MGDEKDSWKVKTLDEILQEKKRRKEQEEKAEIKRLKN

SEQ ID NO: 21197 - protein, 780 aa, Homo sapiens
  Payload ID: 4271
  Gene Symbol: CDK11A
  Gene Name: cyclin-dependent kinase 11A
  Uniprot ID: Q9UQ88
  ENSP ID: ENSP00000384442
MGDEKDSWKVKTLDEILQEKKRRKEQEEKAEIKRLKNSDDRDSKRDSLEEGELRDHCMEITIRNSPYRREDSMEDRGEEDDSLAIKPPQQMSRKEKVHHRKDEKRKEKCRHHSHSAEGGKHARVKEREHERRKRHREEQDKARREWERQKRREMAREHSRRERDRLEQLERKRERERKMREQQKEQREQKERERRAEERRKEREARREVSAHHRTMREDYSDKVKASHWSRSPPRPPRERFELGDGRKPVKEEKMEERDLLSDLQDISDSERKTSSAESSSAESGSGSEEEEEEEEEEEEEGSTSEESEEEEEEEEEEEEETGSNSEEASEQSAEEVSEEEMSEDEERENENHLLVVPESRFDRDSGESEEAEEEVGEGTPQSSALTEGDYVPDSPALLPIELKQELPKYLPALQGCRSVEEFQCLNRIEEGTYGVVYRAKDKKTDEIVALKRLKMEKEKEGFPITSLREINTILKAQHPNIVTVREIVVGSNMDKIYIVMNYVEHDLKSLMETMKQPFLPGEVKTLMIQLLRGVKHLHDNWILHRDLKTSNLLLSHAGILKVGDFGLAREYGSPLKAYTPVVVTQWYRAPELLLGAKEYSTAVDMWSVGCIFGELLTQKPLFPGNSEIDQINKVFKELGTPSEKIWPGYSELPVVKKMTFSEHPYNNLRKRFGALLSDQGFDLMNKFLTYFPGRRISAEDGLKHEYFRETPLPIDPSMFPTWPAKSEQQRVKRGTSPRPPEGGLGYSQLGDDDLKETGFHLTTTNQGASAAGPGFSLKF

SEQ ID NO: 21198 - protein, 420 aa, Homo sapiens
  Payload ID: 4271
  Gene Symbol: CDK11A
  Gene Name: cyclin-dependent kinase 11A
  ENSP ID: ENSP00000422149
MGDEKDSWKVKTLDEILQEKKRRKEQEEKAEIKRLKNSDDRDSKRDSLEEGELRDHCMEITIRNSPYRREDSMEDRGEEDDSLAIKPPQQMSRKEKVHHRKDEKRKEKCRHHSHSAEGGKHARVKEREHERRKRHREEQDKARREWERQKRREMAREHSRRERDRLEQLERKRERERKMREQQKEQREQKERERRAEERRKEREARREVSAHHRTMREDYSDKVKASHWSRSPPRPPRERFELGDGRKPGEARPAPAQKPAQLKEEKMEERDLLSDLQDISDSERKTSSAESSSAESGSGSEEEEEEEEEEEEEGSTSEESEEEEEEEEEEEEETGSNSEEASEQSAEEVSEEEMSEDEERENENHLLVVPESRFDRDSGESEEAEEEVGLPERRGVPVPEQDRGGHLWSGLQSKRQENR

SEQ ID NO: 21199 - protein, 151 aa, Homo sapiens
  Payload ID: 4271
  Gene Symbol: CDK11A
  Gene Name: cyclin-dependent kinase 11A
  ENSP ID: ENSP00000423900
MGDEKDSWKVKTLDEILQEKKRRKEQEEKAEIKRLKNSDDRDSKRDSLEEGELRDHCMEITIRNSPYRREDSMEDRGEEDDSLAIKPPQQMSRKEKVHHRKDEKRKEKWKHARVKEREHERRKRHREEQDKARREWERQKRREMAREHSRR

SEQ ID NO: 21200 - protein, 407 aa, Homo sapiens
  Payload ID: 4271
  Gene Symbol: CDK11A
  Gene Name: cyclin-dependent kinase 11A
  ENSP ID: ENSP00000462289
MGDEKDSWKVKTLDEILQEKKRRKEQEEKAEIKRLKNSDDRDSKRDSLEEGELRDHCMEITIRNSPYRREDSMEDRGEEDDSLAIKPPQQMSRKEKVHHRKDEKRKEKCRHHSHSAEGGKHARVKEREHERRKRHREEQDKARREWERQKRREMAREHSRRERDRLEQLERKRERERKMREQQKEQREQKERERRAEERRKEREARREVSAHHRTMREDYSDKVKASHWSRSPPRPPRERFELGDGRKPVKEEKMEERDLLSDLQDISDSERKTSSAESSSAESGSGSEEEEEEEEEEEEEGSTSEESEEEEEEEEEEEEETGSNSEEASEQSAEEVSEEEMSEDEERENENHLLVVPESRFDRDSGESEEAEEEVGLPERRGVPVPEQDRGGHLWSGLQSKRQENR

SEQ ID NO: 21201 - protein, 782 aa, Homo sapiens
  Payload ID: 4272
  Gene Symbol: CDK11B
  Gene Name: cyclin-dependent kinase 11B
  ENSP ID: ENSP00000463048
MGDEKDSWKVKTLDEILQEKKRRKEQEEKAEIKRLKNSDDRDSKRDSLEEGELRDHRMEITIRNSPYRREDSMEDRGEEDDSLAIKPPQQMSRKEKAHHRKDEKRKEKRRHRSHSAEGGKHARVKEKEREHERRKRHREEQDKARREWERQKRREMAREHSRRERDRLEQLERKRERERKMREQQKEQREQKERERRAEERRKEREARREVSAHHRTMREDYSDKVKASHWSRSPPRPPRERFELGDGRKPVKEEKMEERDLLSDLQDISDSERKTSSAESSSAESGSGSEEEEEEEEEEEEEGSTSEESEEEEEEEEEEEEETGSNSEEASEQSAEEVSEEEMSEDEERENENHLLVVPESRFDRDSGESEEAEEEVGEGTPQSSALTEGDYVPDSPALSPIELKQELPKYLPALQGCRSVEEFQCLNRIEEGTYGVVYRAKDKKTDEIVALKRLKMEKEKEGFPITSLREINTILKAQHPNIVTVREIVVGSNMDKIYIVMNYVEHDLKSLMETMKQPFLPGEVKTLMIQLLRGVKHLHDNWILHRDLKTSNLLLSHAGILKVGDFGLAREYGSPLKAYTPVVVTLWYRAPELLLGAKEYSTAVDMWSVGCIFGELLTQKPLFPGKSEIDQINKVFKDLGTPSEKIWPGYSELPAVKKMTFSEHPYNNLRKRFGALLSDQGFDLMNKFLTYFPGRRISAEDGLKHEYFRETPLPIDPSMFPTWPAKSEQQRVKRGTSPRPPEGGLGYSQLGDDDLKETGFHLTTTNQGASAAGPGFSLKF

SEQ ID NO: 21202 - protein, 748 aa, Homo sapiens
  Payload ID: 4272
  Gene Symbol: CDK11B
  Gene Name: cyclin-dependent kinase 11B
  ENSP ID: ENSP00000464016
MSQSDDRDSKRDSLEEGELRDHRMEITIRNSPYRREDSMEDRGEEDDSLAIKPPQQMSRKEKAHHRKDEKRKEKRRHRSHSAEGGKHARVKEKEREHERRKRHREEQDKARREWERQKRREMAREHSRRERDRLEQLERKRERERKMREQQKEQREQKERERRAEERRKEREARREVSAHHRTMREDYSDKVKASHWSRSPPRPPRERFELGDGRKPVKEEKMEERDLLSDLQDISDSERKTSSAESSSAESGSGSEEEEEEEEEEEEEGSTSEESEEEEEEEEEEEEETGSNSEEASEQSAEEVSEEEMSEDEERENENHLLVVPESRFDRDSGESEEAEEEVGEGTPQSSALTEGDYVPDSPALSPIELKQELPKYLPALQGCRSVEEFQCLNRIEEGTYGVVYRAKDKKTDEIVALKRLKMEKEKEGFPITSLREINTILKAQHPNIVTVREIVVGSNMDKIYIVMNYVEHDLKSLMETMKQPFLPGEVKTLMIQLLRGVKHLHDNWILHRDLKTSNLLLSHAGILKVGDFGLAREYGSPLKAYTPVVVTLWYRAPELLLGAKEYSTAVDMWSVGCIFGELLTQKPLFPGKSEIDQINKVFKDLGTPSEKIWPGYSELPAVKKMTFSEHPYNNLRKRFGALLSDQGFDLMNKFLTYFPGRRISAEDGLKHEYFRETPLPIDPSMFPTWPAKSEQQRVKRGTSPRPPEGGLGYSQLGDDDLKETGFHLTTTNQGASAAGPGFSLKF

SEQ ID NO: 21203 - protein, 795 aa, Homo sapiens
  Payload ID: 4272
  Gene Symbol: CDK11B
  Gene Name: cyclin-dependent kinase 11B
  ENSP ID: ENSP00000464036
MGDEKDSWKVKTLDEILQEKKRRKEQEEKAEIKRLKNSDDRDSKRDSLEEGELRDHRMEITIRNSPYRREDSMEDRGEEDDSLAIKPPQQMSRKEKAHHRKDEKRKEKRRHRSHSAEGGKHARVKEKEREHERRKRHREEQDKARREWERQKRREMAREHSRRERDRLEQLERKRERERKMREQQKEQREQKERERRAEERRKEREARREVSAHHRTMREDYSDKVKASHWSRSPPRPPRERFELGDGRKPGEARPAPAQKPAQLKEEKMEERDLLSDLQDISDSERKTSSAESSSAESGSGSEEEEEEEEEEEEEGSTSEESEEEEEEEEEEEEETGSNSEEASEQSAEEVSEEEMSEDEERENENHLLVVPESRFDRDSGESEEAEEEVGEGTPQSSALTEGDYVPDSPALSPIELKQELPKYLPALQGCRSVEEFQCLNRIEEGTYGVVYRAKDKKTDEIVALKRLKMEKEKEGFPITSLREINTILKAQHPNIVTVREIVVGSNMDKIYIVMNYVEHDLKSLMETMKQPFLPGEVKTLMIQLLRGVKHLHDNWILHRDLKTSNLLLSHAGILKVGDFGLAREYGSPLKAYTPVVVTLWYRAPELLLGAKEYSTAVDMWSVGCIFGELLTQKPLFPGKSEIDQINKVFKDLGTPSEKIWPGYSELPAVKKMTFSEHPYNNLRKRFGALLSDQGFDLMNKFLTYFPGRRISAEDGLKHEYFRETPLPIDPSMFPTWPAKSEQQRVKRGTSPRPPEGGLGYSQLGDDDLKETGFHLTTTNQGASAAGPGFSLKF

SEQ ID NO: 21204 - protein, 203 aa, Homo sapiens
  Payload ID: 4272
  Gene Symbol: CDK11B
  Gene Name: cyclin-dependent kinase 11B
  ENSP ID: ENSP00000481846
MGDEKDSWKVKTLDEILQEKKRRKEQEEKAEIKRLKNSDDRDSKRDSLEEGELRDHRMEITIRNSPYRREDSMEDRGEEDDSLAIKPPQQMSRKEKAHHRKDEKRKEKRRHRSHSAEGGKHARVKEKEREHERRKRHREEQDKARREWERQKRREMAREHSRRESKRRENGRKGPAVRLTGHQRQREEDQLGRVLVSGIRLRF

SEQ ID NO: 21205 - protein, 244 aa, Homo sapiens
  Payload ID: 4272
  Gene Symbol: CDK11B
  Gene Name: cyclin-dependent kinase 11B
  ENSP ID: ENSP00000484222
MGDEKDSWKVKTLDEILQEKKRRKEQEEKAEIKRLKNSDDRDSKRDSLEEGELRDHRMEITIRNSPYRREDSMEDRGEEDDSLAIKPPQQMSRKEKAHHRKDEKRKEKRRHRSHSAEGGKHARVKEKEREHERRKRHREEQDKARREWERQKRREMAREHSRRESVCTSPNDERGLQRQSESQPLESQPASAAAGAVRVGRRPEASKRRENGRKGPAVRLTGHQRQREEDQLGRVLVSGIRLRF

SEQ ID NO: 21206 - protein, 772 aa, Homo sapiens
  Payload ID: 4272
  Gene Symbol: CDK11B
  Gene Name: cyclin-dependent kinase 11B
  ENSP ID: ENSP00000485705
MGDEKDSWKVKTLDEILQEKKRRKEQEEKAEIKRLKNSDDRDSKRDSLEEGELRDHRMEITIRNSPYRREDSMEDRTGKDAALGDKPRPCLKKKLETRRSKDFTARNRPIQQEDTAMIRHFEKRRQADHEVRRLRPSWLTCKLLFRGNDGVCLFRDRLEQLERKRERERKMREQQKEQREQKERERRAEERRKEREARREVSAHHRTMREDYSDKVKASHWSRSPPRPPRERFELGDGRKPVKEEKMEERDLLSDLQDISDSERKTSSAESSSAESGSGSEEEEEEEEEEEEEGSTSEESEEEEEEEEEEEEETGSNSEEASEQSAEEVSEEEMSEDEERENENHLLVVPESRFDRDSGESEEAEEEVGEGTPQSSALTEGDYVPDSPALSPIELKQELPKYLPALQGCRSVEEFQCLNRIEEGTYGVVYRAKDKKTDEIVALKRLKMEKEKEGFPITSLREINTILKAQHPNIVTVREIVVGSNMDKIYIVMNYVEHDLKSLMETMKQPFLPGEVKTLMIQLLRGVKHLHDNWILHRDLKTSNLLLSHAGILKVGDFGLAREYGSPLKAYTPVVVTLWYRAPELLLGAKEYSTAVDMWSVGCIFGELLTQKPLFPGKSEIDQINKVFKDLGTPSEKIWPGYSELPAVKKMTFSEHPYNNLRKRFGALLSDQGFDLMNKFLTYFPGRRISAEDGLKHEYFRETPLPIDPSMFPTWPAKSEQQRVKRGTSPRPPEGGLGYSQLGDDDLKETGFHLTTTNQGASAAGPGFSLKF

SEQ ID NO: 21207 - protein, 785 aa, Homo sapiens
  Payload ID: 4272
  Gene Symbol: CDK11B
  Gene Name: cyclin-dependent kinase 11B
  ENSP ID: ENSP00000485849
MGDEKDSWKVKTLDEILQEKKRRKEQEEKAEIKRLKNSDDRDSKRDSLEEGELRDHRMEITIRNSPYRREDSMEDRNQPGQHGETLSLQKSPGLGDKPRPCLKKKLETRRSKDFTARNRPIQQEDTAMIRHFEKRRQADHEAEAGESLEPGRRSKLLFRGNDGVCLFRDRLEQLERKRERERKMREQQKEQREQKERERRAEERRKEREARREVSAHHRTMREDYSDKVKASHWSRSPPRPPRERFELGDGRKPVKEEKMEERDLLSDLQDISDSERKTSSAESSSAESGSGSEEEEEEEEEEEEEGSTSEESEEEEEEEEEEEEETGSNSEEASEQSAEEVSEEEMSEDEERENENHLLVVPESRFDRDSGESEEAEEEVGEGTPQSSALTEGDYVPDSPALSPIELKQELPKYLPALQGCRSVEEFQCLNRIEEGTYGVVYRAKDKKTDEIVALKRLKMEKEKEGFPITSLREINTILKAQHPNIVTVREIVVGSNMDKIYIVMNYVEHDLKSLMETMKQPFLPGEVKTLMIQLLRGVKHLHDNWILHRDLKTSNLLLSHAGILKVGDFGLAREYGSPLKAYTPVVVTLWYRAPELLLGAKEYSTAVDMWSVGCIFGELLTQKPLFPGKSEIDQINKVFKDLGTPSEKIWPGYSELPAVKKMTFSEHPYNNLRKRFGALLSDQGFDLMNKFLTYFPGRRISAEDGLKHEYFRETPLPIDPSMFPTWPAKSEQQRVKRGTSPRPPEGGLGYSQLGDDDLKETGFHLTTTNQGASAAGPGFSLKF

SEQ ID NO: 21208 - protein, 783 aa, Homo sapiens
  Payload ID: 4272
  Gene Symbol: CDK11B
  Gene Name: cyclin-dependent kinase 11B
  ENSP ID: ENSP00000485937
MGDEKDSWKVKTLDEILQEKKRRKEQEEKAEIKRLKNSDDRDSKRDSLEEGELRDHRMEITIRNSPYRREDSMEDRKTRSNCMLSAREQEKTQRTNISSTREAQTLSQKKARNKKEQGLHSQKQANTAGRYSNDTSTREAEAGESLEPGRRSKLLFRGNDGVCLFRDRLEQLERKRERERKMREQQKEQREQKERERRAEERRKEREARREVSAHHRTMREDYSDKVKASHWSRSPPRPPRERFELGDGRKPVKEEKMEERDLLSDLQDISDSERKTSSAESSSAESGSGSEEEEEEEEEEEEEGSTSEESEEEEEEEEEEEEETGSNSEEASEQSAEEVSEEEMSEDEERENENHLLVVPESRFDRDSGESEEAEEEVGEGTPQSSALTEGDYVPDSPALSPIELKQELPKYLPALQGCRSVEEFQCLNRIEEGTYGVVYRAKDKKTDEIVALKRLKMEKEKEGFPITSLREINTILKAQHPNIVTVREIVVGSNMDKIYIVMNYVEHDLKSLMETMKQPFLPGEVKTLMIQLLRGVKHLHDNWILHRDLKTSNLLLSHAGILKVGDFGLAREYGSPLKAYTPVVVTLWYRAPELLLGAKEYSTAVDMWSVGCIFGELLTQKPLFPGKSEIDQINKVFKDLGTPSEKIWPGYSELPAVKKMTFSEHPYNNLRKRFGALLSDQGFDLMNKFLTYFPGRRISAEDGLKHEYFRETPLPIDPSMFPTWPAKSEQQRVKRGTSPRPPEGGLGYSQLGDDDLKETGFHLTTTNQGASAAGPGFSLKF

SEQ ID NO: 21209 - protein, 1490 aa, Homo sapiens
  Payload ID: 4273
  Gene Symbol: CDK12
  Gene Name: cyclin-dependent kinase 12
  Uniprot ID: Q9NYV4
  ENSP ID: ENSP00000398880
MPNSERHGGKKDGSGGASGTLQPSSGGGSSNSRERHRLVSKHKRHKSKHSKDMGLVTPEAASLGTVIKPLVEYDDISSDSDTFSDDMAFKLDRRENDERRGSDRSDRLHKHRHHQHRRSRDLLKAKQTEKEKSQEVSSKSGSMKDRISGSSKRSNEETDDYGKAQVAKSSSKESRSSKLHKEKTRKERELKSGHKDRSKSHRKRETPKSYKTVDSPKRRSRSPHRKWSDSSKQDDSPSGASYGQDYDLSPSRSHTSSNYDSYKKSPGSTSRRQSVSPPYKEPSAYQSSTRSPSPYSRRQRSVSPYSRRRSSSYERSGSYSGRSPSPYGRRRSSSPFLSKRSLSRSPLPSRKSMKSRSRSPAYSRHSSSHSKKKRSSSRSRHSSISPVRLPLNSSLGAELSRKKKERAAAAAAAKMDGKESKGSPVFLPRKENSSVEAKDSGLESKKLPRSVKLEKSAPDTELVNVTHLNTEVKNSSDTGKVKLDENSEKHLVKDLKAQGTRDSKPIALKEEIVTPKETETSEKETPPPLPTIASPPPPLPTTTPPPQTPPLPPLPPIPALPQQPPLPPSQPAFSQVPASSTSTLPPSTHSKTSAVSSQANSQPPVQVSVKTQVSVTAAIPHLKTSTLPPLPLPPLLPGDDDMDSPKETLPSKPVKKEKEQRTRHLLTDLPLPPELPGGDLSPPDSPEPKAITPPQQPYKKRPKICCPRYGERRQTESDWGKRCVDKFDIIGIIGEGTYGQVYKAKDKDTGELVALKKVRLDNEKEGFPITAIREIKILRQLIHRSVVNMKEIVTDKQDALDFKKDKGAFYLVFEYMDHDLMGLLESGLVHFSEDHIKSFMKQLMEGLEYCHKKNFLHRDIKCSNILLNNSGQIKLADFGLARLYNSEESRPYTNKVITLWYRPPELLLGEERYTPAIDVWSCGCILGELFTKKPIFQANLELAQLELISRLCGSPCPAVWPDVIKLPYFNTMKPKKQYRRRLREEFSFIPSAALDLLDHMLTLDPSKRCTAEQTLQSDFLKDVELSKMAPPDLPHWQDCHELWSKKRRRQRQSGVVVEEPPPSKTSRKETTSGTSTEPVKNSSPAPPQPAPGKVESGAGDAIGLADITQQLNQSELAVLLNLLQSQTDLSIPQMAQLLNIHSNPEMQQQLEALNQSISALTEATSQQQDSETMAPEESLKEAPSAPVILPSAEQTTLEASSTPADMQNILAVLLSQLMKTQEPAGSLEENNSDKNSGPQGPRRTPTMPQEEAAACPPHILPPEKRPPEPPGPPPPPPPPPLVEGDLSSAPQELNPAVTAALLQLLSQPEAEPPGHLPHEHQALRPMEYSTRPRPNRTYGNTDGPETGFSAIDTDERNSGPALTESLVQTLVKNRTFSGSLSHLGESSSYQGTGSVQFPGDQDLRFARVPLALHPVVGQPFLKAEGSSNSVVHAETKLQNYGELGPGTTGASSSGAGLHWGGPTQSSAYGKLYRGPTRVPPRGGRGRGVPY

SEQ ID NO: 21210 - protein, 1481 aa, Homo sapiens
  Payload ID: 4273
  Gene Symbol: CDK12
  Gene Name: cyclin-dependent kinase 12
  Uniprot ID: Q9NYV4
  ENSP ID: ENSP00000407720
MPNSERHGGKKDGSGGASGTLQPSSGGGSSNSRERHRLVSKHKRHKSKHSKDMGLVTPEAASLGTVIKPLVEYDDISSDSDTFSDDMAFKLDRRENDERRGSDRSDRLHKHRHHQHRRSRDLLKAKQTEKEKSQEVSSKSGSMKDRISGSSKRSNEETDDYGKAQVAKSSSKESRSSKLHKEKTRKERELKSGHKDRSKSHRKRETPKSYKTVDSPKRRSRSPHRKWSDSSKQDDSPSGASYGQDYDLSPSRSHTSSNYDSYKKSPGSTSRRQSVSPPYKEPSAYQSSTRSPSPYSRRQRSVSPYSRRRSSSYERSGSYSGRSPSPYGRRRSSSPFLSKRSLSRSPLPSRKSMKSRSRSPAYSRHSSSHSKKKRSSSRSRHSSISPVRLPLNSSLGAELSRKKKERAAAAAAAKMDGKESKGSPVFLPRKENSSVEAKDSGLESKKLPRSVKLEKSAPDTELVNVTHLNTEVKNSSDTGKVKLDENSEKHLVKDLKAQGTRDSKPIALKEEIVTPKETETSEKETPPPLPTIASPPPPLPTTTPPPQTPPLPPLPPIPALPQQPPLPPSQPAFSQVPASSTSTLPPSTHSKTSAVSSQANSQPPVQVSVKTQVSVTAAIPHLKTSTLPPLPLPPLLPGDDDMDSPKETLPSKPVKKEKEQRTRHLLTDLPLPPELPGGDLSPPDSPEPKAITPPQQPYKKRPKICCPRYGERRQTESDWGKRCVDKFDIIGIIGEGTYGQVYKAKDKDTGELVALKKVRLDNEKEGFPITAIREIKILRQLIHRSVVNMKEIVTDKQDALDFKKDKGAFYLVFEYMDHDLMGLLESGLVHFSEDHIKSFMKQLMEGLEYCHKKNFLHRDIKCSNILLNNSGQIKLADFGLARLYNSEESRPYTNKVITLWYRPPELLLGEERYTPAIDVWSCGCILGELFTKKPIFQANLELAQLELISRLCGSPCPAVWPDVIKLPYFNTMKPKKQYRRRLREEFSFIPSAALDLLDHMLTLDPSKRCTAEQTLQSDFLKDVELSKMAPPDLPHWQDCHELWSKKRRRQRQSGVVVEEPPPSKTSRKETTSGTSTEPVKNSSPAPPQPAPGKVESGAGDAIGLADITQQLNQSELAVLLNLLQSQTDLSIPQMAQLLNIHSNPEMQQQLEALNQSISALTEATSQQQDSETMAPEESLKEAPSAPVILPSAEQTTLEASSTPADMQNILAVLLSQLMKTQEPAGSLEENNSDKNSGPQGPRRTPTMPQEEAAEKRPPEPPGPPPPPPPPPLVEGDLSSAPQELNPAVTAALLQLLSQPEAEPPGHLPHEHQALRPMEYSTRPRPNRTYGNTDGPETGFSAIDTDERNSGPALTESLVQTLVKNRTFSGSLSHLGESSSYQGTGSVQFPGDQDLRFARVPLALHPVVGQPFLKAEGSSNSVVHAETKLQNYGELGPGTTGASSSGAGLHWGGPTQSSAYGKLYRGPTRVPPRGGRGRGVPY

SEQ ID NO: 21211 - protein, 159 aa, Homo sapiens
  Payload ID: 4273
  Gene Symbol: CDK12
  Gene Name: cyclin-dependent kinase 12
  ENSP ID: ENSP00000453329
  MOD_RES (1)..(1): Any amino acid
XADITQQLNQSELAVLLNLLQSQTDLSIPQMAQLLNIHSNPEMQQQLEALNQSISALTEATSQQQDSETMAPEESLKEAPSAPVILPSAEQTTLEASSTPADMQNILAVLLSQLMKTQEPAGSLEENNSDKNSGPQGPRRTPTMPQEEAAGRSNGGNAL

SEQ ID NO: 21212 - protein, 1201 aa, Homo sapiens
  Payload ID: 4273
  Gene Symbol: CDK12
  Gene Name: cyclin-dependent kinase 12
  ENSP ID: ENSP00000464641
MPNSERHGGKKDGSGGASGTLQPSSGGGSSNSRERHRLVSKHKRHKSKHSKDMGLVTPEAASLGTVIKPLVEYDDISSDSDTFSDDMAFKLDRRENDERRGSDRSDRLHKHRHHQHRRSRDLLKAKQTEKEKSQEVSSKSGSMKDRISGSSKRSNEETDDYGKAQVAKSSSKESRSSKLHKEKTRKERELKSGHKDRSKSHRKRETPKSYKTVDSPKRRSRSPHRKWSDSSKQDDSPSGASYGQDYDLSPSRSHTSSNYDSYKKSPGSTSRRQSVSPPYKEPSAYQSSTRSPSPYSRRQRSVSPYSRRRSSSYERSGSYSGRSPSPYGRRRSSSPFLSKRSLSRSPLPRKSMKSRSRSPAYSRHSSSHSKKKRSSSRSRHSSISPVRLPLNSSLGAELSRKKKERAAAAAAAKMDGKESKGSPVFLPRKENSSVEAKDSGLESKKLPRSVKLEKSAPDTELVNVTHLNTEVKNSSDTGKVKLDENSEKHLVKDLKAQGTRDSKPIALKEEIVTPKETETSEKETPPPLPTIASPPPPLPTTTPPPQTPPLPPLPPIPALPQQPPLPPSQPAFSQVPASSTSTLPPSTHSKTSAVSSQANSQPPVQVSVKTQVSVTAAIPHLKTSTLPPLPLPPLLPGDDDMDSPKETLPSKPVKKEKEQRTRHLLTDLPLPPELPGGDLSPPDSPEPKAITPPQQPYKKRPKICCPRYGERRQTESDWGKRCVDKFDIIGIIGEGTYGQVYKAKDKDTGELVALKKVRLDNEKEGFPITAIREIKILRQLIHRSVVNMKEIVTDKQDALDFKKDKGAFYLVFEYMDHDLMGLLESGLVHFSEDHIKSFMKQLMEGLEYCHKKNFLHRDIKCSNILLNNSGQIKLADFGLARLYNSEESRPYTNKVITLWYRPPELLLGEERYTPAIDVWSCGCILGELFTKKPIFQANLELAQLELISRLCGSPCPAVWPDVIKLPYFNTMKPKKQYRRRLREEFSFIPSAALDLLDHMLTLDPSKRCTAEQTLQSDFLKDVELSKMAPPDLPHWQDCHELWSKKRRRQRQSGVVVEEPPPSKTSRKETTSGTSTEPVKNSSPAPPQPAPGKVESGAGDAIGLADITQQLNQSELAVLLNLLQSQTDLSIPQMAQLLNIHSNPEMQQQLEALNQSISALTEATSQQQDSETMAPEESLKEAPSAPVILPSAEQTTLEASST

SEQ ID NO: 21213 - protein, 1512 aa, Homo sapiens
  Payload ID: 4274
  Gene Symbol: CDK13
  Gene Name: cyclin-dependent kinase 13
  Uniprot ID: Q14004
  ENSP ID: ENSP00000181839
MPSSSDTALGGGGGLSWAEKKLEERRKRRRFLSPQQPPLLLPLLQPQLLQPPPPPPPLLFLAAPGTAAAAAAAAAASSSCFSPGPPLEVKRLARGKRRAGGRQKRRRGPRAGQEAEKRRVFSLPQPQQDGGGGASSGGGVTPLVEYEDVSSQSEQGLLLGGASAATAATAAGGTGGSGGSPASSSGTQRRGEGSERRPRRDRRSSSGRSKERHREHRRRDGQRGGSEASKSRSRHSHSGEERAEVAKSGSSSSSGGRRKSASATSSSSSSRKDRDSKAHRSRTKSSKEPPSAYKEPPKAYREDKTEPKAYRRRRSLSPLGGRDDSPVSHRASQSLRSRKSPSPAGGGSSPYSRRLPRSPSPYSRRRSPSYSRHSSYERGGDVSPSPYSSSSWRRSRSPYSPVLRRSGKSRSRSPYSSRHSRSRSRHRLSRSRSRHSSISPSTLTLKSSLAAELNKNKKARAAEAARAAEAAKAAEATKAAEAAAKAAKASNTSTPTKGNTETSASASQTNHVKDVKKIKIEHAPSPSSGGTLKNDKAKTKPPLQVTKVENNLIVDKATKKAVIVGKESKSAATKEESVSLKEKTKPLTPSIGAKEKEQHVALVTSTLPPLPLPPMLPEDKEADSLRGNISVKAVKKEVEKKLRCLLADLPLPPELPGGDDLSKSPEEKKTATQLHSKRRPKICGPRYGETKEKDIDWGKRCVDKFDIIGIIGEGTYGQVYKARDKDTGEMVALKKVRLDNEKEGFPITAIREIKILRQLTHQSIINMKEIVTDKEDALDFKKDKGAFYLVFEYMDHDLMGLLESGLVHFNENHIKSFMRQLMEGLDYCHKKNFLHRDIKCSNILLNNRGQIKLADFGLARLYSSEESRPYTNKVITLWYRPPELLLGEERYTPAIDVWSCGCILGELFTKKPIFQANQELAQLELISRICGSPCPAVWPDVIKLPYFNTMKPKKQYRRKLREEFVFIPAAALDLFDYMLALDPSKRCTAEQALQCEFLRDVEPSKMPPPDLPLWQDCHELWSKKRRRQKQMGMTDDVSTIKAPRKDLSLGLDDSRTNTPQGVLPSSQLKSQGSSNVAPVKTGPGQHLNHSELAILLNLLQSKTSVNMADFVQVLNIKVNSETQQQLNKINLPAGILATGEKQTDPSTPQQESSKPLGGIQPSSQTIQPKVETDAAQAAVQSAFAVLLTQLIKAQQSKQKDVLLEERENGSGHEASLQLRPPPEPSTPVSGQDDLIQHQDMRILELTPEPDRPRILPPDQRPPEPPEPPPVTEEDLDYRTENQHVPTTSSSLTDPHAGVKAALLQLLAQHQPQDDPKREGGIDYQAGDTYVSTSDYKDNFGSSSFSSAPYVSNDGLGSSSAPPLERRSFIGNSDIQSLDNYSTASSHSGGPPQPSAFSESFPSSVAGYGDIYLNAGPMLFSGDKDHRFEYSHGPIAVLANSSDPSTGPESTHPLPAKMHNYNYGGNLQENPSGPSLMHGQTWTSPAQGPGYSQGYRGHISTSTGRGRGRGLPY

SEQ ID NO: 21214 - protein, 1452 aa, Homo sapiens
  Payload ID: 4274
  Gene Symbol: CDK13
  Gene Name: cyclin-dependent kinase 13
  Uniprot ID: Q14004
  ENSP ID: ENSP00000340557
MPSSSDTALGGGGGLSWAEKKLEERRKRRRFLSPQQPPLLLPLLQPQLLQPPPPPPPLLFLAAPGTAAAAAAAAAASSSCFSPGPPLEVKRLARGKRRAGGRQKRRRGPRAGQEAEKRRVFSLPQPQQDGGGGASSGGGVTPLVEYEDVSSQSEQGLLLGGASAATAATAAGGTGGSGGSPASSSGTQRRGEGSERRPRRDRRSSSGRSKERHREHRRRDGQRGGSEASKSRSRHSHSGEERAEVAKSGSSSSSGGRRKSASATSSSSSSRKDRDSKAHRSRTKSSKEPPSAYKEPPKAYREDKTEPKAYRRRRSLSPLGGRDDSPVSHRASQSLRSRKSPSPAGGGSSPYSRRLPRSPSPYSRRRSPSYSRHSSYERGGDVSPSPYSSSSWRRSRSPYSPVLRRSGKSRSRSPYSSRHSRSRSRHRLSRSRSRHSSISPSTLTLKSSLAAELNKNKKARAAEAARAAEAAKAAEATKAAEAAAKAAKASNTSTPTKGNTETSASASQTNHVKDVKKIKIEHAPSPSSGGTLKNDKAKTKPPLQVTKVENNLIVDKATKKAVIVGKESKSAATKEESVSLKEKTKPLTPSIGAKEKEQHVALVTSTLPPLPLPPMLPEDKEADSLRGNISVKAVKKEVEKKLRCLLADLPLPPELPGGDDLSKSPEEKKTATQLHSKRRPKICGPRYGETKEKDIDWGKRCVDKFDIIGIIGEGTYGQVYKARDKDTGEMVALKKVRLDNEKEGFPITAIREIKILRQLTHQSIINMKEIVTDKEDALDFKKDKGAFYLVFEYMDHDLMGLLESGLVHFNENHIKSFMRQLMEGLDYCHKKNFLHRDIKCSNILLNNRGQIKLADFGLARLYSSEESRPYTNKVITLWYRPPELLLGEERYTPAIDVWSCGCILGELFTKKPIFQANQELAQLELISRICGSPCPAVWPDVIKLPYFNTMKPKKQYRRKLREEFVFIPAAALDLFDYMLALDPSKRCTAEQALQCEFLRDVEPSKMPPPDLPLWQDCHELWSKKRRRQKQMGMTDDVSTIKAPRKDLSLGLDDSRTNTPQGVLPSSQLKSQGSSNVAPGEKQTDPSTPQQESSKPLGGIQPSSQTIQPKVETDAAQAAVQSAFAVLLTQLIKAQQSKQKDVLLEERENGSGHEASLQLRPPPEPSTPVSGQDDLIQHQDMRILELTPEPDRPRILPPDQRPPEPPEPPPVTEEDLDYRTENQHVPTTSSSLTDPHAGVKAALLQLLAQHQPQDDPKREGGIDYQAGDTYVSTSDYKDNFGSSSFSSAPYVSNDGLGSSSAPPLERRSFIGNSDIQSLDNYSTASSHSGGPPQPSAFSESFPSSVAGYGDIYLNAGPMLFSGDKDHRFEYSHGPIAVLANSSDPSTGPESTHPLPAKMHNYNYGGNLQENPSGPSLMHGQTWTSPAQGPGYSQGYRGHISTSTGRGRGRGLPY

SEQ ID NO: 21215 - protein, 324 aa, Homo sapiens
  Payload ID: 4274
  Gene Symbol: CDK13
  Gene Name: cyclin-dependent kinase 13
  ENSP ID: ENSP00000480835
MLPEDKEADSLRGNISVKAVKKEVEKKLRCLLADLPLPPELPGGDDLSKSPEEKKTATQLHSKRRPKICGPRYGETKEKDIDWGKRCVDKFDIIGIIGEGTYGQVYKARDKDTGEMVALKKVRLDNEKEGFPITAIREIKILRQLTHQSIINMKEIVTDKEDALDFKKDKGAFYLVFEYMDHDLMGLLESGLVHFNENHIKSFMRQLMEGLDYCHKKNFLHRDIKCSNILLNNRGQIKLADFGLARLYSSEESRPYTNKVITLWYRPPELLLGEERYTPAIDVWSCGCILGELFTKKPIFQANQELAQLELIRHEENEVSDKQI

SEQ ID NO: 21216 - protein, 418 aa, Homo sapiens
  Payload ID: 4274
  Gene Symbol: CDK13
  Gene Name: cyclin-dependent kinase 13
  ENSP ID: ENSP00000484610
MLPEDKEADSLRGNISVKAVKKEVEKKLRCLLADLPLPPELPGGDDLSKSPEEKKTATQLHSKRRPKICGPRYGETKEKDIDWGKRCVDKFDIIGIIGEGTYGQVYKARDKDTGEMVALKKVRLDNEKEGFPITAIREIKILRQLTHQSIINMKEIVTDKEDALDFKKDKGAFYLVFEYMDHDLMGLLESGLVHFNENHIKSFMRQLMEGLDYCHKKNFLHRDIKCSNILLNNRGQIKLADFGLARLYSSEESRPYTNKVITLWYRPPELLLGEERYTPAIDVWSCGCILGELFTKKPIFQANQELAQLELISRICGSPCPAVWPDVIKLPYFNTMKPKKQYRRKLREEFVFIPAAALDLFDYMLALDPSKRCTAEQALQCEFLRDVEPSKCLHQISLYGKIVMSYGVKSEEDRSRWA

SEQ ID NO: 21217 - protein, 451 aa, Homo sapiens
  Payload ID: 4275
  Gene Symbol: CDK14
  Gene Name: cyclin-dependent kinase 14
  Uniprot ID: O94921
  ENSP ID: ENSP00000265741
MHGYFGCNAAAEPGYSAFVGTPQICVTKMSTRNCQGMDSVIKPLDTIPEDKKVRVQRTQSTFDPFEKPANQVKRVHSENNACINFKTSSTGKESPKVRRHSSPSSPTSPKFGKADSYEKLEKLGEGSYATVYKGKSKVNGKLVALKVIRLQEEEGTPFTAIREASLLKGLKHANIVLLHDIIHTKETLTLVFEYVHTDLCQYMDKHPGGLHPDNVKLFLFQLLRGLSYIHQRYILHRDLKPQNLLISDTGELKLADFGLARAKSVPSHTYSNEVVTLWYRPPDVLLGSTEYSTCLDMWGVGCIFVEMIQGVAAFPGMKDIQDQLERIFLVLGTPNEDTWPGVHSLPHFKPERFTLYSSKNLRQAWNKLSYVNHAEDLASKLLQCSPKNRLSAQAALSHEYFSDLPPRLWELTDMSSIFTVPNVRLQPEAGESMRAFGKNNSYGKSLSNSKH

SEQ ID NO: 21218 - protein, 469 aa, Homo sapiens
  Payload ID: 4275
  Gene Symbol: CDK14
  Gene Name: cyclin-dependent kinase 14
  Uniprot ID: O94921
  ENSP ID: ENSP00000369390
MCDLIEPQPAEKIGKMKKLRRTLSESFSRIALKKDDTTFDEICVTKMSTRNCQGMDSVIKPLDTIPEDKKVRVQRTQSTFDPFEKPANQVKRVHSENNACINFKTSSTGKESPKVRRHSSPSSPTSPKFGKADSYEKLEKLGEGSYATVYKGKSKVNGKLVALKVIRLQEEEGTPFTAIREASLLKGLKHANIVLLHDIIHTKETLTLVFEYVHTDLCQYMDKHPGGLHPDNVKLFLFQLLRGLSYIHQRYILHRDLKPQNLLISDTGELKLADFGLARAKSVPSHTYSNEVVTLWYRPPDVLLGSTEYSTCLDMWGVGCIFVEMIQGVAAFPGMKDIQDQLERIFLVLGTPNEDTWPGVHSLPHFKPERFTLYSSKNLRQAWNKLSYVNHAEDLASKLLQCSPKNRLSAQAALSHEYFSDLPPRLWELTDMSSIFTVPNVRLQPEAGESMRAFGKNNSYGKSLSNSKH

SEQ ID NO: 21219 - protein, 423 aa, Homo sapiens
  Payload ID: 4275
  Gene Symbol: CDK14
  Gene Name: cyclin-dependent kinase 14
  Uniprot ID: O94921
  ENSP ID: ENSP00000385034
MSTRNCQGMDSVIKPLDTIPEDKKVRVQRTQSTFDPFEKPANQVKRVHSENNACINFKTSSTGKESPKVRRHSSPSSPTSPKFGKADSYEKLEKLGEGSYATVYKGKSKVNGKLVALKVIRLQEEEGTPFTAIREASLLKGLKHANIVLLHDIIHTKETLTLVFEYVHTDLCQYMDKHPGGLHPDNVKLFLFQLLRGLSYIHQRYILHRDLKPQNLLISDTGELKLADFGLARAKSVPSHTYSNEVVTLWYRPPDVLLGSTEYSTCLDMWGVGCIFVEMIQGVAAFPGMKDIQDQLERIFLVLGTPNEDTWPGVHSLPHFKPERFTLYSSKNLRQAWNKLSYVNHAEDLASKLLQCSPKNRLSAQAALSHEYFSDLPPRLWELTDMSSIFTVPNVRLQPEAGESMRAFGKNNSYGKSLSNSKH

SEQ ID NO: 21220 - protein, 113 aa, Homo sapiens
  Payload ID: 4275
  Gene Symbol: CDK14
  Gene Name: cyclin-dependent kinase 14
  ENSP ID: ENSP00000387794
MSTRNCQGMDSVIKPLDTIPEDKKVRVQRTQSTFDPFEKPANQVKRVHSENNACINFKTSSTGKESPKVRRHSSPSSGKWEVGSSEGDQAAGRRRDTFHSYQGSFSFKRTKTC

SEQ ID NO: 21221 - protein, 127 aa, Homo sapiens
  Payload ID: 4275
  Gene Symbol: CDK14
  Gene Name: cyclin-dependent kinase 14
  ENSP ID: ENSP00000393616
MSTRNCQGMDSVIKPLDTIPEDKKVRVQRTQSTFDPFEKPANQVKRVHSENNACINFKTSSTGKESPKVRRHSSPSSPTSPKFGKADSYEKLEKLGEGSYATVYKGKSKVNGKLVALKVIRLQEEEG

SEQ ID NO: 21222 - protein, 127 aa, Homo sapiens; identical to SEQ ID NO: 21221
  Payload ID: 4275
  Gene Symbol: CDK14
  Gene Name: cyclin-dependent kinase 14
  ENSP ID: ENSP00000394570

SEQ ID NO: 21223 - protein, 340 aa, Homo sapiens
  Payload ID: 4275
  Gene Symbol: CDK14
  Gene Name: cyclin-dependent kinase 14
  ENSP ID: ENSP00000398936
MLALTLRPPPLAKSHLKLGGTPAPARVNGKLVALKVIRLQEEEGTPFTAIREASLLKGLKHANIVLLHDIIHTKETLTLVFEYVHTDLCQYMDKHPGGLHPDNVKLFLFQLLRGLSYIHQRYILHRDLKPQNLLISDTGELKLADFGLARAKSVPSHTYSNEVVTLWYRPPDVLLGSTEYSTCLDMWGVGCIFVEMIQGVAAFPGMKDIQDQLERIFLVLGTPNEDTWPGVHSLPHFKPERFTLYSSKNLRQAWNKLSYVNHAEDLASKLLQCSPKNRLSAQAALSHEYFSDLPPRLWELTDMSSIFTVPNVRLQPEAGESMRAFGKNNSYGKSLSNSKH

SEQ ID NO: 21224 - protein, 92 aa, Homo sapiens
  Payload ID: 4275
  Gene Symbol: CDK14
  Gene Name: cyclin-dependent kinase 14
  ENSP ID: ENSP00000401603
MSTRNCQGMDSVIKPLDTIPEDKKVRVQRTQSTFDPFEKPANQVKRVHSENNACINFKTSSTGKESPKVRRHSSPSSPTSPKFGKADSYEKL

SEQ ID NO: 21225 - protein, 127 aa, Homo sapiens; identical to SEQ ID NO: 21221
  Payload ID: 4275
  Gene Symbol: CDK14
  Gene Name: cyclin-dependent kinase 14
  ENSP ID: ENSP00000406848

SEQ ID NO: 21226 - protein, 127 aa, Homo sapiens; identical to SEQ ID NO: 21221
  Payload ID: 4275
  Gene Symbol: CDK14
  Gene Name: cyclin-dependent kinase 14
  ENSP ID: ENSP00000410770

SEQ ID NO: 21227 - protein, 384 aa, Homo sapiens
  Payload ID: 4276
  Gene Symbol: CDK15
  Gene Name: cyclin-dependent kinase 15
  Uniprot ID: Q96Q40
  ENSP ID: ENSP00000260967
MTSFHPRGLQAARAQKFKSKRPRSNSDCFQEEDLRQGFQWRKSLPFGAASSYLNLEKLGEGSYATVYKGISRINGQLVALKVISMNAEEGVPFTAIREASLLKGLKHANIVLLHDIIHTKETLTFVFEYMHTDLAQYMSQHPGGLHPHNVRLFMFQLLRGLAYIHHQHVLHRDLKPQNLLISHLGELKLADFGLARAKSIPSQTYSSEVVTLWYRPPDALLGATEYSSELDIWGAGCIFIEMFQGQPLFPGVSNILEQLEKIWEVLGVPTEDTWPGVSKLPNYNPEWFPLPTPRSLHVVWNRLGRVPEAEDLASQMLKGFPRDRVSAQEALVHDYFSALPSQLYQLPDEESLFTVSGVRLKPEMCDLLASYQKGHHPAQFSKCW

SEQ ID NO: 21228 - protein, 384 aa, Homo sapiens; identical to SEQ ID NO: 21227
  Payload ID: 4276
  Gene Symbol: CDK15
  Gene Name: cyclin-dependent kinase 15
  Uniprot ID: Q96Q40
  ENSP ID: ENSP00000386901

SEQ ID NO: 21229 - protein, 54 aa, Homo sapiens
  Payload ID: 4276
  Gene Symbol: CDK15
  Gene Name: cyclin-dependent kinase 15
  ENSP ID: ENSP00000389831
MTSFHPRGLQAARAQKFKSKRPRSNSDCFQEEDLRQGFQWSRGRASLLGQPHLT

SEQ ID NO: 21230 - protein, 429 aa, Homo sapiens
  Payload ID: 4276
  Gene Symbol: CDK15
  Gene Name: cyclin-dependent kinase 15
  Uniprot ID: Q96Q40
  ENSP ID: ENSP00000406472
MGQELCAKTVQPGCSCYHCSEGGEAHSCRRSQPETTEAAFKLTDLKEASCSMTSFHPRGLQAARAQKFKSKRPRSNSDCFQEEDLRQGFQWRKSLPFGAASSYLNLEKLGEGSYATVYKGISRINGQLVALKVISMNAEEGVPFTAIREASLLKGLKHANIVLLHDIIHTKETLTFVFEYMHTDLAQYMSQHPGGLHPHNVRLFMFQLLRGLAYIHHQHVLHRDLKPQNLLISHLGELKLADFGLARAKSIPSQTYSSEVVTLWYRPPDALLGATEYSSELDIWGAGCIFIEMFQGQPLFPGVSNILEQLEKIWEVLGVPTEDTWPGVSKLPNYNPEWFPLPTPRSLHVVWNRLGRVPEAEDLASQMLKGFPRDRVSAQEALVHDYFSALPSQLYQLPDVSGVRLKPEMCDLLASYQKGHHPAQFSKCW

SEQ ID NO: 21231 - protein, 400 aa, Homo sapiens
  Payload ID: 4276
  Gene Symbol: CDK15
  Gene Name: cyclin-dependent kinase 15
  Uniprot ID: Q96Q40
  ENSP ID: ENSP00000412775
MGQELCAKTVQPGCSCYHCSEGGEAHSCRRSQPETTEAAFKLTDLKEASCSMTSFHPRGLQAARAQKFKSKRPRSNSDCFQEEDLRQGFQWRKSLPFGAASSYLNLEKLGEGSYATVYKGISRINGQLVALKVISMNAEEGVPFTAIREASLLKGLKHANIVLLHDIIHTKETLTFVFEYMHTDLAQYMSQHPGGLHPHNVRLFMFQLLRGLAYIHHQHVLHRDLKPQNLLISHLGELKLADFGLARAKSIPSQTYSSEVVTLWYRPPDALLGATEYSSELDIWGAGCIFIEMFQGQPLFPGVSNILEQLEKIWEVLGVPTEDTWPGVSKLPNYNPEWFPLPTPRSLHVVWNRLGRVPEAEDLASQMLKGFPRDRVSAQEALVHDYFSALPSQLYQLPDE

SEQ ID NO: 21232 - protein, 570 aa, Homo sapiens
  Payload ID: 4277
  Gene Symbol: CDK16
  Gene Name: cyclin-dependent kinase 16
  Uniprot ID: Q00536
  ENSP ID: ENSP00000276052
MPLYGRARDHVTHPSILGTRPGRPMAGPITAAVPEKICNGAFCSCSGAFPLDPNNPSLGPLPSISHLNLRTQIAMDRMKKIKRQLSMTLRGGRGIDKTNGAPEQIGLDESGGGGGSDPGEAPTRAAPGELRSARGPLSSAPEIVHEDLKMGSDGESDQASATSSDEVQSPVRVRMRNHPPRKISTEDINKRLSLPADIRLPEGYLEKLTLNSPIFDKPLSRRLRRVSLSEIGFGKLETYIKLDKLGEGTYATVYKGKSKLTDNLVALKEIRLEHEEGAPCTAIREVSLLKDLKHANIVTLHDIIHTEKSLTLVFEYLDKDLKQYLDDCGNIINMHNVKLFLFQLLRGLAYCHRQKVLHRDLKPQNLLINERGELKLADFGLARAKSIPTKTYSNEVVTLWYRPPDILLGSTDYSTQIDMWGVGCIFYEMATGRPLFPGSTVEEQLHFIFRILGTPTEETWPGILSNEEFKTYNYPKYRAEALLSHAPRLDSDGADLLTKLLQFEGRNRISAEDAMKHPFFLSLGERIHKLPDTTSIFALKEIQLQKEASLRSSSMPDSGRPAFRVVDTEF

SEQ ID NO: 21233 - protein, 496 aa, Homo sapiens [sequence omitted]

SEQ ID NO: 21234 - protein, 502 aa, Homo sapiens
  Payload ID: 4277
  Gene Symbol: CDK16
  Gene Name: cyclin-dependent kinase 16
  Uniprot ID: Q00536
  ENSP ID: ENSP00000405798
MQSEIAMDRMKKIKRQLSMTLRGGRGIDKTNGAPEQIGLDESGGGGGSDPGEAPTRAAPGELRSARGPLSSAPEIVHEDLKMGSDGESDQASATSSDEVQSPVRVRMRNHPPRKISTEDINKRLSLPADIRLPEGYLEKLTLNSPIFDKPLSRRLRRVSLSEIGFGKLETYIKLDKLGEGTYATVYKGKSKLTDNLVALKEIRLEHEEGAPCTAIREVSLLKDLKHANIVTLHDIIHTEKSLTLVFEYLDKDLKQYLDDCGNIINMHNVKLFLFQLLRGLAYCHRQKVLHRDLKPQNLLINERGELKLADFGLARAKSIPTKTYSNEVVTLWYRPPDILLGSTDYSTQIDMWGVGCIFYEMATGRPLFPGSTVEEQLHFIFRILGTPTEETWPGILSNEEFKTYNYPKYRAEALLSHAPRLDSDGADLLTKLLQFEGRNRISAEDAMKHPFFLSLGERIHKLPDTTSIFALKEIQLQKEASLRSSSMPDSGRPAFRVVDTEF

SEQ ID NO: 21235 - protein, 260 aa, Homo sapiens
  Payload ID: 4277
  Gene Symbol: CDK16
  Gene Name: cyclin-dependent kinase 16
  ENSP ID: ENSP00000428349
DKDLKQYLDDCGNIINMHNVKLFLFQLLRGLAYCHRQKVLHRDLKPQNLLINERGELKLADFGLARAKSIPTKTYSNEVVTLWYRPPDILLGSTDYSTQIDMWGVGCIFYEMATGRPLFPGSTVEEQLHFIFRILGTPTEETWPGILSNEEFKTYNYPKYRAEALLSHAPRSLCPCGRLDSDGADLLTKLLQFEGRNRISAEDAMKHPFFLSLGERIHKLPDTTSIFALKEIQLQKEASLRSSSMPDSGRPAFRVVDTEF

SEQ ID NO: 21236 - protein, 153 aa, Homo sapiens
  Payload ID: 4277
  Gene Symbol: CDK16
  Gene Name: cyclin-dependent kinase 16
  ENSP ID: ENSP00000428351
MDRMKKIKRQLSMTLRGGRGIDKTNGAPEQIGLDESGGGGGSDPGEAPTRAAPGELRSARGPLSSAPEIVHEDLKMGSDGESDQASATSSDEVQSPVRVRMRNHPPRKISTEDINKRLSLPADIRLPEGYLEKLTLNSPIFDKPLSRRLRRVS

SEQ ID NO: 21237 - protein, 189 aa, Homo sapiens
  Payload ID: 4277
  Gene Symbol: CDK16
  Gene Name: cyclin-dependent kinase 16
  ENSP ID: ENSP00000429044
MDRMKKIKRQLSMTLRGGRGIDKTNGAPEQIGLDESGGGGGSDPGEAPTRAAPGELRSARGPLSSAPEIVHEDLKMGSDGESDQASATSSDEVQSPVRVRMRNHPPRKISTEDINKRLSLPADIRLPEGYLEKLTLNSPIFDKPLSRRLRRVSLSEIGFGKLETYIKLDKLGEGTYATVYKGKSKLTDN

SEQ ID NO: 21238 - protein, 150 aa, Homo sapiens
  Payload ID: 4277
  Gene Symbol: CDK16
  Gene Name: cyclin-dependent kinase 16
  ENSP ID: ENSP00000429259
MDRMKKIKRQLSMTLRGGRGIDKTNGAPEQIGLDESGGGGGSDPGEAPTRAAPGELRSARGPLSSAPEIVHEDLKMGSDGESDQASATSSDEVQSPVRVRMRNHPPRKISTEDINKRLSLPADIRLPEGYLEKLTLNSPIFDKPLSRRLR

SEQ ID NO: 21239 - protein, 496 aa, Homo sapiens [sequence omitted]

SEQ ID NO: 21240 - protein, 393 aa, Homo sapiens
  Payload ID: 4277
  Gene Symbol: CDK16
  Gene Name: cyclin-dependent kinase 16
  ENSP ID: ENSP00000429985
MDRMKKIKRQLSMTLRGGRGIDKTNGAPEQIGLDESGGGGGSDPGEAPTRAAPGELRSARGPLSSAPEIVHEDLKMGSDGESDQASATSSDEVQSPVRVRMRNHPPRKISTEDINKRLSLPADIRLPEGYLEKLTLNSPIFDKPLSRRLRRVSLSEIGFGKLETYIKLDKLGEGTYATVYKGKSKLTDNLVALKEIRLEHEEGAPCTAIREVSLLKDLKHANIVTLHDIIHTEKSLTLVFEYLDKDLKQYLDDCGNIINMHNVKLFLFQLLRGLAYCHRQKVLHRDLKPQNLLINERGELKLADFGLARAKSIPTKTYSNEVVTLWYRPPDILLGSTDYSTQIDMWGVGCIFYEMATGRPLFPGSTVEEQLHFIFRILVFCAMKPCSQPFRDR

SEQ ID NO: 21241 - protein, 152 aa, Homo sapiens
  Payload ID: 4277
  Gene Symbol: CDK16
  Gene Name: cyclin-dependent kinase 16
  ENSP ID: ENSP00000430486
  MOD_RES (1)..(1): Any amino acid
XPEQIGLDESGGGGGSDPGEAPTRAAPGELRSARGPLSSAPEIVHEDLKMGSDGESDQASATSSDEVQSPVRDINKRLSLPADIRLPEGYLEKLTLNSPIFDKPLSRRLRRVSLSEIGFGKLETYIKLDKLGEGTYATVYKGKSKLTDNLVA

SEQ ID NO: 21242 - protein, 84 aa, Homo sapiens
  Payload ID: 4277
  Gene Symbol: CDK16
  Gene Name: cyclin-dependent kinase 16
  ENSP ID: ENSP00000430824
  MOD_RES (1)..(1): Any amino acid
XLDSDGADLLTKLLQFEGRNRISAEDAMKHPFFLSLGERIHKLPDTTSIFALKEIQLQKEASLRSSSMPDSVAGGQHGRASLPH

SEQ ID NO: 21243 - protein, 83 aa, Homo sapiens
  Payload ID: 4277
  Gene Symbol: CDK16
  Gene Name: cyclin-dependent kinase 16
  ENSP ID: ENSP00000430966
MQSEIAMDRMKKIKRQLSMTLRGGRGIDKTNGAPEQIGLDESGGGGGSDPGEAPTRAAPGELRSARGPLSSAPDCARGLEDGV

SEQ ID NO: 21244 - protein, 166 aa, Homo sapiens
  Payload ID: 4277
  Gene Symbol: CDK16
  Gene Name: cyclin-dependent kinase 16
  ENSP ID: ENSP00000430988
  MOD_RES (1)..(1): Any amino acid
XLDSDGADLLTKLLQFEGRNRISAEDAMKHPFFLSLGERIHKLPDTTSIFALKEIQLQKEASLRSSSMPDSAICSAFPHRQASFPRGGHRVLSHRPRPQQAAAGGMPHPSQGSPQLHLPCLLSAYLPEPCSPAHLSPAACPNTPPLACQPTHWPVCWVLTKLSSLL

SEQ ID NO: 21245 - protein, 57 aa, Homo sapiens
  Payload ID: 4277
  Gene Symbol: CDK16
  Gene Name: cyclin-dependent kinase 16
  ENSP ID: ENSP00000431085
MDRMKKIKRQLSMTLRGGRGIDKTNGAPEQIGLDESGGGGGSDPGEAPTRAAPGELR

SEQ ID NO: 21246 - protein, 448 aa, Homo sapiens
  Payload ID: 4277
  Gene Symbol: CDK16
  Gene Name: cyclin-dependent kinase 16
  ENSP ID: ENSP00000482886
MDRMKKIKRQLSMTLRSAPEIVHEDLKMGSDGESDQASATSSDEVQSPVRVRMRNHPPRKISTEDINKRLSLPADIRLPEGYLEKLTLNSPIFDKPLSRRLRRVSLSEIGFGKLETYIKLDKLGEGTYATVYKGKSKLTDNLVALKEIRLEHEEGAPCTAIREVSLLKDLKHANIVTLHDIIHTEKSLTLVFEYLDKDLKQYLDDCGNIINMHNVKLFLFQLLRGLAYCHRQKVLHRDLKPQNLLINERGELKLADFGLARAKSIPTKTYSNEVVTLWYRPPDILLGSTDYSTQIDMWGVGCIFYEMATGRPLFPGSTVEEQLHFIFRILGTPTEETWPGILSNEEFKTYNYPKYRAEALLSHAPRLDSDGADLLTKLLQFEGRNRISAEDAMKHPFFLSLGERIHKLPDTTSIFALKEIQLQKEASLRSSSMPDSGRPAFRVVDTEF

SEQ ID NO: 21247 - protein, 523 aa, Homo sapiens
  Payload ID: 4278
  Gene Symbol: CDK17
  Gene Name: cyclin-dependent kinase 17
  Uniprot ID: Q00537
  ENSP ID: ENSP00000261211
MKKFKRRLSLTLRGSQTIDESLSELAEQMTIEENSSKDNEPIVKNGRPPTSHSMHSFLHQYTGSFKKPPLRRPHSVIGGSLGSFMAMPRNGSRLDIVHENLKMGSDGESDQASGTSSDEVQSPTGVCLRNRIHRRISMEDLNKRLSLPADIRIPDGYLEKLQINSPPFDQPMSRRSRRASLSEIGFGKMETYIKLEKLGEGTYATVYKGRSKLTENLVALKEIRLEHEEGAPCTAIREVSLLKDLKHANIVTLHDIVHTDKSLTLVFEYLDKDLKQYMDDCGNIMSMHNVKLFLYQILRGLAYCHRRKVLHRDLKPQNLLINEKGELKLADFGLARAKSVPTKTYSNEVVTLWYRPPDVLLGSSEYSTQIDMWGVGCIFFEMASGRPLFPGSTVEDELHLIFRLLGTPSQETWPGISSNEEFKNYNFPKYKPQPLINHAPRLDSEGIELITKFLQYESKKRVSAEEAMKHVYFRSLGPRIHALPESVSIFSLKEIQLQKDPGFRNSSYPETGHGKNRRQSMLF

SEQ ID NO: 21248 - protein, 470 aa, Homo sapiens
  Payload ID: 4278
  Gene Symbol: CDK17
  Gene Name: cyclin-dependent kinase 17
  ENSP ID: ENSP00000442926
MHSFLHQYTGSFKKPPLRRPHSVIGGSLGSFMAMPRNGSRLDIVHENLKMGSDGESDQASGTSSDEVQSPTGVCLRNRIHRRISMEDLNKRLSLPADIRIPDGYLEKLQINSPPFDQPMSRRSRRASLSEIGFGKMETYIKLEKLGEGTYATVYKGRSKLTENLVALKEIRLEHEEGAPCTAIREVSLLKDLKHANIVTLHDIVHTDKSLTLVFEYLDKDLKQYMDDCGNIMSMHNVKLFLYQILRGLAYCHRRKVLHRDLKPQNLLINEKGELKLADFGLARAKSVPTKTYSNEVVTLWYRPPDVLLGSSEYSTQIDMWGVGCIFFEMASGRPLFPGSTVEDELHLIFRLLGTPSQETWPGISSNEEFKNYNFPKYKPQPLINHAPRLDSEGIELITKFLQYESKKRVSAEEAMKHVYFRSLGPRIHALPESVSIFSLKEIQLQKDPGFRNSSYPETGVFVINHFTCRS

SEQ ID NO: 21249 - protein, 523 aa, Homo sapiens
  Payload ID: 4278
  Gene Symbol: CDK17
  Gene Name: cyclin-dependent kinase 17
  Uniprot ID: Q00537
  ENSP ID: ENSP00000444459
MKKFKRRLSLTLRGSQTIDESLSELAEQMTIEENSSKDNEPIVKNGRPPTSHSMHSFLHQYTGSFKKPPLRRPHSVIGGSLGSFMAMPRNGSRLDIVHENLKMGSDGESDQASGTSSDEVQSPTGVCLRNRIHRRISMEDLNKRLSLPADIRIPDGYLEKLQINSPPFDQPMSRRSRRASLSEIGFGKMETYIKLEKLGEGTYATVYKGRSKLTENLVALKEIRLEHEEGAPCTAIREVSLLKDLKHANIVTLHDIVHTDKSLTLVFEYLDKDLKQYMDDCGNIMSMHNVKLFLYQILRGLAYCHRRKVLHRDLKPQNLLINEKGELKLADFGLARAKSVPTKTYSNEVVTLWYRPPDVLLGSSEYSTQIDMWGVGCIFFEMASGRPLFPGSTVEDELHLIFRLLGTPSQETWPGISSNEEFKNYNFPKYKPQPLINHAPRLDSEGIELITKFLQYESKKRVSAEEAMKHVYFRSLGPRIHALPESVSIFSLKEIQLQKDPGFRNSSYPETGVFVINHFTCRS

SEQ ID NO: 21250 - protein, 161 aa, Homo sapiens
  Payload ID: 4278
  Gene Symbol: CDK17
  Gene Name: cyclin-dependent kinase 17
  ENSP ID: ENSP00000447282
MKKFKRRLSLTLRGSQTIDESLSELAEQMTIEENSSKDNEPIVKNGRPPTSHSMHSFLHQYTGSFKKPPLRRPHSVIGGSLGSFMAMPRNGSRLDIVHENLKMGSDGESDQASGTSSDEVQSPTGVCLRNRIHRRISMEDLNKRLSLPADIRIPDGYLEKL

SEQ ID NO: 21251 - protein, 129 aa, Homo sapiens
  Payload ID: 4278
  Gene Symbol: CDK17
  Gene Name: cyclin-dependent kinase 17
  ENSP ID: ENSP00000447441
MMPNKYSIIRRFFKPHSIDRMKKFKRRLSLTLRGSQTIDESLSELAEQMTIEENSSKDNEPIVKNGRPPTSHSMHSFLHQYTGSFKKPPLRRPHSVIGGSLGSFMAMPRNGSRLDIVHENLKMGSDGES

SEQ ID NO: 21252 - protein, 88 aa, Homo sapiens
  Payload ID: 4278
  Gene Symbol: CDK17
  Gene Name: cyclin-dependent kinase 17
  ENSP ID: ENSP00000448132
MKKFKRRLSLTLRGSQTIDESLSELAEQMTIEENSSKDNEPIVKNGRPPTSHSMHSFLHQYTGSFKKPPLRRPHSVIGGSLGSFMAMP

SEQ ID NO: 21253 - protein, 179 aa, Homo sapiens
  Payload ID: 4278
  Gene Symbol: CDK17
  Gene Name: cyclin-dependent kinase 17
  ENSP ID: ENSP00000450058
MKKFKRRLSLTLRGSQTIDESLSELAEQMTIEENSSKDNEPIVKNGRPPTSHSMHSFLHQYTGSFKKPPLRRPHSVIGGSLGSFMAMPRNGSRLDIVHENLKMGSDGESDQASGTSSDEVQSPTGVCLRNRIHRRISMEDLNKRLSLPADIRIPDGYLEKLQINSPPFDQPMSRRSRRA

SEQ ID NO: 21254 - protein, 474 aa, Homo sapiens
  Payload ID: 4279
  Gene Symbol: CDK18
  Gene Name: cyclin-dependent kinase 18
  Uniprot ID: Q07002
  ENSP ID: ENSP00000353176
MIMNKMKNFKRRFSLSVPRTETIEESLAEFTEQFNQLHNRRNENLQLGPLGRDPPQECSTFSPTDSGEEPGQLSPGVQFQRRQNQRRFSMEDVSKRLSLPMDIRLPQEFLQKLQMESPDLPKPLSRMSRRASLSDIGFGKLETYVKLDKLGEGTYATVFKGRSKLTENLVALKEIRLEHEEGAPCTAIREVSLLKNLKHANIVTLHDLIHTDRSLTLVFEYLDSDLKQYLDHCGNLMSMHNVKIFMFQLLRGLAYCHHRKILHRDLKPQNLLINERGELKLADFGLARAKSVPTKTYSNEVVTLWYRPPDVLLGSTEYSTPIDMWGVGCIHYEMATGRPLFPGSTVKEELHLIFRLLGTPTEETWPGVTAFSEFRTYSFPCYLPQPLINHAPRLDTDGIHLLSSLLLYESKSRMSAEAALSHSYFRSLGERVHQLEDTASIFSLKEIQLQKDPGYRGLAFQQPGRGKNRRQSIF

SEQ ID NO: 21255 - protein, 283 aa, Homo sapiens
  Payload ID: 4279
  Gene Symbol: CDK18
  Gene Name: cyclin-dependent kinase 18
  ENSP ID: ENSP00000391324
MIMNKMKNFKRRFSLSVPRTETIEESLAEFTEQFNQLHNRRNENLQLGPLGRDPPQECSTFSPTDSGEEPGQLSPGVQFQRRQNQRRFSMEVRASGALPRQVAGCTHKGVHRRAAALQPDFDVSKRLSLPMDIRLPQEFLQKLQMESPDLPKPLSRMSRRASLSDIGFGKLETYVKLDKLGEGTYATVFKGRSKLTENLVALKEIRLEHEEGAPCTAIREVSLLKNLKHANIVTLHDLIHTDRSLTLVFEYLDSDLKQYLDHCGNLMSMHNVKIFMFQLLRGL

SEQ ID NO: 21256 - protein, 159 aa, Homo sapiens
  Payload ID: 4279
  Gene Symbol: CDK18
  Gene Name: cyclin-dependent kinase 18
  ENSP ID: ENSP00000397831
MIMNKMKNFKRRFSLSVPRTETIEESLAEFTEQFNQLHNRRNENSGEEPGQLSPGVQFQRRQNQRRFSMEVRASGALPRQVAGCTHKGVHRRAAALQPDFDVSKRLSLPMDIRLPQEFLQKLQMESPDLPKPLSRMSRRASLSDIGFGKLETYVKLDKL

SEQ ID NO: 21257 - protein, 474 aa, Homo sapiens; identical to SEQ ID NO: 21254
  Payload ID: 4279
  Gene Symbol: CDK18
  Gene Name: cyclin-dependent kinase 18
  Uniprot ID: Q07002
  ENSP ID: ENSP00000399082

SEQ ID NO: 21258 - protein, 72 aa, Homo sapiens [sequence omitted]

SEQ ID NO: 21259 - protein, 72 aa, Homo sapiens [sequence omitted]

SEQ ID NO: 21260 - protein, 180 aa, Homo sapiens
  Payload ID: 4279
  Gene Symbol: CDK18
  Gene Name: cyclin-dependent kinase 18
  ENSP ID: ENSP00000423408
MEDVSKRLSLPMDIRLPQEFLQKLQMESPDLPKPLSRMSRRASLSDIGFGKLETYVKLDKLGEGTYATVFKGRSKLTENLVALKEIRLEHEEGAPCTAIREVSLLKNLKHANIVTLHDLIHTDRSLTLVFEYLDSDLKQYLDHCGNLMSMHNVKIFMFQLLRGLAYCHHRKILHRDLKPQ

SEQ ID NO: 21261 - protein, 504 aa, Homo sapiens
  Payload ID: 4279
  Gene Symbol: CDK18
  Gene Name: cyclin-dependent kinase 18
  Uniprot ID: Q07002
  ENSP ID: ENSP00000423665
MIMNKMKNFKRRFSLSVPRTETIEESLAEFTEQFNQLHNRRNENLQLGPLGRDPPQECSTFSPTDSGEEPGQLSPGVQFQRRQNQRRFSMEVRASGALPRQVAGCTHKGVHRRAAALQPDFDVSKRLSLPMDIRLPQEFLQKLQMESPDLPKPLSRMSRRASLSDIGFGKLETYVKLDKLGEGTYATVFKGRSKLTENLVALKEIRLEHEEGAPCTAIREVSLLKNLKHANIVTLHDLIHTDRSLTLVFEYLDSDLKQYLDHCGNLMSMHNVKIFMFQLLRGLAYCHHRKILHRDLKPQNLLINERGELKLADFGLARAKSVPTKTYSNEVVTLWYRPPDVLLGSTEYSTPIDMWGVGCIHYEMATGRPLFPGSTVKEELHLIFRLLGTPTEETWPGVTAFSEFRTYSFPCYLPQPLINHAPRLDTDGIHLLSSLLLYESKSRMSAEAALSHSYFRSLGERVHQLEDTASIFSLKEIQLQKDPGYRGLAFQQPGRGKNRRQSIF

SEQ ID NO: 21262 - protein, 72 aa, Homo sapiens [sequence omitted]

SEQ ID NO: 21263 - protein, 72 aa, Homo sapiens [sequence omitted]

SEQ ID NO: 21264 - protein, 64 aa, Homo sapiens
  Payload ID: 4279
  Gene Symbol: CDK18
  Gene Name: cyclin-dependent kinase 18
  ENSP ID: ENSP00000426368
MEVRASGALPRQVAGCTHKGVHRRAAALQPDFDVSKRLSLPMDIRLPQEFLQKLQMESPDLPKP

SEQ ID NO: 21265 - protein, 442 aa, Homo sapiens
  Payload ID: 4280
  Gene Symbol: CDK19
  Gene Name: cyclin-dependent kinase 19
  Uniprot ID: Q9BWU1
  ENSP ID: ENSP00000317665
MSACREIALLRELKHPNVIALQKVFLSHSDRKVWLLFDYAEHDLWHIIKFHRASKANKKPMQLPRSMVKSLLYQILDGIHYLHANWVLHRDLKPANILVMGEGPERGRVKIADMGFARLFNSPLKPLADLDPVVVTFWYRAPELLLGARHYTKAIDIWAIGCIFAELLTSEPIFHCRQEDIKTSNPFHHDQLDRIFSVMGFPADKDWEDIRKMPEYPTLQKDFRRTTYANSSLIKYMEKHKVKPDSKVFLLLQKLLTMDPTKRITSEQALQDPYFQEDPLPTLDVFAGCQIPYPKREFLNEDDPEEKGDKNQQQQQNQHQQPTAPPQQAAAPPQAPPPQQNSTQTNGTAGGAGAGVGGTGAGLQHSQDSSLNQVPPNKKPRLGPSGANSGGPVMPSDYQHSSSRLNYQSSVQGSSQSQSTLGYSSSSQQSSQYHPSHQAHRY

SEQ ID NO: 21266 - protein, 502 aa, Homo sapiens
  Payload ID: 4280
  Gene Symbol: CDK19
  Gene Name: cyclin-dependent kinase 19
  Uniprot ID: Q9BWU1
  ENSP ID: ENSP00000357907
MDYDFKAKLAAERERVEDLFEYEGCKVGRGTYGHVYKARRKDGKDEKEYALKQIEGTGISMSACREIALLRELKHPNVIALQKVFLSHSDRKVWLLFDYAEHDLWHIIKFHRASKANKKPMQLPRSMVKSLLYQILDGIHYLHANWVLHRDLKPANILVMGEGPERGRVKIADMGFARLFNSPLKPLADLDPVVVTFWYRAPELLLGARHYTKAIDIWAIGCIFAELLTSEPIFHCRQEDIKTSNPFHHDQLDRIFSVMGFPADKDWEDIRKMPEYPTLQKDFRRTTYANSSLIKYMEKHKVKPDSKVFLLLQKLLTMDPTKRITSEQALQDPYFQEDPLPTLDVFAGCQIPYPKREFLNEDDPEEKGDKNQQQQQNQHQQPTAPPQQAAAPPQAPPPQQNSTQTNGTAGGAGAGVGGTGAGLQHSQDSSLNQVPPNKKPRLGPSGANSGGPVMPSDYQHSSSRLNYQSSVQGSSQSQSTLGYSSSSQQSSQYHPSHQAHRY

SEQ ID NO: 21267 - protein, 398 aa, Homo sapiens
  Payload ID: 4280
  Gene Symbol: CDK19
  Gene Name: cyclin-dependent kinase 19
  ENSP ID: ENSP00000410604
MSACREIALLRELKHPNVIALQKVFLSHSDRKVWLLFDYAEHDLWHIIKFHRASKANKKPMQLPRSMVKSLLYQILDGIHYLHANWVLHRDLKPANILVMGEGPERGRVKIDIWAIGCIFAELLTSEPIFHCRQEDIKTSNPFHHDQLDRIFSVMGFPADKDWEDIRKMPEYPTLQKDFRRTTYANSSLIKYMEKHKVKPDSKVFLLLQKLLTMDPTKRITSEQALQDPYFQEDPLPTLDVFAGCQIPYPKREFLNEDDPEEKGDKNQQQQQNQHQQPTAPPQQAAAPPQAPPPQQNSTQTNGTAGGAGAGVGGTGAGLQHSQDSSLNQVPPNKKPRLGPSGANSGGPVMPSDYQHSSSRLNYQSSVQGSSQSQSTLGYSSSSQQSSQYHPSHQAHRY

SEQ ID NO: 21268 - protein, 251 aa, Homo sapiens
  Payload ID: 4280
  Gene Symbol: CDK19
  Gene Name: cyclin-dependent kinase 19
  ENSP ID: ENSP00000415621
MSACREIALLRELKHPNVIALQKVFLSHSDRKVWLLFDYAEHDLWHIIKFHRASKANKKPMQLPRSMVKSLLYQILDGIHYLHANWVLHRDLKPANILVMGEGPERGRVKIADMGFARLFNSPLKPLADLDPVVVTFWYRAPELLLGARHYTKAIDIWAIGCIFAELLTSEPIFHCRQEDIKTSNPFHHDQLDRIFSVMGFPADKDWEDIRKMPEYPTLQKDFRRTTYANSSLIKYMEKHKVKPDSKVFLL

SEQ ID NO: 21269 - protein, 122 aa, Homo sapiens
  Payload ID: 4280
  Gene Symbol: CDK19
  Gene Name: cyclin-dependent kinase 19
  ENSP ID: ENSP00000434476
  MOD_RES (1)..(1): Any amino acid
XKDEKEYALKQIEGTGISMSACREIALLRELKHPNVIALQKVFLSHSDRKVWLLFDYAEHDLWHIIKFHRASKANKKPMQLPRSMVKSLLYQILDGIHYLHANWVLHRDLLTWVLPDYSILL

SEQ ID NO: 21270 - protein, 264 aa, Homo sapiens
  Payload ID: 4281
  Gene Symbol: CDK2
  Gene Name: cyclin-dependent kinase 2
  Uniprot ID: P24941
  ENSP ID: ENSP00000243067
MENFQKVEKIGEGTYGVVYKARNKLTGEVVALKKIRLDTETEGVPSTAIREISLLKELNHPNIVKLLDVIHTENKLYLVFEFLHQDLKKFMDASALTGIPLPLIKSYLFQLLQGLAFCHSHRVLHRDLKPQNLLINTEGAIKLADFGLARAFGVPVRTYTHEVTRRALFPGDSEIDQLFRIFRTLGTPDEVVWPGVTSMPDYKPSFPKWARQDFSKVVPPLDEDGRSLLSQMLHYDPNKRISAKAALAHPFFQDVTKPVPHLRL

SEQ ID NO: 21271 - protein, 298 aa, Homo sapiens
  Payload ID: 4281
  Gene Symbol: CDK2
  Gene Name: cyclin-dependent kinase 2
  Uniprot ID: P24941
  ENSP ID: ENSP00000266970
MENFQKVEKIGEGTYGVVYKARNKLTGEVVALKKIRLDTETEGVPSTAIREISLLKELNHPNIVKLLDVIHTENKLYLVFEFLHQDLKKFMDASALTGIPLPLIKSYLFQLLQGLAFCHSHRVLHRDLKPQNLLINTEGAIKLADFGLARAFGVPVRTYTHEVVTLWYRAPEILLGCKYYSTAVDIWSLGCIFAEMVTRRALFPGDSEIDQLFRIFRTLGTPDEVVWPGVTSMPDYKPSFPKWARQDFSKVVPPLDEDGRSLLSQMLHYDPNKRISAKAALAHPFFQDVTKPVPHLRL

SEQ ID NO: 21272 - protein, 238 aa, Homo sapiens
  Payload ID: 4281
  Gene Symbol: CDK2
  Gene Name: cyclin-dependent kinase 2
  ENSP ID: ENSP00000393605
MENFQKVEKIGEGTYGVVYKARNKLTGEVVALKKIRLDTLLDVIHTENKLYLVFEFLHQDLKKFMDASALTGIPLPLIKSYLFQLLQGLAFCHSHRVLHRDLKPQNLLINTEGAIKLADFGLARAFGVPVRTYTHEVTRRALFPGDSEIDQLFRIFRTLGTPDEVVWPGVTSMPDYKPSFPKWARQDFSKVVPPLDEDGRSLLSQMLHYDPNKRISAKAALAHPFFQDVTKPVPHLRL

SEQ ID NO: 21273 - protein, 39 aa, Homo sapiens
  Payload ID: 4281
  Gene Symbol: CDK2
  Gene Name: cyclin-dependent kinase 2
  ENSP ID: ENSP00000450983
MENFQKVEKIGEGTYGVVYKARNKLTGEVVALKKIRLDT

SEQ ID NO: 21274 - protein, 39 aa, Homo sapiens; identical to SEQ ID NO: 21273
  Payload ID: 4281
  Gene Symbol: CDK2
  Gene Name: cyclin-dependent kinase 2
  ENSP ID: ENSP00000452138

SEQ ID NO: 21275 - protein, 346 aa, Homo sapiens
  Payload ID: 4281
  Gene Symbol: CDK2
  Gene Name: cyclin-dependent kinase 2
  ENSP ID: ENSP00000452514
MENFQKVEKIGEGTYGVVYKARNKLTGEVVALKKIRLDTETEGVPSTAIREISLLKELNHPNIVKLLDVIHTENKLYLVFEFLHQDLKKFMDASALTGIPLPLIKSYLFQLLQGLAFCHSHRVLHRDLKPQNLLINTEGAIKLADFGLARAFGVPVRTYTHEVVTLWYRAPEILLGCKYYSTAVDIWSLGCIFAEMHLVGTQHHARCCGEHRRNGRQSLCPLCSYLEVAASQGWGMTAVSTPYPVTRRALFPGDSEIDQLFRIFRTLGTPDEVVWPGVTSMPDYKPSFPKWARQDFSKVVPPLDEDGRSLLSQMLHYDPNKRISAKAALAHPFFQDVTKPVPHLRL

SEQ ID NO: 21276 - protein, 115 aa, Homo sapiens
  Payload ID: 4282
  Gene Symbol: CDK2AP1
  Gene Name: cyclin-dependent kinase 2 associated protein 1
  Uniprot ID: O14519
  ENSP ID: ENSP00000261692
MSYKPNLAAHMPAAALNAAGSVHSPSTSMATSSQYRQLLSDYGPPSLGYTQGTGNSQVPQSKYAELLAIIEELGKEIRPTYAGSKSAMERLKRGIIHARGLVRECLAETERNARS

SEQ ID NO: 21277 - protein, 87 aa, Homo sapiens
  Payload ID: 4282
  Gene Symbol: CDK2AP1
  Gene Name: cyclin-dependent kinase 2 associated protein 1
  Uniprot ID: O14519
  ENSP ID: ENSP00000438561
MATSSQYRQLLSDYGPPSLGYTQGTGNSQVPQSKYAELLAIIEELGKEIRPTYAGSKSAMERLKRGIIHARGLVRECLAETERNARS

SEQ ID NO: 21278 - protein, 87 aa, Homo sapiens; identical to SEQ ID NO: 21277
  Payload ID: 4282
  Gene Symbol: CDK2AP1
  Gene Name: cyclin-dependent kinase 2 associated protein 1
  Uniprot ID: O14519
  ENSP ID: ENSP00000440729

SEQ ID NO: 21279 - protein, 87 aa, Homo sapiens; identical to SEQ ID NO: 21277
  Payload ID: 4282
  Gene Symbol: CDK2AP1
  Gene Name: cyclin-dependent kinase 2 associated protein 1
  Uniprot ID: O14519
  ENSP ID: ENSP00000442502

SEQ ID NO: 21280 - protein, 87 aa, Homo sapiens; identical to SEQ ID NO: 21277
  Payload ID: 4282
  Gene Symbol: CDK2AP1
  Gene Name: cyclin-dependent kinase 2 associated protein 1
  Uniprot ID: O14519
  ENSP ID: ENSP00000442565

SEQ ID NO: 21281 - protein, 66 aa, Homo sapiens
  Payload ID: 4282
  Gene Symbol: CDK2AP1
  Gene Name: cyclin-dependent kinase 2 associated protein 1
  ENSP ID: ENSP00000444499
MATSSQYRQLLSDYGPPSLGYTQGTGNSQVPQSKYAELLAIIEELGKEIRPTYAGSKSAMERLKRG

SEQ ID NO: 21282 - protein, 87 aa, Homo sapiens; identical to SEQ ID NO: 21277
  Payload ID: 4282
  Gene Symbol: CDK2AP1
  Gene Name: cyclin-dependent kinase 2 associated protein 1
  Uniprot ID: O14519
  ENSP ID: ENSP00000479982

SEQ ID NO: 21283 - protein, 126 aa, Homo sapiens
  Payload ID: 4283
  Gene Symbol: CDK2AP2
  Gene Name: cyclin-dependent kinase 2 associated protein 2
  Uniprot ID: O75956
  ENSP ID: ENSP00000301488
MSYKPIAPAPSSTPGSSTPGPGTPVPTGSVPSPSGSVPGAGAPFRPLFNDFGPPSMGYVQAMKPPGAQGSQSTYTDLLSVIEEMGKEIRPTYAGSKSAMERLKRGIIHARALVRECLAETERNART

SEQ ID NO: 21284 - protein, 106 aa, Homo sapiens
  Payload ID: 4283
  Gene Symbol: CDK2AP2
  Gene Name: cyclin-dependent kinase 2 associated protein 2
  ENSP ID: ENSP00000431503
MSYKPIAPAPSSTPGSSTPGPGTPVPTGSVPSPSGSVPGAGAPFRPLFNDFGPPSMGYVQAMKPPGAQGSQSTYTDLLSVIEEMGKEIRPTYAGSKSAMERLKRGK

SEQ ID NO: 21285 - protein, 61 aa, Homo sapiens
  Payload ID: 4283
  Gene Symbol: CDK2AP2
  Gene Name: cyclin-dependent kinase 2 associated protein 2
  ENSP ID: ENSP00000436213
MSYKPIAPAPSSTPGSSTPGPGTPVPTGEDPAPPLLACRAVEVSKRRRPEFCNTGPAAYPR

SEQ ID NO: 21286 - protein, 212 aa, Homo sapiens
  Payload ID: 4284
  Gene Symbol: CINP
  Gene Name: cyclin-dependent kinase 2 interacting protein
  Uniprot ID: Q9BW66
  ENSP ID: ENSP00000216756
MEAKTLGTVTPRKPVLSVSARKIKDNAADWHNLILKWETLNDAGFTTANNIANLKISLLNKDKIELDSSSPASKENEEKVCLEYNEELEKLCEELQATLDGLTKIQVKMEKLSSTTKGICELENYHYGEESKRPPLFHTWPTTHFYEVSHKLLEMYRKELLLKRTVAKELAHTGDPDLTLSYLSMWLHQPYVESDSRLHLESMLLETGHRAL

SEQ ID NO: 21287 - protein, 227 aa, Homo sapiens
  Payload ID: 4284
  Gene Symbol: CINP
  Gene Name: cyclin-dependent kinase 2 interacting protein
  Uniprot ID: Q9BW66
  ENSP ID: ENSP00000442057
MNGTIYANECQQIRHPNSKTLGTVTPRKPVLSVSARKIKDNAADWHNLILKWETLNDAGFTTANNIANLKISLLNKDKIELDSSSPASKENEEKVCLEYNEELEKLCEELQATLDGLTKIQVKMEKLSSTTKGICELENYHYGEESKRPPLFHTWPTTHFYEVSHKLLEMYRKELLLKRTVAKELAHTGDPDLTLSYLSMWLHQPYVESDSRLHLESMLLETGHRAL

SEQ ID NO: 21288 - protein, 118 aa, Homo sapiens
  Payload ID: 4284
  Gene Symbol: CINP
  Gene Name: cyclin-dependent kinase 2 interacting protein
  Uniprot ID: Q9BW66
  ENSP ID: ENSP00000442377
MEAKTLGTVTPRKPVLSVSARKIKDNAADWHNLILKWETLNDAGFTTANNIANLKISLLNKDKIELDSSSPASKENEEKVCLEYNEELEKLCEELQATLDGLMRFRISSWRCTGRSCS

SEQ ID NO: 21289 - protein, 113 aa, Homo sapiens
  Payload ID: 4284
  Gene Symbol: CINP
  Gene Name: cyclin-dependent kinase 2 interacting protein
  ENSP ID: ENSP00000452982
MEAKTLGTVTPRKPVLSVSARKIKDNAADWHNLILKWETLNDAGFTTANNIANLKISLLNKDKIELDSSSPASKENEEKVCLEYNEELEKLCEELQATLDGLRMVSRPGLCLS

SEQ ID NO: 21290 - protein, 212 aa, Homo sapiens; identical to SEQ ID NO: 21286
  Payload ID: 4284
  Gene Symbol: CINP
  Gene Name: cyclin-dependent kinase 2 interacting protein
  Uniprot ID: Q9BW66
  ENSP ID: ENSP00000453839

SEQ ID NO: 21291 - protein, 213 aa, Homo sapiens
  Payload ID: 4284
  Gene Symbol: CINP
  Gene Name: cyclin-dependent kinase 2 interacting protein
  ENSP ID: ENSP00000453846
  MOD_RES (1)..(1): Any amino acid
XLSAKTLGTVTPRKPVLSVSARKIKDNAADWHNLILKWETLNDAGFTTANNIANLKISLLNKDKIELDSSSPASKENEEKVCLEYNEELEKLCEELQATLDGLTKIQVKMEKLSSTTKGICELENYHYGEESKRPPLFHTWPTTHFYEVSHKLLEMYRKELLLKRTVAKELAHTGDPDLTLSYLSMWLHQPYVESDSRLHLESMLLETGHRAL

SEQ ID NO: 21292 - protein, 346 aa, Homo sapiens
  Payload ID: 4285
  Gene Symbol: CDK20
  Gene Name: cyclin-dependent kinase 20
  Uniprot ID: Q8IZL9
  ENSP ID: ENSP00000322343
MDQYCILGRIGEGAHGIVFKAKHVETGEIVALKKVALRRLEDGFPNQALREIKALQEMEDNQYVVQLKAVFPHGGGFVLAFEFMLSDLAEVVRHAQRPLAQAQVKSYLQMLLKGVAFCHANNIVHRDLKPANLLISASGQLKIADFGLARVFSPDGSRLYTHQVATRWYRAPELLYGARQYDQGVDLWSVGCIMGELLNGSPLFPGKNDIEQLCYVLRILGTPNPQVWPELTELPDYNKISFKEQVPMPLEEVLPDVSPQALDLLGQFLLYPPHQRIAASKALLHQYFFTAPLPAHPSELPIPQRLGGPAPKAHPGPPHIHDFHVDRPLEESLLNPELIRPFILEG

SEQ ID NO: 21293 - protein, 338 aa, Homo sapiens
  Payload ID: 4285
  Gene Symbol: CDK20
  Gene Name: cyclin-dependent kinase 20
  Uniprot ID: Q8IZL9
  ENSP ID: ENSP00000338975
MDQYCILGRIGEGAHGIVFKAKHVEPRVGWQCLPSILQTGEIVALKKVALRRLEDGFPNQALREIKALQEMEDNQYVVQLKAVFPHGGGFVLAFEFMLSDLAEVVRHAQRPLAQAQVKSYLQMLLKGVAFCHANNIVHRDLKPANLLISASGQLKIADFGLARVFSPDGSRLYTHQVATRSVGCIMGELLNGSPLFPGKNDIEQLCYVLRILGTPNPQVWPELTELPDYNKISFKEQVPMPLEEVLPDVSPQALDLLGQFLLYPPHQRIAASKALLHQYFFTAPLPAHPSELPIPQRLGGPAPKAHPGPPHIHDFHVDRPLEESLLNPELIRPFILEG

SEQ ID NO: 21294 - protein, 243 aa, Homo sapiens
  Payload ID: 4285
  Gene Symbol: CDK20
  Gene Name: cyclin-dependent kinase 20
  Uniprot ID: Q8IZL9
  ENSP ID: ENSP00000365031
MDQYCILGRIGEGAHGIVFKAKHVETGEIVALKKVALRRLEDGFPNQALREIKALQEMEDNQYVVQLKAVFPHGGGFVLAFEFMLSDLAEVVRHAQRPLAQAQVKSYLQMLLKGVAFCHANNIVHRDLKPANLLISASGQLKIADFGLARVFSPDGSRLYTHQVATRSSLSCRTTTRSPLRSRCPCPWRRCCLTSLPRHWICWVNSFSTLLTSASQLPRLSSISTSSQLPCLPIHLSCRFLSV

SEQ ID NO: 21295 - protein, 325 aa, Homo sapiens
  Payload ID: 4285
  Gene Symbol: CDK20
  Gene Name: cyclin-dependent kinase 20
  Uniprot ID: Q8IZL9
  ENSP ID: ENSP00000365043
MDQYCILGRIGEGAHGIVFKAKHVETGEIVALKKVALRRLEDGFPNQALREIKALQEMEDNQYVVQLKAVFPHGGGFVLAFEFMLSDLAEVVRHAQRPLAQAQVKSYLQMLLKGVAFCHANNIVHRDLKPANLLISASGQLKIADFGLARVFSPDGSRLYTHQVATRSVGCIMGELLNGSPLFPGKNDIEQLCYVLRILGTPNPQVWPELTELPDYNKISFKEQVPMPLEEVLPDVSPQALDLLGQFLLYPPHQRIAASKALLHQYFFTAPLPAHPSELPIPQRLGGPAPKAHPGPPHIHDFHVDRPLEESLLNPELIRPFILEG

SEQ ID NO: 21296 - protein, 275 aa, Homo sapiens
  Payload ID: 4285
  Gene Symbol: CDK20
  Gene Name: cyclin-dependent kinase 20
  Uniprot ID: Q8IZL9
  ENSP ID: ENSP00000474485
MDQYCILGRIGEGAHGIVFKAKHVETGEIVALKKVALRRLEDGFPNQALREIKALQEMEDNQYVVQLKAVFPHGGGFVLAFEFMLSDLAEVVRHAQRPLAQAQVKSYLQMLLKGVAFCHANNIVHRDLKPANLLISASGQLKIADFGLARVFSPDGSRLYTHQVATRSVGCIMGELLNGSPLFPGKNDIEQLCYVLRILGTPNPQVWPELTELPDYNKISFKEQVPMPLEEVLPDVSPQALDLLGQFLLYPPHQRIAASKLPCLPIHLSCRFLSV

SEQ ID NO: 21297 - protein, 305 aa, Homo sapiens
  Payload ID: 4286
  Gene Symbol: CDK3
  Gene Name: cyclin-dependent kinase 3
  Uniprot ID: Q00526
  ENSP ID: ENSP00000410561
MDMFQKVEKIGEGTYGVVYKAKNRETGQLVALKKIRLDLEMEGVPSTAIREISLLKELKHPNIVRLLDVVHNERKLYLVFEFLSQDLKKYMDSTPGSELPLHLIKSYLFQLLQGVSFCHSHRVIHRDLKPQNLLINELGAIKLADFGLARAFGVPLRTYTHEVVTLWYRAPEILLGSKFYTTAVDIWSIGCIFAEMVTRKALFPGDSEIDQLFRIFRMLGTPSEDTWPGVTQLPDYKGSFPKWTRKGLEEIVPNLEPEGRDLLMQLLQYDPSQRITAKTALAHPYFSSPEPSPAARQYVLQRFRH

SEQ ID NO: 21298 - protein, 213 aa, Homo sapiens
  Payload ID: 4286
  Gene Symbol: CDK3
  Gene Name: cyclin-dependent kinase 3
  ENSP ID: ENSP00000465062
MEGVPSTAIREISLLKELKHPNIVRLLDVVHNERKLYLVFEFLSQDLKKYMDSTPGSELPLHLIKSYLFQLLQGVSFCHSHRVIHRDLKPQNLLINELGAIKLADFGLARAFGVPLRTYTHEVVTLWYRAPEILLGSKFYTTAVDIWSIGCIFAEMVTRKALFPGDSEIDQLFRIFRMLGTPSEDTWPGVTQLPDYKGSFPKWTRKGLEEIVP

SEQ ID NO: 21299 - protein, 164 aa, Homo sapiens
  Payload ID: 4286
  Gene Symbol: CDK3
  Gene Name: cyclin-dependent kinase 3
  ENSP ID: ENSP00000466237
MDMFQKVEKIGEGTYGVVYKAKNRETGQLVALKKIRLDLEMEGVPSTAIREISLLKELKHPNIVRLLDVVHNERKLYLVFEFLSQDLKKYMDSTPGSELPLHLIKSYLFQLLQGVSFCHSHRVIHRDLKPQNLLINELGAIKLADFGLARAFGVPLRTYTHEVV

SEQ ID NO: 21300 - protein, 303 aa, Homo sapiens
  Payload ID: 4287
  Gene Symbol: CDK4
  Gene Name: cyclin-dependent kinase 4
  Uniprot ID: P11802
  ENSP ID: ENSP00000257904
MATSRYEPVAEIGVGAYGTVYKARDPHSGHFVALKSVRVPNGGGGGGGLPISTVREVALLRRLEAFEHPNVVRLMDVCATSRTDREIKVTLVFEHVDQDLRTYLDKAPPPGLPAETIKDLMRQFLRGLDFLHANCIVHRDLKPENILVTSGGTVKLADFGLARIYSYQMALTPVVVTLWYRAPEVLLQSTYATPVDMWSVGCIFAEMFRRKPLFCGNSEADQLGKIFDLIGLPPEDDWPRDVSLPRGAFPPRGPRPVQSVVPEMEESGAQLLLEMLTFNPHKRISAFRALQHSYLHKDEGNPE

SEQ ID NO: 21301 - protein, 111 aa, Homo sapiens
  Payload ID: 4287
  Gene Symbol: CDK4
  Gene Name: cyclin-dependent kinase 4
  ENSP ID: ENSP00000316889
MATSRYEPVAEIGVGAYGTVYKARDPHSGHFVALKSVRVPNGGGGGGGLPISTVREVALLRRLEAFEHPNVVRLMDVCATSRTDREIKRCFVESLSSVETLKPTSWAKSLT

SEQ ID NO: 21302 - protein, 115 aa, Homo sapiens
  Payload ID: 4287
  Gene Symbol: CDK4
  Gene Name: cyclin-dependent kinase 4
  ENSP ID: ENSP00000446763
MATSRYEPVAEIGVGAYGTVYKARDPHSGHFVALKSVRVPNGGGGGGGLPISTVREVALLRRLEAFEHPNVVRLMDVCATSRTDREIKVTLVFEHVDQDLRTYLDKAPPPGLPAE

SEQ ID NO: 21303 - protein, 40 aa, Homo sapiens
  Payload ID: 4287
  Gene Symbol: CDK4
  Gene Name: cyclin-dependent kinase 4
  ENSP ID: ENSP00000447005
MEESGAQLLLEMLTFNPHKRISAFRALQHSYLHKDEGNPE

SEQ ID NO: 21304 - protein, 186 aa, Homo sapiens
  Payload ID: 4287
  Gene Symbol: CDK4
  Gene Name: cyclin-dependent kinase 4
  ENSP ID: ENSP00000447274
MDVCATSRTDREIKVTLVFEHVDQDLRTYLDKAPPPGLPAETIKDLMRQFLRGLDFLHANCIVHRDLKPENILVTSGGTVKLADFGLARIYSYQMALTPVVVTLWYRAPEVLLQSTYATPVDMWSVGCIFAEMFRRKPLFCGNSEADQLGKIFDLIGLPPEDDWPRDVSLPRGAFPPRGPRPVQSV

SEQ ID NO: 21305 - protein, 208 aa, Homo sapiens
  Payload ID: 4287
  Gene Symbol: CDK4
  Gene Name: cyclin-dependent kinase 4
  ENSP ID: ENSP00000447779
MDVCATSRTDREIKVTLVFEHVDQDLRTYLDKAPPPGLPAETIKDLMRQFLRGLDFLHANCIVHRDLKPENILVTSGGTVKLADFGLARIYSYQMALTPVVVTLWYRAPEVLLQSTYATPVDMWSVGCIFAEMFRRKPLFCGNSEADQLGKIFDLIGLPPEDDWPRDVSLPRGAFPPRGPRPVQSVVPEMEESGAQLLLEMLTFNPHK

SEQ ID NO: 21306 - protein, 201 aa, Homo sapiens
  Payload ID: 4287
  Gene Symbol: CDK4
  Gene Name: cyclin-dependent kinase 4
  ENSP ID: ENSP00000448098
MATSRYEPVAEIGVGAYGTVYKARDPHSGHFVALKSVRVPNGGGGGGGLPISTVREVALLRRLEAFEHPNVVRLMDVCATSRTDREIKVTLVFEHVDQDLRTYLDKAPPPGLPAETIKDLMRQFLRGLDFLHANCIVHRDLKPENILVTSGGTVKLADFGLARIYSYQMALTPVTRACCVAQAGLQWHDHSSLQLQPPGLK

SEQ ID NO: 21307 - protein, 74 aa, Homo sapiens
  Payload ID: 4287
  Gene Symbol: CDK4
  Gene Name: cyclin-dependent kinase 4
  ENSP ID: ENSP00000448885
MATSRYEPVAEIGVGAYGTVYKARDPHSGHFVALKSVRVPNGGGGGGGLPISTVREVALLRRLEAFEHPNVVRI

SEQ ID NO: 21308 - protein, 170 aa, Homo sapiens
  Payload ID: 4287
  Gene Symbol: CDK4
  Gene Name: cyclin-dependent kinase 4
  ENSP ID: ENSP00000448963
MATSRYEPVAEIGVGAYGTVYKARDPHSGHFVALKSVRVPNGGGGGGGLPISTVREVALLRRLEAFEHPNVVRLMDVCATSRTDREIKVTLVFEHVDQDLRTYLDKAPPPGLPAETIKDLMRQFLRGLDFLHANCIVHRDLKPENILVTSGGTVKLADFGLARIYSYQMA

SEQ ID NO: 21309 - protein, 203 aa, Homo sapiens
  Payload ID: 4287
  Gene Symbol: CDK4
  Gene Name: cyclin-dependent kinase 4
  ENSP ID: ENSP00000449179
MATSRYEPVAEIGVGAYGTVYKARDPHSGHFVALKSVRVPNGGGGGGGLPISTVREVALLRRLEAFEHPNVVRLMDVCATSRTDREIKVTLVFEHVDQDLRTYLDKAPPPGLPAETIKDLMRQFLRGLDFLHANCIVHRDLKPENILVTSGGTVKLADFGLARIYSYQMALTPVVVTLWYRAPEVLLQSTYATPVDMWSVGCI

SEQ ID NO: 21310 - protein, 132 aa, Homo sapiens
  Payload ID: 4287
  Gene Symbol: CDK4
  Gene Name: cyclin-dependent kinase 4
  ENSP ID: ENSP00000449391
MDVCATSRTDREIKVTLVFEHVDQDLRTYLDKAPPPGLPAETIKDLMRQFLRGLDFLHANCIVHRDLKPENILVTSGGTVKLADFGLARIYSYQMALTPVVVTLWYRAPEVLLQSTYATPVDMWSVGCIFAE

SEQ ID NO: 21311 - protein, 2 aa, Homo sapiens
  Payload ID: 4287
  Gene Symbol: CDK4
  Gene Name: cyclin-dependent kinase 4
  ENSP ID: ENSP00000449725
MA

SEQ ID NO: 21312 - protein, 260 aa, Homo sapiens
  Payload ID: 4288
  Gene Symbol: CDK5
  Gene Name: cyclin-dependent kinase 5
  Uniprot ID: Q00535
  ENSP ID: ENSP00000297518
MQKYEKLEKIGEGTYGTVFKAKNRETHEIVALKRVRLDDDDEGVPSSALREICLLKELKHKNIVRLHDVLHSDKKLTLVFEFCDQDLKKYFDSCNGDLDPEIVKNGELKLADFGLARAFGIPVRCYSAEVVTLWYRPPDVLFGAKLYSTSIDMWSAGCIFAELANAGRPLFPGNDVDDQLKRIFRLLGTPTEEQWPSMTKLPDYKPYPMYPATTSLVNVVPKLNATGRDLLQNLLKCNPVQRISAEEALQHPYFSDFCPP

SEQ ID NO: 21313 - protein, 292 aa, Homo sapiens
  Payload ID: 4288
  Gene Symbol: CDK5
  Gene Name: cyclin-dependent kinase 5
  Uniprot ID: Q00535
  ENSP ID: ENSP00000419782
MQKYEKLEKIGEGTYGTVFKAKNRETHEIVALKRVRLDDDDEGVPSSALREICLLKELKHKNIVRLHDVLHSDKKLTLVFEFCDQDLKKYFDSCNGDLDPEIVKSFLFQLLKGLGFCHSRNVLHRDLKPQNLLINRNGELKLADFGLARAFGIPVRCYSAEVVTLWYRPPDVLFGAKLYSTSIDMWSAGCIFAELANAGRPLFPGNDVDDQLKRIFRLLGTPTEEQWPSMTKLPDYKPYPMYPATTSLVNVVPKLNATGRDLLQNLLKCNPVQRISAEEALQHPYFSDFCPP

SEQ ID NO: 21314 - protein, 307 aa, Homo sapiens
  Payload ID: 4289
  Gene Symbol: CDK5R1
  Gene Name: cyclin-dependent kinase 5, regulatory subunit 1 (p35)
  Uniprot ID: Q15078
  ENSP ID: ENSP00000318486
MGTVLSLSPSYRKATLFEDGAATVGHYTAVQNSKNAKDKNLKRHSIISVLPWKRIVAVSAKKKNSKKVQPNSSYQNNITHLNNENLKKSLSCANLSTFAQPPPAQPPAPPASQLSGSQTGGSSSVKKAPHPAVTSAGTPKRVIVQASTSELLRCLGEFLCRRCYRLKHLSPTDPVLWLRSVDRSLLLQGWQDQGFITPANVVFLYMLCRDVISSEVGSDHELQAVLLTCLYLSYSYMGNEISYPLKPFLVESCKEAFWDRCLSVINLMSSKMLQINADPHYFTQVFSDLKNESGQEDKKRLLLGLDR

SEQ ID NO: 21315 - protein, 115 aa, Homo sapiens
  Payload ID: 4289
  Gene Symbol: CDK5R1
  Gene Name: cyclin-dependent kinase 5, regulatory subunit 1 (p35)
  ENSP ID: ENSP00000463654
  MOD_RES (1)..(1): Any amino acid
XAKKKNSKKVQPNSSYQNNITHLNNENLKKSLSCANLSTFAQPPPAQPPAPPASQLSGSQTGGSSSVKKAPHPAVTSAGTPKRVIVQASTSELLRCLGMLSPPRWARITSSRPSC

SEQ ID NO: 21316 - protein, 115 aa, Homo sapiens; identical to SEQ ID NO: 21315
  Payload ID: 4289
  Gene Symbol: CDK5R1
  Gene Name: cyclin-dependent kinase 5, regulatory subunit 1 (p35)
  ENSP ID: ENSP00000464129
  MOD_RES (1)..(1): Any amino acid

SEQ ID NO: 21317 - protein, 367 aa, Homo sapiens
  Payload ID: 4290
  Gene Symbol: CDK5R2
  Gene Name: cyclin-dependent kinase 5, regulatory subunit 2 (p39)
  Uniprot ID: Q13319
  ENSP ID: ENSP00000304250
MGTVLSLSPASSAKGRRPGGLPEEKKKAPPAGDEALGGYGAPPVGKGGKGESRLKRPSVLISALTWKRLVAASAKKKKGSKKVTPKPASTGPDPLVQQRNRENLLRKGRDPPDGGGTAKPLAVPVPTVPAAAATCEPPSGGSAAAQPPGSGGGKPPPPPPPAPQVAPPVPGGSPRRVIVQASTGELLRCLGDFVCRRCYRLKELSPGELVGWFRGVDRSLLLQGWQDQAFITPANLVFVYLLCRESLRGDELASAAELQAAFLTCLYLAYSYMGNEISYPLKPFLVEPDKERFWQRCLRLIQRLSPQMLRLNADPHFFTQVFQDLKNEGEAAASGGGPPSGGAPAASSAARDSCAAGTKHWTMNLDR

SEQ ID NO: 21318 - protein, 326 aa, Homo sapiens
  Payload ID: 4291
  Gene Symbol: CDK6
  Gene Name: cyclin-dependent kinase 6
  Uniprot ID: Q00534
  ENSP ID: ENSP00000265734
MEKDGLCRADQQYECVAEIGEGAYGKVFKARDLKNGGRFVALKRVRVQTGEEGMPLSTIREVAVLRHLETFEHPNVVRLFDVCTVSRTDRETKLTLVFEHVDQDLTTYLDKVPEPGVPTETIKDMMFQLLRGLDFLHSHRVVHRDLKPQNILVTSSGQIKLADFGLARIYSFQMALTSVVVTLWYRAPEVLLQSSYATPVDLWSVGCIFAEMFRRKPLFRGSSDVDQLGKILDVIGLPGEEDWPRDVALPRQAFHSKSAQPIEKFVTDIDELGKDLLLKCLTFNPAKRISAYSALSHPYFQDLERCKENLDSHLPPSQNTSELNTA

SEQ ID NO: 21319 - protein, 326 aa, Homo sapiens; identical to SEQ ID NO: 21318
  Payload ID: 4291
  Gene Symbol: CDK6
  Gene Name: cyclin-dependent kinase 6
  Uniprot ID: Q00534
  ENSP ID: ENSP00000397087

SEQ ID NO: 21320 - protein, 346 aa, Homo sapiens
  Payload ID: 4292
  Gene Symbol: CDK7
  Gene Name: cyclin-dependent kinase 7
  Uniprot ID: P50613
  ENSP ID: ENSP00000256443
MALDVKSRAKRYEKLDFLGEGQFATVYKARDKNTNQIVAIKKIKLGHRSEAKDGINRTALREIKLLQELSHPNIIGLLDAFGHKSNISLVFDFMETDLEVIIKDNSLVLTPSHIKAYMLMTLQGLEYLHQHWILHRDLKPNNLLLDENGVLKLADFGLAKSFGSPNRAYTHQVVTRWYRAPELLFGARMYGVGVDMWAVGCILAELLLRVPFLPGDSDLDQLTRIFETLGTPTEEQWPDMCSLPDYVTFKSFPGIPLHHIFSAAGDDLLDLIQGLFLFNPCARITATQALKMKYFSNRPGPTPGCQLPRPNCPVETLKEQSNPALAIKRKRTEALEQGGLPKKLIF

SEQ ID NO: 21321 - protein, 69 aa, Homo sapiens
  Payload ID: 4292
  Gene Symbol: CDK7
  Gene Name: cyclin-dependent kinase 7
  ENSP ID: ENSP00000421559
MALDVKSRAKRYEKLDFLGEGQFATVYKARDKNTNQIVAIKKIKLGHRSEAKDGGIGPPSYYLELGCMV

SEQ ID NO: 21322 - protein, 58 aa, Homo sapiens
  Payload ID: 4292
  Gene Symbol: CDK7
  Gene Name: cyclin-dependent kinase 7
  ENSP ID: ENSP00000422027
MALDVKSRAKRYEKLDFLGEGQFATVYKARDKNTNQIVAIKKESLLVATTAVNVLCHT

SEQ ID NO: 21323 - protein, 253 aa, Homo sapiens
  Payload ID: 4292
  Gene Symbol: CDK7
  Gene Name: cyclin-dependent kinase 7
  ENSP ID: ENSP00000422121
METDLEVIIKDNSLVLTPSHIKAYMLMTLQGLEYLHQHWILHRDLKPNNLLLDENGVLKLADFGLAKSFGSPNRAYTHQVVTRWYRAPELLFGARMYGVGVDMWAVGCILAELLLRVPFLPGDSDLDQLTRIFETLGTPTEEQWPDMCSLPDYVTFKSFPGIPLHHIFSAAGDDLLDLIQGLFLFNPCARITATQALKMKYFSNRPGPTPGCQLPRPNCPVETLKEQSNPALAIKRKRTEALEQGGLPKKLIF

SEQ ID NO: 21324 - protein, 309 aa, Homo sapiens
  Payload ID: 4292
  Gene Symbol: CDK7
  Gene Name: cyclin-dependent kinase 7
  ENSP ID: ENSP00000422737
MALDVKSRAKRYEKLDFLGEGQFATVYKARDKNTNQIVAIKKIKLGHRSEAKDGINRTALREIKLLQELSHPNIIGLLDAFGHKSNISLVFDFMETDLEDLKPNNLLLDENGVLKLADFGLAKSFGSPNRAYTHQVVTRWYRAPELLFGARMYGVGVDMWAVGCILAELLLRVPFLPGDSDLDQLTRIFETLGTPTEEQWPDMCSLPDYVTFKSFPGIPLHHIFSAAGDDLLDLIQGLFLFNPCARITATQALKMKYFSNRPGPTPGCQLPRPNCPVETLKEQSNPALAIKRKRTEALEQGGLPKKLIF

SEQ ID NO: 21325 - protein, 149 aa, Homo sapiens
  Payload ID: 4292
  Gene Symbol: CDK7
  Gene Name: cyclin-dependent kinase 7
  ENSP ID: ENSP00000425043
METDLEVIIKDNSLVLTPSHIKAYMLMTLQGLEYLHQHWILHRDLKPNNLLLDENGVLKLADFGLAKSFGSPNRAYTHQVVTRWYRAPELLFGARMYGVGVDMWAVGCILAELLLRVPFLPGDSDLDQLTRIFETLGTPTEEQWPDMCS

SEQ ID NO: 21326 - protein, 77 aa, Homo sapiens
  Payload ID: 4292
  Gene Symbol: CDK7
  Gene Name: cyclin-dependent kinase 7
  ENSP ID: ENSP00000425893
MALDVKSRAKRYEKLDFLGEGQFATVYKARDKNTNQIVAIKKIKLGHRSEAKDGINRTALREIKLLQELSHPNIIAP

SEQ ID NO: 21327 - protein, 58 aa, Homo sapiens
  Payload ID: 4292
  Gene Symbol: CDK7
  Gene Name: cyclin-dependent kinase 7
  ENSP ID: ENSP00000425983
MALDVKSRAKRYEKLDFLGEGQFATVYKARDKNTNQIVAIKKIKLGHRSEAKDGYNKG

SEQ ID NO: 21328 - protein, 55 aa, Homo sapiens
  Payload ID: 4292
  Gene Symbol: CDK7
  Gene Name: cyclin-dependent kinase 7
  ENSP ID: ENSP00000426372
MALDVKSRAKRYEKLDFLGEGQFATVYKARDKNTNQIVAIKKIKLGHRSEAKDAP

SEQ ID NO: 21329 - protein, 43 aa, Homo sapiens
  Payload ID: 4292
  Gene Symbol: CDK7
  Gene Name: cyclin-dependent kinase 7
  ENSP ID: ENSP00000426561
MALDVKSRAKRYEKLDFLGEGQFATVYKARDKNTNQIVAIKKV

SEQ ID NO: 21330 - protein, 58 aa, Homo sapiens; identical to SEQ ID NO: 21327
  Payload ID: 4292
  Gene Symbol: CDK7
  Gene Name: cyclin-dependent kinase 7
  ENSP ID: ENSP00000477752

SEQ ID NO: 21331 - protein, 77 aa, Homo sapiens; identical to SEQ ID NO: 21326
  Payload ID: 4292
  Gene Symbol: CDK7
  Gene Name: cyclin-dependent kinase 7
  ENSP ID: ENSP00000477833

SEQ ID NO: 21332 - protein, 149 aa, Homo sapiens; identical to SEQ ID NO: 21325
  Payload ID: 4292
  Gene Symbol: CDK7
  Gene Name: cyclin-dependent kinase 7
  ENSP ID: ENSP00000477911

SEQ ID NO: 21333 - protein, 69 aa, Homo sapiens; identical to SEQ ID NO: 21321
  Payload ID: 4292
  Gene Symbol: CDK7
  Gene Name: cyclin-dependent kinase 7
  ENSP ID: ENSP00000478296

SEQ ID NO: 21334 - protein, 253 aa, Homo sapiens; identical to SEQ ID NO: 21323
  Payload ID: 4292
  Gene Symbol: CDK7
  Gene Name: cyclin-dependent kinase 7
  ENSP ID: ENSP00000478687

SEQ ID NO: 21335 - protein, 55 aa, Homo sapiens; identical to SEQ ID NO: 21328
  Payload ID: 4292
  Gene Symbol: CDK7
  Gene Name: cyclin-dependent kinase 7
  ENSP ID: ENSP00000478968

SEQ ID NO: 21336 - protein, 346 aa, Homo sapiens; identical to SEQ ID NO: 21320
  Payload ID: 4292
  Gene Symbol: CDK7
  Gene Name: cyclin-dependent kinase 7
  Uniprot ID: P50613
  ENSP ID: ENSP00000479116

SEQ ID NO: 21337 - protein, 43 aa, Homo sapiens; identical to SEQ ID NO: 21329
  Payload ID: 4292
  Gene Symbol: CDK7
  Gene Name: cyclin-dependent kinase 7
  ENSP ID: ENSP00000479440

SEQ ID NO: 21338 - protein, 58 aa, Homo sapiens; identical to SEQ ID NO: 21322
  Payload ID: 4292
  Gene Symbol: CDK7
  Gene Name: cyclin-dependent kinase 7
  ENSP ID: ENSP00000483013

SEQ ID NO: 21339 - protein, 309 aa, Homo sapiens; identical to SEQ ID NO: 21324
  Payload ID: 4292
  Gene Symbol: CDK7
  Gene Name: cyclin-dependent kinase 7
  ENSP ID: ENSP00000483754

SEQ ID NO: 21340 - protein, 58 aa, Homo sapiens; identical to SEQ ID NO: 21322
  Payload ID: 4292
  Gene Symbol: CDK7
  Gene Name: cyclin-dependent kinase 7
  ENSP ID: ENSP00000485943

SEQ ID NO: 21341 - protein, 58 aa, Homo sapiens; identical to SEQ ID NO: 21322
  Payload ID: 4292
  Gene Symbol: CDK7
  Gene Name: cyclin-dependent kinase 7
  ENSP ID: ENSP00000486415

SEQ ID NO: 21342 - protein, 69 aa, Homo sapiens; identical to SEQ ID NO: 21321
  Payload ID: 4292
  Gene Symbol: CDK7
  Gene Name: cyclin-dependent kinase 7
  ENSP ID: ENSP00000486424

SEQ ID NO: 21343 - protein, 69 aa, Homo sapiens; identical to SEQ ID NO: 21321
  Payload ID: 4292
  Gene Symbol: CDK7
  Gene Name: cyclin-dependent kinase 7
  ENSP ID: ENSP00000486479

SEQ ID NO: 21344 - protein, 77 aa, Homo sapiens
  Payload ID: 4292
  Gene Symbol: CDK7
  Gene Name: cyclin-dependent kinase 7
  ENSP ID: ENSP00000486950
MALDVKSRAKRYEKLDFLGEGQFATVYKARDKNTNQIVAIKKIKLGHRSEAKDGINRTALREIKLLQELSHPNIIGP

SEQ ID NO: 21345 - protein, 77 aa, Homo sapiens; identical to SEQ ID NO: 21344
  Payload ID: 4292
  Gene Symbol: CDK7
  Gene Name: cyclin-dependent kinase 7
  ENSP ID: ENSP00000487392

SEQ ID NO: 21346 - protein, 464 aa, Homo sapiens
  Payload ID: 4293
  Gene Symbol: CDK8
  Gene Name: cyclin-dependent kinase 8
  Uniprot ID: P49336
  ENSP ID: ENSP00000370938
MDYDFKVKLSSERERVEDLFEYEGCKVGRGTYGHVYKAKRKDGKDDKDYALKQIEGTGISMSACREIALLRELKHPNVISLQKVFLSHADRKVWLLFDYAEHDLWHIIKFHRASKANKKPVQLPRGMVKSLLYQILDGIHYLHANWVLHRDLKPANILVMGEGPERGRVKIADMGFARLFNSPLKPLADLDPVVVTFWYRAPELLLGARHYTKAIDIWAIGCIFAELLTSEPIFHCRQEDIKTSNPYHHDQLDRIFNVMGFPADKDWEDIKKMPEHSTLMKDFRRNTYTNCSLIKYMEKHKVKPDSKAFHLLQKLLTMDPIKRITSEQAMQDPYFLEDPLPTSDVFAGCQIPYPKREFLTEEEPDDKGDKKNQQQQQGNNHTNGTGHPGNQDSSHTQGPPLKKVRVVPPTTTSGGLIMTSDYQRSNPHAAYPNPGPSTSQPQSSMGYSATSQQPPQYSHQTHRY

SEQ ID NO: 21347 - protein, 164 aa, Homo sapiens
  Payload ID: 4293
  Gene Symbol: CDK8
  Gene Name: cyclin-dependent kinase 8
  ENSP ID: ENSP00000437696
MDYDFKVKLSSERERVEDLFEYEGCKVGRGTYGHVYKAKRKDGKDDKDYALKQIEGTGISMSACREIALLRELKHPNVISLQKVFLSHADRKVWLLFDYAEHDLWHIIKFHRASKANKKPVQLPRGMVKSLLYQILDGIHYLHANWVLHRDLLTWALPDYLIHL

SEQ ID NO: 21348 - protein, 148 aa, Homo sapiens
  Payload ID: 4293
  Gene Symbol: CDK8
  Gene Name: cyclin-dependent kinase 8
  ENSP ID: ENSP00000485883
  MOD_RES (1)..(1): Any amino acid
XKDWEDIKKMPEHSTLMKDFRRNTYTNCSLIKYMEKHKVKPDSKAFHLLQKLLTMDPIKRITSEQAMQDPYFLEDPLPTSDVFAGCQIPYPKREFLTEEEPDDKGDKRSNPHAAYPNPGPSTSQPQSSMGYSATSQQPPQYSHQTHRY

SEQ ID NO: 21349 - protein, 195 aa, Homo sapiens
  Payload ID: 4293
  Gene Symbol: CDK8
  Gene Name: cyclin-dependent kinase 8
  ENSP ID: ENSP00000487013
  MOD_RES (1)..(1): Any amino acid
XDMGFARLFNSPLKPLADLDPVVVTFWYRAPELLLGARHYTKAIDKDWEDIKKMPEHSTLMKDFRRNTYTNCSLIKYMEKHKVKPDSKAFHLLQKLLTMDPIKRITSEQAMQDPYFLEDPLPTSDVFAGCQIPYPKREFLTEEEPDDKGDKKNQQQQQGNNHTNGTGHPGNQDSSHTQGPPLKKVRVVPPTTTSG

SEQ ID NO: 21350 - protein, 372 aa, Homo sapiens
  Payload ID: 4294
  Gene Symbol: CDK9
  Gene Name: cyclin-dependent kinase 9
  Uniprot ID: P50750
  ENSP ID: ENSP00000362361
MAKQYDSVECPFCDEVSKYEKLAKIGQGTFGEVFKARHRKTGQKVALKKVLMENEKEGFPITALREIKILQLLKHENVVNLIEICRTKASPYNRCKGSIYLVFDFCEHDLAGLLSNVLVKFTLSEIKRVMQMLLNGLYYIHRNKILHRDMKAANVLITRDGVLKLADFGLARAFSLAKNSQPNRYTNRVVTLWYRPPELLLGERDYGPPIDLWGAGCIMAEMWTRSPIMQGNTEQHQLALISQLCGSITPEVWPNVDNYELYEKLELVKGQKRKVKDRLKAYVRDPYALDLIDKLLVLDPAQRIDSDDALNHDFFWSDPMPSDLKGMLSTHLTSMFEYLAPPRRKGSQITQQSTNQSRNPATTNQTEFERVF

SEQ ID NO: 21351 - protein, 194 aa, Homo sapiens
  Payload ID: 4294
  Gene Symbol: CDK9
  Gene Name: cyclin-dependent kinase 9
  ENSP ID: ENSP00000395872
MQRDAPPRAPAPAPRLPAPPIGAAASSGGGGGGGSGGGGGGASAAPAPPGLSGTTSPRGPGGGRRAEEAGSAPRGRKWPWRRKWRGRGGAWSAAAAGPGAGAAAAATGGGGGALEAAMAKQYDSVECPFCDEVSKYEKLAKIGQGTFGEVFKARHRKTGQKVALKKVLMENEKEGFPITALREIKILQLLKHEN

SEQ ID NO: 21352 - protein, 164 aa, Homo sapiens
  Payload ID: 4295
  Gene Symbol: CDKN1A
  Gene Name: cyclin-dependent kinase inhibitor 1A (p21, Cip1)
  Uniprot ID: P38936
  ENSP ID: ENSP00000244741
MSEPAGDVRQNPCGSKACRRLFGPVDSEQLSRDCDALMAGCIQEARERWNFDFVTETPLEGDFAWERVRGLGLPKLYLPTGPRRGRDELGGGRRPGTSPALLQGTAEEDHVDLSLSCTLVPRSGEQAEGSPGGPGDSQGRKRRQTSMTDFYHSKRRLIFSKRKP

SEQ ID NO: 21353 - protein, 164 aa, Homo sapiens; identical to SEQ ID NO: 21352
  Payload ID: 4295
  Gene Symbol: CDKN1A
  Gene Name: cyclin-dependent kinase inhibitor 1A (p21, Cip1)
  Uniprot ID: P38936
  ENSP ID: ENSP00000362815

SEQ ID NO: 21354 - protein, 164 aa, Homo sapiens; identical to SEQ ID NO: 21352
  Payload ID: 4295
  Gene Symbol: CDKN1A
  Gene Name: cyclin-dependent kinase inhibitor 1A (p21, Cip1)
  Uniprot ID: P38936
  ENSP ID: ENSP00000384849

SEQ ID NO: 21355 - protein, 164 aa, Homo sapiens; identical to SEQ ID NO: 21352
  Payload ID: 4295
  Gene Symbol: CDKN1A
  Gene Name: cyclin-dependent kinase inhibitor 1A (p21, Cip1)
  Uniprot ID: P38936
  ENSP ID: ENSP00000409259

SEQ ID NO: 21356 - protein, 164 aa, Homo sapiens; identical to SEQ ID NO: 21352
  Payload ID: 4295
  Gene Symbol: CDKN1A
  Gene Name: cyclin-dependent kinase inhibitor 1A (p21, Cip1)
  Uniprot ID: P38936
  ENSP ID: ENSP00000482768

SEQ ID NO: 21357 - protein, 198 aa, Homo sapiens
  Payload ID: 4296
  Gene Symbol: CDKN1B
  Gene Name: cyclin-dependent kinase inhibitor 1B (p27, Kip1)
  Uniprot ID: P46527
  ENSP ID: ENSP00000228872
MSNVRVSNGSPSLERMDARQAEHPKPSACRNLFGPVDHEELTRDLEKHCRDMEEASQRKWNFDFQNHKPLEGKYEWQEVEKGSLPEFYYRPPRPPKGACKVPAQESQDVSGSRPAAPLIGAPANSEDTHLVDPKTDPSDSQTGLAEQCAGIRKRPATDDSSTQNKRANRTEENVSDGSPNAGSVEQTPKKPGLRRRQT

SEQ ID NO: 21358 - protein, 205 aa, Homo sapiens
  Payload ID: 4296
  Gene Symbol: CDKN1B
  Gene Name: cyclin-dependent kinase inhibitor 1B (p27, Kip1)
  ENSP ID: ENSP00000379629
MSNVRVSNGSPSLERMDARQAEHPKPSACRNLFGPVDHEELTRDLEKHCRDMEEASQRKWNFDFQNHKPLEGKYEWQEVEKGSLPEFYYRPPRPPKGACKVPAQESQDVSGSRPAAPLIGAPANSEDTHLVDPKTDPSDSQTGLAEQCAGIRKRPATDDTSLLDEARKIYMKILKIHIADFMEWTSCISTEKQQHNNTKILGTLK

SEQ ID NO: 21359 - protein, 104 aa, Homo sapiens
  Payload ID: 4296
  Gene Symbol: CDKN1B
  Gene Name: cyclin-dependent kinase inhibitor 1B (p27, Kip1)
  ENSP ID: ENSP00000407597
NGSPSLERMDARQAEHPKPSACRNLFGPVDHEELTRDLEKHCRDMEEASQRKWNFDFQNHKPLEDSSTQNKRANRTEENVSDGSPNAGSVEQTPKKPGLRRRQT

SEQ ID NO: 21360 - protein, 305 aa, Homo sapiens
  Payload ID: 4297
  Gene Symbol: CDKN1C
  Gene Name: cyclin-dependent kinase inhibitor 1C (p57, Kip2)
  ENSP ID: ENSP00000321019
MERLVARGTFPVLVRTSACRSLFGPVDHEELSRELQARLAELNAEDQNRWDYDFQQDMPLRGPGRLQWTEVDSDSVPAFYRETVQVGRCRLLLAPRPVAVAVAVSPPLEPAAESLDGLEEAPEQLPSVPVPAPASTPPPVPVLAPAPAPAPAPVAAPVAAPVAVAVLAPAPAPAPAPAPAPAPVAARAPAPARARAPAPAPAPAPDAAPQESAEQGANQGQRGQEPLADQLHSGISGRPAAGTAAASANGAAIKKLSGPLISDFFAKRKRSAPEKSSGDVPAPCPSPSAAPGVGSVEQTPRKRLR

SEQ ID NO: 21361 - protein, 131 aa, Homo sapiens
  Payload ID: 4297
  Gene Symbol: CDKN1C
  Gene Name: cyclin-dependent kinase inhibitor 1C (p57, Kip2)
  ENSP ID: ENSP00000370101
MERLVARGTFPVLVRTSACRSLFGPVDHEELSRELQARLAELNAEDQNRWDYDFQQDMPLRGPGRLQWTEVDSDSVPAFYRETVQISSPSARDQRLRSRRAMSPRRVPLQAPPLAWARWSRPRARGCGEPI

SEQ ID NO: 21362 - protein, 305 aa, Homo sapiens
  Payload ID: 4297
  Gene Symbol: CDKN1C
  Gene Name: cyclin-dependent kinase inhibitor 1C (p57, Kip2)
  Uniprot ID: P49918
  ENSP ID: ENSP00000411257
MERLVARGTFPVLVRTSACRSLFGPVDHEELSRELQARLAELNAEDQNRWDYDFQQDMPLRGPGRLQWTEVDSDSVPAFYRETVQVGRCRLLLAPRPVAVAVAVSPPLEPAAESLDGLEEAPEQLPSVPVPAPASTPPPVPVLAPAPAPAPAPVAAPVAAPVAVAVLAPAPAPAPAPAPAPAPVAAPAPAPAPAPAPAPAPAPAPDAAPQESAEQGANQGQRGQEPLADQLHSGISGRPAAGTAAASANGAAIKKLSGPLISDFFAKRKRSAPEKSSGDVPAPCPSPSAAPGVGSVEQTPRKRLR

SEQ ID NO: 21363 - protein, 316 aa, Homo sapiens
  Payload ID: 4297
  Gene Symbol: CDKN1C
  Gene Name: cyclin-dependent kinase inhibitor 1C (p57, Kip2)
  Uniprot ID: P49918
  ENSP ID: ENSP00000411552
MSDASLRSTSTMERLVARGTFPVLVRTSACRSLFGPVDHEELSRELQARLAELNAEDQNRWDYDFQQDMPLRGPGRLQWTEVDSDSVPAFYRETVQVGRCRLLLAPRPVAVAVAVSPPLEPAAESLDGLEEAPEQLPSVPVPAPASTPPPVPVLAPAPAPAPAPVAAPVAAPVAVAVLAPAPAPAPAPAPAPAPVAAPAPAPAPAPAPAPAPAPAPDAAPQESAEQGANQGQRGQEPLADQLHSGISGRPAAGTAAASANGAAIKKLSGPLISDFFAKRKRSAPEKSSGDVPAPCPSPSAAPGVGSVEQTPRKRLR

SEQ ID NO: 21364 - protein, 316 aa, Homo sapiens; identical to SEQ ID NO: 21363
  Payload ID: 4297
  Gene Symbol: CDKN1C
  Gene Name: cyclin-dependent kinase inhibitor 1C (p57, Kip2)
  Uniprot ID: P49918
  ENSP ID: ENSP00000413720

SEQ ID NO: 21365 - protein, 316 aa, Homo sapiens
  Payload ID: 4297
  Gene Symbol: CDKN1C
  Gene Name: cyclin-dependent kinase inhibitor 1C (p57, Kip2)
  ENSP ID: ENSP00000484462
MSDASLRSTSTMERLVARGTFPVLVRTSACRSLFGPVDHEELSRELQARLAELNAEDQNRWDYDFQQDMPLRGPGRLQWTEVDSDSVPAFYRETVQVGRCRLLLAPRPVAVAVAVSPPLEPAAESLDGLEEAPEQLPSVPVPAPASTPPPVPVLAPAPAPAPAPVAAPVAAPVAVAVLAPAPAPAPAPAPAPAPVAARAPAPARARAPAPAPAPAPDAAPQESAEQGANQGQRGQEPLADQLHSGISGRPAAGTAAASANGAAIKKLSGPLISDFFAKRKRSAPEKSSGDVPAPCPSPSAAPGVGSVEQTPRKRLR

SEQ ID NO: 21366 - protein, 131 aa, Homo sapiens; identical to SEQ ID NO: 21361
  Payload ID: 4297
  Gene Symbol: CDKN1C
  Gene Name: cyclin-dependent kinase inhibitor 1C (p57, Kip2)
  ENSP ID: ENSP00000488761

SEQ ID NO: 21367 - protein, 316 aa, Homo sapiens; identical to SEQ ID NO: 21365
  Payload ID: 4297
  Gene Symbol: CDKN1C
  Gene Name: cyclin-dependent kinase inhibitor 1C (p57, Kip2)
  ENSP ID: ENSP00000488786

SEQ ID NO: 21368 - protein, 156 aa, Homo sapiens
  Payload ID: 4298
  Gene Symbol: CDKN2A
  Gene Name: cyclin-dependent kinase inhibitor 2A
  Uniprot ID: P42771
  ENSP ID: ENSP00000307101
MEPAAGSSMEPSADWLATAAARGRVEEVRALLEAGALPNAPNSYGRRPIQVMMMGSARVAELLLLHGAEPNCADPATLTRPVHDAAREGFLDTLVVLHRAGARLDVRDAWGRLPVDLAEELGHRDVARYLRAAAGGTRGSNHARIDAAEGPSDIPD

SEQ ID NO: 21369 - protein, 170 aa, Homo sapiens
  Payload ID: 4298
  Gene Symbol: CDKN2A
  Gene Name: cyclin-dependent kinase inhibitor 2A
  ENSP ID: ENSP00000355153
MVRRFLVTLRIRRACGPPRVRVFVVHIPRLTGEWAAPGAPAAVALVLMLLRSQRLGQQPLPRRPGHDDGQRPSGGAAAAPRRGAQLRRPRHSHPTVHDAAREGFLDTLVVLHRAGARLDVRDAWGRLPVDLAEELGHRDVARYLRAAAGGTRGSNHARIDAAEGPSDIPD

SEQ ID NO: 21370 - protein, 116 aa, Homo sapiens
  Payload ID: 4298
  Gene Symbol: CDKN2A
  Gene Name: cyclin-dependent kinase inhibitor 2A
  ENSP ID: ENSP00000369496
MEPAAGSSMEPSADWLATAAARGRVEEVRALLEAGALPNAPNSYGRRPIQVGRGSAAGAGDGGRLWRTKFAGELESGSASILRKKGRLPGEFSEGVCNHRPPPGDALGAWEAKEEE

SEQ ID NO: 21371 - protein, 167 aa, Homo sapiens
  Payload ID: 4298
  Gene Symbol: CDKN2A
  Gene Name: cyclin-dependent kinase inhibitor 2A
  Uniprot ID: P42771
  ENSP ID: ENSP00000418915
MEPAAGSSMEPSADWLATAAARGRVEEVRALLEAGALPNAPNSYGRRPIQVMMMGSARVAELLLLHGAEPNCADPATLTRPVHDAAREGFLDTLVVLHRAGARLDVRDAWGRLPVDLAEELGHRDVARYLRAAAGGTRGSNHARIDAAEGPSEMIGNHLWVCRSRHA

SEQ ID NO: 21372 - protein, 132 aa, Homo sapiens
  Payload ID: 4298
  Gene Symbol: CDKN2A
  Gene Name: cyclin-dependent kinase inhibitor 2A
  Uniprot ID: Q8N726
  ENSP ID: ENSP00000432664
MVRRFLVTLRIRRACGPPRVRVFVVHIPRLTGEWAAPGAPAAVALVLMLLRSQRLGQQPLPRRPGHDDGQRPSGGAAAAPRRGAQLRRPRHSHPTRARRCPGGLPGHAGGAAPGRGAAGRARCLGPSARGPG

SEQ ID NO: 21373 - protein, 132 aa, Homo sapiens; identical to SEQ ID NO: 21372
  Payload ID: 4298
  Gene Symbol: CDKN2A
  Gene Name: cyclin-dependent kinase inhibitor 2A
  Uniprot ID: Q8N726
  ENSP ID: ENSP00000462950

SEQ ID NO: 21374 - protein, 138 aa, Homo sapiens
  Payload ID: 4298
  Gene Symbol: CDKN2A
  Gene Name: cyclin-dependent kinase inhibitor 2A
  ENSP ID: ENSP00000464202
MEPAAGSSMEPSADWLATAAARGRVEEVRALLEAGALPNAPNSYGRRPIQVMMMGSARVAELLLLHGAEPNCADPATLTRPVHDAAREGFLDTLVVLHRAGARLDVRDAWGRLPVDLAEELGHRDVARHPRLKEPERL

SEQ ID NO: 21375 - protein, 105 aa, Homo sapiens
  Payload ID: 4298
  Gene Symbol: CDKN2A
  Gene Name: cyclin-dependent kinase inhibitor 2A
  Uniprot ID: P42771
  ENSP ID: ENSP00000464952
MMMGSARVAELLLLHGAEPNCADPATLTRPVHDAAREGFLDTLVVLHRAGARLDVRDAWGRLPVDLAEELGHRDVARYLRAAAGGTRGSNHARIDAAEGPSDIPD

SEQ ID NO: 21376 - protein, 121 aa, Homo sapiens
  Payload ID: 4298
  Gene Symbol: CDKN2A
  Gene Name: cyclin-dependent kinase inhibitor 2A
  ENSP ID: ENSP00000466887
MMMGSARVAELLLLHGAEPNCADPATLTRPVHDAAREGFLDTLVVLHRAGARLDVRDAWGRLPVDLAEELGHRDVARYLRAAAGGTRGSNHARIDAAEGPSVTASIQVPGGEEGDFGSSYS

SEQ ID NO: 21377 - protein, 105 aa, Homo sapiens; identical to SEQ ID NO: 21375
  Payload ID: 4298
  Gene Symbol: CDKN2A
  Gene Name: cyclin-dependent kinase inhibitor 2A
  Uniprot ID: P42771
  ENSP ID: ENSP00000467390

SEQ ID NO: 21378 - protein, 105 aa, Homo sapiens; identical to SEQ ID NO: 21375
  Payload ID: 4298
  Gene Symbol: CDKN2A
  Gene Name: cyclin-dependent kinase inhibitor 2A
  Uniprot ID: P42771
  ENSP ID: ENSP00000467857

SEQ ID NO: 21379 - protein, 104 aa, Homo sapiens
  Payload ID: 4298
  Gene Symbol: CDKN2A
  Gene Name: cyclin-dependent kinase inhibitor 2A
  ENSP ID: ENSP00000468510
MMMGSARVAELLLLHGAEPNCADPATLTRPVHDAAREGFLDTLVVLHRAGARLDVRDAWGRLPVDLAEELGHRDVARYLRAAAGGTRGSNHARIDAAEGPSGED

SEQ ID NO: 21380 - protein, 138 aa, Homo sapiens
  Payload ID: 4299
  Gene Symbol: CDKN2B
  Gene Name: cyclin-dependent kinase inhibitor 2B (p15, inhibits CDK4)
  Uniprot ID: P42772
  ENSP ID: ENSP00000276925
MREENKGMPSGGGSDEGLASAAARGLVEKVRQLLEAGADPNGVNRFGRRAIQVMMMGSARVAELLLLHGAEPNCADPATLTRPVHDAAREGFLDTLVVLHRAGARLDVRDAWGRLPVDLAEERGHRDVAGYLRTATGD

SEQ ID NO: 21381 - protein, 78 aa, Homo sapiens
  Payload ID: 4299
  Gene Symbol: CDKN2B
  Gene Name: cyclin-dependent kinase inhibitor 2B (p15, inhibits CDK4)
  Uniprot ID: P42772
  ENSP ID: ENSP00000369487
MREENKGMPSGGGSDEGLASAAARGLVEKVRQLLEAGADPNGVNRFGRRAIQVAGAPGPRRQGARERGARPRRIGAGT

SEQ ID NO: 21382 - protein, 168 aa, Homo sapiens
  Payload ID: 4300
  Gene Symbol: CDKN2C
  Gene Name: cyclin-dependent kinase inhibitor 2C (p18, inhibits CDK4)
  Uniprot ID: P42773
  ENSP ID: ENSP00000262662
MAEPWGNELASAAARGDLEQLTSLLQNNVNVNAQNGFGRTALQVMKLGNPEIARRLLLRGANPDLKDRTGFAVIHDAARAGFLDTLQTLLEFQADVNIEDNEGNLPLHLAAKEGHLRVVEFLVKHTASNVGHRNHKGDTACDLARLYGRNEVVSLMQANGAGGATNLQ

SEQ ID NO: 21383 - protein, 168 aa, Homo sapiens; identical to SEQ ID NO: 21382
  Payload ID: 4300
  Gene Symbol: CDKN2C
  Gene Name: cyclin-dependent kinase inhibitor 2C (p18, inhibits CDK4)
  Uniprot ID: P42773
  ENSP ID: ENSP00000360826

SEQ ID NO: 21384 - protein, 168 aa, Homo sapiens; identical to SEQ ID NO: 21382
  Payload ID: 4300
  Gene Symbol: CDKN2C
  Gene Name: cyclin-dependent kinase inhibitor 2C (p18, inhibits CDK4)
  Uniprot ID: P42773
  ENSP ID: ENSP00000379452

SEQ ID NO: 21385 - protein, 166 aa, Homo sapiens
  Payload ID: 4301
  Gene Symbol: CDKN2D
  Gene Name: cyclin-dependent kinase inhibitor 2D (p19, inhibits CDK4)
  Uniprot ID: P55273
  ENSP ID: ENSP00000337056
MLLEEVRAGDRLSGAAARGDVQEVRRLLHRELVHPDALNRFGKTALQVMMFGSTAIALELLKQGASPNVQDTSGTSPVHDAARTGFLDTLKVLVEHGADVNVPDGTGALPIHLAVQEGHTAVVSFLAAESDLHRRDARGLTPLELALQRGAQDLVDILQGHMVAPL

SEQ ID NO: 21386 - protein, 166 aa, Homo sapiens; identical to SEQ ID NO: 21385
  Payload ID: 4301
  Gene Symbol: CDKN2D
  Gene Name: cyclin-dependent kinase inhibitor 2D (p19, inhibits CDK4)
  Uniprot ID: P55273
  ENSP ID: ENSP00000377224

SEQ ID NO: 21387 - protein, 212 aa, Homo sapiens
  Payload ID: 4302
  Gene Symbol: CDKN3
  Gene Name: cyclin-dependent kinase inhibitor 3
  Uniprot ID: Q16667
  ENSP ID: ENSP00000335357
MKPPSSIQTSEFDSSDEEPIEDEQTPIHISWLSLSRVNCSQFLGLCALPGCKFKDVRRNVQKDTEELKSCGIQDIFVFCTRGELSKYRVPNLLDLYQQCGIITHHHPIADGGTPDIASCCEIMEELTTCLKNYRKTLIHCYGGLGRSCLVAACLLLYLSDTISPEQAIDSLRDLRGSGAIQTIKQYNYLHEFRDKLAAHLSSRDSQSRSVSR

SEQ ID NO: 21388 - protein, 166 aa, Homo sapiens
  Payload ID: 4302
  Gene Symbol: CDKN3
  Gene Name: cyclin-dependent kinase inhibitor 3
  ENSP ID: ENSP00000378944
MNPCCKFKDVRRNVQKDTEELKSCGIQDIFVFCTRGELSKYRVPNLLDLYQQCGIITHHHPIADGGTPDIASCCEIMEELTTCLKNYRKTLIHCYGGLGRSCLVAACLLLYLSDTISPEQAIDSLRDLRGSGAIQTIKQYNYLHEFRDKLAAHLSSRDSQSRSVSR

SEQ ID NO: 21389 - protein, 211 aa, Homo sapiens
  Payload ID: 4302
  Gene Symbol: CDKN3
  Gene Name: cyclin-dependent kinase inhibitor 3
  ENSP ID: ENSP00000396451
MKPPSSIQTSEFDSSDEEPIEDEQTPIHISWLSLSRVNCSQFLGLCALPGCKFKDVRRNVQKDTEELKSCGIQDIFVFCTRGELSKYRVPNLLDLYQQCGIITHHHPIADGGTPDIASCCEIMEELTTCLKNYRKTLIHCYGGLGRSCLAACLLLYLSDTISPEQAIDSLRDLRGSGAIQTIKQYNYLHEFRDKLAAHLSSRDSQSRSVSR

SEQ ID NO: 21390 - protein, 172 aa, Homo sapiens
  Payload ID: 4302
  Gene Symbol: CDKN3
  Gene Name: cyclin-dependent kinase inhibitor 3
  Uniprot ID: Q16667
  ENSP ID: ENSP00000415333
MKPPSSIQTSCKFKDVRRNVQKDTEELKSCGIQDIFVFCTRGELSKYRVPNLLDLYQQCGIITHHHPIADGGTPDIASCCEIMEELTTCLKNYRKTLIHCYGGLGRSCLVAACLLLYLSDTISPEQAIDSLRDLRGSGAIQTIKQYNYLHEFRDKLAAHLSSRDSQSRSVSR

SEQ ID NO: 21391 - protein, 148 aa, Homo sapiens
  Payload ID: 4302
  Gene Symbol: CDKN3
  Gene Name: cyclin-dependent kinase inhibitor 3
  ENSP ID: ENSP00000440404
MKPPSSIQTSEFDSSDEEPIEDEQTPIHISWLSLSRVNCSQFLGLCALPGCKFKDVRRNVQKDTEELKSCGIQDIFVFCTRGELSKYRVPNLLDLYQQCGIITHHHPIADGGTPDIASCCEIMEELTTCLKNYRKTLIHSCLSPTIPV

SEQ ID NO: 21392 - protein, 146 aa, Homo sapiens
  Payload ID: 4302
  Gene Symbol: CDKN3
  Gene Name: cyclin-dependent kinase inhibitor 3
  ENSP ID: ENSP00000445572
MKPPSSIQTSEFDSSDEEPIEDEQTPIHISWLSLSRVNCSQFLGLCALPGCKFKDVRRNVQKDTEELKSCGIQDIFVFCTRGELSKYRVPNLLDLYQQCGIITHHHPIADGGTPDIASCCEIMEELTTCLKNYRKTLIQAFEGVLR

SEQ ID NO: 21393 - protein, 203 aa, Homo sapiens
  Payload ID: 4302
  Gene Symbol: CDKN3
  Gene Name: cyclin-dependent kinase inhibitor 3
  ENSP ID: ENSP00000450711
MKPPSSIQTSEFDSSDEEPIEDEQTPIHISWLSLSRVNCSQFLGLCALPGCKFKDVRRNVQKDTEELKSCGIQDIFVFCTRGELSKYRVPNLLDLYQQCGIITHHHPIADGGTPDIASCCEIMEELTTCLKNYRKTLIHCYGGLGRSCLVAACLLLYLSDTISPEQAIDSLRDLRGSGAIQTIKDLPTSQFLPQSVLGMDPLT

SEQ ID NO: 21394 - protein, 35 aa, Homo sapiens
  Payload ID: 4302
  Gene Symbol: CDKN3
  Gene Name: cyclin-dependent kinase inhibitor 3
  ENSP ID: ENSP00000479875
LKPSSIQTSEFDSSDEEPIEDEQTPIHISWLSLTN

SEQ ID NO: 21395 - protein, 207 aa, Homo sapiens [sequence omitted]

SEQ ID NO: 21396 - protein, 276 aa, Homo sapiens
  Payload ID: 4303
  Gene Symbol: CDKL1
  Gene Name: cyclin-dependent kinase-like 1 (CDC2-related kinase)
  ENSP ID: ENSP00000216378
MMEKYEKIGKIGEGSYGVVFKCRNRDTGQIVAIKKFLESEDDPVIKKIALREIRMLKQLKHPNLVNLLEVFRRKRRLHLVFEYCDHTVLHELDRYQRGVPEHLVKSITWQTLQAVNFCHKHNCIHRDVKPENILITKHSVIKLCDFGFARLLTGPSDYYTDYVATRWYRSPELLVGDTQYGPPVDVWAIGCVFAELLSGVPLWPGKSDVDQLYLIRKTLGDLIPRHQQVFSTNQYFSGVKIPDPEDMEPLELKFPNISYPALGLLKGRVPIASRTE

SEQ ID NO: 21397 - protein, 358 aa, Homo sapiens
  Payload ID: 4303
  Gene Symbol: CDKL1
  Gene Name: cyclin-dependent kinase-like 1 (CDC2-related kinase)
  Uniprot ID: Q00532
  ENSP ID: ENSP00000379176
MMEKYEKIGKIGEGSYGVVFKCRNRDTGQIVAIKKFLESEDDPVIKKIALREIRMLKQLKHPNLVNLLEVFRRKRRLHLVFEYCDHTVLHELDRYQRGVPEHLVKSITWQTLQAVNFCHKHNCIHRDVKPENILITKHSVIKLCDFGFARLLTGPSDYYTDYVATRWYRSPELLVGDTQYGPPVDVWAIGCVFAELLSGVPLWPGKSDVDQLYLIRKTLGDLIPRHQQVFSTNQYFSGVKIPDPEDMEPLELKFPNISYPALGLLKGCLHMDPTQRLTCEQLLHHPYFENIREIEDLAKEHNKPTRKTLRKSRKHHCFTETSKLQYLPQLTGSSILPALDNKKYYCDTKKLNYRFPNI

SEQ ID NO: 21398 - protein, 70 aa, Homo sapiens
  Payload ID: 4303
  Gene Symbol: CDKL1
  Gene Name: cyclin-dependent kinase-like 1 (CDC2-related kinase)
  ENSP ID: ENSP00000431449
  MOD_RES (1)..(1): Any amino acid
XDLIPRHQQVFSTNQYFSGVKIPDPEDMEPLELKFPNISYPALGLLKLQYLPQLTGSSILPALDNKKYYC

SEQ ID NO: 21399 - protein, 140 aa, Homo sapiens
  Payload ID: 4303
  Gene Symbol: CDKL1
  Gene Name: cyclin-dependent kinase-like 1 (CDC2-related kinase)
  ENSP ID: ENSP00000435044
  MOD_RES (1)..(1): Any amino acid
XAIGCVFAELLSGVPLWPGKSDVDQLYLIRKTLGDLIPRHQQVFSTNQYFSGVKIPDPEDMEPLELKFPNISYPALGLLKGCLHMDPTQRLTCEQLLHHPYFENIREIEDLAKEHNKPTRKTLRKSRKHHCFTETSKVII

SEQ ID NO: 21400 - protein, 570 aa, Homo sapiens
  Payload ID: 4304
  Gene Symbol: CDKL2
  Gene Name: cyclin-dependent kinase-like 2 (CDC2-related kinase)
  ENSP ID: ENSP00000306340
MEKYENLGLVGEGSYGMVMKCRNKDTGRIVAIKKFLESDDDKMVKKIAMREIKLLKQLRHENLVNLLEVCKKKKRWYLVFEFVDHTILDDLELFPNGLDYQVVQKYLFQIINGIGFCHSHNIIHRDIKPENILVSQSGVVKLCDFGFARTLAAPGEVYTDYVATRWYRAPELLVGDVKYGKAVDVWAIGCLVTEMFMGEPLFPGDSDIDQLYHIMMCLGNLIPRHQELFNKNPVFAGVRLPEIKEREPLERRYPKLSEVVIDLAKKCLHIDPDKRPFCAELLHHDFFQMDGFAERFSQELQLKVQKDARNVSLSKKSQNRKKEKEKDDSLVEERKTLVVQDTNADPKIKDYKLFKIKGSKIDGEKAEKGNRASNASCLHDSRTSHNKIVPSTSLKDCSNVSVDHTRNPSVAIPPLTHNLSAVAPSINSGMGTETIPIQGYRVDEKTKKCSIPFVKPNRHSPSGIYNINVTTLVSSEKNLFWASKKRREYSRTDVRLPELNYNHLPELRALGGIARNSRLTKKESKILSESRIPSLAAIDLHTPSITLHQVSGPPLSDDSGADLPQMEHQH

SEQ ID NO: 21401 - protein, 493 aa, Homo sapiens
  Payload ID: 4304
  Gene Symbol: CDKL2
  Gene Name: cyclin-dependent kinase-like 2 (CDC2-related kinase)
  Uniprot ID: Q92772
  ENSP ID: ENSP00000412365
MEKYENLGLVGEGSYGMVMKCRNKDTGRIVAIKKFLESDDDKMVKKIAMREIKLLKQLRHENLVNLLEVCKKKKRWYLVFEFVDHTILDDLELFPNGLDYQVVQKYLFQIINGIGFCHSHNIIHRDIKPENILVSQSGVVKLCDFGFARTLAAPGEVYTDYVATRWYRAPELLVGDVKYGKAVDVWAIGCLVTEMFMGEPLFPGDSDIDQLYHIMMCLGNLIPRHQELFNKNPVFAGVRLPEIKEREPLERRYPKLSEVVIDLAKKCLHIDPDKRPFCAELLHHDFFQMDGFAERFSQELQLKVQKDARNVSLSKKSQNRKKEKEKDDSLVEERKTLVVQDTNADPKIKDYKLFKIKGSKIDGEKAEKGNRASNASCLHDSRTSHNKIVPSTSLKDCSNVSVDHTRNPSVAIPPLTHNLSAVAPSINSGMGTETIPIQGYRVDEKTKKCSIPFVKPNRHSPSGIYNINVTTLVSGPPLSDDSGADLPQMEHQH

SEQ ID NO: 21402 - protein, 58 aa, Homo sapiens
  Payload ID: 4304
  Gene Symbol: CDKL2
  Gene Name: cyclin-dependent kinase-like 2 (CDC2-related kinase)
  ENSP ID: ENSP00000422666
MEKYENLGLVGEGSYGMVMKCRNKDTGRIVAIKKFLESDDDKMVKKIAMREIKLLKVI

SEQ ID NO: 21403 - protein, 592 aa, Homo sapiens
  Payload ID: 4305
  Gene Symbol: CDKL3
  Gene Name: cyclin-dependent kinase-like 3
  Uniprot ID: Q8IVW4
  ENSP ID: ENSP00000265334
MEMYETLGKVGEGSYGTVMKCKHKNTGQIVAIKIFYERPEQSVNKIAMREIKFLKQFHHENLVNLIEVFRQKKKIHLVFEFIDHTVLDELQHYCHGLESKRLRKYLFQILRAIDYLHSNNIIHRDIKPENILVSQSGITKLCDFGFARTLAAPGDIYTDYVATRWYRAPELVLKDTSYGKPVDIWALGCMIIEMATGNPYLPSSSDLDLLHKIVLKVGNLSPHLQNIFSKSPIFAGVVLPQVQHPKNARKKYPKLNGLLADIVHACLQIDPADRISSSDLLHHEYFTRDGFIEKFMPELKAKLLQEAKVNSLIKPKESSKENELRKDERKTVYTNTLLSSSVLGKEIEKEKKPKEIKVRVIKVKGGRGDISEPKKKEYEGGLGQQDANENVHPMSPDTKLVTIEPPNPINPSTNCNGLKENPHCGGSVTMPPINLTNSNLMAANLSSNLFHPSVRLTERAKKRRTSSQSIGQVMPNSRQEDPGPIQSQMEKGIFNERTGHSDQMANENKRKLNFSRSDRKEFHFPELPVTIQSKDTKGMEVKQIKMLKRESKKTESSKIPTLLNVDQNQEKQEGGDGHCEGKNLKRNRFFFW

SEQ ID NO: 21404 - protein, 106 aa, Homo sapiens
  Payload ID: 4305
  Gene Symbol: CDKL3
  Gene Name: cyclin-dependent kinase-like 3
  ENSP ID: ENSP00000427738
MIIEMATGNPYLPSSSDLDLLHKIVLKVGNLSPHLQNIFSKSPIFAGVVLPQVQHPKNARKKYPKLNGLLADIVHACLQIDPADRISSSDLLHHEYFTRDGFIEKK

SEQ ID NO: 21405 - protein, 73 aa, Homo sapiens
  Payload ID: 4305
  Gene Symbol: CDKL3
  Gene Name: cyclin-dependent kinase-like 3
  ENSP ID: ENSP00000427836
  MOD_RES (1)..(1): Any amino acid
XTKGMEVKQIKMLKRESKKTESSKIPTLLNVDQNQEKQEFIPLSLLSACCPIFTNICSQLTIRVEMAIARGRI

SEQ ID NO: 21406 - protein, 44 aa, Homo sapiens
  Payload ID: 4305
  Gene Symbol: CDKL3
  Gene Name: cyclin-dependent kinase-like 3
  ENSP ID: ENSP00000427964
MIIEMATGNPYLPSSSDLDLLHKIVLKVGNRKREKAQGDQSQSY

SEQ ID NO: 21407 - protein, 18 aa, Homo sapiens
  Payload ID: 4305
  Gene Symbol: CDKL3
  Gene Name: cyclin-dependent kinase-like 3
  ENSP ID: ENSP00000428498
  MOD_RES (1)..(1): Any amino acid
XLNGLLADIVHIHARTES

SEQ ID NO: 21408 - protein, 401 aa, Homo sapiens
  Payload ID: 4305
  Gene Symbol: CDKL3
  Gene Name: cyclin-dependent kinase-like 3
  ENSP ID: ENSP00000428500
MIIEMATGNPYLPSSSDLDLLHKIVLKVGNLSPHLQNIFSKSPIFAGVVLPQVQHPKNARKKYPKLNGLLADIVHACLQIDPADRISSSDLLHHEYFTRDGFIEKFMPELKAKLLQEAKVNSLIKPKESSKENELRKDERKTVYTNTLLSSSVLGKEIEKEKKPKEIKVRVIKVKGGRGDISEPKKKEYEGGLGQQDANENVHPMSPDTKLVTIEPPNPINPSTNCNGLKENPHCGGSVTMPPINLTNSNLMAANLSSNLFHPSVRLTERAKKRRTSSQSIGQVMPNSRQEDPGPIQSQMEKGIFNERTGHSDQMANENKRKLNFSRSDRKEFHFPELPVTIQSKDTKGMEVKQIKMLKRESKKTESSKIPTLLNVDQNQEKQENTGNAQTERKKNLPDVE

SEQ ID NO: 21409 - protein, 590 aa, Homo sapiens
  Payload ID: 4305
  Gene Symbol: CDKL3
  Gene Name: cyclin-dependent kinase-like 3
  ENSP ID: ENSP00000428689
MEMYETLGKVGEGSYGTVMKCKHKNTGQIVAIKIFYERPEQSVNKIAMREIKFLKQFHHENLVNLIEVFRQKKKIHLVFEFIDHTVLDELQHYCHGLESKRLRKYLFQILRAIDYLHSNNIIHRDIKPENILVSQSGITKLCDFGFARTLAAPGDIYTDYVATRWYRAPELVLKDTSYGKPVDIWALGCMIIEMATGNPYLPSSSDLDLLHKIVLKVGNLSPHLQNIFSKSPIFAGVVLPQVQHPKNARKKYPKLNGLLADIVHACLQIDPADRISSSDLLHHEYFTRDGFIEKFMPELKAKLLQEAKVNSLIKPKESSKENELRKDERKTVYTNTLLSSSVLGKEIEKEKKPKEIKVRVIKVKGGRGDISEPKKKEYEGGLGQQDANENVHPMSPDTKLVTIEPPNPINPSTNCNGLKENPHCGGSVTMPPINLTNSNLMAANLSSNLFHPSVRLTERAKKRRTSSQSIGQVMPNSRQEDPGPIQSQMEKGIFNERTGHSDQMANENKRKLNFSRSDRKEFHFPELPVTIQSKDTKGMEVKQIKMLKRESKKTESSKIPTLLNVDQNQEKQENTGNAQTERKKNLPDVE

SEQ ID NO: 21410 - protein, 455 aa, Homo sapiens
  Payload ID: 4305
  Gene Symbol: CDKL3
  Gene Name: cyclin-dependent kinase-like 3
  Uniprot ID: Q8IVW4
  ENSP ID: ENSP00000430496
MEMYETLGKVGEGSYGTVMKCKHKNTGQIVAIKIFYERPEQSVNKIAMREIKFLKQFHHENLVNLIEVFRQKKKIHLVFEFIDHTVLDELQHYCHGLESKRLRKYLFQILRAIDYLHSNNIIHRDIKPENILVSQSGITKLCDFGFARTLAAPGDIYTDYVATRWYRAPELVLKDTSYGKPVDIWALGCMIIEMATGNPYLPSSSDLDLLHKIVLKVGNLSPHLQNIFSKSPIFAGVVLPQVQHPKNARKKYPKLNGLLADIVHACLQIDPADRISSSDLLHHEYFTRDGFIEKFMPELKAKLLQEAKVNSLIKPKESSKENELRKDERKTVYTNTLLSSSVLGKEIEKEKKPKEIKVRVIKVKGGRGDISEPKKKEYEGGLGQQDANENVHPMSPDTKLVTIEPPNPINPSTNCNGLKENPHCGGSVTMPPINLTNSNLMAANLSSNLFHPSVR

SEQ ID NO: 21411 - protein, 82 aa, Homo sapiens
  Payload ID: 4305
  Gene Symbol: CDKL3
  Gene Name: cyclin-dependent kinase-like 3
  ENSP ID: ENSP00000430777
MIIEMATGNPYLPSSSDLDLLHKIVLKVGNLSPHLQNIFSKSPIFAGVVLPQVQHPKNARKKYPKLNGLLADIVHIHARTES

SEQ ID NO: 21412 - protein, 315 aa, Homo sapiens
  Payload ID: 4306
  Gene Symbol: CDKL4
  Gene Name: cyclin-dependent kinase-like 4
  Uniprot ID: Q5MAI5
  ENSP ID: ENSP00000368080
MEKYEKLAKTGEGSYGVVFKCRNKTSGQVVAVKKFVESEDDPVVKKIALREIRMLKQLKHPNLVNLIEVFRRKRKMHLVFEYCDHTLLNELERNPNGVADGVIKSVLWQTLQALNFCHIHNCIHRDIKPENILITKQGIIKICDFGFAQILIPGDAYTDYVATRWYRAPELLVGDTQYGSSVDIWAIGCVFAELLTGQPLWPGKSDVDQLYLIIRTLGKLIPRHQSIFKSNGFFHGISIPEPEDMETLEEKFSDVHPVALNFMKGCLKMNPDDRLTCSQLLESSYFDSFQEAQIKRKARNEGRNRRRQQVLPLKS

SEQ ID NO: 21413 - protein, 379 aa, Homo sapiens
  Payload ID: 4306
  Gene Symbol: CDKL4
  Gene Name: cyclin-dependent kinase-like 4
  Uniprot ID: Q5MAI5
  ENSP ID: ENSP00000378476
MEKYEKLAKTGEGSYGVVFKCRNKTSGQVVAVKKFVESEDDPVVKKIALREIRMLKQLKHPNLVNLIEVFRRKRKMHLVFEYCDHTLLNELERNPNGVADGVIKSVLWQTLQALNFCHIHNCIHRDIKPENILITKQGIIKICDFGFAQILIPGDAYTDYVATRWYRAPELLVGDTQYGSSVDIWAIGCVFAELLTGQPLWPGKSDVDQLYLIIRTLGKLIPRHQSIFKSNGFFHGISIPEPEDMETLEEKFSDVHPVALNFMKGCLKMNPDDRLTCSQLLESSYFDSFQEAQIKRKARNEGRNRRRQQQAPKSAFPRLFLKTKICQVQRNETQTSGNQILPNGPILQNSMVTVMTNINSAVYQVTVLHLLSENFEVKS

SEQ ID NO: 21414 - protein, 124 aa, Homo sapiens
  Payload ID: 4306
  Gene Symbol: CDKL4
  Gene Name: cyclin-dependent kinase-like 4
  ENSP ID: ENSP00000389833
KLIPRHQSIFKSNGFFHGISIPEPEDMETLEEKFSDVHPVALNFMKGCLKMNPDDRLTCSQLLESSYFDSFQEAQIKRKARNEGRNRRRQQNQLLPLIPGSHISPTPDGRKQVLQLKFDHLPNI

SEQ ID NO: 21415 - protein, 58 aa, Homo sapiens
  Payload ID: 4306
  Gene Symbol: CDKL4
  Gene Name: cyclin-dependent kinase-like 4
  ENSP ID: ENSP00000399213
MEKYEKLAKTGEGSYGVVFKCRNKTSGQVVAVKKFVESEDDPVVKKIALREIRMLKSC

SEQ ID NO: 21416 - protein, 1030 aa, Homo sapiens
  Payload ID: 4307
  Gene Symbol: CDKL5
  Gene Name: cyclin-dependent kinase-like 5
  Uniprot ID: O76039
  ENSP ID: ENSP00000369325
MKIPNIGNVMNKFEILGVVGEGAYGVVLKCRHKETHEIVAIKKFKDSEENEEVKETTLRELKMLRTLKQENIVELKEAFRRRGKLYLVFEYVEKNMLELLEEMPNGVPPEKVKSYIYQLIKAIHWCHKNDIVHRDIKPENLLISHNDVLKLCDFGFARNLSEGNNANYTEYVATRWYRSPELLLGAPYGKSVDMWSVGCILGELSDGQPLFPGESEIDQLFTIQKVLGPLPSEQMKLFYSNPRFHGLRFPAVNHPQSLERRYLGILNSVLLDLMKNLLKLDPADRYLTEQCLNHPTFQTQRLLDRSPSRSAKRKPYHVESSTLSNRNQAGKSTALQSHHRSNSKDIQNLSVGLPRADEGLPANESFLNGNLAGASLSPLHTKTYQASSQPGSTSKDLTNNNIPHLLSPKEAKSKTEFDFNIDPKPSEGPGTKYLKSNSRSQQNRHSFMESSQSKAGTLQPNEKQSRHSYIDTIPQSSRSPSYRTKAKSHGALSDSKSVSNLSEARAQIAEPSTSRYFPSSCLDLNSPTSPTPTRHSDTRTLLSPSGRNNRNEGTLDSRRTTTRHSKTMEELKLPEHMDSSHSHSLSAPHESFSYGLGYTSPFSSQQRPHRHSMYVTRDKVRAKGLDGSLSIGQGMAARANSLQLLSPQPGEQLPPEMTVARSSVKETSREGTSSFHTRQKSEGGVYHDPHSDDGTAPKENRHLYNDPVPRRVGSFYRVPSPRPDNSFHENNVSTRVSSLPSESSSGTNHSKRQPAFDPWKSPENISHSEQLKEKEKQGFFRSMKKKKKKSQTVPNSDSPDLLTLQKSIHSASTPSSRPKEWRPEKISDLQTQSQPLKSLRKLLHLSSASNHPASSDPRFQPLTAQQTKNSFSEIRIHPLSQASGGSSNIRQEPAPKGRPALQLPDGGCDGRRQRHHSGPQDRRFMLRTTEQQGEYFCCGDPKKPHTPCVPNRALHRPISSPAPYPVLQVRGTSMCPTLQVRGTDAFSCPTQQSGFSFFVRHVMREALIHRAQVNQAALLTYHENAALTGK

SEQ ID NO: 21417 - protein, 1030 aa, Homo sapiens; identical to SEQ ID NO: 21416
  Payload ID: 4307
  Gene Symbol: CDKL5
  Gene Name: cyclin-dependent kinase-like 5
  Uniprot ID: O76039
  ENSP ID: ENSP00000369332

SEQ ID NO: 21418 - protein, 784 aa, Homo sapiens
  Payload ID: 4307
  Gene Symbol: CDKL5
  Gene Name: cyclin-dependent kinase-like 5
  ENSP ID: ENSP00000485184
MKIPNIGNVMNKFEILGVVGEGAYGVVLKCRHKETHEIVAIKKFKDSEENEEVKETTLRELKMLRTLKQENIVELKEAFRRRGKLYLVFEYVEKNMLELLEEMPNGVPPEKVKSYIYQLIKAIHWCHKNDIVHRDIKPENLLISHNDVLKLCDFGFARNLSEGNNANYTEYVATRWYRSPELLLGAPYGKSVDMWSVGCILGELSDGQPLFPGESEIDQLFTIQKVLGPLPSEQMKLFYSNPRFHGLRFPAVNHPQSLERRYLGILNSVLLDLMKNLLKLDPADRYLTEQCLNHPTFQTQRLLDRSPSRSAKRKPYHVESSTLSNRNQAGKSTALQSHHRSNSKDIQNLSVGLPRADEGLPANESFLNGNLAGASLSPLHTKTYQASSQPGSTSKDLTNNNIPHLLSPKEAKSKTEFDFNIDPKPSEGPGTKYLKSNSRSQQNRHSFMESSQSKAGTLQPNEKQSRHSYIDTIPQSSRSPSYRTKAKSHGALSDSKSVSNLSEARAQIAEPSTSRYFPSSCLDLNSPTSPTPTRHSDTRTLLSPSGRNNRNEGTLDSRRTTTRHSKTMEELKLPEHMDSSHSHSLSAPHESFSYGLGYTSPFSSQQRPHRHSMYVTRDKVRAKGLDGSLSIGQGMAARANSLQLLSPQPGEQLPPEMTVARSSVKETSREGTSSFHTRQKSEGGVYHDPHSDDGTAPKENRHLYNDPVPRRVGSFYRVPSPRPDNSFHENNVSTRVSSLPSESSSGTNHSKRQPAFDPWKSPENISHSEQLKEKEKQGFFRSMK

SEQ ID NO: 21419 - protein, 960 aa, Homo sapiens
  Payload ID: 4307
  Gene Symbol: CDKL5
  Gene Name: cyclin-dependent kinase-like 5
  Uniprot ID: O76039
  ENSP ID: ENSP00000485244
MKIPNIGNVMNKFEILGVVGEGAYGVVLKCRHKETHEIVAIKKFKDSEENEEVKETTLRELKMLRTLKQENIVELKEAFRRRGKLYLVFEYVEKNMLELLEEMPNGVPPEKVKSYIYQLIKAIHWCHKNDIVHRDIKPENLLISHNDVLKLCDFGFARNLSEGNNANYTEYVATRWYRSPELLLGAPYGKSVDMWSVGCILGELSDGQPLFPGESEIDQLFTIQKVLGPLPSEQMKLFYSNPRFHGLRFPAVNHPQSLERRYLGILNSVLLDLMKNLLKLDPADRYLTEQCLNHPTFQTQRLLDRSPSRSAKRKPYHVESSTLSNRNQAGKSTALQSHHRSNSKDIQNLSVGLPRADEGLPANESFLNGNLAGASLSPLHTKTYQASSQPGSTSKDLTNNNIPHLLSPKEAKSKTEFDFNIDPKPSEGPGTKYLKSNSRSQQNRHSFMESSQSKAGTLQPNEKQSRHSYIDTIPQSSRSPSYRTKAKSHGALSDSKSVSNLSEARAQIAEPSTSRYFPSSCLDLNSPTSPTPTRHSDTRTLLSPSGRNNRNEGTLDSRRTTTRHSKTMEELKLPEHMDSSHSHSLSAPHESFSYGLGYTSPFSSQQRPHRHSMYVTRDKVRAKGLDGSLSIGQGMAARANSLQLLSPQPGEQLPPEMTVARSSVKETSREGTSSFHTRQKSEGGVYHDPHSDDGTAPKENRHLYNDPVPRRVGSFYRVPSPRPDNSFHENNVSTRVSSLPSESSSGTNHSKRQPAFDPWKSPENISHSEQLKEKEKQGFFRSMKKKKKKSQTVPNSDSPDLLTLQKSIHSASTPSSRPKEWRPEKISDLQTQSQPLKSLRKLLHLSSASNHPASSDPRFQPLTAQQTKNSFSEIRIHPLSQASGGSSNIRQEPAPKGRPALQLPGQMDPGWHVSSVTRSATEGPSYSEQLGAKSGPNGHPYNRTNRSRMPNLNDLKETAL

SEQ ID NO: 21420 - protein, 68 aa, Homo sapiens
  Payload ID: 4307
  Gene Symbol: CDKL5
  Gene Name: cyclin-dependent kinase-like 5
  ENSP ID: ENSP00000485359
MKIPNIGNVMNKFEILGVVGEGAYGVVLKCRHKETHEIVAIKKFKDSEENEEVKETTLRELKMLRTLK

SEQ ID NO: 21421 - protein, 60 aa, Homo sapiens
  Payload ID: 4307
  Gene Symbol: CDKL5
  Gene Name: cyclin-dependent kinase-like 5
  ENSP ID: ENSP00000485581
MKIPNIGNVMNKFEILGVVGEGAYGVVLKCRHKETHEIVAIKKFKDSEENEEVKETTLRE

SEQ ID NO: 21422 - protein, 17 aa, Homo sapiens
  Payload ID: 4307
  Gene Symbol: CDKL5
  Gene Name: cyclin-dependent kinase-like 5
  ENSP ID: ENSP00000485625
MKIPNIGNVMNKFEILG

SEQ ID NO: 21423 - protein, 651 aa, Homo sapiens
  Payload ID: 4308
  Gene Symbol: CYLC1
  Gene Name: cylicin, basic protein of sperm head cytoskeleton 1
  Uniprot ID: P35663
  ENSP ID: ENSP00000331556
MSLPRLLKVNIRTYDNSIPISESSRKSWNQKHFALTFPKPLQRGTNDKSRPLKSQITVTRHDKRKLEEGQKPAHKWIRHSFRKILQWPPIYTAAREQTPFRHLYTSKTHLKKAEYKKSKDEKGGTPLKKDSKKKGGSYATNPESKQIVEEKTKRQNEADKTPLKSSHENEQSKKSKSSSETNPESQNSKTVSKNCSQKDKKDSKNSKKTNTEFLHTKNNPKKDLKRSKTSNDPISEICSENSLNVDFLMLVGQSDDESINFDAWLRNYSQNNSKNYSLKYTKYTKKDTKKNAKKSSDAESEDSKDAKKDSKKVKKNVKKDDKKKDVKKDTESTDAESGDSKDERKDTKKDKKKLKKDDKKKDTKKYPESTDTESGDAKDARNDSRNLKKASKNDDKKKDAKKITFSTDSESELESKESQKDEKKDKKDSKTDNKKSVKNDEESTDADSEPKGDSKKGKKDEKKGKKDSKKDDKKKDAKKNAESTEMESDLELKKDKKHSKEKKGSKKDIKKDARKDTESTDAEFDESSKTGFKTSTKIKGSDTESEESLYKPGAKKKIDESDGTSANSKMEGLESKRGFRMSSKKTTFNEKGEKASTGRVPPSREKPPLPACEPSLPSPKVRRLCWCKMPPPPPKPRYAPLPEAPWIHKLL

SEQ ID NO: 21424 - protein, 68 aa, Homo sapiens
  Payload ID: 4308
  Gene Symbol: CYLC1
  Gene Name: cylicin, basic protein of sperm head cytoskeleton 1
  ENSP ID: ENSP00000480907
MSLPRLKVNIRTYDNSIPISESSRKSWNQKHFALTFPKPLQRGTNDKSRPLKSQITVTPEAPWIHKLL

SEQ ID NO: 21425 - protein, 348 aa, Homo sapiens
  Payload ID: 4309
  Gene Symbol: CYLC2
  Gene Name: cylicin, basic protein of sperm head cytoskeleton 2
  Uniprot ID: Q14093
  ENSP ID: ENSP00000417674
MSLPRFQRVNFGPYDNYIPVSELSKKSWNQQHFALLFPKPQRPGTKRRSKPSQIRDNTVSIIDEEQLRGDRRQPLWMYRSLMRISERPSVYLAARRQPLKPTRTVEVDSKAAEIGKKGEDKTTQKDTTDSESELKQGKKDSKKGKDIEKGKEEKLDAKKDSKKGKKDAEKGKDSATESEDEKGGAKKDNKKDKKDSNKGKDSATESEGEKGGTEKDSKKGKKDSKKGKDSAIELQAVKADEKKDEDGKKDANKGDESKDAKKDAKEIKKGKKDKKKPSSTDSDSKDDVKKESKKDATKDAKKVAKKDTEKESADSKKDAKKNAKKDAKKDAKKNAKKDEKKDAKKKGK

SEQ ID NO: 21426 - protein, 348 aa, Homo sapiens; identical to SEQ ID NO: 21425
  Payload ID: 4309
  Gene Symbol: CYLC2
  Gene Name: cylicin, basic protein of sperm head cytoskeleton 2
  Uniprot ID: Q14093
  ENSP ID: ENSP00000420256

SEQ ID NO: 21427 - protein, 348 aa, Homo sapiens; identical to SEQ ID NO: 21425
  Payload ID: 4309
  Gene Symbol: CYLC2
  Gene Name: cylicin, basic protein of sperm head cytoskeleton 2
  Uniprot ID: Q14093
  ENSP ID: ENSP00000478399

SEQ ID NO: 21428 - protein, 956 aa, Homo sapiens
  Payload ID: 4310
  Gene Symbol: CYLD
  Gene Name: cylindromatosis (turban tumor syndrome)
  Uniprot ID: Q9NQC7
  ENSP ID: ENSP00000308928
MSSGLWSQEKVTSPYWEERIFYLLLQECSVTDKQTQKLLKVPKGSIGQYIQDRSVGHSRIPSAKGKKNQIGLKILEQPHAVLFVDEKDVVEINEKFTELLLAITNCEERFSLFKNRNRLSKGLQIDVGCPVKVQLRSGEEKFPGVVRFRGPLLAERTVSGIFFGVELLEEGRGQGFTDGVYQGKQLFQCDEDCGVFVALDKLELIEDDDTALESDYAGPGDTMQVELPPLEINSRVSLKVGETIESGTVIFCDVLPGKESLGYFVGVDMDNPIGNWDGRFDGVQLCSFACVESTILLHINDIIPALSESVTQERRPPKLAFMSRGVGDKGSSSHNKPKATGSTSDPGNRNRSELFYTLNGSSVDSQPQSKSKNTWYIDEVAEDPAKSLTEISTDFDRSSPPLQPPPVNSLTTENRFHSLPFSLTKMPNTNGSIGHSPLSLSAQSVMEELNTAPVQESPPLAMPPGNSHGLEVGSLAEVKENPPFYGVIRWIGQPPGLNEVLAGLELEDECAGCTDGTFRGTRYFTCALKKALFVKLKSCRPDSRFASLQPVSNQIERCNSLAFGGYLSEVVEENTPPKMEKEGLEIMIGKKKGIQGHYNSCYLDSTLFCLFAFSSVLDTVLLRPKEKNDVEYYSETQELLRTEIVNPLRIYGYVCATKIMKLRKILEKVEAASGFTSEEKDPEEFLNILFHHILRVEPLLKIRSAGQKVQDCYFYQIFMEKNEKVGVPTIQQLLEWSFINSNLKFAEAPSCLIIQMPRFGKDFKLFKKIFPSLELNITDLLEDTPRQCRICGGLAMYECRECYDDPDISAGKIKQFCKTCNTQVHLHPKRLNHKYNPVSLPKDLPDWDWRHGCIPCQNMELFAVLCIETSHYVAFVKYGKDDSAWLFFDSMADRDGGQNGFNIPQVTPCPEVGEYLKMSLEDLHSLDSRRIQGCARRLLCDAYMCMYQSPTMSLYK

SEQ ID NO: 21429 - protein, 953 aa, Homo sapiens
  Payload ID: 4310
  Gene Symbol: CYLD
  Gene Name: cylindromatosis (turban tumor syndrome)
  Uniprot ID: Q9NQC7
  ENSP ID: ENSP00000381574
MSSGLWSQEKVTSPYWEERIFYLLLQECSVTDKQTQKLLKVPKGSIGQYIQDRSVGHSRIPSAKGKKNQIGLKILEQPHAVLFVDEKDVVEINEKFTELLLAITNCEERFSLFKNRNRLSKGLQIDVGCPVKVQLRSGEEKFPGVVRFRGPLLAERTVSGIFFGVELLEEGRGQGFTDGVYQGKQLFQCDEDCGVFVALDKLELIEDDDTALESDYAGPGDTMQVELPPLEINSRVSLKVGETIESGTVIFCDVLPGKESLGYFVGVDMDNPIGNWDGRFDGVQLCSFACVESTILLHINDIIPESVTQERRPPKLAFMSRGVGDKGSSSHNKPKATGSTSDPGNRNRSELFYTLNGSSVDSQPQSKSKNTWYIDEVAEDPAKSLTEISTDFDRSSPPLQPPPVNSLTTENRFHSLPFSLTKMPNTNGSIGHSPLSLSAQSVMEELNTAPVQESPPLAMPPGNSHGLEVGSLAEVKENPPFYGVIRWIGQPPGLNEVLAGLELEDECAGCTDGTFRGTRYFTCALKKALFVKLKSCRPDSRFASLQPVSNQIERCNSLAFGGYLSEVVEENTPPKMEKEGLEIMIGKKKGIQGHYNSCYLDSTLFCLFAFSSVLDTVLLRPKEKNDVEYYSETQELLRTEIVNPLRIYGYVCATKIMKLRKILEKVEAASGFTSEEKDPEEFLNILFHHILRVEPLLKIRSAGQKVQDCYFYQIFMEKNEKVGVPTIQQLLEWSFINSNLKFAEAPSCLIIQMPRFGKDFKLFKKIFPSLELNITDLLEDTPRQCRICGGLAMYECRECYDDPDISAGKIKQFCKTCNTQVHLHPKRLNHKYNPVSLPKDLPDWDWRHGCIPCQNMELFAVLCIETSHYVAFVKYGKDDSAWLFFDSMADRDGGQNGFNIPQVTPCPEVGEYLKMSLEDLHSLDSRRIQGCARRLLCDAYMCMYQSPTMSLYK

SEQ ID NO: 21430 - protein, 956 aa, Homo sapiens; identical to SEQ ID NO: 21428
  Payload ID: 4310
  Gene Symbol: CYLD
  Gene Name: cylindromatosis (turban tumor syndrome)
  Uniprot ID: Q9NQC7
  ENSP ID: ENSP00000392025

SEQ ID NO: 21431 - protein, 953 aa, Homo sapiens; identical to SEQ ID NO: 21429
  Payload ID: 4310
  Gene Symbol: CYLD
  Gene Name: cylindromatosis (turban tumor syndrome)
  Uniprot ID: Q9NQC7
  ENSP ID: ENSP00000454515

SEQ ID NO: 21432 - protein, 33 aa, Homo sapiens
  Payload ID: 4310
  Gene Symbol: CYLD
  Gene Name: cylindromatosis (turban tumor syndrome)
  ENSP ID: ENSP00000455535
MSSGLWSQEKVTSPYWEERIFYLLLQECSVTDK

SEQ ID NO: 21433 - protein, 771 aa, Homo sapiens
  Payload ID: 4310
  Gene Symbol: CYLD
  Gene Name: cylindromatosis (turban tumor syndrome)
  ENSP ID: ENSP00000456488
MSSGLWSQEKVTSPYWEERIFYLLLQECSVTDKQTQKLLKVPKGSIGQYIQDRSVGHSRIPSAKGKKNQIGLKILEQPHAVLFVDEKDVVEINEKFTELLLAITNCEERFSLFKNRNRLSKGLQIDVGCPVKVQLRSGEEKFPGVVRFRGPLLAERTVSGIFFGVELLEEGRGQGFTDGVYQGKQLFQCDEDCGVFVALDKLELIEDDDTALESDYAGPGDTMQVELPPLEINSRVSLKVGETIESGTVIFCDVLPGKESLGYFVGVDMDNPIGNWDGRFDGVQLCSFACVESTILLHINDIIPESVTQERRPPKLAFMSRGVGDKGSSSHNKPKATGSTSDPGNRNRSELFYTLNGSSVDSQPQSKSKNTWYIDEAFGGYLSEVVEENTPPKMEKEGLEIMIGKKKGIQGHYNSCYLDSTLFCLFAFSSVLDTVLLRPKEKNDVEYYSETQELLRTEIVNPLRIYGYVCATKIMKLRKILEKVEAASGFTSEEKDPEEFLNILFHHILRVEPLLKIRSAGQKVQDCYFYQIFMEKNEKVGVPTIQQLLEWSFINSNLKFAEAPSCLIIQMPRFGKDFKLFKKIFPSLELNITDLLEDTPRQCRICGGLAMYECRECYDDPDISAGKIKQFCKTCNTQVHLHPKRLNHKYNPVSLPKDLPDWDWRHGCIPCQNMELFAVLCIETSHYVAFVKYGKDDSAWLFFDSMADRDGGQNGFNIPQVTPCPEVGEYLKMSLEDLHSLDSRRIQGCARRLLCDAYMCMYQSPTMSLYK

SEQ ID NO: 21434 - protein, 304 aa, Homo sapiens
  Payload ID: 4310
  Gene Symbol: CYLD
  Gene Name: cylindromatosis (turban tumor syndrome)
  ENSP ID: ENSP00000456912
MSSGLWSQEKVTSPYWEERIFYLLLQECSVTDKQTQKLLKVPKGSIGQYIQDRSVGHSRIPSAKGKKNQIGLKILEQPHAVLFVDEKDVVEINEKFTELLLAITNCEERFSLFKNRNRLSKGLQIDVGCPVKVQLRSGEEKFPGVVRFRGPLLAERTVSGIFFGVELLEEGRGQGFTDGVYQGKQLFQCDEDCGVFVALDKLELIEDDDTALESDYAGPGDTMQVELPPLEINSRVSLKVGETIESGTVIFCDVLPGKESLGYFVGVDMDNPIGNWDGRFDGVQLCSFACVESTILLHINDIIP

SEQ ID NO: 21435 - protein, 166 aa, Homo sapiens
  Payload ID: 4310
  Gene Symbol: CYLD
  Gene Name: cylindromatosis (turban tumor syndrome)
  ENSP ID: ENSP00000457108
MSSGLWSQEKVTSPYWEERIFYLLLQECSVTDKQTQKLLKVPKGSIGQYIQDRSVGHSRIPSAKGKKNQIGLKILEQPHAVLFVDEKDVVEINEKFTELLLAITNCEERFSLFKNRNRLSKGLQIDVGCPVKVQLRSGEEKFPGVVRFRGPLLAERTVSGIFFGVE

SEQ ID NO: 21436 - protein, 953 aa, Homo sapiens; identical to SEQ ID NO: 21429
  Payload ID: 4310
  Gene Symbol: CYLD
  Gene Name: cylindromatosis (turban tumor syndrome)
  Uniprot ID: Q9NQC7
  ENSP ID: ENSP00000457576

SEQ ID NO: 21437 - protein, 66 aa, Homo sapiens
  Payload ID: 4310
  Gene Symbol: CYLD
  Gene Name: cylindromatosis (turban tumor syndrome)
  ENSP ID: ENSP00000458507
  MOD_RES (1)..(1): Any amino acid
XGCIPCQNMELFAVLCIETSHYVAFVKYGKDDSAWLFFDSMADRDGTENAFLLHVAQGSGFGAILH

SEQ ID NO: 21438 - protein, 910 aa, Homo sapiens
  Payload ID: 4310
  Gene Symbol: CYLD
  Gene Name: cylindromatosis (turban tumor syndrome)
  ENSP ID: ENSP00000462134
MSSGLWSQEKVTSPYWEERIFYLLLQECSVTDKQTQKLLKVPKGSIGQYIQDRSVGHSRIPSAKGKKNQIGLKILEQPHAVLFVDEKDVVEINEKFTELLLAITNCEERFSLFKNRNRLSKGLQIDVGCPVKVQLRSGEEKFPGVVRFRGPLLAERTVSGIFFGVELLEEGRGQGFTDGVYQGKQLFQCDEDCGVFVALDKLELIEDDDTALESDYAGPGDTMQVELPPLEINSRVSLKVGETIESGTVIFCDVLPGKESLGYFVGVDMDNPIGNWDGRFDGVQLCSFACVESTILLHINDIIPESVTQERRPPKLAFMSRGVGDKGSSSHNKPKATGSTSDPGNRNRSELFYTLNGSSVDSQPQSKSKNTWYIDEVAEDPAKSLTEISTDFDRSSPPLQPPPVNSLTTENRFHSLPFSLTKMPNTNGSIGHSPLSLSAQSVMEELNTAPVQESPPLAMPPGNSHGLEVGSLAEVKENPPFYGVIRWIGQPPGLNEVLAGLELEDECAGCTDGTFRGTRYFTCALKKALFVKLKSCRPDSRFASLQPVSNQIERCNSLAFGGYLSEVVEENTPPKMEKEGLEIMIGKKKGIQGHYNSCYLDSTLFCLFAFSSVLDTVLLRPKEKNDVEYYSETQELLRTEIVNPLRIYGYVCATKIMKLRKILEKVEAASGFTSEEKDPEEFLNILFHHILRVEPLLKIRSAGQKVQDCYFYQIFMEKNEKVGVPTIQQLLEWSFINSNLKFAEAPSCLIIQMPRFGKDFKLFKKIFPSLELNITDLLEDTPRQCRICGGLAMYECRECYDDPDISAGKIKQFCKTCNTQVHLHPKRLNHKYNPVSLPKDLPDWDWRHGCIPCQNMELFAVLCIETSHYVAFVKYGKDDSAWLFFDSMADRDAALSDPAPTAFWCGPPVA

SEQ ID NO: 21439 - protein, 104 aa, Homo sapiens
  Payload ID: 4310
  Gene Symbol: CYLD
  Gene Name: cylindromatosis (turban tumor syndrome)
  ENSP ID: ENSP00000463197
ISAGKIKQFCKTCNTQVHLHPKRLNHKYNPVSLPKDLPDWDWRHGCIPCQNMELFAVLCIETSHYVAFVKYGKDDSAWLFFDSMADRDGTENAFLLHVAQGSGL

SEQ ID NO: 21440 - protein, 503 aa, Homo sapiens
  Payload ID: 4311
  Gene Symbol: CYP3A7-CYP3A51P
  Gene Name: CYP3A7-CYP3A51P readthrough
  ENSP ID: ENSP00000479282
MDLIPNLAVETWLLLAVSLILLYLYGTRTHGLFKKLGIPGPTPLPFLGNALSFRKGYWTFDMECYKKYRKVWGIYDCQQPMLAITDPDMIKTVLVKECYSVFTNRRPFGPVGFMKNAISIAEDEEWKRIRSLLSPTFTSGKLKEMVPIIAQYGDVLVRNLRREAETGKPVTLKHVFGAYSMDVITSTSFGVSIDSLNNPQDPFVENTKKLLRFNPLDPFVLSIKVFPFLTPILEALNITVFPRKVISFLTKSVKQIKEGRLKETQKHRVDFLQLMIDSQNSKDSETHKALSDLELMAQSIIFIFAGYETTSSVLSFIIYELATHPDVQQKVQKEIDTVLPNKAPPTYDTVLQLEYLDMVVNETLRLFPVAMRLERVCKKDVEINGMFIPKGVVVMIPSYVLHHDPKYWTEPEKFLPERFSKKNKDNIDPYIYTPFGSGPRNCIGMRFALVNMKLALVRVLQNFSFKPCKETQIPLKLRLGGLLQPEKPIVLKVESRDGTVSGT

SEQ ID NO: 21441 - protein, 535 aa, Homo sapiens
  Payload ID: 4311
  Gene Symbol: CYP3A7-CYP3A51P
  Gene Name: CYP3A7-CYP3A51P readthrough
  Uniprot ID: P24462
  ENSP ID: ENSP00000480571
MDLIPNLAVETWLLLAVSLILLYLYGTRTHGLFKKLGIPGPTPLPFLGNALSFRKGYWTFDMECYKKYRKVWGIYDCQQPMLAITDPDMIKTVLVKECYSVFTNRRPFGPVGFMKNAISIAEDEEWKRIRSLLSPTFTSGKLKEMVPIIAQYGDVLVRNLRREAETGKPVTLKHVFGAYSMDVITSTSFGVSIDSLNNPQDPFVENTKKLLRFNPLDPFVLSIKVFPFLTPILEALNITVFPRKVISFLTKSVKQIKEGRLKETQKHRVDFLQLMIDSQNSKDSETHKALSDLELMAQSIIFIFAGYETTSSVLSFIIYELATHPDVQQKVQKEIDTVLPNKAPPTYDTVLQLEYLDMVVNETLRLFPVAMRLERVCKKDVEINGMFIPKGVVVMIPSYVLHHDPKYWTEPEKFLPERFSKKNKDNIDPYIYTPFGSGPRNCIGMRFALVNMKLALVRVLQNFSFKPCKETQIPLKLRFGGLLLTEKPIVLKAESRDETFVDMEPIHMDFLRSLAFQGPHLCFFWELLCPTIRSR

SEQ ID NO: 21442 - protein, 361 aa, Homo sapiens
  Payload ID: 4312
  Gene Symbol: CTH
  Gene Name: cystathionine gamma-lyase
  Uniprot ID: P32929
  ENSP ID: ENSP00000311554
MQEKDASSQGFLPHFQHFATQAIHVGQDPEQWTSRAVVPPISLSTTFKQGAPGQHSGFEYSRSGNPTRNCLEKAVAALDGAKYCLAFASGLAATVTITHLLKAGDQIICMDDVYGGTNRYFRQVASEFGLKISFVDCSKIKLLEAAITPETKRPLALGADISMYSATKYMNGHSDVVMGLVSVNCESLHNRLRFLQNSLGAVPSPIDCYLCNRGLKTLHVRMEKHFKNGMAVAQFLESNPWVEKVIYPGLPSHPQHELVKRQCTGCTGMVTFYIKGTLQHAEIFLKNLKLFTLAESLGGFESLAELPAIMTHASVLKNDRDVLGISDTLIRLSVGLEDEEDLLEDLDQALKAAHPPSGSHS

SEQ ID NO: 21443 - protein, 405 aa, Homo sapiens
  Payload ID: 4312
  Gene Symbol: CTH
  Gene Name: cystathionine gamma-lyase
  Uniprot ID: P32929
  ENSP ID: ENSP00000359976
MQEKDASSQGFLPHFQHFATQAIHVGQDPEQWTSRAVVPPISLSTTFKQGAPGQHSGFEYSRSGNPTRNCLEKAVAALDGAKYCLAFASGLAATVTITHLLKAGDQIICMDDVYGGTNRYFRQVASEFGLKISFVDCSKIKLLEAAITPETKLVWIETPTNPTQKVIDIEGCAHIVHKHGDIILVVDNTFMSPYFQRPLALGADISMYSATKYMNGHSDVVMGLVSVNCESLHNRLRFLQNSLGAVPSPIDCYLCNRGLKTLHVRMEKHFKNGMAVAQFLESNPWVEKVIYPGLPSHPQHELVKRQCTGCTGMVTFYIKGTLQHAEIFLKNLKLFTLAESLGGFESLAELPAIMTHASVLKNDRDVLGISDTLIRLSVGLEDEEDLLEDLDQALKAAHPPSGSHS

SEQ ID NO: 21444 - protein, 373 aa, Homo sapiens
  Payload ID: 4312
  Gene Symbol: CTH
  Gene Name: cystathionine gamma-lyase
  Uniprot ID: P32929
  ENSP ID: ENSP00000413407
MQEKDASSQGFLPHFQHFATQAIHVGQDPEQWTSRAVVPPISLSTTFKQGAPGQHSGFEYSRSGNPTRNCLEKAVAALDGAKYCTNRYFRQVASEFGLKISFVDCSKIKLLEAAITPETKLVWIETPTNPTQKVIDIEGCAHIVHKHGDIILVVDNTFMSPYFQRPLALGADISMYSATKYMNGHSDVVMGLVSVNCESLHNRLRFLQNSLGAVPSPIDCYLCNRGLKTLHVRMEKHFKNGMAVAQFLESNPWVEKVIYPGLPSHPQHELVKRQCTGCTGMVTFYIKGTLQHAEIFLKNLKLFTLAESLGGFESLAELPAIMTHASVLKNDRDVLGISDTLIRLSVGLEDEEDLLEDLDQALKAAHPPSGSHS

SEQ ID NO: 21445 - protein, 551 aa, Homo sapiens
  Payload ID: 4313
  Gene Symbol: CBS
  Gene Name: cystathionine-beta-synthase
  Uniprot ID: P35520
  ENSP ID: ENSP00000344460
MPSETPQAEVGPTGCPHRSGPHSAKGSLEKGSPEDKEAKEPLWIRPDAPSRCTWQLGRPASESPHHHTAPAKSPKILPDILKKIGDTPMVRINKIGKKFGLKCELLAKCEFFNAGGSVKDRISLRMIEDAERDGTLKPGDTIIEPTSGNTGIGLALAAAVRGYRCIIVMPEKMSSEKVDVLRALGAEIVRTPTNARFDSPESHVGVAWRLKNEIPNSHILDQYRNASNPLAHYDTTADEILQQCDGKLDMLVASVGTGGTITGIARKLKEKCPGCRIIGVDPEGSILAEPEELNQTEQTTYEVEGIGYDFIPTVLDRTVVDKWFKSNDEEAFTFARMLIAQEGLLCGGSAGSTVAVAVKAAQELQEGQRCVVILPDSVRNYMTKFLSDRWMLQKGFLKEEDLTEKKPWWWHLRVQELGLSAPLTVLPTITCGHTIEILREKGFDQAPVVDEAGVILGMVTLGNMLSSLLAGKVQPSDQVGKVIYKQFKQIRLTDTLGRLSHILEMDHFALVVHEQIQYHSTGKSSQRQMVFGVVTAIDLLNFVAAQERDQK

SEQ ID NO: 21446 - protein, 551 aa, Homo sapiens; identical to SEQ ID NO: 21445
  Payload ID: 4313
  Gene Symbol: CBS
  Gene Name: cystathionine-beta-synthase
  Uniprot ID: P35520
  ENSP ID: ENSP00000352643

SEQ ID NO: 21447 - protein, 551 aa, Homo sapiens; identical to SEQ ID NO: 21445
  Payload ID: 4313
  Gene Symbol: CBS
  Gene Name: cystathionine-beta-synthase
  Uniprot ID: P35520
  ENSP ID: ENSP00000381225

SEQ ID NO: 21448 - protein, 551 aa, Homo sapiens; identical to SEQ ID NO: 21445
  Payload ID: 4313
  Gene Symbol: CBS
  Gene Name: cystathionine-beta-synthase
  Uniprot ID: P35520
  ENSP ID: ENSP00000381231

SEQ ID NO: 21449 - protein, 177 aa, Homo sapiens
  Payload ID: 4313
  Gene Symbol: CBS
  Gene Name: cystathionine-beta-synthase
  ENSP ID: ENSP00000388235
MPSETPQAEVGPTGCPHRSGPHSAKGSLEKGSPEDKEAKEPLWIRPDAPSRCTWQLGRPASESPHHHTAPAKSPKILPDILKKIGDTPMVRINKIGKKFGLKCELLAKCEFFNAGGSVKDRISLRMIEDAERDGTLKPGDTIIEPTSGNTGIGLALAAAVRGYRCIIVMPEKMSSEK

SEQ ID NO: 21450 - protein, 149 aa, Homo sapiens
  Payload ID: 4313
  Gene Symbol: CBS
  Gene Name: cystathionine-beta-synthase
  ENSP ID: ENSP00000402823
  MOD_RES (1)..(1): Any amino acid
XGLSAPLTVLPTITCGHTIEILREKGFDQAPVVDEAGVILGMVTLGNMLSSLLAGKVQPSDQVGKVIYKQFKQIRLTDTLGRLSHILEMDHFALVVHEQIQSQDQAWAGVVGGPADHSTGKSSQRQMVFGVVTAIDLLNFVAAQERDQK

SEQ ID NO: 21451 - protein, 224 aa, Homo sapiens
  Payload ID: 4313
  Gene Symbol: CBS
  Gene Name: cystathionine-beta-synthase
  ENSP ID: ENSP00000405929
  MOD_RES (1)..(1): Any amino acid
XGSAGSTVAVAVKAAQELQEGQRCVVILPDSVRNYMTKFLSDRWMLQKGFLKEEDLTEKKPWWWHLRVQELGLSAPLTVLPTITCGHTIEILREKGFDQAPVVDEAGVILGMVTLGNMLSSLLAGKVQPSDQVGKVIYKQFKQIRLTDTLGRLSHILEMDHFALVVHEQIQSQDQAWAGVVGGPAGSPNQVFLEHVHACHHRLWLLSSTSGLRAHNRDGTAPKT

SEQ ID NO: 21452 - protein, 159 aa, Homo sapiens
  Payload ID: 4313
  Gene Symbol: CBS
  Gene Name: cystathionine-beta-synthase
  ENSP ID: ENSP00000408014
  MOD_RES (1)..(1): Any amino acid
XVQELGLSAPLTVLPTITCGHTIEILREKGFDQAPVVDEAGVILGMVTLGNMLSSLLAGKVQPSDQVGKVIYKQFKQIRLTDTLGRLSHILEMDHFALVVHEQIQSQDQAWAGVVGGPAEKKKDANSNVRVPKSSLPGACPRLSPPSVAAFKHVRAACS

SEQ ID NO: 21453 - protein, 551 aa, Homo sapiens; identical to SEQ ID NO: 21445
  Payload ID: 4314
  Gene Symbol: CBSL
  Gene Name: cystathionine-beta-synthase like
  Uniprot ID: P35520
  ENSP ID: ENSP00000381234

SEQ ID NO: 21454 - protein, 551 aa, Homo sapiens; identical to SEQ ID NO: 21445
  Payload ID: 4314
  Gene Symbol: CBSL
  Gene Name: cystathionine-beta-synthase like
  Uniprot ID: P35520
  ENSP ID: ENSP00000479559

SEQ ID NO: 21455 - protein, 551 aa, Homo sapiens; identical to SEQ ID NO: 21445
  Payload ID: 4314
  Gene Symbol: CBSL
  Gene Name: cystathionine-beta-synthase like
  Uniprot ID: P35520
  ENSP ID: ENSP00000481719

SEQ ID NO: 21456 - protein, 565 aa, Homo sapiens
  Payload ID: 4314
  Gene Symbol: CBSL
  Gene Name: cystathionine-beta-synthase like
  Uniprot ID: P35520
  ENSP ID: ENSP00000485527
MPSETPQAEVGPTGCPHRSGPHSAKGSLEKGSPEDKEAKEPLWIRPDAPSRCTWQLGRPASESPHHHTAPAKSPKILPDILKKIGDTPMVRINKIGKKFGLKCELLAKCEFFNAGGSVKDRISLRMIEDAERDGTLKPGDTIIEPTSGNTGIGLALAAAVRGYRCIIVMPEKMSSEKVDVLRALGAEIVRTPTNARFDSPESHVGVAWRLKNEIPNSHILDQYRNASNPLAHYDTTADEILQQCDGKLDMLVASVGTGGTITGIARKLKEKCPGCRIIGVDPEGSILAEPEELNQTEQTTYEVEGIGYDFIPTVLDRTVVDKWFKSNDEEAFTFARMLIAQEGLLCGGSAGSTVAVAVKAAQELQEGQRCVVILPDSVRNYMTKFLSDRWMLQKGFLKEEDLTEKKPWWWHLRVQELGLSAPLTVLPTITCGHTIEILREKGFDQAPVVDEAGVILGMVTLGNMLSSLLAGKVQPSDQVGKVIYKQFKQIRLTDTLGRLSHILEMDHFALVVHEQIQSQDQAWAGVVGGPADHSTGKSSQRQMVFGVVTAIDLLNFVAAQERDQK

SEQ ID NO: 21457 - protein, 551 aa, Homo sapiens; identical to SEQ ID NO: 21445
  Payload ID: 4314
  Gene Symbol: CBSL
  Gene Name: cystathionine-beta-synthase like
  Uniprot ID: P35520
  ENSP ID: ENSP00000485669

SEQ ID NO: 21458 - protein, 103 aa, Homo sapiens
  Payload ID: 4315
  Gene Symbol: CST11
  Gene Name: cystatin 11
  Uniprot ID: Q9H112
  ENSP ID: ENSP00000366206
MMAEPWQALQLLLAILLTLMALPYQARKKTFLSVHEVMAVENYAKDSLQWITDQYNKESDDKYHFRIFRVLKVQRQQVNCFFSVFAVPWFEQYKILNKSCSSD

SEQ ID NO: 21459 - protein, 138 aa, Homo sapiens
  Payload ID: 4315
  Gene Symbol: CST11
  Gene Name: cystatin 11
  Uniprot ID: Q9H112
  ENSP ID: ENSP00000366208
MMAEPWQALQLLLAILLTLMALPYQARKKTFLSVHEVMAVENYAKDSLQWITDQYNKESDDKYHFRIFRVLKVQRQVTDHLEYHLNVEMQWTTCQKPETTNCVPQERELHKQVNCFFSVFAVPWFEQYKILNKSCSSD

SEQ ID NO: 21460 - protein, 142 aa, Homo sapiens
  Payload ID: 4316
  Gene Symbol: CST8
  Gene Name: cystatin 8 (cystatin-related epididymal specific)
  Uniprot ID: O60676
  ENSP ID: ENSP00000246012
MPRCRWLSLILLTIPLALVARKDPKKNETGVLRKLKPVNASNANVKQCLWFAMQEYNKESEDKYVFLVVKTLQAQLQVTNLLEYLIDVEIARSDCRKPLSTNEICAIQENSKLKRKLSCSFLVGALPWNGEFTVMEKKCEDA

SEQ ID NO: 21461 - protein, 134 aa, Homo sapiens
  Payload ID: 4316
  Gene Symbol: CST8
  Gene Name: cystatin 8 (cystatin-related epididymal specific)
  ENSP ID: ENSP00000399144
MPRCRWLSLILLTIPLALVARKDPKKNETGVLRKLKPVNASNANVKQCLWFAMQEYNKESEDKYVFLVVKTLQAQLQVTNLLEYLIDVEIARSDCRKPLSTNEICAIQENSKLKRKLSCSFLVGALPWNGEFTV

SEQ ID NO: 21462 - protein, 159 aa, Homo sapiens
  Payload ID: 4317
  Gene Symbol: CST9
  Gene Name: cystatin 9 (testatin)
  Uniprot ID: Q5W186
  ENSP ID: ENSP00000366170
MSSPQRRKAMPWALSLLLMGFQLLVTYAWCSEEEMGGNNKIVQDPMFLATVEFALNTFNVQSKEEHAYRLLRVLSSWREDSMDRKWRGKMVFSMNLQLRQTVCRKFEDDIDNCPFQESLELNNVRQGISFPQVHSCGCCMGCGVGTGAADKAIPRDKGK

SEQ ID NO: 21463 - protein, 147 aa, Homo sapiens
  Payload ID: 4318
  Gene Symbol: CST9L
  Gene Name: cystatin 9-like
  Uniprot ID: Q9H4G1
  ENSP ID: ENSP00000366178
MLGLPWKGGLSWALLLLLLGSQILLIYAWHFHEQRDCDEHNVMARYLPATVEFAVHTFNQQSKDYYAYRLGHILNSWKEQVESKTVFSMELLLGRTRCGKFEDDIDNCHFQESTELNNTFTCFFTISTRPWMTQFSLLNKTCLEGFH

SEQ ID NO: 21464 - protein, 98 aa, Homo sapiens
  Payload ID: 4319
  Gene Symbol: CSTA
  Gene Name: cystatin A (stefin A)
  Uniprot ID: P01040
  ENSP ID: ENSP00000264474
MIPGGLSEAKPATPEIQEIVDKVKPQLEEKTNETYGKLEAVQYKTQVVAGTNYYIKVRAGDNKYMHLKVFKSLPGQNEDLVLTGYQVDKNKDDELTGF

SEQ ID NO: 21465 - protein, 63 aa, Homo sapiens
  Payload ID: 4319
  Gene Symbol: CSTA
  Gene Name: cystatin A (stefin A)
  ENSP ID: ENSP00000418891
MIPGGLSEAKPATPEIQEIVDKVKPQLEEKTNETYGKLEAVQYKTQVVAGTNYYIKVRVQHLL

SEQ ID NO: 21466 - protein, 98 aa, Homo sapiens
  Payload ID: 4320
  Gene Symbol: CSTB
  Gene Name: cystatin B (stefin B)
  Uniprot ID: P04080
  ENSP ID: ENSP00000291568
MMCGAPSATQPATAETQHIADQVRSQLEEKENKKFPVFKAVSFKSQVVAGTNYFIKVHVGDEDFVHLRVFQSLPHENKPLTLSNYQTNKAKHDELTYF

SEQ ID NO: 21467 - protein, 146 aa, Homo sapiens
  Payload ID: 4321
  Gene Symbol: CST3
  Gene Name: cystatin C
  Uniprot ID: P01034
  ENSP ID: ENSP00000366124
MAGPLRAPLLLLAILAVALAVSPAAGSSPGKPPRLVGGPMDASVEEEGVRRALDFAVGEYNKASNDMYHSRALQVVRARKQIVAGVNYFLDVELGRTTCTKTQPNLDNCPFHDQPHLKRKAFCSFQIYAVPWQGTMTLSKSTCQDA

SEQ ID NO: 21468 - protein, 146 aa, Homo sapiens; identical to SEQ ID NO: 21467
  Payload ID: 4321
  Gene Symbol: CST3
  Gene Name: cystatin C
  Uniprot ID: P01034
  ENSP ID: ENSP00000381446

SEQ ID NO: 21469 - protein, 146 aa, Homo sapiens; identical to SEQ ID NO: 21467
  Payload ID: 4321
  Gene Symbol: CST3
  Gene Name: cystatin C
  Uniprot ID: P01034
  ENSP ID: ENSP00000381448

SEQ ID NO: 21470 - protein, 142 aa, Homo sapiens
  Payload ID: 4322
  Gene Symbol: CST5
  Gene Name: cystatin D
  Uniprot ID: P28325
  ENSP ID: ENSP00000307132
MMWPMHTPLLLLTALMVAVAGSASAQSRTLAGGIHATDLNDKSVQCALDFAISEYNKVINKDEYYSRPLQVMAAYQQIVGGVNYYFNVKFGRTTCTKSQPNLDNCPFNDQPKLKEEEFCSFQINEVPWEDKISILNYKCRKV

SEQ ID NO: 21471 - protein, 149 aa, Homo sapiens
  Payload ID: 4323
  Gene Symbol: CST6
  Gene Name: cystatin E/M
  Uniprot ID: Q15828
  ENSP ID: ENSP00000311313
MARSNLPLALGLALVAFCLLALPRDARARPQERMVGELRDLSPDDPQVQKAAQAAVASYNMGSNSIYYFRDTHIIKAQSQLVAGIKYFLTMEMGSTDCRKTRVTGDHVDLTTCPLAAGAQQEKLRCDFEVLVVPWQNSSQLLKHNCVQM

SEQ ID NO: 21472 - protein, 145 aa, Homo sapiens
  Payload ID: 4324
  Gene Symbol: CST7
  Gene Name: cystatin F (leukocystatin)
  Uniprot ID: O76096
  ENSP ID: ENSP00000420384
MRAAGTLLAFCCLVLSTTGGPSPDTCSQDLNSRVKPGFPKTIKTNDPGVLQAARYSVEKFNNCTNDMFLFKESRITRALVQIVKGLKYMLEVEIGRTTCKKNQHLRLDDCDFQTNHTLKQTLSCYSEVWVVPWLQHFEVPVLRCH

SEQ ID NO: 21473 - protein, 141 aa, Homo sapiens
  Payload ID: 4325
  Gene Symbol: CST4
  Gene Name: cystatin S
  Uniprot ID: P01036
  ENSP ID: ENSP00000217423
MARPLCTLLLLMATLAGALASSSKEENRIIPGGIYDADLNDEWVQRALHFAISEYNKATEDEYYRRPLQVLRAREQTFGGVNYFFDVEVGRTICTKSQPNLDTCAFHEQPELQKKQLCSFEIYEVPWEDRMSLVNSRCQEA

SEQ ID NO: 21474 - protein, 141 aa, Homo sapiens
  Payload ID: 4326
  Gene Symbol: CST2
  Gene Name: cystatin SA
  Uniprot ID: P09228
  ENSP ID: ENSP00000307540
MAWPLCTLLLLLATQAVALAWSPQEEDRIIEGGIYDADLNDERVQRALHFVISEYNKATEDEYYRRLLRVLRAREQIVGGVNYFFDIEVGRTICTKSQPNLDTCAFHEQPELQKKQLCSFQIYEVPWEDRMSLVNSRCQEA

SEQ ID NO: 21475 - protein, 141 aa, Homo sapiens
  Payload ID: 4327
  Gene Symbol: CST1
  Gene Name: cystatin SN
  Uniprot ID: P01037
  ENSP ID: ENSP00000305731
MAQYLSTLLLLLATLAVALAWSPKEEDRIIPGGIYNADLNDEWVQRALHFAISEYNKATKDDYYRRPLRVLRARQQTVGGVNYFFDVEVGRTICTKSQPNLDTCAFHEQPELQKKQLCSFEIYEVPWENRRSLVKSRCQES

SEQ ID NO: 21476 - protein, 141 aa, Homo sapiens; identical to SEQ ID NO: 21475
  Payload ID: 4327
  Gene Symbol: CST1
  Gene Name: cystatin SN
  Uniprot ID: P01037
  ENSP ID: ENSP00000381439

SEQ ID NO: 21477 - protein, 145 aa, Homo sapiens
  Payload ID: 4328
  Gene Symbol: CSTL1
  Gene Name: cystatin-like 1
  Uniprot ID: Q9H114
  ENSP ID: ENSP00000246020
MGIGCWRNPLLLLIALVLSAKLGHFQRWEGFQQKLMSKKNMNSTLNFFIQSYNNASNDTYLYRVQRLIRSQMQLTTGVEYIVTVKIGWTKCKRNDTSNSSCPLQSKKLRKSLICESLIYTMPWINYFQLWNNSCLEAEHVGRNLR

SEQ ID NO: 21478 - protein, 145 aa, Homo sapiens; identical to SEQ ID NO: 21477
  Payload ID: 4328
  Gene Symbol: CSTL1
  Gene Name: cystatin-like 1
  Uniprot ID: Q9H114
  ENSP ID: ENSP00000344907

SEQ ID NO: 21479 - protein, 37 aa, Homo sapiens
  Payload ID: 4328
  Gene Symbol: CSTL1
  Gene Name: cystatin-like 1
  ENSP ID: ENSP00000477757
MNSTLNFFIQSYNNASNDTYLYRVQRLIRSQMQQVHC

SEQ ID NO: 21480 - protein, 193 aa, Homo sapiens
  Payload ID: 4329
  Gene Symbol: CSRP1
  Gene Name: cysteine and glycine-rich protein 1
  Uniprot ID: P21291
  ENSP ID: ENSP00000345079
MPNWGGGKKCGVCQKTVYFAEEVQCEGNSFHKSCFLCMVCKKNLDSTTVAVHGEEIYCKSCYGKKYGPKGYGYGQGAGTLSTDKGESLGIKHEEAPGHRPTTNPNASKFAQKIGGSERCPRCSQAVYAAEKVIGAGKSWHKACFRCAKCGKGLESTTLADKDGEIYCKGCYAKNFGPKGFGFGQGAGALVHSE

SEQ ID NO: 21481 - protein, 193 aa, Homo sapiens; identical to SEQ ID NO: 21480
  Payload ID: 4329
  Gene Symbol: CSRP1
  Gene Name: cysteine and glycine-rich protein 1
  Uniprot ID: P21291
  ENSP ID: ENSP00000356275

SEQ ID NO: 21482 - protein, 153 aa, Homo sapiens
  Payload ID: 4329
  Gene Symbol: CSRP1
  Gene Name: cysteine and glycine-rich protein 1
  ENSP ID: ENSP00000432110
MPNWGGGKKCGVCQKTVYFAEEVQCEGNSFHKSCFLCMVCKKNLDSTTVAVHGEEIYCKSCYGKKYGPKGYGYGQGAGTLSTDKGESLGIKHEEAPGHRPTTNPNASKFAQKIGGSERCPRCSQAVYAAEKDPKVRMLFDLLKHLVPCLMGGS

SEQ ID NO: 21483 - protein, 193 aa, Homo sapiens; identical to SEQ ID NO: 21480
  Payload ID: 4329
  Gene Symbol: CSRP1
  Gene Name: cysteine and glycine-rich protein 1
  Uniprot ID: P21291
  ENSP ID: ENSP00000434147

SEQ ID NO: 21484 - protein, 160 aa, Homo sapiens
  Payload ID: 4329
  Gene Symbol: CSRP1
  Gene Name: cysteine and glycine-rich protein 1
  ENSP ID: ENSP00000436491
MPNWGGGKKCGVCQKTVYFAEEIYCKSCYGKKYGPKGYGYGQGAGTLSTDKGESLGIKHEEAPGHRPTTNPNASKFAQKIGGSERCPRCSQAVYAAEKVIGAGKSWHKACFRCAKCGKGLESTTLADKDGEIYCKGCYAKNFGPKGFGFGQGAGALVHSE

SEQ ID NO: 21485 - protein, 193 aa, Homo sapiens; identical to SEQ ID NO: 21480
  Payload ID: 4329
  Gene Symbol: CSRP1
  Gene Name: cysteine and glycine-rich protein 1
  Uniprot ID: P21291
  ENSP ID: ENSP00000436792

SEQ ID NO: 21486 - protein, 153 aa, Homo sapiens
  Payload ID: 4329
  Gene Symbol: CSRP1
  Gene Name: cysteine and glycine-rich protein 1
  ENSP ID: ENSP00000437218
MVCKKNLDSTTVAVHGEEIYCKSCYGKKYGPKGYGYGQGAGTLSTDKGESLGIKHEEAPGHRPTTNPNASKFAQKIGGSERCPRCSQAVYAAEKVIGAGKSWHKACFRCAKCGKGLESTTLADKDGEIYCKGCYAKNFGPKGFGFGQGAGALV

SEQ ID NO: 21487 - protein, 17 aa, Homo sapiens
  Payload ID: 4329
  Gene Symbol: CSRP1
  Gene Name: cysteine and glycine-rich protein 1
  ENSP ID: ENSP00000483864
MPNWGGGKKSGALVHSE

SEQ ID NO: 21488 - protein, 193 aa, Homo sapiens
  Payload ID: 4330
  Gene Symbol: CSRP2
  Gene Name: cysteine and glycine-rich protein 2
  Uniprot ID: Q16527
  ENSP ID: ENSP00000310901
MPVWGGGNKCGACGRTVYHAEEVQCDGRSFHRCCFLCMVCRKNLDSTTVAIHDEEIYCKSCYGKKYGPKGYGYGQGAGTLNMDRGERLGIKPESVQPHRPTTNPNTSKFAQKYGGAEKCSRCGDSVYAAEKIIGAGKPWHKNCFRCAKCGKSLESTTLTEKEGEIYCKGCYAKNFGPKGFGYGQGAGALVHAQ

SEQ ID NO: 21489 - protein, 243 aa, Homo sapiens
  Payload ID: 4330
  Gene Symbol: CSRP2
  Gene Name: cysteine and glycine-rich protein 2
  ENSP ID: ENSP00000449824
MPVWGGGNKCGACGRTVYHAEEVQCDGRSFHRCCFLCMVCRKNLDSTTVAIHDEEIYCKSCYGKKYGPKGYGYGQGAGTLNMDRGERLGIKPESIPSCIKESCSQKQVICIYFNFTAPWRPDVMKLNGREMCCVNHERCFSCAIVQPHRPTTNPNTSKFAQKYGGAEKCSRCGDSVYAAEKIIGAGKPWHKNCFRCAKCGKSLESTTLTEKEGEIYCKGCYAKNFGPKGFGYGQGAGALVHAQ

SEQ ID NO: 21490 - protein, 193 aa, Homo sapiens; identical to SEQ ID NO: 21488
  Payload ID: 4330
  Gene Symbol: CSRP2
  Gene Name: cysteine and glycine-rich protein 2
  Uniprot ID: Q16527
  ENSP ID: ENSP00000450056

SEQ ID NO: 21491 - protein, 187 aa, Homo sapiens
  Payload ID: 4330
  Gene Symbol: CSRP2
  Gene Name: cysteine and glycine-rich protein 2
  ENSP ID: ENSP00000450143
MPVWGGGNKCGACGRTVYHAEEVQCDGRSFHRCCFLCMVCRKNLDSTTVAIHDEEIYCKSCYGKKYGPKGYGYGQGAGTLNMDRGERLGIKPESVQPHRPTTNPNTSKFAQKYGGAEKCSRCGDSVYAAEKIIGAGKPWHKNCFRCAKCGKSLESTTLTEKEGEIYCKGKIHFSYCCPYEYSTLVLV

SEQ ID NO: 21492 - protein, 194 aa, Homo sapiens
  Payload ID: 4331
  Gene Symbol: CSRP3
  Gene Name: cysteine and glycine-rich protein 3 (cardiac LIM protein)
  Uniprot ID: P50461
  ENSP ID: ENSP00000265968
MPNWGGGAKCGACEKTVYHAEEIQCNGRSFHKTCFHCMACRKALDSTTVAAHESEIYCKVCYGRRYGPKGIGYGQGAGCLSTDTGEHLGLQFQQSPKPARSVTTSNPSKFTAKFGESEKCPRCGKSVYAAEKVMGGGKPWHKTCFRCAICGKSLESTNVTDKDGELYCKVCYAKNFGPTGIGFGGLTQQVEKKE

SEQ ID NO: 21493 - protein, 194 aa, Homo sapiens; identical to SEQ ID NO: 21492
  Payload ID: 4331
  Gene Symbol: CSRP3
  Gene Name: cysteine and glycine-rich protein 3 (cardiac LIM protein)
  Uniprot ID: P50461
  ENSP ID: ENSP00000431813

SEQ ID NO: 21494 - protein, 332 aa, Homo sapiens
  Payload ID: 4332
  Gene Symbol: CHORDC1
  Gene Name: cysteine and histidine-rich domain (CHORD) containing 1
  Uniprot ID: Q9UHD1
  ENSP ID: ENSP00000319255
MALLCYNRGCGQRFDPETNSDDACTYHPGVPVFHDALKGWSCCKRRTTDFSDFLSIVGCTKGRHNSEKPPEPVKPEVKTTEKKELCELKPKFQEHIIQAPKPVEAIKRPSPDEPMTNLELKISASLKQALDKLKLSSGNEENKKEEDNDEIKIGTSCKNGGCSKTYQGLESLEEVCVYHSGVPIFHEGMKYWSCCRRKTSDFNTFLAQEGCTKGKHMWTKKDAGKKVVPCRHDWHQTGGEVTISVYAKNSLPELSRVEANSTLLNVHIVFEGEKEFDQNVKLWGVIDVKRSYVTMTATKIEITMRKAEPMQWASLELPAAKKQEKQKDATTD

SEQ ID NO: 21495 - protein, 313 aa, Homo sapiens
  Payload ID: 4332
  Gene Symbol: CHORDC1
  Gene Name: cysteine and histidine-rich domain (CHORD) containing 1
  Uniprot ID: Q9UHD1
  ENSP ID: ENSP00000401080
MALLCYNRGCGQRFDPETNSDDACTYHPGVPVFHDALKGCTKGRHNSEKPPEPVKPEVKTTEKKELCELKPKFQEHIIQAPKPVEAIKRPSPDEPMTNLELKISASLKQALDKLKLSSGNEENKKEEDNDEIKIGTSCKNGGCSKTYQGLESLEEVCVYHSGVPIFHEGMKYWSCCRRKTSDFNTFLAQEGCTKGKHMWTKKDAGKKVVPCRHDWHQTGGEVTISVYAKNSLPELSRVEANSTLLNVHIVFEGEKEFDQNVKLWGVIDVKRSYVTMTATKIEITMRKAEPMQWASLELPAAKKQEKQKDATTD

SEQ ID NO: 21496 - protein, 116 aa, Homo sapiens
  Payload ID: 4332
  Gene Symbol: CHORDC1
  Gene Name: cysteine and histidine-rich domain (CHORD) containing 1
  ENSP ID: ENSP00000431929
MALLCYNRGCGQRFDPETNSDDACTYHPGVPVFHDALKGWSCCKRRTTDFSDFLSIVGCTKGRHNSEKPPEPVKPEVKTTEKKELCELKPKFQEHIIQAPKPVEAIKRPRSSSCYT

SEQ ID NO: 21497 - protein, 117 aa, Homo sapiens
  Payload ID: 4332
  Gene Symbol: CHORDC1
  Gene Name: cysteine and histidine-rich domain (CHORD) containing 1
  ENSP ID: ENSP00000432019
MALLCYNRGCGQRFDPETNSDGKRNAPPALPPLHLISRGGPLGRRVSADLLQPSSRGPRSMPLLGLPWLPAQPAGRPSVAPRSLGERPAPAPDCPLPLRRETLPWIHVFPPSSPHSF

SEQ ID NO: 21498 - protein, 39 aa, Homo sapiens
  Payload ID: 4332
  Gene Symbol: CHORDC1
  Gene Name: cysteine and histidine-rich domain (CHORD) containing 1
  ENSP ID: ENSP00000433440
MALLCYNRGCGQRFDPETNSDDACTYHPGVPVFHDALKS

SEQ ID NO: 21499 - protein, 144 aa, Homo sapiens
  Payload ID: 4332
  Gene Symbol: CHORDC1
  Gene Name: cysteine and histidine-rich domain (CHORD) containing 1
  ENSP ID: ENSP00000433719
MKYWSCCRRKTSDFNTFLAQEGCTKGKHMWTKKDAGKKVVPCRHDWHQTGGEVTISVYAKNSLPELSRVEANSTLLNVHIVFEGEKEFDQNVKLWGVIDVKRSYVTMTATKIEITMRKAEPMQWASLELPAAKKQEKQKDATTD

SEQ ID NO: 21500 - protein, 120 aa, Homo sapiens
  Payload ID: 4332
  Gene Symbol: CHORDC1
  Gene Name: cysteine and histidine-rich domain (CHORD) containing 1
  ENSP ID: ENSP00000434040
MALLCYNRGCGQRFDPETNSDDACTYHPGVPVFHDALKGWSCCKRRTTDFSDFLSIVGCTKGRHNSEKPPEPVKPEVKTTEKKELCELKPKFQEHIIQAPKPVEAIKRPRFQNSPAQMNQ

SEQ ID NO: 21501 - protein, 144 aa, Homo sapiens; identical to SEQ ID NO: 21499
  Payload ID: 4332
  Gene Symbol: CHORDC1
  Gene Name: cysteine and histidine-rich domain (CHORD) containing 1
  ENSP ID: ENSP00000436632

SEQ ID NO: 21502 - protein, 184 aa, Homo sapiens
  Payload ID: 4332
  Gene Symbol: CHORDC1
  Gene Name: cysteine and histidine-rich domain (CHORD) containing 1
  ENSP ID: ENSP00000436945
MALLCYNRGCGQRFDPETNSDDACTYHPGVPVFHDALKGWSCCKRRTTDFSDFLSIVGCTKGRHNSEKPPEPVKPEVKTTEKKELCELKPKFQEHIIQAPKPVEAIKRPSPDEPMTNLELKISASLKQALDKLKLSSGNEENKKEEDNDEIKIGTSCKNGGCSKSLHLQQQWGPDLPDKPWIYI

SEQ ID NO: 21503 - protein, 454 aa, Homo sapiens
  Payload ID: 4333
  Gene Symbol: CCBL2
  Gene Name: cysteine conjugate-beta lyase 2
  Uniprot ID: Q6YP21
  ENSP ID: ENSP00000260508
MFLAQRSLCSLSGRAKFLKTISSSKILGFSTSAKMSLKFTNAKRIEGLDSNVWIEFTKLAADPSVVNLGQGFPDISPPTYVKEELSKIAAIDSLNQYTRGFGHPSLVKALSYLYEKLYQKQIDSNKEILVTVGAYGSLFNTIQALIDEGDEVILIVPFYDCYEPMVRMAGATPVFIPLRSKPVYGKRWSSSDWTLDPQELESKFNSKTKAIILNTPHNPLGKVYNREELQVIADLCIKYDTLCISDEVYEWLVYSGNKHLKIATFPGMWERTITIGSAGKTFSVTGWKLGWSIGPNHLIKHLQTVQQNTIYTCATPLQEALAQAFWIDIKRMDDPECYFNSLPKELEVKRDRMVRLLESVGLKPIVPDGGYFIIADVSLLDPDLSDMKNNEPYDYKFVKWMTKHKKLSAIPVSAFCNSETKSQFEKFVRFCFIKKDSTLDAAEEIIKAWSVQKS

SEQ ID NO: 21504 - protein, 175 aa, Homo sapiens
  Payload ID: 4333
  Gene Symbol: CCBL2
  Gene Name: cysteine conjugate-beta lyase 2
  ENSP ID: ENSP00000359516
MVRMAGATPVFIPLRSKPVYGKRWSSSDWTLDPQELESKFNSKTKAIILNTPHNPLGKVYNREELQVIADLCIKYDTLCISDEVYEWLVYSGNKHLKIATFPGMWERTITIGSAGKTFSVTGWKLGWSIGPNHLIKHLQTVQQNTIYTCATPLQEALAQAFWIDIKRMDDPETLI

SEQ ID NO: 21505 - protein, 262 aa, Homo sapiens
  Payload ID: 4333
  Gene Symbol: CCBL2
  Gene Name: cysteine conjugate-beta lyase 2
  ENSP ID: ENSP00000359517
MFLAQRSLCSLSGRAKFLKTISSSKILGFSTSAKMSLKFTNAKRIEGLDSNVWIEFTKLAADPSVVNLGQGFPDISPPTYVKEELSKIAAIDSLNQYTRGFGHPSLVKALSYLYEKLYQKQIDSNKEILVTVGAYGSLFNTIQALIDEGDEVILIVPFYDCYEPMVRMAGATPVFIPLRSKPVYGKRWSSSDWTLDPQELESKFNSKTKAIILNTPHNPLGKVYNREELQVIADLCIKYDTLCISDEVYEWLVYSGNKHLKI

SEQ ID NO: 21506 - protein, 420 aa, Homo sapiens
  Payload ID: 4333
  Gene Symbol: CCBL2
  Gene Name: cysteine conjugate-beta lyase 2
  Uniprot ID: Q6YP21
  ENSP ID: ENSP00000359522
MSLKFTNAKRIEGLDSNVWIEFTKLAADPSVVNLGQGFPDISPPTYVKEELSKIAAIDSLNQYTRGFGHPSLVKALSYLYEKLYQKQIDSNKEILVTVGAYGSLFNTIQALIDEGDEVILIVPFYDCYEPMVRMAGATPVFIPLRSKPVYGKRWSSSDWTLDPQELESKFNSKTKAIILNTPHNPLGKVYNREELQVIADLCIKYDTLCISDEVYEWLVYSGNKHLKIATFPGMWERTITIGSAGKTFSVTGWKLGWSIGPNHLIKHLQTVQQNTIYTCATPLQEALAQAFWIDIKRMDDPECYFNSLPKELEVKRDRMVRLLESVGLKPIVPDGGYFIIADVSLLDPDLSDMKNNEPYDYKFVKWMTKHKKLSAIPVSAFCNSETKSQFEKFVRFCFIKKDSTLDAAEEIIKAWSVQKS

SEQ ID NO: 21507 - protein, 422 aa, Homo sapiens
  Payload ID: 4334
  Gene Symbol: CCBL1
  Gene Name: cysteine conjugate-beta lyase, cytoplasmic
  Uniprot ID: Q16773
  ENSP ID: ENSP00000302227
MAKQLQARRLDGIDYNPWVEFVKLASEHDVVNLGQGFPDFPPPDFAVEAFQHAVSGDFMLNQYTKTFGYPPLTKILASFFGELLGQEIDPLRNVLVTVGGYGALFTAFQALVDEGDEVIIIEPFFDCYEPMTMMAGGRPVFVSLKPGPIQNGELGSSSNWQLDPMELAGKFTSRTKALVLNTPNNPLGKVFSREELELVASLCQQHDVVCITDEVYQWMVYDGHQHISIASLPGMWERTLTIGSAGKTFSATGWKVGWVLGPDHIMKHLRTVHQNSVFHCPTQSQAAVAESFEREQLLFRQPSSYFVQFPQAMQRCRDHMIRSLQSVGLKPIIPQGSYFLITDISDFKRKMPDLPGAVDEPYDRRFVKWMIKNKGLVAIPVSIFYSVPHQKHFDHYIRFCFVKDEATLQAMDEKLRKWKVEL

SEQ ID NO: 21508 - protein, 372 aa, Homo sapiens
  Payload ID: 4334
  Gene Symbol: CCBL1
  Gene Name: cysteine conjugate-beta lyase, cytoplasmic
  Uniprot ID: Q16773
  ENSP ID: ENSP00000317342
MAKQLQARRLDGIDYNPWVEFVKLASEHDVVNLGQGFPDFPPPDFAVEAFQHAVSGDFMLNQYTKTFVIIIEPFFDCYEPMTMMAGGRPVFVSLKPGPIQNGELGSSSNWQLDPMELAGKFTSRTKALVLNTPNNPLGKVFSREELELVASLCQQHDVVCITDEVYQWMVYDGHQHISIASLPGMWERTLTIGSAGKTFSATGWKVGWVLGPDHIMKHLRTVHQNSVFHCPTQSQAAVAESFEREQLLFRQPSSYFVQFPQAMQRCRDHMIRSLQSVGLKPIIPQGSYFLITDISDFKRKMPDLPGAVDEPYDRRFVKWMIKNKGLVAIPVSIFYSVPHQKHFDHYIRFCFVKDEATLQAMDEKLRKWKVEL

SEQ ID NO: 21509 - protein, 251 aa, Homo sapiens
  Payload ID: 4334
  Gene Symbol: CCBL1
  Gene Name: cysteine conjugate-beta lyase, cytoplasmic
  ENSP ID: ENSP00000390377
MAKQLQARRLDGIDYNPWVEFVKLASEHDVVNLGQGFPDFPPPDFAVEAFQHAVSGDFMLNQYTKTFGYPPLTKILASFFGELLGQEIDPLRNVLVTVGGYGALFTAFQALVDEGDEVIIIEPFFDCYEPMTMMAGGRPVFVSLKPGPIQNGELGSSSNWQLDPMELAGKFTSRTKALVLNTPNNPLGKVFSREELELVASLCQQHDVVCITDEVYQWMVYDGHQHISIASLPGMWERTLTIGSAGKTFSA

SEQ ID NO: 21510 - protein, 159 aa, Homo sapiens
  Payload ID: 4334
  Gene Symbol: CCBL1
  Gene Name: cysteine conjugate-beta lyase, cytoplasmic
  ENSP ID: ENSP00000392354
AMAKQLQARRLDGIDYNPWVEFVKLASEHDVVNLGQGFPDFPPPDFAVEAFQHAVSGDFMLNQYTKTFVSLCYPGWSAMVRSWSTAALTLPVSSGPPTSASGVTGTTGWSQSWLESSFFDPKKKKIIWGYPPLTKILASFFGELLGQEIDPLRNVLVTV

SEQ ID NO: 21511 - protein, 516 aa, Homo sapiens
  Payload ID: 4334
  Gene Symbol: CCBL1
  Gene Name: cysteine conjugate-beta lyase, cytoplasmic
  ENSP ID: ENSP00000399415
MFRTAAAISVHLVGPLQGRKAGAPLTWFLHQTQVAEKNVGSPAPRPTSHLGLANPQERKVPQGPQSPCEVPAAEGILRTGGAKLPIQGHPAKLAMAKQLQARRLDGIDYNPWVEFVKLASEHDVVNLGQGFPDFPPPDFAVEAFQHAVSGDFMLNQYTKTFGYPPLTKILASFFGELLGQEIDPLRNVLVTVGGYGALFTAFQALVDEGDEVIIIEPFFDCYEPMTMMAGGRPVFVSLKPGPIQNGELGSSSNWQLDPMELAGKFTSRTKALVLNTPNNPLGKVFSREELELVASLCQQHDVVCITDEVYQWMVYDGHQHISIASLPGMWERTLTIGSAGKTFSATGWKVGWVLGPDHIMKHLRTVHQNSVFHCPTQSQAAVAESFEREQLLFRQPSSYFVQFPQAMQRCRDHMIRSLQSVGLKPIIPQGSYFLITDISDFKRKMPDLPGAVDEPYDRRFVKWMIKNKGLVAIPVSIFYSVPHQKHFDHYIRFCFVKDEATLQAMDEKLRKWKVEL

SEQ ID NO: 21512 - protein, 184 aa, Homo sapiens
  Payload ID: 4334
  Gene Symbol: CCBL1
  Gene Name: cysteine conjugate-beta lyase, cytoplasmic
  ENSP ID: ENSP00000412402
MAKQLQARRLDGIDYNPWVEFVKLASEHDVVNLGQGFPDFPPPDFAVEAFQHAVSGDFMLNQYTKTFGYPPLTKILASFFGELLGQEIDPLRNVLVTVGGYGALFTAFQALVDEGDEVIIIEPFFDCYEPMTMMAGGRPVFVSLKPGPIQNGELGSSSNWQLDPMELAGKFTSRTKALVLNTPN

SEQ ID NO: 21513 - protein, 200 aa, Homo sapiens
  Payload ID: 4335
  Gene Symbol: CDO1
  Gene Name: cysteine dioxygenase type 1
  Uniprot ID: Q16878
  ENSP ID: ENSP00000250535
MEQTEVLKPRTLADLIRILHQLFAGDEVNVEEVQAIMEAYESDPTEWAMYAKFDQYRYTRNLVDQGNGKFNLMILCWGEGHGSSIHDHTNSHCFLKMLQGNLKETLFAWPDKKSNEMVKKSERVLRENQCAYINDSIGLHRVENISHTEPAVSLHLYSPPFDTCHAFDQRTGHKNKVTMTFHSKFGIRTPNATSGSLENN

SEQ ID NO: 21514 - protein, 1036 aa, Homo sapiens
  Payload ID: 4336
  Gene Symbol: CRIM1
  Gene Name: cysteine rich transmembrane BMP regulator 1 (chordin-like)
  Uniprot ID: Q9NZV1
  ENSP ID: ENSP00000280527
MYLVAGDRGLAGCGHLLVSLLGLLLLLARSGTRALVCLPCDESKCEEPRNCPGSIVQGVCGCCYTCASQRNESCGGTFGIYGTCDRGLRCVIRPPLNGDSLTEYEAGVCEDENWTDDQLLGFKPCNENLIAGCNIINGKCECNTIRTCSNPFEFPSQDMCLSALKRIEEEKPDCSKARCEVQFSPRCPEDSVLIEGYAPPGECCPLPSRCVCNPAGCLRKVCQPGNLNILVSKASGKPGECCDLYECKPVFGVDCRTVECPPVQQTACPPDSYETQVRLTADGCCTLPTRCECLSGLCGFPVCEVGSTPRIVSRGDGTPGKCCDVFECVNDTKPACVFNNVEYYDGDMFRMDNCRFCRCQGGVAICFTAQCGEINCERYYVPEGECCPVCEDPVYPFNNPAGCYANGLILAHGDRWREDDCTFCQCVNGERHCVATVCGQTCTNPVKVPGECCPVCEEPTIITVDPPACGELSNCTLTGKDCINGFKRDHNGCRTCQCINTEELCSERKQGCTLNCPFGFLTDAQNCEICECRPRPKKCRPIICDKYCPLGLLKNKHGCDICRCKKCPELSCSKICPLGFQQDSHGCLICKCREASASAGPPILSGTCLTVDGHHHKNEESWHDGCRECYCLNGREMCALITCPVPACGNPTIHPGQCCPSCADDFVVQKPELSTPSICHAPGGEYFVEGETWNIDSCTQCTCHSGRVLCETEVCPPLLCQNPSRTQDSCCPQCTDQPFRPSLSRNNSVPNYCKNDEGDIFLAAESWKPDVCTSCICIDSVISCFSESCPSVSCERPVLRKGQCCPYCIEDTIPKKVVCHFSGKAYADEERWDLDSCTHCYCLQGQTLCSTVSCPPLPCVEPINVEGSCCPMCPEMYVPEPTNIPIEKTNHRGEVDLEVPLWPTPSENDIVHLPRDMGHLQVDYRDNRLHPSEDSSLDSIASVVVPIIICLSIIIAFLFINQKKQWIPLLCWYRTPTKPSSLNNQLVSVDCKKGTRVQVDSSQRMLRIAEPDARFSGFYSMQKQNHLQADNFYQTV

SEQ ID NO: 21515 - protein, 175 aa, Homo sapiens
  Payload ID: 4336
  Gene Symbol: CRIM1
  Gene Name: cysteine rich transmembrane BMP regulator 1 (chordin-like)
  ENSP ID: ENSP00000403120
ALITCPVPACGNPTIHPGQCCPSCADDFVVQKPELSTPSICHAPGGEYFVEGETWNIDSCTQCTCHSGRVLCETEVCPPLLCQNPSRTQDSCCPQCTDQPFRPSLSRNNSVPNYCKNDEGDIFLAAESWKPDVCTSCICIDSVISCFSESCPSVSCERPVLRKGQCCPYCIGGQT

SEQ ID NO: 21516 - protein, 222 aa, Homo sapiens
  Payload ID: 4336
  Gene Symbol: CRIM1
  Gene Name: cysteine rich transmembrane BMP regulator 1 (chordin-like)
  ENSP ID: ENSP00000407636
CPGSIVQGVCGCCYTCASQRNESCGGTFGIYGTCDRGLRCVIRPPLNGDSLTEYEAGVCEEEKPDCSKARCEVQFSPRCPEDSVLIEGYAPPGECCPLPSRCVCNPAGCLRKVCQPGNLNILVSKASGKPGECCDLYECKPVFGVDCRTVECPPVQQTACPPDSYETQVRLTADGCCTLPTRCECLSGLCGFPVCEVGSTPRIVSRGDGTPGKCCDVFECVN

SEQ ID NO: 21517 - protein, 55 aa, Homo sapiens
  Payload ID: 4336
  Gene Symbol: CRIM1
  Gene Name: cysteine rich transmembrane BMP regulator 1 (chordin-like)
  ENSP ID: ENSP00000415706
  MOD_RES (1)..(1): Any amino acid
XGCCYTCASQRNESCGGTFGIYGTCDRGLRCVIRPPLNGDSLTEYEAGVCEAAGY

SEQ ID NO: 21518 - protein, 110 aa, Homo sapiens
  Payload ID: 4336
  Gene Symbol: CRIM1
  Gene Name: cysteine rich transmembrane BMP regulator 1 (chordin-like)
  ENSP ID: ENSP00000478123
MYLVAGDRGLAGCGHLLVSLLGLLLLLARSGTRALVCLPCDESKCEEPRNCPGSIVQGVCGCCYTCASQRNESCGGTFGIYGTCDRGLRCVIRPPLNGDSLTEYEAGVCE

SEQ ID NO: 21519 - protein, 60 aa, Homo sapiens
  Payload ID: 4336
  Gene Symbol: CRIM1
  Gene Name: cysteine rich transmembrane BMP regulator 1 (chordin-like)
  ENSP ID: ENSP00000480932
CPGSIVQGVCGCCYTCASQRNESCGGTFGIYGTCDRGLRCVIRPPLNGDSLTEYEAGVCE

SEQ ID NO: 21520 - protein, 51 aa, Homo sapiens
  Payload ID: 4336
  Gene Symbol: CRIM1
  Gene Name: cysteine rich transmembrane BMP regulator 1 (chordin-like)
  ENSP ID: ENSP00000480938
  MOD_RES (1)..(1): Any amino acid
XGCCYTCASQRNESCGGTFGIYGTCDRGLRCVIRPPLNGDSLTEYEAGVCE

SEQ ID NO: 21521 - protein, 520 aa, Homo sapiens
  Payload ID: 4337
  Gene Symbol: CSAD
  Gene Name: cysteine sulfinic acid decarboxylase
  Uniprot ID: Q9Y600
  ENSP ID: ENSP00000267085
MSIPLKSSFLLSYLCTLPPALLSREILMADSEALPSLAGDPVAVEALLRAVFGVVVDEAIQKGTSVSQKVCEWKEPEELKQLLDLELRSQGESQKQILERCRAVIRYSVKTGHPRFFNQLFSGLDPHALAGRIITESLNTSQYTYEIAPVFVLMEEEVLRKLRALVGWSSGDGIFCPGGSISNMYAVNLARYQRYPDCKQRGLRTLPPLALFTSKECHYSIQKGAAFLGLGTDSVRVVKADERGKMVPEDLERQIGMAEAEGAVPFLVSATSGTTVLGAFDPLEAIADVCQRHGLWLHVDAAWGGSVLLSQTHRHLLDGIQRADSVAWNPHKLLAAGLQCSALLLQDTSNLLKRCHGSQASYLFQQDKFYDVALDTGDKVVQCGRRVDCLKLWLMWKAQGDQGLERRIDQAFVLARYLVEEMKKREGFELVMEPEFVNVCFWFVPPSLRGKQESPDYHERLSKVAPVLKERMVKEGSMMIGYQPHGTRGNFFRVVVANSALTCADMDFLLNELERLGQDL

SEQ ID NO: 21522 - protein, 267 aa, Homo sapiens
  Payload ID: 4337
  Gene Symbol: CSAD
  Gene Name: cysteine sulfinic acid decarboxylase
  ENSP ID: ENSP00000369172
MADSEALPSLAGDPVAVEALLRAVFGVVVDEAIQKGTSVSQKVCEWKEPEELKQLLDLELRSQGESQKQILERCRAVIRYSVKTGHPRFFNQLFSGLDPHALAGRIITESLNTSQYTYEIAPVFVLMEEEVLRKLRALVGWSSGDGIFCPGGSISNMYAVNLARYQRYPDCKQRGLRTLPPLALFTSKEVGKRHRPNPGLLILISSHVTTPSRRELRFWDLAPTVSEWSRLMREGKWSPRIWRGRLVWPRLRVLCRSWSVPPLAPLC

SEQ ID NO: 21523 - protein, 346 aa, Homo sapiens
  Payload ID: 4337
  Gene Symbol: CSAD
  Gene Name: cysteine sulfinic acid decarboxylase
  Uniprot ID: Q9Y600
  ENSP ID: ENSP00000369175
MADSEALPSLAGDPVAVEALLRAVFGVVVDEAIQKGTSVSQKCHYSIQKGAAFLGLGTDSVRVVKADERGKMVPEDLERQIGMAEAEGAVPFLVSATSGTTVLGAFDPLEAIADVCQRHGLWLHVDAAWGGSVLLSQTHRHLLDGIQRADSVAWNPHKLLAAGLQCSALLLQDTSNLLKRCHGSQASYLFQQDKFYDVALDTGDKVVQCGRRVDCLKLWLMWKAQGDQGLERRIDQAFVLARYLVEEMKKREGFELVMEPEFVNVCFWFVPPSLRGKQESPDYHERLSKVAPVLKERMVKEGSMMIGYQPHGTRGNFFRVVVANSALTCADMDFLLNELERLGQDL

SEQ ID NO: 21524 - protein, 519 aa, Homo sapiens
  Payload ID: 4337
  Gene Symbol: CSAD
  Gene Name: cysteine sulfinic acid decarboxylase
  ENSP ID: ENSP00000369179
  MOD_RES (1)..(1): Any amino acid
XLGDARRGAAGYLCTLPPALLSREILMADSEALPSLAGDPVAVEALLRAVFGVVVDEAIQKGTSVSQKVCEWKEPEELKQLLDLELRSQGESQKQILERCRAVIRYSVKTGHPRFFNQLFSGLDPHALAGRIITESLNTSQYTYEIAPVFVLMEEEVLRKLRALVGWSSGDGIFCPGGSISNMYAVNLARYQRYPDCKQRGLRTLPPLALFTSKECHYSIQKGAAFLGLGTDSVRVVKADERGKMVPEDLERQIGMAEAEGAVPFLVSATSGTTVLGAFDPLEAIADVCQRHGLWLHVDAAWGGSVLLSQTHRHLLDGIQRADSVAWNPHKLLAAGLQCSALLLQDTSNLLKRCHGSQASYLFQQDKFYDVALDTGDKVVQCGRRVDCLKLWLMWKAQGDQGLERRIDQAFVLARYLVEEMKKREGFELVMEPEFVNVCFWFVPPSLRGKQESPDYHERLSKVAPVLKERMVKEGSMMIGYQPHGTRGNFFRVVVANSALTCADMDFLLNELERLGQDL

SEQ ID NO: 21525 - protein, 45 aa, Homo sapiens
  Payload ID: 4337
  Gene Symbol: CSAD
  Gene Name: cysteine sulfinic acid decarboxylase
  ENSP ID: ENSP00000390269
MADSEALPSLAGDPVAVEALLRAVFGVVVDEAIQKGTSVSQKVHI

SEQ ID NO: 21526 - protein, 146 aa, Homo sapiens
  Payload ID: 4337
  Gene Symbol: CSAD
  Gene Name: cysteine sulfinic acid decarboxylase
  ENSP ID: ENSP00000401078
MADSEALPSLAGDPVAVEALLRAVFGVVVDEAIQKGTSVSQKVCEWKEPEELKQLLDLELRSQGESQKQILERCRAVIRYSVKTGHPRFFNQLFSGLDPHALAGRIITESLNTSQYTYEIAPVFVLMEEEVLRKLRALVGWSSGDG

SEQ ID NO: 21527 - protein, 493 aa, Homo sapiens
  Payload ID: 4337
  Gene Symbol: CSAD
  Gene Name: cysteine sulfinic acid decarboxylase
  Uniprot ID: Q9Y600
  ENSP ID: ENSP00000410648
MADSEALPSLAGDPVAVEALLRAVFGVVVDEAIQKGTSVSQKVCEWKEPEELKQLLDLELRSQGESQKQILERCRAVIRYSVKTGHPRFFNQLFSGLDPHALAGRIITESLNTSQYTYEIAPVFVLMEEEVLRKLRALVGWSSGDGIFCPGGSISNMYAVNLARYQRYPDCKQRGLRTLPPLALFTSKECHYSIQKGAAFLGLGTDSVRVVKADERGKMVPEDLERQIGMAEAEGAVPFLVSATSGTTVLGAFDPLEAIADVCQRHGLWLHVDAAWGGSVLLSQTHRHLLDGIQRADSVAWNPHKLLAAGLQCSALLLQDTSNLLKRCHGSQASYLFQQDKFYDVALDTGDKVVQCGRRVDCLKLWLMWKAQGDQGLERRIDQAFVLARYLVEEMKKREGFELVMEPEFVNVCFWFVPPSLRGKQESPDYHERLSKVAPVLKERMVKEGSMMIGYQPHGTRGNFFRVVVANSALTCADMDFLLNELERLGQDL

SEQ ID NO: 21528 - protein, 163 aa, Homo sapiens
  Payload ID: 4337
  Gene Symbol: CSAD
  Gene Name: cysteine sulfinic acid decarboxylase
  ENSP ID: ENSP00000415314
MADSEALPSLAGDPVAVEALLRAVFGVVVDEAIQKGTSVSQKVCEWKEPEELKQLLDLELRSQGESQKQILERCRAVIRYSVKTGHPRFFNQLFSGLDPHALAGRIITESLNTSQYTYEIAPVFVLMEEEVLRKLRALVGWSSGDGIFCPGGSISNMYAVNLA

SEQ ID NO: 21529 - protein, 493 aa, Homo sapiens; identical to SEQ ID NO: 21527
  Payload ID: 4337
  Gene Symbol: CSAD
  Gene Name: cysteine sulfinic acid decarboxylase
  Uniprot ID: Q9Y600
  ENSP ID: ENSP00000415485

SEQ ID NO: 21530 - protein, 267 aa, Homo sapiens; identical to SEQ ID NO: 21522
  Payload ID: 4337
  Gene Symbol: CSAD
  Gene Name: cysteine sulfinic acid decarboxylase
  ENSP ID: ENSP00000436800

SEQ ID NO: 21531 - protein, 135 aa, Homo sapiens
  Payload ID: 4337
  Gene Symbol: CSAD
  Gene Name: cysteine sulfinic acid decarboxylase
  ENSP ID: ENSP00000449373
MADSEALPSLAGDPVAVEALLRAVFGVVVDEAIQKGTSVSQKCHYSIQKGAAFLGLGTDSVRVVKADERGKMVPEDLERQIGMAEAEGAVPFLVSATSGTTVLGAFDPLEAIADVCQRHGLWLHVDAAWGGSVLL

SEQ ID NO: 21532 - protein, 142 aa, Homo sapiens
  Payload ID: 4337
  Gene Symbol: CSAD
  Gene Name: cysteine sulfinic acid decarboxylase
  ENSP ID: ENSP00000455618
IQKGTSVSQKVCEWKEPEELKQLLDLELRSQGESQKQILERCRAVIRYSVKTGHPRFFNQLFSGLDPHALAGRIITESLNTSQYTYEIAPVFVLMEEEVLRKLRALVGWSSGDGIFCPVSLLHPEGSCVSGTWHRQCPSGQG

SEQ ID NO: 21533 - protein, 129 aa, Homo sapiens
  Payload ID: 4337
  Gene Symbol: CSAD
  Gene Name: cysteine sulfinic acid decarboxylase
  ENSP ID: ENSP00000457264
MADSEALPSLAGDPVAVEALLRAVFGVVVDEAIQKGTSVSQKVCEWKEPEELKQLLDLELRSQGESQKQILERCRAVIRYSVKTGHPRFFNQLFSGLDPHALAGRIITESLNTSQYTYEIAPVFVLMEE

SEQ ID NO: 21534 - protein, 192 aa, Homo sapiens
  Payload ID: 4338
  Gene Symbol: CYHR1
  Gene Name: cysteine/histidine-rich 1
  Uniprot ID: Q6ZMK1
  ENSP ID: ENSP00000304826
MAPKPGAEWSTALSHLVLGVVSLHAAVSTAEASRGAAAGFLLQVLAATTTLAPGLSTHEDCLAGAWVATVIGLPLLAFDFHWVNGDRSSANLLLGGGMVLAVAGGHLGPEGRSVAGQAMLLVVAVTILIVAVFTANTYGMWGGAMLGVAGLLSRLEEDRLLLLPKEDVCRWALAVGSWAYCRALHTQRLQWE

SEQ ID NO: 21535 - protein, 192 aa, Homo sapiens; identical to SEQ ID NO: 21534
  Payload ID: 4338
  Gene Symbol: CYHR1
  Gene Name: cysteine/histidine-rich 1
  Uniprot ID: Q6ZMK1
  ENSP ID: ENSP00000385962

SEQ ID NO: 21536 - protein, 362 aa, Homo sapiens
  Payload ID: 4338
  Gene Symbol: CYHR1
  Gene Name: cysteine/histidine-rich 1
  Uniprot ID: Q6ZMK1
  ENSP ID: ENSP00000387426
MAPKPGAEWSTALSHLVLGVVSLHAAVSTAEASRGAAAGFLLQVLAATTTLAPGLSTHEDCLAGAWVATVIGLPLLAFDFHWCTNGHLMCAGCFIHLLADARLKEEQATCPNCRCEISKSLCCRNLAVEKAVSELPSECGFCLRQFPRSLLERHQKEECQDRVTQCKYKRIGCPWHGPFHELTVHEAACAHPTKTGSELMEILDGMDQSHRKEMQLYNSIFSLLSFEKIGYTEVQFRPYRTDDFITRLYYETPRFTVLNQTWVLKARVNDSERNPNLSCKRTLSFQLLLKSKVTAPLECSFLLLKGPYDDVRISPVIYHFVFTNESNETDYVPLPIIDSVECNKLLAAKNINLRLFLFQIQK

SEQ ID NO: 21537 - protein, 192 aa, Homo sapiens; identical to SEQ ID NO: 21534
  Payload ID: 4338
  Gene Symbol: CYHR1
  Gene Name: cysteine/histidine-rich 1
  Uniprot ID: Q6ZMK1
  ENSP ID: ENSP00000414647

SEQ ID NO: 21538 - protein, 143 aa, Homo sapiens
  Payload ID: 4338
  Gene Symbol: CYHR1
  Gene Name: cysteine/histidine-rich 1
  ENSP ID: ENSP00000432902
MAPKPGAEWSTALSHLVLGVVSLHAAVSTAEASRGAAAGFLLQVLAATTTLAPGLSTHEDCLAGAWVATVIGLPLLAFDFHWVNGDRSSANLLLGGGMVLAVAGGHLGPEGRSVAGQAMLLVVAVTILIVAVFTANTYGMWGG

SEQ ID NO: 21539 - protein, 404 aa, Homo sapiens
  Payload ID: 4338
  Gene Symbol: CYHR1
  Gene Name: cysteine/histidine-rich 1
  ENSP ID: ENSP00000433769
MSGAEEAGGGGPAAGPAGSVPAGVGVGVGAGPGAAAGQAAAAALGEAAGPGLPDEAGLAGARQLQLQEAAGDPDAPPKKRLRAAEAAEAAAAAAAAGSGKLEERLYSVLCCTVCLDLPKASVYQCTNGHLMCAGCFIHLLADARLKEEQATCPNCRCEISKSLCCRNLAVEKAVSELPSECGFCLRQFPRSLLERHQKEECQDRVTQCKYKRIGCPWHGPFHELTVHEAACAHPTKTGSELMEILDGMDQSHRKEMQLYNSIFSLLSFEKIGYTEVQFRPYRTDDFITRLYYETPRFTVLNQTWVLKARVNDSERNPNLSCKRTLSFQLLLKSKVTAPLECSFLLLKGPYDDVRISPVIYHFVFTNESNETDYVPLPIIDSVECNKLLAAKNINLRLFLFQIQK

SEQ ID NO: 21540 - protein, 246 aa, Homo sapiens
  Payload ID: 4338
  Gene Symbol: CYHR1
  Gene Name: cysteine/histidine-rich 1
  ENSP ID: ENSP00000434470
MAPKPGAEWSTALSHLVLGVVSLHAAVSTAECTNGHLMCAGCFIHLLADARLKEEQATCPNCRCEISKSLCCRNLAVEKAVSELPSECGFCLRQFPRSLLERHQKEECQDRVTQCKYKRIGCPWHGPFHELTVHEAACAHPTKTGSELMEILDGMDQSHRKEMQLYNSIFSLLSFEKIGYTEVQFRPYRTDDFITRLYYETPRFTVLNQTWVLKARVNDSERNPNLSCKRTLSFQLLLKSKVTAPL

SEQ ID NO: 21541 - protein, 42 aa, Homo sapiens
  Payload ID: 4338
  Gene Symbol: CYHR1
  Gene Name: cysteine/histidine-rich 1
  ENSP ID: ENSP00000434642
MAPKPGAEWSTALSHLVLGVVSLHAAVSTAEASRGAAAGFLL

SEQ ID NO: 21542 - protein, 154 aa, Homo sapiens
  Payload ID: 4339
  Gene Symbol: CYYR1
  Gene Name: cysteine/tyrosine-rich 1
  Uniprot ID: Q96J86
  ENSP ID: ENSP00000299340
MDAPRLPVRPGVLLPKLVLLFVYADDCLAQCGKDCKSYCCDGTTPYCCSYYAYIGNILSGTAIAGIVFGIVFIMGVIAGIAICICMCMKNHRATRVGILRTTHINTVSSYPGPPPYGHDHEMEYCADLPPPYSPTPQGPAQRSPPPPYPGNARK

SEQ ID NO: 21543 - protein, 132 aa, Homo sapiens
  Payload ID: 4339
  Gene Symbol: CYYR1
  Gene Name: cysteine/tyrosine-rich 1
  Uniprot ID: Q96J86
  ENSP ID: ENSP00000382918
MDAPRLPVRPGVLLPKLVLLFVYADDCLAQCGKDCKSYCCDGTTPYCCSYYAYIGNILSGTAIAGIVFGIVFIMGVIAGIAICICMCMKNHRATRVGILRTTHINTVSSYPEYELHEAEILVYFVQHSIPSM

SEQ ID NO: 21544 - protein, 99 aa, Homo sapiens
  Payload ID: 4340
  Gene Symbol: CRCT1
  Gene Name: cysteine-rich C-terminal 1
  Uniprot ID: Q9UGL9
  ENSP ID: ENSP00000357779
MSSQQSAVSAKGFSKGSSQGPAPCPAPAPTPAPASSSSCCGSGRGCCGDSGCCGSSSTSCCCFPRRRRRQRSSGCCCCGGGSQRSQRSNNRSSGCCSGC

SEQ ID NO: 21545 - protein, 224 aa, Homo sapiens
  Payload ID: 4341
  Gene Symbol: CHIC1
  Gene Name: cysteine-rich hydrophobic domain 1
  Uniprot ID: Q5VXU3
  ENSP ID: ENSP00000362601
MSILLPNMAEFDTISELEEEEEEEAATSSSSPSSSSSVSGPDDDEEDEEEEEEEEEEEEEEEEEEEEEAPPPPRVVSEEHLRRYAPDPVLVRGAGHITVFGLSNKFDTEFPSVLTGKVAPEEFKTSIGRVNACLKKALPVNVKWLLCGCLCCCCTLGCSLWPVICLNKRTRRSIQKLIEWENNRLYHKLALHWKLTKRKCETSNMMEYVILIEFLPKYPIFRPD

SEQ ID NO: 21546 - protein, 204 aa, Homo sapiens
  Payload ID: 4341
  Gene Symbol: CHIC1
  Gene Name: cysteine-rich hydrophobic domain 1
  Uniprot ID: Q5VXU3
  ENSP ID: ENSP00000362603
MSILLPNMAEFDTISELEEEEEEEAATSSSSPSSSSSVSGPDDDEEDEEEEEEEEEEEEEEEEEEEEEAPPPPRVVSEEHLRRYAPDPVLVRGAGHITVFGLSNKFDTEFPSVLTGKVAPEEFKTSIGRVNACLKKALPVNVKWLLCGCLCCCCTLGCSLWPVICLNKRTRRSIQKLIEWENNRLYHKVILIEFLPKYPIFRPD

SEQ ID NO: 21547 - protein, 217 aa, Homo sapiens
  Payload ID: 4341
  Gene Symbol: CHIC1
  Gene Name: cysteine-rich hydrophobic domain 1
  ENSP ID: ENSP00000432985
MAEFDTISELEEEEEEEAATSSSSPSSSSSVSGPDDDEEDEEEEEEEEEEEEEEEEEEEEEAPPPPRVVSEEHLRRYAPDPVLVRGAGHITVFGLSNKFDTEFPSVLTGKVAPEEFKTSIGRVNACLKKALPVNVKWLLCGCLCCCCTLGCSLWPVICLNKRTRRSIQKLIEWENNRLYHKLALHWKLTKRKCETSNMMEYVILIEFLPKYPIFRPD

SEQ ID NO: 21548 - protein, 64 aa, Homo sapiens
  Payload ID: 4341
  Gene Symbol: CHIC1
  Gene Name: cysteine-rich hydrophobic domain 1
  ENSP ID: ENSP00000473482
  MOD_RES (1)..(1): Any amino acid
XEEEEEEEEEEEEAPPPPRVVSEEHLRRYAPDPVLVRGAGHITVFGLSNKFDTEFPSVLTGKKF

SEQ ID NO: 21549 - protein, 165 aa, Homo sapiens
  Payload ID: 4342
  Gene Symbol: CHIC2
  Gene Name: cysteine-rich hydrophobic domain 2
  Uniprot ID: Q9UKJ5
  ENSP ID: ENSP00000263921
MADFDEIYEEEEDEERALEEQLLKYSPDPVVVRGSGHVTVFGLSNKFESEFPSSLTGKVAPEEFKASINRVNSCLKKNLPVNVRWLLCGCLCCCCTLGCSMWPVICLSKRTRRSIEKLLEWENNRLYHKLCLHWRLSKRKCETNNMMEYVILIEFLPKTPIFRPD

SEQ ID NO: 21550 - protein, 137 aa, Homo sapiens
  Payload ID: 4342
  Gene Symbol: CHIC2
  Gene Name: cysteine-rich hydrophobic domain 2
  ENSP ID: ENSP00000421032
  MOD_RES (1)..(1): Any amino acid
XADFDEIYEEEEDEERALEEQLLKYSPDPVVVRGSGHVTVFGLSNKFESEFPSSLTGKVAPEEFKASINRVNSCLKKNLPVNTRRSIEKLLEWENNRLYHKLCLHWRLSKRKCETNNMMEYVILIEFLPKTPIFRPD

SEQ ID NO: 21551 - protein, 146 aa, Homo sapiens
  Payload ID: 4342
  Gene Symbol: CHIC2
  Gene Name: cysteine-rich hydrophobic domain 2
  ENSP ID: ENSP00000425238
MADFDEIYEEEEDEERALEEQLLKYSPDPVVVRGSGHVTVFGLSNKFESEFPSSLTGKVAPEEFKASINRVNSCLKKNLPVNVRWLLCGCLCCCCTLGCSMWPVICLSKRLCLHWRLSKRKCETNNMMEYVILIEFLPKTPIFRPD

SEQ ID NO: 21552 - protein, 446 aa, Homo sapiens
  Payload ID: 4343
  Gene Symbol: CRIPAK
  Gene Name: cysteine-rich PAK1 inhibitor
  Uniprot ID: Q8N1N5
  ENSP ID: ENSP00000323978
MHEPSLCANVECPPAHTCPCGVPACSCAHVECPPAHTCRCGVPACSHMPMWSARLLTRAHVECPPAHTRVHVECPPAHVPMWSAHLLTCADVECHLLTHVPMWSARLLTCPCGVPACSHVPMRSARLLTRAHAECPPAHTCPCGVPACSHVPMRSARLLTRADVECPPAHTCPCGVPACSHVPTWSARLITRAHVECSPAHTCRCGVPACSHVPMWSVRLLTRADAECPPAHTCRCGVPACSHVPMWSARLLTCRCGVPACSHVPMWSARLLTCRCGVPACSHVPMWSARLLTRAHVECPPAHTCRRGVPACSRAHMECPPAHTCHCGVPACSHTCRCGVPACSHVPMWSARLLTRAHVECPPAHTRAHVECPPAHTCPCGVPACSHTCPCGVPACSHKALAWWFCRFPVLPAESDAVTVHSTHGGFLIRFYVKDPFYISLHLEIT

SEQ ID NO: 21553 - protein, 101 aa, Homo sapiens
  Payload ID: 4344
  Gene Symbol: CRIPT
  Gene Name: cysteine-rich PDZ-binding protein
  Uniprot ID: Q9P021
  ENSP ID: ENSP00000238892
MVCEKCEKKLGTVITPDTWKDGARNTTESGGRKLNENKALTSKKARFDPYGKNKFSTCRICKSSVHQPGSHYCQGCAYKKGICAMCGKKVLDTKNYKQTSV

SEQ ID NO: 21554 - protein, 46 aa, Homo sapiens
  Payload ID: 4345
  Gene Symbol: AL928654.7
  Gene Name: Cysteine-rich protein 1
  ENSP ID: ENSP00000454458
  MOD_RES (1)..(1): Any amino acid
XKCGKTLTSGGHAEHEGKPYCNHPCYAAMFGPKGFGRGGAESHTFK

SEQ ID NO: 21555 - protein, 46 aa, Homo sapiens; identical to SEQ ID NO: 21554
  Payload ID: 4345
  Gene Symbol: AL928654.7
  Gene Name: Cysteine-rich protein 1
  ENSP ID: ENSP00000455328
  MOD_RES (1)..(1): Any amino acid

SEQ ID NO: 21556 - protein, 77 aa, Homo sapiens
  Payload ID: 4345
  Gene Symbol: AL928654.7
  Gene Name: Cysteine-rich protein 1
  ENSP ID: ENSP00000455329
MPKCPKCNKEVYFAERVTSLGKDWHRPCLKCEKCGKTLTSGGHAEHEGKPYCNHPCYAAMFGPKGFGRGGAESHTFK

SEQ ID NO: 21557 - protein, 46 aa, Homo sapiens; identical to SEQ ID NO: 21554
  Payload ID: 4345
  Gene Symbol: AL928654.7
  Gene Name: Cysteine-rich protein 1
  ENSP ID: ENSP00000456068
  MOD_RES (1)..(1): Any amino acid

SEQ ID NO: 21558 - protein, 49 aa, Homo sapiens
  Payload ID: 4345
  Gene Symbol: AL928654.7
  Gene Name: Cysteine-rich protein 1
  ENSP ID: ENSP00000456357
  MOD_RES (1)..(1): Any amino acid
XKCEKCGKTLTSGGHAEHEGKPYCNHPCYAAMFGPKGFGRGGAESHTFK

SEQ ID NO: 21559 - protein, 77 aa, Homo sapiens; identical to SEQ ID NO: 21556
  Payload ID: 4346
  Gene Symbol: CRIP1
  Gene Name: cysteine-rich protein 1 (intestinal)
  Uniprot ID: P50238
  ENSP ID: ENSP00000332449

SEQ ID NO: 21560 - protein, 77 aa, Homo sapiens; identical to SEQ ID NO: 21556
  Payload ID: 4346
  Gene Symbol: CRIP1
  Gene Name: cysteine-rich protein 1 (intestinal)
  Uniprot ID: P50238
  ENSP ID: ENSP00000376315

SEQ ID NO: 21561 - protein, 77 aa, Homo sapiens; identical to SEQ ID NO: 21556
  Payload ID: 4346
  Gene Symbol: CRIP1
  Gene Name: cysteine-rich protein 1 (intestinal)
  Uniprot ID: P50238
  ENSP ID: ENSP00000386340

SEQ ID NO: 21562 - protein, 208 aa, Homo sapiens
  Payload ID: 4347
  Gene Symbol: CRIP2
  Gene Name: cysteine-rich protein 2
  Uniprot ID: P52943
  ENSP ID: ENSP00000328521
MASKCPKCDKTVYFAEKVSSLGKDWHKFCLKCERCSKTLTPGGHAEHDGKPFCHKPCYATLFGPKGVNIGGAGSYIYEKPLAEGPQVTGPIEVPAARAEERKASGPPKGPSRASSVTTFTGEPNTCPRCSKKVYFAEKVTSLGKDWHRPCLRCERCGKTLTPGGHAEHDGQPYCHKPCYGILFGPKGVNTGAVGSYIYDRDPEGKVQP

SEQ ID NO: 21563 - protein, 282 aa, Homo sapiens
  Payload ID: 4347
  Gene Symbol: CRIP2
  Gene Name: cysteine-rich protein 2
  Uniprot ID: P52943
  ENSP ID: ENSP00000426119
MPPHHLLPWLAQVPSAEGELVRLVSRAGGRGACFWPAVTMEMAVAAGCVCKGGGCCHREPSQDHHESQEHRGPLVGSQTCLVHQAEGTAEKVSSLGKDWHKFCLKCERCSKTLTPGGHAEHDGKPFCHKPCYATLFGPKGVNIGGAGSYIYEKPLAEGPQVTGPIEVPAARAEERKASGPPKGPSRASSVTTFTGEPNTCPRCSKKVYFAEKVTSLGKDWHRPCLRCERCGKTLTPGGHAEHDGQPYCHKPCYGILFGPKGVNTGAVGSYIYDRDPEGKVQP

SEQ ID NO: 21564 - protein, 192 aa, Homo sapiens
  Payload ID: 4347
  Gene Symbol: CRIP2
  Gene Name: cysteine-rich protein 2
  ENSP ID: ENSP00000437723
  MOD_RES (1)..(1): Any amino acid
XEENGRRARADRAHRPWPPNAPSATRPCTSHDGKPFCHKPCYATLFGPKGVNIGGAGSYIYEKPLAEGPQVTGPIEVPAARAEERKASGPPKGPSRASSVTTFTGEPNTCPRCSKKVYFAEKVTSLGKDWHRPCLRCERCGKTLTPGGHAEHDGQPYCHKPCYGILFGPKGVNTGAVGSYIYDRDPEGKVQP

SEQ ID NO: 21565 - protein, 104 aa, Homo sapiens
  Payload ID: 4347
  Gene Symbol: CRIP2
  Gene Name: cysteine-rich protein 2
  ENSP ID: ENSP00000446875
  MOD_RES (1)..(1): Any amino acid
XPGGERAEGAGRPGAPTMASKCPKCDKTVYFAEKVTSLGKDWHRPCLRCERCGKTLTPGGHAEHDGQPYCHKPCYGILFGPKGVNTGAVGSYIYDRDPEGKVQP

SEQ ID NO: 21566 - protein, 217 aa, Homo sapiens
  Payload ID: 4348
  Gene Symbol: CRIP3
  Gene Name: cysteine-rich protein 3
  Uniprot ID: Q6Q6R5
  ENSP ID: ENSP00000274990
MSWTCPRCQQPVFFAEKVSSLGKNWHRFCLKCERCHSILSPGGHAEHNGRPYCHKPCYGALFGPRGVNIGGVGSYLYNPPTPSPGCTTPLSPSSFSPPRPRTGLPQGKKSPPHMKTFTGETSLCPGCGEPVYFAEKVMSLGRNWHRPCLRCQRCHKTLTAGSHAEHDGVPYCHVPCYGYLFGPKGGQPHPRHWDGMYMPEVWHVHGLWVCVDNFPCG

SEQ ID NO: 21567 - protein, 204 aa, Homo sapiens
  Payload ID: 4348
  Gene Symbol: CRIP3
  Gene Name: cysteine-rich protein 3
  Uniprot ID: Q6Q6R5
  ENSP ID: ENSP00000361650
MSWTCPRCQQPVFFAEKVSSLGKNWHRFCLKCERCHSILSPGGHAEHNGRPYCHKPCYGALFGPRGVNIGGVGSYLYNPPTPSPGCTTPLSPSSFSPPRPRTGLPQGKKSPPHMKTFTGETSLCPGCGEPVYFAEKVMSLGRNWHRPCLRCQRCHKTLTAGSHAEHDGVPYCHVPCYGYLFGPKGVNIGDVGCYIYDPVKIKFK

SEQ ID NO: 21568 - protein, 38 aa, Homo sapiens
  Payload ID: 4348
  Gene Symbol: CRIP3
  Gene Name: cysteine-rich protein 3
  ENSP ID: ENSP00000397775
EPVYFAEKVMSLGRNWHRPCLRCQRCHKTLTAGSHAEV

SEQ ID NO: 21569 - protein, 110 aa, Homo sapiens
  Payload ID: 4348
  Gene Symbol: CRIP3
  Gene Name: cysteine-rich protein 3
  ENSP ID: ENSP00000414553
  MOD_RES (1)..(1): Any amino acid
XHKPCYGALFGPRGVNIGGVGSYLYNPPTPSPGCTTPLSPSSFSPPRPRTGLPQGKKTEKVMSLGRNWHRPCLRCQRCHKTLTAGSHAEHDGVPYCHVPCYGYLFGPKAL

SEQ ID NO: 21570 - protein, 178 aa, Homo sapiens
  Payload ID: 4349
  Gene Symbol: CRISP1
  Gene Name: cysteine-rich secretory protein 1
  Uniprot ID: P54107
  ENSP ID: ENSP00000331317
MEIKHLLFLVAAACLLPMLSMKKKSARDQFNKLVTDLPNVQEEIVNIHNALRRRVVPPASNMLKMSWSEEAAQNARIFSKYCDMTESNPLERRLPNTFCGENMHMTSYPVSWSSVIGVWYSESTSFKHGEWTTTDDDITTDHYTQIVWATSYLIGCAIASCRQQGSPRYLYVCHYCHD

SEQ ID NO: 21571 - protein, 249 aa, Homo sapiens
  Payload ID: 4349
  Gene Symbol: CRISP1
  Gene Name: cysteine-rich secretory protein 1
  Uniprot ID: P54107
  ENSP ID: ENSP00000338276
MEIKHLLFLVAAACLLPMLSMKKKSARDQFNKLVTDLPNVQEEIVNIHNALRRRVVPPASNMLKMSWSEEAAQNARIFSKYCDMTESNPLERRLPNTFCGENMHMTSYPVSWSSVIGVWYSESTSFKHGEWTTTDDDITTDHYTQIVWATSYLIGCAIASCRQQGSPRYLYVCHYCHEGNDPETKNEPYKTGVPCEACPSNCEDKLCTNPCIYYDEYFDCDIQVHYLGCNHSTTILFCKATCLCDTEIK

SEQ ID NO: 21572 - protein, 178 aa, Homo sapiens; identical to SEQ ID NO: 21570
  Payload ID: 4349
  Gene Symbol: CRISP1
  Gene Name: cysteine-rich secretory protein 1
  Uniprot ID: P54107
  ENSP ID: ENSP00000425020

SEQ ID NO: 21573 - protein, 249 aa, Homo sapiens; identical to SEQ ID NO: 21571
  Payload ID: 4349
  Gene Symbol: CRISP1
  Gene Name: cysteine-rich secretory protein 1
  Uniprot ID: P54107
  ENSP ID: ENSP00000427589

SEQ ID NO: 21574 - protein, 243 aa, Homo sapiens
  Payload ID: 4350
  Gene Symbol: CRISP2
  Gene Name: cysteine-rich secretory protein 2
  Uniprot ID: P16562
  ENSP ID: ENSP00000339155
MALLPVLFLVTVLLPSLPAEGKDPAFTALLTTQLQVQREIVNKHNELRKAVSPPASNMLKMEWSREVTTNAQRWANKCTLQHSDPEDRKTSTRCGENLYMSSDPTSWSSAIQSWYDEILDFVYGVGPKSPNAVVGHYTQLVWYSTYQVGCGIAYCPNQDSLKYYYVCQYCPAGNNMNRKNTPYQQGTPCAGCPDDCDKGLCTNSCQYQDLLSNCDSLKNTAGCEHELLKEKCKATCLCENKIY

SEQ ID NO: 21575 - protein, 278 aa, Homo sapiens
  Payload ID: 4350
  Gene Symbol: CRISP2
  Gene Name: cysteine-rich secretory protein 2
  Uniprot ID: P16562
  ENSP ID: ENSP00000482890
MALLPVLFLVTVLLPSLPAEGKDPAFTALLTTQLQVQREIVNKHNELRKAVSPPASNMLKMEWSREVTTNAQRWANKCTLQHSDPEDRKTSTRCGENLYMSSDPTSWSSAIQSWYDEILDFVYGVGPKSPNAVVGHYTQLVWYSTYQVGCGIAYCPNQDSLKYYYVCQYCPAMKTYLNKREGINVWKCFLRLRHFQLLRGEQLLTFSGNNMNRKNTPYQQGTPCAGCPDDCDKGLCTNSCQYQDLLSNCDSLKNTAGCEHELLKEKCKATCLCENKIY

SEQ ID NO: 21576 - protein, 243 aa, Homo sapiens; identical to SEQ ID NO: 21574
  Payload ID: 4350
  Gene Symbol: CRISP2
  Gene Name: cysteine-rich secretory protein 2
  Uniprot ID: P16562
  ENSP ID: ENSP00000484609

SEQ ID NO: 21577 - protein, 258 aa, Homo sapiens
  Payload ID: 4351
  Gene Symbol: CRISP3
  Gene Name: cysteine-rich secretory protein 3
  Uniprot ID: P54108
  ENSP ID: ENSP00000263045
MKQILHPALETTAMTLFPVLLFLVAGLLPSFPANEDKDPAFTALLTTQTQVQREIVNKHNELRRAVSPPARNMLKMEWNKEAAANAQKWANQCNYRHSNPKDRMTSLKCGENLYMSSASSSWSQAIQSWFDEYNDFDFGVGPKTPNAVVGHYTQVVWYSSYLVGCGNAYCPNQKVLKYYYVCQYCPAGNWANRLYVPYEQGAPCASCPDNCDDGLCTNGCKYEDLYSNCKSLKLTLTCKHQLVRDSCKASCNCSNSIY

SEQ ID NO: 21578 - protein, 191 aa, Homo sapiens
  Payload ID: 4351
  Gene Symbol: CRISP3
  Gene Name: cysteine-rich secretory protein 3
  ENSP ID: ENSP00000346636
MKQILHPALETTDPCSTGFVFPAMTLFPVLLFLVAGLLPSFPANEDKDPAFTALLTTQTQVQREIVNKHNELRRAVSPPARNMLKMEWNKEAAANAQKWANQCNYRHSNPKDRMTSLKCGENLYMSSASSSWSQAIQSWFDEYNDFDFGVGPKTPNAVVGHYTQVVWYSSYLVGCGNAYCPNQKVLKYYYV

SEQ ID NO: 21579 - protein, 276 aa, Homo sapiens
  Payload ID: 4351
  Gene Symbol: CRISP3
  Gene Name: cysteine-rich secretory protein 3
  ENSP ID: ENSP00000360201
MKQILHPALETTACTNHFNADPCSTGFVFPAMTLFPVLLFLVAGLLPSFPANEDKDPAFTALLTTQTQVQREIVNKHNELRRAVSPPARNMLKMEWNKEAAANAQKWANQCNYRHSNPKDRMTSLKCGENLYMSSASSSWSQAIQSWFDEYNDFDFGVGPKTPNAVVGHYTQVVWYSSYLVGCGNAYCPNQKVLKYYYVCQYCPAGNWANRLYVPYEQGAPCASCPDNCDDGLCTNGCKYEDLYSNCKSLKLTLTCKHQLVRDSCKASCNCSNSIY

SEQ ID NO: 21580 - protein, 268 aa, Homo sapiens
  Payload ID: 4351
  Gene Symbol: CRISP3
  Gene Name: cysteine-rich secretory protein 3
  Uniprot ID: P54108
  ENSP ID: ENSP00000389026
MKQILHPALETTDPCSTGFVFPAMTLFPVLLFLVAGLLPSFPANEDKDPAFTALLTTQTQVQREIVNKHNELRRAVSPPARNMLKMEWNKEAAANAQKWANQCNYRHSNPKDRMTSLKCGENLYMSSASSSWSQAIQSWFDEYNDFDFGVGPKTPNAVVGHYTQVVWYSSYLVGCGNAYCPNQKVLKYYYVCQYCPAGNWANRLYVPYEQGAPCASCPDNCDDGLCTNGCKYEDLYSNCKSLKLTLTCKHQLVRDSCKASCNCSNSIY

SEQ ID NO: 21581 - protein, 500 aa, Homo sapiens
  Payload ID: 4352
  Gene Symbol: CRISPLD1
  Gene Name: cysteine-rich secretory protein LCCL domain containing 1
  Uniprot ID: Q9H336
  ENSP ID: ENSP00000262207
MKCTAREWLRVTTVLFMARAIPAMVVPNATLLEKLLEKYMDEDGEWWIAKQRGKRAITDNDMQSILDLHNKLRSQVYPTASNMEYMTWDVELERSAESWAESCLWEHGPASLLPSIGQNLGAHWGRYRPPTFHVQSWYDEVKDFSYPYEHECNPYCPFRCSGPVCTHYTQVVWATSNRIGCAINLCHNMNIWGQIWPKAVYLVCNYSPKGNWWGHAPYKHGRPCSACPPSFGGGCRENLCYKEGSDRYYPPREEETNEIERQQSQVHDTHVRTRSDDSSRNEVISAQQMSQIVSCEVRLRDQCKGTTCNRYECPAGCLDSKAKVIGSVHYEMQSSICRAAIHYGIIDNDGGWVDITRQGRKHYFIKSNRNGIQTIGKYQSANSFTVSKVTVQAVTCETTVEQLCPFHKPASHCPRVYCPRNCMQANPHYARVIGTRVYSDLSSICRAAVHAGVVRNHGGYVDVMPVDKRKTYIASFQNGIFSESLQNPPGGKAFRVFAVV

SEQ ID NO: 21582 - protein, 314 aa, Homo sapiens
  Payload ID: 4352
  Gene Symbol: CRISPLD1
  Gene Name: cysteine-rich secretory protein LCCL domain containing 1
  Uniprot ID: Q9H336
  ENSP ID: ENSP00000429746
MNMNATHIVHSGVLALYVHIIHRGNWWGHAPYKHGRPCSACPPSFGGGCRENLCYKEGSDRYYPPREEETNEIERQQSQVHDTHVRTRSDDSSRNEVISAQQMSQIVSCEVRLRDQCKGTTCNRYECPAGCLDSKAKVIGSVHYEMQSSICRAAIHYGIIDNDGGWVDITRQGRKHYFIKSNRNGIQTIGKYQSANSFTVSKVTVQAVTCETTVEQLCPFHKPASHCPRVYCPRNCMQANPHYARVIGTRVYSDLSSICRAAVHAGVVRNHGGYVDVMPVDKRKTYIASFQNGIFSESLQNPPGGKAFRVFAVV

SEQ ID NO: 21583 - protein, 312 aa, Homo sapiens
  Payload ID: 4352
  Gene Symbol: CRISPLD1
  Gene Name: cysteine-rich secretory protein LCCL domain containing 1
  ENSP ID: ENSP00000430105
MNIWGQIWPKAVYLVCNYSPKGNWWGHAPYKHGRPCSACPPSFGGGCRENLCYKEGSDRYYPPREEETNEIERQQSQVHDTHVRTRSDDSSRNEVISAQQMSQIVSCEVRLRDQCKGTTCNRYECPAGCLDSKAKVIGSVHYEMQSSICRAAIHYGIIDNDGGWVDITRQGRKHYFIKSNRNGIQTIGKYQSANSFTVSKVTVQAVTCETTVEQLCPFHKPASHCPRVYCPRNCMQANPHYARVIGTRVYSDLSSICRAAVHAGVVRNHGGYVDVMPVDKRKTYIASFQNGIFSESLQNPPGGKAFRVFAVV

SEQ ID NO: 21584 - protein, 105 aa, Homo sapiens
  Payload ID: 4352
  Gene Symbol: CRISPLD1
  Gene Name: cysteine-rich secretory protein LCCL domain containing 1
  ENSP ID: ENSP00000430504
MKCTAREWLRVTTVLFMARAIPAMVVPNATLLEKLLEKYMDEDGEWWIAKQRGKRAITDNDMQSILDLHNKLRSQVYPTASNMEYMTWDVELERSAESWAESCLW

SEQ ID NO: 21585 - protein, 497 aa, Homo sapiens
  Payload ID: 4353
  Gene Symbol: CRISPLD2
  Gene Name: cysteine-rich secretory protein LCCL domain containing 2
  Uniprot ID: Q9H0B8
  ENSP ID: ENSP00000262424
MSCVLGGVIPLGLLFLVCGSQGYLLPNVTLLEELLSKYQHNESHSRVRRAIPREDKEEILMLHNKLRGQVQPQASNMEYMTWDDELEKSAAAWASQCIWEHGPTSLLVSIGQNLGAHWGRYRSPGFHVQSWYDEVKDYTYPYPSECNPWCPERCSGPMCTHYTQIVWATTNKIGCAVNTCRKMTVWGEVWENAVYFVCNYSPKGNWIGEAPYKNGRPCSECPPSYGGSCRNNLCYREETYTPKPETDEMNEVETAPIPEENHVWLQPRVMRPTKPKKTSAVNYMTQVVRCDTKMKDRCKGSTCNRYQCPAGCLNHKAKIFGTLFYESSSSICRAAIHYGILDDKGGLVDITRNGKVPFFVKSERHGVQSLSKYKPSSSFMVSKVKVQDLDCYTTVAQLCPFEKPATHCPRIHCPAHCKDEPSYWAPVFGTNIYADTSSICKTAVHAGVISNESGGDVDVMPVDKKKTYVGSLRNGVQSESLGTPRDGKAFRIFAVRQ

SEQ ID NO: 21586 - protein, 120 aa, Homo sapiens
  Payload ID: 4353
  Gene Symbol: CRISPLD2
  Gene Name: cysteine-rich secretory protein LCCL domain containing 2
  Uniprot ID: Q9H0B8
  ENSP ID: ENSP00000454858
MSCVLGGVIPLGLLFLVCGSQGYLLPNVTLLEELLSKYQHNESHSRVRRAIPREDKEEILMLHNKLRGQVQPQASNMEYMTWDDELEKSAAAWASQCIWEHGPTSLLVSIGQNLGAHWGR

SEQ ID NO: 21587 - protein, 18 aa, Homo sapiens
  Payload ID: 4353
  Gene Symbol: CRISPLD2
  Gene Name: cysteine-rich secretory protein LCCL domain containing 2
  ENSP ID: ENSP00000456554
MSCVLGGVIPLGLLFLVC

SEQ ID NO: 21588 - protein, 209 aa, Homo sapiens
  Payload ID: 4353
  Gene Symbol: CRISPLD2
  Gene Name: cysteine-rich secretory protein LCCL domain containing 2
  ENSP ID: ENSP00000456952
MCTHYTQIVWATTNKIGCAVNTCRKMTVWGEVWENAVYFVCNYSPKGNWIGEAPYKNGRPCSECPPSYGGSCRNNLCYREETYTPKPETDEMNEVETAPIPEENHVWLQPRVMRPTKPKKTSAVNYMTQVVRCDTKMKDRCKGSTCNRYQCPAGCLNHKAKIFGTLFYESSSSICRAAIHYGILDDKGGLVDITRNGKVPFFVKSERHG

SEQ ID NO: 21589 - protein, 496 aa, Homo sapiens
  Payload ID: 4353
  Gene Symbol: CRISPLD2
  Gene Name: cysteine-rich secretory protein LCCL domain containing 2
  ENSP ID: ENSP00000457183
MSCVLGGVIPLGLLFLVCGSQGYLLPNVTLLEELLSKYQHNESHSRVRRAIPREDKEEILMLHNKLRGQVQPQASNMEYMTWDDELEKSAAAWASQCIWEHGPTSLLVSIGQNLGAHWGRYRSPGFHVQSWYDEVKDYTYPYPSECNPWCPERCSGPMCTHYTQIVWATTNKIGCAVNTCRKMTVWGEVWENAVYFVCNYSPKGNWIGEAPYKNGRPCSECPPSYGGSCRNNLCYRETYTPKPETDEMNEVETAPIPEENHVWLQPRVMRPTKPKKTSAVNYMTQVVRCDTKMKDRCKGSTCNRYQCPAGCLNHKAKIFGTLFYESSSSICRAAIHYGILDDKGGLVDITRNGKVPFFVKSERHGVQSLSKYKPSSSFMVSKVKVQDLDCYTTVAQLCPFEKPATHCPRIHCPAHCKDEPSYWAPVFGTNIYADTSSICKTAVHAGVISNESGGDVDVMPVDKKKTYVGSLRNGVQSESLGTPRDGKAFRIFAVRQ

SEQ ID NO: 21590 - protein, 111 aa, Homo sapiens
  Payload ID: 4353
  Gene Symbol: CRISPLD2
  Gene Name: cysteine-rich secretory protein LCCL domain containing 2
  ENSP ID: ENSP00000457259
MCTHYTQIVWATTNKIGCAVNTCRKMTVWGEVWENAVYFVCNYSPKGNWIGEAPYKNGRPCSECPPSYGGSCRNNLCYREETYTPKPETDEMNEVETAPIPEENHVWLQPR

SEQ ID NO: 21591 - protein, 449 aa, Homo sapiens
  Payload ID: 4353
  Gene Symbol: CRISPLD2
  Gene Name: cysteine-rich secretory protein LCCL domain containing 2
  Uniprot ID: Q9H0B8
  ENSP ID: ENSP00000457655
MSCVLGGVIPLGLLFLVCGSQGYLLPNVTLLEELLSKYQHNESHSRVRRAIPREDKEEILMLHNKLRGQVQPQASNMEYMTWDDELEKSAAAWASQCIWEHGPTSLLVSIGQNLGAHWGRYRSPGFHVQSWYDEVKDYTYPYPSECNPWCPERCSGPMCTHYTQIVWATTNKIGCAVNTCRKMTVWGEVWENAVYFVCNYSPKGNWIGEAPYKNGRPCSECPPSYGGSCRNNLCYREETYTPKPETDEMNEVETAPIPEENHVWLQPRVMRPTKPKKTSAVNYMTQVVRCDTKMKDRCKGSTCNRYQCPAGCLNHKAKIFGTLFYESSSSICRAAIHYGILDDKGGLVDITRNGKVPFFVKSERHGVQSLSKYKPSSSFMVSKVKVQDLDCYTTVAQLCPFEKPATHCPRIHCPAHCKDEPSYWAPVFGTNIYADVSRMHFQQLSRKAC

SEQ ID NO: 21592 - protein, 43 aa, Homo sapiens
  Payload ID: 4353
  Gene Symbol: CRISPLD2
  Gene Name: cysteine-rich secretory protein LCCL domain containing 2
  ENSP ID: ENSP00000463171
  MOD_RES (1)..(1): Any amino acid
XKTAVHAGVISNESGGDVDVMPVDKKKTYVGSLRNGVQSERNM

SEQ ID NO: 21593 - protein, 184 aa, Homo sapiens
  Payload ID: 4354
  Gene Symbol: CYSRT1
  Gene Name: cysteine-rich tail protein 1
  ENSP ID: ENSP00000386453
MAPPLPRREKAAASRSTQALGPRAQKTERTDCRVATTGWTMDPQEMVVKNPYAHISIPRAHLRPDLGQQLEVASTCSSSSEMQPLPVGPCAPEPTHLLQPTEVPGPKGAKGNQGAAPIQNQQAWQQPGNPYSSSQRQAGLTYAGPPPAGRGDDIAHHCCCCPCCHCCHCPPFCRCHSCCCCVIS

SEQ ID NO: 21594 - protein, 97 aa, Homo sapiens
  Payload ID: 4355
  Gene Symbol: CYSTM1
  Gene Name: cysteine-rich transmembrane module containing 1
  Uniprot ID: Q9H1C7
  ENSP ID: ENSP00000261811
MNQENPPPYPGPGPTAPYPPYPPQPMGPGPMGGPYPPPQGYPYQGYPQYGWQGGPQEPPKTTVYVVEDQRRDELGPSTCLTACWTALCCCCLWDMLT

SEQ ID NO: 21595 - protein, 422 aa, Homo sapiens
  Payload ID: 4356
  Gene Symbol: CRELD1
  Gene Name: cysteine-rich with EGF-like domains 1
  Uniprot ID: Q96HD1
  ENSP ID: ENSP00000321856
MAPWPPKGLVPAMLWGLSLFLNLPGPIWLQPSPPPQSSPPPQPHPCHTCRGLVDSFNKGLERTIRDNFGGGNTAWEEENLSKYKDSETRLVEVLEGVCSKSDFECHRLLELSEELVESWWFHKQQEAPDLFQWLCSDSLKLCCPAGTFGPSCLPCPGGTERPCGGYGQCEGEGTRGGSGHCDCQAGYGGEACGQCGLGYFEAERNASHLVCSACFGPCARCSGPEESNCLQCKKGWALHHLKCVDIDECGTEGANCGADQFCVNTEGSYECRDCAKACLGCMGAGPGRCKKCSPGYQQVGSKCLDVDECETEVCPGENKQCENTEGGYRCICAEGYKQMEGICVKEQIPGAFPILTDLTPETTRRWKLGSHPHSTYVKMKMQRDEATFPGLYGKQVAKLGSQSRQSDRGTRLIHSQQASSQR

SEQ ID NO: 21596 - protein, 420 aa, Homo sapiens
  Payload ID: 4356
  Gene Symbol: CRELD1
  Gene Name: cysteine-rich with EGF-like domains 1
  Uniprot ID: Q96HD1
  ENSP ID: ENSP00000373322
MAPWPPKGLVPAMLWGLSLFLNLPGPIWLQPSPPPQSSPPPQPHPCHTCRGLVDSFNKGLERTIRDNFGGGNTAWEEENLSKYKDSETRLVEVLEGVCSKSDFECHRLLELSEELVESWWFHKQQEAPDLFQWLCSDSLKLCCPAGTFGPSCLPCPGGTERPCGGYGQCEGEGTRGGSGHCDCQAGYGGEACGQCGLGYFEAERNASHLVCSACFGPCARCSGPEESNCLQCKKGWALHHLKCVDIDECGTEGANCGADQFCVNTEGSYECRDCAKACLGCMGAGPGRCKKCSPGYQQVGSKCLDVDECETEVCPGENKQCENTEGGYRCICAEGYKQMEGICVKEQIPESAGFFSEMTEDELVVLQQMFFGIIICALATLAAKGDLVFTAIFIGAVAAMTGYWLSERSDRVLEGFIKGR

SEQ ID NO: 21597 - protein, 420 aa, Homo sapiens; identical to SEQ ID NO: 21596
  Payload ID: 4356
  Gene Symbol: CRELD1
  Gene Name: cysteine-rich with EGF-like domains 1
  Uniprot ID: Q96HD1
  ENSP ID: ENSP00000380355

SEQ ID NO: 21598 - protein, 420 aa, Homo sapiens; identical to SEQ ID NO: 21596
  Payload ID: 4356
  Gene Symbol: CRELD1
  Gene Name: cysteine-rich with EGF-like domains 1
  Uniprot ID: Q96HD1
  ENSP ID: ENSP00000393643

SEQ ID NO: 21599 - protein, 100 aa, Homo sapiens
  Payload ID: 4356
  Gene Symbol: CRELD1
  Gene Name: cysteine-rich with EGF-like domains 1
  ENSP ID: ENSP00000406556
  MOD_RES (1)..(1): Any amino acid
XPAHLSADIDECGTEGANCGADQFCVNTEGSYECRDCAKACLGCMGAGPGRCKKCSPGYQQMWMSVRQRCVRERTSSVKTPRAVIAASVPRATSRWKASV

SEQ ID NO: 21600 - protein, 101 aa, Homo sapiens
  Payload ID: 4356
  Gene Symbol: CRELD1
  Gene Name: cysteine-rich with EGF-like domains 1
  ENSP ID: ENSP00000411021
MAPWPPKGLVPAMLWGLSLFLNLPGPIWLQPSPPPQSSPPPQPHPCHTCRGLVDSFNKGLERTIRDNFGGGNTAWEEENLSKYKDSLSWGNREALRWLRAV

SEQ ID NO: 21601 - protein, 353 aa, Homo sapiens
  Payload ID: 4357
  Gene Symbol: CRELD2
  Gene Name: cysteine-rich with EGF-like domains 2
  Uniprot ID: Q6UXH1
  ENSP ID: ENSP00000332223
MRLPRRAALGLLPLLLLLPPAPEAAKKPTPCHRCRGLVDKFNQGMVDTAKKNFGGGNTAWEEKTLSKYESSEIRLLEILEGLCESSDFECNQMLEAQEEHLEAWWLQLKSEYPDLFEWFCVKTLKVCCSPGTYGPDCLACQGGSQRPCSGNGHCSGDGSRQGDGSCRCHMGYQGPLCTDCMDGYFSSLRNETHSICTACDESCKTCSGLTNRDCGECEVGWVLDEGACVDVDECAAEPPPCSAAQFCKNANGSYTCEECDSSCVGCTGEGPGNCKECISGYAREHGQCADVDECSLAEKTCVRKNENCYNTPGSYVCVCPDGFEETEDACVPPAEAEATEGESPTQLPSREDL

SEQ ID NO: 21602 - protein, 402 aa, Homo sapiens
  Payload ID: 4357
  Gene Symbol: CRELD2
  Gene Name: cysteine-rich with EGF-like domains 2
  Uniprot ID: Q6UXH1
  ENSP ID: ENSP00000383938
MRLPRRAALGLLPLLLLLPPAPEAAKKPTPCHRCRGLVDKFNQGMVDTAKKNFGGGNTAWEEKTLSKYESSEIRLLEILEGLCESSDFECNQMLEAQEEHLEAWWLQLKSEYPDLFEWFCVKTLKVCCSPGTYGPDCLACQGGSQRPCSGNGHCSGDGSRQGDGSCRCHMGYQGPLCTDCMDGYFSSLRNETHSICTVRTGLSDSYPPCCLSLGCWRGVGHAWIRGRNTHTQPGYSSRVWIAAFSPACDESCKTCSGLTNRDCGECEVGWVLDEGACVDVDECAAEPPPCSAAQFCKNANGSYTCEECDSSCVGCTGEGPGNCKECISGYAREHGQCADVDECSLAEKTCVRKNENCYNTPGSYVCVCPDGFEETEDACVPPAEAEATEGESPTQLPSREDL

SEQ ID NO: 21603 - protein, 325 aa, Homo sapiens
  Payload ID: 4357
  Gene Symbol: CRELD2
  Gene Name: cysteine-rich with EGF-like domains 2
  Uniprot ID: Q6UXH1
  ENSP ID: ENSP00000384111
MRLPRRAALGLLPLLLLLPPAPEAAKKPTPCHRCRGLVDKFNQGMVDTAKKNFGGGNTAWEEKTLSKYESSEIRLLEILEGLCESSDFECNQMLEAQEEHLEAWWLQLKSEYPDLFEWFCVKTLKVCCSPGTYGPDCLACQGGSQRPCSGNGHCSGDGSRQGDGSCRCHMGYQGPLCTDCMDGYFSSLRNETHSICTACDESCKTCSGLTNRDCGECEVGWVLDEGACVECDSSCVGCTGEGPGNCKECISGYAREHGQCADVDECSLAEKTCVRKNENCYNTPGSYVCVCPDGFEETEDACVPPAEAEATEGESPTQLPSREDL

SEQ ID NO: 21604 - protein, 321 aa, Homo sapiens
  Payload ID: 4357
  Gene Symbol: CRELD2
  Gene Name: cysteine-rich with EGF-like domains 2
  Uniprot ID: Q6UXH1
  ENSP ID: ENSP00000386034
MRLPRRAALGLLPLLLLLPPAPEAAKKPTPCHRCRGLVDKFNQGMVDTAKKNFGGGNTAWEEKTLSKYESSEIRLLEILEGLCESSDFECNQMLEAQEEHLEAWWLQLKSEYPDLFEWFCVKTLKVCCSPGTYGPDCLACQGGSQRPCSGNGHCSGDGSRQGDGSCRCHMGYQGPLCTDCMDGYFSSLRNETHSICTACDESCKTCSGLTNRDCGECEVGWVLDEGACVDVDECAAEPPPCSAAQFCKNANGSYTCEDVDECSLAEKTCVRKNENCYNTPGSYVCVCPDGFEETEDACVPPAEAEATEGESPTQLPSREDL

SEQ ID NO: 21605 - protein, 229 aa, Homo sapiens
  Payload ID: 4357
  Gene Symbol: CRELD2
  Gene Name: cysteine-rich with EGF-like domains 2
  ENSP ID: ENSP00000387769
MRLPRRAALGLLPLLLLLPPAPEAAKKPTPCHRCRGLVDKFNQGMVDTAKKNFGGGNTAWEEKTLSKYESSEIRLLEILEGLCESSDFECNQMLEAQEEHLEAWWLQLKSEYPDLFEWFCVKTLKVCCSPGTYGPDCLACQGGSQRPCSGNGHCSGDGSRQGDGSCRCHMGYQGPLCTDCMDGYFSSLRNETHSICTACDESCKTCSGLTNRDCGECEVGWVLDEGACV

SEQ ID NO: 21606 - protein, 381 aa, Homo sapiens [sequence omitted]

SEQ ID NO: 21607 - protein, 379 aa, Homo sapiens
  Payload ID: 4358
  Gene Symbol: CYR61
  Gene Name: cysteine-rich, angiogenic inducer, 61
  ENSP ID: ENSP00000479537
MSSRIARALALVVTLLHLTRLALSTCPAACHCPLEAPKCAPGVGLVRDGCGCCKVCAKQLNEDCSKTQPCDHTKGLECNFGASSTALKGICRAQSEGRPCEYNSRIYQNGESFQPNCKHQCTCIDGAVGCIPLCPQELSLPNLGCPNPRLVKVTGQCCEEWVCDEDSIKDPMEDQDGLLGKELGFDASEVELTRNNELIAVGKGSSLKRLPVFGMEPRILYNPLQGQKCIVQTTSWSQCSKTCGTGISTRVTNDNPECRLVKETRICEVRPCGQPVYSSLKKGKKCSKTKKSPEPVRFTYAGCLSVKKYRPKYCGSCVDGRCCTPQLTRCEDAVPLRRWGDIFQERHDDPVKCNYNCPHANEAAFPFYRLFNDIHKFRD

SEQ ID NO: 21608 - protein, 123 aa, Homo sapiens
  Payload ID: 4359
  Gene Symbol: CDPF1
  Gene Name: cysteine-rich, DPF motif domain containing 1
  Uniprot ID: Q6NVV7
  ENSP ID: ENSP00000325301
MASHVECRPLGVFECELCTLTAPYSYVGQKPPNTQSMVLLEESYVMKDPFTSDKDRFLVLGSCCSLCSRLVCVGPECSLFYSKRFCLPCVRENINAFPQEIRQDLEKRKAPSKRTPSQPGSRT

SEQ ID NO: 21609 - protein, 89 aa, Homo sapiens
  Payload ID: 4359
  Gene Symbol: CDPF1
  Gene Name: cysteine-rich, DPF motif domain containing 1
  ENSP ID: ENSP00000370425
MASHVECRPLGVFECELCTLTAPYSYVGQKPPNTQSMVLLEESYVMKDPFTSDKDRFLVLGSCCSLCSRLVCVGPMFLEGSPGEGTVLS

SEQ ID NO: 21610 - protein, 118 aa, Homo sapiens
  Payload ID: 4359
  Gene Symbol: CDPF1
  Gene Name: cysteine-rich, DPF motif domain containing 1
  ENSP ID: ENSP00000384451
MASHVECRPLGVFECELCTLTAPYSYVGQKPPNTQSMVLLEESYVMKDPFTSDKDRFLVLGSCCSLCSRLECSLFYSKRFCLPCVRENINAFPQEIRQDLEKRKAPSKRTPSQPGSRT

SEQ ID NO: 21611 - protein, 115 aa, Homo sapiens
  Payload ID: 4359
  Gene Symbol: CDPF1
  Gene Name: cysteine-rich, DPF motif domain containing 1
  ENSP ID: ENSP00000385460
MASHVECRPLGVFECELCTLTAPYSYVGQKPPNTQSMVLLEESYVMKDPFTSDKDRFLVLGSCCSLCSRLVCVGPVDVLGGISRRRDCPFMSTCCVPGPVLGTCFTAEASFSPAP

SEQ ID NO: 21612 - protein, 589 aa, Homo sapiens
  Payload ID: 4360
  Gene Symbol: CSRNP1
  Gene Name: cysteine-serine-rich nuclear protein 1
  Uniprot ID: Q96S65
  ENSP ID: ENSP00000273153
MTGLLKRKFDQLDEDNSSVSSSSSSSGCQSRSCSPSSSVSRAWDSEEEGPWDQMPLPDRDFCGPRSFTPLSILKRARRERPGRVAFDGITVFYFPRCQGFTSVPSRGGCTLGMALRHSACRRFSLAEFAQEQARARHEKLRQRLKEEKLEMLQWKLSAAGVPQAEAGLPPVVDAIDDASVEEDLAVAVAGGRLEEVSFLQPYPARRRRALLRASGVRRIDREEKRELQALRQSREDCGCHCDRICDPETCSCSLAGIKCQMDHTAFPCGCCREGCENPMGRVEFNQARVQTHFIHTLTRLQLEQEAESFRELEAPAQGSPPSPGEEALVPTFPLAKPPMNNELGDNSCSSDMTDSSTASSSASGTSEAPDCPTHPGLPGPGFQPGVDDDSLARILSFSDSDFGGEEEEEEEGSVGNLDNLSCFHPADIFGTSDPGGLASWTHSYSGCSFTSGVLDENANLDASCFLNGGLEGSREGSLPGTSVPPSMDAGRSSSVDLSLSSCDSFELLQALPDYSLGPHYTSQKVSDSLDNIEAPHFPLPGLSPPGDASSCFLESLMGFSEPAAEALDPFIDSQFEDTVPASLMEPVPV

SEQ ID NO: 21613 - protein, 589 aa, Homo sapiens; identical to SEQ ID NO: 21612
  Payload ID: 4360
  Gene Symbol: CSRNP1
  Gene Name: cysteine-serine-rich nuclear protein 1
  Uniprot ID: Q96S65
  ENSP ID: ENSP00000422532

SEQ ID NO: 21614 - protein, 543 aa, Homo sapiens
  Payload ID: 4361
  Gene Symbol: CSRNP2
  Gene Name: cysteine-serine-rich nuclear protein 2
  Uniprot ID: Q9H175
  ENSP ID: ENSP00000228515
MDAFTGSGLKRKFDDVDVGSSVSNSDDEISSSDSADSCDSLNPPTTASFTPTSILKRQKQLRRKNVRFDQVTVYYFARRQGFTSVPSQGGSSLGMAQRHNSVRSYTLCEFAQEQEVNHREILREHLKEEKLHAKKMKLTKNGTVESVEADGLTLDDVSDEDIDVENVEVDDYFFLQPLPTKRRRALLRASGVHRIDAEEKQELRAIRLSREECGCDCRLYCDPEACACSQAGIKCQVDRMSFPCGCSRDGCGNMAGRIEFNPIRVRTHYLHTIMKLELESKRQVSRPAAPDEEPSPTASCSLTGAQGSETQDFQEFIAENETAVMHLQSAEELERLKAEEDSSGSSASLDSSIESLGVCILEEPLAVPEELCPGLTAPILIQAQLPPGSSVLCFTENSDHPTASTVNSPSYLNSGPLVYYQVEQRPVLGVKGEPGTEEGSASFPKEKDLNVFSLPVTSLVACSSTDPAALCKSEVGKTPTLEALLPEDCNPEEPENEDFHPSWSPSSLPFRTDNEEGCGMVKTSQQNEDRPPEDSSLELPLAV

SEQ ID NO: 21615 - protein, 86 aa, Homo sapiens
  Payload ID: 4361
  Gene Symbol: CSRNP2
  Gene Name: cysteine-serine-rich nuclear protein 2
  ENSP ID: ENSP00000447065
MDAFTGSGLKRKFDDVDVGSSVSNSDDEISSSDSADSCDSLNPPTTASFTPTSILKRQKQLRRKNVRFDQVTVYYFARRQGFTSVP

SEQ ID NO: 21616 - protein, 114 aa, Homo sapiens
  Payload ID: 4361
  Gene Symbol: CSRNP2
  Gene Name: cysteine-serine-rich nuclear protein 2
  ENSP ID: ENSP00000447657
MDAFTGSGLKRKFDDVDVGSSVSNSDDEISSSDSADSCDSLNPPTTASFTPTSILKRQKQLRRKNVRFDQVTVYYFARRQGFTSVPSQGGSSLGMAQRHNSVRSYTLCEFAQEQ

SEQ ID NO: 21617 - protein, 66 aa, Homo sapiens
  Payload ID: 4361
  Gene Symbol: CSRNP2
  Gene Name: cysteine-serine-rich nuclear protein 2
  ENSP ID: ENSP00000447983
MAQRHNSVRSYTLCEFAQEQEVNHREILREHLKEEKLHAKKMKLTKNGTVESVEADGLTLDDVSDE

SEQ ID NO: 21618 - protein, 58 aa, Homo sapiens
  Payload ID: 4361
  Gene Symbol: CSRNP2
  Gene Name: cysteine-serine-rich nuclear protein 2
  ENSP ID: ENSP00000449152
MDAFTGSGLKRKFDDVDVGSSVSNSDDEISSSDSADSCDSLNPPTTASFTPTSILKRQ

SEQ ID NO: 21619 - protein, 585 aa, Homo sapiens
  Payload ID: 4362
  Gene Symbol: CSRNP3
  Gene Name: cysteine-serine-rich nuclear protein 3
  Uniprot ID: Q8WYN3
  ENSP ID: ENSP00000318258
MSGILKRKFEEVDGSSPCSSVRESDDEVSSSESADSGDSVNPSTSSHFTPSSILKREKRLRTKNVHFSCVTVYYFTRRQGFTSVPSQGGSTLGMSSRHNSVRQYTLGEFAREQERLHREMLREHLREEKLNSLKLKMTKNGTVESEEASTLTLDDISDDDIDLDNTEVDEYFFLQPLPTKKRRALLRASGVKKIDVEEKHELRAIRLSREDCGCDCRVFCDPDTCTCSLAGIKCQVDRMSFPCGCTKEGCSNTAGRIEFNPIRVRTHFLHTIMKLELEKNREQQIPTLNGCHSEISAHSSSMGPVAHSVEYSIADSFEIETEPQAAVLHLQSAEELDCQGEEEEEEEDGSSFCSGVTDSSTQSLAPSESDEEEEEEEEEEEEEDDDDDKGDGFVEGLGTHAEVVPLPSVLCYSDGTAVHESHAKNASFYANSSTLYYQIDSHIPGTPNQISENYSERDTVKNGTLSLVPYTMTPEQFVDYARQAEEAYGASHYPAANPSVIVCCSSSENDSGVPCNSLYPEHRSNHPQVEFHSYLKGPSQEGFVSALNGDSHISEHPAENSLSLAEKSILHEECIKSPVVETVPV

SEQ ID NO: 21620 - protein, 585 aa, Homo sapiens; identical to SEQ ID NO: 21619
  Payload ID: 4362
  Gene Symbol: CSRNP3
  Gene Name: cysteine-serine-rich nuclear protein 3
  Uniprot ID: Q8WYN3
  ENSP ID: ENSP00000344042

SEQ ID NO: 21621 - protein, 138 aa, Homo sapiens
  Payload ID: 4362
  Gene Symbol: CSRNP3
  Gene Name: cysteine-serine-rich nuclear protein 3
  ENSP ID: ENSP00000386278
MSGILKRKFEEVDGSSPCSSVRESDDEVSSSESADSGDSVNPSTSSHFTPSSILKREKRLRTKNVHFSCVTVYYFTRRQGFTSVPSQGGSTLGMSSRHNSVRQYTLGEFAREQERLHREMLREHLREEKLNSLKLKMT

SEQ ID NO: 21622 - protein, 617 aa, Homo sapiens
  Payload ID: 4362
  Gene Symbol: CSRNP3
  Gene Name: cysteine-serine-rich nuclear protein 3
  ENSP ID: ENSP00000387195
MKCALFLRVKILQRVCRSRYIVHAGTCDSTAAMSGILKRKFEEVDGSSPCSSVRESDDEVSSSESADSGDSVNPSTSSHFTPSSILKREKRLRTKNVHFSCVTVYYFTRRQGFTSVPSQGGSTLGMSSRHNSVRQYTLGEFAREQERLHREMLREHLREEKLNSLKLKMTKNGTVESEEASTLTLDDISDDDIDLDNTEVDEYFFLQPLPTKKRRALLRASGVKKIDVEEKHELRAIRLSREDCGCDCRVFCDPDTCTCSLAGIKCQVDRMSFPCGCTKEGCSNTAGRIEFNPIRVRTHFLHTIMKLELEKNREQQIPTLNGCHSEISAHSSSMGPVAHSVEYSIADSFEIETEPQAAVLHLQSAEELDCQGEEEEEEEDGSSFCSGVTDSSTQSLAPSESDEEEEEEEEEEEEEDDDDDKGDGFVEGLGTHAEVVPLPSVLCYSDGTAVHESHAKNASFYANSSTLYYQIDSHIPGTPNQISENYSERDTVKNGTLSLVPYTMTPEQFVDYARQAEEAYGASHYPAANPSVIVCCSSSENDSGVPCNSLYPEHRSNHPQVEFHSYLKGPSQEGFVSALNGDSHISEHPAENSLSLAEKSILHEECIKSPVVETVPV

SEQ ID NO: 21623 - protein, 437 aa, Homo sapiens
  Payload ID: 4362
  Gene Symbol: CSRNP3
  Gene Name: cysteine-serine-rich nuclear protein 3
  ENSP ID: ENSP00000412081
MSGILKRKFEEVDGSSPCSSVRESDDEVSSSESADSGDSVNPSTSSHFTPSSILKREKRLRTKNVHFSCVTVYYFTRRQGFTSVPSQGGSTLGMSSRHNSVRQYTLGEFAREQERLHREMLREHLREEKLNSLKLKMTKNGTVESEEASTLTLDDISDDDIDLDNTEVDEYFFLQPLPTKKRRALLRASGVKKIDVEEKHELRAIRLSREDCGCDCRVFCDPDTCTCSLAGIKCQVDRMSFPCGCTKEGCSNTAGRIEFNPIRVRTHFLHTIMKLELEKNREQQIPTLNGCHSEISAHSSSMGPVAHSVEYSIADSFEIETEPQAAVLHLQSAEELDCQGEEEEEEEDGSSFCSGVTDSSTQSLAPSESDEEEEEEEEEEEEEDDDDDKGDGFVEGLGTHAEVVPLPSVLCYSDGTAVHESHAKNASFYANSSTLYY

SEQ ID NO: 21624 - protein, 337 aa, Homo sapiens
  Payload ID: 4363
  Gene Symbol: CYSLTR1
  Gene Name: cysteinyl leukotriene receptor 1
  Uniprot ID: Q9Y271
  ENSP ID: ENSP00000362401
MDETGNLTVSSATCHDTIDDFRNQVYSTLYSMISVVGFFGNGFVLYVLIKTYHKKSAFQVYMINLAVADLLCVCTLPLRVVYYVHKGIWLFGDFLCRLSTYALYVNLYCSIFFMTAMSFFRCIAIVFPVQNINLVTQKKARFVCVGIWIFVILTSSPFLMAKPQKDEKNNTKCFEPPQDNQTKNHVLVLHYVSLFVGFIIPFVIIIVCYTMIILTLLKKSMKKNLSSHKKAIGMIMVVTAAFLVSFMPYHIQRTIHLHFLHNETKPCDSVLRMQKSVVITLSLAASNCCFDPLLYFFSGGNFRKRLSTFRKHSLSSVTYVPRKKASLPEKGEEICKV

SEQ ID NO: 21625 - protein, 337 aa, Homo sapiens; identical to SEQ ID NO: 21624
  Payload ID: 4363
  Gene Symbol: CYSLTR1
  Gene Name: cysteinyl leukotriene receptor 1
  Uniprot ID: Q9Y271
  ENSP ID: ENSP00000478492

SEQ ID NO: 21626 - protein, 346 aa, Homo sapiens
  Payload ID: 4364
  Gene Symbol: CYSLTR2
  Gene Name: cysteinyl leukotriene receptor 2
  Uniprot ID: Q9NS75
  ENSP ID: ENSP00000282018
MERKFMSLQPSISVSEMEPNGTFSNNNSRNCTIENFKREFFPIVYLIIFFWGVLGNGLSIYVFLQPYKKSTSVNVFMLNLAISDLLFISTLPFRADYYLRGSNWIFGDLACRIMSYSLYVNMYSSIYFLTVLSVVRFLAMVHPFRLLHVTSIRSAWILCGIIWILIMASSIMLLDSGSEQNGSVTSCLELNLYKIAKLQTMNYIALVVGCLLPFFTLSICYLLIIRVLLKVEVPESGLRVSHRKALTTIIITLIIFFLCFLPYHTLRTVHLTTWKVGLCKDRLHKALVITLALAAANACFNPLLYYFAGENFKDRLKSALRKGHPQKAKTKCVFPVSVWLRKETRV

SEQ ID NO: 21627 - protein, 346 aa, Homo sapiens; identical to SEQ ID NO: 21626
  Payload ID: 4364
  Gene Symbol: CYSLTR2
  Gene Name: cysteinyl leukotriene receptor 2
  Uniprot ID: Q9NS75
  ENSP ID: ENSP00000477930

SEQ ID NO: 21628 - protein, 14 aa, Homo sapiens
  Payload ID: 4364
  Gene Symbol: CYSLTR2
  Gene Name: cysteinyl leukotriene receptor 2
  ENSP ID: ENSP00000479446
MERKFMSLQPSISV

SEQ ID NO: 21629 - protein, 14 aa, Homo sapiens
  Payload ID: 4364
  Gene Symbol: CYSLTR2
  Gene Name: cysteinyl leukotriene receptor 2
  ENSP ID: ENSP00000482031
MERKFMSLQPSISV

SEQ ID NO: 21630 - protein, 14 aa, Homo sapiens
  Payload ID: 4364
  Gene Symbol: CYSLTR2
  Gene Name: cysteinyl leukotriene receptor 2
  ENSP ID: ENSP00000482041
MERKFMSLQPSISV

SEQ ID NO: 21631 - protein, 726 aa, Homo sapiens
  Payload ID: 4365
  Gene Symbol: CARS
  Gene Name: cysteinyl-tRNA synthetase
  Uniprot ID: P49589
  ENSP ID: ENSP00000278224
MADSSGQQGKGRRVQPQWSPPAGTQPCRLHLYNSLTRNKEVFIPQDGKKVTWYCCGPTVYDASHMGHARSYISFDILRRVLKDYFKFDVFYCMNITDIDDKIIKRARQNHLFEQYREKRPEAAQLLEDVQAALKPFSVKLNETTDPDKKQMLERIQHAVQLATEPLEKAVQSRLTGEEVNSCVEVLLEEAKDLLSDWLDSTLGCDVTDNSIFSKLPKFWEGDFHRDMEALNVLPPDVLTRVSEYVPEIVNFVQKIVDNGYGYVSNGSVYFDTAKFASSEKHSYGKLVPEAVGDQKALQEGEGDLSISADRLSEKRSPNDFALWKASKPGEPSWPCPWGKGRPGWHIECSAMAGTLLGASMDIHGGGFDLRFPHHDNELAQSEAYFENDCWVRYFLHTGHLTIAGCKMSKSLKNFITIKDALKKHSARQLRLAFLMHSWKDTLDYSSNTMESALQYEKFLNEFFLNVKDILRAPVDITGQFEKWGEEEAELNKNFYDKKTAIHKALCDNVDTRTVMEEMRALVSQCNLYMAARKAVRKRPNQALLENIALYLTHMLKIFGAVEEDSSLGFPVGGPGTSLSLEATVMPYLQVLSEFREGVRKIAREQKVPEILQLSDALRDNILPELGVRFEDHEGLPTVVKLVDRNTLLKEREEKRRVEEEKRKKKEEAARRKQEQEAAKLAKMKIPPSEMFLSETDKYSKFDENVSMVCPHMTWRAKSSAKGKPRS

SEQ ID NO: 21632 - protein, 831 aa, Homo sapiens
  Payload ID: 4365
  Gene Symbol: CARS
  Gene Name: cysteinyl-tRNA synthetase
  Uniprot ID: P49589
  ENSP ID: ENSP00000369897
MADSSGQQAPDYRSILSISDEAARAQALNEHLSTRSYVQGYSLSQADVDAFRQLSAPPADPQLFHVARWFRHIEALLGSPCGKGQPCRLQASKGRRVQPQWSPPAGTQPCRLHLYNSLTRNKEVFIPQDGKKVTWYCCGPTVYDASHMGHARSYISFDILRRVLKDYFKFDVFYCMNITDIDDKIIKRARQNHLFEQYREKRPEAAQLLEDVQAALKPFSVKLNETTDPDKKQMLERIQHAVQLATEPLEKAVQSRLTGEEVNSCVEVLLEEAKDLLSDWLDSTLGCDVTDNSIFSKLPKFWEGDFHRDMEALNVLPPDVLTRVSEYVPEIVNFVQKIVDNGYGYVSNGSVYFDTAKFASSEKHSYGKLVPEAVGDQKALQEGEGDLSISADRLSEKRSPNDFALWKASKPGEPSWPCPWGKGRPGWHIECSAMAGTLLGASMDIHGGGFDLRFPHHDNELAQSEAYFENDCWVRYFLHTGHLTIAGCKMSKSLKNFITIKDALKKHSARQLRLAFLMHSWKDTLDYSSNTMESALQYEKFLNEFFLNVKDILRAPVDITGQFEKWGEEEAELNKNFYDKKTAIHKALCDNVDTRTVMEEMRALVSQCNLYMAARKAVRKRPNQALLENIALYLTHMLKIFGAVEEDSSLGFPVGGPGTSLSLEATVMPYLQVLSEFREGVRKIAREQKVPEILQLSDALRDNILPELGVRFEDHEGLPTVVKLVDRNTLLKEREEKRRVEEEKRKKKEEAARRKQEQEAAKLAKMKIPPSEMFLSETDKYSKFDENGLPTHDMEGKELSKGQAKKLKKLFEAQEKLYKEYLQMAQNGSFQ

SEQ ID NO: 21633 - protein, 748 aa, Homo sapiens
  Payload ID: 4365
  Gene Symbol: CARS
  Gene Name: cysteinyl-tRNA synthetase
  Uniprot ID: P49589
  ENSP ID: ENSP00000380300
MADSSGQQGKGRRVQPQWSPPAGTQPCRLHLYNSLTRNKEVFIPQDGKKVTWYCCGPTVYDASHMGHARSYISFDILRRVLKDYFKFDVFYCMNITDIDDKIIKRARQNHLFEQYREKRPEAAQLLEDVQAALKPFSVKLNETTDPDKKQMLERIQHAVQLATEPLEKAVQSRLTGEEVNSCVEVLLEEAKDLLSDWLDSTLGCDVTDNSIFSKLPKFWEGDFHRDMEALNVLPPDVLTRVSEYVPEIVNFVQKIVDNGYGYVSNGSVYFDTAKFASSEKHSYGKLVPEAVGDQKALQEGEGDLSISADRLSEKRSPNDFALWKASKPGEPSWPCPWGKGRPGWHIECSAMAGTLLGASMDIHGGGFDLRFPHHDNELAQSEAYFENDCWVRYFLHTGHLTIAGCKMSKSLKNFITIKDALKKHSARQLRLAFLMHSWKDTLDYSSNTMESALQYEKFLNEFFLNVKDILRAPVDITGQFEKWGEEEAELNKNFYDKKTAIHKALCDNVDTRTVMEEMRALVSQCNLYMAARKAVRKRPNQALLENIALYLTHMLKIFGAVEEDSSLGFPVGGPGTSLSLEATVMPYLQVLSEFREGVRKIAREQKVPEILQLSDALRDNILPELGVRFEDHEGLPTVVKLVDRNTLLKEREEKRRVEEEKRKKKEEAARRKQEQEAAKLAKMKIPPSEMFLSETDKYSKFDENGLPTHDMEGKELSKGQAKKLKKLFEAQEKLYKEYLQMAQNGSFQ

SEQ ID NO: 21634 - protein, 45 aa, Homo sapiens
  Payload ID: 4365
  Gene Symbol: CARS
  Gene Name: cysteinyl-tRNA synthetase
  ENSP ID: ENSP00000408802
MADSSGQQGKGRRVQPQWSPPAGTQPCRLHLYNSLTRNKCFLHFL

SEQ ID NO: 21635 - protein, 128 aa, Homo sapiens
  Payload ID: 4365
  Gene Symbol: CARS
  Gene Name: cysteinyl-tRNA synthetase
  ENSP ID: ENSP00000431368
MADSSGQQAPDYRSILSISDEAARAQALNEHLSTRSYVQGYSLSQADVDAFRQLSAPPADPQLFHVARWFRHIEALLGSPCGKGQPCRLQASKGRRVQPQWSPPAGTQPCRLHLYNSLTRNKCFLHFL

SEQ ID NO: 21636 - protein, 739 aa, Homo sapiens
  Payload ID: 4365
  Gene Symbol: CARS
  Gene Name: cysteinyl-tRNA synthetase
  ENSP ID: ENSP00000432619
MEPTSGPFRTDLGYHLVGCSSGKGRRVQPQWSPPAGTQPCRLHLYNSLTRNKEVFIPQDGKKVTWYCCGPTVYDASHMGHARSYISFDILRRVLKDYFKFDVFYCMNITDIDDKIIKRARQNHLFEQYREKRPEAAQLLEDVQAALKPFSVKLNETTDPDKKQMLERIQHAVQLATEPLEKAVQSRLTGEEVNSCVEVLLEEAKDLLSDWLDSTLGCDVTDNSIFSKLPKFWEGDFHRDMEALNVLPPDVLTRVSEYVPEIVNFVQKIVDNGYGYVSNGSVYFDTAKFASSEKHSYGKLVPEAVGDQKALQEGEGDLSISADRLSEKRSPNDFALWKASKPGEPSWPCPWGKGRPGWHIECSAMAGTLLGASMDIHGGGFDLRFPHHDNELAQSEAYFENDCWVRYFLHTGHLTIAGCKMSKSLKNFITIKDALKKHSARQLRLAFLMHSWKDTLDYSSNTMESALQYEKFLNEFFLNVKDILRAPVDITGQFEKWGEEEAELNKNFYDKKTAIHKALCDNVDTRTVMEEMRALVSQCNLYMAARKAVRKRPNQALLENIALYLTHMLKIFGAVEEDSSLGFPVGGPGTSLSLEATVMPYLQVLSEFREGVRKIAREQKVPEILQLSDALRDNILPELGVRFEDHEGLPTVVKLVDRNTLLKEREEKRRVEEEKRKKKEEAARRKQEQEAAKLAKMKIPPSEMFLSETDKYSKFDENVSMVCPHMTWRAKSSAKGKPRS

SEQ ID NO: 21637 - protein, 76 aa, Homo sapiens
  Payload ID: 4365
  Gene Symbol: CARS
  Gene Name: cysteinyl-tRNA synthetase
  ENSP ID: ENSP00000434184
MADSSGQQGKGRRVQPQWSPPAGTQPCRLHLYNSLTRNKEVFIPQDGKKVTWYCCGPTVYDASHMGHASSRGVPRC

SEQ ID NO: 21638 - protein, 831 aa, Homo sapiens; identical to SEQ ID NO: 21632
  Payload ID: 4365
  Gene Symbol: CARS
  Gene Name: cysteinyl-tRNA synthetase
  Uniprot ID: P49589
  ENSP ID: ENSP00000482336

SEQ ID NO: 21639 - protein, 76 aa, Homo sapiens; identical to SEQ ID NO: 21637
  Payload ID: 4365
  Gene Symbol: CARS
  Gene Name: cysteinyl-tRNA synthetase
  ENSP ID: ENSP00000486161

SEQ ID NO: 21640 - protein, 726 aa, Homo sapiens; identical to SEQ ID NO: 21631
  Payload ID: 4365
  Gene Symbol: CARS
  Gene Name: cysteinyl-tRNA synthetase
  Uniprot ID: P49589
  ENSP ID: ENSP00000487923

SEQ ID NO: 21641 - protein, 739 aa, Homo sapiens; identical to SEQ ID NO: 21636
  Payload ID: 4365
  Gene Symbol: CARS
  Gene Name: cysteinyl-tRNA synthetase
  ENSP ID: ENSP00000488062

SEQ ID NO: 21642 - protein, 45 aa, Homo sapiens; identical to SEQ ID NO: 21634
  Payload ID: 4365
  Gene Symbol: CARS
  Gene Name: cysteinyl-tRNA synthetase
  ENSP ID: ENSP00000488476

SEQ ID NO: 21643 - protein, 748 aa, Homo sapiens; identical to SEQ ID NO: 21633
  Payload ID: 4365
  Gene Symbol: CARS
  Gene Name: cysteinyl-tRNA synthetase
  Uniprot ID: P49589
  ENSP ID: ENSP00000488657

SEQ ID NO: 21644 - protein, 128 aa, Homo sapiens; identical to SEQ ID NO: 21635
  Payload ID: 4365
  Gene Symbol: CARS
  Gene Name: cysteinyl-tRNA synthetase
  ENSP ID: ENSP00000488737

SEQ ID NO: 21645 - protein, 564 aa, Homo sapiens
  Payload ID: 4366
  Gene Symbol: CARS2
  Gene Name: cysteinyl-tRNA synthetase 2, mitochondrial (putative)
  Uniprot ID: Q9HA77
  ENSP ID: ENSP00000257347
MLRTTRGPGLGPPLLQAALGLGRAGWHWPAGRAASGGRGRAWLQPTGRETGVQVYNSLTGRKEPLIVAHAEAASWYSCGPTVYDHAHLGHACSYVRFDIIRRILTKVFGCSIVMVMGITDVDDKIIKRANEMNISPASLASLYEEDFKQDMAALKVLPPTVYLRVTENIPQIISFIEGIIARGNAYSTAKGNVYFDLKSRGDKYGKLVGVVPGPVGEPADSDKRHASDFALWKAAKPQEVFWASPWGPGRPGWHIECSAIASMVFGSQLDIHSGGIDLAFPHHENEIAQCEVFHQCEQWGNYFLHSGHLHAKGKEEKMSKSLKNYITIKDFLKTFSPDVFRFFCLRSSYRSAIDYSDSAMLQAQQLLLGLGSFLEDARAYMKGQLACGSVREAMLWERLSSTKRAVKAALADDFDTPRVVDAILGLAHHGNGQLRASLKEPEGPRSPAVFGAIISYFEQFFETVGISLANQQYVSGDGSEATLHGVVDELVRFRQKVRQFALAMPEATGDARRQQLLERQPLLEACDTLRRGLTAHGINIKDRSSTTSTWELLDQRTKDQKSAG

SEQ ID NO: 21646 - protein, 154 aa, Homo sapiens
  Payload ID: 4366
  Gene Symbol: CARS2
  Gene Name: cysteinyl-tRNA synthetase 2, mitochondrial (putative)
  ENSP ID: ENSP00000437962
MLRTTRGPGLGPPLLQAALGLGRAGWHWPAGRAASGGRGRAWLQPTGRETGVQVYNSLTGRKEPLIVAHAEAASWYSCGPTVYDHAHLGHACSYVRFDIIRRILTKVFGCSIVMVMGITDVDDKIIKRANERVLLCRPGWSAVAPSWLTATSAS

SEQ ID NO: 21647 - protein, 176 aa, Homo sapiens
  Payload ID: 4366
  Gene Symbol: CARS2
  Gene Name: cysteinyl-tRNA synthetase 2, mitochondrial (putative)
  ENSP ID: ENSP00000438267
  MOD_RES (1)..(1): Any amino acid
XHLHAKGKEEKMSKSLKNYITIKDFLKTFSPDVFRFFCLRSSYRSAIDYSDSAMLQAQQLLLGLGSFLEDARAYMKGQLACGSVREAMLWERLSSTKRAVKAALADDFDTPRVVDAILGLAHHGNGQLRASLKEPEGPRSPAVFGAIISYFEQFFETVGISLANQQLANSRAQNQR

SEQ ID NO: 21648 - protein, 119 aa, Homo sapiens
  Payload ID: 4366
  Gene Symbol: CARS2
  Gene Name: cysteinyl-tRNA synthetase 2, mitochondrial (putative)
  ENSP ID: ENSP00000440420
  MOD_RES (1)..(1): Any amino acid
XLQAALGLGRAGWHWPAGRAASGGRGRAWLQPTGRETGVQVYNSLTGRKEPLIVAHAEAASWYSCGPTVYDHAHLGHACSYVRFDIIRRILTKVFGCSIVMVMGITDVDDKIIKRANEA

SEQ ID NO: 21649 - protein, 92 aa, Homo sapiens
  Payload ID: 4366
  Gene Symbol: CARS2
  Gene Name: cysteinyl-tRNA synthetase 2, mitochondrial (putative)
  ENSP ID: ENSP00000443027
  MOD_RES (1)..(1): Any amino acid
XWGPGRPGWHIECSAIASMVFGSQLDIHSGGIDLAFPHHENEIAQCEVFHQCEQWGNYFLHSGHLHAKGKEEKMSKSLKNYITIKAQSWLDP

SEQ ID NO: 21650 - protein, 181 aa, Homo sapiens
  Payload ID: 4366
  Gene Symbol: CARS2
  Gene Name: cysteinyl-tRNA synthetase 2, mitochondrial (putative)
  ENSP ID: ENSP00000444655
MEGAVLEAGGARCFCRFGCELSKYENPGYSSPRSDYFKNYMIIITQNRMSFLANMFHTMDFNFVSRYSCGPTVYDHAHLGHACSYVRFDIIRRILTKVFGCSIVMVMGITDVDDKIIKRANEMNISPASLASLYEEDFKQDMAALKVLPPTVYLRVTENIPQIISFIEGIIARGNAYSTAK

SEQ ID NO: 21651 - protein, 90 aa, Homo sapiens
  Payload ID: 4366
  Gene Symbol: CARS2
  Gene Name: cysteinyl-tRNA synthetase 2, mitochondrial (putative)
  ENSP ID: ENSP00000480523
  MOD_RES (1)..(1): Any amino acid
XMLWERLSSTKRAVKAALADDFDTPRVVDAILGLAHHGNGQLRASLKEPEGPRSPAVFGAIISYFEQFFETVGISLANQQLANSRAQNQR

SEQ ID NO: 21652 - protein, 1480 aa, Homo sapiens
  Payload ID: 4367
  Gene Symbol: CFTR
  Gene Name: cystic fibrosis transmembrane conductance regulator (ATP-binding cassette sub-family C, member 7)
  Uniprot ID: P13569
  ENSP ID: ENSP00000003084
MQRSPLEKASVVSKLFFSWTRPILRKGYRQRLELSDIYQIPSVDSADNLSEKLEREWDRELASKKNPKLINALRRCFFWRFMFYGIFLYLGEVTKAVQPLLLGRIIASYDPDNKEERSIAIYLGIGLCLLFIVRTLLLHPAIFGLHHIGMQMRIAMFSLIYKKTLKLSSRVLDKISIGQLVSLLSNNLNKFDEGLALAHFVWIAPLQVALLMGLIWELLQASAFCGLGFLIVLALFQAGLGRMMMKYRDQRAGKISERLVITSEMIENIQSVKAYCWEEAMEKMIENLRQTELKLTRKAAYVRYFNSSAFFFSGFFVVFLSVLPYALIKGIILRKIFTTISFCIVLRMAVTRQFPWAVQTWYDSLGAINKIQDFLQKQEYKTLEYNLTTTEVVMENVTAFWEEGFGELFEKAKQNNNNRKTSNGDDSLFFSNFSLLGTPVLKDINFKIERGQLLAVAGSTGAGKTSLLMVIMGELEPSEGKIKHSGRISFCSQFSWIMPGTIKENIIFGVSYDEYRYRSVIKACQLEEDISKFAEKDNIVLGEGGITLSGGQRARISLARAVYKDADLYLLDSPFGYLDVLTEKEIFESCVCKLMANKTRILVTSKMEHLKKADKILILHEGSSYFYGTFSELQNLQPDFSSKLMGCDSFDQFSAERRNSILTETLHRFSLEGDAPVSWTETKKQSFKQTGEFGEKRKNSILNPINSIRKFSIVQKTPLQMNGIEEDSDEPLERRLSLVPDSEQGEAILPRISVISTGPTLQARRRQSVLNLMTHSVNQGQNIHRKTTASTRKVSLAPQANLTELDIYSRRLSQETGLEISEEINEEDLKECFFDDMESIPAVTTWNTYLRYITVHKSLIFVLIWCLVIFLAEVAASLVVLWLLGNTPLQDKGNSTHSRNNSYAVIITSTSSYYVFYIYVGVADTLLAMGFFRGLPLVHTLITVSKILHHKMLHSVLQAPMSTLNTLKAGGILNRFSKDIAILDDLLPLTIFDFIQLLLIVIGAIAVVAVLQPYIFVATVPVIVAFIMLRAYFLQTSQQLKQLESEGRSPIFTHLVTSLKGLWTLRAFGRQPYFETLFHKALNLHTANWFLYLSTLRWFQMRIEMIFVIFFIAVTFISILTTGEGEGRVGIILTLAMNIMSTLQWAVNSSIDVDSLMRSVSRVFKFIDMPTEGKPTKSTKPYKNGQLSKVMIIENSHVKKDDIWPSGGQMTVKDLTAKYTEGGNAILENISFSISPGQRVGLLGRTGSGKSTLLSAFLRLLNTEGEIQIDGVSWDSITLQQWRKAFGVIPQKVFIFSGTFRKNLDPYEQWSDQEIWKVADEVGLRSVIEQFPGKLDFVLVDGGCVLSHGHKQLMCLARSVLSKAKILLLDEPSAHLDPVTYQIIRRTLKQAFADCTVILCEHRIEAMLECQQFLVIEENKVRQYDSIQKLLNERSLFRQAISPSDRVKLFPHRNSSKCKSKPQIAALKEETEEEVQDTRL

SEQ ID NO: 21653 - protein, 1438 aa, Homo sapiens
  Payload ID: 4367
  Gene Symbol: CFTR
  Gene Name: cystic fibrosis transmembrane conductance regulator (ATP-binding cassette sub-family C, member 7)
  ENSP ID: ENSP00000389119
MQRSPLEKASVVSKLFFSWTRPILRKGYRQRLELSDIYQIPSVDSADNLSEKLEREWDRELASKKNPKLINALRRCFFWRFMFYGIFLYLGEVTKAVQPLLLGRIIASYDPDNKEERSIAIYLGIGLCLLFIVRTLLLHPAIFGLHHIGMQMRIAMFSLIYKKGLALAHFVWIAPLQVALLMGLIWELLQASAFCGLGFLIVLALFQAGLGRMMMKYRDQRAGKISERLVITSEMIENIQSVKAYCWEEAMEKMIENLRQTELKLTRKAAYVRYFNSSAFFFSGFFVVFLSVLPYALIKGIILRKIFTTISFCIVLRMAVTRQFPWAVQTWYDSLGAINKIQDFLQKQEYKTLEYNLTTTEVVMENVTAFWEEGFGELFEKAKQNNNNRKTSNGDDSLFFSNFSLLGTPVLKDINFKIERGQLLAVAGSTGAGKTSLLMVIMGELEPSEGKIKHSGRISFCSQFSWIMPGTIKENIIFGVSYDEYRYRSVIKACQLEEDISKFAEKDNIVLGEGGITLSGGQRARISLARAVYKDADLYLLDSPFGYLDVLTEKEIFESCVCKLMANKTRILVTSKMEHLKKADKILILHEGSSYFYGTFSELQNLQPDFSSKLMGCDSFDQFSAERRNSILTETLHRFSLEGDAPVSWTETKKQSFKQTGEFGEKRKNSILNPINSIRKFSIVQKTPLQMNGIEEDSDEPLERRLSLVPDSEQGEAILPRISVISTGPTLQARRRQSVLNLMTHSVNQGQNIHRKTTASTRKVSLAPQANLTELDIYSRRLSQETGLEISEEINEEDLKECFFDDMESIPAVTTWNTYLRYITVHKSLIFVLIWCLVIFLAEVAASLVVLWLLGNTPLQDKGNSTHSRNNSYAVIITSTSSYYVFYIYVGVADTLLAMGFFRGLPLVHTLITVSKILHHKMLHSVLQAPMSTLNTLKAGGILNRFSKDIAILDDLLPLTIFDFIQLLLIVIGAIAVVAVLQPYIFVATVPVIVAFIMLRAYFLQTSQQLKQLESEGRSPIFTHLVTSLKGLWTLRAFGRQPYFETLFHKALNLHTANWFLYLSTLRWFQMRIEMIFVIFFIAVTFISILTTGEGEGRVGIILTLAMNIMSTLQWAVNSSIDVDSLMRSVSRVFKFIDMPTEGKPTKSTKPYKNGQLSKVMIIENSHVKKDDIWPSGGQMTVKDLTAKYTEGGNAILENISFSISPGQRVGLLGRTGSGKSTLLSAFLRLLNTEGEIQIDGVSWDSITLQQWRKAFGVIPQKVFIFSGTFRKNLDPYEQWSDQEIWKVADEVGLRSVIEQFPGKLDFVLVDGGCVLSHGHKQLMCLARSVLSKAKILLLDEPSAHLDPVTYQIIRRTLKQAFADCTVILCEHRIEAMLECQQFLVIEENKVRQYDSIQKLLNERSLFRQAISPSDRVKLFPHRNSSKCKSKPQIAALK

SEQ ID NO: 21654 - protein, 36 aa, Homo sapiens
  Payload ID: 4367
  Gene Symbol: CFTR
  Gene Name: cystic fibrosis transmembrane conductance regulator (ATP-binding cassette sub-family C, member 7)
  ENSP ID: ENSP00000417012
MFYGIFLYLGEVTKAVQPLLLGRIIASYDPDNKEER

SEQ ID NO: 21655 - protein, 190 aa, Homo sapiens
  Payload ID: 4367
  Gene Symbol: CFTR
  Gene Name: cystic fibrosis transmembrane conductance regulator (ATP-binding cassette sub-family C, member 7)
  ENSP ID: ENSP00000419254
  MOD_RES (1)..(1): Any amino acid
XKGLWTLRAFGRQPYFETLFHKALNLHTANWFLYLSTLRWFQMRIEMIFVIFFIAVTFISILTTGEGEGRVGIILTLAMNIMSTLQWAVNSSIDVDSLMRSVSRVFKFIDMPTEGKPTKSTKPYKNGQLSKVMIIENSHVKKDDIWPSGGQMTVKDLTAKYTEGGNAILENISFSISPGQRVRFEHCLLC

SEQ ID NO: 21656 - protein, 156 aa, Homo sapiens
  Payload ID: 4367
  Gene Symbol: CFTR
  Gene Name: cystic fibrosis transmembrane conductance regulator (ATP-binding cassette sub-family C, member 7)
  ENSP ID: ENSP00000470177
  MOD_RES (1)..(1): Any amino acid
XVFIFSGTFRKNLDPYEQWSDQEIWKVADEVGLRSVIEQFPGKLDFVLVDGGCVLSHGHKQLMCLARSVLSKAKILLLDEPSAHLDPVTYQIIRRTLKQAFADCTVILCEHRIEAMLECQQFLIMMVAGPLFNGGIASLLAMKEKVISTNPGNSYL

SEQ ID NO: 21657 - protein, 158 aa, Homo sapiens
  Payload ID: 4368
  Gene Symbol: CYS1
  Gene Name: cystin 1
  Uniprot ID: Q717R9
  ENSP ID: ENSP00000371234
MGSGSSRSSRTLRRRRSPESLPAGPGAAALEGGTRRRVPVAAAEVPGAAAEEAPGRDPSPVAPPDGRDETLRLLDELLAESAAWGPPEPAPRRPARLRPTAVAGSAVCAEQSTEGHPGSGNVSEAPGSGRKKPERPAAISYDHSEEGLMASIEREYCR

SEQ ID NO: 21658 - protein, 367 aa, Homo sapiens
  Payload ID: 4369
  Gene Symbol: CTNS
  Gene Name: cystinosin, lysosomal cystine transporter
  Uniprot ID: O60931
  ENSP ID: ENSP00000046640
MIRNWLTIFILFPLKLVEKCESSVSLTVPPVVKLENGSSTNVSLTLRPPLNATLVITFEITFRSKNITILELPDEVVVPPGVTNSSFQVTSQNVGQLTVYLHGNHSNQTGPRIRFLVIRSSAISIINQVIGWIYFVAWSISFYPQVIMNWRRKSVIGLSFDFVALNLTGFVAYSVFNIGLLWVPYIKEQFLLKYPNGVNPVNSNDVFFSLHAVVLTLIIIVQCCLYERGGQRVSWPAIGFLVLAWLFAFVTMIVAAVGVTTWLQFLFCFSYIKLAVTLVKYFPQAYMNFYYKSTEGWSIGNVLLDFTGGSFSLLQMFLQSYNNDQWTLIFGDPTKFGLGVFSIVFDVVFFIQHFCLYRKRPGYDQLN

SEQ ID NO: 21659 - protein, 400 aa, Homo sapiens
  Payload ID: 4369
  Gene Symbol: CTNS
  Gene Name: cystinosin, lysosomal cystine transporter
  Uniprot ID: O60931
  ENSP ID: ENSP00000371294
MIRNWLTIFILFPLKLVEKCESSVSLTVPPVVKLENGSSTNVSLTLRPPLNATLVITFEITFRSKNITILELPDEVVVPPGVTNSSFQVTSQNVGQLTVYLHGNHSNQTGPRIRFLVIRSSAISIINQVIGWIYFVAWSISFYPQVIMNWRRKSVIGLSFDFVALNLTGFVAYSVFNIGLLWVPYIKEQFLLKYPNGVNPVNSNDVFFSLHAVVLTLIIIVQCCLYERGGQRVSWPAIGFLVLAWLFAFVTMIVAAVGVTTWLQFLFCFSYIKLAVTLVKYFPQAYMNFYYKSTEGWSIGNVLLDFTGGSFSLLQMFLQSYNNDQWTLIFGDPTKFGLGVFSIVFDVVFFIQHFCLYRKRPGLQAARTGSGSRLRQDWAPSLQPKALPQTTSVSASSLKG

SEQ ID NO: 21660 - protein, 122 aa, Homo sapiens
  Payload ID: 4369
  Gene Symbol: CTNS
  Gene Name: cystinosin, lysosomal cystine transporter
  ENSP ID: ENSP00000382245
MIRNWLTIFILFPLKLVEKCESSVSLTVPPVVKLENGSSTNVSLTLRPPLNATLVITFEITFRSKNITILELPDELVEAGGEECRDEISSHEAHQDGLQISSEPPRKQTGVKHDQSPACGNL

SEQ ID NO: 21661 - protein, 75 aa, Homo sapiens
  Payload ID: 4369
  Gene Symbol: CTNS
  Gene Name: cystinosin, lysosomal cystine transporter
  ENSP ID: ENSP00000408652
MIRNWLTIFILFPLKLVEKCESSVSLTVPPVVKLENGSSTNVSLTLRPPLNATLVITFEITFRSKNITILELPDE

SEQ ID NO: 21662 - protein, 162 aa, Homo sapiens
  Payload ID: 4369
  Gene Symbol: CTNS
  Gene Name: cystinosin, lysosomal cystine transporter
  ENSP ID: ENSP00000458457
MIRNWLTIFILFPLKLVEKCESSVSLTVPPVVKLENGSSTNVSLTLRPPLNATLVITFEITFRSKNITILELPDEVVVPPGVTNSSFQVTSQNVGQLTVYLHGNHSNQTGPRIRFLVIRSSAISIINQVIGWIYFVAWSISFYPQVIMNWRRKSVIGLSFDF

SEQ ID NO: 21663 - protein, 28 aa, Homo sapiens
  Payload ID: 4369
  Gene Symbol: CTNS
  Gene Name: cystinosin, lysosomal cystine transporter
  ENSP ID: ENSP00000458912
MNWRRKSVIGLSFDFVALNLTGFVAYSV

SEQ ID NO: 21664 - protein, 53 aa, Homo sapiens
  Payload ID: 4369
  Gene Symbol: CTNS
  Gene Name: cystinosin, lysosomal cystine transporter
  ENSP ID: ENSP00000461056
MIRNWLTIFILFPLKLVEKCESSVSLTVPPVVKLENGSSTNVSLTLRLWCLLE

SEQ ID NO: 21665 - protein, 20 aa, Homo sapiens
  Payload ID: 4369
  Gene Symbol: CTNS
  Gene Name: cystinosin, lysosomal cystine transporter
  ENSP ID: ENSP00000461118
MNWRRKSVIGLSFDFVALNL

SEQ ID NO: 21666 - protein, 514 aa, Homo sapiens
  Payload ID: 4370
  Gene Symbol: CDADC1
  Gene Name: cytidine and dCMP deaminase domain containing 1
  Uniprot ID: Q9BWV3
  ENSP ID: ENSP00000251108
MKEAGQMQNLESARAGRSVSTQTGSMTGQIPRLSKVNLFTLLSLWMELFPAEAQRQKSQKNEEGKHGPLGDNEERTRVSTDKRQVKRTGLVVVKNMKIVGLHCSSEDLHAGQIALIKHGSRLKNCDLYFSRKPCSACLKMIVNAGVNRISYWPADPEISLLTEASSSEDAKLDAKAVERLKSNSRAHVCVLLQPLVCYMVQFVEETSYKCDFIQKITKTLPDANTDFYYECKQERIKEYEMLFLVSNEEMHKQILMTIGLENLCENPYFSNLRQNMKDLILLLATVASSVPNFKHFGFYRSNPEQINEIHNQSLPQEIARHCMVQARLLAYRTEDHKTGVGAVIWAEGKSRSCDGTGAMYFVGCGYNAFPVGSEYADFPHMDDKQKDREIRKFRYIIHAEQNALTFRCQEIKPEERSMIFVTKCPCDECVPLIKGAGIKQIYAGDVDVGKKKADISYMRFGELEGVSKFTWQLNPSGAYGLEQNEPERRENGVLRPVPQKEEQHQDKKLRLGIH

SEQ ID NO: 21667 - protein, 97 aa, Homo sapiens
  Payload ID: 4370
  Gene Symbol: CDADC1
  Gene Name: cytidine and dCMP deaminase domain containing 1
  ENSP ID: ENSP00000389571
  MOD_RES (1)..(1): Any amino acid
XGQMQNLESARAGRSVSTQTGSMTGQIPRLSKVNLFTLLSLWMELFPAEAQRQKSQKNEEGKHGPLGDNEERTRVSTDKRQDYWKQLRCLDERFTIT

SEQ ID NO: 21668 - protein, 153 aa, Homo sapiens
  Payload ID: 4370
  Gene Symbol: CDADC1
  Gene Name: cytidine and dCMP deaminase domain containing 1
  ENSP ID: ENSP00000434135
MKEAGQMQNLESARAGRSVSTQTGSMTGQIPRLSKVNLFTLLSLWMELFPAEAQRQKSQKNEEGKHGPLGDNEERTRVSTDKRQVKRTGLVVVKNMKIVGLHCSSEDLHAGQIALIKHGSRLKNCDLYFSRKPCSACLKMIVNGLLEAAKMPR

SEQ ID NO: 21669 - protein, 102 aa, Homo sapiens
  Payload ID: 4370
  Gene Symbol: CDADC1
  Gene Name: cytidine and dCMP deaminase domain containing 1
  ENSP ID: ENSP00000434986
MKEAGQMQNLESARAGRSVSTQTGSMTGQIPRLSKVNLFTLLSLWMELFPAEAQRQKSQKNEEGKHGPLGDNEERTRVSTDKRQKTMFCLFENDCKWITGSS

SEQ ID NO: 21670 - protein, 146 aa, Homo sapiens [sequence omitted]

SEQ ID NO: 21671 - protein, 169 aa, Homo sapiens
  Payload ID: 4372
  Gene Symbol: CMPK1
  Gene Name: cytidine monophosphate (UMP-CMP) kinase 1, cytosolic
  ENSP ID: ENSP00000360937
MLSRCRSGLLHVLGLSFLLQTRRPILLCSPRLMKPLVVFVLGGPGAGKGTQCARIVEKYGYTHLSAGELLRDERKNPDSQYGELIEKYIKEGKIVPVEITISLLKREMDQTMAANAQKNKFLIDGFPRNQDNLQGWNKTMDGKADVSFVLFFDCNNENSDLPSVNKANY

SEQ ID NO: 21672 - protein, 228 aa, Homo sapiens
  Payload ID: 4372
  Gene Symbol: CMPK1
  Gene Name: cytidine monophosphate (UMP-CMP) kinase 1, cytosolic
  Uniprot ID: P30085
  ENSP ID: ENSP00000360939
MLSRCRSGLLHVLGLSFLLQTRRPILLCSPRLMKPLVVFVLGGPGAGKGTQCARIVEKYGYTHLSAGELLRDERKNPDSQYGELIEKYIKEGKIVPVEITISLLKREMDQTMAANAQKNKFLIDGFPRNQDNLQGWNKTMDGKADVSFVLFFDCNNEICIERCLERGKSSGRSDDNRESLEKRIQTYLQSTKPIIDLYEEMGKVKKIDASKSVDEVFDEVVQIFDKEG

SEQ ID NO: 21673 - protein, 179 aa, Homo sapiens
  Payload ID: 4372
  Gene Symbol: CMPK1
  Gene Name: cytidine monophosphate (UMP-CMP) kinase 1, cytosolic
  Uniprot ID: P30085
  ENSP ID: ENSP00000398192
MLSRCRSGLLHVLGLSFLLQTRRPILLCSPRLMKPLVVFVLGGPGAGKGTQCARIVEEMDQTMAANAQKNKFLIDGFPRNQDNLQGWNKTMDGKADVSFVLFFDCNNEICIERCLERGKSSGRSDDNRESLEKRIQTYLQSTKPIIDLYEEMGKVKKIDASKSVDEVFDEVVQIFDKEG

SEQ ID NO: 21674 - protein, 58 aa, Homo sapiens
  Payload ID: 4372
  Gene Symbol: CMPK1
  Gene Name: cytidine monophosphate (UMP-CMP) kinase 1, cytosolic
  ENSP ID: ENSP00000433782
MLSRCRSGLLHVLGLSFLLQTRRPILLCSPRLMKPLVVFVLGGPGAGKGTQCARIVEG

SEQ ID NO: 21675 - protein, 449 aa, Homo sapiens
  Payload ID: 4373
  Gene Symbol: CMPK2
  Gene Name: cytidine monophosphate (UMP-CMP) kinase 2, mitochondrial
  Uniprot ID: Q5EBM0
  ENSP ID: ENSP00000256722
MAFARRLLRGPLSGPLLGRRGVCAGAMAPPRRFVLELPDCTLAHFALGADAPGDADAPDPRLAALLGPPERSYSLCVPVTPDAGCGARVRAARLHQRLLHQLRRGPFQRCQLLRLLCYCPGGQAGGAQQGFLLRDPLDDPDTRQALLELLGACQEAPRPHLGEFEADPRGQLWQRLWEVQDGRRLQVGCAQVVPVPEPPLHPVVPDLPSSVVFPDREAARAVLEECTSFIPEARAVLDLVDQCPKQIQKGKFQVVAIEGLDATGKTTVTQSVADSLKAVLLKSPPSCIGQWRKIFDDEPTIIRRAFYSLGNYIVASEIAKESAKSPVIVDRYWHSTATYAIATEVSGGLQHLPPAHHPVYQWPEDLLKPDLILLLTVSPEERLQRLQGRGMEKTREEAELEANSVFRQKVEMSYQRMENPGCHVVDASPSREKVLQTVLSLIQNSFSEP

SEQ ID NO: 21676 - protein, 409 aa, Homo sapiens
  Payload ID: 4373
  Gene Symbol: CMPK2
  Gene Name: cytidine monophosphate (UMP-CMP) kinase 2, mitochondrial
  Uniprot ID: Q5EBM0
  ENSP ID: ENSP00000384915
MAFARRLLRGPLSGPLLGRRGVCAGAMAPPRRFVLELPDCTLAHFALGADAPGDADAPDPRLAALLGPPERSYSLCVPVTPDAGCGARVRAARLHQRLLHQLRRGPFQRCQLLRLLCYCPGGQAGGAQQGFLLRDPLDDPDTRQALLELLGACQEAPRPHLGEFEADPRGQLWQRLWEVQDGRRLQVGCAQVVPVPEPPLHPVVPDLPSSVVFPDREAARAVLEECTSFIPEARAVLDLVDQCPKQIQKGKFQVVAIEGLDATGKTTVTQSVADSLKAVLLKSPPSCIGQWRKIFDDEPTIIRRAFYSLGNYIVASEIAKESAKSPVIVDRYWHSTATYAIATEVSGGLQHLPPAHHPVYQWPEDLLKPDLILLLTVSPEERLQRLQGRGMEKTREEAELEANSVFRQK

SEQ ID NO: 21677 - protein, 366 aa, Homo sapiens
  Payload ID: 4373
  Gene Symbol: CMPK2
  Gene Name: cytidine monophosphate (UMP-CMP) kinase 2, mitochondrial
  Uniprot ID: Q5EBM0
  ENSP ID: ENSP00000396385
MAFARRLLRGPLSGPLLGRRGVCAGAMAPPRRFVLELPDCTLAHFALGADAPGDADAPDPRLAALLGPPERSYSLCVPVTPDAGCGARVRAARLHQRLLHQLRRGPFQRCQLLRLLCYCPGGQAGGAQQGFLLRDPLDDPDTRQALLELLGACQEAPRPHLGEFEADPRGQLWQRLWEVQDGRRLQVGCAQVVPVPEPPLHPVVPDLPSSVVFPDREAARAVLEECTSFIPEARAVLDLVDQCPKQIQKGKFQVVAIEGLDATGKTTVTQSVADSLKAVLLKSPPSCIGQWRKIFDDEPTIIRRAFYSLGNYIVASEIAKESAKSPVIVDRSQLGGTLYHPSLHLLGSEVCGTGILDSSHSSQGLE

SEQ ID NO: 21678 - protein, 434 aa, Homo sapiens
  Payload ID: 4374
  Gene Symbol: CMAS
  Gene Name: cytidine monophosphate N-acetylneuraminic acid synthetase
  Uniprot ID: Q8NFW8
  ENSP ID: ENSP00000229329
MDSVEKGAATSVSNPRGRPSRGRPPKLQRNSRGGQGRGVEKPPHLAALILARGGSKGIPLKNIKHLAGVPLIGWVLRAALDSGAFQSVWVSTDHDEIENVAKQFGAQVHRRSSEVSKDSSTSLDAIIEFLNYHNEVDIVGNIQATSPCLHPTDLQKVAEMIREEGYDSVFSVVRRHQFRWSEIQKGVREVTEPLNLNPAKRPRRQDWDGELYENGSFYFAKRHLIEMGYLQGGKMAYYEMRAEHSVDIDVDIDWPIAEQRVLRYGYFGKEKLKEIKLLVCNIDGCLTNGHIYVSGDQKEIISYDVKDAIGISLLKKSGIEVRLISERACSKQTLSSLKLDCKMEVSVSDKLAVVDEWRKEMGLCWKEVAYLGNEVSDEECLKRVGLSGAPADACSTAQKAVGYICKCNGGRGAIREFAEHICLLMEKVNNSCQK

SEQ ID NO: 21679 - protein, 88 aa, Homo sapiens
  Payload ID: 4374
  Gene Symbol: CMAS
  Gene Name: cytidine monophosphate N-acetylneuraminic acid synthetase
  ENSP ID: ENSP00000439404
MDSVEKGAATSVSNPRGRPSRGRPPKLQRNSRGGQGRGVEKPPHLAALILARGGSKGIPLKNIKHLAGVPLIGWVLRAALDSGAFQRG

SEQ ID NO: 21680 - protein, 97 aa, Homo sapiens
  Payload ID: 4374
  Gene Symbol: CMAS
  Gene Name: cytidine monophosphate N-acetylneuraminic acid synthetase
  ENSP ID: ENSP00000440605
MIREEGYDSVFSVVRRHQFRWSEIQKGVREVTEPLNLNPAKRPRRQDWDGELYENGSFYFAKRHLIEMGYLQGGKMAYYEMRAEHSVDIDVDIDWPI

SEQ ID NO: 21681 - protein, 263 aa, Homo sapiens
  Payload ID: 4374
  Gene Symbol: CMAS
  Gene Name: cytidine monophosphate N-acetylneuraminic acid synthetase
  Uniprot ID: Q8NFW8
  ENSP ID: ENSP00000446239
MDSVEKGAATSVSNPRGRPSRGRPPKLQRNSRGGQGRGVEKPPHLAALILARGGSKGIPLKNIKHLAGVPLIGWVLRAALDSGAFQSVWVSTDHDEIENVAKQFGAQVHRRSSEVSKDSSTSLDAIIEFLNYHNEVDIVGNIQATSPCLHPTDLQKVAEMIREEGYDSVFSVVRRHQFRWSEIQKGVREVTEPLNLNPAKRPRRQDWDGELYENGSFYFAKRHLIEMGYLQGGKMAYYEMRAEHSVDIDVDIDWPIAEQRVLR

SEQ ID NO: 21682 - protein, 286 aa, Homo sapiens
  Payload ID: 4375
  Gene Symbol: CYBRD1
  Gene Name: cytochrome b reductase 1
  Uniprot ID: Q53TN4
  ENSP ID: ENSP00000319141
MAMEGYWRFLALLGSALLVGFLSVIFALVWVLHYREGLGWDGSALEFNWHPVLMVTGFVFIQGIAIIVYRLPWTWKCSKLLMKSIHAGLNAVAAILAIISVVAVFENHNVNNIANMYSLHSWVGLIAVICYLLQLLSGFSVFLLPWAPLSLRAFLMPIHVYSGIVIFGTVIATALMGLTEKLIFSLRDPAYSTFPPEGVFVNTLGLLILVFGALIFWIVTRPQWKRPKEPNSTILHPNGGTEQGARGSMPAYSGNNMDKSDSELNSEVAARKRNLALDEAGQRSTM

SEQ ID NO: 21683 - protein, 157 aa, Homo sapiens
  Payload ID: 4375
  Gene Symbol: CYBRD1
  Gene Name: cytochrome b reductase 1
  Uniprot ID: Q53TN4
  ENSP ID: ENSP00000364401
MAMEGYWRFLALLGSALLVGFLSVIFALVWVLHYREGLGWDGSALEFNWHPVLMVTGFVFIQGIASFRFFSLSASMGSAFSPSISHAHTCLFWNCHLWNSDCNSTYGIDRETDFFPERSCIQYIPARRCFRKYAWPSDPGVRGPHFLDSHQTAMETS

SEQ ID NO: 21684 - protein, 228 aa, Homo sapiens
  Payload ID: 4375
  Gene Symbol: CYBRD1
  Gene Name: cytochrome b reductase 1
  Uniprot ID: Q53TN4
  ENSP ID: ENSP00000386739
MLDEGEAIIVYRLPWTWKCSKLLMKSIHAGLNAVAAILAIISVVAVFENHNVNNIANMYSLHSWVGLIAVICYLLQLLSGFSVFLLPWAPLSLRAFLMPIHVYSGIVIFGTVIATALMGLTEKLIFSLRDPAYSTFPPEGVFVNTLGLLILVFGALIFWIVTRPQWKRPKEPNSTILHPNGGTEQGARGSMPAYSGNNMDKSDSELNSEVAARKRNLALDEAGQRSTM

SEQ ID NO: 21685 - protein, 174 aa, Homo sapiens
  Payload ID: 4375
  Gene Symbol: CYBRD1
  Gene Name: cytochrome b reductase 1
  ENSP ID: ENSP00000402242
MRRGRQRGKDCRSENLPVFVTSSALAIIVYRLPWTWKCSKLLMKSIHAGLNAVAAILAIISVVAVFENHNVNNIANMYSLHSWVGLIAVICYLLQLLSGFSVFLLPWAPLSLRAFLMPIHVYSGIVIFGTVIATALMGLTEKLIFSLRDPAYSTFPPEGVFVNTLGLLILVFGA

SEQ ID NO: 21686 - protein, 195 aa, Homo sapiens
  Payload ID: 4376
  Gene Symbol: CYBA
  Gene Name: cytochrome b-245, alpha polypeptide
  Uniprot ID: P13498
  ENSP ID: ENSP00000261623
MGQIEWAMWANEQALASGLILITGGIVATAGRFTQWYFGAYSIVAGVFVCLLEYPRGKRKKGSTMERWGQKYMTAVVKLFGPFTRNYYVRAVLHLLLSVPAGFLLATILGTACLAIASGIYLLAAVRGEQWTPIEPKPRERPQIGGTIKQPPSNPPPRPPAEARKKPSEEEAAVAAGGPPGGPQVNPIPVTDEVV

SEQ ID NO: 21687 - protein, 210 aa, Homo sapiens
  Payload ID: 4376
  Gene Symbol: CYBA
  Gene Name: cytochrome b-245, alpha polypeptide
  ENSP ID: ENSP00000454951
MGQIEWAMWANEQALASGLILITGGIVATAGRFTQWYFGAYSIVAGVFVCLLEYPRGKRKKGSTMERWGQKYMTAVVKLFGPFTRNYYVRAVLHLLLSVPAGFLLATILGTACLAIASGIYLLSQVPPARRGNCPPLAVRLLVCVRGKGAALSVYAFRVWKWSSVSSLTDLPPAELSFRTPSCCQVLIWAVALFSGGHPHPPRLPAATHS

SEQ ID NO: 21688 - protein, 145 aa, Homo sapiens
  Payload ID: 4376
  Gene Symbol: CYBA
  Gene Name: cytochrome b-245, alpha polypeptide
  ENSP ID: ENSP00000455506
MGQIEWAMWANEQALASGLILITGGIVATAGRFTQWYFGAYSIVAGVFVCLLEYPRGKRKKGSTMERWGQKYMTAVVKLFGPFTRNYYVRAVLHLLACVCCLVCRICKDPLQIRGAPIRRQGLGLSVPAGFLLATILGTACLAIA

SEQ ID NO: 21689 - protein, 74 aa, Homo sapiens
  Payload ID: 4376
  Gene Symbol: CYBA
  Gene Name: cytochrome b-245, alpha polypeptide
  ENSP ID: ENSP00000455537
  MOD_RES (1)..(1): Any amino acid
XDRRGEAVRALYQELLCSGRPASPALGARRLPAGHHPWDRLPGHCERHLPTVPRRRLCVASSGRPSSPSPGSGR

SEQ ID NO: 21690 - protein, 128 aa, Homo sapiens
  Payload ID: 4376
  Gene Symbol: CYBA
  Gene Name: cytochrome b-245, alpha polypeptide
  ENSP ID: ENSP00000456079
MGQIEWAMWANEQALASGLILITGGIVATAGRFTQWYFGAYSIVAGVFVCLLEYPRGKRKKGSTMERWGQKYMTAVVKLFGPFTRNYYVRAVLHLLLSVPAGFLLATILGTACLAIASGIYLLVSGAL

SEQ ID NO: 21691 - protein, 130 aa, Homo sapiens
  Payload ID: 4376
  Gene Symbol: CYBA
  Gene Name: cytochrome b-245, alpha polypeptide
  ENSP ID: ENSP00000457060
MDPLGTRARECLAQHGPHHRGHRGHSWALHPVVLWCLLHCGGRVCVPAGVPPGEEEEGLHHGALGTEVHDRRGEAVRALYQELLCSGRPASPALGARRLPAGHHPWDRLPGHCERHLPTGGCAWRAVDAH

SEQ ID NO: 21692 - protein, 570 aa, Homo sapiens
  Payload ID: 4377
  Gene Symbol: CYBB
  Gene Name: cytochrome b-245, beta polypeptide
  Uniprot ID: P04839
  ENSP ID: ENSP00000367851
MGNWAVNEGLSIFVILVWLGLNVFLFVWYYRVYDIPPKFFYTRKLLGSALALARAPAACLNFNCMLILLPVCRNLLSFLRGSSACCSTRVRRQLDRNLTFHKMVAWMIALHSAIHTIAHLFNVEWCVNARVNNSDPYSVALSELGDRQNESYLNFARKRIKNPEGGLYLAVTLLAGITGVVITLCLILIITSSTKTIRRSYFEVFWYTHHLFVIFFIGLAIHGAERIVRGQTAESLAVHNITVCEQKISEWGKIKECPIPQFAGNPPMTWKWIVGPMFLYLCERLVRFWRSQQKVVITKVVTHPFKTIELQMKKKGFKMEVGQYIFVKCPKVSKLEWHPFTLTSAPEEDFFSIHIRIVGDWTEGLFNACGCDKQEFQDAWKLPKIAVDGPFGTASEDVFSYEVVMLVGAGIGVTPFASILKSVWYKYCNNATNLKLKKIYFYWLCRDTHAFEWFADLLQLLESQMQERNNAGFLSYNIYLTGWDESQANHFAVHHDEEKDVITGLKQKTLYGRPNWDNEFKTIASQHPNTRIGVFLCGPEALAETLSKQSISNSESGPRGVHFIFNKENF

SEQ ID NO: 21693 - protein, 228 aa, Homo sapiens
  Payload ID: 4378
  Gene Symbol: CYB5D1
  Gene Name: cytochrome b5 domain containing 1
  Uniprot ID: Q6P9G0
  ENSP ID: ENSP00000331479
MPRRGLVAGPDLEYFQRRYFTPAEVAQHNRPEDLWVSYLGRVYDLTSLAQEYKGNLLLKPIVEVAGQDISHWFDPKTRDIRKHIDPLTGCLRYCTPRGRFVHVPPQLPCSDWANDFGKPWWQGSYYEVGRLSAKTRSIRIINTLTSQEHTLEVGVLESIWEILHRYLPYNSHAASYTWKYEGKNLNMDFTLEENGIRDEEEEFDYLSMDGTLHTPAILLYFNDDLTEL

SEQ ID NO: 21694 - protein, 157 aa, Homo sapiens
  Payload ID: 4378
  Gene Symbol: CYB5D1
  Gene Name: cytochrome b5 domain containing 1
  Uniprot ID: Q6P9G0
  ENSP ID: ENSP00000459369
MPRRGLVAGPDLEYFQRRYFTPAEVAQHNRPEDLWVSYLGRVYDLTSLAQEYKGNLLLKPIVEVAGQDISHWFDPKTRDIRKHIDPLTGCLRYCTPRGRFVHVPPQLPCSDWANDFGKPWWQGSYYEVGRLSAKTRSIRIINTLTSQEHTLELHVEI

SEQ ID NO: 21695 - protein, 30 aa, Homo sapiens
  Payload ID: 4378
  Gene Symbol: CYB5D1
  Gene Name: cytochrome b5 domain containing 1
  ENSP ID: ENSP00000460105
EYKGKGHTLGRGRSVCVCTRAFAWFSKGWH

SEQ ID NO: 21696 - protein, 100 aa, Homo sapiens
  Payload ID: 4378
  Gene Symbol: CYB5D1
  Gene Name: cytochrome b5 domain containing 1
  ENSP ID: ENSP00000461852
MPRRGLVAGPDLEYFQRRYFTPAEVGVLESIWEILHRYLPYNSHAASYTWKYEGKNLNMDFTLEENGIRDEEEEFDYLSMDGTLHTPAILLYFNDDLTEL

SEQ ID NO: 21697 - protein, 264 aa, Homo sapiens
  Payload ID: 4379
  Gene Symbol: CYB5D2
  Gene Name: cytochrome b5 domain containing 2
  Uniprot ID: Q8WUJ1
  ENSP ID: ENSP00000301391
MLRCGGRGLLLGLAVAAAAVMAARLMGWWGPRAGFRLFIPEELSRYRGGPGDPGLYLALLGRVYDVSSGRRHYEPGSHYSGFAGRDASRAFVTGDCSEAGLVDDVSDLSAAEMLTLHNWLSFYEKNYVCVGRVTGRFYGEDGLPTPALTQVEAAITRGLEANKLQLQEKQTFPPCNAEWSSARGSRLWCSQKSGGVSRDWIGVPRKLYKPGAKEPRCVCVRTTGPPSGQMPDNPPHRNRGDLDHPNLAEYTGCPPLAITCSFPL

SEQ ID NO: 21698 - protein, 152 aa, Homo sapiens
  Payload ID: 4379
  Gene Symbol: CYB5D2
  Gene Name: cytochrome b5 domain containing 2
  Uniprot ID: Q8WUJ1
  ENSP ID: ENSP00000458352
MLTLHNWLSFYEKNYVCVGRVTGRFYGEDGLPTPALTQVEAAITRGLEANKLQLQEKQTFPPCNAEWSSARGSRLWCSQKSGGVSRDWIGVPRKLYKPGAKEPRCVCVRTTGPPSGQMPDNPPHRNRGDLDHPNLAEYTGCPPLAITCSFPL

SEQ ID NO: 21699 - protein, 152 aa, Homo sapiens; identical to SEQ ID NO: 21698
  Payload ID: 4379
  Gene Symbol: CYB5D2
  Gene Name: cytochrome b5 domain containing 2
  Uniprot ID: Q8WUJ1
  ENSP ID: ENSP00000458903

SEQ ID NO: 21700 - protein, 106 aa, Homo sapiens
  Payload ID: 4379
  Gene Symbol: CYB5D2
  Gene Name: cytochrome b5 domain containing 2
  ENSP ID: ENSP00000461090
MLTLHNWLSFYEKNYVCVGRVTGRFYGEDGLPTPALTQVEAAITRGLEANKLQLQEKQTFPPCNAEWSSARGSRLWCSQKRGFNSSLALASGSLKHACHRLILQFL

SEQ ID NO: 21701 - protein, 305 aa, Homo sapiens
  Payload ID: 4380
  Gene Symbol: CYB5R1
  Gene Name: cytochrome b5 reductase 1
  Uniprot ID: Q9UHQ9
  ENSP ID: ENSP00000356218
MGIQTSPVLLASLGVGLVTLLGLAVGSYLVRRSRRPQVTLLDPNEKYLLRLLDKTTVSHNTKRFRFALPTAHHTLGLPVGKHIYLSTRIDGSLVIRPYTPVTSDEDQGYVDLVIKVYLKGVHPKFPEGGKMSQYLDSLKVGDVVEFRGPSGLLTYTGKGHFNIQPNKKSPPEPRVAKKLGMIAGGTGITPMLQLIRAILKVPEDPTQCFLLFANQTEKDIILREDLEELQARYPNRFKLWFTLDHPPKDWAYSKGFVTADMIREHLPAPGDDVLVLLCGPPPMVQLACHPNLDKLGYSQKMRFTY

SEQ ID NO: 21702 - protein, 226 aa, Homo sapiens
  Payload ID: 4380
  Gene Symbol: CYB5R1
  Gene Name: cytochrome b5 reductase 1
  ENSP ID: ENSP00000396382
  MOD_RES (1)..(1): Any amino acid
XTAHHTLGLPVGKHIYLSTRIDGSLVIRPYTPVTSDEDQGYVDLVIKVYLKGVHPKFPEGGKMSQYLDSLKVGDVVEFRGPSGLLTYTGKGHFNIQPNKKSPPEPRVAKKLGMIAGGTGITPMLQLIRAILKVPEDPTQCFLLFANQTEKDIILREDLEELQARYPNRFKLWFTLDHPPKGILPISGHPTIPSSSKSKPCPFVNSGFIEINLASHCQLGSLSAQTQ

SEQ ID NO: 21703 - protein, 276 aa, Homo sapiens
  Payload ID: 4381
  Gene Symbol: CYB5R2
  Gene Name: cytochrome b5 reductase 2
  Uniprot ID: Q6BCY4
  ENSP ID: ENSP00000299498
MNSRRREPITLQDPEAKYPLPLIEKEKISHNTRRFRFGLPSPDHVLGLPVGNYVQLLAKIDNELVVRAYTPVSSDDDRGFVDLIIKIYFKNVHPQYPEGGKMTQYLENMKIGETIFFRGPRGRLFYHGPGNLGIRPDQTSEPKKTLADHLGMIAGGTGITPMLQLIRHITKDPSDRTRMSLIFANQTEEDILVRKELEEIARTHPDQFNLWYTLDRPPIGWKYSSGFVTADMIKEHLPPPAKSTLILVCGPPPLIQTAAHPNLEKLGYTQDMIFTY

SEQ ID NO: 21704 - protein, 116 aa, Homo sapiens
  Payload ID: 4381
  Gene Symbol: CYB5R2
  Gene Name: cytochrome b5 reductase 2
  ENSP ID: ENSP00000392777
MNSRRREPITLQDPEAKYPLPLIEKEKISHNTRRFRFGLPSPDHVLGLPVGNYVQLLAKIDNELVVRAYTPVSSDDDRGFVDLIIKIYFKNVHPQYPEGGKMTQYLENMKIGETIF

SEQ ID NO: 21705 - protein, 189 aa, Homo sapiens
  Payload ID: 4381
  Gene Symbol: CYB5R2
  Gene Name: cytochrome b5 reductase 2
  ENSP ID: ENSP00000432482
MNERRSARSTRLQLGDAPASAPPRKHPPRTRPRVGAHEDPSLLLTITVTGVTVLVLVLKSMNSRRREPITLQDPEAKYPLPLIEKEKISHNTRRFRFGLPSPDHVLGLPVGNYVQLLAKIDNELVVRAYTPVSSDDDRGFVDLIIKIYFKNVHPQYPEGGKMTQYLENMKIGETIFFRGPRGRLFYHGP

SEQ ID NO: 21706 - protein, 146 aa, Homo sapiens
  Payload ID: 4381
  Gene Symbol: CYB5R2
  Gene Name: cytochrome b5 reductase 2
  ENSP ID: ENSP00000433856
MNSRRREPITLQDPEAKYPLPLIEKEKISHNTRRFRFGLPSPDHVLGLPVGNYVQLLAKIDNELVVRAYTPVSSDDDRGFVDLIIKIYFKNVHPQYPEGGKMTQYLENMKIGETIFFRGPRGRLFYHGPGNLGIRPDQTSEPKKTL

SEQ ID NO: 21707 - protein, 171 aa, Homo sapiens
  Payload ID: 4381
  Gene Symbol: CYB5R2
  Gene Name: cytochrome b5 reductase 2
  ENSP ID: ENSP00000434969
MNSRRREPITLQDPEAKYPLPLIEKEKISHNTRRFRFGLPSPDHVLGLPVGNYVQLLAKIDNELVVRAYTPVSSDDDRGFVDLIIKIYFKNVHPQYPEGGKMTQYLENMKIGETIFFRGPRGRLFYHGPGNLGIRPDQTSEPKKTLADHLGMIAGGTGITPMLQLIRHITK

SEQ ID NO: 21708 - protein, 237 aa, Homo sapiens
  Payload ID: 4381
  Gene Symbol: CYB5R2
  Gene Name: cytochrome b5 reductase 2
  Uniprot ID: Q6BCY4
  ENSP ID: ENSP00000435916
MNSRRREPITLQDPEAKYPLPLIEKEKISHNTRRFRFGLPSPDHVLGLPVGNYVQLLAKIDNELVVRAYTPVSSDDDRGFVDLIIKIYFKNVHPQYPEGGKMTQYLENMKIGETIFFRGPRGRLFYHGPGNLGIRPDQTSEPKKTLADHLGMIAGGTGITPMLQLIRHITKDPSDRTRMSLIFANQTEEDILVRKELEEIARTHPDQFNLWYTLDRPPIGPWSAEGATLLSNSAQFH

SEQ ID NO: 21709 - protein, 276 aa, Homo sapiens; identical to SEQ ID NO: 21703
  Payload ID: 4381
  Gene Symbol: CYB5R2
  Gene Name: cytochrome b5 reductase 2
  Uniprot ID: Q6BCY4
  ENSP ID: ENSP00000437041

SEQ ID NO: 21710 - protein, 301 aa, Homo sapiens
  Payload ID: 4382
  Gene Symbol: CYB5R3
  Gene Name: cytochrome b5 reductase 3
  Uniprot ID: P00387
  ENSP ID: ENSP00000338461
MGAQLSTLGHMVLFPVWFLYSLLMKLFQRSTPAITLESPDIKYPLRLIDREIISHDTRRFRFALPSPQHILGLPVGQHIYLSARIDGNLVVRPYTPISSDDDKGFVDLVIKVYFKDTHPKFPAGGKMSQYLESMQIGDTIEFRGPSGLLVYQGKGKFAIRPDKKSNPIIRTVKSVGMIAGGTGITPMLQVIRAIMKDPDDHTVCHLLFANQTEKDILLRPELEELRNKHSARFKLWYTLDRAPEAWDYGQGFVNEEMIRDHLPPPEEEPLVLMCGPPPMIQYACLPNLDHVGHPTERCFVF

SEQ ID NO: 21711 - protein, 334 aa, Homo sapiens
  Payload ID: 4382
  Gene Symbol: CYB5R3
  Gene Name: cytochrome b5 reductase 3
  Uniprot ID: P00387
  ENSP ID: ENSP00000354468
MNRSLLVGCMQSKDIWGREESICERLKQDGLDVERAESWELGHMVLFPVWFLYSLLMKLFQRSTPAITLESPDIKYPLRLIDREIISHDTRRFRFALPSPQHILGLPVGQHIYLSARIDGNLVVRPYTPISSDDDKGFVDLVIKVYFKDTHPKFPAGGKMSQYLESMQIGDTIEFRGPSGLLVYQGKGKFAIRPDKKSNPIIRTVKSVGMIAGGTGITPMLQVIRAIMKDPDDHTVCHLLFANQTEKDILLRPELEELRNKHSARFKLWYTLDRAPEAWDYGQGFVNEEMIRDHLPPPEEEPLVLMCGPPPMIQYACLPNLDHVGHPTERCFVF

SEQ ID NO: 21712 - protein, 278 aa, Homo sapiens
  Payload ID: 4382
  Gene Symbol: CYB5R3
  Gene Name: cytochrome b5 reductase 3
  Uniprot ID: P00387
  ENSP ID: ENSP00000384457
MKLFQRSTPAITLESPDIKYPLRLIDREIISHDTRRFRFALPSPQHILGLPVGQHIYLSARIDGNLVVRPYTPISSDDDKGFVDLVIKVYFKDTHPKFPAGGKMSQYLESMQIGDTIEFRGPSGLLVYQGKGKFAIRPDKKSNPIIRTVKSVGMIAGGTGITPMLQVIRAIMKDPDDHTVCHLLFANQTEKDILLRPELEELRNKHSARFKLWYTLDRAPEAWDYGQGFVNEEMIRDHLPPPEEEPLVLMCGPPPMIQYACLPNLDHVGHPTERCFVF

SEQ ID NO: 21713 - protein, 278 aa, Homo sapiens; identical to SEQ ID NO: 21712
  Payload ID: 4382
  Gene Symbol: CYB5R3
  Gene Name: cytochrome b5 reductase 3
  Uniprot ID: P00387
  ENSP ID: ENSP00000384834

SEQ ID NO: 21714 - protein, 278 aa, Homo sapiens; identical to SEQ ID NO: 21712
  Payload ID: 4382
  Gene Symbol: CYB5R3
  Gene Name: cytochrome b5 reductase 3
  Uniprot ID: P00387
  ENSP ID: ENSP00000385679

SEQ ID NO: 21715 - protein, 147 aa, Homo sapiens
  Payload ID: 4382
  Gene Symbol: CYB5R3
  Gene Name: cytochrome b5 reductase 3
  ENSP ID: ENSP00000403439
MKLFQRSTPAITLESPDIKYPLRLIDREIISHDTRRFRFALPSPQHILGLPVGQHIYLSARIDGNLVVRPYTPISSDDDKGFVDLVIKVYFKDTHPKFPAGGKMSQYLESMQIGDTIEFRGPSGLLVYQGKGKFAIRPDKKSNPIIR

SEQ ID NO: 21716 - protein, 109 aa, Homo sapiens
  Payload ID: 4383
  Gene Symbol: CYB5R4
  Gene Name: cytochrome b5 reductase 4
  ENSP ID: ENSP00000358693
MDWIRLTKSGKDLTGLKGRLIEVTEEELKKHNKKDDCWICIRGFVYNVSPYMEYHPGGEDELMRAAGSDGTELFDQVHRWVNYESMLKECLVGRMAIKPAVLKGKLWHL

SEQ ID NO: 21717 - protein, 521 aa, Homo sapiens
  Payload ID: 4383
  Gene Symbol: CYB5R4
  Gene Name: cytochrome b5 reductase 4
  Uniprot ID: Q7L1T6
  ENSP ID: ENSP00000358695
MLNVPSQSFPAPRSQQRVASGGRSKVPLKQGRSLMDWIRLTKSGKDLTGLKGRLIEVTEEELKKHNKKDDCWICIRGFVYNVSPYMEYHPGGEDELMRAAGSDGTELFDQVHRWVNYESMLKECLVGRMAIKPAVLKDYREEEKKVLNGMLPKSQVTDTLAKEGPSYPSYDWFQTDSLVTIAIYTKQKDINLDSIIVDHQNDSFRAETIIKDCLYLIHIGLSHEVQEDFSVRVVESVGKIEIVLQKKENTSWDFLGHPLKNHNSLIPRKDTGLYYRKCQLISKEDVTHDTRLFCLMLPPSTHLQVPIGQHVYLKLPITGTEIVKPYTPVSGSLLSEFKEPVLPNNKYIYFLIKIYPTGLFTPELDRLQIGDFVSVSSPEGNFKISKFQELEDLFLLAAGTGFTPMVKILNYALTDIPSLRKVKLMFFNKTEDDIIWRSQLEKLAFKDKRLDVEFVLSAPISEWNGKQGHISPALLSEFLKRNLDKSKVLVCICGPVPFTEQGVRLLHDLNFSKNEIHSFTA

SEQ ID NO: 21718 - protein, 247 aa, Homo sapiens
  Payload ID: 4384
  Gene Symbol: CYB5RL
  Gene Name: cytochrome b5 reductase-like
  Uniprot ID: Q6IPT4
  ENSP ID: ENSP00000287899
MMAEREEDDDTEEAWMQLRPTEPLPSQCCGSGCSPCVFDLYHRDLARWEAAQASKDRSLLRGPESQSCPSKLNPETFVAFCIIAMDRLTKDTYRVRFALPGNSQLGLRPGQHLILRGIVDDLEIQRAYTPISPANAEGYFEVLIKCYQMGLMSRYVESWRVGDTAFWRGPFGDFFYKPNQESSSEQLPWSYQEKTHFGHLGQDLIKELVSCCRRKPFALVCGSAEFTKDIARCLLCAGLTEDSYFLF

SEQ ID NO: 21719 - protein, 70 aa, Homo sapiens
  Payload ID: 4384
  Gene Symbol: CYB5RL
  Gene Name: cytochrome b5 reductase-like
  ENSP ID: ENSP00000394709
MMAEREEDDDTEEAWMQLRPTEPLPSQCCGSGCSPCVFDLYHRDLARWEAAQASKDRSLLRGPESQRDSR

SEQ ID NO: 21720 - protein, 55 aa, Homo sapiens
  Payload ID: 4384
  Gene Symbol: CYB5RL
  Gene Name: cytochrome b5 reductase-like
  ENSP ID: ENSP00000403021
MQLRPTEPLPSQCCGSGCSPCVFDLYHRDLARWEAAQASKDRSLLRGPESQRDSR

SEQ ID NO: 21721 - protein, 138 aa, Homo sapiens
  Payload ID: 4384
  Gene Symbol: CYB5RL
  Gene Name: cytochrome b5 reductase-like
  ENSP ID: ENSP00000431157
MMAEREEDDDTEEAWMQLRPTEPLPSQCCGSGCSPCVFDLYHRDLARWEAAQASKDRSLLRGPESQSCPSKLNPETFVAFCIIAMDRLTKDTYRVRFALPGNSQLGLRPGQHLILRYTQVAGGPKLHSPALLFASCWP

SEQ ID NO: 21722 - protein, 123 aa, Homo sapiens
  Payload ID: 4384
  Gene Symbol: CYB5RL
  Gene Name: cytochrome b5 reductase-like
  ENSP ID: ENSP00000431428
MMAEREEDDDTEEAWMQLRPTEPLPSQCCGSGCSPCVFDLYHRDLARWEAAQASKDRSLLRGPESQSCPSKLNPETFVAFCIIAMDRLTKDTYRVRFALPGNSQLGLRPGQHLILRYTQRDSR

SEQ ID NO: 21723 - protein, 315 aa, Homo sapiens
  Payload ID: 4384
  Gene Symbol: CYB5RL
  Gene Name: cytochrome b5 reductase-like
  Uniprot ID: Q6IPT4
  ENSP ID: ENSP00000434343
MMAEREEDDDTEEAWMQLRPTEPLPSQCCGSGCSPCVFDLYHRDLARWEAAQASKDRSLLRGPESQSCPSKLNPETFVAFCIIAMDRLTKDTYRVRFALPGNSQLGLRPGQHLILRGIVDDLEIQRAYTPISPANAEGYFEVLIKCYQMGLMSRYVESWRVGDTAFWRGPFGDFFYKPNQYGELLLLAAGTGLAPMVPILQSITDNENDETFVTLVGCFKTFESIYLKTFLQEQARFWNVRTFFVLSQESSSEQLPWSYQEKTHFGHLGQDLIKELVSCCRRKPFALVCGSAEFTKDIARCLLCAGLTEDSYFLF

SEQ ID NO: 21724 - protein, 176 aa, Homo sapiens
  Payload ID: 4384
  Gene Symbol: CYB5RL
  Gene Name: cytochrome b5 reductase-like
  ENSP ID: ENSP00000434606
RGPESQSCPSKLNPETFVAFCIIAMDRLTKDTYRVRFALPGNSQLGLRPGQHLILRYTQCYQMGLMSRYVESWRVGDTAFWRGPFGDFFYKPNQYGELLLLAAGTGLAPMVPILQSITDNENDETFVTLVGCFKTFESIYLKTFLQEQARFWNVRTFFVLSQLVESTNVEPMDTEG

SEQ ID NO: 21725 - protein, 60 aa, Homo sapiens
  Payload ID: 4385
  Gene Symbol: CYB5A
  Gene Name: cytochrome b5 type A (microsomal)
  ENSP ID: ENSP00000299438
MSKTFIIGELHPDDRPKLNKPPETLITTIDSSSSWWTNWVIPAISAVAVALMYRLYMAED

SEQ ID NO: 21726 - protein, 134 aa, Homo sapiens
  Payload ID: 4385
  Gene Symbol: CYB5A
  Gene Name: cytochrome b5 type A (microsomal)
  Uniprot ID: P00167
  ENSP ID: ENSP00000341625
MAEQSDEAVKYYTLEEIQKHNHSKSTWLILHHKVYDLTKFLEEHPGGEEVLREQAGGDATENFEDVGHSTDAREMSKTFIIGELHPDDRPKLNKPPETLITTIDSSSSWWTNWVIPAISAVAVALMYRLYMAED

SEQ ID NO: 21727 - protein, 124 aa, Homo sapiens
  Payload ID: 4385
  Gene Symbol: CYB5A
  Gene Name: cytochrome b5 type A (microsomal)
  Uniprot ID: P00167
  ENSP ID: ENSP00000381011
MAEQSDEAVKYYTLEEIQKHNHSKSTWLILHHKVYDLTKFLEEHPGGEEVLREQAGGDATENFEDVGHSTDAREMSKTFIIGELHPETLITTIDSSSSWWTNWVIPAISAVAVALMYRLYMAED

SEQ ID NO: 21728 - protein, 98 aa, Homo sapiens
  Payload ID: 4385
  Gene Symbol: CYB5A
  Gene Name: cytochrome b5 type A (microsomal)
  Uniprot ID: P00167
  ENSP ID: ENSP00000436461
MAEQSDEAVKYYTLEEIQKHNHSKSTWLILHHKVYDLTKFLEEHPGGEEVLREQAGGDATENFEDVGHSTDAREMSKTFIIGELHPDDRPKLNKPPEP

SEQ ID NO: 21729 - protein, 150 aa, Homo sapiens
  Payload ID: 4386
  Gene Symbol: CYB5B
  Gene Name: cytochrome b5 type B (outer mitochondrial membrane)
  ENSP ID: ENSP00000308430
MSGSMATAEASGSDGKGQEVETSVTYYRLEEVAKRNSLKELWLVIHGRVYDVTRFLNEHPGGEEVLLEQAGVDASESFEDVGHSSDAREMLKQYYIGDIHPSDLKPESGSKDPSKNDTCKSCWAYWILPIIGAVLLGFLYRYYTSESKSS

SEQ ID NO: 21730 - protein, 131 aa, Homo sapiens
  Payload ID: 4386
  Gene Symbol: CYB5B
  Gene Name: cytochrome b5 type B (outer mitochondrial membrane)
  ENSP ID: ENSP00000421492
MATAEASGSDGKGQEVETSVTYYRLEEVAKRNSLKELWLVIHGRVYDVTRFLNEHPGGEEVLLEQAGVDASESFEDVGHSSDAREMLKQYYIGDIHPLLGILDFTHHRRCSLRFPVPLLHIGKQILLRRPC

SEQ ID NO: 21731 - protein, 146 aa, Homo sapiens
  Payload ID: 4386
  Gene Symbol: CYB5B
  Gene Name: cytochrome b5 type B (outer mitochondrial membrane)
  Uniprot ID: O43169
  ENSP ID: ENSP00000423679
MATAEASGSDGKGQEVETSVTYYRLEEVAKRNSLKELWLVIHGRVYDVTRFLNEHPGGEEVLLEQAGVDASESFEDVGHSSDAREMLKQYYIGDIHPSDLKPESGSKDPSKNDTCKSCWAYWILPIIGAVLLGFLYRYYTSESKSS

SEQ ID NO: 21732 - protein, 140 aa, Homo sapiens
  Payload ID: 4386
  Gene Symbol: CYB5B
  Gene Name: cytochrome b5 type B (outer mitochondrial membrane)
  ENSP ID: ENSP00000457848
MATAEASGSDGKGQEVETSVTYYRLEEVAKRNSLKELWLVIHGRVYDVTRFLNEHPGGEEVLLEQAGVDASESFEDVGHSSDAREMLKQYYIGDIHPSDLKPESGSKDPSKNDTCKRRCSLRFPVPLLHIGKQILLRRPC

SEQ ID NO: 21733 - protein, 64 aa, Homo sapiens
  Payload ID: 4386
  Gene Symbol: CYB5B
  Gene Name: cytochrome b5 type B (outer mitochondrial membrane)
  ENSP ID: ENSP00000464102
KRNSLKELWLVIHGRVYDVTRFLNEDPSKNDTCKSCWAYWILPIIGAVLLGFLYRYYTSESKSS

SEQ ID NO: 21734 - protein, 251 aa, Homo sapiens
  Payload ID: 4387
  Gene Symbol: CYB561
  Gene Name: cytochrome b561
  Uniprot ID: P49447
  ENSP ID: ENSP00000354028
MEGGAAAATPTALPYYVAFSQLLGLTLVAMTGAWLGLYRGGIAWESDLQFNAHPLCMVIGLIFLQGNALLVYRVFRNEAKRTTKVLHGLLHIFALVIALVGLVAVFDYHRKKGYADLYSLHSWCGILVFVLYFVQWLVGFSFFLFPGASFSLRSRYRPQHIFFGATIFLLSVGTALLGLKEALLFNLGGKYSAFEPEGVLANVLGLLLACFGGAVLYILTRADWKRPSQAEEQALSMDFKTLTEGDSPGSQ

SEQ ID NO: 21735 - protein, 251 aa, Homo sapiens; identical to SEQ ID NO: 21734
  Payload ID: 4387
  Gene Symbol: CYB561
  Gene Name: cytochrome b561
  Uniprot ID: P49447
  ENSP ID: ENSP00000376701

SEQ ID NO: 21736 - protein, 251 aa, Homo sapiens; identical to SEQ ID NO: 21734
  Payload ID: 4387
  Gene Symbol: CYB561
  Gene Name: cytochrome b561
  Uniprot ID: P49447
  ENSP ID: ENSP00000376702

SEQ ID NO: 21737 - protein, 138 aa, Homo sapiens
  Payload ID: 4387
  Gene Symbol: CYB561
  Gene Name: cytochrome b561
  Uniprot ID: P49447
  ENSP ID: ENSP00000400350
MEGGAAAATPTALPYYVAFSQLLGLTLVAMTGAWLGLYRGGIAWESDLQFNAHPLCMVIGLIFLQGNALLVYRVFRNEAKRTTKVLHGLLHIFALVIALVGLVAVFDYHRKKGYADLYSLHSWCGILVFVLYFVQGQV

SEQ ID NO: 21738 - protein, 318 aa, Homo sapiens
  Payload ID: 4387
  Gene Symbol: CYB561
  Gene Name: cytochrome b561
  ENSP ID: ENSP00000442773
MKQKTKPGTGPLSSLEFGVSFLAPSPHMELLASCPRSRLSPWGGWAPPPSHSRDLRPLPQDDGVCLSMEGGAAAATPTALPYYVAFSQLLGLTLVAMTGAWLGLYRGGIAWESDLQFNAHPLCMVIGLIFLQGNALLVYRVFRNEAKRTTKVLHGLLHIFALVIALVGLVAVFDYHRKKGYADLYSLHSWCGILVFVLYFVQWLVGFSFFLFPGASFSLRSRYRPQHIFFGATIFLLSVGTALLGLKEALLFNLGGKYSAFEPEGVLANVLGLLLACFGGAVLYILTRADWKRPSQAEEQALSMDFKTLTEGDSPGSQ

SEQ ID NO: 21739 - protein, 251 aa, Homo sapiens; identical to SEQ ID NO: 21734
  Payload ID: 4387
  Gene Symbol: CYB561
  Gene Name: cytochrome b561
  Uniprot ID: P49447
  ENSP ID: ENSP00000462325

SEQ ID NO: 21740 - protein, 251 aa, Homo sapiens; identical to SEQ ID NO: 21734
  Payload ID: 4387
  Gene Symbol: CYB561
  Gene Name: cytochrome b561
  Uniprot ID: P49447
  ENSP ID: ENSP00000462543

SEQ ID NO: 21741 - protein, 305 aa, Homo sapiens
  Payload ID: 4387
  Gene Symbol: CYB561
  Gene Name: cytochrome b561
  ENSP ID: ENSP00000462545
  MOD_RES (1)..(1): Any amino acid
XFLAPSPHMELLASCPRSRLSPWGGWAPPPSHSRDLRPLPQDDGWEGACGVCLSMEGGAAAATPTALPYYVAFSQLLGLTLVAMTGAWLGLYRGGIAWESDLQFNAHPLCMVIGLIFLQGNALLVYRVFRNEAKRTTKVLHGLLHIFALVIALVGLVAVFDYHRKKGYADLYSLHSWCGILVFVLYFVQWLVGFSFFLFPGASFSLRSRYRPQHIFFGATIFLLSVGTALLGLKEALLFNLGGKYSAFEPEGVLANVLGLLLACFGGAVLYILTRADWKRPSQAEEQALSMDFKTLTEGDSPGSQ

SEQ ID NO: 21742 - protein, 194 aa, Homo sapiens
  Payload ID: 4387
  Gene Symbol: CYB561
  Gene Name: cytochrome b561
  ENSP ID: ENSP00000463162
MEGGAAAATPTALPYYVAFSQLLGLTLVAMTGAWLGLYRGGIAWESDLQFNAHPLCMVIGLIFLQGNALLVYRVFRNEAKRTTKVLHGLLHIFALVIALVGEFPGAAFPATCLPLQAWWRCSTTTGRRATLTCTAYTAGAGSLSLSCTLCSGWWASASSCSPELHSPCGAATAHSTSSLVLPSSSFPWAPPCWA

SEQ ID NO: 21743 - protein, 94 aa, Homo sapiens
  Payload ID: 4387
  Gene Symbol: CYB561
  Gene Name: cytochrome b561
  ENSP ID: ENSP00000463680
MWQRELGSREGAHHWEGLKTSSWALQGRACAGVCLSMEGGAAAATPTALPYYVAFSQLLGLTLVAMTGAWLGLYRGGIAWESDLQFNAHPLCMV

SEQ ID NO: 21744 - protein, 73 aa, Homo sapiens
  Payload ID: 4387
  Gene Symbol: CYB561
  Gene Name: cytochrome b561
  ENSP ID: ENSP00000464012
  MOD_RES (1)..(1): Any amino acid
XYRPQHIFFGATIFLLSVGTALLGLKEALLFNLGFSLPLTPAGASIAHLSPRVSWPTCWACCWPASVGRCSTS

SEQ ID NO: 21745 - protein, 142 aa, Homo sapiens
  Payload ID: 4387
  Gene Symbol: CYB561
  Gene Name: cytochrome b561
  ENSP ID: ENSP00000464193
MEGGAAAATPTALPYYVAFSQLLGLTLVAMTGAWLGLYRGGIAWESDLQFNAHPLCMVIGLIFLQGNALLVYRVFRNEAKRTTKVLHGLLHIFALVIALVGEFPGAAFPATCLPLQAWWRCSTTTGRRATLTCTAYTAGAGS

SEQ ID NO: 21746 - protein, 258 aa, Homo sapiens
  Payload ID: 4387
  Gene Symbol: CYB561
  Gene Name: cytochrome b561
  ENSP ID: ENSP00000464215
MSSVCLSMEGGAAAATPTALPYYVAFSQLLGLTLVAMTGAWLGLYRGGIAWESDLQFNAHPLCMVIGLIFLQGNALLVYRVFRNEAKRTTKVLHGLLHIFALVIALVGLVAVFDYHRKKGYADLYSLHSWCGILVFVLYFVQWLVGFSFFLFPGASFSLRSRYRPQHIFFGATIFLLSVGTALLGLKEALLFNLGGKYSAFEPEGVLANVLGLLLACFGGAVLYILTRADWKRPSQAEEQALSMDFKTLTEGDSPGSQ

SEQ ID NO: 21747 - protein, 210 aa, Homo sapiens
  Payload ID: 4387
  Gene Symbol: CYB561
  Gene Name: cytochrome b561
  ENSP ID: ENSP00000464470
MEGGAAAATPTALPYYVAFSQLLGLTLVAMTGAWLGLYRGGIAWESDLQFNAHPLCMVIGLIFLQGNALLVYRVFRNEAKRTTKVLHGLLHIFALVIALVGLVAVFDYHRKKGYADLYSLHSWCGILVFVLYFVQWLVGFSFFLFPGASFSLRSRYRPQHIFFGATIFLLSVGTALLGLKEALLFNLGKSGWSQNNYSHPPWCLHITPAP

SEQ ID NO: 21748 - protein, 222 aa, Homo sapiens
  Payload ID: 4387
  Gene Symbol: CYB561
  Gene Name: cytochrome b561
  ENSP ID: ENSP00000464520
MTGAWLGLYRGGIAWESDLQFNAHPLCMVIGLIFLQGNALLVYRVFRNEAKRTTKVLHGLLHIFALVIALVGLVAVFDYHRKKGYADLYSLHSWCGILVFVLYFVQWLVGFSFFLFPGASFSLRSRYRPQHIFFGATIFLLSVGTALLGLKEALLFNLGGKYSAFEPEGVLANVLGLLLACFGGAVLYILTRADWKRPSQAEEQALSMDFKTLTEGDSPGSQ

SEQ ID NO: 21749 - protein, 242 aa, Homo sapiens
  Payload ID: 4388
  Gene Symbol: CYB561A3
  Gene Name: cytochrome b561 family, member A3
  Uniprot ID: Q8NBI2
  ENSP ID: ENSP00000294072
MVSGRFYLSCLLLGSLGSMCILFTIYWMQYWRGGFAWNGSIYMFNWHPVLMVAGMVVFYGGASLVYRLPQSWVGPKLPWKLLHAALHLMAFVLTVVGLVAVFTFHNHGRTANLYSLHSWLGITTVFLFACQWFLGFAVFLLPWASMWLRSLLKPIHVFFGAAILSLSIASVISGINEKLFFSLKNTTRPYHSLPSEAVFANSTGMLVVAFGLLVLYILLASSWKRPEPGILTDRQPLLHDGE

SEQ ID NO: 21750 - protein, 263 aa, Homo sapiens
  Payload ID: 4388
  Gene Symbol: CYB561A3
  Gene Name: cytochrome b561 family, member A3
  ENSP ID: ENSP00000389745
MVSGRFYLSCLLLGSLGSMCILFTIYWMQYWRGGFAWNGSIYMFNWHPVLMVAGMVVFYGGASLVYRLPQSWVGPKLPWKLLHAALHLMAFVLTVVGLVAVFTFHNHGRTANLYSLHSWLGITTVFLFACQWFLGFAVFLLPWASMWLRSLLKPIHVFFGAAILSLSIASVISGINEKLFFSLKNTTRPYHSLPSEAVFANSTGMLVVAFGLLVLYILLASSWKRPEPGILTDRQLLLQLRPGSRPFPVTYVSVTGRQPYKSW

SEQ ID NO: 21751 - protein, 259 aa, Homo sapiens
  Payload ID: 4388
  Gene Symbol: CYB561A3
  Gene Name: cytochrome b561 family, member A3
  Uniprot ID: Q8NBI2
  ENSP ID: ENSP00000398979
MGKNFSDSFLSRECVIRMVSGRFYLSCLLLGSLGSMCILFTIYWMQYWRGGFAWNGSIYMFNWHPVLMVAGMVVFYGGASLVYRLPQSWVGPKLPWKLLHAALHLMAFVLTVVGLVAVFTFHNHGRTANLYSLHSWLGITTVFLFACQWFLGFAVFLLPWASMWLRSLLKPIHVFFGAAILSLSIASVISGINEKLFFSLKNTTRPYHSLPSEAVFANSTGMLVVAFGLLVLYILLASSWKRPEPGILTDRQPLLHDGE

SEQ ID NO: 21752 - protein, 242 aa, Homo sapiens; identical to SEQ ID NO: 21749
  Payload ID: 4388
  Gene Symbol: CYB561A3
  Gene Name: cytochrome b561 family, member A3
  Uniprot ID: Q8NBI2
  ENSP ID: ENSP00000437390

SEQ ID NO: 21753 - protein, 55 aa, Homo sapiens
  Payload ID: 4388
  Gene Symbol: CYB561A3
  Gene Name: cytochrome b561 family, member A3
  ENSP ID: ENSP00000437819
MVSGRFYLSCLLLGSLGSMCILFTIYWMQYWRGGFAWNGSIYMFNWHPVLMVAGM

SEQ ID NO: 21754 - protein, 182 aa, Homo sapiens
  Payload ID: 4388
  Gene Symbol: CYB561A3
  Gene Name: cytochrome b561 family, member A3
  ENSP ID: ENSP00000438725
MVSGRFYLSCLLLGSLGSMCILFTIYWMQYWRGGFAWNGSIYMFNWHPVLMVAGMVVFYGGASLVYRLPQSWVGPKLPWKLLHAALHLMAFVLTVVGLVAVFTFHNHGRTANLYSLHSWLGITTVFLFACQWFLGFAVFLLPWASMWLRSLLKPIHVFFGAAILSLSIASVISGINEKLFFS

SEQ ID NO: 21755 - protein, 28 aa, Homo sapiens
  Payload ID: 4388
  Gene Symbol: CYB561A3
  Gene Name: cytochrome b561 family, member A3
  ENSP ID: ENSP00000439702
MVSGRFYLSCLLLGSLGSMCILFTIYWM

SEQ ID NO: 21756 - protein, 124 aa, Homo sapiens
  Payload ID: 4388
  Gene Symbol: CYB561A3
  Gene Name: cytochrome b561 family, member A3
  ENSP ID: ENSP00000441085
MAFVLTVVGLVAVFTFHNHGRTANLYSLHSWLGITTVFLFACQWFLGFAVFLLPWASMWLRSLLKPIHVFFGAAILSLSIASVISGINEKLFFSLKNTTRPYHSLPSEAVFANSTGMLVVAFGL

SEQ ID NO: 21757 - protein, 95 aa, Homo sapiens
  Payload ID: 4388
  Gene Symbol: CYB561A3
  Gene Name: cytochrome b561 family, member A3
  ENSP ID: ENSP00000441834
MVSGRFYLSCLLLGSLGSMCILFTIYWMQYWRGGFAWNGSIYMFNWHPVLMVAGMVVFYGGAGWASPLSSSSPASGSWALLSSSCPGRPCGCAAS

SEQ ID NO: 21758 - protein, 115 aa, Homo sapiens
  Payload ID: 4388
  Gene Symbol: CYB561A3
  Gene Name: cytochrome b561 family, member A3
  ENSP ID: ENSP00000443005
MVSGRFYLSCLLLGSLGSMCILFTIYWMQYWRGGFAWNGSIYMFNWHPVLMVAGMVVFYGGASLVYRLPQSWVGPKLPWKLLHAALHLMAFVLTVVGLVAVFTFHNHGRTANLYS

SEQ ID NO: 21759 - protein, 199 aa, Homo sapiens
  Payload ID: 4388
  Gene Symbol: CYB561A3
  Gene Name: cytochrome b561 family, member A3
  ENSP ID: ENSP00000443321
MVSGRFYLSCLLLGSLGSMCILFTIYWMQYWRGGFAWNGSIYMFNWHPVLMVAGMVVFYGGASLVYRLPQSWVGPKLPWKLLHAALHLMAFVLTVVGLVAVFTFHNHGRTANLYSLHSWLGITTVFLFACQWFLGFAVFLLPWASMWLRSLLKPIHVFFGAAILSLSIASVISGINEKLFFSLKNTTRPYHSLPSEAVF

SEQ ID NO: 21760 - protein, 109 aa, Homo sapiens
  Payload ID: 4388
  Gene Symbol: CYB561A3
  Gene Name: cytochrome b561 family, member A3
  ENSP ID: ENSP00000443756
MVSGRFYLSCLLLGSLGSMCILFTIYWMQYWRGGFAWNGSIYMFNWHPVLMVAGMVVFYGGGKTPPGHTTACPVRRSLPTAPGCWWWPLGCWCSTSFWLHLGSAQSRGS

SEQ ID NO: 21761 - protein, 105 aa, Homo sapiens
  Payload ID: 4388
  Gene Symbol: CYB561A3
  Gene Name: cytochrome b561 family, member A3
  ENSP ID: ENSP00000445561
MVSGRFYLSCLLLGSLGSMCILFTIYWMQYWRGGFAWNGSIYMFNWHPVLMVAGMVVFYGGVVPGLCCLPPALGVHVAAQPPKTYPRLFWSRHPLSVHRIRHFGH

SEQ ID NO: 21762 - protein, 104 aa, Homo sapiens
  Payload ID: 4388
  Gene Symbol: CYB561A3
  Gene Name: cytochrome b561 family, member A3
  ENSP ID: ENSP00000446158
MVSGRFYLSCLLLGSLGSMCILFTIYWMQYWRGGFAWNGSIYMFNWHPVLMVAGMVVFYGGGHTTACPVRRSLPTAPGCWWWPLGCWCSTSFWLHLGSAQSRGS

SEQ ID NO: 21763 - protein, 133 aa, Homo sapiens
  Payload ID: 4389
  Gene Symbol: CYB561D1
  Gene Name: cytochrome b561 family, member D1
  Uniprot ID: Q8N8Q1
  ENSP ID: ENSP00000309324
MQPLEVGLVPAPAGEPRLTRWLRRGSGILAHLVALGFTIFLTALSRPGTKTGPLMEDRSEGGRARWVMPEIPALWEADAGGSLEVFSPGTLYSWPWRSASAWLKPSYSSHLNTPCSSSAPEKHGSGSTGQGRP

SEQ ID NO: 21764 - protein, 251 aa, Homo sapiens
  Payload ID: 4389
  Gene Symbol: CYB561D1
  Gene Name: cytochrome b561 family, member D1
  Uniprot ID: Q8N8Q1
  ENSP ID: ENSP00000358884
MQPLEVGLVPAPAGEPRLTRWLRRGSGILAHLVALGFTIFLTALSRPGTKTGPLMEDRSEGGRARWVMPEIPALWEADAGGSLEFCLCMAEAILLFSPEHSLFFFCSRKARIRLHWAGQTLAILCAALGLGFIISSRTRSELPHLVSWHSWVGALTLLATAVQALCGLCLLCPRAARVSRVARLKLYHLTCGLVVYLMATVTVLLGMYSVWFQAQIKGAAWYLCLALPVYPALVIMHQISRSYLPRKKMEM

SEQ ID NO: 21765 - protein, 172 aa, Homo sapiens
  Payload ID: 4389
  Gene Symbol: CYB561D1
  Gene Name: cytochrome b561 family, member D1
  Uniprot ID: Q8N8Q1
  ENSP ID: ENSP00000377312
MQPLEFCLCMAEAILLFSPEHSLFFFCSRKARIRLHWAGQTLAILCAALGLGFIISSRTRSELPHLVSWHSWVGALTLLATAVQALCGLCLLCPRAARVSRVARLKLYHLTCGLVVYLMATVTVLLGMYSVWFQAQIKGAAWYLCLALPVYPALVIMHQISRSYLPRKKMEM

SEQ ID NO: 21766 - protein, 229 aa, Homo sapiens
  Payload ID: 4389
  Gene Symbol: CYB561D1
  Gene Name: cytochrome b561 family, member D1
  Uniprot ID: Q8N8Q1
  ENSP ID: ENSP00000413530
MQPLEVGLVPAPAGEPRLTRWLRRGSGILAHLVALGFTIFLTALSRPGTSLFSWHPVFMALAFCLCMAEAILLFSPEHSLFFFCSRKARIRLHWAGQTLAILCAALGLGFIISSRTRSELPHLVSWHSWVGALTLLATAVQALCGLCLLCPRAARVSRVARLKLYHLTCGLVVYLMATVTVLLGMYSVWFQAQIKGAAWYLCLALPVYPALVIMHQISRSYLPRKKMEM

SEQ ID NO: 21767 - protein, 128 aa, Homo sapiens
  Payload ID: 4389
  Gene Symbol: CYB561D1
  Gene Name: cytochrome b561 family, member D1
  Uniprot ID: Q8N8Q1
  ENSP ID: ENSP00000416898
MQPLEVGLVPAPAGEPRLTRWLRRGSGILAHLVALGFTIFLTALSRPGTKTGPLMEDRSEGGRARWVMPEIPALWEADAGGSLEVFSPGTLYSWPWRMYESTSFFSGLQARHEAYWLSPMFTVLPLHG

SEQ ID NO: 21768 - protein, 55 aa, Homo sapiens
  Payload ID: 4389
  Gene Symbol: CYB561D1
  Gene Name: cytochrome b561 family, member D1
  ENSP ID: ENSP00000433095
MQPLEVGLVPAPAGEPRLTRWLRRGSGILAHLVALGFTIFLTALSRPGTILPLHG

SEQ ID NO: 21769 - protein, 231 aa, Homo sapiens
  Payload ID: 4389
  Gene Symbol: CYB561D1
  Gene Name: cytochrome b561 family, member D1
  ENSP ID: ENSP00000434344
MQPLEVGLVPAPAGEPRLTRWLRRGSGILAHLVALGFTIFLTALSRPGTSLFSWHPVFMALAFCLCMAEAILLFSPEHSLFFFCSRKARIRLHWAGQTLAILCAALGLGFIISSRTRSELPHLVSWHSWVGALTLLATAVQALCGLCLLCPRAARVSRVARLKLYHLTCGLVVYLMATVTVLLGMYSVWFQAQIKGAAWYLCLALPVYPALVIMHQISRSYLPRKKMEIAT

SEQ ID NO: 21770 - protein, 54 aa, Homo sapiens
  Payload ID: 4389
  Gene Symbol: CYB561D1
  Gene Name: cytochrome b561 family, member D1
  ENSP ID: ENSP00000435802
MQPLEVFSPGTLYSWPWRSASAWLKPSYSSHLNTPCSSSAPEKHGSGSTGQGRP

SEQ ID NO: 21771 - protein, 64 aa, Homo sapiens
  Payload ID: 4389
  Gene Symbol: CYB561D1
  Gene Name: cytochrome b561 family, member D1
  ENSP ID: ENSP00000435819
MQPLEVGLVPAPAGEPRLTRWLRRGSGILAHLVALGFTIFLTALSRPGTSLFSWHPVFMALADV

SEQ ID NO: 21772 - protein, 222 aa, Homo sapiens
  Payload ID: 4390
  Gene Symbol: CYB561D2
  Gene Name: cytochrome b561 family, member D2
  Uniprot ID: O14569
  ENSP ID: ENSP00000232508
MALSAETESHIYRALRTASGAAAHLVALGFTIFVAVLARPGSSLFSWHPVLMSLAFSFLMTEALLVFSPESSLLHSLSRKGRARCHWVLQLLALLCALLGLGLVILHKEQLGKAHLVTRHGQAGLLAVLWAGLQCSGGVGLLYPKLLPRWPLAKLKLYHATSGLVGYLLGSASLLLGMCSLWFTASVTGAAWYLAVLCPVLTSLVIMNQVSNAYLYRKRIQP

SEQ ID NO: 21773 - protein, 222 aa, Homo sapiens; identical to SEQ ID NO: 21772
  Payload ID: 4390
  Gene Symbol: CYB561D2
  Gene Name: cytochrome b561 family, member D2
  Uniprot ID: O14569
  ENSP ID: ENSP00000391209

SEQ ID NO: 21774 - protein, 222 aa, Homo sapiens; identical to SEQ ID NO: 21772
  Payload ID: 4390
  Gene Symbol: CYB561D2
  Gene Name: cytochrome b561 family, member D2
  Uniprot ID: O14569
  ENSP ID: ENSP00000400454

SEQ ID NO: 21775 - protein, 222 aa, Homo sapiens; identical to SEQ ID NO: 21772
  Payload ID: 4390
  Gene Symbol: CYB561D2
  Gene Name: cytochrome b561 family, member D2
  Uniprot ID: O14569
  ENSP ID: ENSP00000410663

SEQ ID NO: 21776 - protein, 146 aa, Homo sapiens
  Payload ID: 4391
  Gene Symbol: COA1
  Gene Name: cytochrome c oxidase assembly factor 1 homolog
  Uniprot ID: Q9GZY4
  ENSP ID: ENSP00000223336
MMWQKYAGSRRSMPLGARILFHGVFYAGGFAIVYYLIQKFHSRALYYKLAVEQLQSHPEAQEALGPPLNIHYLKLIDRENFVDIVDAKLKIPVSGSKSEGLLYVHSSRGGPFQRWHLDEVFLELKDGQQIPVFKLSGENGDEVKKE

SEQ ID NO: 21777 - protein, 146 aa, Homo sapiens; identical to SEQ ID NO: 21776
  Payload ID: 4391
  Gene Symbol: COA1
  Gene Name: cytochrome c oxidase assembly factor 1 homolog
  Uniprot ID: Q9GZY4
  ENSP ID: ENSP00000312100

SEQ ID NO: 21778 - protein, 146 aa, Homo sapiens; identical to SEQ ID NO: 21776
  Payload ID: 4391
  Gene Symbol: COA1
  Gene Name: cytochrome c oxidase assembly factor 1 homolog
  Uniprot ID: Q9GZY4
  ENSP ID: ENSP00000379218

SEQ ID NO: 21779 - protein, 63 aa, Homo sapiens
  Payload ID: 4391
  Gene Symbol: COA1
  Gene Name: cytochrome c oxidase assembly factor 1 homolog
  ENSP ID: ENSP00000387433
MMWQKYAGSRRSMPLGARILFHGVFYAGGFAIVYYLIQSKYPASRLRPDLLLACSCSSIRGNT

SEQ ID NO: 21780 - protein, 146 aa, Homo sapiens; identical to SEQ ID NO: 21776
  Payload ID: 4391
  Gene Symbol: COA1
  Gene Name: cytochrome c oxidase assembly factor 1 homolog
  Uniprot ID: Q9GZY4
  ENSP ID: ENSP00000395586

SEQ ID NO: 21781 - protein, 34 aa, Homo sapiens
  Payload ID: 4391
  Gene Symbol: COA1
  Gene Name: cytochrome c oxidase assembly factor 1 homolog
  ENSP ID: ENSP00000398886
MMWQKVMECSRAKFPTRTCQGILELDNRRKSLPE

SEQ ID NO: 21782 - protein, 34 aa, Homo sapiens; identical to SEQ ID NO: 21781
  Payload ID: 4391
  Gene Symbol: COA1
  Gene Name: cytochrome c oxidase assembly factor 1 homolog
  ENSP ID: ENSP00000400271

SEQ ID NO: 21783 - protein, 146 aa, Homo sapiens; identical to SEQ ID NO: 21776
  Payload ID: 4391
  Gene Symbol: COA1
  Gene Name: cytochrome c oxidase assembly factor 1 homolog
  Uniprot ID: Q9GZY4
  ENSP ID: ENSP00000400759

SEQ ID NO: 21784 - protein, 113 aa, Homo sapiens
  Payload ID: 4391
  Gene Symbol: COA1
  Gene Name: cytochrome c oxidase assembly factor 1 homolog
  ENSP ID: ENSP00000405582
MMWQKYAGSRRSMPLGARILFHGVFYAGGFAIVYYLIQKFHSRALYYKLAVEQLQSHPEAQEALGPPLNIHYLKLIDRENFVDIVDAKLKIPVSGSKSEGLLYVHSSRGGPFQ

SEQ ID NO: 21785 - protein, 63 aa, Homo sapiens; identical to SEQ ID NO: 21779
  Payload ID: 4391
  Gene Symbol: COA1
  Gene Name: cytochrome c oxidase assembly factor 1 homolog
  ENSP ID: ENSP00000410365

SEQ ID NO: 21786 - protein, 41 aa, Homo sapiens
  Payload ID: 4391
  Gene Symbol: COA1
  Gene Name: cytochrome c oxidase assembly factor 1 homolog
  ENSP ID: ENSP00000411540
MMWQKYAGSRRSMPLGARILFHGVFYAGGFAIVYYLIQRGC

SEQ ID NO: 21787 - protein, 146 aa, Homo sapiens; identical to SEQ ID NO: 21776
  Payload ID: 4391
  Gene Symbol: COA1
  Gene Name: cytochrome c oxidase assembly factor 1 homolog
  Uniprot ID: Q9GZY4
  ENSP ID: ENSP00000413777

SEQ ID NO: 21788 - protein, 146 aa, Homo sapiens; identical to SEQ ID NO: 21776
  Payload ID: 4391
  Gene Symbol: COA1
  Gene Name: cytochrome c oxidase assembly factor 1 homolog
  Uniprot ID: Q9GZY4
  ENSP ID: ENSP00000416406

SEQ ID NO: 21789 - protein, 88 aa, Homo sapiens
  Payload ID: 4391
  Gene Symbol: COA1
  Gene Name: cytochrome c oxidase assembly factor 1 homolog
  ENSP ID: ENSP00000417046
MMWQKYAGSRRSMPLGARILFHGVFYAGGFAIVYYLIQKFHSRALYYKLAVEQLQSHPEAQEALGPPLNIHYLKLIDRENFVDIVDAK

SEQ ID NO: 21790 - protein, 106 aa, Homo sapiens
  Payload ID: 4392
  Gene Symbol: COA3
  Gene Name: cytochrome c oxidase assembly factor 3
  Uniprot ID: Q9Y2R0
  ENSP ID: ENSP00000354762
MASSGAGDPLDSKRGEAPFAQRIDPTREKLTPEQLHSMRQAELAQWQKVLPRRRTRNIVTGLGIGALVLAIYGYTFYSISQERFLDELEDEAKAARARALARASGS

SEQ ID NO: 21791 - protein, 71 aa, Homo sapiens
  Payload ID: 4392
  Gene Symbol: COA3
  Gene Name: cytochrome c oxidase assembly factor 3
  ENSP ID: ENSP00000467546
MASSGAGDPLDSKRGEAPFAQRIDPTREKLTPEQLHSMRQAELAQWQKVLPRRRTRNIVTGLGIGALVLAI

SEQ ID NO: 21792 - protein, 87 aa, Homo sapiens [sequence omitted]

SEQ ID NO: 21793 - protein, 87 aa, Homo sapiens [sequence omitted]

SEQ ID NO: 21794 - protein, 96 aa, Homo sapiens
  Payload ID: 4393
  Gene Symbol: COA4
  Gene Name: cytochrome c oxidase assembly factor 4 homolog
  Uniprot ID: Q9NYJ1
  ENSP ID: ENSP00000440756
MFYRLPIPRMSTSVPQGHTWTQRVKKDDEEEDPLDQLISRSGCAASHFAVQECMAQHQDWRQCQPQVQAFKDCMSEQQARRQEELQRRQEQAGAHH

SEQ ID NO: 21795 - protein, 87 aa, Homo sapiens [sequence omitted]

SEQ ID NO: 21796 - protein, 74 aa, Homo sapiens
  Payload ID: 4394
  Gene Symbol: COA5
  Gene Name: cytochrome c oxidase assembly factor 5
  Uniprot ID: Q86WW8
  ENSP ID: ENSP00000330730
MPKYYEDKPQGGACAGLKEDLGACLLQSDCVVQEGKSPRQCLKEGYCNSLKYAFFECKRSVLDNRARFRGRKGY

SEQ ID NO: 21797 - protein, 73 aa, Homo sapiens
  Payload ID: 4394
  Gene Symbol: COA5
  Gene Name: cytochrome c oxidase assembly factor 5
  ENSP ID: ENSP00000386934
MPKYYEDKPQGGACAGLKEDLGACLLQSDCVVQEGKSPRQCLKEGYCNSLKYAFFECKRSVMESRSVARAGVQ

SEQ ID NO: 21798 - protein, 79 aa, Homo sapiens
  Payload ID: 4395
  Gene Symbol: COA6
  Gene Name: cytochrome c oxidase assembly factor 6
  Uniprot ID: Q5JTJ3
  ENSP ID: ENSP00000355571
MAAPSMKERQVCWGARDEYWKCLDENLEDASQCKKLRSSFESSCPQQWIKYFDKRRDYLKFKEKFEAGQFEPSETTAKS

SEQ ID NO: 21799 - protein, 125 aa, Homo sapiens
  Payload ID: 4395
  Gene Symbol: COA6
  Gene Name: cytochrome c oxidase assembly factor 6
  Uniprot ID: Q5JTJ3
  ENSP ID: ENSP00000355572
MGPGGPLLSPSRGFLLCKTGWHSNRLLGDCGPHTPVSTALSFIAVGMAAPSMKERQVCWGARDEYWKCLDENLEDASQCKKLRSSFESSCPQQWIKYFDKRRDYLKFKEKFEAGQFEPSETTAKS

SEQ ID NO: 21800 - protein, 155 aa, Homo sapiens
  Payload ID: 4395
  Gene Symbol: COA6
  Gene Name: cytochrome c oxidase assembly factor 6
  ENSP ID: ENSP00000355574
MVARKGQKSPRFRRVSCFLRLGRSTLLELEPAGRPCSGRTRHRALHRRLVACVTVSSRRHRKEAGRGRAESFIAVGMAAPSMKERQVCWGARDEYWKCLDENLEDASQCKKLRSSFESSCPQQWIKYFDKRRDYLKFKEKFEAGQFEPSETTAKS

SEQ ID NO: 21801 - protein, 79 aa, Homo sapiens; identical to SEQ ID NO: 21798
  Payload ID: 4395
  Gene Symbol: COA6
  Gene Name: cytochrome c oxidase assembly factor 6
  Uniprot ID: Q5JTJ3
  ENSP ID: ENSP00000479686

SEQ ID NO: 21802 - protein, 231 aa, Homo sapiens
  Payload ID: 4396
  Gene Symbol: COA7
  Gene Name: cytochrome c oxidase assembly factor 7 (putative)
  Uniprot ID: Q96BR5
  ENSP ID: ENSP00000360593
MAGMVDFQDEEQVKSFLENMEVECNYHCYHEKDPDGCYRLVDYLEGIRKNFDEAAKVLKFNCEENQHSDSCYKLGAYYVTGKGGLTQDLKAAARCFLMACEKPGKKSIAACHNVGLLAHDGQVNEDGQPDLGKARDYYTRACDGGYTSSCFNLSAMFLQGAPGFPKDMDLACKYSMKACDLGHIWACANASRMYKLGDGVDKDEAKAEVLKNRAQQLHKEQQKGVQPLTFG

SEQ ID NO: 21803 - protein, 410 aa, Homo sapiens
  Payload ID: 4397
  Gene Symbol: COX15
  Gene Name: cytochrome c oxidase assembly homolog 15 (yeast)
  Uniprot ID: Q7KZN9
  ENSP ID: ENSP00000016171
MQRLLFPPLRALKGRQYLPLLAPRAAPRAQCDCIRRPLRPGQYSTISEVALQSGRGTVSLPSKAAERVVGRWLLVCSGTVAGAVILGGVTRLTESGLSMVDWHLIKEMKPPTSQEEWEAEFQRYQQFPEFKILNHDMTLTEFKFIWYMEYSHRMWGRLVGLVYILPAAYFWRKGWLSRGMKGRVLALCGLVCFQGLLGWYMVKSGLEEKSDSHDIPRVSQYRLAAHLGSALVLYCASLWTSLSLLLPPHKLPETHQLLQLRRFAHGTAGLVFLTALSGAFVAGLDAGLVYNSFPKMGESWIPEDLFTFSPILRNVFENPTMVQFDHRILGITSVTAITVLYFLSRRIPLPRRTKMAAVTLLALAYTQVGLGISTLLMYVPTPLAATHQSGSLALLTGALWLMNELRRVPK

SEQ ID NO: 21804 - protein, 388 aa, Homo sapiens
  Payload ID: 4397
  Gene Symbol: COX15
  Gene Name: cytochrome c oxidase assembly homolog 15 (yeast)
  Uniprot ID: Q7KZN9
  ENSP ID: ENSP00000359514
MQRLLFPPLRALKGRQYLPLLAPRAAPRAQCDCIRRPLRPGQYSTISEVALQSGRGTVSLPSKAAERVVGRWLLVCSGTVAGAVILGGVTRLTESGLSMVDWHLIKEMKPPTSQEEWEAEFQRYQQFPEFKILNHDMTLTEFKFIWYMEYSHRMWGRLVGLVYILPAAYFWRKGWLSRGMKGRVLALCGLVCFQGLLGWYMVKSGLEEKSDSHDIPRVSQYRLAAHLGSALVLYCASLWTSLSLLLPPHKLPETHQLLQLRRFAHGTAGLVFLTALSGAFVAGLDAGLVYNSFPKMGESWIPEDLFTFSPILRNVFENPTMVQFDHRILGITSVTAITVLYFLSRRIPLPRRTKMAAVTLLALAYTQGPVLFNFTFKISDLDEGIRNI

SEQ ID NO: 21805 - protein, 169 aa, Homo sapiens
  Payload ID: 4398
  Gene Symbol: COX4I1
  Gene Name: cytochrome c oxidase subunit IV isoform 1
  Uniprot ID: P13073
  ENSP ID: ENSP00000253452
MLATRVFSLVGKRAISTSVCVRAHESVVKSEDFSLPAYMDRRDHPLPEVAHVKHLSASQKALKEKEKASWSSLSMDEKVELYRIKFKESFAEMNRGSNEWKTVVGGAMFFIGFTALVIMWQKHYVYGPLPQSFDKEWVAKQTKRMLDMKVNPIQGLASKWDYEKNEWKK

SEQ ID NO: 21806 - protein, 126 aa, Homo sapiens
  Payload ID: 4398
  Gene Symbol: COX4I1
  Gene Name: cytochrome c oxidase subunit IV isoform 1
  ENSP ID: ENSP00000454714
MLATRVFSLVGKRAISTSVCVRAHESVVKSEDFSLPAYMDRRDHPLPEVAHVKHLSASQKALKEKEKASWSSLSMDEKVELYRIKFKESFAEMNRGSNEWKTVVGGAMFFIGFTALVIMWQKHYGE

SEQ ID NO: 21807 - protein, 43 aa, Homo sapiens
  Payload ID: 4398
  Gene Symbol: COX4I1
  Gene Name: cytochrome c oxidase subunit IV isoform 1
  ENSP ID: ENSP00000454869
MLATRVFSLVGKRAISTSVCVRAHESVVKSEDFSLPAYMDRRD

SEQ ID NO: 21808 - protein, 139 aa, Homo sapiens
  Payload ID: 4398
  Gene Symbol: COX4I1
  Gene Name: cytochrome c oxidase subunit IV isoform 1
  ENSP ID: ENSP00000455030
MLATRVFSLVGKRAISTSVCVRAHESVVKSEDFSLPAYMDRRDHPLPEVAHVKHLSASQKALKEKEKASWSSLSMDEKVELYRIKFKESFAEMNRGSNEWKTVVGGAMFFIGFTALVIMWQKHYGHLGLCLSDPVIHSL

SEQ ID NO: 21809 - protein, 108 aa, Homo sapiens
  Payload ID: 4398
  Gene Symbol: COX4I1
  Gene Name: cytochrome c oxidase subunit IV isoform 1
  ENSP ID: ENSP00000455301
MDRRDHPLPEVAHVKHLSASQKALKEKEKASWSSLSMDEKVELYRIKFKESFAEMNRGSNEWKTVVGGAMFFIGFTALVIMWQKHYVYGPLPQSFDKEWVAKQTKRML

SEQ ID NO: 21810 - protein, 42 aa, Homo sapiens
  Payload ID: 4398
  Gene Symbol: COX4I1
  Gene Name: cytochrome c oxidase subunit IV isoform 1
  ENSP ID: ENSP00000455437
MLATRVFSLVGKRAISTSVCVRAHVETGFHHVSQDGLDLLTS

SEQ ID NO: 21811 - protein, 83 aa, Homo sapiens
  Payload ID: 4398
  Gene Symbol: COX4I1
  Gene Name: cytochrome c oxidase subunit IV isoform 1
  ENSP ID: ENSP00000456452
MLATRVFSLVGKRAISTSVCVRAHESVVKSEDFSLPAYMDRRDHPLPEVAHVKHLSASQKALKEKEKASWSSLSMDEKVECGY

SEQ ID NO: 21812 - protein, 169 aa, Homo sapiens; identical to SEQ ID NO: 21805
  Payload ID: 4398
  Gene Symbol: COX4I1
  Gene Name: cytochrome c oxidase subunit IV isoform 1
  Uniprot ID: P13073
  ENSP ID: ENSP00000457015

SEQ ID NO: 21813 - protein, 169 aa, Homo sapiens; identical to SEQ ID NO: 21805
  Payload ID: 4398
  Gene Symbol: COX4I1
  Gene Name: cytochrome c oxidase subunit IV isoform 1
  Uniprot ID: P13073
  ENSP ID: ENSP00000457513

SEQ ID NO: 21814 - protein, 171 aa, Homo sapiens
  Payload ID: 4399
  Gene Symbol: COX4I2
  Gene Name: cytochrome c oxidase subunit IV isoform 2 (lung)
  Uniprot ID: Q96KJ9
  ENSP ID: ENSP00000365243
MLPRAAWSLVLRKGGGGRRGMHSSEGTTRGGGKMSPYTNCYAQRYYPMPEEPFCTELNAEEQALKEKEKGSWTQLTHAEKVALYRLQFNETFAEMNRRSNEWKTVMGCVFFFIGFAALVIWWQRVYVFPPKPITLTDERKAQQLQRMLDMKVNPVQGLASRWDYEKKQWKK

SEQ ID NO: 21815 - protein, 150 aa, Homo sapiens
  Payload ID: 4400
  Gene Symbol: COX5A
  Gene Name: cytochrome c oxidase subunit Va
  Uniprot ID: P20674
  ENSP ID: ENSP00000317780
MLGAALRRCAVAATTRADPRGLLHSARTPGPAVAIQSVRCYSHGSQETDEEFDARWVTYFNKPDIDAWELRKGINTLVTYDMVPEPKIIDAALRACRRLNDFASTVRILEVVKDKAGPHKEIYPYVIQELRPTLNELGISTPEELGLDKV

SEQ ID NO: 21816 - protein, 153 aa, Homo sapiens
  Payload ID: 4400
  Gene Symbol: COX5A
  Gene Name: cytochrome c oxidase subunit Va
  ENSP ID: ENSP00000455053
MLGAALRRCAVAATTRADPRGLLHSARTPGPAVAIQSVRCYSHGSQETDEEFDARWVTYFNKPDIDAWELRKGINTLVTYDMVPEPKIIDAALRACRRLNDFASTVRILEVVKMGFPKDLLTLLLECEQLPGNTDDNILPYLNKFSFIEYQAM

SEQ ID NO: 21817 - protein, 84 aa, Homo sapiens
  Payload ID: 4400
  Gene Symbol: COX5A
  Gene Name: cytochrome c oxidase subunit Va
  ENSP ID: ENSP00000456253
MLGAALRRCAVAATTRADPRGLLHSARTPGPAVAIQSVRCYSHGSQETDEEFDARWVTYFNKPDIDAWELRKDGLPQGFIDIAT

SEQ ID NO: 21818 - protein, 69 aa, Homo sapiens
  Payload ID: 4400
  Gene Symbol: COX5A
  Gene Name: cytochrome c oxidase subunit Va
  ENSP ID: ENSP00000456314
MVPEPKIIDAALRACRRLNDFASTVRILEVVKDKAGPHKEIYPYVIQELRPTLNELGISTPEELGLDKV

SEQ ID NO: 21819 - protein, 150 aa, Homo sapiens; identical to SEQ ID NO: 21815
  Payload ID: 4400
  Gene Symbol: COX5A
  Gene Name: cytochrome c oxidase subunit Va
  Uniprot ID: P20674
  ENSP ID: ENSP00000456386

SEQ ID NO: 21820 - protein, 111 aa, Homo sapiens
  Payload ID: 4400
  Gene Symbol: COX5A
  Gene Name: cytochrome c oxidase subunit Va
  ENSP ID: ENSP00000457974
MLGAALRRCAVAATTRADPRGLLHSARTPGPAVGINTLVTYDMVPEPKIIDAALRACRRLNDFASTVRILEVVKDKAGPHKEIYPYVIQELRPTLNELGISTPEELGLDKV

SEQ ID NO: 21821 - protein, 129 aa, Homo sapiens
  Payload ID: 4401
  Gene Symbol: COX5B
  Gene Name: cytochrome c oxidase subunit Vb
  Uniprot ID: P10606
  ENSP ID: ENSP00000258424
MASRLLRGAGTLAAQALRARGPSGAAAMRSMASGGGVPTDEEQATGLEREIMLAAKKGLDPYNVLAPKGASGTREDPNLVPSISNKRIVGCICEEDNTSVVWFWLHKGEAQRCPRCGAHYKLVPQQLAH

SEQ ID NO: 21822 - protein, 109 aa, Homo sapiens
  Payload ID: 4402
  Gene Symbol: COX6A1
  Gene Name: cytochrome c oxidase subunit VIa polypeptide 1
  Uniprot ID: P12074
  ENSP ID: ENSP00000229379
MAVVGVSSVSRLLGRSRPQLGRPMSSGAHGEEGSARMWKTLTFFVALPGVAVSMLNVYLKSHHGEHERPEFIAYPHLRIRTKPFPWGDGNHTLFHNPHVNPLPTGYEDE

SEQ ID NO: 21823 - protein, 97 aa, Homo sapiens
  Payload ID: 4403
  Gene Symbol: COX6A2
  Gene Name: cytochrome c oxidase subunit VIa polypeptide 2
  Uniprot ID: Q02221
  ENSP ID: ENSP00000287490
MALPLRPLTRGLASAAKGGHGGAGARTWRLLTFVLALPSVALCTFNSYLHSGHRPRPEFRPYQHLRIRTKPYPWGDGNHTLFHNSHVNPLPTGYEHP

SEQ ID NO: 21824 - protein, 86 aa, Homo sapiens
  Payload ID: 4404
  Gene Symbol: COX6B1
  Gene Name: cytochrome c oxidase subunit VIb polypeptide 1 (ubiquitous)
  Uniprot ID: P14854
  ENSP ID: ENSP00000246554
MAEDMETKIKNYKTAPFDSRFPNQNQTRNCWQNYLDFHRCQKAMTAKGGDISVCEWYQRVYQSLCPTSWVTDWDEQRAEGTFPGKI

SEQ ID NO: 21825 - protein, 86 aa, Homo sapiens; identical to SEQ ID NO: 21824
  Payload ID: 4404
  Gene Symbol: COX6B1
  Gene Name: cytochrome c oxidase subunit VIb polypeptide 1 (ubiquitous)
  Uniprot ID: P14854
  ENSP ID: ENSP00000376037

SEQ ID NO: 21826 - protein, 86 aa, Homo sapiens; identical to SEQ ID NO: 21824
  Payload ID: 4404
  Gene Symbol: COX6B1
  Gene Name: cytochrome c oxidase subunit VIb polypeptide 1 (ubiquitous)
  Uniprot ID: P14854
  ENSP ID: ENSP00000466818

SEQ ID NO: 21827 - protein, 40 aa, Homo sapiens
  Payload ID: 4404
  Gene Symbol: COX6B1
  Gene Name: cytochrome c oxidase subunit VIb polypeptide 1 (ubiquitous)
  ENSP ID: ENSP00000467776
  MOD_RES (1)..(1): Any amino acid
XAEDMETKIKNYKTAPFDSRFPNQNQTRNCWQNYLGHRLG

SEQ ID NO: 21828 - protein, 88 aa, Homo sapiens
  Payload ID: 4405
  Gene Symbol: COX6B2
  Gene Name: cytochrome c oxidase subunit VIb polypeptide 2 (testis)
  Uniprot ID: Q6YFQ2
  ENSP ID: ENSP00000320672
MLDVEAQEPPKGKWSTPPFDPRFPSQNQIRNCYQNFLDYHRCLKTRTRRGKSTQPCEYYFRVYHSLCPISWVESWNEQIKNGIFAGKI

SEQ ID NO: 21829 - protein, 88 aa, Homo sapiens; identical to SEQ ID NO: 21828
  Payload ID: 4405
  Gene Symbol: COX6B2
  Gene Name: cytochrome c oxidase subunit VIb polypeptide 2 (testis)
  Uniprot ID: Q6YFQ2
  ENSP ID: ENSP00000467128

SEQ ID NO: 21830 - protein, 88 aa, Homo sapiens; identical to SEQ ID NO: 21828
  Payload ID: 4405
  Gene Symbol: COX6B2
  Gene Name: cytochrome c oxidase subunit VIb polypeptide 2 (testis)
  Uniprot ID: Q6YFQ2
  ENSP ID: ENSP00000467266

SEQ ID NO: 21831 - protein, 88 aa, Homo sapiens; identical to SEQ ID NO: 21828
  Payload ID: 4405
  Gene Symbol: COX6B2
  Gene Name: cytochrome c oxidase subunit VIb polypeptide 2 (testis)
  Uniprot ID: Q6YFQ2
  ENSP ID: ENSP00000467959

SEQ ID NO: 21832 - protein, 88 aa, Homo sapiens; identical to SEQ ID NO: 21828
  Payload ID: 4405
  Gene Symbol: COX6B2
  Gene Name: cytochrome c oxidase subunit VIb polypeptide 2 (testis)
  Uniprot ID: Q6YFQ2
  ENSP ID: ENSP00000476768

SEQ ID NO: 21833 - protein, 75 aa, Homo sapiens
  Payload ID: 4406
  Gene Symbol: COX6C
  Gene Name: cytochrome c oxidase subunit VIc
  Uniprot ID: P09669
  ENSP ID: ENSP00000297564
MAPEVLPKPRMRGLLARRLRNHMAVAFVLSLGVAALYKFRVADQRKKAYADFYRNYDVMKDFEEMRKAGIFQSVK

SEQ ID NO: 21834 - protein, 75 aa, Homo sapiens; identical to SEQ ID NO: 21833
  Payload ID: 4406
  Gene Symbol: COX6C
  Gene Name: cytochrome c oxidase subunit VIc
  Uniprot ID: P09669
  ENSP ID: ENSP00000428150

SEQ ID NO: 21835 - protein, 75 aa, Homo sapiens; identical to SEQ ID NO: 21833
  Payload ID: 4406
  Gene Symbol: COX6C
  Gene Name: cytochrome c oxidase subunit VIc
  Uniprot ID: P09669
  ENSP ID: ENSP00000428702

SEQ ID NO: 21836 - protein, 75 aa, Homo sapiens; identical to SEQ ID NO: 21833
  Payload ID: 4406
  Gene Symbol: COX6C
  Gene Name: cytochrome c oxidase subunit VIc
  Uniprot ID: P09669
  ENSP ID: ENSP00000428895

SEQ ID NO: 21837 - protein, 75 aa, Homo sapiens; identical to SEQ ID NO: 21833
  Payload ID: 4406
  Gene Symbol: COX6C
  Gene Name: cytochrome c oxidase subunit VIc
  Uniprot ID: P09669
  ENSP ID: ENSP00000428965

SEQ ID NO: 21838 - protein, 75 aa, Homo sapiens; identical to SEQ ID NO: 21833
  Payload ID: 4406
  Gene Symbol: COX6C
  Gene Name: cytochrome c oxidase subunit VIc
  Uniprot ID: P09669
  ENSP ID: ENSP00000429410

SEQ ID NO: 21839 - protein, 75 aa, Homo sapiens; identical to SEQ ID NO: 21833
  Payload ID: 4406
  Gene Symbol: COX6C
  Gene Name: cytochrome c oxidase subunit VIc
  Uniprot ID: P09669
  ENSP ID: ENSP00000429707

SEQ ID NO: 21840 - protein, 75 aa, Homo sapiens; identical to SEQ ID NO: 21833
  Payload ID: 4406
  Gene Symbol: COX6C
  Gene Name: cytochrome c oxidase subunit VIc
  Uniprot ID: P09669
  ENSP ID: ENSP00000429714

SEQ ID NO: 21841 - protein, 75 aa, Homo sapiens; identical to SEQ ID NO: 21833
  Payload ID: 4406
  Gene Symbol: COX6C
  Gene Name: cytochrome c oxidase subunit VIc
  Uniprot ID: P09669
  ENSP ID: ENSP00000429755

SEQ ID NO: 21842 - protein, 75 aa, Homo sapiens; identical to SEQ ID NO: 21833
  Payload ID: 4406
  Gene Symbol: COX6C
  Gene Name: cytochrome c oxidase subunit VIc
  Uniprot ID: P09669
  ENSP ID: ENSP00000429991

SEQ ID NO: 21843 - protein, 79 aa, Homo sapiens
  Payload ID: 4407
  Gene Symbol: COX7A1
  Gene Name: cytochrome c oxidase subunit VIIa polypeptide 1 (muscle)
  Uniprot ID: P24310
  ENSP ID: ENSP00000292907
MQALRVSQALIRSFSSTARNRFQNRVREKQKLFQEDNDIPLYLKGGIVDNILYRVTMTLCLGGTVYSLYSLGWASFPRN

SEQ ID NO: 21844 - protein, 60 aa, Homo sapiens
  Payload ID: 4407
  Gene Symbol: COX7A1
  Gene Name: cytochrome c oxidase subunit VIIa polypeptide 1 (muscle)
  ENSP ID: ENSP00000468063
MQALRVSQALIRSFSSTARNRFQNREDNDIPLYLKGGIVDNILYRVTMTLCLGGTVYSLY

SEQ ID NO: 21845 - protein, 23 aa, Homo sapiens
  Payload ID: 4407
  Gene Symbol: COX7A1
  Gene Name: cytochrome c oxidase subunit VIIa polypeptide 1 (muscle)
  ENSP ID: ENSP00000475885
MTLCLGGTVYSLYSLGWASFPRN

SEQ ID NO: 21846 - protein, 115 aa, Homo sapiens
  Payload ID: 4408
  Gene Symbol: COX7A2
  Gene Name: cytochrome c oxidase subunit VIIa polypeptide 2 (liver)
  ENSP ID: ENSP00000359098
MHTQDSEVVPVPAWPFSLVVFSCGGCWSVTAKMLRNLLALRQIGQRTISTASRRHFKNKVPEKQKLFQEDDEIPLYLKGGVADALLYRATMILTVGGTAYAIYELAVASFPKKQE

SEQ ID NO: 21847 - protein, 115 aa, Homo sapiens; identical to SEQ ID NO: 21846
  Payload ID: 4408
  Gene Symbol: COX7A2
  Gene Name: cytochrome c oxidase subunit VIIa polypeptide 2 (liver)
  ENSP ID: ENSP00000359106

SEQ ID NO: 21848 - protein, 103 aa, Homo sapiens
  Payload ID: 4408
  Gene Symbol: COX7A2
  Gene Name: cytochrome c oxidase subunit VIIa polypeptide 2 (liver)
  ENSP ID: ENSP00000421193
MLRNLLFHTCCPGWSAMARSQLTATSASQVQAILLPQPPKYLGLQALRQIGQRTISTASRRHFKNKVPEKQKLFQEDDEIPLYLKGGVADALLYRATMILTVG

SEQ ID NO: 21849 - protein, 67 aa, Homo sapiens
  Payload ID: 4408
  Gene Symbol: COX7A2
  Gene Name: cytochrome c oxidase subunit VIIa polypeptide 2 (liver)
  ENSP ID: ENSP00000421969
  MOD_RES (1)..(1): Any amino acid
XFSLVVFSCGGCWSVTAKMLRNLLALRQIGQRTISTASRRHFKNKVPEKQKLFQVLKYFIGDVTCNY

SEQ ID NO: 21850 - protein, 53 aa, Homo sapiens
  Payload ID: 4408
  Gene Symbol: COX7A2
  Gene Name: cytochrome c oxidase subunit VIIa polypeptide 2 (liver)
  ENSP ID: ENSP00000422979
MLRNLLEDDEIPLYLKGGVADALLYRATMILTVGGTAYAIYELAVASFPKKQE

SEQ ID NO: 21851 - protein, 76 aa, Homo sapiens
  Payload ID: 4408
  Gene Symbol: COX7A2
  Gene Name: cytochrome c oxidase subunit VIIa polypeptide 2 (liver)
  ENSP ID: ENSP00000423432
MLRNLLALRQIGQRTISTASRRHFKNKVPEKQKLFQEQHMPYMSWLWLHFPRSRSDFSHPSNRLVQFHSALYGPVI

SEQ ID NO: 21852 - protein, 91 aa, Homo sapiens
  Payload ID: 4408
  Gene Symbol: COX7A2
  Gene Name: cytochrome c oxidase subunit VIIa polypeptide 2 (liver)
  ENSP ID: ENSP00000425951
MLRNLLALRQIGQRTISTASRRHFKNKVPEKQKLFQEDDEIPLYLKGGVADALLYRATMILTVGGKAFGMFEGTAYAIYELAVASFPKKQE

SEQ ID NO: 21853 - protein, 114 aa, Homo sapiens
  Payload ID: 4409
  Gene Symbol: COX7A2L
  Gene Name: cytochrome c oxidase subunit VIIa polypeptide 2 like
  Uniprot ID: O14548
  ENSP ID: ENSP00000234301
MYYKFSGFTQKLAGAWASEAYSPQGLKPVVSTEAPPIIFATPTKLTSDSTVYDYAGKNKVPELQKFFQKADGVPVYLKRGLPDQMLYRTTMALTVGGTIYCLIALYMASQPKNK

SEQ ID NO: 21854 - protein, 114 aa, Homo sapiens; identical to SEQ ID NO: 21853
  Payload ID: 4409
  Gene Symbol: COX7A2L
  Gene Name: cytochrome c oxidase subunit VIIa polypeptide 2 like
  Uniprot ID: O14548
  ENSP ID: ENSP00000367938

SEQ ID NO: 21855 - protein, 39 aa, Homo sapiens
  Payload ID: 4409
  Gene Symbol: COX7A2L
  Gene Name: cytochrome c oxidase subunit VIIa polypeptide 2 like
  ENSP ID: ENSP00000428873
MYYKFSGFTQKLAGAWASEAYSPQVRVAPGQLGHEKWRP

SEQ ID NO: 21856 - protein, 95 aa, Homo sapiens
  Payload ID: 4409
  Gene Symbol: COX7A2L
  Gene Name: cytochrome c oxidase subunit VIIa polypeptide 2 like
  ENSP ID: ENSP00000429237
FSGFTQKLAGAWASEAYSPQGLKPVVSTEAPPIIFATPTKLTSDSTVYDYAGKNKVPELQKFFQETYLQTILFLWLLETPVVGILDKGTFPAGLQ

SEQ ID NO: 21857 - protein, 79 aa, Homo sapiens
  Payload ID: 4409
  Gene Symbol: COX7A2L
  Gene Name: cytochrome c oxidase subunit VIIa polypeptide 2 like
  ENSP ID: ENSP00000431039
MYYKFSGFTQKLAGAWASEAYSPQGLKPVVSTEAPPIIFATPTKLTSDSTVYDYAGKNKVPELQKFFQVREDTLQQKSL

SEQ ID NO: 21858 - protein, 80 aa, Homo sapiens
  Payload ID: 4410
  Gene Symbol: COX7B
  Gene Name: cytochrome c oxidase subunit VIIb
  Uniprot ID: P24311
  ENSP ID: ENSP00000417656
MFPLVKSALNRLQVRSIQQTMARQSHQKRTPDFHDKYGNAVLASGATFCIVTWTYVATQVGIEWNLSPVGRVTPKEWRNQ

SEQ ID NO: 21859 - protein, 81 aa, Homo sapiens
  Payload ID: 4411
  Gene Symbol: COX7B2
  Gene Name: cytochrome c oxidase subunit VIIb2
  Uniprot ID: Q8TF08
  ENSP ID: ENSP00000347799
MMFPLARNALSSLKIQSILQSMARHSHVKHSPDFHDKYGNAVLASGTAFCVATWVFTATQIGIEWNLSPVGRVTPKEWKHQ

SEQ ID NO: 21860 - protein, 81 aa, Homo sapiens; identical to SEQ ID NO: 21859
  Payload ID: 4411
  Gene Symbol: COX7B2
  Gene Name: cytochrome c oxidase subunit VIIb2
  Uniprot ID: Q8TF08
  ENSP ID: ENSP00000379784

SEQ ID NO: 21861 - protein, 32 aa, Homo sapiens
  Payload ID: 4411
  Gene Symbol: COX7B2
  Gene Name: cytochrome c oxidase subunit VIIb2
  ENSP ID: ENSP00000423519
MMFPLARNALSSLKIQSILQSMARHSHVKHSP

SEQ ID NO: 21862 - protein, 80 aa, Homo sapiens
  Payload ID: 4411
  Gene Symbol: COX7B2
  Gene Name: cytochrome c oxidase subunit VIIb2
  ENSP ID: ENSP00000437439
MFPLARNALSSLKIQSILQSMARHSHVKHSPDFHDKYGNAVLASGTAFCVATWVFTATQIGIEWNLSPVGRVTPKEWKHQ

SEQ ID NO: 21863 - protein, 63 aa, Homo sapiens
  Payload ID: 4412
  Gene Symbol: COX7C
  Gene Name: cytochrome c oxidase subunit VIIc
  Uniprot ID: P15954
  ENSP ID: ENSP00000247655
MLGQSIRRFTTSVVRRSHYEEGPGKNLPFSVENKWSLLAKMCLYFGSAFATPFLVVRHQLLKT

SEQ ID NO: 21864 - protein, 56 aa, Homo sapiens
  Payload ID: 4412
  Gene Symbol: COX7C
  Gene Name: cytochrome c oxidase subunit VIIc
  ENSP ID: ENSP00000422012
MLGQSIRRFTTSVVRRSHYEEGPGKNLPFSVENKWSLLAKMCLYFGSAFATPFLVI

SEQ ID NO: 21865 - protein, 63 aa, Homo sapiens; identical to SEQ ID NO: 21863
  Payload ID: 4412
  Gene Symbol: COX7C
  Gene Name: cytochrome c oxidase subunit VIIc
  Uniprot ID: P15954
  ENSP ID: ENSP00000425759

SEQ ID NO: 21866 - protein, 69 aa, Homo sapiens
  Payload ID: 4413
  Gene Symbol: COX8A
  Gene Name: cytochrome c oxidase subunit VIIIA (ubiquitous)
  Uniprot ID: P10176
  ENSP ID: ENSP00000321260
MSVLTPLLLRGLTGSARRLPVPRAKIHSLPPEGKLGIMELAVGLTSCFVTFLLPAGWILSHLETYRRPE

SEQ ID NO: 21867 - protein, 72 aa, Homo sapiens
  Payload ID: 4414
  Gene Symbol: COX8C
  Gene Name: cytochrome c oxidase subunit VIIIC
  Uniprot ID: Q7Z4L0
  ENSP ID: ENSP00000340568
MPLLRGRCPARRHYRRLALLGLQPAPRFAHSGPPRQRPLSAAEMAVGLVVFFTTFLTPAAYVLGNLKQFRRN

SEQ ID NO: 21868 - protein, 72 aa, Homo sapiens; identical to SEQ ID NO: 21867
  Payload ID: 4414
  Gene Symbol: COX8C
  Gene Name: cytochrome c oxidase subunit VIIIC
  Uniprot ID: Q7Z4L0
  ENSP ID: ENSP00000480706

SEQ ID NO: 21869 - protein, 105 aa, Homo sapiens
  Payload ID: 4415
  Gene Symbol: CYCS
  Gene Name: cytochrome c, somatic
  Uniprot ID: P99999
  ENSP ID: ENSP00000307786
MGDVEKGKKIFIMKCSQCHTVEKGGKHKTGPNLHGLFGRKTGQAPGYSYTAANKNKGIIWGEDTLMEYLENPKKYIPGTKMIFVGIKKKEERADLIAYLKKATNE

SEQ ID NO: 21870 - protein, 105 aa, Homo sapiens; identical to SEQ ID NO: 21869
  Payload ID: 4415
  Gene Symbol: CYCS
  Gene Name: cytochrome c, somatic
  Uniprot ID: P99999
  ENSP ID: ENSP00000386270

SEQ ID NO: 21871 - protein, 105 aa, Homo sapiens; identical to SEQ ID NO: 21869
  Payload ID: 4415
  Gene Symbol: CYCS
  Gene Name: cytochrome c, somatic
  Uniprot ID: P99999
  ENSP ID: ENSP00000387279

SEQ ID NO: 21872 - protein, 101 aa, Homo sapiens
  Payload ID: 4415
  Gene Symbol: CYCS
  Gene Name: cytochrome c, somatic
  ENSP ID: ENSP00000416479
MGDVEKGKKIFIMKCSQCHTVEKGGKHKTGPNLHGLFGRKTGQAPGYSYTAANKNKGIIWGEDTLMEYLENPKKYIPGTKMIFVGIKKKEERADLIAYLKK

SEQ ID NO: 21873 - protein, 325 aa, Homo sapiens
  Payload ID: 4416
  Gene Symbol: CYC1
  Gene Name: cytochrome c-1
  Uniprot ID: P08574
  ENSP ID: ENSP00000317159
MAAAAASLRGVVLGPRGAGLPGARARGLLCSARPGQLPLRTPQAVALSSKSGLSRGRKVMLSALGMLAAGGAGLAMALHSAVSASDLELHPPSYPWSHRGLLSSLDHTSIRRGFQVYKQVCASCHSMDFVAYRHLVGVCYTEDEAKELAAEVEVQDGPNEDGEMFMRPGKLFDYFPKPYPNSEAARAANNGALPPDLSYIVRARHGGEDYVFSLLTGYCEPPTGVSLREGLYFNPYFPGQAIAMAPPIYTDVLEFDDGTPATMSQIAKDVCTFLRWASEPEHDHRKRMGLKMLMMMALLVPLVYTIKRHKWSVLKSRKLAYRPPK

SEQ ID NO: 21874 - protein, 512 aa, Homo sapiens [sequence omitted]

SEQ ID NO: 21875 - protein, 512 aa, Homo sapiens [sequence omitted]

SEQ ID NO: 21876 - protein, 483 aa, Homo sapiens
  Payload ID: 4417
  Gene Symbol: CYP1A1
  Gene Name: cytochrome P450, family 1, subfamily A, polypeptide 1
  ENSP ID: ENSP00000378489
MLFPISMSATEFLLASVIFCLVFWVIRASRPQVPKGLKNPPGPWGWPLIGHMLTLGKNPHLALSRMSQQYGDVLQIRIGSTPVVVLSGLDTIRQALVRQGDDFKGRPDLYTFTLISNGQSMSFSPDSGPVWAARRRLAQNGLKSFSIASDPASSTSCYLEEHVSKEAEVLISTLQELMAGPGHFNPYRYVVVSVTNVICAICFGRRYDHNHQELLSLVNLNNNFGEVVGSGNPADFIPILRYLPNPSLNAFKDLNEKFYSFMQKMVKEHYKTFEKGHIRDITDSLIEHCQEKQLDENANVQLSDEKIINIVLDLFGAGFDTVTTAISWSLMYLVMNPRVQRKIQEELDTVIGRSRRPRLSDRSHLPYMEAFILETFRHSSFVPFTIPHRKLWVNPSEFLPERFLTPDGAIDKVLSEKVIIFGMGKRKCIGETIARWEVFLFLAILLQRVEFSVPLGVKVDMTPIYGLTMKHACCEHFQMQLRS

SEQ ID NO: 21877 - protein, 189 aa, Homo sapiens
  Payload ID: 4417
  Gene Symbol: CYP1A1
  Gene Name: cytochrome P450, family 1, subfamily A, polypeptide 1
  Uniprot ID: P04798
  ENSP ID: ENSP00000455051
MLFPISMSATEFLLASVIFCLVFWVIRASRPQVPKGLKNPPGPWGWPLIGHMLTLGKNPHLALSRMSQQYGDVLQIRIGSTPVVVLSGLDTIRQALVRQGDDFKGRPDLYTFTLISNGQSMSFSPDSGPVWAARRRLAQNGLKSFSIASDPASSTSCYLEEHVSKEAEVLISTLQELMAGPGHFNPYRT

SEQ ID NO: 21878 - protein, 189 aa, Homo sapiens; identical to SEQ ID NO: 21877
  Payload ID: 4417
  Gene Symbol: CYP1A1
  Gene Name: cytochrome P450, family 1, subfamily A, polypeptide 1
  Uniprot ID: P04798
  ENSP ID: ENSP00000455340

SEQ ID NO: 21879 - protein, 175 aa, Homo sapiens
  Payload ID: 4417
  Gene Symbol: CYP1A1
  Gene Name: cytochrome P450, family 1, subfamily A, polypeptide 1
  ENSP ID: ENSP00000455846
MQKMVKEHYKTFEKGHIRDITDSLIEHCQEKQLDENANVQLSDEKIINIVLDLFGAGFDTVTTAISWSLMYLVMNPRVQRKIQEELDTVIGRSRRPRLSDRSHLPYMEAFILETFRHSSFVPFTIPHSTTRDTSLKGFYIPKGRCVFVNQWQINHDQKLWVNPSEFLPERFLTPD

SEQ ID NO: 21880 - protein, 512 aa, Homo sapiens [sequence omitted]

SEQ ID NO: 21881 - protein, 157 aa, Homo sapiens
  Payload ID: 4417
  Gene Symbol: CYP1A1
  Gene Name: cytochrome P450, family 1, subfamily A, polypeptide 1
  Uniprot ID: P04798
  ENSP ID: ENSP00000457668
MQKMVKEHYKTFEKGHIRDITDSLIEHCQEKQLDENANVQLSDEKIINIVLDLFGAGFDTVTTAISWSLMYLVMNPRVQRKIQEELDTVIGRSRRPRLSDRSHLPYMEAFILETFRHSSFVPFTIPHSTTRDTSLKGFYIPKGRCVFVNQWQINHDQ

SEQ ID NO: 21882 - protein, 484 aa, Homo sapiens
  Payload ID: 4417
  Gene Symbol: CYP1A1
  Gene Name: cytochrome P450, family 1, subfamily A, polypeptide 1
  ENSP ID: ENSP00000479744
MLFPISMSATEFLLASVIFCLVFWVIRASRPQVPKGLKNPPGPWGWPLIGHMLTLGKNPHLALSRMSQQYGDVLQIRIGSTPVVVLSGLDTIRQALVRQGDDFKGRPDLYTFTLISNGQSMSFSPDSGPVWAARRRLAQNGLKSFSIASDPASSTSCYLEEHVSKEAEVLISTLQELMAGPGHFNPYRYVVVSVTNVICAICFGRRYDHNHQELLSLVNLNAFKDLNEKFYSFMQKMVKEHYKTFEKGHIRDITDSLIEHCQEKQLDENANVQLSDEKIINIVLDLFGAGFDTVTTAISWSLMYLVMNPRVQRKIQEELDTVIGRSRRPRLSDRSHLPYMEAFILETFRHSSFVPFTIPHSTTRDTSLKGFYIPKGRCVFVNQWQINHDQKLWVNPSEFLPERFLTPDGAIDKVLSEKVIIFGMGKRKCIGETIARWEVFLFLAILLQRVEFSVPLGVKVDMTPIYGLTMKHACCEHFQMQLRS

SEQ ID NO: 21883 - protein, 483 aa, Homo sapiens; identical to SEQ ID NO: 21876
  Payload ID: 4417
  Gene Symbol: CYP1A1
  Gene Name: cytochrome P450, family 1, subfamily A, polypeptide 1
  ENSP ID: ENSP00000482863

SEQ ID NO: 21884 - protein, 516 aa, Homo sapiens
  Payload ID: 4418
  Gene Symbol: CYP1A2
  Gene Name: cytochrome P450, family 1, subfamily A, polypeptide 2
  Uniprot ID: P05177
  ENSP ID: ENSP00000342007
MALSQSVPFSATELLLASAIFCLVFWVLKGLRPRVPKGLKSPPEPWGWPLLGHVLTLGKNPHLALSRMSQRYGDVLQIRIGSTPVLVLSRLDTIRQALVRQGDDFKGRPDLYTSTLITDGQSLTFSTDSGPVWAARRRLAQNALNTFSIASDPASSSSCYLEEHVSKEAKALISRLQELMAGPGHFDPYNQVVVSVANVIGAMCFGQHFPESSDEMLSLVKNTHEFVETASSGNPLDFFPILRYLPNPALQRFKAFNQRFLWFLQKTVQEHYQDFDKNSVRDITGALFKHSKKGPRASGNLIPQEKIVNLVNDIFGAGFDTVTTAISWSLMYLVTKPEIQRKIQKELDTVIGRERRPRLSDRPQLPYLEAFILETFRHSSFLPFTIPHSTTRDTTLNGFYIPKKCCVFVNQWQVNHDPELWEDPSEFRPERFLTADGTAINKPLSEKMMLFGMGKRRCIGEVLAKWEIFLFLAILLQQLEFSVPPGVKVDLTPIYGLTMKHARCEHVQARLRFSIN

SEQ ID NO: 21885 - protein, 543 aa, Homo sapiens
  Payload ID: 4419
  Gene Symbol: CYP1B1
  Gene Name: cytochrome P450, family 1, subfamily B, polypeptide 1
  Uniprot ID: Q16678
  ENSP ID: ENSP00000478561
MGTSLSPNDPWPLNPLSIQQTTLLLLLSVLATVHVGQRLLRQRRRQLRSAPPGPFAWPLIGNAAAVGQAAHLSFARLARRYGDVFQIRLGSCPIVVLNGERAIHQALVQQGSAFADRPAFASFRVVSGGRSMAFGHYSEHWKVQRRAAHSMMRNFFTRQPRSRQVLEGHVLSEARELVALLVRGSADGAFLDPRPLTVVAVANVMSAVCFGCRYSHDDPEFRELLSHNEEFGRTVGAGSLVDVMPWLQYFPNPVRTVFREFEQLNRNFSNFILDKFLRHCESLRPGAAPRDMMDAFILSAEKKAAGDSHGGGARLDLENVPATITDIFGASQDTLSTALQWLLLLFTRYPDVQTRVQAELDQVVGRDRLPCMGDQPNLPYVLAFLYEAMRFSSFVPVTIPHATTANTSVLGYHIPKDTVVFVNQWSVNHDPLKWPNPENFDPARFLDKDGLINKDLTSRVMIFSVGKRRCIGEELSKMQLFLFISILAHQCDFRANPNEPAKMNFSYGLTIKPKSFKVNVTLRESMELLDSAVQNLQAKETCQ

SEQ ID NO: 21886 - protein, 143 aa, Homo sapiens
  Payload ID: 4419
  Gene Symbol: CYP1B1
  Gene Name: cytochrome P450, family 1, subfamily B, polypeptide 1
  ENSP ID: ENSP00000478839
MGTSLSPNDPWPLNPLSIQQTTLLLLLSVLATVHVGQRLLRQRRRQLRSAPPGPFAWPLIGNAAAVGQAAHLSFARLARRYGDVFQIRLGSCPIVVLNGERAIHQALVQQGSAFADRPAFASFRVVSGGRSMAFGHYSEHWKV

SEQ ID NO: 21887 - protein, 172 aa, Homo sapiens
  Payload ID: 4419
  Gene Symbol: CYP1B1
  Gene Name: cytochrome P450, family 1, subfamily B, polypeptide 1
  ENSP ID: ENSP00000479876
MGDQPNLPYVLAFLYEAMRFSSFVPVTIPHATTANTSVLGYHIPKDTVVFVNQWSVNHDPLKWPNPENFDPARFLDKDGLINKDLTSRVMIFSVGKRRCIGEELSKMQLFLFISILAHQCDFRANPNEPAKMNFSYGLTIKPKSFKVNVTLRESMELLDSAVQNLQAKETCQ

SEQ ID NO: 21888 - protein, 543 aa, Homo sapiens; identical to SEQ ID NO: 21885
  Payload ID: 4419
  Gene Symbol: CYP1B1
  Gene Name: cytochrome P450, family 1, subfamily B, polypeptide 1
  Uniprot ID: Q16678
  ENSP ID: ENSP00000483678

SEQ ID NO: 21889 - protein, 521 aa, Homo sapiens
  Payload ID: 4420
  Gene Symbol: CYP11A1
  Gene Name: cytochrome P450, family 11, subfamily A, polypeptide 1
  Uniprot ID: P05108
  ENSP ID: ENSP00000268053
MLAKGLPPRSVLVKGCQTFLSAPREGLGRLRVPTGEGAGISTRSPRPFNEIPSPGDNGWLNLYHFWRETGTHKVHLHHVQNFQKYGPIYREKLGNVESVYVIDPEDVALLFKSEGPNPERFLIPPWVAYHQYYQRPIGVLLKKSAAWKKDRVALNQEVMAPEATKNFLPLLDAVSRDFVSVLHRRIKKAGSGNYSGDISDDLFRFAFESITNVIFGERQGMLEEVVNPEAQRFIDAIYQMFHTSVPMLNLPPDLFRLFRTKTWKDHVAAWDVIFSKADIYTQNFYWELRQKGSVHHDYRGILYRLLGDSKMSFEDIKANVTEMLAGGVDTTSMTLQWHLYEMARNLKVQDMLRAEVLAARHQAQGDMATMLQLVPLLKASIKETLRLHPISVTLQRYLVNDLVLRDYMIPAKTLVQVAIYALGREPTFFFDPENFDPTRWLSKDKNITYFRNLGFGWGVRQCLGRRIAELEMTIFLINMLENFRVEIQHLSDVGTTFNLILMPEKPISFTFWPFNQEATQQ

SEQ ID NO: 21890 - protein, 363 aa, Homo sapiens
  Payload ID: 4420
  Gene Symbol: CYP11A1
  Gene Name: cytochrome P450, family 11, subfamily A, polypeptide 1
  Uniprot ID: P05108
  ENSP ID: ENSP00000351455
MAPEATKNFLPLLDAVSRDFVSVLHRRIKKAGSGNYSGDISDDLFRFAFESITNVIFGERQGMLEEVVNPEAQRFIDAIYQMFHTSVPMLNLPPDLFRLFRTKTWKDHVAAWDVIFSKADIYTQNFYWELRQKGSVHHDYRGILYRLLGDSKMSFEDIKANVTEMLAGGVDTTSMTLQWHLYEMARNLKVQDMLRAEVLAARHQAQGDMATMLQLVPLLKASIKETLRLHPISVTLQRYLVNDLVLRDYMIPAKTLVQVAIYALGREPTFFFDPENFDPTRWLSKDKNITYFRNLGFGWGVRQCLGRRIAELEMTIFLINMLENFRVEIQHLSDVGTTFNLILMPEKPISFTFWPFNQEATQQ

SEQ ID NO: 21891 - protein, 168 aa, Homo sapiens
  Payload ID: 4420
  Gene Symbol: CYP11A1
  Gene Name: cytochrome P450, family 11, subfamily A, polypeptide 1
  ENSP ID: ENSP00000388018
MLAKGLPPRSVLVKGCQTFLSAPREGLGRLRVPTGEGAGISTRSPRPFNEIPSPGDNGWLNLYHFWRETGTHKVHLHHVQNFQKYGPIYREKLGNVESVYVIDPEDVALLFKSEGPNPERFLIPPWVAYHQYYQRPIGVLLKPGVCDHEGLWAHVFSGSRQPGRKTGW

SEQ ID NO: 21892 - protein, 414 aa, Homo sapiens
  Payload ID: 4420
  Gene Symbol: CYP11A1
  Gene Name: cytochrome P450, family 11, subfamily A, polypeptide 1
  ENSP ID: ENSP00000391081
MLAKGLPPRSVLVKGCQTFLSAPREGLGRLRVPTGEGAGISTRSPRPFNEIPSPGDNGWLNLYHFWRETGTHKVHLHHVQNFQKYGPIYREKLGNVESVYVIDPEDVALLFKSEGPNPERFLIPPWVAYHQYYQRPIGVLLKKSAAWKKDRVALNQEVMAPEATKNFLPLLDAVSRDFVSVLHRRIKKAGSGNYSGDISDDLFRFAFESITNVIFGERQGMLEEVVNPEAQRFIDAIYQMFHTSVPMLNLPPDLFRLFRTKTWKDHVAAWDVIFSKADIYTQNFYWELRQKGSVHHDYRGILYRLLGDSKMSFEDIKANVTEMLAGGVDTTSMTLQWHLYEMARNLKVQDMLRAEVLAARHQAQGDMATMLQLVPLLKASIKETLRHWCKWPSMLWAESPPSSSTRKILTQPDG

SEQ ID NO: 21893 - protein, 96 aa, Homo sapiens
  Payload ID: 4420
  Gene Symbol: CYP11A1
  Gene Name: cytochrome P450, family 11, subfamily A, polypeptide 1
  ENSP ID: ENSP00000402064
MAPEATKNFLPLLDAVSRDFVSVLHRRIKKAGSGNYSGDISDDLFRFAFESITNVIFGERQGMLEEVVNPEAQRFIDAIYQMFHTSVPMLNLPPDL

SEQ ID NO: 21894 - protein, 26 aa, Homo sapiens
  Payload ID: 4420
  Gene Symbol: CYP11A1
  Gene Name: cytochrome P450, family 11, subfamily A, polypeptide 1
  ENSP ID: ENSP00000456598
MAPEATKNFLPLLDAVSRDFVSVLHR

SEQ ID NO: 21895 - protein, 227 aa, Homo sapiens
  Payload ID: 4420
  Gene Symbol: CYP11A1
  Gene Name: cytochrome P450, family 11, subfamily A, polypeptide 1
  ENSP ID: ENSP00000456941
MAPEATKNFLPLLDAVSRDFVSVLHRRIKKAGSGNYSGDISDDLFRFAFESITNVIFGERQGMLEEVVNPEAQRFIDAIYQMFHTSVPMLNLPPDLFRLFRTKTWKDHVAAWDVIFSKADIYTQNFYWELRQKGSVHHDYRGILYRLLGDSKMSFEDIKANVTEMLAGGVDTTSMTLQWHLYEMARNLKVQDMLRAEVLAARHQAQGDMATMLQLVPLLKASIKETL

SEQ ID NO: 21896 - protein, 503 aa, Homo sapiens
  Payload ID: 4421
  Gene Symbol: CYP11B1
  Gene Name: cytochrome P450, family 11, subfamily B, polypeptide 1
  Uniprot ID: P15538
  ENSP ID: ENSP00000292427
MALRAKAEVCMAVPWLSLQRAQALGTRAARVPRTVLPFEAMPRRPGNRWLRLLQIWREQGYEDLHLEVHQTFQELGPIFRYDLGGAGMVCVMLPEDVEKLQQVDSLHPHRMSLEPWVAYRQHRGHKCGVFLLNGPEWRFNRLRLNPEVLSPNAVQRFLPMVDAVARDFSQALKKKVLQNARGSLTLDVQPSIFHYTIEASNLALFGERLGLVGHSPSSASLNFLHALEVMFKSTVQLMFMPRSLSRWTSPKVWKEHFEAWDCIFQYGDNCIQKIYQELAFSRPQQYTSIVAELLLNAELSPDAIKANSMELTAGSVDTTVFPLLMTLFELARNPNVQQALRQESLAAAASISEHPQKATTELPLLRAALKETLRLYPVGLFLERVASSDLVLQNYHIPAGTLVRVFLYSLGRNPALFPRPERYNPQRWLDIRGSGRNFYHVPFGFGMRQCLGRRLAEAEMLLLLHHVLKHLQVETLTQEDIKMVYSFILRPSMFPLLTFRAIN

SEQ ID NO: 21897 - protein, 574 aa, Homo sapiens
  Payload ID: 4421
  Gene Symbol: CYP11B1
  Gene Name: cytochrome P450, family 11, subfamily B, polypeptide 1
  ENSP ID: ENSP00000366903
MALRAKAEVCMAVPWLSLQRAQALGTRAARVPRTVLPFEAMPRRPGNRWLRLLQIWREQGYEDLHLEVHQTFQELGPIFRSRHSASFGRWGRSAARAGLWRCQGRGWCRANPSSLQRGQDSEALKYDLGGAGMVCVMLPEDVEKLQQVDSLHPHRMSLEPWVAYRQHRGHKCGVFLLNVADRGNSSPPFPGGIHGAPTHSGCRNGPEWRFNRLRLNPEVLSPNAVQRFLPMVDAVARDFSQALKKKVLQNARGSLTLDVQPSIFHYTIEASNLALFGERLGLVGHSPSSASLNFLHALEVMFKSTVQLMFMPRSLSRWTSPKVWKEHFEAWDCIFQYGDNCIQKIYQELAFSRPQQYTSIVAELLLNAELSPDAIKANSMELTAGSVDTTVFPLLMTLFELARNPNVQQALRQESLAAAASISEHPQKATTELPLLRAALKETLRLYPVGLFLERVASSDLVLQNYHIPAGTLVRVFLYSLGRNPALFPRPERYNPQRWLDIRGSGRNFYHVPFGFGMRQCLGRRLAEAEMLLLLHHVLKHLQVETLTQEDIKMVYSFILRPSMFPLLTFRAIN

SEQ ID NO: 21898 - protein, 437 aa, Homo sapiens
  Payload ID: 4421
  Gene Symbol: CYP11B1
  Gene Name: cytochrome P450, family 11, subfamily B, polypeptide 1
  Uniprot ID: P15538
  ENSP ID: ENSP00000428043
MALRAKAEVCMAVPWLSLQRAQALGTRAARVPRTVLPFEAMPRRPGNRWLRLLQIWREQGYEDLHLEVHQTFQELGPIFRYDLGGAGMVCVMLPEDVEKLQQVDSLHPHRMSLEPWVAYRQHRGHKCGVFLLNGPEWRFNRLRLNPEVLSPNAVQRFLPMVDAVARDFSQALKKKVLQNARGSLTLDVQPSIFHYTIEASNLALFGERLGLVGHSPSSASLNFLHALEVMFKSTVQLMFMPRSLSRWTSPKVWKEHFEAWDCIFQYGDNCIQKIYQELAFSRPQQYTSIVAELLLNAELSPDAIKANSMELTAGSVDTTVFPLLMTLFELARNPNVQQALRQESLAAAASISEHPQKATTELPLLRAALKETLRLYPVGLFLERVASSDLVLQNYHIPAGVLKHLQVETLTQEDIKMVYSFILRPSMFPLLTFRAIN

SEQ ID NO: 21899 - protein, 181 aa, Homo sapiens
  Payload ID: 4421
  Gene Symbol: CYP11B1
  Gene Name: cytochrome P450, family 11, subfamily B, polypeptide 1
  ENSP ID: ENSP00000430144
AAAASISEHPQKATTELPLLRAALKETLRKGAESTGSPIQLRTLSMDAPTSRLYPVGLFLERVASSDLVLQNYHIPAGTLVRVFLYSLGRNPALFPRPERYNPQRWLDIRGSGRNFYHVPFGFGMRQCLGRRLAEAEMLLLLHHVLKHLQVETLTQEDIKMVYSFILRPSMFPLLTFRAIN

SEQ ID NO: 21900 - protein, 503 aa, Homo sapiens
  Payload ID: 4422
  Gene Symbol: CYP11B2
  Gene Name: cytochrome P450, family 11, subfamily B, polypeptide 2
  Uniprot ID: P19099
  ENSP ID: ENSP00000325822
MALRAKAEVCVAAPWLSLQRARALGTRAARAPRTVLPFEAMPQHPGNRWLRLLQIWREQGYEHLHLEMHQTFQELGPIFRYNLGGPRMVCVMLPEDVEKLQQVDSLHPCRMILEPWVAYRQHRGHKCGVFLLNGPEWRFNRLRLNPDVLSPKAVQRFLPMVDAVARDFSQALKKKVLQNARGSLTLDVQPSIFHYTIEASNLALFGERLGLVGHSPSSASLNFLHALEVMFKSTVQLMFMPRSLSRWISPKVWKEHFEAWDCIFQYGDNCIQKIYQELAFNRPQHYTGIVAELLLKAELSLEAIKANSMELTAGSVDTTAFPLLMTLFELARNPDVQQILRQESLAAAASISEHPQKATTELPLLRAALKETLRLYPVGLFLERVVSSDLVLQNYHIPAGTLVQVFLYSLGRNAALFPRPERYNPQRWLDIRGSGRNFHHVPFGFGMRQCLGRRLAEAEMLLLLHHVLKHFLVETLTQEDIKMVYSFILRPGTSPLLTFRAIN

SEQ ID NO: 21901 - protein, 508 aa, Homo sapiens
  Payload ID: 4423
  Gene Symbol: CYP17A1
  Gene Name: cytochrome P450, family 17, subfamily A, polypeptide 1
  Uniprot ID: P05093
  ENSP ID: ENSP00000358903
MWELVALLLLTLAYLFWPKRRCPGAKYPKSLLSLPLVGSLPFLPRHGHMHNNFFKLQKKYGPIYSVRMGTKTTVIVGHHQLAKEVLIKKGKDFSGRPQMATLDIASNNRKGIAFADSGAHWQLHRRLAMATFALFKDGDQKLEKIICQEISTLCDMLATHNGQSIDISFPVFVAVTNVISLICFNTSYKNGDPELNVIQNYNEGIIDNLSKDSLVDLVPWLKIFPNKTLEKLKSHVKIRNDLLNKILENYKEKFRSDSITNMLDTLMQAKMNSDNGNAGPDQDSELLSDNHILTTIGDIFGAGVETTTSVVKWTLAFLLHNPQVKKKLYEEIDQNVGFSRTPTISDRNRLLLLEATIREVLRLRPVAPMLIPHKANVDSSIGEFAVDKGTEVIINLWALHHNEKEWHQPDQFMPERFLNPAGTQLISPSVSYLPFGAGPRSCIGEILARQELFLIMAWLLQRFDLEVPDDGQLPSLEGIPKVVFLIDSFKVKIKVRQAWREAQAEGST

SEQ ID NO: 21902 - protein, 503 aa, Homo sapiens
  Payload ID: 4424
  Gene Symbol: CYP19A1
  Gene Name: cytochrome P450, family 19, subfamily A, polypeptide 1
  Uniprot ID: P11511
  ENSP ID: ENSP00000260433
MVLEMLNPIHYNITSIVPEAMPAATMPVLLLTGLFLLVWNYEGTSSIPGPGYCMGIGPLISHGRFLWMGIGSACNYYNRVYGEFMRVWISGEETLIISKSSSMFHIMKHNHYSSRFGSKLGLQCIGMHEKGIIFNNNPELWKTTRPFFMKALSGPGLVRMVTVCAESLKTHLDRLEEVTNESGYVDVLTLLRRVMLDTSNTLFLRIPLDESAIVVKIQGYFDAWQALLIKPDIFFKISWLYKKYEKSVKDLKDAIEVLIAEKRRRISTEEKLEECMDFATELILAEKRGDLTRENVNQCILEMLIAAPDTMSVSLFFMLFLIAKHPNVEEAIIKEIQTVIGERDIKIDDIQKLKVMENFIYESMRYQPVVDLVMRKALEDDVIDGYPVKKGTNIILNIGRMHRLEFFPKPNEFTLENFAKNVPYRYFQPFGFGPRGCAGKYIAMVMMKAILVTLLRRFHVKTLQGQCVESIQKIHDLSLHPDETKNMLEMIFTPRNSDRCLEH

SEQ ID NO: 21903 - protein, 503 aa, Homo sapiens; identical to SEQ ID NO: 21902
  Payload ID: 4424
  Gene Symbol: CYP19A1
  Gene Name: cytochrome P450, family 19, subfamily A, polypeptide 1
  Uniprot ID: P11511
  ENSP ID: ENSP00000379683

SEQ ID NO: 21904 - protein, 503 aa, Homo sapiens; identical to SEQ ID NO: 21902
  Payload ID: 4424
  Gene Symbol: CYP19A1
  Gene Name: cytochrome P450, family 19, subfamily A, polypeptide 1
  Uniprot ID: P11511
  ENSP ID: ENSP00000379685

SEQ ID NO: 21905 - protein, 218 aa, Homo sapiens
  Payload ID: 4424
  Gene Symbol: CYP19A1
  Gene Name: cytochrome P450, family 19, subfamily A, polypeptide 1
  Uniprot ID: P11511
  ENSP ID: ENSP00000383930
MVLEMLNPIHYNITSIVPEAMPAATMPVLLLTGLFLLVWNYEGTSSIPGPGYCMGIGPLISHGRFLWMGIGSACNYYNRVYGEFMRVWISGEETLIISKSSSMFHIMKHNHYSSRFGSKLGLQCIGMHEKGIIFNNNPELWKTTRPFFMKALSGPGLVRMVTVCAESLKTHLDRLEEVTNESGYVDVLTLLRRVMLDTSNTLFLRIPLDGTEIFTLTS

SEQ ID NO: 21906 - protein, 166 aa, Homo sapiens
  Payload ID: 4424
  Gene Symbol: CYP19A1
  Gene Name: cytochrome P450, family 19, subfamily A, polypeptide 1
  ENSP ID: ENSP00000384389
MVLEMLNPIHYNITSIVPEAMPAATMPVLLLTGLFLLVWNYEGTSSIPGPGYCMGIGPLISHGRFLWMGIGSACNYYNRVYGEFMRVWISGEETLIISKSSSMFHIMKHNHYSSRFGSKLGLQCIGMHEKGIIFNNNPELWKTTRPFFMKALSGPGLVRMVTVCAE

SEQ ID NO: 21907 - protein, 352 aa, Homo sapiens
  Payload ID: 4424
  Gene Symbol: CYP19A1
  Gene Name: cytochrome P450, family 19, subfamily A, polypeptide 1
  ENSP ID: ENSP00000390614
MVLEMLNPIHYNITSIVPEAMPAATMPVLLLTGLFLLVWNYEGTSSIPGPGYCMGIGPLISHGRFLWMGIGSACNYYNRVYGEFMRVWISGEETLIISKSSSMFHIMKHNHYSSRFGSKLGLQCIGMHEKGIIFNNNPELWKTTRPFFMKALSGPGLVRMVTVCAESLKTHLDRLEEVTNESGYVDVLTLLRRVMLDTSNTLFLRIPLDESAIVVKIQGYFDAWQALLIKPDIFFKISWLYKKYEKSVKDLKDAIEVLIAEKRRRISTEEKLEECMDFATELILAEKRGDLTRENVNQCILEMLIAAPDTMSVSLFFMLFLIAKHPNVEEAIIKEIQTVIGERDIKIDDIQK

SEQ ID NO: 21908 - protein, 242 aa, Homo sapiens
  Payload ID: 4424
  Gene Symbol: CYP19A1
  Gene Name: cytochrome P450, family 19, subfamily A, polypeptide 1
  ENSP ID: ENSP00000391139
MVLEMLNPIHYNITSIVPEAMPAATMPVLLLTGLFLLVWNYEGTSSIPGPGYCMGIGPLISHGRFLWMGIGSACNYYNRVYGEFMRVWISGEETLIISKSSSMFHIMKHNHYSSRFGSKLGLQCIGMHEKGIIFNNNPELWKTTRPFFMKALSGPGLVRMVTVCAESLKTHLDRLEEVTNESGYVDVLTLLRRVMLDTSNTLFLRIPLDESAIVVKIQGYFDAWQALLIKPDIFFKISWLYK

SEQ ID NO: 21909 - protein, 218 aa, Homo sapiens; identical to SEQ ID NO: 21905
  Payload ID: 4424
  Gene Symbol: CYP19A1
  Gene Name: cytochrome P450, family 19, subfamily A, polypeptide 1
  Uniprot ID: P11511
  ENSP ID: ENSP00000452627

SEQ ID NO: 21910 - protein, 138 aa, Homo sapiens
  Payload ID: 4424
  Gene Symbol: CYP19A1
  Gene Name: cytochrome P450, family 19, subfamily A, polypeptide 1
  ENSP ID: ENSP00000452667
  MOD_RES (1)..(1): Any amino acid
XDLTRENVNQCILEMLIAAPDTMSVSLFFMLFLIAKHPNVEEAIIKEIQTVIGERDIKIDDIQKLKVMENFIYESMRYQPVVDLVMRKALEDDVIDGYPVKKGTNIILNIGRMHRLEFFPKPNEFTLENFAKNVRALP

SEQ ID NO: 21911 - protein, 172 aa, Homo sapiens
  Payload ID: 4424
  Gene Symbol: CYP19A1
  Gene Name: cytochrome P450, family 19, subfamily A, polypeptide 1
  ENSP ID: ENSP00000452872
MVLEMLNPIHYNITSIVPEAMPAATMPVLLLTGLFLLVWNYEGTSSIPGPGYCMGIGPLISHGRFLWMGIGSACNYYNRVYGEFMRVWISGEETLIISKSSSMFHIMKHNHYSSRFGSKLGLQCIGMHEKGIIFNNNPELWKTTRPFFMKALSGPGLVRMVTVCAESLKTHL

SEQ ID NO: 21912 - protein, 503 aa, Homo sapiens; identical to SEQ ID NO: 21902
  Payload ID: 4424
  Gene Symbol: CYP19A1
  Gene Name: cytochrome P450, family 19, subfamily A, polypeptide 1
  Uniprot ID: P11511
  ENSP ID: ENSP00000453149

SEQ ID NO: 21913 - protein, 283 aa, Homo sapiens
  Payload ID: 4424
  Gene Symbol: CYP19A1
  Gene Name: cytochrome P450, family 19, subfamily A, polypeptide 1
  ENSP ID: ENSP00000453280
MVLEMLNPIHYNITSIVPEAMPAATMPVLLLTGLFLLVWNYEGTSSIPGPGYCMGIGPLISHGRFLWMGIGSACNYYNRVYGEFMRVWISGEETLIISKSSSMFHIMKHNHYSSRFGSKLGLQCIGMHEKGIIFNNNPELWKTTRPFFMKALSGPGLVRMVTVCAESLKTHLDRLEEVTNESGYVDVLTLLRRVMLDTSNTLFLRIPLDESAIVVKIQGYFDAWQALLIKPDIFFKISWLYKKYEKSVKDLKDAIEVLIAEKRRRISTEEKLEECMDFATELI

SEQ ID NO: 21914 - protein, 164 aa, Homo sapiens
  Payload ID: 4424
  Gene Symbol: CYP19A1
  Gene Name: cytochrome P450, family 19, subfamily A, polypeptide 1
  ENSP ID: ENSP00000453318
MVLEMLNPIHYNITSIVPEAMPAATMPVLLLTGLFLLVWNYEGTSSIPGPGYCMGIGPLISHGRFLWMGIGSACNYYNRVYGEFMRVWISGEETLIISKSSSMFHIMKHNHYSSRFGSKLGLQCIGMHEKGIIFNNNPELWKTTRPFFMKALSGPGLVRMVTVC

SEQ ID NO: 21915 - protein, 352 aa, Homo sapiens; identical to SEQ ID NO: 21907
  Payload ID: 4424
  Gene Symbol: CYP19A1
  Gene Name: cytochrome P450, family 19, subfamily A, polypeptide 1
  ENSP ID: ENSP00000454004

SEQ ID NO: 21916 - protein, 244 aa, Homo sapiens
  Payload ID: 4424
  Gene Symbol: CYP19A1
  Gene Name: cytochrome P450, family 19, subfamily A, polypeptide 1
  ENSP ID: ENSP00000454039
MVLEMLNPIHYNITSIVPEAMPAATMPVLLLTGLFLLVWNYEGTSSIPGPGYCMGIGPLISHGRFLWMGIGSACNYYNRVYGEFMRVWISGEETLIISKSSSMFHIMKHNHYSSRFGSKLGLQCIGMHEKGIIFNNNPELWKTTRPFFMKESAIVVKIQGYFDAWQALLIKPDIFFKISWLYKKYEKSVKDLKDAIEVLIAEKRRRISTEEKLEECMDFATELILAEKRGDLTRENVNQCILEM

SEQ ID NO: 21917 - protein, 41 aa, Homo sapiens
  Payload ID: 4424
  Gene Symbol: CYP19A1
  Gene Name: cytochrome P450, family 19, subfamily A, polypeptide 1
  ENSP ID: ENSP00000479587
KSVVIQLWKIYEYNWIGFFPLCLCCFSWPLSKDLKDAIEVL

SEQ ID NO: 21918 - protein, 494 aa, Homo sapiens
  Payload ID: 4425
  Gene Symbol: CYP2A13
  Gene Name: cytochrome P450, family 2, subfamily A, polypeptide 13
  Uniprot ID: Q16696
  ENSP ID: ENSP00000332679
MLASGLLLVTLLACLTVMVLMSVWRQRKSRGKLPPGPTPLPFIGNYLQLNTEQMYNSLMKISERYGPVFTIHLGPRRVVVLCGHDAVKEALVDQAEEFSGRGEQATFDWLFKGYGVAFSNGERAKQLRRFSIATLRGFGVGKRGIEERIQEEAGFLIDALRGTHGANIDPTFFLSRTVSNVISSIVFGDRFDYEDKEFLSLLRMMLGSFQFTATSTGQLYEMFSSVMKHLPGPQQQAFKELQGLEDFIAKKVEHNQRTLDPNSPRDFIDSFLIRMQEEEKNPNTEFYLKNLVMTTLNLFFAGTETVSTTLRYGFLLLMKHPEVEAKVHEEIDRVIGKNRQPKFEDRAKMPYTEAVIHEIQRFGDMLPMGLAHRVNKDTKFRDFFLPKGTEVFPMLGSVLRDPRFFSNPRDFNPQHFLDKKGQFKKSDAFVPFSIGKRYCFGEGLARMELFLFFTTIMQNFRFKSPQSPKDIDVSPKHVGFATIPRNYTMSFLPR

SEQ ID NO: 21919 - protein, 494 aa, Homo sapiens
  Payload ID: 4426
  Gene Symbol: CYP2A6
  Gene Name: cytochrome P450, family 2, subfamily A, polypeptide 6
  Uniprot ID: P11509
  ENSP ID: ENSP00000301141
MLASGMLLVALLVCLTVMVLMSVWQQRKSKGKLPPGPTPLPFIGNYLQLNTEQMYNSLMKISERYGPVFTIHLGPRRVVVLCGHDAVREALVDQAEEFSGRGEQATFDWVFKGYGVVFSNGERAKQLRRFSIATLRDFGVGKRGIEERIQEEAGFLIDALRGTGGANIDPTFFLSRTVSNVISSIVFGDRFDYKDKEFLSLLRMMLGIFQFTSTSTGQLYEMFSSVMKHLPGPQQQAFQLLQGLEDFIAKKVEHNQRTLDPNSPRDFIDSFLIRMQEEEKNPNTEFYLKNLVMTTLNLFIGGTETVSTTLRYGFLLLMKHPEVEAKVHEEIDRVIGKNRQPKFEDRAKMPYMEAVIHEIQRFGDVIPMSLARRVKKDTKFRDFFLPKGTEVYPMLGSVLRDPSFFSNPQDFNPQHFLNEKGQFKKSDAFVPFSIGKRNCFGEGLARMELFLFFTTVMQNFRLKSSQSPKDIDVSPKHVGFATIPRNYTMSFLPR

SEQ ID NO: 21920 - protein, 65 aa, Homo sapiens
  Payload ID: 4426
  Gene Symbol: CYP2A6
  Gene Name: cytochrome P450, family 2, subfamily A, polypeptide 6
  ENSP ID: ENSP00000472905
MLASGMLLVALLVCLTVMVLMSVWQQRKSKGKLPPGPTPLPFIGNYLQLNTEQMYNSLMKVSQDQ

SEQ ID NO: 21921 - protein, 494 aa, Homo sapiens
  Payload ID: 4426
  Gene Symbol: CYP2A6
  Gene Name: cytochrome P450, family 2, subfamily A, polypeptide 6
  ENSP ID: ENSP00000477899
MLASGLLLVALLACLTVMVLMSVWQQRKSRGKLPPGPTPLPFIGNYLQLNTEQMYNSLMKISERYGPVFTIHLGPRRVVVLCGHDAVREALVDQAEEFSGRGEQATFDWVFKGYGVVFSNGERAKQLRRFSIATLRDFGVGKRGIEERIQEEAGFLIDALRGTGGANIDPTFFLSRTVSNVISSIVFGDRFDYKDKEFLSLLRMMLGIFQFTSTSTGQLYEMFSSVMKHLPGPQQQAFQLLQGLEDFIAKKVEHNQRTLDPNSPRDFIDSFLIRMQEEEKNPNTEFYLKNLVMTTLNLFIGGTETVSTTLRYGFLLLMKHPEVEAKVHEEIDRVIGKNRQPKFEDRAKMPYMEAVIHEIQRFGDVIPMSLARRVKKDTKFRDFFLPKGTEVYPMLGSVLRDPSFFSNPQDFNPQHFLNEKGQFKKSDAFVPFSIGKRNCFGEGLARMELFLFFTTVMQNFRLKSSQSPKDIDVSPKHVGFATIPRNYTMSFLPR

SEQ ID NO: 21922 - protein, 443 aa, Homo sapiens
  Payload ID: 4427
  Gene Symbol: CYP2A7
  Gene Name: cytochrome P450, family 2, subfamily A, polypeptide 7
  ENSP ID: ENSP00000291764
MLASGLLLVALLACLTVMVLMSVWQQRKSRGKLPPGPTPLPFIGNYLQLNTEHICDSIMKVSQGVAFSNGERAKQLLRFAIATLRDFGVGKRGIEERIQEESGFLIEAIRSTHGANIDPTFFLSRTVSNVISSIVFGDRFDYEDKEFLSLLSMMLGIFQFTSTSTGQLYEMFSSVMKHLPGPQQQAFKLLQGLEDFIAKKVEHNQRTLDPNSPQDFIDSFLIHMQEEEKNPNTEFYLKNLMMSTLNLFIAGTETVSTTLRYGFLLLMKHPEVEAKVHEEIDRVIGKNRQPKFEDRTKMPYMEAVIHEIQRFGDVIPMSLARRVKKDTKFRDFFLPKGTEVFPMLGSVLRDPSFFSNPQDFNPQHFLDDKGQFKKSDAFVPFSIGKRNCFGEGLARMELFLFFTTVMQNFRLKSSQSPKDIDVSPKHVVFATIPRNYTMSFLPR

SEQ ID NO: 21923 - protein, 494 aa, Homo sapiens
  Payload ID: 4427
  Gene Symbol: CYP2A7
  Gene Name: cytochrome P450, family 2, subfamily A, polypeptide 7
  Uniprot ID: P20853
  ENSP ID: ENSP00000301146
MLASGLLLVALLACLTVMVLMSVWQQRKSRGKLPPGPTPLPFIGNYLQLNTEHICDSIMKFSECYGPVFTIHLGPRRVVVLCGHDAVREALVDQAEEFSGRGEQATFDWVFKGYGVAFSNGERAKQLLRFAIATLRDFGVGKRGIEERIQEESGFLIEAIRSTHGANIDPTFFLSRTVSNVISSIVFGDRFDYEDKEFLSLLSMMLGIFQFTSTSTGQLYEMFSSVMKHLPGPQQQAFKLLQGLEDFIAKKVEHNQRTLDPNSPQDFIDSFLIHMQEEEKNPNTEFYLKNLMMSTLNLFIAGTETVSTTLRYGFLLLMKHPEVEAKVHEEIDRVIGKNRQPKFEDRTKMPYMEAVIHEIQRFGDVIPMSLARRVKKDTKFRDFFLPKGTEVFPMLGSVLRDPSFFSNPQDFNPQHFLDDKGQFKKSDAFVPFSIGKRNCFGEGLARMELFLFFTTVMQNFRLKSSQSPKDIDVSPKHVVFATIPRNYTMSFLPR

SEQ ID NO: 21924 - protein, 80 aa, Homo sapiens
  Payload ID: 4427
  Gene Symbol: CYP2A7
  Gene Name: cytochrome P450, family 2, subfamily A, polypeptide 7
  ENSP ID: ENSP00000470933
MLASGLLLVALLACLTVMVLMSVWQQRKSRGKLPPGPTPLPFIGNYLQLNTEHICDSIMKAWRSATGSAPSSSCALPSPP

SEQ ID NO: 21925 - protein, 491 aa, Homo sapiens
  Payload ID: 4428
  Gene Symbol: CYP2B6
  Gene Name: cytochrome P450, family 2, subfamily B, polypeptide 6
  Uniprot ID: P20813
  ENSP ID: ENSP00000324648
MELSVLLFLALLTGLLLLLVQRHPNTHDRLPPGPRPLPLLGNLLQMDRRGLLKSFLRFREKYGDVFTVHLGPRPVVMLCGVEAIREALVDKAEAFSGRGKIAMVDPFFRGYGVIFANGNRWKVLRRFSVTTMRDFGMGKRSVEERIQEEAQCLIEELRKSKGALMDPTFLFQSITANIICSIVFGKRFHYQDQEFLKMLNLFYQTFSLISSVFGQLFELFSGFLKYFPGAHRQVYKNLQEINAYIGHSVEKHRETLDPSAPKDLIDTYLLHMEKEKSNAHSEFSHQNLNLNTLSLFFAGTETTSTTLRYGFLLMLKYPHVAERVYREIEQVIGPHRPPELHDRAKMPYTEAVIYEIQRFSDLLPMGVPHIVTQHTSFRGYIIPKDTEVFLILSTALHDPHYFEKPDAFNPDHFLDANGALKKTEAFIPFSLGKRICLGEGIARAELFLFFTTILQNFSMASPVAPEDIDLTPQECGVGKIPPTYQIRFLPR

SEQ ID NO: 21926 - protein, 255 aa, Homo sapiens
  Payload ID: 4428
  Gene Symbol: CYP2B6
  Gene Name: cytochrome P450, family 2, subfamily B, polypeptide 6
  ENSP ID: ENSP00000470582
MLCGVEAIREALVDKAEAFSGRGKIAMVDPFFRGYGVIFANGNRWKVLRRFSVTTMRDFGMGKRSVEERIQEEAQCLIEELRKSKERVYREIEQVIGPHRPPELHDRAKMPYTEAVIYEIQRFSDLLPMGVPHIVTQHTSFRGYIIPKDTEVFLILSTALHDPHYFEKPDAFNPDHFLDANGALKKTEAFIPFSLGKRICLGEGIARAELFLFFTTILQNFSMASPVAPEDIDLTPQECGVGKIPPTYQIRFLPR

SEQ ID NO: 21927 - protein, 490 aa, Homo sapiens
  Payload ID: 4429
  Gene Symbol: CYP2C18
  Gene Name: cytochrome P450, family 2, subfamily C, polypeptide 18
  Uniprot ID: P33260
  ENSP ID: ENSP00000285979
MDPAVALVLCLSCLFLLSLWRQSSGRGRLPSGPTPLPIIGNILQLDVKDMSKSLTNFSKVYGPVFTVYFGLKPIVVLHGYEAVKEALIDHGEEFSGRGSFPVAEKVNKGLGILFSNGKRWKEIRRFCLMTLRNFGMGKRSIEDRVQEEARCLVEELRKTNASPCDPTFILGCAPCNVICSVIFHDRFDYKDQRFLNLMEKFNENLRILSSPWIQVCNNFPALIDYLPGSHNKIAENFAYIKSYVLERIKEHQESLDMNSARDFIDCFLIKMEQEKHNQQSEFTVESLIATVTDMFGAGTETTSTTLRYGLLLLLKYPEVTAKVQEEIECVVGRNRSPCMQDRSHMPYTDAVVHEIQRYIDLLPTNLPHAVTCDVKFKNYLIPKGTTIITSLTSVLHNDKEFPNPEMFDPGHFLDKSGNFKKSDYFMPFSAGKRMCMGEGLARMELFLFLTTILQNFNLKSQVDPKDIDITPIANAFGRVPPLYQLCFIPV

SEQ ID NO: 21928 - protein, 431 aa, Homo sapiens
  Payload ID: 4429
  Gene Symbol: CYP2C18
  Gene Name: cytochrome P450, family 2, subfamily C, polypeptide 18
  Uniprot ID: P33260
  ENSP ID: ENSP00000341293
MDPAVALVLCLSCLFLLSLWRQSSGRGRLPSGPTPLPIIGNILQLDVKDMSKSLTNFSKVYGPVFTVYFGLKPIVVLHGYEAVKEALIDHGEEFSGRGSFPVAEKVNKGLGILFSNGKRWKEIRRFCLMTLRNFGMGKRSIEDRVQEEARCLVEELRKTNASPCDPTFILGCAPCNVICSVIFHDRFDYKDQRFLNLMEKFNENLRILSSPWIQEKHNQQSEFTVESLIATVTDMFGAGTETTSTTLRYGLLLLLKYPEVTAKVQEEIECVVGRNRSPCMQDRSHMPYTDAVVHEIQRYIDLLPTNLPHAVTCDVKFKNYLIPKGTTIITSLTSVLHNDKEFPNPEMFDPGHFLDKSGNFKKSDYFMPFSAGKRMCMGEGLARMELFLFLTTILQNFNLKSQVDPKDIDITPIANAFGRVPPLYQLCFIPV

SEQ ID NO: 21929 - protein, 490 aa, Homo sapiens
  Payload ID: 4430
  Gene Symbol: CYP2C19
  Gene Name: cytochrome P450, family 2, subfamily C, polypeptide 19
  Uniprot ID: P33261
  ENSP ID: ENSP00000360372
MDPFVVLVLCLSCLLLLSIWRQSSGRGKLPPGPTPLPVIGNILQIDIKDVSKSLTNLSKIYGPVFTLYFGLERMVVLHGYEVVKEALIDLGEEFSGRGHFPLAERANRGFGIVFSNGKRWKEIRRFSLMTLRNFGMGKRSIEDRVQEEARCLVEELRKTKASPCDPTFILGCAPCNVICSIIFQKRFDYKDQQFLNLMEKLNENIRIVSTPWIQICNNFPTIIDYFPGTHNKLLKNLAFMESDILEKVKEHQESMDINNPRDFIDCFLIKMEKEKQNQQSEFTIENLVITAADLLGAGTETTSTTLRYALLLLLKHPEVTAKVQEEIERVIGRNRSPCMQDRGHMPYTDAVVHEVQRYIDLIPTSLPHAVTCDVKFRNYLIPKGTTILTSLTSVLHDNKEFPNPEMFDPRHFLDEGGNFKKSNYFMPFSAGKRICVGEGLARMELFLFLTFILQNFNLKSLIDPKDLDTTPVVNGFASVPPFYQLCFIPV

SEQ ID NO: 21930 - protein, 162 aa, Homo sapiens
  Payload ID: 4430
  Gene Symbol: CYP2C19
  Gene Name: cytochrome P450, family 2, subfamily C, polypeptide 19
  ENSP ID: ENSP00000483847
MDPFVVLVLCLSCLLLLSIWRQSSGRGKLPPGPTPLPVIGNILQIDIKDVSKSLTNLSKIYGPVFTLYFGLERMVVLHGYEVVKEALIDLGEEFSGRGHFPLAERANRGFGIVFSNGKRWKEIRRFSLMTLRNFGMGKRSIEDRVQEEARCLVEELRKTKGG

SEQ ID NO: 21931 - protein, 490 aa, Homo sapiens
  Payload ID: 4431
  Gene Symbol: CYP2C8
  Gene Name: cytochrome P450, family 2, subfamily C, polypeptide 8
  Uniprot ID: P10632
  ENSP ID: ENSP00000360317
MEPFVVLVLCLSFMLLFSLWRQSCRRRKLPPGPTPLPIIGNMLQIDVKDICKSFTNFSKVYGPVFTVYFGMNPIVVFHGYEAVKEALIDNGEEFSGRGNSPISQRITKGLGIISSNGKRWKEIRRFSLTTLRNFGMGKRSIEDRVQEEAHCLVEELRKTKASPCDPTFILGCAPCNVICSVVFQKRFDYKDQNFLTLMKRFNENFRILNSPWIQVCNNFPLLIDCFPGTHNKVLKNVALTRSYIREKVKEHQASLDVNNPRDFIDCFLIKMEQEKDNQKSEFNIENLVGTVADLFVAGTETTSTTLRYGLLLLLKHPEVTAKVQEEIDHVIGRHRSPCMQDRSHMPYTDAVVHEIQRYSDLVPTGVPHAVTTDTKFRNYLIPKGTTIMALLTSVLHDDKEFPNPNIFDPGHFLDKNGNFKKSDYFMPFSAGKRICAGEGLARMELFLFLTTILQNFNLKSVDDLKNLNTTAVTKGIVSLPPSYQICFIPV

SEQ ID NO: 21932 - protein, 393 aa, Homo sapiens
  Payload ID: 4431
  Gene Symbol: CYP2C8
  Gene Name: cytochrome P450, family 2, subfamily C, polypeptide 8
  ENSP ID: ENSP00000433191
MEPFVVLVLCLSFMLLFSLWRQSCRRRKLPPGPTPLPIIGNMLQIDVKDICKSFTNFSKVYGPVFTVYFGMNPIVVFHGYEAVKEALIDNGEEFSGRGNSPISQRITKGLGIISSNGKRWKEIRRFSLTTLRNFGMGKRSIEDRVQEEAHCLVEELRKTKASPCDPTFILGCAPCNVICSVVFQKRFDYKDQNFLTLMKRFNENFRILNSPWIQVCNNFPLLIDCFPGTHNKVLKNVALTRSYIREKVKEHQASLDVNNPRDFIDCFLIKMEQEKDNQKSEFNIENLVGTVADLFVAGTETTSTTLRYGLLLLLKHPEVTAKVQEEIDHVIGRHRSPCMQDRSHMPYTDAVVHEIQRYSDLVPTGVPHAVTTDTKFRNYLIPKSFDNKIMLAA

SEQ ID NO: 21933 - protein, 83 aa, Homo sapiens
  Payload ID: 4431
  Gene Symbol: CYP2C8
  Gene Name: cytochrome P450, family 2, subfamily C, polypeptide 8
  ENSP ID: ENSP00000433314
MEPFVVLVLCLSFMLLFSLWRQSCRRRKLPPGPTPLPIIGNMLQIDVKDICKSFTNVSLPYVPPANCKGSQKSMVLCSPCILA

SEQ ID NO: 21934 - protein, 99 aa, Homo sapiens
  Payload ID: 4431
  Gene Symbol: CYP2C8
  Gene Name: cytochrome P450, family 2, subfamily C, polypeptide 8
  ENSP ID: ENSP00000433842
MEPFVVLVLCLSFMLLFSLWRQSCRRRKLPPGPTPLPIIGNMLQIDVKDICKSFTNVSLPYVPPANCKGNHFQQWKEMEGDPAFLPHNLAEFWDGEEEH

SEQ ID NO: 21935 - protein, 420 aa, Homo sapiens
  Payload ID: 4431
  Gene Symbol: CYP2C8
  Gene Name: cytochrome P450, family 2, subfamily C, polypeptide 8
  ENSP ID: ENSP00000442343
MNPIVVFHGYEAVKEALIDNGEEFSGRGNSPISQRITKGLGIISSNGKRWKEIRRFSLTTLRNFGMGKRSIEDRVQEEAHCLVEELRKTKASPCDPTFILGCAPCNVICSVVFQKRFDYKDQNFLTLMKRFNENFRILNSPWIQVCNNFPLLIDCFPGTHNKVLKNVALTRSYIREKVKEHQASLDVNNPRDFIDCFLIKMEQEKDNQKSEFNIENLVGTVADLFVAGTETTSTTLRYGLLLLLKHPEVTAKVQEEIDHVIGRHRSPCMQDRSHMPYTDAVVHEIQRYSDLVPTGVPHAVTTDTKFRNYLIPKGTTIMALLTSVLHDDKEFPNPNIFDPGHFLDKNGNFKKSDYFMPFSAGKRICAGEGLARMELFLFLTTILQNFNLKSVDDLKNLNTTAVTKGIVSLPPSYQICFIPV

SEQ ID NO: 21936 - protein, 388 aa, Homo sapiens
  Payload ID: 4431
  Gene Symbol: CYP2C8
  Gene Name: cytochrome P450, family 2, subfamily C, polypeptide 8
  Uniprot ID: P10632
  ENSP ID: ENSP00000445062
MFLQPIAKGIISSNGKRWKEIRRFSLTTLRNFGMGKRSIEDRVQEEAHCLVEELRKTKASPCDPTFILGCAPCNVICSVVFQKRFDYKDQNFLTLMKRFNENFRILNSPWIQVCNNFPLLIDCFPGTHNKVLKNVALTRSYIREKVKEHQASLDVNNPRDFIDCFLIKMEQEKDNQKSEFNIENLVGTVADLFVAGTETTSTTLRYGLLLLLKHPEVTAKVQEEIDHVIGRHRSPCMQDRSHMPYTDAVVHEIQRYSDLVPTGVPHAVTTDTKFRNYLIPKGTTIMALLTSVLHDDKEFPNPNIFDPGHFLDKNGNFKKSDYFMPFSAGKRICAGEGLARMELFLFLTTILQNFNLKSVDDLKNLNTTAVTKGIVSLPPSYQICFIPV

SEQ ID NO: 21937 - protein, 420 aa, Homo sapiens; identical to SEQ ID NO: 21935
  Payload ID: 4431
  Gene Symbol: CYP2C8
  Gene Name: cytochrome P450, family 2, subfamily C, polypeptide 8
  ENSP ID: ENSP00000485110

SEQ ID NO: 21938 - protein, 307 aa, Homo sapiens
  Payload ID: 4431
  Gene Symbol: CYP2C8
  Gene Name: cytochrome P450, family 2, subfamily C, polypeptide 8
  ENSP ID: ENSP00000487145
MAAKCCSTFFLGCEFSQFLPLFLLGIISSNGKRWKEIRRFSLTTLRNFGMGKRSIEDRVQEEAHCLVEELRKTKASPCDPTFILGCAPCNVICSVVFQKRFDYKDQNFLTLMKRFNENFRILNSPWIQVCNNFPLLIDCFPGTHNKVLKNVALTRSYIREKVKEHQASLDVNNPRDFIDCFLIKMEQEKDNQKSEFNIENLVGTVADLFVAGTETTSTTLRYGLLLLLKHPEVTAKVQEEIDHVIGRHRSPCMQDRSHMPYTDAVVHEIQRYSDLVPTGVPHAVTTDTKFRNYLIPKSFDNKIMLAA

SEQ ID NO: 21939 - protein, 490 aa, Homo sapiens [sequence omitted]

SEQ ID NO: 21940 - protein, 446 aa, Homo sapiens
  Payload ID: 4433
  Gene Symbol: CYP2D6
  Gene Name: cytochrome P450, family 2, subfamily D, polypeptide 6
  Uniprot ID: P10635
  ENSP ID: ENSP00000351927
MGLEALVPLAVIVAIFLLLVDLMHRRQRWAARYPPGPLPLPGLGNLLHVDFQNTPYCFDQLRRRFGDVFSLQLAWTPVVVLNGLAAVREALVTHGEDTADRPPVPITQILGFGPRSQGRPFRPNGLLDKAVSNVIASLTCGRRFEYDDPRFLRLLDLAQEGLKEESGFLREVLNAVPVLLHIPALAGKVLRFQKAFLTQLDELLTEHRMTWDPAQPPRDLTEAFLAEMEKAKGNPESSFNDENLRIVVADLFSAGMVTTSTTLAWGLLLMILHPDVQRRVQQEIDDVIGQVRRPEMGDQAHMPYTTAVIHEVQRFGDIVPLGVTHMTSRDIEVQGFRIPKGTTLITNLSSVLKDEAVWEKPFRFHPEHFLDAQGHFVKPEAFLPFSAGRRACLGEPLARMELFLFFTSLLQHFSFSVPTGQPRPSHHGVFAFLVSPSPYELCAVPR

SEQ ID NO: 21941 - protein, 180 aa, Homo sapiens
  Payload ID: 4433
  Gene Symbol: CYP2D6
  Gene Name: cytochrome P450, family 2, subfamily D, polypeptide 6
  ENSP ID: ENSP00000353241
LRRRFGDVFSLQLAWTPVVVLNGLAAVREALVTHGEDTADRPPVPITQILGFGPRSQGRPFRPNGLLDKAVSNVIASLTCGRRFEYDDPRFLRLLDLAQEGLKEESGFLREVLNAVPVLLHIPALAGKVLRFQKAFLTQLDELLTEHRMTWDPAQPPRDLTEAFLAEMEKWWLTCSLPGW

SEQ ID NO: 21942 - protein, 497 aa, Homo sapiens [sequence omitted]

SEQ ID NO: 21943 - protein, 494 aa, Homo sapiens [sequence omitted]

SEQ ID NO: 21944 - protein, 497 aa, Homo sapiens; identical to SEQ ID NO: 1193
  Payload ID: 4433
  Gene Symbol: CYP2D6
  Gene Name: cytochrome P450, family 2, subfamily D, polypeptide 6
  ENSP ID: ENSP00000476021

SEQ ID NO: 21945 - protein, 497 aa, Homo sapiens
  Payload ID: 4433
  Gene Symbol: CYP2D6
  Gene Name: cytochrome P450, family 2, subfamily D, polypeptide 6
  ENSP ID: ENSP00000479867
MGLEALVPLAVIVAIFLLLVDLMHRRQRWAARYPPGPLPLPGLGNLLHVDFQNTPYCFDQLRRRFGDVFSLQLAWTPVVVLNGLAAVREALVTHGEDTADRPPVPITQILGFGPRSQGVFLARYGPAWREQRRFSVSTLRNLGLGKKSLEQWVTEEAACLCAAFANHSGRPFRPNGLLDKAVSNVIASLTCGRRFEYDDPRFLRLLDLAQEGLKEESGFLREVLNAVPVLLHIPALAGKVLRFQKAFLTQLDELLTEHRMTWDPAQPPRDLTEAFLAEMEKAKGNPESSFNDENLCIVVADLFSAGMVTTSTTLAWGLLLMILHPDVQRRVQQEIDDVIGQVRRPEMGDQAHMPYTTAVIHEVQRFGDIVPLGVTHMTSRDIEVQGFRIPKGTTLITNLSSVLKDEAVWEKPFRFHPEHFLDAQGHFVKPEAFLPFSAGRRACLGEPLARMELFLFFTSLLQHFSFSVPTGQPRPSHHGVFAFLVTPSPYELCAVPR

SEQ ID NO: 21946 - protein, 446 aa, Homo sapiens; identical to SEQ ID NO: 1192
  Payload ID: 4433
  Gene Symbol: CYP2D6
  Gene Name: cytochrome P450, family 2, subfamily D, polypeptide 6
  ENSP ID: ENSP00000483245

SEQ ID NO: 21947 - protein, 446 aa, Homo sapiens
  Payload ID: 4433
  Gene Symbol: CYP2D6
  Gene Name: cytochrome P450, family 2, subfamily D, polypeptide 6
  Uniprot ID: P10635
  ENSP ID: ENSP00000483677
MGLEALVPLAVIVAIFLLLVDLMHRRQRWAARYPPGPLPLPGLGNLLHVDFQNTPYCFDQLRRRFGDVFSLQLAWTPVVVLNGLAAVREALVTHGEDTADRPPVPITQILGFGPRSQGRPFRPNGLLDKAVSNVIASLTCGRRFEYDDPRFLRLLDLAQEGLKEESGFLREVLNAVPVLLHIPALAGKVLRFQKAFLTQLDELLTEHRMTWDPAQPPRDLTEAFLAEMEKAKGNPESSFNDENLCIVVADLFSAGMVTTSTTLAWGLLLMILHPDVQRRVQQEIDDVIGQVRRPEMGDQAHMPYTTAVIHEVQRFGDIVPLGVTHMTSRDIEVQGFRIPKGTTLITNLSSVLKDEAVWEKPFRFHPEHFLDAQGHFVKPEAFLPFSAGRRACLGEPLARMELFLFFTSLLQHFSFSVPTGQPRPSHHGVFAFLVTPSPYELCAVPR

SEQ ID NO: 21948 - protein, 497 aa, Homo sapiens; identical to SEQ ID NO: 1193
  Payload ID: 4433
  Gene Symbol: CYP2D6
  Gene Name: cytochrome P450, family 2, subfamily D, polypeptide 6
  ENSP ID: ENSP00000486094

SEQ ID NO: 21949 - protein, 446 aa, Homo sapiens; identical to SEQ ID NO: 1192
  Payload ID: 4433
  Gene Symbol: CYP2D6
  Gene Name: cytochrome P450, family 2, subfamily D, polypeptide 6
  ENSP ID: ENSP00000486619

SEQ ID NO: 21950 - protein, 180 aa, Homo sapiens; identical to SEQ ID NO: 21941
  Payload ID: 4433
  Gene Symbol: CYP2D6
  Gene Name: cytochrome P450, family 2, subfamily D, polypeptide 6
  ENSP ID: ENSP00000487214

SEQ ID NO: 21951 - protein, 180 aa, Homo sapiens; identical to SEQ ID NO: 21941
  Payload ID: 4433
  Gene Symbol: CYP2D6
  Gene Name: cytochrome P450, family 2, subfamily D, polypeptide 6
  ENSP ID: ENSP00000487281

SEQ ID NO: 21952 - protein, 494 aa, Homo sapiens
  Payload ID: 4433
  Gene Symbol: CYP2D6
  Gene Name: cytochrome P450, family 2, subfamily D, polypeptide 6
  ENSP ID: ENSP00000487558
MHRRQRWAARYSPGPLPLPGLGNLLHVDFQNTPYCFDQLRRRFGDVFSLQLAWTPVVVLNGLAAVREALVTHGEDTADRPPVPITQILGFGPRSQGVFLARYGPAWREQRRFSVSTLRNLGLGKKSLEQWVTEEAACLCAAFANHSGRPFRPNGLLDKAVSNVIASLTCGRRFEYDDPRFLRLLDLAQEGLKEESGFLREVLNAVPVLLHIPALAGKVLRFQKAFLTQLDELLTEHRMTWDPAQPPRDLTEAFLAEMEKAKGNPESSFNDENLRIVVADLFSAGMVTTSTTLAWGLLLMILHPDVQQGGRVQAGAHPIVGTHVCPGRVQQEIDDVIGQVRRPEMGDQAHMPYTTAVIHEVQRFGDIVPLGVTHMTSRDIEVQGFRIPKGTTLITNLSSVLKDEAVWEKPFRFHPEHFLDAQGHFVKPEAFLPFSAGRRACLGEPLARMELFLFFTSLLQHFSFSVPTGQPRPSHHGVFAFLVTPSPYELCAVPR

SEQ ID NO: 21953 - protein, 180 aa, Homo sapiens; identical to SEQ ID NO: 21941
  Payload ID: 4433
  Gene Symbol: CYP2D6
  Gene Name: cytochrome P450, family 2, subfamily D, polypeptide 6
  ENSP ID: ENSP00000488991

SEQ ID NO: 21954 - protein, 446 aa, Homo sapiens; identical to SEQ ID NO: 1192
  Payload ID: 4433
  Gene Symbol: CYP2D6
  Gene Name: cytochrome P450, family 2, subfamily D, polypeptide 6
  ENSP ID: ENSP00000489103

SEQ ID NO: 21955 - protein, 494 aa, Homo sapiens; identical to SEQ ID NO: 21952
  Payload ID: 4433
  Gene Symbol: CYP2D6
  Gene Name: cytochrome P450, family 2, subfamily D, polypeptide 6
  ENSP ID: ENSP00000489144

SEQ ID NO: 21956 - protein, 497 aa, Homo sapiens; identical to SEQ ID NO: 1193
  Payload ID: 4433
  Gene Symbol: CYP2D6
  Gene Name: cytochrome P450, family 2, subfamily D, polypeptide 6
  ENSP ID: ENSP00000489231

SEQ ID NO: 21957 - protein, 45 aa, Homo sapiens
  Payload ID: 4434
  Gene Symbol: CYP2D7
  Gene Name: cytochrome P450, family 2, subfamily D, polypeptide 7 (gene/pseudogene)
  ENSP ID: ENSP00000437680
DPAQPPRDLTEAFLAKKEKAKGSPESSFNDENLRIVSVSNRRSTT

SEQ ID NO: 21958 - protein, 505 aa, Homo sapiens
  Payload ID: 4434
  Gene Symbol: CYP2D7
  Gene Name: cytochrome P450, family 2, subfamily D, polypeptide 7 (gene/pseudogene)
  ENSP ID: ENSP00000439604
MGLEALVPLAMIVAIFLLLVDLMHRHQRWAARYPPGPLPLPGLGNLAACGLPEHTILLRPVAAPLRGRVQPAAGLDAGGRAQWAGGRARGDGDPRRGHGRPPACAHLPGPGLRAAFPRGDPVALWARVARAEALLRVHLAQLGPGQEVAGAVGDRGGRLPLCRLRRPSRTPLSPQRPLGQSREQRDRLPHLRAPLRVRRPSLPQAAGPSSGGTEGGVGLPARGAECCPRPPAHPSAGWQGPTLPKGFPDPAGAANAQDDLGPSPATPRPDGLPGKEGEGQGEPEQLQEPAHSGGPVPCRDGDHLDHAGLGPPAHDPTPGCAARKESVPWVLTHCGDACLSSPCPTGDRRRDRAGAATRDGPGSHALHHCRDSRGAALWGHRPPGCDPYDIPHRSTGLPHPGNDTHHQPVIGAEGGRLEEALPLPPRTLPGCPGPLCEAGGLPAFLSRPPCMPRGAPGPHGALPLLHLPAAALQLLRGRRTAPAQPLSCRQLSGDPIPLRALCCAP

SEQ ID NO: 21959 - protein, 486 aa, Homo sapiens
  Payload ID: 4434
  Gene Symbol: CYP2D7
  Gene Name: cytochrome P450, family 2, subfamily D, polypeptide 7 (gene/pseudogene)
  ENSP ID: ENSP00000445124
MGLEALVPLAMIVAIFLLLVDLMHRHQRWAARYPPGPLPLPGLGNLAACGLPEHTILLRPVAAPLRGRVQPAAGLDAGGRAQWAGGRARGDGDPRRGHGRPPACAHLPGPGLRAAFPRGDPVALWARVARAEALLRVHLAQLGPGQEVAGAVGDRGGRLPLCRLRRPSRTPLSPQRPLGQSREQRDRLPHLRAPLRVRRPSLPQAAGPSSGGTEGGVGLPARGAECCPRPPAHPSAGWQGPTLPKGFPDPAGAANAQDDLGPSPATPRPDGLPGKEGEGQGEPEQLQEPAHSGGPVPCRDGDHLDHAGLGPPAHDPTPGCAAPCPTGDRRRDRAGAATRDGPGSHALHHCRDSRGAALWGHRPPGCDPYDIPHRSTGLPHPGNDTHHQPVIGAEGGRLEEALPLPPRTLPGCPGPLCEAGGLPAFLSRPPCMPRGAPGPHGALPLLHLPAAALQLLRGRRTAPAQPLSCRQLSGDPIPLRALCCAP

SEQ ID NO: 21960 - protein, 506 aa, Homo sapiens
  Payload ID: 4434
  Gene Symbol: CYP2D7
  Gene Name: cytochrome P450, family 2, subfamily D, polypeptide 7 (gene/pseudogene)
  ENSP ID: ENSP00000461363
MGLEALVPLAMIVAIFLLLVDLMHRHQRWAARYPPGPLPLPGLGNLAACGLPEHTILLRPVAAPLRGRVQPAAGLDAGGRAQWAGGRARGDGDPRRGHGRPPACAHLPGPGLRAAFPRGDPVALWARVARAEALLRVHLAQLGPGQEVAGAVGDRGGRLPLCRLRRPSRTPLSPQRPLGQSREQRDRLPHLRAPLRVRRPSLPQAAGPSSGGTEGGVGLPARGAECCPRPPAHPSAGWQGPTLPKGFPDPAGAANAQDDLGPSPATPRPDGLPGKEGEGQGEPEQLQEPAHSGGPVPCRDGDHLDHAGLGPPAHDPTPGCAARKESVPWVLTHCGDACLSSPCPTGDRRRDRAGAATRDGPGSHALHHCRDSRGAALWGHHPPECDPYDIPHRSTGLPHPGNDTHHQPVIGAEGGRLEEALPLPPRTLPGCPGPLCEAGGLPAFLSRPPCMPRGAPGPHGALPLLHLPAAALQLLRGRRTAPAQPLSCRQLSGDPIPLRALCCAPL

SEQ ID NO: 21961 - protein, 487 aa, Homo sapiens
  Payload ID: 4434
  Gene Symbol: CYP2D7
  Gene Name: cytochrome P450, family 2, subfamily D, polypeptide 7 (gene/pseudogene)
  ENSP ID: ENSP00000461768
MGLEALVPLAMIVAIFLLLVDLMHRHQRWAARYPPGPLPLPGLGNLAACGLPEHTILLRPVAAPLRGRVQPAAGLDAGGRAQWAGGRARGDGDPRRGHGRPPACAHLPGPGLRAAFPRGDPVALWARVARAEALLRVHLAQLGPGQEVAGAVGDRGGRLPLCRLRRPSRTPLSPQRPLGQSREQRDRLPHLRAPLRVRRPSLPQAAGPSSGGTEGGVGLPARGAECCPRPPAHPSAGWQGPTLPKGFPDPAGAANAQDDLGPSPATPRPDGLPGKEGEGQGEPEQLQEPAHSGGPVPCRDGDHLDHAGLGPPAHDPTPGCAAPCPTGDRRRDRAGAATRDGPGSHALHHCRDSRGAALWGHHPPECDPYDIPHRSTGLPHPGNDTHHQPVIGAEGGRLEEALPLPPRTLPGCPGPLCEAGGLPAFLSRPPCMPRGAPGPHGALPLLHLPAAALQLLRGRRTAPAQPLSCRQLSGDPIPLRALCCAPL

SEQ ID NO: 21962 - protein, 446 aa, Homo sapiens
  Payload ID: 4434
  Gene Symbol: CYP2D7
  Gene Name: cytochrome P450, family 2, subfamily D, polypeptide 7 (gene/pseudogene)
  ENSP ID: ENSP00000478020
MGLEALVPLAMIVAIFLLLVDLMHRHQRWAARYPPGPLPLPGLGNLLHVDFQNTPYCFDQLRRRFGDVFSLQLAWTPVVVLNGLAAVREAMVTRGEDTADRPPAPIYQVLGFGPRSQGRPFRPNGLLDKAVSNVIASLTCGRRFEYDDPRFLRLLDLAQEGLKEESGFLREVLNAVPVLLHIPALAGKVLRFQKAFLTQLDELLTEHRMTWDPAQPPRDLTEAFLAKKEKAKGSPESSFNDENLRIVVGNLFLAGMVTTLTTLAWGLLLMILHLDVQLRVQQEIDDVIGQVRRPEMGDQAHMPYTTAVIHEVQRFGDIIPLSVTHMTSHDIEVQGFRIPKGTTLITNLSSVLKDEAVWKKPFRFHPEHFLDAQGHFVKPEAFLPFSAGRRACLGEPLARMELFLFFTSLLQHFSFSVAAGQPRPSHSRVVSFLVTPSPYELCAVPR

SEQ ID NO: 21963 - protein, 506 aa, Homo sapiens
  Payload ID: 4434
  Gene Symbol: CYP2D7
  Gene Name: cytochrome P450, family 2, subfamily D, polypeptide 7 (gene/pseudogene)
  ENSP ID: ENSP00000478656
MGLEALVPLAMIVAIFLLLVDLMHRHQRWAARYPPGPLPLPGLGNLAACGLPEHTILLRPVAAPLRGRVQPAAGLDAGGRAQWAGGRARGDGDPRRGHGRPPACAHLPGPGLRAAFPRGVPVALWARVARAEALLRVHLAQLGPGQEVAGAVGDRGGRLPLCRLRRPSRTPLSPQRSLGQSREQRDRLPHLRAPLRVRRPSLPQAAGPSSGGTEGGVGLPARGAECCPRPPAHPSAGWQGPTLPKGFPDPAGAANAQDDLGPSPATPRPDGLPGKEGEGQGEPEQLQEPAHSGGPVPCRDGDHLDHAGLGPPAHDPTPGCAATKESVPWVLTHCGDACLSSPCPTGDRRRDRAGAATRDGPGSHALHHCRDSRGAALWGHHPPECDPYDIPHRSTGLPHPGNDTHHQPVIGAEGGRLEEALPLPPRTLPGCPGPLCEAGGLPAFLSRPPCMPRGAPGPHGALPLLHLPAAALQLLRGRRTAPAQPLSCRQLSGDPIPLRALCCAPL

SEQ ID NO: 21964 - protein, 515 aa, Homo sapiens
  Payload ID: 4434
  Gene Symbol: CYP2D7
  Gene Name: cytochrome P450, family 2, subfamily D, polypeptide 7 (gene/pseudogene)
  ENSP ID: ENSP00000479001
MGLEALVPLAMIVAIFLLLVDLMHRHQRWAARYPPGPLPLPGLGNLLHVDFQNTPYCFDQLRRRFGDVFSLQLAWTPVVVLNGLAAVREAMVTRGEDTADRPPAPIYQVLGFGPRSQGVILSRYGPAWREQRRFSVSTLRNLGLGKKSLEQWVTEEAACLCAAFADQAGRPFRPNGLLDKAVSNVIASLTCGRRFEYDDPRFLRLLDLAQEGLKEESGFLREVLNAVPVLPHIPALAGKVLRFQKAFLTQLDELLTEHRMTWDPAQPPRDLTEAFLAKKEKAKGSPESSFNDENLRIVVGNLFLAGMVTTSTTLAWGLLLMILHLDVQRGRRVSPGCPIVGTHVCPVRVQQEIDDVIGQVRRPEMGDQAHMPCTTAVIHEVQRFGDIIPLSVTHMTSRDIEVQGFRIPKGTTLITNLSSVLKDEAVWKKPFRFHPEHFLDAQGHFVKPEAFLPFSAGRRACLGEPLARMELFLFFTSLLQHFSFSVAAGQPRPSHSRVVSFLVTPSPYELCAVPR

SEQ ID NO: 21965 - protein, 446 aa, Homo sapiens
  Payload ID: 4434
  Gene Symbol: CYP2D7
  Gene Name: cytochrome P450, family 2, subfamily D, polypeptide 7 (gene/pseudogene)
  ENSP ID: ENSP00000480735
MGLEALVPLAMIVAIFLLLVDLMHRHQRWAARYPPGPLPLPGLGNLLHVDFQNTPYCFDQLRRRFGDVFSLQLAWTPVVVLNGLAAVREAMVTRGEDTADRPPAPIYQVLGFGPRSQGRPFRPNGLLDKAVSNVIASLTCGRRFEYDDPRFLRLLDLAQEGLKEESGFLREVLNAVPVLPHIPALAGKVLRFQKAFLTQLDELLTEHRMTWDPAQPPRDLTEAFLAKKEKAKGSPESSFNDENLRIVVGNLFLAGMVTTSTTLAWGLLLMILHLDVQLRVQQEIDDVIGQVRRPEMGDQAHMPCTTAVIHEVQRFGDIIPLSVTHMTSRDIEVQGFRIPKGTTLITNLSSVLKDEAVWKKPFRFHPEHFLDAQGHFVKPEAFLPFSAGRRACLGEPLARMELFLFFTSLLQHFSFSVAAGQPRPSHSRVVSFLVTPSPYELCAVPR

SEQ ID NO: 21966 - protein, 446 aa, Homo sapiens
  Payload ID: 4434
  Gene Symbol: CYP2D7
  Gene Name: cytochrome P450, family 2, subfamily D, polypeptide 7 (gene/pseudogene)
  ENSP ID: ENSP00000481168
MGLEALVPLAMIVAIFLLLVDLMHRHQRWAARYPPGPLPLPGLGNLLHVDFQNTPYCFDQLRRRFGDVFSLQLAWTPVVVLNGLAAVREAMVTRGEDTADRPPAPIYQVLGFGPRSQGRPFRPNGLLDKAVSNVIASLTCGRRFEYDDPRFLRLLDLAQEGLKEESGFLREVLNAVPVLPHIPALAGKVLRFQKAFLTQLDELLTEHRMTWDPAQPPRDLTEAFLAKKEKAKGSPESSFNDENLRIVVGNLFLAGMVTTSTTLAWGLLLMILHLDVQLRVQQEIDDVIGQVRRPEMGDQAHMPCTTAVIHEVQHFGDIVPLGVTHMTSRDIEVQGFRIPKGTTLITNLSSVLKDEAVWKKPFRFHPEHFLDAQGHFVKPEAFLPFSAGRRACLGEPLARMELFLFFTSLLQHFSFSVAAGQPRPSHSRVVSFLVTPSPYELCAVPR

SEQ ID NO: 21967 - protein, 515 aa, Homo sapiens
  Payload ID: 4434
  Gene Symbol: CYP2D7
  Gene Name: cytochrome P450, family 2, subfamily D, polypeptide 7 (gene/pseudogene)
  ENSP ID: ENSP00000481748
MGLEALVPLAMIVAIFLLLVDLMHRHQRWAARYPPGPLPLPGLGNLLHVDFQNTPYCFDQLRRRFGDVFSLQLAWTPVVVLNGLAAVREAMVTRGEDTADRPPAPIYQVLGFGPRSQGVFLSRYGPAWREQRRFSVSTLRNLGLGKKSLEQWVTEEAACLCAAFADQAGRPFRPNGLLDKAVSNVIASLTCGRRFEYDDPRFLRLLDLAQEGLKEESGFLREVLNAVPVLLHIPALAGKVLRFQKAFLTQLDELLTEHRMTWDPAQPPRDLTEAFLAKKEKAKGSPESSFNDENLRIVVGNLFLAGMVTTLTTLAWGLLLMILHLDVQRRRRVSPGCPIVGTHVCPVRVQQEIDDVIGQVRRPEMGDQAHMPYTTAVIHEVQRFGDIIPLSVTHMTSHDIEVQGFRIPKGTTLITNLSSVLKDEAVWKKPFRFHPEHFLDAQGHFVKPEAFLPFSAGRRACLGEPLARMELFLFFTSLLQHFSFSVAAGQPRPSHSRVVSFLVTPSPYELCAVPR

SEQ ID NO: 21968 - protein, 497 aa, Homo sapiens; identical to SEQ ID NO: 1212
  Payload ID: 4434
  Gene Symbol: CYP2D7
  Gene Name: cytochrome P450, family 2, subfamily D, polypeptide 7 (gene/pseudogene)
  ENSP ID: ENSP00000483834

SEQ ID NO: 21969 - protein, 515 aa, Homo sapiens
  Payload ID: 4434
  Gene Symbol: CYP2D7
  Gene Name: cytochrome P450, family 2, subfamily D, polypeptide 7 (gene/pseudogene)
  Uniprot ID: A0A087X1C5
  ENSP ID: ENSP00000484065
MGLEALVPLAMIVAIFLLLVDLMHRHQRWAARYPPGPLPLPGLGNLLHVDFQNTPYCFDQLRRRFGDVFSLQLAWTPVVVLNGLAAVREAMVTRGEDTADRPPAPIYQVLGFGPRSQGVILSRYGPAWREQRRFSVSTLRNLGLGKKSLEQWVTEEAACLCAAFADQAGRPFRPNGLLDKAVSNVIASLTCGRRFEYDDPRFLRLLDLAQEGLKEESGFLREVLNAVPVLPHIPALAGKVLRFQKAFLTQLDELLTEHRMTWDPAQPPRDLTEAFLAKKEKAKGSPESSFNDENLRIVVGNLFLAGMVTTSTTLAWGLLLMILHLDVQRGRRVSPGCPIVGTHVCPVRVQQEIDDVIGQVRRPEMGDQAHMPCTTAVIHEVQHFGDIVPLGVTHMTSRDIEVQGFRIPKGTTLITNLSSVLKDEAVWKKPFRFHPEHFLDAQGHFVKPEAFLPFSAGRRACLGEPLARMELFLFFTSLLQHFSFSVAAGQPRPSHSRVVSFLVTPSPYELCAVPR

SEQ ID NO: 21970 - protein, 45 aa, Homo sapiens; identical to SEQ ID NO: 21957
  Payload ID: 4434
  Gene Symbol: CYP2D7
  Gene Name: cytochrome P450, family 2, subfamily D, polypeptide 7 (gene/pseudogene)
  ENSP ID: ENSP00000484386

SEQ ID NO: 21971 - protein, 487 aa, Homo sapiens
  Payload ID: 4434
  Gene Symbol: CYP2D7
  Gene Name: cytochrome P450, family 2, subfamily D, polypeptide 7 (gene/pseudogene)
  ENSP ID: ENSP00000487044
MGLEALVPLAMIVAIFLLLVDLMHRHQRWAARYPPGPLPLPGLGNLAACGLPEHTILLRPVAAPLRGRVQPAAGLDAGGRAQWAGGRARGDGDPRRGHGRPPACAHLPGPGLRAAFPRGVPVALWARVARAEALLRVHLAQLGPGQEVAGAVGDRGGRLPLCRLRRPSRTPLSPQRSLGQSREQRDRLPHLRAPLRVRRPSLPQAAGPSSGGTEGGVGLPARGAECCPRPPAHPSAGWQGPTLPKGFPDPAGAANAQDDLGPSPATPRPDGLPGKEGEGQGEPEQLQEPAHSGGPVPCRDGDHLDHAGLGPPAHDPTPGCAAPCPTGDRRRDRAGAATRDGPGSHALHHCRDSRGAALWGHHPPECDPYDIPHRSTGLPHPGNDTHHQPVIGAEGGRLEEALPLPPRTLPGCPGPLCEAGGLPAFLSRPPCMPRGAPGPHGALPLLHLPAAALQLLRGRRTAPAQPLSCRQLSGDPIPLRALCCAPL

SEQ ID NO: 21972 - protein, 485 aa, Homo sapiens
  Payload ID: 4434
  Gene Symbol: CYP2D7
  Gene Name: cytochrome P450, family 2, subfamily D, polypeptide 7 (gene/pseudogene)
  ENSP ID: ENSP00000488911
MGLEALVPLAMIVAIFLLLVDLMHRHQRWAARYPPGPLPLPGLGNLAACGLPEHTILLRPVAAPLRGRVQPAAGLDAGGRAQWAGGRARGDGDPRRGHGRPPACAHLPGPGLRAAFPRGDPVALWARVARAEALLRVHLAQLGPGQEVAGAVGDRGGRLPLCRLRRPSRTPLSPQRPLGQSREQRDRLPHLRAPLRVRRPSLPQAAGPSSGGTEGGVGLPARGAECCPRPPAHPSAGWQGPTLPKGFPDPAGAANAQDDLGPSPATPRPDGLPGKEGEGQGEPEQLQEPAHSGGPVPCRDGDHLDHAGLGPPAHDPTPGCAAPCPTGDRRRDRAGAATRDGPGSHALHHCRDSGAALWGHRPPGCDPYDIPHRSTGLPHPGNDTHHQPVIGAEGGRLEEALPLPPRTLPGCPGPLCEAGGLPAFLSRPPCMPRGAPGPHGALPLLHLPAAALQLLRGRRTAPAQPLSCRQLSGDPIPLRALCCAP

SEQ ID NO: 21973 - protein, 446 aa, Homo sapiens
  Payload ID: 4434
  Gene Symbol: CYP2D7
  Gene Name: cytochrome P450, family 2, subfamily D, polypeptide 7 (gene/pseudogene)
  ENSP ID: ENSP00000488927
MGLEALVPLAMIVAIFLLLVDLMHRHQRWAARYPPGPLPLPGLGNLLHVDFQNTPYCFDQLRRRFGDVFSLQLAWTPVVVLNGLAAVREAMVTRGEDTADRPPAPIYQVLGFGPRSQGRPFRPNGLLDKAVSNVIASLTCGRRFEYDDPRFLRLLDLAQEGLKEESGFLREVLNAVPVLPHIPALAGKVLRFQKAFLTQLDELLTEHRMTWDPAQPPRDLTEAFLAKKEKAKGSPESSFNDENLRIVVGNLFLAGMVTTSTTLAWGLLLMILHLDVQLRVQQEIDDVIGQVRRPEMGDQAHMPYTTAVIHEVQRFGDIVPLGVTHMTSRDIEVQGFRIPKGTTLITNLSSVLKDEAVWKKPFRFHPEHFLDAQGHFVKPEAFLPFSAGRRACLGEPLARMELFLFFTSLLQHFSFSVAAGQPRPSHSRVVSFLVTPSPYELCAVPR

SEQ ID NO: 21974 - protein, 504 aa, Homo sapiens
  Payload ID: 4434
  Gene Symbol: CYP2D7
  Gene Name: cytochrome P450, family 2, subfamily D, polypeptide 7 (gene/pseudogene)
  ENSP ID: ENSP00000489014
MGLEALVPLAMIVAIFLLLVDLMHRHQRWAARYPPGPLPLPGLGNLAACGLPEHTILLRPVAAPLRGRVQPAAGLDAGGRAQWAGGRARGDGDPRRGHGRPPACAHLPGPGLRAAFPRGDPVALWARVARAEALLRVHLAQLGPGQEVAGAVGDRGGRLPLCRLRRPSRTPLSPQRPLGQSREQRDRLPHLRAPLRVRRPSLPQAAGPSSGGTEGGVGLPARGAECCPRPPAHPSAGWQGPTLPKGFPDPAGAANAQDDLGPSPATPRPDGLPGKEGEGQGEPEQLQEPAHSGGPVPCRDGDHLDHAGLGPPAHDPTPGCAARKESVPWVLTHCGDACLSSPCPTGDRRRDRAGAATRDGPGSHALHHCRDSGAALWGHRPPGCDPYDIPHRSTGLPHPGNDTHHQPVIGAEGGRLEEALPLPPRTLPGCPGPLCEAGGLPAFLSRPPCMPRGAPGPHGALPLLHLPAAALQLLRGRRTAPAQPLSCRQLSGDPIPLRALCCAP

SEQ ID NO: 21975 - protein, 45 aa, Homo sapiens; identical to SEQ ID NO: 21957
  Payload ID: 4434
  Gene Symbol: CYP2D7
  Gene Name: cytochrome P450, family 2, subfamily D, polypeptide 7 (gene/pseudogene)
  ENSP ID: ENSP00000489078

SEQ ID NO: 21976 - protein, 515 aa, Homo sapiens
  Payload ID: 4434
  Gene Symbol: CYP2D7
  Gene Name: cytochrome P450, family 2, subfamily D, polypeptide 7 (gene/pseudogene)
  ENSP ID: ENSP00000489459
MGLEALVPLAMIVAIFLLLVDLMHRHQRWAARYPPGPLPLPGLGNLLHVDFQNTPYCFDQLRRRFGDVFSLQLAWTPVVVLNGLAAVREAMVTRGEDTADRPPAPIYQVLGFGPRSQGVILSRYGPAWREQRRFSVSTLRNLGLGKKSLEQWVTEEAACLCAAFADQAGRPFRPNGLLDKAVSNVIASLTCGRRFEYDDPRFLRLLDLAQEGLKEESGFLREVLNAVPVLPHIPALAGKVLRFQKAFLTQLDELLTEHRMTWDPAQPPRDLTEAFLAKKEKAKGSPESSFNDENLRIVVGNLFLAGMVTTSTTLAWGLLLMILHLDVQRGRRVSPGCPIVGTHVCPVRVQQEIDDVIGQVRRPEMGDQAHMPYTTAVIHEVQRFGDIVPLGVTHMTSRDIEVQGFRIPKGTTLITNLSSVLKDEAVWKKPFRFHPEHFLDAQGHFVKPEAFLPFSAGRRACLGEPLARMELFLFFTSLLQHFSFSVAAGQPRPSHSRVVSFLVTPSPYELCAVPR

SEQ ID NO: 21977 - protein, 493 aa, Homo sapiens
  Payload ID: 4435
  Gene Symbol: CYP2E1
  Gene Name: cytochrome P450, family 2, subfamily E, polypeptide 1
  Uniprot ID: P05181
  ENSP ID: ENSP00000252945
MSALGVTVALLVWAAFLLLVSMWRQVHSSWNLPPGPFPLPIIGNLFQLELKNIPKSFTRLAQRFGPVFTLYVGSQRMVVMHGYKAVKEALLDYKDEFSGRGDLPAFHAHRDRGIIFNNGPTWKDIRRFSLTTLRNYGMGKQGNESRIQREAHFLLEALRKTQGQPFDPTFLIGCAPCNVIADILFRKHFDYNDEKFLRLMYLFNENFHLLSTPWLQLYNNFPSFLHYLPGSHRKVIKNVAEVKEYVSERVKEHHQSLDPNCPRDLTDCLLVEMEKEKHSAERLYTMDGITVTVADLFFAGTETTSTTLRYGLLILMKYPEIEEKLHEEIDRVIGPSRIPAIKDRQEMPYMDAVVHEIQRFITLVPSNLPHEATRDTIFRGYLIPKGTVVVPTLDSVLYDNQEFPDPEKFKPEHFLNENGKFKYSDYFKPFSTGKRVCAGEGLARMELFLLLCAILQHFNLKPLVDPKDIDLSPIHIGFGCIPPRYKLCVIPRS

SEQ ID NO: 21978 - protein, 306 aa, Homo sapiens
  Payload ID: 4435
  Gene Symbol: CYP2E1
  Gene Name: cytochrome P450, family 2, subfamily E, polypeptide 1
  ENSP ID: ENSP00000397299
RPFPASHHREPLPVGIEEYSQVLHPGQPFDPTFLIGCAPCNVIADILFRKHFDYNDEKFLRLMYLFNENFHLLSTPWLQLYNNFPSFLHYLPGSHRKVIKNVAEVKEYVSERVKEHHQSLDPNCPRDLTDCLLVEMEKEKHSAERLYTMDGITVTVADLFFAGTETTSTTLRYGLLILMKYPEIEEKLHEEIDRVIGPSRIPAIKDRQEMPYMDAVVHEIQRFITLVPSNLPHEATRDTIFRGYLIPKGTVVVPTLDSVLYDNQEFPDPEKFKPEHFLNENGKFKYSDYFKPFSTGKRVCAGEGLA

SEQ ID NO: 21979 - protein, 356 aa, Homo sapiens
  Payload ID: 4435
  Gene Symbol: CYP2E1
  Gene Name: cytochrome P450, family 2, subfamily E, polypeptide 1
  ENSP ID: ENSP00000412754
RPFPASHHREPLPVGIEEYSQVLHPGIIFNNGPTWKDIRRFSLTTLRNYGMGKQGNESRIQREAHFLLEALRKTQGQPFDPTFLIGCAPCNVIADILFRKHFDYNDEKFLRLMYLFNENFHLLSTPWLQLYNNFPSFLHYLPGSHRKVIKNVAEVKEYVSERVKEHHQSLDPNCPRDLTDCLLVEMEKEKHSAERLYTMDGITVTVADLFFAGTETTSTTLRYGLLILMKYPEIEEKLHEEIDRVIGPSRIPAIKDRQEMPYMDAVVHEIQRFITLVPSNLPHEATRDTIFRGYLIPKGTVVVPTLDSVLYDNQEFPDPEKFKPEHFLNENGKFKYSDYFKPFSTGKRVCAGEGLA

SEQ ID NO: 21980 - protein, 86 aa, Homo sapiens
  Payload ID: 4435
  Gene Symbol: CYP2E1
  Gene Name: cytochrome P450, family 2, subfamily E, polypeptide 1
  ENSP ID: ENSP00000437799
MSALGVTVALLVWAAFLLLVSMWRQVHSSWNLPPGPFPLPIIGNLFQLELKNIPKSFTRLAQRFGPVFTLYVGSQRMVVMHGYKAV

SEQ ID NO: 21981 - protein, 493 aa, Homo sapiens; identical to SEQ ID NO: 21977
  Payload ID: 4435
  Gene Symbol: CYP2E1
  Gene Name: cytochrome P450, family 2, subfamily E, polypeptide 1
  Uniprot ID: P05181
  ENSP ID: ENSP00000440689

SEQ ID NO: 21982 - protein, 43 aa, Homo sapiens
  Payload ID: 4435
  Gene Symbol: CYP2E1
  Gene Name: cytochrome P450, family 2, subfamily E, polypeptide 1
  ENSP ID: ENSP00000444958
  MOD_RES (1)..(1): Any amino acid
XGPFPLPIIGNLFQLELKNIPKSFTRESFLIMDLPGRTSGGFP

SEQ ID NO: 21983 - protein, 491 aa, Homo sapiens
  Payload ID: 4436
  Gene Symbol: CYP2F1
  Gene Name: cytochrome P450, family 2, subfamily F, polypeptide 1
  Uniprot ID: P24903
  ENSP ID: ENSP00000333534
MDSISTAILLLLLALVCLLLTLSSRDKGKLPPGPRPLSILGNLLLLCSQDMLTSLTKLSKEYGSMYTVHLGPRRVVVLSGYQAVKEALVDQGEEFSGRGDYPAFFNFTKGNGIAFSSGDRWKVLRQFSIQILRNFGMGKRSIEERILEEGSFLLAELRKTEGEPFDPTFVLSRSVSNIICSVLFGSRFDYDDERLLTIIRLINDNFQIMSSPWGELYDIFPSLLDWVPGPHQRIFQNFKCLRDLIAHSVHDHQASLDPRSPRDFIQCFLTKMAEEKEDPLSHFHMDTLLMTTHNLLFGGTKTVSTTLHHAFLALMKYPKVQARVQEEIDLVVGRARLPALKDRAAMPYTDAVIHEVQRFADIIPMNLPHRVTRDTAFRGFLIPKGTDVITLLNTVHYDPSQFLTPQEFNPEHFLDANQSFKKSPAFMPFSAGRRLCLGESLARMELFLYLTAILQSFSLQPLGAPEDIDLTPLSSGLGNLPRPFQLCLRPR

SEQ ID NO: 21984 - protein, 81 aa, Homo sapiens
  Payload ID: 4436
  Gene Symbol: CYP2F1
  Gene Name: cytochrome P450, family 2, subfamily F, polypeptide 1
  ENSP ID: ENSP00000443424
  MOD_RES (1)..(1): Any amino acid
XPHRVTRDTAFRGFLIPKGTDVITLLNTVHYDPSQFLTPQEFNPEHFLDANQSFKKSPAFMPFSAALDAQRHSFLLSTLLL

SEQ ID NO: 21985 - protein, 172 aa, Homo sapiens
  Payload ID: 4436
  Gene Symbol: CYP2F1
  Gene Name: cytochrome P450, family 2, subfamily F, polypeptide 1
  ENSP ID: ENSP00000470136
ARVQEEIDLVVGRARLPALKDRAAMPYTDAVIHEVQRFADIIPMNLPHRVTRDTAFRGFLIPKGTDVITLLNTVHYDPSQFLTPQEFNPEHFLDANQSFKKSPAFMPFSAGEGRNQSLSGPISTYIPHPNSTCQILSLLPSTHSQLWMHRDIHSSSQLCSYRQVVTKILVKQ

SEQ ID NO: 21986 - protein, 320 aa, Homo sapiens
  Payload ID: 4436
  Gene Symbol: CYP2F1
  Gene Name: cytochrome P450, family 2, subfamily F, polypeptide 1
  Uniprot ID: P24903
  ENSP ID: ENSP00000471416
MDSISTAILLLLLALVCLLLTLSSRDKGKLPPGPRPLSILGNLLLLCSQDMLTSLTKLSKEYGSMYTVHLGPRRVVVLSGYQAVKEALVDQGEEFSGRGDYPAFFNFTKGNGIAFSSGDRWKVLRQFSIQILRNFGMGKRSIEERILEEGSFLLAELRKTEGEPFDPTFVLSRSVSNIICSVLFGSRFDYDDERLLTIIRLINDNFQIMSSPWGELYDIFPSLLDWVPGPHQRIFQNFKCLRDLIAHSVHDHQASLDPRSPRDFIQCFLTKMAEEKEDPLSHFHMDTLLMTTHNLLFGGTKTPACRRRSTSWWDARGCRR

SEQ ID NO: 21987 - protein, 502 aa, Homo sapiens
  Payload ID: 4437
  Gene Symbol: CYP2J2
  Gene Name: cytochrome P450, family 2, subfamily J, polypeptide 2
  Uniprot ID: P51589
  ENSP ID: ENSP00000360247
MLAAMGSLAAALWAVVHPRTLLLGTVAFLLAADFLKRRRPKNYPPGPWRLPFLGNFFLVDFEQSHLEVQLFVKKYGNLFSLELGDISAVLITGLPLIKEALIHMDQNFGNRPVTPMREHIFKKNGLIMSSGQAWKEQRRFTLTALRNFGLGKKSLEERIQEEAQHLTEAIKEENGQPFDPHFKINNAVSNIICSITFGERFEYQDSWFQQLLKLLDEVTYLEASKTCQLYNVFPWIMKFLPGPHQTLFSNWKKLKLFVSHMIDKHRKDWNPAETRDFIDAYLKEMSKHTGNPTSSFHEENLICSTLDLFFAGTETTSTTLRWALLYMALYPEIQEKVQAEIDRVIGQGQQPSTAARESMPYTNAVIHEVQRMGNIIPLNVPREVTVDTTLAGYHLPKGTMILTNLTALHRDPTEWATPDTFNPDHFLENGQFKKREAFMPFSIGKRACLGEQLARTELFIFFTSLMQKFTFRPPNNEKLSLKFRMGITISPVSHRLCAVPQV

SEQ ID NO: 21988 - protein, 501 aa, Homo sapiens
  Payload ID: 4438
  Gene Symbol: CYP2R1
  Gene Name: cytochrome P450, family 2, subfamily R, polypeptide 1
  Uniprot ID: Q6VVX0
  ENSP ID: ENSP00000334592
MWKLWRAEEGAAALGGALFLLLFALGVRQLLKQRRPMGFPPGPPGLPFIGNIYSLAASSELPHVYMRKQSQVYGEIFSLDLGGISTVVLNGYDVVKECLVHQSEIFADRPCLPLFMKMTKMGGLLNSRYGRGWVDHRRLAVNSFRYFGYGQKSFESKILEETKFFNDAIETYKGRPFDFKQLITNAVSNITNLIIFGERFTYEDTDFQHMIELFSENVELAASASVFLYNAFPWIGILPFGKHQQLFRNAAVVYDFLSRLIEKASVNRKPQLPQHFVDAYLDEMDQGKNDPSSTFSKENLIFSVGELIIAGTETTTNVLRWAILFMALYPNIQGQVQKEIDLIMGPNGKPSWDDKCKMPYTEAVLHEVLRFCNIVPLGIFHATSEDAVVRGYSIPKGTTVITNLYSVHFDEKYWRDPEVFHPERFLDSSGYFAKKEALVPFSLGRRHCLGEHLARMEMFLFFTALLQRFHLHFPHELVPDLKPRLGMTLQPQPYLICAERR

SEQ ID NO: 21989 - protein, 37 aa, Homo sapiens
  Payload ID: 4438
  Gene Symbol: CYP2R1
  Gene Name: cytochrome P450, family 2, subfamily R, polypeptide 1
  ENSP ID: ENSP00000432087
MPCSSKRNFCRQTMPSFIHEDDKNGRLTQFQIWPRMG

SEQ ID NO: 21990 - protein, 268 aa, Homo sapiens
  Payload ID: 4438
  Gene Symbol: CYP2R1
  Gene Name: cytochrome P450, family 2, subfamily R, polypeptide 1
  ENSP ID: ENSP00000435484
MPCSSKRNFCRQTMPSFIHEDDKNGRLIEKASVNRKPQLPQHFVDAYLDEMDQGKNDPSSTFSKENLIFSVGELIIAGTETTTNVLRWAILFMALYPNIQGQVQKEIDLIMGPNGKPSWDDKCKMPYTEAVLHEVLRFCNIVPLGIFHATSEDAVVRGYSIPKGTTVITNLYSVHFDEKYWRDPEVFHPERFLDSSGYFAKKEALVPFSLGRRHCLGEHLARMEMFLFFTALLQRFHLHFPHELVPDLKPRLGMTLQPQPYLICAERR

SEQ ID NO: 21991 - protein, 37 aa, Homo sapiens; identical to SEQ ID NO: 21989
  Payload ID: 4438
  Gene Symbol: CYP2R1
  Gene Name: cytochrome P450, family 2, subfamily R, polypeptide 1
  ENSP ID: ENSP00000465097

SEQ ID NO: 21992 - protein, 37 aa, Homo sapiens; identical to SEQ ID NO: 21989
  Payload ID: 4438
  Gene Symbol: CYP2R1
  Gene Name: cytochrome P450, family 2, subfamily R, polypeptide 1
  ENSP ID: ENSP00000466060

SEQ ID NO: 21993 - protein, 32 aa, Homo sapiens
  Payload ID: 4438
  Gene Symbol: CYP2R1
  Gene Name: cytochrome P450, family 2, subfamily R, polypeptide 1
  ENSP ID: ENSP00000466604
  MOD_RES (1)..(1): Any amino acid
XQSEIFADRPCLPLFMKMTKMGVLERPRSVPS

SEQ ID NO: 21994 - protein, 504 aa, Homo sapiens
  Payload ID: 4439
  Gene Symbol: CYP2S1
  Gene Name: cytochrome P450, family 2, subfamily S, polypeptide 1
  Uniprot ID: Q96SQ9
  ENSP ID: ENSP00000308032
MEATGTWALLLALALLLLLTLALSGTRARGHLPPGPTPLPLLGNLLQLRPGALYSGLMRLSKKYGPVFTIYLGPWRPVVVLVGQEAVREALGGQAEEFSGRGTVAMLEGTFDGHGVFFSNGERWRQLRKFTMLALRDLGMGKREGEELIQAEARCLVETFQGTEGRPFDPSLLLAQATSNVVCSLLFGLRFSYEDKEFQAVVRAAGGTLLGVSSQGGQTYEMFSWFLRPLPGPHKQLLHHVSTLAAFTVRQVQQHQGNLDASGPARDLVDAFLLKMAQEEQNPGTEFTNKNMLMTVIYLLFAGTMTVSTTVGYTLLLLMKYPHVQKWVREELNRELGAGQAPSLGDRTRLPYTDAVLHEAQRLLALVPMGIPRTLMRTTRFRGYTLPQGTEVFPLLGSILHDPNIFKHPEEFNPDRFLDADGRFRKHEAFLPFSLGKRVCLGEGLAKAELFLFFTTILQAFSLESPCPPDTLSLKPTVSGLFNIPPAFQLQVRPTDLHSTTQTR

SEQ ID NO: 21995 - protein, 60 aa, Homo sapiens
  Payload ID: 4439
  Gene Symbol: CYP2S1
  Gene Name: cytochrome P450, family 2, subfamily S, polypeptide 1
  ENSP ID: ENSP00000469593
MLEGTFDGHGGTKPRHRIHQQEHADDSHLFAVCWDDDGQHHGRLYPPAPDEIPSCPKVGT

SEQ ID NO: 21996 - protein, 73 aa, Homo sapiens
  Payload ID: 4439
  Gene Symbol: CYP2S1
  Gene Name: cytochrome P450, family 2, subfamily S, polypeptide 1
  ENSP ID: ENSP00000469850
AVCWDDDGQHHGRLYPPAPDEIPSCPKARRSSPSLAPSCMTPTSSSTQKSSTQTVSWMQMDGSGSMRRSCPSP

SEQ ID NO: 21997 - protein, 187 aa, Homo sapiens
  Payload ID: 4439
  Gene Symbol: CYP2S1
  Gene Name: cytochrome P450, family 2, subfamily S, polypeptide 1
  ENSP ID: ENSP00000471016
MEATGTWALLLALALLLLLTLALSGTRARGHLPPGPTPLPLLGNLLQLRPGALYSGLMRLSKKYGPVFTIYLGPWRPVVVLVGQEAVREALGGQAEEFSGRGTVAMLEGTFDGHGVFFSNGERWRQLRKFTMLALRDLGMGKREGEELIQAEARCLVETFQGTEGGTKPRHRIHQQEHADDSHLFAV

SEQ ID NO: 21998 - protein, 175 aa, Homo sapiens
  Payload ID: 4439
  Gene Symbol: CYP2S1
  Gene Name: cytochrome P450, family 2, subfamily S, polypeptide 1
  ENSP ID: ENSP00000471637
MEATGTWALLLALALLLLLTLALSGTRARGHLPPGPTPLPLLGNLLQLRPGALYSGLMREEQNPGTEFTNKNMLMTVIYLLFAGTMTVSTTVGYTLLLLMKYPHVQKWVREELNRELGAGQAPSLGDRTRLPYTDAVLHEAQRLLALVPMGIPRTLMRTTRFRGYTLPQGTEVFP

SEQ ID NO: 21999 - protein, 165 aa, Homo sapiens
  Payload ID: 4439
  Gene Symbol: CYP2S1
  Gene Name: cytochrome P450, family 2, subfamily S, polypeptide 1
  ENSP ID: ENSP00000472555
MEATGTWALLLALALLLLLTLALSGTRARGHLPPGPTPLPLLGNLLQLRPGALYSGLMRLSKKYGPVFTIYLGPWRPVVVLVGQEAVREALGGQAEEFSGRGTVAMLEGTFDGHGGTKPRHRIHQQEHADDSHLFAVCWDDDGQHHGRLYPPAPDEIPSCPKVGT

SEQ ID NO: 22000 - protein, 544 aa, Homo sapiens
  Payload ID: 4440
  Gene Symbol: CYP2U1
  Gene Name: cytochrome P450, family 2, subfamily U, polypeptide 1
  Uniprot ID: Q7Z449
  ENSP ID: ENSP00000333212
MSSPGPSQPPAEDPPWPARLLRAPLGLLRLDPSGGALLLCGLVALLGWSWLRRRRARGIPPGPTPWPLVGNFGHVLLPPFLRRRSWLSSRTRAAGIDPSVIGPQVLLAHLARVYGSIFSFFIGHYLVVVLSDFHSVREALVQQAEVFSDRPRVPLISIVTKEKGVVFAHYGPVWRQQRKFSHSTLRHFGLGKLSLEPKIIEEFKYVKAEMQKHGEDPFCPFSIISNAVSNIICSLCFGQRFDYTNSEFKKMLGFMSRGLEICLNSQVLLVNICPWLYYLPFGPFKELRQIEKDITSFLKKIIKDHQESLDRENPQDFIDMYLLHMEEERKNNSNSSFDEEYLFYIIGDLFIAGTDTTTNSLLWCLLYMSLNPDVQEKVHEEIERVIGANRAPSLTDKAQMPYTEATIMEVQRLTVVVPLAIPHMTSENTVLQGYTIPKGTLILPNLWSVHRDPAIWEKPEDFYPNRFLDDQGQLIKKETFIPFGIGKRVCMGEQLAKMELFLMFVSLMQSFAFALPEDSKKPLLTGRFGLTLAPHPFNITISRR

SEQ ID NO: 22001 - protein, 335 aa, Homo sapiens
  Payload ID: 4440
  Gene Symbol: CYP2U1
  Gene Name: cytochrome P450, family 2, subfamily U, polypeptide 1
  ENSP ID: ENSP00000423667
MQKHGEDPFCPFSIISNAVSNIICSLCFGQRFDYTNSEFKKMLGFMSRGLEICLNSQVLLVNICPWLYYLPFGPFKELRQIEKDITSFLKKIIKDHQESLDRENPQDFIDMYLLHMEEERKNNSNSSFDEEYLFYIIGDLFIAGTDTTTNSLLWCLLYMSLNPDVQEKVHEEIERVIGANRAPSLTDKAQMPYTEATIMEVQRLTVVVPLAIPHMTSENTVLQGYTIPKGTLILPNLWSVHRDPAIWEKPEDFYPNRFLDDQGQLIKKETFIPFGIGKRVCMGEQLAKMELFLMFVSLMQSFAFALPEDSKKPLLTGRFGLTLAPHPFNITISRR

SEQ ID NO: 22002 - protein, 490 aa, Homo sapiens
  Payload ID: 4441
  Gene Symbol: CYP2W1
  Gene Name: cytochrome P450, family 2, subfamily W, polypeptide 1
  Uniprot ID: Q8TAV3
  ENSP ID: ENSP00000310149
MALLLLLFLGLLGLWGLLCACAQDPSPAARWPPGPRPLPLVGNLHLLRLSQQDRSLMELSERYGPVFTVHLGRQKTVVLTGFEAVKEALAGPGQELADRPPIAIFQLIQRGGGIFFSSGARWRAARQFTVRALHSLGVGREPVADKILQELKCLSGQLDGYRGRPFPLALLGWAPSNITFALLFGRRFDYRDPVFVSLLGLIDEVMVLLGSPGLQLFNVYPWLGALLQLHRPVLRKIEEVRAILRTLLEARRPHVCPGDPVCSYVDALIQQGQGDDPEGLFAEANAVACTLDMVMAGTETTSATLQWAALLMGRHPDVQGRVQEELDRVLGPGRTPRLEDQQALPYTSAVLHEVQRFITLLPHVPRCTAADTQLGGFLLPKGTPVIPLLTSVLLDETQWQTPGQFNPGHFLDANGHFVKREAFLPFSAGRRVCVGERLARTELFLLFAGLLQRYRLLPPPGVSPASLDTTPARAFTMRPRAQALCAVPRP

SEQ ID NO: 22003 - protein, 408 aa, Homo sapiens
  Payload ID: 4441
  Gene Symbol: CYP2W1
  Gene Name: cytochrome P450, family 2, subfamily W, polypeptide 1
  ENSP ID: ENSP00000344178
MELSERYGPVFTVHLGRQKTVVLTGFEAVKEALAGPGQELADRPPIAIFQLIQRGGGIFFSSGARWRAARQFTVRALHSLGVGREPVADKILQELKCLSGQLDGYRGRPFPLALLGWAPSNITFALLFGRRFDYRDPVFVSLLGLIDEVMVLLGSPGLQLFNVYPWLGALLQLHRPVLRKIEEVRAILRTLLEARRPHVCPGDPVCSYVDALIQQGQGDDPEGLFAEANAVACTLDMVMAGTETTSATLQWAALLMGRHPDVQGRVQEELDRVLGPGRTPRLEDQQALPYTSAVLHEVQRFITLLPHVPRCTAADTQLGGFLLPKGTPVIPLLTSVLLDETQWQTPGQFNPGHFLDANGHFVKREAFLPFSAGQQPSGPGWGGTSRAPGVGRPQLRLPPLHPPPDLRF

SEQ ID NO: 22004 - protein, 288 aa, Homo sapiens
  Payload ID: 4441
  Gene Symbol: CYP2W1
  Gene Name: cytochrome P450, family 2, subfamily W, polypeptide 1
  ENSP ID: ENSP00000392581
LQLHRPVLRKIEEVRAILRTLLEARRPHVCPGDPVCSYVDALIQQGQGDDPEGLFAEANAVACTLDMVMAGTETTSATLQWAALLMGRHPDVQGRVQEELDRVLGPGRTPRLEDQQALPYTSAVLHEVQRFITLLPHVPRCTAADTQLGGFLLPKGTPVIPLLTSVLLDETQWQTPGQFNPGHFLDANGHFVKREAFLPFSAGSEGGCGGCSCAPLGRSPPLPSRSRPGAAHSVPGHPPQAAASVLGSAWPGPSSSCCLPASCRGTACCPRLASVRPPWTPRPPGLLP

SEQ ID NO: 22005 - protein, 462 aa, Homo sapiens
  Payload ID: 4442
  Gene Symbol: CYP20A1
  Gene Name: cytochrome P450, family 20, subfamily A, polypeptide 1
  Uniprot ID: Q6UW02
  ENSP ID: ENSP00000348380
MLDFAIFAVTFLLALVGAVLYLYPASRQAAGIPGITPTEEKDGNLPDIVNSGSLHEFLVNLHERYGPVVSFWFGRRLVVSLGTVDVLKQHINPNKTSDPFETMLKSLLRYQSGGGSVSENHMRKKLYENGVTDSLKSNFALLLKLSEELLDKWLSYPETQHVPLSQHMLGFAMKSVTQMVMGSTFEDDQEVIRFQKNHGTVWSEIGKGFLDGSLDKNMTRKKQYEDALMQLESVLRNIIKERKGRNFSQHIFIDSLVQGNLNDQQILEDSMIFSLASCIITAKLCTWAICFLTTSEEVQKKLYEEINQVFGNGPVTPEKIEQLRYCQHVLCETVRTAKLTPVSAQLQDIEGKIDRFIIPRETLVLYALGVVLQDPNTWPSPHKFDPDRFDDELVMKTFSSLGFSGTQECPELRFAYMVTTVLLSVLVKRLHLLSVEGQVIETKYELVTSSREEAWITVSKRY

SEQ ID NO: 22006 - protein, 44 aa, Homo sapiens
  Payload ID: 4442
  Gene Symbol: CYP20A1
  Gene Name: cytochrome P450, family 20, subfamily A, polypeptide 1
  ENSP ID: ENSP00000388070
MLDFAIFAVTFLLALVGAVLYLYPASRQAAGIPGITPTEENGPF

SEQ ID NO: 22007 - protein, 44 aa, Homo sapiens; identical to SEQ ID NO: 22006
  Payload ID: 4442
  Gene Symbol: CYP20A1
  Gene Name: cytochrome P450, family 20, subfamily A, polypeptide 1
  ENSP ID: ENSP00000398046

SEQ ID NO: 22008 - protein, 470 aa, Homo sapiens
  Payload ID: 4442
  Gene Symbol: CYP20A1
  Gene Name: cytochrome P450, family 20, subfamily A, polypeptide 1
  ENSP ID: ENSP00000407860
MLDFAIFAVTFLLALVGAVLYLYPASRQAAGIPGITPTEEKDGNLPDIVNSGSLHEFLVNLHERYGPVVSFWFGRRLVVSLGTVDVLKQHINPNKTSDPFETMLKSLLRYQSGGGSVSENHMRKKLYENGVTDSLKSNFALLLKLSEELLDKWLSYPETQHVPLSQHMLGFAMKSVTQMVMGSTFEDDQEVIRFQKNHGTLCIFTYFQVWSEIGKGFLDGSLDKNMTRKKQYEDALMQLESVLRNIIKERKGRNFSQHIFIDSLVQGNLNDQQILEDSMIFSLASCIITAKLCTWAICFLTTSEEVQKKLYEEINQVFGNGPVTPEKIEQLRYCQHVLCETVRTAKLTPVSAQLQDIEGKIDRFIIPRETLVLYALGVVLQDPNTWPSPHKFDPDRFDDELVMKTFSSLGFSGTQECPELRFAYMVTTVLLSVLVKRLHLLSVEGQVIETKYELVTSSREEAWITVSKRY

SEQ ID NO: 22009 - protein, 258 aa, Homo sapiens
  Payload ID: 4442
  Gene Symbol: CYP20A1
  Gene Name: cytochrome P450, family 20, subfamily A, polypeptide 1
  ENSP ID: ENSP00000411341
MLDFAIFAVTFLLALVGAVLYLYPASRQAAGIPGITPTEEKDGNLPDIVNSGSLHEFLVNLHERYGPVVSFWFGRRLVVSLGTVDVLKQHINPNKTSDPFETMLKSLLRYQSGGGSVSENHMRKKLYENGVTDSLKSNFALLLKLSEELLDKWLSYPETQHVPLSQHMLGFAMKSVTQMVMGSTFEDDQEVIRFQKNHGTILEDSMIFSLASCIITAKLCTWAICFLTTSEEVQKKLYEEINQVFGNGPVTPEKIEQL

SEQ ID NO: 22010 - protein, 208 aa, Homo sapiens
  Payload ID: 4442
  Gene Symbol: CYP20A1
  Gene Name: cytochrome P450, family 20, subfamily A, polypeptide 1
  ENSP ID: ENSP00000414831
MLDFAIFAVTFLLALVGAVLYLYPASRQAAGIPGITPTEEKDGNLPDIVNSGSLHEFLVNLHERYGPVVSFWFGRRLVVSLGTVDVLKQHINPNKTSDPFETMLKSLLRYQSGGGSVSENHMRKKLYENGVTDSLKSNFALLLKLSEELLDKWLSYPETQHVPLSQHMLGFAMKSVTQMVMGSTFEDDQEVIRFQKNHGTPSCNWSLF

SEQ ID NO: 22011 - protein, 435 aa, Homo sapiens
  Payload ID: 4442
  Gene Symbol: CYP20A1
  Gene Name: cytochrome P450, family 20, subfamily A, polypeptide 1
  Uniprot ID: Q6UW02
  ENSP ID: ENSP00000477866
MLDFAIFAVTFLLALVGAVLYLYPASRQAAGIPGITPTEEKDGNLPDIVNSGSLHEFLVNLHERYGPVVSFWFGRRLVVSLGTVDVLKQHINPNKTSDPFETMLKSLLRYQSGGGSVSENHMRKKLYENGVTDSLKSNFALLLKLSEELLDKWLSYPETQHVPLSQHMLGFAMKSVTQMVMGSTFEDDQEVIRFQKNHGTPSCNWSLFKEHHKRTKRKELQSTYFIDSLVQGNLNDQQILEDSMIFSLASCIITAKLCTWAICFLTTSEEVQKKLYEEINQVFGNGPVTPEKIEQLRYCQHVLCETVRTAKLTPVSAQLQDIEGKIDRFIIPRETLVLYALGVVLQDPNTWPSPHKFDPDRFDDELVMKTFSSLGFSGTQECPELRFAYMVTTVLLSVLVKRLHLLSVEGQVIETKYELVTSSREEAWITVSKRY

SEQ ID NO: 22012 - protein, 192 aa, Homo sapiens
  Payload ID: 4442
  Gene Symbol: CYP20A1
  Gene Name: cytochrome P450, family 20, subfamily A, polypeptide 1
  ENSP ID: ENSP00000482757
MIFSLASCIITAKLCTWAICFLTTSEEVQKKLYEEINQVFGNGPVTPEKIEQLRYCQHVLCETVRTAKLTPVSAQLQDIEGKIDRFIIPRETLVLYALGVVLQDPNTWPSPHKFDPDRFDDELVMKTFSSLGFSGTQECPELRFAYMVTTVLLSVLVKRLHLLSVEGQVIETKYELVTSSREEAWITVSKRY

SEQ ID NO: 22013 - protein, 465 aa, Homo sapiens
  Payload ID: 4443
  Gene Symbol: CYP21A2
  Gene Name: cytochrome P450, family 21, subfamily A, polypeptide 2
  Uniprot ID: P08686
  ENSP ID: ENSP00000372811
MLLLGLLLLLPLLAGARLLWNWWKLRSLHLPPLAPGFLHLLQPDLPIYLLGLTQKFGPIYRLHLGLQDKLVSRNYPDLSLGDYSLLWKAHKKLTRSALLLGIRDSMEPVVEQLTQEFCERMRAQPGTPVAIEEEFSLLTCSIICYLTFGDKIKDDNLMPAYYKCIQEVLKTWSHWSIQIVDVIPFLRFFPNPGLRRLKQAIEKRDHIVEMQLRQHKESLVAGQWRDMMDYMLQGVAQPSMEEGSGQLLEGHVHMAAVDLLIGGTETTANTLSWAVVFLLHHPEIQQRLQEELDHELGPGASSSRVPYKDRARLPLLNATIAEVLRLRPVVPLALPHRTTRPSSISGYDIPEGTVIIPNLQGAHLDETVWERPHEFWPDRFLEPGKNSRALAFGCGARVCLGEPLARLELFVVLTRLLQAFTLLPSGDALPSLQPLPHCSVILKMQPFQVRLQPRGMGAHSPGQSQ

SEQ ID NO: 22014 - protein, 495 aa, Homo sapiens
  Payload ID: 4443
  Gene Symbol: CYP21A2
  Gene Name: cytochrome P450, family 21, subfamily A, polypeptide 2
  ENSP ID: ENSP00000372812
MLLLGLLLLLPLLAGARLLWNWWKLRSLHLPPLAPGFLHLLQPDLPIYLLGLTQKFGPIYRLHLGLQDVVVLNSKRTIEEAMVKKWADFAGRPEPLTYKLVSRNYPDLSLGDYSLLWKAHKKLTRSALLLGIRDSMEPVVEQLTQEFCERMRAQPGTPVAIEEEFSLLTCSIICYLTFGDKIKDDNLMPAYYKCIQEVLKTWSHWSIQIVDVIPFLRFFPNPGLRRLKQAIEKRDHIVEMQLRQHKESLVAGQWRDMMDYMLQGVAQPSMEEGSGQLLEGHVHMAAVDLLIGGTETTANTLSWAVVFLLHHPEIQQRLQEELDHELGPGASSSRVPYKDRARLPLLNATIAEVLRLRPVVPLALPHRTTRPSSISGYDIPEGTVIIPNLQGAHLDETVWERPHEFWPDRFLEPGKNSRALAFGCGARVCLGEPLARLELFVVLTRLLQAFTLLPSGDALPSLQPLPHCSVILKMQPFQVRLQPRGMGAHSPGQSQ

SEQ ID NO: 22015 - protein, 464 aa, Homo sapiens
  Payload ID: 4443
  Gene Symbol: CYP21A2
  Gene Name: cytochrome P450, family 21, subfamily A, polypeptide 2
  ENSP ID: ENSP00000390312
MLLLGLLLLPLLAGARLLWNWWKLRSLHLPPLAPGFLHLLQPDLPIYLLGLTQKFGPIYRLHLGLQDKLVSKNYPDLSLGDYSLLWKAHKKLTRSALLLGIRDSMEPVVEQLTQEFCERMRAQPGTPVAIEEEFSLLTCSIICYLTFGDKIKDDNLMPAYYKCIQEVLKTWSHWSIQIVDVIPFLRFFPNPGLRRLKQAIEKRDHIVEMQLRQHKESLVAGQWRDMMDYMLQGVAQPSMEEGSGQLLEGHVHMAAVDLLIGGTETTANTLSWAVVFLLHHPEIQQRLQEELDHELGPGASSSRVPYKDRARLPLLNATIAEVLRLRPVVPLALPHRTTRPSSISGYDIPEGTVIIPNLQGAHLDETVWERPHEFWPDRFLEPGKNSRALAFGCGARVCLGEPLARLELFVVLTRLLQAFTLLPSGDALPSLQPLPHCSVILKMQPFQVRLQPRGMGAHSPGQNQ

SEQ ID NO: 22016 - protein, 465 aa, Homo sapiens; identical to SEQ ID NO: 22013
  Payload ID: 4443
  Gene Symbol: CYP21A2
  Gene Name: cytochrome P450, family 21, subfamily A, polypeptide 2
  Uniprot ID: P08686
  ENSP ID: ENSP00000392321

SEQ ID NO: 22017 - protein, 495 aa, Homo sapiens; identical to SEQ ID NO: 22014
  Payload ID: 4443
  Gene Symbol: CYP21A2
  Gene Name: cytochrome P450, family 21, subfamily A, polypeptide 2
  ENSP ID: ENSP00000394942

SEQ ID NO: 22018 - protein, 494 aa, Homo sapiens [sequence omitted]

SEQ ID NO: 22019 - protein, 465 aa, Homo sapiens; identical to SEQ ID NO: 22013
  Payload ID: 4443
  Gene Symbol: CYP21A2
  Gene Name: cytochrome P450, family 21, subfamily A, polypeptide 2
  Uniprot ID: P08686
  ENSP ID: ENSP00000403230

SEQ ID NO: 22020 - protein, 494 aa, Homo sapiens [sequence omitted]

SEQ ID NO: 22021 - protein, 464 aa, Homo sapiens; identical to SEQ ID NO: 22015
  Payload ID: 4443
  Gene Symbol: CYP21A2
  Gene Name: cytochrome P450, family 21, subfamily A, polypeptide 2
  ENSP ID: ENSP00000407338

SEQ ID NO: 22022 - protein, 495 aa, Homo sapiens; identical to SEQ ID NO: 22014
  Payload ID: 4443
  Gene Symbol: CYP21A2
  Gene Name: cytochrome P450, family 21, subfamily A, polypeptide 2
  ENSP ID: ENSP00000408860

SEQ ID NO: 22023 - protein, 465 aa, Homo sapiens; identical to SEQ ID NO: 22013
  Payload ID: 4443
  Gene Symbol: CYP21A2
  Gene Name: cytochrome P450, family 21, subfamily A, polypeptide 2
  Uniprot ID: P08686
  ENSP ID: ENSP00000415043

SEQ ID NO: 22024 - protein, 495 aa, Homo sapiens; identical to SEQ ID NO: 22014
  Payload ID: 4443
  Gene Symbol: CYP21A2
  Gene Name: cytochrome P450, family 21, subfamily A, polypeptide 2
  ENSP ID: ENSP00000416598

SEQ ID NO: 22025 - protein, 108 aa, Homo sapiens
  Payload ID: 4443
  Gene Symbol: CYP21A2
  Gene Name: cytochrome P450, family 21, subfamily A, polypeptide 2
  ENSP ID: ENSP00000417321
MLLLGLLLLLPLLAGARLLWNWWKLRSLHLPPLAPGFLHLLQPDLPIYLLGLTQKFGPIYRLHLGLQDVVVLNSKRTIEEAMVKKWADFAGRPEPLTSPTSSCRQAGV

SEQ ID NO: 22026 - protein, 78 aa, Homo sapiens
  Payload ID: 4443
  Gene Symbol: CYP21A2
  Gene Name: cytochrome P450, family 21, subfamily A, polypeptide 2
  ENSP ID: ENSP00000418104
MLLLGLLLLLPLLAGARLLWNWWKLRSLHLPPLAPGFLHLLQPDLPIYLLGLTQKFGPIYRLHLGLQAPTSSCRQAGV

SEQ ID NO: 22027 - protein, 190 aa, Homo sapiens
  Payload ID: 4443
  Gene Symbol: CYP21A2
  Gene Name: cytochrome P450, family 21, subfamily A, polypeptide 2
  ENSP ID: ENSP00000418561
MLLLGLLLLLPLLAGARLLWNWWKLRSLHLPPLAPGFLHLLQPDLPIYLLGLTQKFGPIYRLHLGLQDVVVLNSKRTIEEAMVKKWADFAGRPEPLTYKLVSRNYPDLSLGDYSLLWKAHKKLTRSALLLGIRDSMEPVVEQLTQEFCERMRAQPGTPVAIEEEFSLLTCSIICYLTFGDKIKEVLKTWS

SEQ ID NO: 22028 - protein, 186 aa, Homo sapiens
  Payload ID: 4443
  Gene Symbol: CYP21A2
  Gene Name: cytochrome P450, family 21, subfamily A, polypeptide 2
  ENSP ID: ENSP00000419572
MLLLGLLLLLPLLAGARLLWNWWKLRSLHLPPLAPGFLHLLQPDLPIYLLGLTQKFGPIYRLHLGLQDVVVLNSKRTIEEAMVKKWADFAGRPEPLTFPTLQPPPPPADKLVSRNYPDLSLGDYSLLWKAHKKLTRSALLLGIRDSMEPVVEQLTQEFCERMRAQPGTPVAIEEEFSLLTCSIICY

SEQ ID NO: 22029 - protein, 514 aa, Homo sapiens
  Payload ID: 4444
  Gene Symbol: CYP24A1
  Gene Name: cytochrome P450, family 24, subfamily A, polypeptide 1
  Uniprot ID: Q07973
  ENSP ID: ENSP00000216862
MSSPISKSRSLAAFLQQLRSPRQPPRLVTSTAYTSPQPREVPVCPLTAGGETQNAAALPGPTSWPLLGSLLQILWKGGLKKQHDTLVEYHKKYGKIFRMKLGSFESVHLGSPCLLEALYRTESAYPQRLEIKPWKAYRDYRKEGYGLLILEGEDWQRVRSAFQKKLMKPGEVMKLDNKINEVLADFMGRIDELCDERGHVEDLYSELNKWSFESICLVLYEKRFGLLQKNAGDEAVNFIMAIKTMMSTFGRMMVTPVELHKSLNTKVWQDHTLAWDTIFKSVKACIDNRLEKYSQQPSADFLCDIYHQNRLSKKELYAAVTELQLAAVETTANSLMWILYNLSRNPQVQQKLLKEIQSVLPENQVPRAEDLRNMPYLKACLKESMRLTPSVPFTTRTLDKATVLGEYALPKGTVLMLNTQVLGSSEDNFEDSSQFRPERWLQEKEKINPFAHLPFGVGKRMCIGRRLAELQLHLALCWIVRKYDIQATDNEPVEMLHSGTLVPSRELPIAFCQR

SEQ ID NO: 22030 - protein, 372 aa, Homo sapiens
  Payload ID: 4444
  Gene Symbol: CYP24A1
  Gene Name: cytochrome P450, family 24, subfamily A, polypeptide 1
  Uniprot ID: Q07973
  ENSP ID: ENSP00000379284
MYSCFSHREGEDWQRVRSAFQKKLMKPGEVMKLDNKINEVLADFMGRIDELCDERGHVEDLYSELNKWSFESICLVLYEKRFGLLQKNAGDEAVNFIMAIKTMMSTFGRMMVTPVELHKSLNTKVWQDHTLAWDTIFKSVKACIDNRLEKYSQQPSADFLCDIYHQNRLSKKELYAAVTELQLAAVETTANSLMWILYNLSRNPQVQQKLLKEIQSVLPENQVPRAEDLRNMPYLKACLKESMRLTPSVPFTTRTLDKATVLGEYALPKGTVLMLNTQVLGSSEDNFEDSSQFRPERWLQEKEKINPFAHLPFGVGKRMCIGRRLAELQLHLALCWIVRKYDIQATDNEPVEMLHSGTLVPSRELPIAFCQR

SEQ ID NO: 22031 - protein, 448 aa, Homo sapiens
  Payload ID: 4444
  Gene Symbol: CYP24A1
  Gene Name: cytochrome P450, family 24, subfamily A, polypeptide 1
  Uniprot ID: Q07973
  ENSP ID: ENSP00000379285
MSSPISKSRSLAAFLQQLRSPRQPPRLVTSTAYTSPQPREVPVCPLTAGGETQNAAALPGPTSWPLLGSLLQILWKGGLKKQHDTLVEYHKKYGKIFRMKLGSFESVHLGSPCLLEALYRTESAYPQRLEIKPWKAYRDYRKEGYGLLILEGEDWQRVRSAFQKKLMKPGEVMKLDNKINEVLADFMGRIDELCDERGHVEDLYSELNKWSFESICLVLYEKRFGLLQKNAGDEAVNFIMAIKTMMSTFGRMMVTPVELHKSLNTKVWQDHTLAWDTIFKSVKACIDNRLEKYSQQPSADFLCDIYHQNRLSKKELYAAVTELQLAAVETTANSLMWILYNLSRNPQVQQKLLKEIQSVLPENQVPRAEDLRNMPYLKACLKESMRLTPSVPFTTRTLDKATVLGEYALPKGIVRKYDIQATDNEPVEMLHSGTLVPSRELPIAFCQR

SEQ ID NO: 22032 - protein, 497 aa, Homo sapiens
  Payload ID: 4445
  Gene Symbol: CYP26A1
  Gene Name: cytochrome P450, family 26, subfamily A, polypeptide 1
  Uniprot ID: O43174
  ENSP ID: ENSP00000224356
MGLPALLASALCTFVLPLLLFLAAIKLWDLYCVSGRDRSCALPLPPGTMGFPFFGETLQMVLQRRKFLQMKRRKYGFIYKTHLFGRPTVRVMGADNVRRILLGEHRLVSVHWPASVRTILGSGCLSNLHDSSHKQRKKVIMRAFSREALECYVPVITEEVGSSLEQWLSCGERGLLVYPEVKRLMFRIAMRILLGCEPQLAGDGDSEQQLVEAFEEMTRNLFSLPIDVPFSGLYRGMKARNLIHARIEQNIRAKICGLRASEAGQGCKDALQLLIEHSWERGERLDMQALKQSSTELLFGGHETTASAATSLITYLGLYPHVLQKVREELKSKGLLCKSNQDNKLDMEILEQLKYIGCVIKETLRLNPPVPGGFRVALKTFELNGYQIPKGWNVIYSICDTHDVAEIFTNKEEFNPDRFMLPHPEDASRFSFIPFGGGLRSCVGKEFAKILLKIFTVELARHCDWQLLNGPPTMKTSPTVYPVDNLPARFTHFHGEI

SEQ ID NO: 22033 - protein, 428 aa, Homo sapiens
  Payload ID: 4445
  Gene Symbol: CYP26A1
  Gene Name: cytochrome P450, family 26, subfamily A, polypeptide 1
  Uniprot ID: O43174
  ENSP ID: ENSP00000360586
MKRRKYGFIYKTHLFGRPTVRVMGADNVRRILLGEHRLVSVHWPASVRTILGSGCLSNLHDSSHKQRKKVIMRAFSREALECYVPVITEEVGSSLEQWLSCGERGLLVYPEVKRLMFRIAMRILLGCEPQLAGDGDSEQQLVEAFEEMTRNLFSLPIDVPFSGLYRGMKARNLIHARIEQNIRAKICGLRASEAGQGCKDALQLLIEHSWERGERLDMQALKQSSTELLFGGHETTASAATSLITYLGLYPHVLQKVREELKSKGLLCKSNQDNKLDMEILEQLKYIGCVIKETLRLNPPVPGGFRVALKTFELNGYQIPKGWNVIYSICDTHDVAEIFTNKEEFNPDRFMLPHPEDASRFSFIPFGGGLRSCVGKEFAKILLKIFTVELARHCDWQLLNGPPTMKTSPTVYPVDNLPARFTHFHGEI

SEQ ID NO: 22034 - protein, 256 aa, Homo sapiens
  Payload ID: 4445
  Gene Symbol: CYP26A1
  Gene Name: cytochrome P450, family 26, subfamily A, polypeptide 1
  ENSP ID: ENSP00000485126
MKRRKYGFIYKTHLFGRPTVRVMGADNVRRILLGEHRLVSVHWPASVRTILGSGCLSNLHDSSHKQRKKPRGTRMLRAGDHRGSGQQPGAVAELRRARPPGLPRGEAPHVPNRHAHPTGLRTPTGGRRGLRAAACGGLRGNDPQSLLAAHRRALQRAVPGHEGAEPHSRAHRAEHSRQDLRAAGIRGGPGLQRRAAAVDRALVGEGRAAGHAGTKAIFNRTPLWRTRNHGQCSHISDHLPGALPTCSPESARRAEE

SEQ ID NO: 22035 - protein, 512 aa, Homo sapiens
  Payload ID: 4446
  Gene Symbol: CYP26B1
  Gene Name: cytochrome P450, family 26, subfamily B, polypeptide 1
  Uniprot ID: Q9NR63
  ENSP ID: ENSP00000001146
MLFEGLDLVSALATLAACLVSVTLLLAVSQQLWQLRWAATRDKSCKLPIPKGSMGFPLIGETGHWLLQGSGFQSSRREKYGNVFKTHLLGRPLIRVTGAENVRKILMGEHHLVSTEWPRSTRMLLGPNTVSNSIGDIHRNKRKVFSKIFSHEALESYLPKIQLVIQDTLRAWSSHPEAINVYQEAQKLTFRMAIRVLLGFSIPEEDLGHLFEVYQQFVDNVFSLPVDLPFSGYRRGIQARQILQKGLEKAIREKLQCTQGKDYLDALDLLIESSKEHGKEMTMQELKDGTLELIFAAYATTASASTSLIMQLLKHPTVLEKLRDELRAHGILHSGGCPCEGTLRLDTLSGLRYLDCVIKEVMRLFTPISGGYRTVLQTFELDGFQIPKGWSVMYSIRDTHDTAPVFKDVNVFDPDRFSQARSEDKDGRFHYLPFGGGVRTCLGKHLAKLFLKVLAVELASTSRFELATRTFPRITLVPVLHPVDGLSVKFFGLDSNQNEILPETEAMLSATV

SEQ ID NO: 22036 - protein, 321 aa, Homo sapiens
  Payload ID: 4446
  Gene Symbol: CYP26B1
  Gene Name: cytochrome P450, family 26, subfamily B, polypeptide 1
  ENSP ID: ENSP00000401465
MAIRVLLGFSIPEEDLGHLFEVYQQFVDNVFSLPVDLPFSGYRRGIQARQILQKGLEKAIREKLQCTQGKDYLDALDLLIESSKEHGKEMTMQELKDGTLELIFAAYATTASASTSLIMQLLKHPTVLEKLRDELRAHGILHSGGCPCEGTLRLDTLSGLRYLDCVIKEVMRLFTPISGGYRTVLQTFELDGFQIPKGWSVMYSIRDTHDTAPVFKDVNVFDPDRFSQARSEDKDGRFHYLPFGGGVRTCLGKHLAKLFLKVLAVELASTSRFELATRTFPRITLVPVLHPVDGLSVKFFGLDSNQNEILPETEAMLSATV

SEQ ID NO: 22037 - protein, 172 aa, Homo sapiens
  Payload ID: 4446
  Gene Symbol: CYP26B1
  Gene Name: cytochrome P450, family 26, subfamily B, polypeptide 1
  ENSP ID: ENSP00000430871
MKNKTCVLVCVSVFGGERGQVTVPRVGVRRPSLAGPLQKCTLRETRVWLPQGSGFQSSRREKYGNVFKTHLLGRPLIRVTGAENVRKILMGEHHLVSTEWPRSTRMLLGPNTVSNSIGDIHRNKRKVFSKIFSHEALESYLPKIQLVIQDTLRAWSSHPEAINVYQEAQKLT

SEQ ID NO: 22038 - protein, 182 aa, Homo sapiens
  Payload ID: 4446
  Gene Symbol: CYP26B1
  Gene Name: cytochrome P450, family 26, subfamily B, polypeptide 1
  ENSP ID: ENSP00000430888
MLFEGLDLVSALATLAACLVSVTLLLAVSQQLWQLRWAATRDKSCKLPIPKGSMGFPLIGETGHWLLQVFSKIFSHEALESYLPKIQLVIQDTLRAWSSHPEAINVYQEAQKLTFRMAIRVLLGFSIPEEDLGHLFEVYQQFVDNVFSLPVDLPFSGYRRGIQARQILQKGLEKAIREKLQC

SEQ ID NO: 22039 - protein, 437 aa, Homo sapiens
  Payload ID: 4446
  Gene Symbol: CYP26B1
  Gene Name: cytochrome P450, family 26, subfamily B, polypeptide 1
  Uniprot ID: Q9NR63
  ENSP ID: ENSP00000443304
MLFEGLDLVSALATLAACLVSVTLLLAVSQQLWQLRWAATRDKSCKLPIPKGSMGFPLIGETGHWLLQVFSKIFSHEALESYLPKIQLVIQDTLRAWSSHPEAINVYQEAQKLTFRMAIRVLLGFSIPEEDLGHLFEVYQQFVDNVFSLPVDLPFSGYRRGIQARQILQKGLEKAIREKLQCTQGKDYLDALDLLIESSKEHGKEMTMQELKDGTLELIFAAYATTASASTSLIMQLLKHPTVLEKLRDELRAHGILHSGGCPCEGTLRLDTLSGLRYLDCVIKEVMRLFTPISGGYRTVLQTFELDGFQIPKGWSVMYSIRDTHDTAPVFKDVNVFDPDRFSQARSEDKDGRFHYLPFGGGVRTCLGKHLAKLFLKVLAVELASTSRFELATRTFPRITLVPVLHPVDGLSVKFFGLDSNQNEILPETEAMLSATV

SEQ ID NO: 22040 - protein, 522 aa, Homo sapiens
  Payload ID: 4447
  Gene Symbol: CYP26C1
  Gene Name: cytochrome P450, family 26, subfamily C, polypeptide 1
  Uniprot ID: Q6V0L0
  ENSP ID: ENSP00000285949
MFPWGLSCLSVLGAAGTALLCAGLLLSLAQHLWTLRWMLSRDRASTLPLPKGSMGWPFFGETLHWLVQGSRFHSSRRERYGTVFKTHLLGRPVIRVSGAENVRTILLGEHRLVRSQWPQSAHILLGSHTLLGAVGEPHRRRRKVLARVFSRAALERYVPRLQGALRHEVRSWCAAGGPVSVYDASKALTFRMAARILLGLRLDEAQCATLARTFEQLVENLFSLPLDVPFSGLRKGIRARDQLHRHLEGAISEKLHEDKAAEPGDALDLIIHSARELGHEPSMQELKESAVELLFAAFFTTASASTSLVLLLLQHPAAIAKIREELVAQGLGRACGCAPGAAGGSEGPPPDCGCEPDLSLAALGRLRYVDCVVKEVLRLLPPVSGGYRTALRTFELDGYQIPKGWSVMYSIRDTHETAAVYRSPPEGFDPERFGAAREDSRGASSRFHYIPFGGGARSCLGQELAQAVLQLLAVELVRTARWELATPAFPAMQTVPIVHPVDGLRLFFHPLTPSVAGNGLCL

SEQ ID NO: 22041 - protein, 302 aa, Homo sapiens
  Payload ID: 4447
  Gene Symbol: CYP26C1
  Gene Name: cytochrome P450, family 26, subfamily C, polypeptide 1
  ENSP ID: ENSP00000485098
MFPWGLSCLSVLGAAGTALLCAGLLLSLAQHLWTLRWMLSRDRASTLPLPKGSMGWPFFGETLHWLVQGSRFHSSRRERYGTVFKTHLLGRPVIRVSGAENVRTILLGEHRLVRSQWPQSAHILLGSHTLLGAVGEPHRRRRKVLARVFSRAALERYVPRLQGALRHEVRSWCAAGGPVSVYDASKALTFRMAARILLGLRLDEAQCATLARTFEQLVENLFSLPLDVPFSGLRKVRPPRLQTFLRGSAARAGLPDPDGTPSAHPARPSPLLGTAAGPGGGRRCGGGVAVGSGPGLCAGSLV

SEQ ID NO: 22042 - protein, 531 aa, Homo sapiens
  Payload ID: 4448
  Gene Symbol: CYP27A1
  Gene Name: cytochrome P450, family 27, subfamily A, polypeptide 1
  Uniprot ID: Q02318
  ENSP ID: ENSP00000258415
MAALGCARLRWALRGAGRGLCPHGARAKAAIPAALPSDKATGAPGAGPGVRRRQRSLEEIPRLGQLRFFFQLFVQGYALQLHQLQVLYKAKYGPMWMSYLGPQMHVNLASAPLLEQVMRQEGKYPVRNDMELWKEHRDQHDLTYGPFTTEGHHWYQLRQALNQRLLKPAEAALYTDAFNEVIDDFMTRLDQLRAESASGNQVSDMAQLFYYFALEAICYILFEKRIGCLQRSIPEDTVTFVRSIGLMFQNSLYATFLPKWTRPVLPFWKRYLDGWNAIFSFGKKLIDEKLEDMEAQLQAAGPDGIQVSGYLHFLLASGQLSPREAMGSLPELLMAGVDTTSNTLTWALYHLSKDPEIQEALHEEVVGVVPAGQVPQHKDFAHMPLLKAVLKETLRLYPVVPTNSRIIEKEIEVDGFLFPKNTQFVFCHYVVSRDPTAFSEPESFQPHRWLRNSQPATPRIQHPFGSVPFGYGVRACLGRRIAELEMQLLLARLIQKYKVVLAPETGELKSVARIVLVPNKKVGLQFLQRQC

SEQ ID NO: 22043 - protein, 221 aa, Homo sapiens
  Payload ID: 4448
  Gene Symbol: CYP27A1
  Gene Name: cytochrome P450, family 27, subfamily A, polypeptide 1
  ENSP ID: ENSP00000392671
MWMSYLGPQMHVNLASAPLLEQVMRQEGKYPVRNDMELWKEHRDQHDLTYGPFTTEGHHWYQLRQALNQRLLKPAEAALYTDAFNEVIDDFMTRLDQLRAESASGNQVSDMAQLFYYFALEAICYILFEKRIGCLQRSIPEDTVTFVRSIGLMFQNSLYATFLPKWTRPVLPFWKRYLDGWNAIFSFGKKLIDEKLEDMEAQLQAAGPDGIQVSGYLHFLL

SEQ ID NO: 22044 - protein, 115 aa, Homo sapiens
  Payload ID: 4448
  Gene Symbol: CYP27A1
  Gene Name: cytochrome P450, family 27, subfamily A, polypeptide 1
  ENSP ID: ENSP00000404945
MAALGCARLRWALRGAGRGLCPHGARAKAAIPAALPSDKATGAPGAGPGVRRRQRSLEEIPRLGQLRFFFQLFVQGYALQLHQLQGRTPLVPAAPGSEPAVAEASGSSALYGCFQ

SEQ ID NO: 22045 - protein, 508 aa, Homo sapiens
  Payload ID: 4449
  Gene Symbol: CYP27B1
  Gene Name: cytochrome P450, family 27, subfamily B, polypeptide 1
  Uniprot ID: O15528
  ENSP ID: ENSP00000228606
MTQTLKYASRVFHRVRWAPELGASLGYREYHSARRSLADIPGPSTPSFLAELFCKGGLSRLHELQVQGAAHFGPVWLASFGTVRTVYVAAPALVEELLRQEGPRPERCSFSPWTEHRRCRQRACGLLTAEGEEWQRLRSLLAPLLLRPQAAARYAGTLNNVVCDLVRRLRRQRGRGTGPPALVRDVAGEFYKFGLEGIAAVLLGSRLGCLEAQVPPDTETFIRAVGSVFVSTLLTMAMPHWLRHLVPGPWGRLCRDWDQMFAFAQRHVERREAEAAMRNGGQPEKDLESGAHLTHFLFREELPAQSILGNVTELLLAGVDTVSNTLSWALYELSRHPEVQTALHSEITAALSPGSSAYPSATVLSQLPLLKAVVKEVLRLYPVVPGNSRVPDKDIHVGDYIIPKNTLVTLCHYATSRDPAQFPEPNSFRPARWLGEGPTPHPFASLPFGFGKRSCMGRRLAELELQMALAQILTHFEVQPEPGAAPVRPKTRTVLVPERSINLQFLDR

SEQ ID NO: 22046 - protein, 157 aa, Homo sapiens
  Payload ID: 4449
  Gene Symbol: CYP27B1
  Gene Name: cytochrome P450, family 27, subfamily B, polypeptide 1
  ENSP ID: ENSP00000449472
MAMPHWLRHLVPGPWGRLCRDWDQMFAFAQRHVERREAEAAMRNGGQPEKDLESGAHLTHFLFREELPAQSILGNVTELLLAGVDTVSNTLSWALYELSRHPEVQTALHSEITAALSPGSSAYPSATVLSQLPLLKAVVKEVLRLYPVVPGNSRVPD

SEQ ID NO: 22047 - protein, 234 aa, Homo sapiens
  Payload ID: 4449
  Gene Symbol: CYP27B1
  Gene Name: cytochrome P450, family 27, subfamily B, polypeptide 1
  ENSP ID: ENSP00000476959
  MOD_RES (1)..(1): Any amino acid
XTLAGPRLPGIREKSRSPGSSQLRLLELRHSTLLKKVQGAAHFGPVWLASFGTVRTVYVAAPALVEELLRQEGPRPERCSFSPWTEHRRCRQRACGLLTAEGEEWQRLRSLLAPLLLRPQAAARYAGTLNNVVCDLVRRLRRQRGRGTGPPALVRDVAGEFYKFGLEGIAAVLLGSRLGCLEAQVPPDTETFIRAVGSVFVSTLLTMAMPHWLRHLVPGPWGRLCRDWDQMFAF

SEQ ID NO: 22048 - protein, 372 aa, Homo sapiens
  Payload ID: 4450
  Gene Symbol: CYP27C1
  Gene Name: cytochrome P450, family 27, subfamily C, polypeptide 1
  Uniprot ID: Q4G0S4
  ENSP ID: ENSP00000334128
MRSVLRQRILKPKDVAIYSGEVNQVIADLIKRIYLLRSQAEDGETVTNVNDLFFKYSMEGVATILYESRLGCLENSIPQLTVEYIEALELMFSMFKTSMYAGAIPRWLRPFIPKPWREFCRSWDGLFKFSQIHVDNKLRDIQYQMDRGRRVSGGLLTYLFLSQALTLQEIYANVTEMLLAGVDTTSFTLSWTVYLLARHPEVQQTVYREIVKNLGERHVPTAADVPKVPLVRALLKETLRLFPVLPGNGRVTQEDLVIGGYLIPKGTQLALCHYATSYQDENFPRAKEFRPERWLRKGDLDRVDNFGSIPFGHGVRSCIGRRIAELEIHLVVIQLLQHFEIKTSSQTNAVHAKTHGLLTPGGPIHVRFVNRK

SEQ ID NO: 22049 - protein, 372 aa, Homo sapiens; identical to SEQ ID NO: 22048
  Payload ID: 4450
  Gene Symbol: CYP27C1
  Gene Name: cytochrome P450, family 27, subfamily C, polypeptide 1
  Uniprot ID: Q4G0S4
  ENSP ID: ENSP00000387198

SEQ ID NO: 22050 - protein, 503 aa, Homo sapiens
  Payload ID: 4451
  Gene Symbol: CYP3A4
  Gene Name: cytochrome P450, family 3, subfamily A, polypeptide 4
  Uniprot ID: P08684
  ENSP ID: ENSP00000337915
MALIPDLAMETWLLLAVSLVLLYLYGTHSHGLFKKLGIPGPTPLPFLGNILSYHKGFCMFDMECHKKYGKVWGFYDGQQPVLAITDPDMIKTVLVKECYSVFTNRRPFGPVGFMKSAISIAEDEEWKRLRSLLSPTFTSGKLKEMVPIIAQYGDVLVRNLRREAETGKPVTLKDVFGAYSMDVITSTSFGVNIDSLNNPQDPFVENTKKLLRFDFLDPFFLSITVFPFLIPILEVLNICVFPREVTNFLRKSVKRMKESRLEDTQKHRVDFLQLMIDSQNSKETESHKALSDLELVAQSIIFIFAGYETTSSVLSFIMYELATHPDVQQKLQEEIDAVLPNKAPPTYDTVLQMEYLDMVVNETLRLFPIAMRLERVCKKDVEINGMFIPKGVVVMIPSYALHRDPKYWTEPEKFLPERFSKKNKDNIDPYIYTPFGSGPRNCIGMRFALMNMKLALIRVLQNFSFKPCKETQIPLKLSLGGLLQPEKPVVLKVESRDGTVSGA

SEQ ID NO: 22051 - protein, 353 aa, Homo sapiens
  Payload ID: 4451
  Gene Symbol: CYP3A4
  Gene Name: cytochrome P450, family 3, subfamily A, polypeptide 4
  ENSP ID: ENSP00000346607
MALIPDLAMETWLLLAVSLVLLYLVFGAYSMDVITSTSFGVNIDSLNNPQDPFVENTKKLLRFDFLDPFFLSITVFPFLIPILEVLNICVFPREVTNFLRKSVKRMKESRLEDTQKHRVDFLQLMIDSQNSKETESHKALSDLELVAQSIIFIFAGYETTSSVLSFIMYELATHPDVQQKLQEEIDAVLPNKAPPTYDTVLQMEYLDMVVNETLRLFPIAMRLERVCKKDVEINGMFIPKGVVVMIPSYALHRDPKYWTEPEKFLPERFSKKNKDNIDPYIYTPFGSGPRNCIGMRFALMNMKLALIRVLQNFSFKPCKETQIPLKLSLGGLLQPEKPVVLKVESRDGTVSGA

SEQ ID NO: 22052 - protein, 153 aa, Homo sapiens
  Payload ID: 4451
  Gene Symbol: CYP3A4
  Gene Name: cytochrome P450, family 3, subfamily A, polypeptide 4
  ENSP ID: ENSP00000397208
MALIPDLAMETWLLLAVSLVLLYLHNRCDLISVSLCRYGTHSHGLFKKLGIPGPTPLPFLGNILSYHKGFCMFDMECHKKYGKVWGFYDGQQPVLAITDPDMIKTVLVKECYSVFTNRRPFGPVGFMKSAISIAEDEEWKRLRSLLSPTFTSG

SEQ ID NO: 22053 - protein, 504 aa, Homo sapiens
  Payload ID: 4452
  Gene Symbol: CYP3A43
  Gene Name: cytochrome P450, family 3, subfamily A, polypeptide 43
  Uniprot ID: Q9HB55
  ENSP ID: ENSP00000222382
MDLIPNFAMETWVLVATSLVLLYIYGTHSHKLFKKLGIPGPTPLPFLGTILFYLRGLWNFDRECNEKYGEMWGLYEGQQPMLVIMDPDMIKTVLVKECYSVFTNQMPLGPMGFLKSALSFAEDEEWKRIRTLLSPAFTSVKFKEMVPIISQCGDMLVRSLRQEAENSKSINLKDFFGAYTMDVITGTLFGVNLDSLNNPQDPFLKNMKKLLKLDFLDPFLLLISLFPFLTPVFEALNIGLFPKDVTHFLKNSIERMKESRLKDKQKHRVDFFQQMIDSQNSKETKSHKALSDLELVAQSIIIIFAAYDTTSTTLPFIMYELATHPDVQQKLQEEIDAVLPNKAPVTYDALVQMEYLDMVVNETLRLFPVVSRVTRVCKKDIEINGVFIPKGLAVMVPIYALHHDPKYWTEPEKFCPESRFSKKNKDSIDLYRYIPFGAGPRNCIGMRFALTNIKLAVIRALQNFSFKPCKETQIPLKLDNLPILQPEKPIVLKVHLRDGITSGP

SEQ ID NO: 22054 - protein, 420 aa, Homo sapiens
  Payload ID: 4452
  Gene Symbol: CYP3A43
  Gene Name: cytochrome P450, family 3, subfamily A, polypeptide 43
  Uniprot ID: Q9HB55
  ENSP ID: ENSP00000312110
MDLIPNFAMETWVLVATSLVLLYIYGTHSHKLFKKLGIPGPTPLPFLGTILFYLRGLWNFDRECNEKYGEMWGLYEGQQPMLVIMDPDMIKTVLVKECYSVFTNQMPLGPMGFLKSALSFAEDEEWKRIRTLLSPAFTSVKFKEMVPIISQCGDMLVRSLRQEAENSKSINLKDFFGAYTMDVITGTLFGVNLDSLNNPQDPFLKNMKKLLKLDFLDPFLLLISLFPFLTPVFEALNIGLFPKDVTHFLKNSIERMKESRLKDKQKHRVDFFQQMIDSQNSKETKSHKALSDLELVAQSIIIIFAAYDTTSTTLPFIMYELATHPDVQQKLQEEIDAVLPNKAPVTYDALVQMEYLDMVVNETLRLFPVVSRVTRVCKKDIEINGVFIPKGLAVMVPIYALHHDPKYWTEPEKFCPERSH

SEQ ID NO: 22055 - protein, 126 aa, Homo sapiens
  Payload ID: 4452
  Gene Symbol: CYP3A43
  Gene Name: cytochrome P450, family 3, subfamily A, polypeptide 43
  ENSP ID: ENSP00000345351
MDLIPNFAMETWVLVATSLVLLYIYGTHSHKLFKKLGIPGPTPLPFLGTILFYLRGLWNFDRECNEKFLWGLHHGCNHWHIIWSELGFSQQSTRSLSEKYEEAFKIGFFGSLFTLNITLSISYPSF

SEQ ID NO: 22056 - protein, 503 aa, Homo sapiens
  Payload ID: 4452
  Gene Symbol: CYP3A43
  Gene Name: cytochrome P450, family 3, subfamily A, polypeptide 43
  Uniprot ID: Q9HB55
  ENSP ID: ENSP00000346887
MDLIPNFAMETWVLVATSLVLLYIYGTHSHKLFKKLGIPGPTPLPFLGTILFYLRGLWNFDRECNEKYGEMWGLYEGQQPMLVIMDPDMIKTVLVKECYSVFTNQMPLGPMGFLKSALSFAEDEEWKRIRTLLSPAFTSVKFKEMVPIISQCGDMLVRSLRQEAENSKSINLKDFFGAYTMDVITGTLFGVNLDSLNNPQDPFLKNMKKLLKLDFLDPFLLLISLFPFLTPVFEALNIGLFPKDVTHFLKNSIERMKESRLKDKQKHRVDFFQQMIDSQNSKETKSHKALSDLELVAQSIIIIFAAYDTTSTTLPFIMYELATHPDVQQKLQEEIDAVLPNKAPVTYDALVQMEYLDMVVNETLRLFPVVSRVTRVCKKDIEINGVFIPKGLAVMVPIYALHHDPKYWTEPEKFCPERFSKKNKDSIDLYRYIPFGAGPRNCIGMRFALTNIKLAVIRALQNFSFKPCKETQIPLKLDNLPILQPEKPIVLKVHLRDGITSGP

SEQ ID NO: 22057 - protein, 96 aa, Homo sapiens
  Payload ID: 4452
  Gene Symbol: CYP3A43
  Gene Name: cytochrome P450, family 3, subfamily A, polypeptide 43
  ENSP ID: ENSP00000400316
MDLIPNFAMETWVLVATSLVLLYIYGTHSHKLFKKLGIPGPTPLPFLGTILFYLRPLGPMGFLKSALSFAEDEEWKRIRTLLSPAFTSVKFKEVRK

SEQ ID NO: 22058 - protein, 292 aa, Homo sapiens
  Payload ID: 4452
  Gene Symbol: CYP3A43
  Gene Name: cytochrome P450, family 3, subfamily A, polypeptide 43
  ENSP ID: ENSP00000401521
MDLIPNFAMETWVLVATSLVLLYIYGTHSHKLFKKLGIPGPTPLPFLGTILFYLRHRVDFFQQMIDSQNSKETKSHKALSDLELVAQSIIIIFAAYDTTSTTLPFIMYELATHPDVQQKLQEEIDAVLPNKAPVTYDALVQMEYLDMVVNETLRLFPVVSRVTRVCKKDIEINGVFIPKGLAVMVPIYALHHDPKYWTEPEKFCPERFSKKNKDSIDLYRYIPFGAGPRNCIGMRFALTNIKLAVIRALQNFSFKPCKETQIPLKLDNLPILQPEKPIVLKVHLRDGITSGP

SEQ ID NO: 22059 - protein, 167 aa, Homo sapiens
  Payload ID: 4452
  Gene Symbol: CYP3A43
  Gene Name: cytochrome P450, family 3, subfamily A, polypeptide 43
  ENSP ID: ENSP00000405557
MGSCGYQPGTPLYHRVDFFQQMIDSQNSKETKSHKALSDLELVAQSIIIIFAAYDTTSTTLPFIMYELATHPDVQQKLQEEIDAVLPNKAPVTYDALVQMEYLDMVVNETLRLFPVVSRVTRVCKKDIEINGVFIPKGLAVMVPIYALHHDPKYWTEPEKFCPERSH

SEQ ID NO: 22060 - protein, 250 aa, Homo sapiens
  Payload ID: 4452
  Gene Symbol: CYP3A43
  Gene Name: cytochrome P450, family 3, subfamily A, polypeptide 43
  Uniprot ID: Q9HB55
  ENSP ID: ENSP00000411653
MDLIPNFAMETWVLVATSLVLLYIYGTHSHKLFKKLGIPGPTPLPFLGTILFYLRGLWNFDRECNEKYGEMWGLYEGQQPMLVIMDPDMIKTVLVKECYSVFTNQMPLGPMGFLKSALSFAEDEEWKRIRTLLSPAFTSVKFKEMVPIISQCGDMLVRSLRQEAENSKSINLKDFFGAYTMDVITGTLFGVNLDSLNNPQDPFLKNMKKLLKLDFLDPFLLLIYRVSLCCLGRSAWCDLGSLKPPPPGFE

SEQ ID NO: 22061 - protein, 56 aa, Homo sapiens
  Payload ID: 4452
  Gene Symbol: CYP3A43
  Gene Name: cytochrome P450, family 3, subfamily A, polypeptide 43
  ENSP ID: ENSP00000415221
MDLIPNFAMETWVLVATSLVLLYMVFGILTENVMKNTEKCGAFRSNGISEKCLKFC

SEQ ID NO: 22062 - protein, 393 aa, Homo sapiens
  Payload ID: 4452
  Gene Symbol: CYP3A43
  Gene Name: cytochrome P450, family 3, subfamily A, polypeptide 43
  Uniprot ID: Q9HB55
  ENSP ID: ENSP00000416581
MDLIPNFAMETWVLVATSLVLLYIYGTHSHKLFKKLGIPGPTPLPFLGTILFYLRRSLNKIPSWAWWLTPVIPALWEAEAGGSPKVRSSRPALPTWVFGILTENVMKNTEKCGALFPFLTPVFEALNIGLFPKDVTHFLKNSIERMKESRLKDKQKHRVDFFQQMIDSQNSKETKSHKALSDLELVAQSIIIIFAAYDTTSTTLPFIMYELATHPDVQQKLQEEIDAVLPNKAPVTYDALVQMEYLDMVVNETLRLFPVVSRVTRVCKKDIEINGVFIPKGLAVMVPIYALHHDPKYWTEPEKFCPERFSKKNKDSIDLYRYIPFGAGPRNCIGMRFALTNIKLAVIRALQNFSFKPCKETQIPLKLDNLPILQPEKPIVLKVHLRDGITSGP

SEQ ID NO: 22063 - protein, 74 aa, Homo sapiens
  Payload ID: 4452
  Gene Symbol: CYP3A43
  Gene Name: cytochrome P450, family 3, subfamily A, polypeptide 43
  ENSP ID: ENSP00000486759
MDLIPNFAMETWVLVATSLVLLYIYGTHSHKLFKKLGIPGPTPLPFLGTILFYLRGLWNFDRECNEKYGEMWGP

SEQ ID NO: 22064 - protein, 502 aa, Homo sapiens
  Payload ID: 4453
  Gene Symbol: CYP3A5
  Gene Name: cytochrome P450, family 3, subfamily A, polypeptide 5
  Uniprot ID: P20815
  ENSP ID: ENSP00000222982
MDLIPNLAVETWLLLAVSLVLLYLYGTRTHGLFKRLGIPGPTPLPLLGNVLSYRQGLWKFDTECYKKYGKMWGTYEGQLPVLAITDPDVIRTVLVKECYSVFTNRRSLGPVGFMKSAISLAEDEEWKRIRSLLSPTFTSGKLKEMFPIIAQYGDVLVRNLRREAEKGKPVTLKDIFGAYSMDVITGTSFGVNIDSLNNPQDPFVESTKKFLKFGFLDPLFLSIILFPFLTPVFEALNVSLFPKDTINFLSKSVNRMKKSRLNDKQKHRLDFLQLMIDSQNSKETESHKALSDLELAAQSIIFIFAGYETTSSVLSFTLYELATHPDVQQKLQKEIDAVLPNKAPPTYDAVVQMEYLDMVVNETLRLFPVAIRLERTCKKDVEINGVFIPKGSMVVIPTYALHHDPKYWTEPEEFRPERFSKKKDSIDPYIYTPFGTGPRNCIGMRFALMNMKLALIRVLQNFSFKPCKETQIPLKLDTQGLLQPEKPIVLKVDSRDGTLSGE

SEQ ID NO: 22065 - protein, 39 aa, Homo sapiens
  Payload ID: 4453
  Gene Symbol: CYP3A5
  Gene Name: cytochrome P450, family 3, subfamily A, polypeptide 5
  ENSP ID: ENSP00000343074
MDLIPNLAVETWLLLAVSLVLLYLMRVPKSAKSPLTKQT

SEQ ID NO: 22066 - protein, 140 aa, Homo sapiens
  Payload ID: 4453
  Gene Symbol: CYP3A5
  Gene Name: cytochrome P450, family 3, subfamily A, polypeptide 5
  Uniprot ID: P20815
  ENSP ID: ENSP00000401269
MDLIPNLAVETWLLLAVSLVLLYLYGTRTHGLFKRLGIPGPTPLPLLGNVLSYRQGLWKFDTECYKKYGKMWGTYEGQLPVLAITDPDVIRTVLVKECYSVFTNRRICATTSTIKMQTHSVTMWLPPAVLQSQHGVCLFL

SEQ ID NO: 22067 - protein, 39 aa, Homo sapiens; identical to SEQ ID NO: 22065
  Payload ID: 4453
  Gene Symbol: CYP3A5
  Gene Name: cytochrome P450, family 3, subfamily A, polypeptide 5
  ENSP ID: ENSP00000415399

SEQ ID NO: 22068 - protein, 503 aa, Homo sapiens
  Payload ID: 4454
  Gene Symbol: CYP3A7
  Gene Name: cytochrome P450, family 3, subfamily A, polypeptide 7
  Uniprot ID: P24462
  ENSP ID: ENSP00000337450
MDLIPNLAVETWLLLAVSLILLYLYGTRTHGLFKKLGIPGPTPLPFLGNALSFRKGYWTFDMECYKKYRKVWGIYDCQQPMLAITDPDMIKTVLVKECYSVFTNRRPFGPVGFMKNAISIAEDEEWKRIRSLLSPTFTSGKLKEMVPIIAQYGDVLVRNLRREAETGKPVTLKHVFGAYSMDVITSTSFGVSIDSLNNPQDPFVENTKKLLRFNPLDPFVLSIKVFPFLTPILEALNITVFPRKVISFLTKSVKQIKEGRLKETQKHRVDFLQLMIDSQNSKDSETHKALSDLELMAQSIIFIFAGYETTSSVLSFIIYELATHPDVQQKVQKEIDTVLPNKAPPTYDTVLQLEYLDMVVNETLRLFPVAMRLERVCKKDVEINGMFIPKGVVVMIPSYVLHHDPKYWTEPEKFLPERFSKKNKDNIDPYIYTPFGSGPRNCIGMRFALVNMKLALVRVLQNFSFKPCKETQIPLKLRFGGLLLTEKPIVLKAESRDETVSGA

SEQ ID NO: 22069 - protein, 469 aa, Homo sapiens
  Payload ID: 4455
  Gene Symbol: CYP39A1
  Gene Name: cytochrome P450, family 39, subfamily A, polypeptide 1
  Uniprot ID: Q9NYL5
  ENSP ID: ENSP00000275016
MELISPTVIIILGCLALFLLLQRKNLRRPPCIKGWIPWIGVGFEFGKAPLEFIEKARIKYGPIFTVFAMGNRMTFVTEEEGINVFLKSKKVDFELAVQNIVYRTASIPKNVFLALHEKLYIMLKGKMGTVNLHQFTGQLTEELHEQLENLGTHGTMDLNNLVRHLLYPVTVNMLFNKSLFSTNKKKIKEFHQYFQVYDEDFEYGSQLPECLLRNWSKSKKWFLELFEKNIPDIKACKSAKDNSMTLLQATLDIVETETSKENSPNYGLLLLWASLSNAVPVAFWTLAYVLSHPDIHKAIMEGISSVFGKAGKDKIKVSEDDLENLLLIKWCVLETIRLKAPGVITRKVVKPVEILNYIIPSGDLLMLSPFWLHRNPKYFPEPELFKPERWKKANLEKHSFLDCFMAFGSGKFQCPARWFALLEVQMCIILILYKYDCSLLDPLPKQSYLHLVGVPQPEGQCRIEYKQRI

SEQ ID NO: 22070 - protein, 297 aa, Homo sapiens
  Payload ID: 4455
  Gene Symbol: CYP39A1
  Gene Name: cytochrome P450, family 39, subfamily A, polypeptide 1
  ENSP ID: ENSP00000477769
MLFNKSLFSTNKKKIKEFHQYFQVYDEDFEYGSQLPECLLRNWSKSKKWFLELFEKNIPDIKACKSAKDNSMTLLQATLDIVETETSKENSPNYGLLLLWASLSNAVPVAFWTLAYVLSHPDIHKAIMEGISSVFGKAGKDKIKVSEDDLENLLLIKWCVLETIRLKAPGVITRKVVKPVEILNYIIPSGDLLMLSPFWLHRNPKYFPEPELFKPERWKKANLEKHSFLDCFMAFGSGKFQCPARWFALLEVQMCIILILYKYDCSLLDPLPKQSYLHLVGVPQPEGQCRIEYKQRI

SEQ ID NO: 22071 - protein, 519 aa, Homo sapiens
  Payload ID: 4456
  Gene Symbol: CYP4A11
  Gene Name: cytochrome P450, family 4, subfamily A, polypeptide 11
  Uniprot ID: Q02928
  ENSP ID: ENSP00000311095
MSVSVLSPSRLLGDVSGILQAASLLILLLLLIKAVQLYLHRQWLLKALQQFPCPPSHWLFGHIQELQQDQELQRIQKWVETFPSACPHWLWGGKVRVQLYDPDYMKVILGRSDPKSHGSYRFLAPWIGYGLLLLNGQTWFQHRRMLTPAFHYDILKPYVGLMADSVRVMLDKWEELLGQDSPLEVFQHVSLMTLDTIMKCAFSHQGSIQVDRNSQSYIQAISDLNNLVFSRVRNAFHQNDTIYSLTSAGRWTHRACQLAHQHTDQVIQLRKAQLQKEGELEKIKRKRHLDFLDILLLAKMENGSILSDKDLRAEVDTFMFEGHDTTASGISWILYALATHPKHQERCREEIHSLLGDGASITWNHLDQMPYTTMCIKEALRLYPPVPGIGRELSTPVTFPDGRSLPKGIMVLLSIYGLHHNPKVWPNPEVFDPFRFAPGSAQHSHAFLPFSGGSRNCIGKQFAMNELKVATALTLLRFELLPDPTRIPIPIARLVLKSKNGIHLRLRRLPNPCEDKDQL

SEQ ID NO: 22072 - protein, 520 aa, Homo sapiens [sequence omitted]

SEQ ID NO: 22073 - protein, 455 aa, Homo sapiens
  Payload ID: 4456
  Gene Symbol: CYP4A11
  Gene Name: cytochrome P450, family 4, subfamily A, polypeptide 11
  ENSP ID: ENSP00000360972
MSVSVLSPSRLLGDVSGILQAASLLILLLLLIKAVQLYLHRQWLLKALQQFPCPPSHWLFGHIQELQQDQELQRIQKWVETFPSACPHWLWGGKVRVQLYDPDYMKVILGRSDPKSHGSYRFLAPWIGYGLLLLNGQTWFQHRRMLTPAFHYDILKPYVGLMADSVRVMLDKWEELLGQDSPLEVFQHVSLMTLDTIMKCAFSHQGSIQVDRNSQSYIQAISDLNNLVFSRVRNAFHQNDTIYSLTSAGRWTHRACQLAHQHTDQVIQLRKAQLQKEGELEKIKRKRHLDFLDILLLAKMENGSILSDKDLRAEVDTFMFEGHDTTASGISWILYALATHPKHQERCREEIHSLLGDGASITWNHLDQMPYTTMCIKEALRLYPPVPGIGRELSTPVTFPDGRSLPKGIMVLLSIYGLHHNPKVWPNPEVFDPFRFAPGSAQHSHAFLPFSGGSR

SEQ ID NO: 22074 - protein, 215 aa, Homo sapiens
  Payload ID: 4456
  Gene Symbol: CYP4A11
  Gene Name: cytochrome P450, family 4, subfamily A, polypeptide 11
  ENSP ID: ENSP00000476368
MSVSVLSPSRLLGDVSGILQAASLLILLLLLIKAVQLYLHRQWLLKALQQFPCPPSHWLFGHIQELQQDQELQRIQKWVETFPSACPHWLWGGKVRVQLYDPDYMKVILGRSDPKSHGSYRFLAPWIGYGLLLLNGQTWFQHRRMLTPAFHYDILKPYVGLMADSVRVMLDKWEELLGQDSPLEVFQHVSLMTLDTIMKCAFRHWQRAQHSRHLP

SEQ ID NO: 22075 - protein, 377 aa, Homo sapiens
  Payload ID: 4456
  Gene Symbol: CYP4A11
  Gene Name: cytochrome P450, family 4, subfamily A, polypeptide 11
  ENSP ID: ENSP00000476619
MSVSVLSPSRLLGDVSGILQAASLLILLLLLIKAVQLYLHRQWLLKALQQFPCPPSHWLFGHIQELQQDQELQRIQKWVETFPSACPHWLWGGKVRVQLYDPDYMKVILGRSDPKSHGSYRFLAPWIGYGLLLLNGQTWFQHRRMLTPAFHYDILKPYVGLMADSVRVMLDKWEELLGQDSPLEVFQHVSLMTLDTIMKCAFSHQGSIQVDSLTSAGRWTHRACQLAHQHTDQVIQLRKAQLQKEGELEKIKRKRHLDFLDILLLAKMENGSILSDKDLRAEVDTFMFEGHDTTASGISWILYALATHPKHQERCREEIHSLLGDGASITWNHLDQMPYTTMCIKEALRLYPPVPGIGRELSTPVTFPDGRSLPKGV

SEQ ID NO: 22076 - protein, 264 aa, Homo sapiens
  Payload ID: 4456
  Gene Symbol: CYP4A11
  Gene Name: cytochrome P450, family 4, subfamily A, polypeptide 11
  ENSP ID: ENSP00000476854
MSVSVLSPSRLLGDVSGILQAASLLILLLLLIKAVQLYLHRQWLLKALQQFPCPPSHWLFGHIQELQQDQELQRIQKWVETFPSACPHWLWGGKVRVQLYDPDYMKVILGRSDPKSHGSYRFLAPWIGYGLLLLNGQTWFQHRRMLTPAFHYDILKPYVGLMADSVRVMLDKWEELLGQDSPLEVFQHVSLMTLDTIMKCAFSHQGSIQVDRPSDPTEEGSTTEGGGAGEDQEEEAFGFSGYPPLGQRTTWTRCPTPPCALRRH

SEQ ID NO: 22077 - protein, 249 aa, Homo sapiens
  Payload ID: 4456
  Gene Symbol: CYP4A11
  Gene Name: cytochrome P450, family 4, subfamily A, polypeptide 11
  ENSP ID: ENSP00000476988
MSVSVLSPSRLLGDVSGILQAASLLILLLLLIKAVQLYLHRQWLLKALQQFPCPPSHWLFGHIQELQQDQELQRIQKWVETFPSACPHWLWGGKVRVQLYDPDYMKVILGRSDPKSHGSYRFLAPWIGYGLLLLNGQTWFQHRRMLTPAFHYDILKPYVGLMADSVRVMLDKWEELLGQDSPLEVFQHVSLMTLDTIMKCAFSHQGSIQVDRPSDPTEEGSTTEGGGAGEDQEEEAFGFSGYPPLGQSV

SEQ ID NO: 22078 - protein, 421 aa, Homo sapiens
  Payload ID: 4456
  Gene Symbol: CYP4A11
  Gene Name: cytochrome P450, family 4, subfamily A, polypeptide 11
  ENSP ID: ENSP00000477495
MSVSVLSPSRLLGDVSGILQAASLLILLLLLIKAVQLYLHRQWLLKALQQFPCPPSHWLFGHIQELQQDQELQRIQKWVETFPSACPHWLWGGKVRVQLYDPDYMKVILGRSDPKSHGSYRFLAPWIGYGLLLLNGQTWFQHRRMLTPAFHYDILKPYVGLMADSVRVMLDKWEELLGQDSPLEVFQHVSLMTLDTIMKCAFSHQGSIQVDRPSDPTEEGSTTEGGGAGEDQEEEAFGFSGYPPLGQRAPGLPRPCWCSGWNCFRNHLDQMPYTTMCIKEALRLYPPVPGIGRELSTPVTFPDGRSLPKGIMVLLSIYGLHHNPKVWPNPEVFDPFRFAPGSAQHSHAFLPFSGGSRNCIGKQFAMNELKVATALTLLRFELLPDPTRIPIPIARLVLKSKNGIHLRLRRLPNPCEDKDQL

SEQ ID NO: 22079 - protein, 455 aa, Homo sapiens
  Payload ID: 4457
  Gene Symbol: CYP4A22
  Gene Name: cytochrome P450, family 4, subfamily A, polypeptide 22
  ENSP ID: ENSP00000294337
MSVSVLSPSRRLGGVSGILQVTSLLILLLLLIKAAQLYLHRQWLLKALQQFPCPPSHWLFGHIQEFQHDQELQRIQERVKTFPSACPYWIWGGKVRVQLYDPDYMKVILGRSDPKSHGSYKFLAPRIGYGLLLLNGQTWFQHRRMLTPAFHNDILKPYVGLMADSVRVMLDKWEELLGQDSPLEVFQHVSLMTLDTIMKSAFSHQGSIQVDRNSQSYIQAISDLNSLVFCCMRNAFHENDTIYSLTSAGRWTHRACQLAHQHTDQVIQLRKAQLQKEGELEKIKRKRHLDFLDILLLAKMENGSILSDKDLRAEVDTFMFEGHDTTASGISWILYALATHPKHQERCREEIHGLLGDGASITWNHLDQMPYTTMCIKEALRLYPPVPGIGRELSTPVTFPDGRSLPKGIMVLLSIYGLHHNPKVWPNLEVFDPSRFAPGSAQHSHAFLPFSGGSR

SEQ ID NO: 22080 - protein, 421 aa, Homo sapiens
  Payload ID: 4457
  Gene Symbol: CYP4A22
  Gene Name: cytochrome P450, family 4, subfamily A, polypeptide 22
  ENSP ID: ENSP00000360957
MSVSVLSPSRRLGGVSGILQVTSLLILLLLLIKAAQLYLHRQWLLKALQQFPCPPSHWLFGHIQEFQHDQELQRIQERVKTFPSACPYWIWGGKVRVQLYDPDYMKVILGRSDPKSHGSYKFLAPRIGYGLLLLNGQTWFQHRRMLTPAFHNDILKPYVGLMADSVRVMLDKWEELLGQDSPLEVFQHVSLMTLDTIMKSAFSHQGSIQVDRPSDPTEEGSTTEGGGAGEDQEEEALGFSGHPPLGQRAPGLPRPCWCSGWNCFRNHLDQMPYTTMCIKEALRLYPPVPGIGRELSTPVTFPDGRSLPKGIMVLLSIYGLHHNPKVWPNLEVFDPSRFAPGSAQHSHAFLPFSGGSRNCIGKQFAMNQLKVARALTLLRFELLPDPTRIPIPMARLVLKSKNGIHLRLRRLPNPCEDKDQL

SEQ ID NO: 22081 - protein, 519 aa, Homo sapiens
  Payload ID: 4457
  Gene Symbol: CYP4A22
  Gene Name: cytochrome P450, family 4, subfamily A, polypeptide 22
  Uniprot ID: Q5TCH4
  ENSP ID: ENSP00000360958
MSVSVLSPSRRLGGVSGILQVTSLLILLLLLIKAAQLYLHRQWLLKALQQFPCPPSHWLFGHIQEFQHDQELQRIQERVKTFPSACPYWIWGGKVRVQLYDPDYMKVILGRSDPKSHGSYKFLAPRIGYGLLLLNGQTWFQHRRMLTPAFHNDILKPYVGLMADSVRVMLDKWEELLGQDSPLEVFQHVSLMTLDTIMKSAFSHQGSIQVDRNSQSYIQAISDLNSLVFCCMRNAFHENDTIYSLTSAGRWTHRACQLAHQHTDQVIQLRKAQLQKEGELEKIKRKRHLDFLDILLLAKMENGSILSDKDLRAEVDTFMFEGHDTTASGISWILYALATHPKHQERCREEIHGLLGDGASITWNHLDQMPYTTMCIKEALRLYPPVPGIGRELSTPVTFPDGRSLPKGIMVLLSIYGLHHNPKVWPNLEVFDPSRFAPGSAQHSHAFLPFSGGSRNCIGKQFAMNQLKVARALTLLRFELLPDPTRIPIPMARLVLKSKNGIHLRLRRLPNPCEDKDQL

SEQ ID NO: 22082 - protein, 520 aa, Homo sapiens
  Payload ID: 4457
  Gene Symbol: CYP4A22
  Gene Name: cytochrome P450, family 4, subfamily A, polypeptide 22
  ENSP ID: ENSP00000479019
MSVSVLSPSRRLGGVSGILQVTSLLILLLLLIKAAQLYLHRQWLLKALQQFPCPPSHWLFGHIQEFQHDQELQRIQERVKTFPSACPYWIWGGKVRVQLYDPDYMKVILGRSDPKSHGSYKFLAPRIGYGLLLLNGQTWFQHRRMLTPAFHNDILKPYVGLMADSVRVMLDKWEELLGQDSPLEVFQHVSLMTLDTIMKSAFSHQGSIQVDRNSQSYIQAISDLNSLVFCCMRNAFHENDTIYSLTSAGRWTHRACQLAHQHTGDQVIQLRKAQLQKEGELEKIKRKRHLDFLDILLLAKMENGSILSDKDLRAEVDTFMFEGHDTTASGISWILYALATHPKHQERCREEIHGLLGDGASITWNHLDQMPYTTMCIKEALRLYPPVPGIGRELSTPVTFPDGRSLPKGIMVLLSIYGLHHNPKVWPNLEVFDPSRFAPGSAQHSHAFLPFSGGSRNCIGKQFAMNQLKVARALTLLRFELLPDPTRIPIPMARLVLKSKNGIHLRLRRLPNPCEDKDQL

SEQ ID NO: 22083 - protein, 357 aa, Homo sapiens
  Payload ID: 4457
  Gene Symbol: CYP4A22
  Gene Name: cytochrome P450, family 4, subfamily A, polypeptide 22
  ENSP ID: ENSP00000482952
MSVSVLSPSRRLGGVSGILQVTSLLILLLLLIKAAQLYLHRQWLLKALQQFPCPPSHWLFGHIQEFQHDQELQRIQERVKTFPSACPYWIWGGKVRVQLYDPDYMKVILGRSDPKSHGSYKFLAPRIGYGLLLLNGQTWFQHRRMLTPAFHNDILKPYVGLMADSVRVMLDKWEELLGQDSPLEVFQHVSLMTLDTIMKSAFSHQGSIQVDRPSDPTEEGSTTEGGGAGEDQEEEALGFSGHPPLGQRAPGLPRPCWCSGWNCFRNHLDQMPYTTMCIKEALRLYPPVPGIGRELSTPVTFPDGRSLPKGIMVLLSIYGLHHNPKVWPNLEVFDPSRFAPGSAQHSHAFLPFSGGSR

SEQ ID NO: 22084 - protein, 511 aa, Homo sapiens
  Payload ID: 4458
  Gene Symbol: CYP4B1
  Gene Name: cytochrome P450, family 4, subfamily B, polypeptide 1
  Uniprot ID: P13584
  ENSP ID: ENSP00000271153
MVPSFLSLSFSSLGLWASGLILVLGFLKLIHLLLRRQTLAKAMDKFPGPPTHWLFGHALEIQETGSLDKVVSWAHQFPYAHPLWFGQFIGFLNIYEPDYAKAVYSRGDPKAPDVYDFFLQWIGRGLLVLEGPKWLQHRKLLTPGFHYDVLKPYVAVFTESTRIMLDKWEEKAREGKSFDIFCDVGHMALNTLMKCTFGRGDTGLGHRDSSYYLAVSDLTLLMQQRLVSFQYHNDFIYWLTPHGRRFLRACQVAHDHTDQVIRERKAALQDEKVRKKIQNRRHLDFLDILLGARDEDDIKLSDADLRAEVDTFMFEGHDTTTSGISWFLYCMALYPEHQHRCREEVREILGDQDFFQWDDLGKMTYLTMCIKESFRLYPPVPQVYRQLSKPVTFVDGRSLPAGSLISMHIYALHRNSAVWPDPEVFDSLRFSTENASKRHPFAFMPFSAGPRNCIGQQFAMSEMKVVTAMCLLRFEFSLDPSRLPIKMPQLVLRSKNGFHLHLKPLGPGSGK

SEQ ID NO: 22085 - protein, 497 aa, Homo sapiens
  Payload ID: 4458
  Gene Symbol: CYP4B1
  Gene Name: cytochrome P450, family 4, subfamily B, polypeptide 1
  ENSP ID: ENSP00000360987
MVPSFLSLSFSSLGLWASGLILVLGFLKLIHLLLRRQTLAKAMDKFPGPPTHWLFGHALEIQETGSLDKVVSWAHQFPYAHPLWFGQFIGFLNIYEPDYAKAVYSRGGRGLLVLEGPKWLQHRKLLTPGFHYDVLKPYVAVFTESTRIMLDKWEEKAREGKSFDIFCDVGHMALNTLMKCTFGRGDTGLGHSRDSSYYLAVSDLTLLMQQRLVSFQYHNDFIYWLTPHGRRFLRACQVAHDHTDQVIRERKAALQDEKVRKKIQNRRHLDFLDILLGARDEDDIKLSDADLRAEVDTFMFEGHDTTTSGISWFLYCMALYPEHQHRCREEVREILGDQDFFQWDDLGKMTYLTMCIKESFRLYPPVPQVYRQLSKPVTFVDGRSLPAGSLISMHIYALHRNSAVWPDPEVFDSLRFSTENASKRHPFAFMPFSAGPRNCIGQQFAMSEMKVVTAMCLLRFEFSLDPSRLPIKMPQLVLRSKNGFHLHLKPLGPGSGK

SEQ ID NO: 22086 - protein, 512 aa, Homo sapiens
  Payload ID: 4458
  Gene Symbol: CYP4B1
  Gene Name: cytochrome P450, family 4, subfamily B, polypeptide 1
  Uniprot ID: P13584
  ENSP ID: ENSP00000360991
MVPSFLSLSFSSLGLWASGLILVLGFLKLIHLLLRRQTLAKAMDKFPGPPTHWLFGHALEIQETGSLDKVVSWAHQFPYAHPLWFGQFIGFLNIYEPDYAKAVYSRGDPKAPDVYDFFLQWIGRGLLVLEGPKWLQHRKLLTPGFHYDVLKPYVAVFTESTRIMLDKWEEKAREGKSFDIFCDVGHMALNTLMKCTFGRGDTGLGHSRDSSYYLAVSDLTLLMQQRLVSFQYHNDFIYWLTPHGRRFLRACQVAHDHTDQVIRERKAALQDEKVRKKIQNRRHLDFLDILLGARDEDDIKLSDADLRAEVDTFMFEGHDTTTSGISWFLYCMALYPEHQHRCREEVREILGDQDFFQWDDLGKMTYLTMCIKESFRLYPPVPQVYRQLSKPVTFVDGRSLPAGSLISMHIYALHRNSAVWPDPEVFDSLRFSTENASKRHPFAFMPFSAGPRNCIGQQFAMSEMKVVTAMCLLRFEFSLDPSRLPIKMPQLVLRSKNGFHLHLKPLGPGSGK

SEQ ID NO: 22087 - protein, 325 aa, Homo sapiens
  Payload ID: 4458
  Gene Symbol: CYP4B1
  Gene Name: cytochrome P450, family 4, subfamily B, polypeptide 1
  ENSP ID: ENSP00000433068
MVPSFLSLSFSSLGLWASGLILVLGFLKLIHLLLRRQTLAKAMDKFPGPPTHWLFGHALEIQETGSLDKVVSWAHQFPYAHPLWFGQFIGFLNIYEPDYAKAVYSRGDPKAPDVYDFFLQWIGRGLLVLEGPKWLQHRKLLTPGFHYDVLKPYVAVFTESTRIMLDKWEEKAREGKSFDIFCDVGHMALNTLMKCTFGRGDTGLGHSTIMTSSTGSPHMAAASCGPARWPMTIQTRSSGSGRQPCRMRRCGRRSRTGGTWTSWTFSWVPGMKMTSNCQMQTSGLKWTHSCLKAMTPPPVVSPGFSTAWPCTLSTSIVVERRSARS

SEQ ID NO: 22088 - protein, 87 aa, Homo sapiens
  Payload ID: 4458
  Gene Symbol: CYP4B1
  Gene Name: cytochrome P450, family 4, subfamily B, polypeptide 1
  ENSP ID: ENSP00000433367
MVPSFLSLSFSSLGLWASGLILVLGFLKLIHLLLRRQTLAKAMDKFPGPPTHWLFGHALEGEACWFLRGPSGCSTASCSHLAFIMMC

SEQ ID NO: 22089 - protein, 70 aa, Homo sapiens
  Payload ID: 4458
  Gene Symbol: CYP4B1
  Gene Name: cytochrome P450, family 4, subfamily B, polypeptide 1
  ENSP ID: ENSP00000438995
MLDKWEEKAREGKSFDIFCDVGHMALNTLMKCTFGRGDTGLGHSRDSSYYLAVSDLTLLMQQRLVSFQYH

SEQ ID NO: 22090 - protein, 138 aa, Homo sapiens
  Payload ID: 4458
  Gene Symbol: CYP4B1
  Gene Name: cytochrome P450, family 4, subfamily B, polypeptide 1
  ENSP ID: ENSP00000443212
MVPSFLSLSFSSLGLWASGLILVLGFLKLIHLLLRRQTLAKAMDKFPGPPTHWLFGHALEIQETGSLDKVVSWAHQFPYAHPLWFGQFIGFLNIYEPDYAKAVYSRGGGCVSFVSHLAMSSDTSSWTQALWVQLRYRN

SEQ ID NO: 22091 - protein, 295 aa, Homo sapiens [sequence omitted]

SEQ ID NO: 22092 - protein, 524 aa, Homo sapiens
  Payload ID: 4459
  Gene Symbol: CYP4F11
  Gene Name: cytochrome P450, family 4, subfamily F, polypeptide 11
  Uniprot ID: Q9HBI6
  ENSP ID: ENSP00000248041
MPQLSLSWLGLGPVAASPWLLLLLVGGSWLLARVLAWTYTFYDNCRRLQCFPQPPKQNWFWGHQGLVTPTEEGMKTLTQLVTTYPQGFKLWLGPTFPLLILCHPDIIRPITSASAAVAPKDMIFYGFLKPWLGDGLLLSGGDKWSRHRRMLTPAFHFNILKPYMKIFNKSVNIMHDKWQRLASEGSARLDMFEHISLMTLDSLQKCVFSFESNCQEKPSEYIAAILELSAFVEKRNQQILLHTDFLYYLTPDGQRFRRACHLVHDFTDAVIQERRCTLPTQGIDDFLKNKAKSKTLDFIDVLLLSKDEDGKELSDEDIRAEADTFMFEGHDTTASGLSWVLYHLAKHPEYQEQCRQEVQELLKDREPIEIEWDDLAQLPFLTMCIKESLRLHPPVPVISRCCTQDFVLPDGRVIPKGIVCLINIIGIHYNPTVWPDPEVYDPFRFDQENIKERSPLAFIPFSAGPRNCIGQAFAMAEMKVVLALTLLHFRILPTHTEPRRKPELILRAEGGLWLRVEPLGANSQ

SEQ ID NO: 22093 - protein, 454 aa, Homo sapiens
  Payload ID: 4459
  Gene Symbol: CYP4F11
  Gene Name: cytochrome P450, family 4, subfamily F, polypeptide 11
  ENSP ID: ENSP00000319859
MPQLSLSWLGLGPVAASPWLLLLLVGGSWLLARVLAWTYTFYDNCRRLQCFPQPPKQNWFWGHQGLVTPTEEGMKTLTQLVTTYPQGFKLWLGPTFPLLILCHPDIIRPITSASAAVAPKDMIFYGFLKPWLGDGLLLSGGDKWSRHRRMLTPAFHFNILKPYMKIFNKSVNIMHDKWQRLASEGSARLDMFEHISLMTLDSLQKCVFSFESNCQEKPSEYIAAILELSAFVEKRNQQILLHTDFLYYLTPDGQRFRRACHLVHDFTDAVIQERRCTLPTQGIDDFLKNKAKSKTLDFIDVLLLSKDEDGKELSDEDIRAEADTFMFEGHDTTASGLSWVLYHLAKHPEYQEQCRQEVQELLKDREPIEIEWDDLAQLPFLTMCIKESLRLHPPVPVISRCCTQDFVLPDGRVIPKGLRPLPFRPREHQGEVTSGFYSLLGRAQKLHRAGVRHG

SEQ ID NO: 22094 - protein, 524 aa, Homo sapiens; identical to SEQ ID NO: 22092
  Payload ID: 4459
  Gene Symbol: CYP4F11
  Gene Name: cytochrome P450, family 4, subfamily F, polypeptide 11
  Uniprot ID: Q9HBI6
  ENSP ID: ENSP00000384588

SEQ ID NO: 22095 - protein, 199 aa, Homo sapiens
  Payload ID: 4459
  Gene Symbol: CYP4F11
  Gene Name: cytochrome P450, family 4, subfamily F, polypeptide 11
  ENSP ID: ENSP00000476972
MFEGHDTTASGLSWVLYHLAKHPEYQEQCRQEVQELLKDREPIEIEWDDLAQLPFLTMCIKESLRLHPPVPVISRCCTQDFVLPDGRVIPKGIVCLINIIGIHYNPTVWPDPEVYDPFRFDQENIKERSPLAFIPFSAGPRNCIGQAFAMAEMKVVLALTLLHFRILPTHTEPRRKPELILRAEGGLWLRVEPLGANSQ

SEQ ID NO: 22096 - protein, 454 aa, Homo sapiens; identical to SEQ ID NO: 22093
  Payload ID: 4459
  Gene Symbol: CYP4F11
  Gene Name: cytochrome P450, family 4, subfamily F, polypeptide 11
  ENSP ID: ENSP00000481243

SEQ ID NO: 22097 - protein, 524 aa, Homo sapiens
  Payload ID: 4460
  Gene Symbol: CYP4F12
  Gene Name: cytochrome P450, family 4, subfamily F, polypeptide 12
  ENSP ID: ENSP00000321821
MSLLSLPWLGLRPVATSPWLLLLLVVGSWLLARILAWTYAFYNNCRRLQCFPQPPKRNWFWGHLGLITPTEEGLKNSTQMSATYSQGFTVWLGPIIPFIVLCHPDTIRSITNASAAIAPKDNLFIRFLKPWLGEGILLSGGDKWSRHRRMLTPAFHFNILKSYITIFNKSANIMLDKWQHLASEGSSRLDMFEHISLMTLDSLQKCIFSFDSHCQERPSEYIATILELSALVEKRSQHILQHMDFLYYLSHDGRRFHRACRLVHDFTDAVIRERRRTLPTQGIDDFFKDKAKSKTLDFIDVLLLSKDEDGKALSDEDIRAEADTFMFGGHDTTASGLSWVLYNLARHPEYQERCRQEVQELLKDRDPKEIEWDDLAQLPFLTMCVKESLRLHPPAPFISRCCTQDIVLPDGRVIPKGITCLIDIIGVHHNPTVWPDPEVYDPFRFDPENSKGRSPLAFIPFSAGPRNCIGQAFAMAEMKVVLALMLLHFRFLPDHTEPRRKLELIMRAEGGLWLRVEPLNVSLQ

SEQ ID NO: 22098 - protein, 102 aa, Homo sapiens
  Payload ID: 4460
  Gene Symbol: CYP4F12
  Gene Name: cytochrome P450, family 4, subfamily F, polypeptide 12
  Uniprot ID: Q9HCS2
  ENSP ID: ENSP00000430849
MSLLSLPWLGLRPVATSPWLLLLLVVGSWLLARILAWTYAFYNNCRRLQCFPQPPKRNWFWGHLGLITPTEEGLKNSTQMSATYSQGFTLPLHPRIISSSGS

SEQ ID NO: 22099 - protein, 79 aa, Homo sapiens
  Payload ID: 4460
  Gene Symbol: CYP4F12
  Gene Name: cytochrome P450, family 4, subfamily F, polypeptide 12
  ENSP ID: ENSP00000446812
MSLLSLPWLGLRPVATSPWLLLLLVVGSWLLARILAWTYAFYNNCRRLQCFPQPPKRNWFWGHLGLLPLHPRIISSSGS

SEQ ID NO: 22100 - protein, 70 aa, Homo sapiens
  Payload ID: 4460
  Gene Symbol: CYP4F12
  Gene Name: cytochrome P450, family 4, subfamily F, polypeptide 12
  ENSP ID: ENSP00000447922
MGNWGFPGNWTPSKLPRIQITPTEEGLKNSTQMSATYSQGFTVWLGPIIPFIVLCHPDTIRSITNASAAI

SEQ ID NO: 22101 - protein, 104 aa, Homo sapiens
  Payload ID: 4460
  Gene Symbol: CYP4F12
  Gene Name: cytochrome P450, family 4, subfamily F, polypeptide 12
  ENSP ID: ENSP00000448560
MSLLSLPWLGLRPVATSPWLLLLLVVGSWLLARILAWTYAFYNNCRRLQCFPQPPKRNWFWGHLGLITPTEEGLKNSTQMSATYSQGFTVPEALAGRRDTAEWR

SEQ ID NO: 22102 - protein, 524 aa, Homo sapiens; identical to SEQ ID NO: 22097
  Payload ID: 4460
  Gene Symbol: CYP4F12
  Gene Name: cytochrome P450, family 4, subfamily F, polypeptide 12
  ENSP ID: ENSP00000448998

SEQ ID NO: 22103 - protein, 102 aa, Homo sapiens; identical to SEQ ID NO: 22098
  Payload ID: 4460
  Gene Symbol: CYP4F12
  Gene Name: cytochrome P450, family 4, subfamily F, polypeptide 12
  Uniprot ID: Q9HCS2
  ENSP ID: ENSP00000449703

SEQ ID NO: 22104 - protein, 520 aa, Homo sapiens
  Payload ID: 4461
  Gene Symbol: CYP4F2
  Gene Name: cytochrome P450, family 4, subfamily F, polypeptide 2
  ENSP ID: ENSP00000011989
MSQLSLSWLGLWPVAASPWLLLLLVGASWLLAHVLAWTYAFYDNCRRLRCFPQPPRRNWFWGHQGMIHSSEEGLLYTQSLACTFGDMGCWWVGPWQAVIHIFLPTCIKPVLFAPAAIAPKDKFFYSFLEPWLGDGLLLSAGDKWSRHRRMLTPAFHFNILKPYMKIFNESVNIMHAKWQLLASEGSACLDMFEHISLMTLDSLQKCVFSFDSHCQEKPSEYIAAILELSALVSKRHHEILLHIDFLYYLTPDGQRFRRACRLVHDFTDAVIQERRRTLPSQGVDDFLQAKAKSKTLDFIDVLLLSKDEDGKKLSDEDIRAEADTFMFEGHDTTASGLSWVLYHLAKHPEYQERCRQEVQELLKDREPKEIEWDDLAHLPFLTMCMKESLRLHPPVPVISRHVTQDIVLPDGRVIPKGIICLISVFGTHHNPAVWPDPEVYDPFRFDPENIKERSPLAFIPFSAGPRNCIGQTFAMAEMKVVLALTLLRFRVLPDHTEPRRKPELVLRAEGGLWLRVEPLS

SEQ ID NO: 22105 - protein, 520 aa, Homo sapiens
  Payload ID: 4461
  Gene Symbol: CYP4F2
  Gene Name: cytochrome P450, family 4, subfamily F, polypeptide 2
  Uniprot ID: P78329
  ENSP ID: ENSP00000221700
MSQLSLSWLGLWPVAASPWLLLLLVGASWLLAHVLAWTYAFYDNCRRLRCFPQPPRRNWFWGHQGMVNPTEEGMRVLTQLVATYPQGFKVWMGPISPLLSLCHPDIIRSVINASAAIAPKDKFFYSFLEPWLGDGLLLSAGDKWSRHRRMLTPAFHFNILKPYMKIFNESVNIMHAKWQLLASEGSACLDMFEHISLMTLDSLQKCVFSFDSHCQEKPSEYIAAILELSALVSKRHHEILLHIDFLYYLTPDGQRFRRACRLVHDFTDAVIQERRRTLPSQGVDDFLQAKAKSKTLDFIDVLLLSKDEDGKKLSDEDIRAEADTFMFEGHDTTASGLSWVLYHLAKHPEYQERCRQEVQELLKDREPKEIEWDDLAHLPFLTMCMKESLRLHPPVPVISRHVTQDIVLPDGRVIPKGIICLISVFGTHHNPAVWPDPEVYDPFRFDPENIKERSPLAFIPFSAGPRNCIGQTFAMAEMKVVLALTLLRFRVLPDHTEPRRKPELVLRAEGGLWLRVEPLS

SEQ ID NO: 22106 - protein, 153 aa, Homo sapiens
  Payload ID: 4461
  Gene Symbol: CYP4F2
  Gene Name: cytochrome P450, family 4, subfamily F, polypeptide 2
  ENSP ID: ENSP00000465514
MSQLSLSWLGLWPVAASPWLLLLLVGASWLLAHVLAWTYAFYDNCRRLRCFPQPPRRNWFWGHQGMVNPTEEGMRVLTQLVATYPQGFKVWMGPISPLLSLCHPDIIRSVINASAAIAPKDKFFYSFLEPWLGDGLLLSAGDKWSRHRRMLTP

SEQ ID NO: 22107 - protein, 89 aa, Homo sapiens
  Payload ID: 4461
  Gene Symbol: CYP4F2
  Gene Name: cytochrome P450, family 4, subfamily F, polypeptide 2
  ENSP ID: ENSP00000467443
MSQLSLSWLGLWPVAASPWLLLLLVGASWLLAHVLAWTYAFYDNCRRLRCFPQPPRRNWFWGHQGMLPLHQRTSSSTASWSPGWGMGSC

SEQ ID NO: 22108 - protein, 74 aa, Homo sapiens
  Payload ID: 4461
  Gene Symbol: CYP4F2
  Gene Name: cytochrome P450, family 4, subfamily F, polypeptide 2
  ENSP ID: ENSP00000467846
  MOD_RES (1)..(1): Any amino acid
XWVLYHLAKHPEYQERCRQEVQELLKDREPKEIEWSTTPFALTQRTSRRGHLWLLFPSRQGPGTASGRRSRWRR

SEQ ID NO: 22109 - protein, 531 aa, Homo sapiens
  Payload ID: 4462
  Gene Symbol: CYP4F22
  Gene Name: cytochrome P450, family 4, subfamily F, polypeptide 22
  Uniprot ID: Q6NT55
  ENSP ID: ENSP00000269703
MLPITDRLLHLLGLEKTAFRIYAVSTLLLFLLFFLFRLLLRFLRLCRSFYITCRRLRCFPQPPRRNWLLGHLGMYLPNEAGLQDEKKVLDNMHHVLLVWMGPVLPLLVLVHPDYIKPLLGASAAIAPKDDLFYGFLKPWLGDGLLLSKGDKWSRHRRLLTPAFHFDILKPYMKIFNQSADIMHAKWRHLAEGSAVSLDMFEHISLMTLDSLQKCVFSYNSNCQEKMSDYISAIIELSALSVRRQYRLHHYLDFIYYRSADGRRFRQACDMVHHFTTEVIQERRRALRQQGAEAWLKAKQGKTLDFIDVLLLARDEDGKELSDEDIRAEADTFMFEGHDTTSSGISWMLFNLAKYPEYQEKCREEIQEVMKGRELEELEWDDLTQLPFTTMCIKESLRQYPPVTLVSRQCTEDIKLPDGRIIPKGIICLVSIYGTHHNPTVWPDSKVYNPYRFDPDNPQQRSPLAYVPFSAGPRNCIGQSFAMAELRVVVALTLLRFRLSVDRTRKVRRKPELILRTENGLWLKVEPLPPRA

SEQ ID NO: 22110 - protein, 531 aa, Homo sapiens; identical to SEQ ID NO: 22109
  Payload ID: 4462
  Gene Symbol: CYP4F22
  Gene Name: cytochrome P450, family 4, subfamily F, polypeptide 22
  Uniprot ID: Q6NT55
  ENSP ID: ENSP00000469866

SEQ ID NO: 22111 - protein, 520 aa, Homo sapiens
  Payload ID: 4463
  Gene Symbol: CYP4F3
  Gene Name: cytochrome P450, family 4, subfamily F, polypeptide 3
  Uniprot ID: Q08477
  ENSP ID: ENSP00000221307
MPQLSLSSLGLWPMAASPWLLLLLVGASWLLARILAWTYTFYDNCCRLRCFPQPPKRNWFLGHLGLIHSSEEGLLYTQSLACTFGDMCCWWVGPWHAIVRIFHPTYIKPVLFAPAAIVPKDKVFYSFLKPWLGDGLLLSAGEKWSRHRRMLTPAFHFNILKPYMKIFNESVNIMHAKWQLLASEGSARLDMFEHISLMTLDSLQKCVFSFDSHCQEKPSEYIAAILELSALVTKRHQQILLYIDFLYYLTPDGQRFRRACRLVHDFTDAVIQERRRTLPSQGVDDFLQAKAKSKTLDFIDVLLLSKDEDGKKLSDEDIRAEADTFMFEGHDTTASGLSWVLYHLAKHPEYQERCRQEVQELLKDREPKEIEWDDLAQLPFLTMCIKESLRLHPPVPAVSRCCTQDIVLPDGRVIPKGIICLISVFGTHHNPAVWPDPEVYDPFRFDPKNIKERSPLAFIPFSAGPRNCIGQAFAMAEMKVVLGLTLLRFRVLPDHTEPRRKPELVLRAEGGLWLRVEPLS

SEQ ID NO: 22112 - protein, 79 aa, Homo sapiens
  Payload ID: 4463
  Gene Symbol: CYP4F3
  Gene Name: cytochrome P450, family 4, subfamily F, polypeptide 3
  ENSP ID: ENSP00000465394
MPQLSLSSLGLWPMAASPWLLLLLVGASWLLARILAWTYTFYDNCCRLRCFPQPPKRNWFLGHLGLLPLYQRTRSSTAS

SEQ ID NO: 22113 - protein, 520 aa, Homo sapiens
  Payload ID: 4463
  Gene Symbol: CYP4F3
  Gene Name: cytochrome P450, family 4, subfamily F, polypeptide 3
  Uniprot ID: Q08477
  ENSP ID: ENSP00000466395
MPQLSLSSLGLWPMAASPWLLLLLVGASWLLARILAWTYTFYDNCCRLRCFPQPPKRNWFLGHLGLVTPTEQGMRVLTQLVATYPQGFKVWMGPIFPVIRFCHPNIIRSVINASAAIVPKDKVFYSFLKPWLGDGLLLSAGEKWSRHRRMLTPAFHFNILKPYMKIFNESVNIMHAKWQLLASEGSARLDMFEHISLMTLDSLQKCVFSFDSHCQEKPSEYIAAILELSALVTKRHQQILLYIDFLYYLTPDGQRFRRACRLVHDFTDAVIQERRRTLPSQGVDDFLQAKAKSKTLDFIDVLLLSKDEDGKKLSDEDIRAEADTFMFEGHDTTASGLSWVLYHLAKHPEYQERCRQEVQELLKDREPKEIEWDDLAQLPFLTMCIKESLRLHPPVPAVSRCCTQDIVLPDGRVIPKGIICLISVFGTHHNPAVWPDPEVYDPFRFDPKNIKERSPLAFIPFSAGPRNCIGQAFAMAEMKVVLGLTLLRFRVLPDHTEPRRKPELVLRAEGGLWLRVEPLS

SEQ ID NO: 22114 - protein, 520 aa, Homo sapiens; identical to SEQ ID NO: 22113
  Payload ID: 4463
  Gene Symbol: CYP4F3
  Gene Name: cytochrome P450, family 4, subfamily F, polypeptide 3
  Uniprot ID: Q08477
  ENSP ID: ENSP00000466988

SEQ ID NO: 22115 - protein, 520 aa, Homo sapiens; identical to SEQ ID NO: 22113
  Payload ID: 4463
  Gene Symbol: CYP4F3
  Gene Name: cytochrome P450, family 4, subfamily F, polypeptide 3
  Uniprot ID: Q08477
  ENSP ID: ENSP00000468105

SEQ ID NO: 22116 - protein, 74 aa, Homo sapiens
  Payload ID: 4463
  Gene Symbol: CYP4F3
  Gene Name: cytochrome P450, family 4, subfamily F, polypeptide 3
  ENSP ID: ENSP00000476546
ILLYIDFLYYLTPDGQRFRRACRLVHDFTDAVIQERRRTLPSQGVDDFLQAKAKSKTLDFIDVLLLSKVGLSGI

SEQ ID NO: 22117 - protein, 523 aa, Homo sapiens
  Payload ID: 4463
  Gene Symbol: CYP4F3
  Gene Name: cytochrome P450, family 4, subfamily F, polypeptide 3
  ENSP ID: ENSP00000478605
MSLLSLSWLGLRPVAASPWLLLLVVGASWLLARILAWTYAFYHNGRRLRCFPQPRKQNWFLGHLGLVTPTEEGLRVLTQLVATYPQGFVRWLGPITPIINLCHPDIVRSVINTSAAIVPKDKVFYSFLKPWLGDGLLLSAGEKWSRHRRMLTPAFHFNILKPYMKIFNESVNIMHAKWQLLASEGSARLDMFEHISLMTLDSLQKCVFSFDSHCQEKPSEYIAAILELSALVTKRHQQILLYIDFLYYLTPDGQRFRRACRLVHDFTDAVIQERRRTLPSQGVDDFLQAKAKSKTLDFIDVLLLSKDEDGKKLSDEDIRAEADTFMFEGHDTTASGLSWVLYHLAKHPEYQERCRQEVQELLKDREPKEIEWDDLAQLPFLTMCIKESLRLHPPVPAVSRCCTQDIVLPDGRVIPKGIICLISVFGTHHNPAVWPDPEVYDPFRFDPKNIKERSPLAFIPFSAGPRNCIGQAFAMAEMKVVLGLTLLRFRVLPDHTEPRRKPELVLRAEGGLWLRVEPLSVLQ

SEQ ID NO: 22118 - protein, 520 aa, Homo sapiens
  Payload ID: 4464
  Gene Symbol: CYP4F8
  Gene Name: cytochrome P450, family 4, subfamily F, polypeptide 8
  Uniprot ID: P98187
  ENSP ID: ENSP00000477567
MSLLSLSWLGLRPVAASPWLLLLVVGASWLLARILAWTYAFYHNGRRLRCFPQPRKQNWFLGHLGLVTPTEEGLRVLTQLVATYPQGFVRWLGPITPIINLCHPDIVRSVINTSDAITDKDIVFYKTLKPWLGDGLLLSVGDKWRHHRRLLTPAFHFNILKPYIKIFSKSANIMHAKWQRLAMEGSTCLDVFEHISLMTLDSLQKCIFSFDSNCQEKPSEYITAIMELSALVVKRNNQFFRYKDFLYFLTPCGRRFHRACRLVHDFTDAVIQERRRTLTSQGVDDFLQAKAKSKTLDFIDVLLLSEDKNGKELSDEDIRAEADTFMFGGHDTTASGLSWVLYNLARHPEYQERCRQEVQELLKDREPKEIEWDDLAQLPFLTMCLKESLRLHPPIPTFARGCTQDVVLPDSRVIPKGNVCNINIFAIHHNPSVWPDPEVYDPFRFDPENAQKRSPMAFIPFSAGPRNCIGQKFAMAEMKVVLALTLLRFRILPDHREPRRTPEIVLRAEDGLWLRVEPLG

SEQ ID NO: 22119 - protein, 211 aa, Homo sapiens
  Payload ID: 4464
  Gene Symbol: CYP4F8
  Gene Name: cytochrome P450, family 4, subfamily F, polypeptide 8
  ENSP ID: ENSP00000478555
MGACRMSLLSLSWLGLRPVAASPWLLLLVVGASWLLARILAWTYAFYHNGRRLRCFPQPRKQNWFLGHLGLVTPTEEGLRVLTQLVATYPQGFVRWLGPITPIINLCHPDIVRSVINTSDAITDKDIVFYKTLKPWLGDGLLLSVGDKWRHHRRLLTPAFHFNILKPYIKIFSKSANIMHAKWQRLAMEGSTCLDVFEHISLMTLDSLQKC

SEQ ID NO: 22120 - protein, 69 aa, Homo sapiens
  Payload ID: 4464
  Gene Symbol: CYP4F8
  Gene Name: cytochrome P450, family 4, subfamily F, polypeptide 8
  ENSP ID: ENSP00000479430
MSLLSLSWLGLRPVAASPWLLLLVVGASWLLARILAWTYAFYHNGRRLRCFPQPRKQNWFLGHLGLEAQ

SEQ ID NO: 22121 - protein, 103 aa, Homo sapiens
  Payload ID: 4464
  Gene Symbol: CYP4F8
  Gene Name: cytochrome P450, family 4, subfamily F, polypeptide 8
  ENSP ID: ENSP00000482692
  MOD_RES (1)..(1): Any amino acid
XLRLHPPIPTFARGCTQDVVLPDSRVIPKGNVCNINIFAIHHNPSVWPDPEVYDPFRFDPENAQKRSPMAFIPFSAGPREPRRTPEIVLRAEDGLWLRVEPLG

SEQ ID NO: 22122 - protein, 525 aa, Homo sapiens
  Payload ID: 4465
  Gene Symbol: CYP4V2
  Gene Name: cytochrome P450, family 4, subfamily V, polypeptide 2
  Uniprot ID: Q6ZWL3
  ENSP ID: ENSP00000368079
MAGLWLGLVWQKLLLWGAASALSLAGASLVLSLLQRVASYARKWQQMRPIPTVARAYPLVGHALLMKPDGREFFQQIIEYTEEYRHMPLLKLWVGPVPMVALYNAENVEVILTSSKQIDKSSMYKFLEPWLGLGLLTSTGNKWRSRRKMLTPTFHFTILEDFLDIMNEQANILVKKLEKHINQEAFNCFFYITLCALDIICETAMGKNIGAQSNDDSEYVRAVYRMSEMIFRRIKMPWLWLDLWYLMFKEGWEHKKSLQILHTFTNSVIAERANEMNANEDCRGDGRGSAPSKNKRRAFLDLLLSVTDDEGNRLSHEDIREEVDTFMFEGHDTTAAAINWSLYLLGSNPEVQKKVDHELDDVFGKSDRPATVEDLKKLRYLECVIKETLRLFPSVPLFARSVSEDCEVAGYRVLKGTEAVIIPYALHRDPRYFPNPEEFQPERFFPENAQGRHPYAYVPFSAGPRNCIGQKFAVMEEKTILSCILRHFWIESNQKREELGLEGQLILRPSNGIWIKLKRRNADER

SEQ ID NO: 22123 - protein, 509 aa, Homo sapiens
  Payload ID: 4466
  Gene Symbol: CYP4X1
  Gene Name: cytochrome P450, family 4, subfamily X, polypeptide 1
  Uniprot ID: Q8N118
  ENSP ID: ENSP00000360968
MEFSWLETRWARPFYLAFVFCLALGLLQAIKLYLRRQRLLRDLRPFPAPPTHWFLGHQKFIQDDNMEKLEEIIEKYPRAFPFWIGPFQAFFCIYDPDYAKTLLSRTDPKSQYLQKFSPPLLGKGLAALDGPKWFQHRRLLTPGFHFNILKAYIEVMAHSVKMMLDKWEKICSTQDTSVEVYEHINSMSLDIIMKCAFSKETNCQTNSTHDPYAKAIFELSKIIFHRLYSLLYHSDIIFKLSPQGYRFQKLSRVLNQYTDTIIQERKKSLQAGVKQDNTPKRKYQDFLDIVLSAKDESGSSFSDIDVHSEVSTFLLAGHDTLAASISWILYCLALNPEHQERCREEVRGILGDGSSITWDQLGEMSYTTMCIKETCRLIPAVPSISRDLSKPLTFPDGCTLPAGITVVLSIWGLHHNPAVWKNPKVFDPLRFSQENSDQRHPYAYLPFSAGSRNCIGQEFAMIELKVTIALILLHFRVTPDPTRPLTFPNHFILKPKNGMYLHLKKLSEC

SEQ ID NO: 22124 - protein, 505 aa, Homo sapiens
  Payload ID: 4467
  Gene Symbol: CYP4Z1
  Gene Name: cytochrome P450, family 4, subfamily Z, polypeptide 1
  Uniprot ID: Q86W10
  ENSP ID: ENSP00000334246
MEPSWLQELMAHPFLLLILLCMSLLLFQVIRLYQRRRWMIRALHLFPAPPAHWFYGHKEFYPVKEFEVYHKLMEKYPCAVPLWVGPFTMFFSVHDPDYAKILLKRQDPKSAVSHKILESWVGRGLVTLDGSKWKKHRQIVKPGFNISILKIFITMMSESVRMMLNKWEEHIAQNSRLELFQHVSLMTLDSIMKCAFSHQGSIQLDSTLDSYLKAVFNLSKISNQRMNNFLHHNDLVFKFSSQGQIFSKFNQELHQFTEKVIQDRKESLKDKLKQDTTQKRRWDFLDILLSAKSENTKDFSEADLQAEVKTFMFAGHDTTSSAISWILYCLAKYPEHQQRCRDEIRELLGDGSSITWEHLSQMPYTTMCIKECLRLYAPVVNISRLLDKPITFPDGRSLPAGITVFINIWALHHNPYFWEDPQVFNPLRFSRENSEKIHPYAFIPFSAGLRNCIGQHFAIIECKVAVALTLLRFKLAPDHSRPPQPVRQVVLKSKNGIHVFAKKVC

SEQ ID NO: 22125 - protein, 500 aa, Homo sapiens
  Payload ID: 4468
  Gene Symbol: CYP46A1
  Gene Name: cytochrome P450, family 46, subfamily A, polypeptide 1
  Uniprot ID: Q9Y6A2
  ENSP ID: ENSP00000261835
MSPGLLLLGSAVLLAFGLCCTFVHRARSRYEHIPGPPRPSFLLGHLPCFWKKDEVGGRVLQDVFLDWAKKYGPVVRVNVFHKTSVIVTSPESVKKFLMSTKYNKDSKMYRALQTVFGERLFGQGLVSECNYERWHKQRRVIDLAFSRSSLVSLMETFNEKAEQLVEILEAKADGQTPVSMQDMLTYTAMDILAKAAFGMETSMLLGAQKPLSQAVKLMLEGITASRNTLAKFLPGKRKQLREVRESIRFLRQVGRDWVQRRREALKRGEEVPADILTQILKAEEGAQDDEGLLDNFVTFFIAGHETSANHLAFTVMELSRQPEIVARLQAEVDEVIGSKRYLDFEDLGRLQYLSQVLKESLRLYPPAWGTFRLLEEETLIDGVRVPGNTPLLFSTYVMGRMDTYFEDPLTFNPDRFGPGAPKPRFTYFPFSLGHRSCIGQQFAQMEVKVVMAKLLQRLEFRLVPGQRFGLQEQATLKPLDPVLCTLRPRGWQPAPPPPPC

SEQ ID NO: 22126 - protein, 403 aa, Homo sapiens
  Payload ID: 4468
  Gene Symbol: CYP46A1
  Gene Name: cytochrome P450, family 46, subfamily A, polypeptide 1
  Uniprot ID: Q9Y6A2
  ENSP ID: ENSP00000369577
MSTKYNKDSKMYRALQTVFGERLFGQGLVSECNYERWHKQRRVIDLAFSRSSLVSLMETFNEKAEQLVEILEAKADGQTPVSMQDMLTYTAMDILAKAAFGMETSMLLGAQKPLSQAVKLMLEGITASRNTLAKFLPGKRKQLREVRESIRFLRQVGRDWVQRRREALKRGEEVPADILTQILKAEEGAQDDEGLLDNFVTFFIAGHETSANHLAFTVMELSRQPEIVARLQAEVDEVIGSKRYLDFEDLGRLQYLSQVLKESLRLYPPAWGTFRLLEEETLIDGVRVPGNTPLLFSTYVMGRMDTYFEDPLTFNPDRFGPGAPKPRFTYFPFSLGHRSCIGQQFAQMEVKVVMAKLLQRLEFRLVPGQRFGLQEQATLKPLDPVLCTLRPRGWQPAPPPPPC

SEQ ID NO: 22127 - protein, 96 aa, Homo sapiens
  Payload ID: 4468
  Gene Symbol: CYP46A1
  Gene Name: cytochrome P450, family 46, subfamily A, polypeptide 1
  ENSP ID: ENSP00000451069
MSPGLLLLGSAVLLAFGLCCTFVHRARSRYEHIPGPPRPSFLLGHLPCFWKKDEVGGRVLQDVFLDWAKKYGPVVRVNVFHKTSVIVTSPESVKFH

SEQ ID NO: 22128 - protein, 164 aa, Homo sapiens
  Payload ID: 4468
  Gene Symbol: CYP46A1
  Gene Name: cytochrome P450, family 46, subfamily A, polypeptide 1
  ENSP ID: ENSP00000451602
RFLRQVGRDWVQRRREALKRGEEVPADILTQILKAEEGAQDDEGLLDNFVTFFIAGHETSANHLAFTVMELSRQPEIVARLQAEVDEVIGSKRYLDFEDLGRLQYLSQVLKESLRLYPPAWGTFRLLEEETLIDGVRVPGNTPLLEQCASQLLGHLPRSERAGL

SEQ ID NO: 22129 - protein, 51 aa, Homo sapiens
  Payload ID: 4468
  Gene Symbol: CYP46A1
  Gene Name: cytochrome P450, family 46, subfamily A, polypeptide 1
  ENSP ID: ENSP00000452151
  MOD_RES (1)..(1): Any amino acid
XPAREEEAAPGGPGEHSLPAPGGQGLGPAPPGSPEEGRGGSCRHPHTDSES

SEQ ID NO: 22130 - protein, 509 aa, Homo sapiens
  Payload ID: 4469
  Gene Symbol: CYP51A1
  Gene Name: cytochrome P450, family 51, subfamily A, polypeptide 1
  ENSP ID: ENSP00000003100
MAAAAGMLLLGLLQAGGSVLGQAMEKVTGGNLLSMLLIACAFTLSLVYLIRLAAGHLVQLPAGVKSPPYIFSPIPFLGHAIAFGKSPIEFLENAYEKYGPVFSFTMVGKTFTYLLGSDAAALLFNSKNEDLNAEDVYSRLTTPVFGKGVAYDVPNPVFLEQKKMLKSGLNIAHFKQHVSIIEKETKEYFESWGESGEKNVFEALSELIILTASHCLHGKEIRSQLNEKVAQLYADLDGGFSHAAWLLPGWLPLPSFRRRDRAHREIKDIFYKAIQKRRQSQEKIDDILQTLLDATYKDGRPLTDDEVAGMLIGLLLAGQHTSSTTSAWMGFFLARDKTLQKKCYLEQKTVCGENLPPLTYDQLKDLNLLDRCIKETLRLRPPIMIMMRMARTPQTVAGYTIPPGHQVCVSPTVNQRLKDSWVERLDFNPDRYLQDNPASGEKFAYVPFGAGRHRCIGENFAYVQIKTIWSTMLRLYEFDLIDGYFPTVNYTTMIHTPENPVIRYKRRSK

SEQ ID NO: 22131 - protein, 222 aa, Homo sapiens
  Payload ID: 4469
  Gene Symbol: CYP51A1
  Gene Name: cytochrome P450, family 51, subfamily A, polypeptide 1
  ENSP ID: ENSP00000394268
  MOD_RES (1)..(1): Any amino acid
XRAHREIKDIFYKAIQKRRQSQEKIDDILQTLLDATYKDGRPLTDDEVAGMLIGLLLAGQHTSSTTSAWMGFFLARDKTLQKKCYLEQKTVCGENLPPLTYDQLKDLNLLDRCIKETLRLRPPIMIMMRMARTPQTVAGYTIPPGHQDNPASGEKFAYVPFGAGRHRCIGENFAYVQIKTIWSTMLRLYEFDLIDGYFPTVNYTTMIHTPENPVIRYKRRSK

SEQ ID NO: 22132 - protein, 404 aa, Homo sapiens
  Payload ID: 4469
  Gene Symbol: CYP51A1
  Gene Name: cytochrome P450, family 51, subfamily A, polypeptide 1
  Uniprot ID: Q16850
  ENSP ID: ENSP00000406757
MVGKTFTYLLGSDAAALLFNSKNEDLNAEDVYSRLTTPVFGKGVAYDVPNPVFLEQKKMLKSGLNIAHFKQHVSIIEKETKEYFESWGESGEKNVFEALSELIILTASHCLHGKEIRSQLNEKVAQLYADLDGGFSHAAWLLPGWLPLPSFRRRDRAHREIKDIFYKAIQKRRQSQEKIDDILQTLLDATYKDGRPLTDDEVAGMLIGLLLAGQHTSSTTSAWMGFFLARDKTLQKKCYLEQKTVCGENLPPLTYDQLKDLNLLDRCIKETLRLRPPIMIMMRMARTPQTVAGYTIPPGHQVCVSPTVNQRLKDSWVERLDFNPDRYLQDNPASGEKFAYVPFGAGRHRCIGENFAYVQIKTIWSTMLRLYEFDLIDGYFPTVNYTTMIHTPENPVIRYKRRSK

SEQ ID NO: 22133 - protein, 30 aa, Homo sapiens
  Payload ID: 4469
  Gene Symbol: CYP51A1
  Gene Name: cytochrome P450, family 51, subfamily A, polypeptide 1
  ENSP ID: ENSP00000412536
MEDALFLRKSPPYIFSPIPFLGHAIAFGKS

SEQ ID NO: 22134 - protein, 504 aa, Homo sapiens
  Payload ID: 4470
  Gene Symbol: CYP7A1
  Gene Name: cytochrome P450, family 7, subfamily A, polypeptide 1
  Uniprot ID: P22680
  ENSP ID: ENSP00000301645
MMTTSLIWGIAIAACCCLWLILGIRRRQTGEPPLENGLIPYLGCALQFGANPLEFLRANQRKHGHVFTCKLMGKYVHFITNPLSYHKVLCHGKYFDWKKFHFATSAKAFGHRSIDPMDGNTTENINDTFIKTLQGHALNSLTESMMENLQRIMRPPVSSNSKTAAWVTEGMYSFCYRVMFEAGYLTIFGRDLTRRDTQKAHILNNLDNFKQFDKVFPALVAGLPIHMFRTAHNAREKLAESLRHENLQKRESISELISLRMFLNDTLSTFDDLEKAKTHLVVLWASQANTIPATFWSLFQMIRNPEAMKAATEEVKRTLENAGQKVSLEGNPICLSQAELNDLPVLDSIIKESLRLSSASLNIRTAKEDFTLHLEDGSYNIRKDDIIALYPQLMHLDPEIYPDPLTFKYDRYLDENGKTKTTFYCNGLKLKYYYMPFGSGATICPGRLFAIHEIKQFLILMLSYFELELIEGQAKCPPLDQSRAGLGILPPLNDIEFKYKFKHL

SEQ ID NO: 22135 - protein, 506 aa, Homo sapiens
  Payload ID: 4471
  Gene Symbol: CYP7B1
  Gene Name: cytochrome P450, family 7, subfamily B, polypeptide 1
  Uniprot ID: O75881
  ENSP ID: ENSP00000310721
MAGEVSAATGRFSLERLGLPGLALAAALLLLALCLLVRRTRRPGEPPLIKGWLPYLGVVLNLRKDPLRFMKTLQKQHGDTFTVLLGGKYITFILDPFQYQLVIKNHKQLSFRVFSNKLLEKAFSISQLQKNHDMNDELHLCYQFLQGKSLDILLESMMQNLKQVFEPQLLKTTSWDTAELYPFCSSIIFEITFTTIYGKVIVCDNNKFISELRDDFLKFDDKFAYLVSNIPIELLGNVKSIREKIIKCFSSEKLAKMQGWSEVFQSRQDVLEKYYVHEDLEIGAHHLGFLWASVANTIPTMFWAMYYLLRHPEAMAAVRDEIDRLLQSTGQKKGSGFPIHLTREQLDSLICLESSIFEALRLSSYSTTIRFVEEDLTLSSETGDYCVRKGDLVAIFPPVLHGDPEIFEAPEEFRYDRFIEDGKKKTTFFKRGKKLKCYLMPFGTGTSKCPGRFFALMEIKQLLVILLTYFDLEIIDDKPIGLNYSRLLFGIQYPDSDVLFRYKVKS

SEQ ID NO: 22136 - protein, 501 aa, Homo sapiens
  Payload ID: 4472
  Gene Symbol: CYP8B1
  Gene Name: cytochrome P450, family 8, subfamily B, polypeptide 1
  Uniprot ID: Q9UNU6
  ENSP ID: ENSP00000318867
MVLWGPVLGALLVVIAGYLCLPGMLRQRRPWEPPLDKGTVPWLGHAMAFRKNMFEFLKRMRTKHGDVFTVQLGGQYFTFVMDPLSFGSILKDTQRKLDFGQYAKKLVLKVFGYRSVQGDHEMIHSASTKHLRGDGLKDLNETMLDSLSFVMLTSKGWSLDASCWHEDSLFRFCYYILFTAGYLSLFGYTKDKEQDLLQAGELFMEFRKFDLLFPRFVYSLLWPREWLEVGRLQRLFHKMLSVSHSQEKEGISNWLGNMLQFLREQGVPSAMQDKFNFMMLWASQGNTGPTSFWALLYLLKHPEAIRAVREEATQVLGEARLETKQSFAFKLGALQHTPVLDSVVEETLRLRAAPTLLRLVHEDYTLKMSSGQEYLFRHGDILALFPYLSVHMDPDIHPEPTVFKYDRFLNPNGSRKVDFFKTGKKIHHYTMPWGSGVSICPGRFFALSEVKLFILLMVTHFDLELVDPDTPLPHVDPQRWGFGTMQPSHDVRFRYRLHPTE

SEQ ID NO: 22137 - protein, 496 aa, Homo sapiens
  Payload ID: 4472
  Gene Symbol: CYP8B1
  Gene Name: cytochrome P450, family 8, subfamily B, polypeptide 1
  ENSP ID: ENSP00000404499
MVLWGPVLGALLVVIAGYLCLPGMLRQRRPWEPPLDKGTVPWLGHAMAFRKNMFEFLKRMRTKHGDVFTVQLGGQYFTFVMDPLSFGSILKDTQRKLDFGQYAKKLVLKVFGYRSVQGDHEMIHSASTKHLRGDGLKDLNETMLDSLSFVMLTSKGWSLDASCWHEDSLFRFCYYILFTAGYLSLFGYTKDKEQDLLQAGELFMEFRKFDLLFPRFVYSLLWPREWLEVGRLQRLFHKMLSVSHSQEKEGISNWLGNMLQFLREQGVPSAMQDKFNFMMLWASQGNTGPTSFWALLYLLKHPEAIRAVREEATQVLGEARLETKQSFAFKLGALQHTPVLDSVVEETLRLRAAPTLLRLVHEDYTLKMSSGQEYLFRHGDILALFPYLSVHMDPDIHPEPTVFKYDRFLNPNGSRKVDFFKTGKKIHHYTMPWGSGVSICPGRFFALSEADFERNVDSGPQLTQSIYDTMISWLMELFSAAETEPLLREPWSPPTL

SEQ ID NO: 22138 - protein, 190 aa, Homo sapiens
  Payload ID: 4473
  Gene Symbol: CYGB
  Gene Name: cytoglobin
  Uniprot ID: Q8WWM9
  ENSP ID: ENSP00000293230
MEKVPGEMEIERRERSEELSEAERKAVQAMWARLYANCEDVGVAILVRFFVNFPSAKQYFSQFKHMEDPLEMERSPQLRKHACRVMGALNTVVENLHDPDKVSSVLALVGKAHALKHKVEPVYFKILSGVILEVVAEEFASDFPPETQRAWAKLRGLIYSHVTAAYKEVGWVQQVPNATTPPATLPSSGP

SEQ ID NO: 22139 - protein, 125 aa, Homo sapiens
  Payload ID: 4473
  Gene Symbol: CYGB
  Gene Name: cytoglobin
  ENSP ID: ENSP00000464817
MEDPLEMERSPQLRKHACRVMGALNTVVENLHDPDKVSSVLALVGKAHALKHKVEPVYFKILSGVILEVVAEEFASDFPPETQRAWAKLRGLIYSHVTAAYKEVGWVQQVPNATTPPATLPSSGP

SEQ ID NO: 22140 - protein, 226 aa, Homo sapiens
  Payload ID: 4473
  Gene Symbol: CYGB
  Gene Name: cytoglobin
  ENSP ID: ENSP00000466448
MEKVPGEMEIERRERSEELSEAERKAVQAMWARLYANCEDVGVAILVRFFVNFPSAKQYFSQFKHMEDPLEMERSPQLRKHACRVMGALNTVVENLHDPDKVSSVLALVGKAHALKHKVEPVYFKPTGHTALFGAVGPLTPPPSLAAPRAEGRVLKTLLDAPFLGAKEAGGIPDSTSPKEASVAARVPPWSCWEAALAAWMLTPARRAERGPLFLAFLLTVRERPS

SEQ ID NO: 22141 - protein, 125 aa, Homo sapiens; identical to SEQ ID NO: 22139
  Payload ID: 4473
  Gene Symbol: CYGB
  Gene Name: cytoglobin
  ENSP ID: ENSP00000468559

SEQ ID NO: 22142 - protein, 398 aa, Homo sapiens
  Payload ID: 4474
  Gene Symbol: CYTH1
  Gene Name: cytohesin 1
  Uniprot ID: Q15438
  ENSP ID: ENSP00000354398
MEEDDSYVPSDLTAEERQELENIRRRKQELLADIQRLKDEIAEVANEIENLGSTEERKNMQRNKQVAMGRKKFNMDPKKGIQFLIENDLLKNTCEDIAQFLYKGEGLNKTAIGDYLGERDEFNIQVLHAFVELHEFTDLNLVQALRQFLWSFRLPGEAQKIDRMMEAFAQRYCQCNNGVFQSTDTCYVLSFAIIMLNTSLHNPNVKDKPTVERFIAMNRGINDGGDLPEELLRNLYESIKNEPFKIPEDDGNDLTHTFFNPDREGWLLKLGGGRVKTWKRRWFILTDNCLYYFEYTTDKEPRGIIPLENLSIREVEDSKKPNCFELYIPDNKDQVIKACKTEADGRVVEGNHTVYRISAPTPEEKEEWIKCIKAAISRDPFYEMLAARKKKVSSTKRH

SEQ ID NO: 22143 - protein, 398 aa, Homo sapiens; identical to SEQ ID NO: 22142
  Payload ID: 4474
  Gene Symbol: CYTH1
  Gene Name: cytohesin 1
  Uniprot ID: Q15438
  ENSP ID: ENSP00000389095

SEQ ID NO: 22144 - protein, 64 aa, Homo sapiens
  Payload ID: 4474
  Gene Symbol: CYTH1
  Gene Name: cytohesin 1
  ENSP ID: ENSP00000465252
MEEDDSYVPSDLTAEERQELENIRRRKQELLADIQRLKDEIAEVANEIENLGSTEESFSFCYFF

SEQ ID NO: 22145 - protein, 104 aa, Homo sapiens
  Payload ID: 4474
  Gene Symbol: CYTH1
  Gene Name: cytohesin 1
  ENSP ID: ENSP00000465530
MQRNKQVAMGRKKFNMDPKKGIQFLIENDLLKNTCEDIAQFLYKGEGLNKTAIGDYLGERDEFNIQVLHAFVELHEFTDLNLVQALRQFLWSFRLPGEAQKIDR

SEQ ID NO: 22146 - protein, 397 aa, Homo sapiens
  Payload ID: 4474
  Gene Symbol: CYTH1
  Gene Name: cytohesin 1
  Uniprot ID: Q15438
  ENSP ID: ENSP00000465665
MEEDDSYVPSDLTAEERQELENIRRRKQELLADIQRLKDEIAEVANEIENLGSTEERKNMQRNKQVAMGRKKFNMDPKKGIQFLIENDLLKNTCEDIAQFLYKGEGLNKTAIGDYLGERDEFNIQVLHAFVELHEFTDLNLVQALRQFLWSFRLPGEAQKIDRMMEAFAQRYCQCNNGVFQSTDTCYVLSFAIIMLNTSLHNPNVKDKPTVERFIAMNRGINDGGDLPEELLRNLYESIKNEPFKIPEDDGNDLTHTFFNPDREGWLLKLGGRVKTWKRRWFILTDNCLYYFEYTTDKEPRGIIPLENLSIREVEDSKKPNCFELYIPDNKDQVIKACKTEADGRVVEGNHTVYRISAPTPEEKEEWIKCIKAAISRDPFYEMLAARKKKVSSTKRH

SEQ ID NO: 22147 - protein, 339 aa, Homo sapiens
  Payload ID: 4474
  Gene Symbol: CYTH1
  Gene Name: cytohesin 1
  Uniprot ID: Q15438
  ENSP ID: ENSP00000465940
MQRNKQVAMGRKKFNMDPKKGIQFLIENDLLKNTCEDIAQFLYKGEGLNKTAIGDYLGERDEFNIQVLHAFVELHEFTDLNLVQALRQFLWSFRLPGEAQKIDRMMEAFAQRYCQCNNGVFQSTDTCYVLSFAIIMLNTSLHNPNVKDKPTVERFIAMNRGINDGGDLPEELLRNLYESIKNEPFKIPEDDGNDLTHTFFNPDREGWLLKLGGGRVKTWKRRWFILTDNCLYYFEYTTDKEPRGIIPLENLSIREVEDSKKPNCFELYIPDNKDQVIKACKTEADGRVVEGNHTVYRISAPTPEEKEEWIKCIKAAISRDPFYEMLAARKKKVSSTKRH

SEQ ID NO: 22148 - protein, 11 aa, Homo sapiens
  Payload ID: 4474
  Gene Symbol: CYTH1
  Gene Name: cytohesin 1
  ENSP ID: ENSP00000465945
MEEDDSYEAEG

SEQ ID NO: 22149 - protein, 339 aa, Homo sapiens; identical to SEQ ID NO: 22147
  Payload ID: 4474
  Gene Symbol: CYTH1
  Gene Name: cytohesin 1
  Uniprot ID: Q15438
  ENSP ID: ENSP00000466512

SEQ ID NO: 22150 - protein, 86 aa, Homo sapiens
  Payload ID: 4474
  Gene Symbol: CYTH1
  Gene Name: cytohesin 1
  ENSP ID: ENSP00000466949
MQRNKQVAMGRKKFNMDPKKGIQFLIENDLLKNTCEDIAQFLYKGEGLNKTAIGDYLGERDEFNIQVLHAFVELHEFTDLNLVQAL

SEQ ID NO: 22151 - protein, 272 aa, Homo sapiens
  Payload ID: 4474
  Gene Symbol: CYTH1
  Gene Name: cytohesin 1
  ENSP ID: ENSP00000467052
MVLKTEEEDVPSDLTAEERQELENIRRRKQELLADIQRLKDEIAEVANEIENLGSTEERKNMQRNKQVAMGRKKFNMDPKKGIQFLIENDLLKNTCEDIAQFLYKGEGLNKTAIGDYLGERDEFNIQVLHAFVELHEFTDLNLVQALRQFLWSFRLPGEAQKIDRMMEAFAQRYCQCNNGVFQSTDTCYVLSFAIIMLNTSLHNPNVKDKPTVERFIAMNRGINDGGDLPEELLRNLYESIKNEPFKIPEDDGNDLTHTFFNPDREGWLLKL

SEQ ID NO: 22152 - protein, 194 aa, Homo sapiens
  Payload ID: 4474
  Gene Symbol: CYTH1
  Gene Name: cytohesin 1
  ENSP ID: ENSP00000468433
MHSPGGLGRPCLLQPCPAVPSDLTAEERQELENIRRRKQELLADIQRLKDEIAEVANEIENLGSTEERKNMQRNKQVAMGRKKFNMDPKKGIQFLIENDLLKNTCEDIAQFLYKGEGLNKTAIGDYLGERDEFNIQVLHAFVELHEFTDLNLVQALRQFLWSFRLPGEAQKIDRMMEAFAQRYCQCNNGVFQST

SEQ ID NO: 22153 - protein, 359 aa, Homo sapiens
  Payload ID: 4475
  Gene Symbol: CYTIP
  Gene Name: cytohesin 1 interacting protein
  Uniprot ID: O60759
  ENSP ID: ENSP00000264192
MSLQRLLQHSSNGNLADFCAGPAYSSYSTLTGSLTMDDNRRIQMLADTVATLPRGRKQLALTRSSSLSDFSWSQRKLVTVEKQDNETFGFEIQSYRPQNQNACSSEMFTLICKIQEDSPAHCAGLQAGDVLANINGVSTEGFTYKQVVDLIRSSGNLLTIETLNGTMILKRTELEAKLQVLKQTLKQKWVEYRSLQLQEHRLLHGDAANCPSLENMDLDELSLFGPLPGPGPALVDRNRLSSESSCKSWLSSMTMDSEDGYQTCVSEDSSRGAFSRQTSTDDECFIPKEGDDFLRRSSSRRNRSISNTSSGSMSPLWEGNLSSMFGTLPRKSRKGSVRKQLLKFIPGLHRAVEEEESRF

SEQ ID NO: 22154 - protein, 131 aa, Homo sapiens
  Payload ID: 4475
  Gene Symbol: CYTIP
  Gene Name: cytohesin 1 interacting protein
  ENSP ID: ENSP00000394308
MFTLICKIQEDSPAHCAGLQAGDVLANINGVSTEGFTYKQVVDLIRSSGNLLTIETLNGTMILKRTELEAKLQVLKQTLKQKWVEYRSLQLQEHRLLHGDAANCPSLENMDLDELSLFGPLPGPGPALVDR

SEQ ID NO: 22155 - protein, 36 aa, Homo sapiens
  Payload ID: 4475
  Gene Symbol: CYTIP
  Gene Name: cytohesin 1 interacting protein
  ENSP ID: ENSP00000402155
MDDNRRIQMLADTVATLPRGRKQLALTRSSSLSDFS

SEQ ID NO: 22156 - protein, 74 aa, Homo sapiens
  Payload ID: 4475
  Gene Symbol: CYTIP
  Gene Name: cytohesin 1 interacting protein
  ENSP ID: ENSP00000402771
MDDNRRIQMLADTVATLPRGRKQLALTRSSSLSDFSWSQRKLVTVEKQDNETFGFEIQSYRPQNQNACSSEMFT

SEQ ID NO: 22157 - protein, 61 aa, Homo sapiens
  Payload ID: 4475
  Gene Symbol: CYTIP
  Gene Name: cytohesin 1 interacting protein
  ENSP ID: ENSP00000407205
MSLQRLLQHSSNGNLADFCAGPAYSSYSTLTGSLTMDDNRRIQMLADTVATLPRGRKQNDF

SEQ ID NO: 22158 - protein, 254 aa, Homo sapiens
  Payload ID: 4476
  Gene Symbol: CYTH2
  Gene Name: cytohesin 2
  ENSP ID: ENSP00000314566
MDPVVRITRSPATSPVMESENQGLSPLPKPPDLTPEERMELENIRRRKQELLVEIQRLREELSEAMSEVEGLEANEGSKTLQRNRKMAMGRKKFNMDPKKGIQFLVENELLQNTPEEIARFLYKGEGLNKTAIGDYLGEREELNLAVLHAFVDLHEFTDLNLVQALRQFLWSFRLPGEAQKIDRMMEAFAQRYCLCNPGVFQSTDTCYVLSFAVIMLNTSLHNPNVRDKPGLERFVAMNRGINEGGDLPEELLR

SEQ ID NO: 22159 - protein, 292 aa, Homo sapiens
  Payload ID: 4476
  Gene Symbol: CYTH2
  Gene Name: cytohesin 2
  ENSP ID: ENSP00000375753
MEDGVYEPPDLTPEERMELENIRRRKQELLVEIQRLREELSEAMSEVEGLEANEGSKTLQRNRKMAMGRKKFNMDPKKGIQFLVENELLQNTPEEIARFLYKGEGLNKTAIGDYLGEREELNLAVLHAFVDLHEFTDLNLVQALRQFLWSFRLPGEAQKIDRMMEAFAQRYCLCNPGVFQSTDTCYVLSFAVIMLNTSLHNPNVRDKPGLERFVAMNRGINEGGDLPEELLRNLYDSIRNEPFKIPEDDGNDLTHTFFNPDREGWLLKLGTGPGEDVEAALVYPHRQLPLLL

SEQ ID NO: 22160 - protein, 399 aa, Homo sapiens
  Payload ID: 4476
  Gene Symbol: CYTH2
  Gene Name: cytohesin 2
  Uniprot ID: Q99418
  ENSP ID: ENSP00000408236
MEDGVYEPPDLTPEERMELENIRRRKQELLVEIQRLREELSEAMSEVEGLEANEGSKTLQRNRKMAMGRKKFNMDPKKGIQFLVENELLQNTPEEIARFLYKGEGLNKTAIGDYLGEREELNLAVLHAFVDLHEFTDLNLVQALRQFLWSFRLPGEAQKIDRMMEAFAQRYCLCNPGVFQSTDTCYVLSFAVIMLNTSLHNPNVRDKPGLERFVAMNRGINEGGDLPEELLRNLYDSIRNEPFKIPEDDGNDLTHTFFNPDREGWLLKLGGRVKTWKRRWFILTDNCLYYFEYTTDKEPRGIIPLENLSIREVDDPRKPNCFELYIPNNKGQLIKACKTEADGRVVEGNHMVYRISAPTQEEKDEWIKSIQAAVSVDPFYEMLAARKKRISVKKKQEQP

SEQ ID NO: 22161 - protein, 214 aa, Homo sapiens
  Payload ID: 4476
  Gene Symbol: CYTH2
  Gene Name: cytohesin 2
  ENSP ID: ENSP00000472602
LLQNTPEEIARFLYKGEGLNKTAIGDYLGEREELNLAVLHAFVDLHEFTDLNLVQALRQFLWSFRLPGEAQKIDRMMEAFAQRYCLCNPGVFQSTDTCYVLSFAVIMLNTSLHNPNVRDKPGLERFVAMNRGINEGGDLPEELLRNLYDSIRNEPFKIPEDDGNDLTHTFFNPDREGWLLKLGTCPPDPAGPSAGGHLWAWALDSASAHTCCLN

SEQ ID NO: 22162 - protein, 139 aa, Homo sapiens
  Payload ID: 4476
  Gene Symbol: CYTH2
  Gene Name: cytohesin 2
  ENSP ID: ENSP00000482082
MVAPLQSSLGNRARPRLYKIKHANHCPANTPVQIPAFDPREADCWGKLRVLEVPLAVSGQKEKQEGASITRNCFPQSAGITGVSHRARPQPTSFGWQWFGYRLSSLKFMLRFEPQCGRCWDVGPHRSCVVLEVESSWID

SEQ ID NO: 22163 - protein, 400 aa, Homo sapiens
  Payload ID: 4476
  Gene Symbol: CYTH2
  Gene Name: cytohesin 2
  ENSP ID: ENSP00000486578
MEDGVYEPPDLTPEERMELENIRRRKQELLVEIQRLREELSEAMSEVEGLEANEGSKTLQRNRKMAMGRKKFNMDPKKGIQFLVENELLQNTPEEIARFLYKGEGLNKTAIGDYLGEREELNLAVLHAFVDLHEFTDLNLVQALRQFLWSFRLPGEAQKIDRMMEAFAQRYCLCNPGVFQSTDTCYVLSFAVIMLNTSLHNPNVRDKPGLERFVAMNRGINEGGDLPEELLRNLYDSIRNEPFKIPEDDGNDLTHTFFNPDREGWLLKLAGGRVKTWKRRWFILTDNCLYYFEYTTDKEPRGIIPLENLSIREVDDPRKPNCFELYIPNNKGQLIKACKTEADGRVVEGNHMVYRISAPTQEEKDEWIKSIQAAVSVDPFYEMLAARKKRISVKKKQEQP

SEQ ID NO: 22164 - protein, 399 aa, Homo sapiens
  Payload ID: 4477
  Gene Symbol: CYTH3
  Gene Name: cytohesin 3
  Uniprot ID: O43739
  ENSP ID: ENSP00000297044
MDEDGGGEGGGVPEDLSLEEREELLDIRRRKKELIDDIERLKYEIAEVMTEIDNLTSVEESKTTQRNKQIAMGRKKFNMDPKKGIQFLIENDLLQSSPEDVAQFLYKGEGLNKTVIGDYLGERDEFNIKVLQAFVELHEFADLNLVQALRQFLWSFRLPGEAQKIDRMMEAFASRYCLCNPGVFQSTDTCYVLSFAIIMLNTSLHNHNVRDKPTAERFIAMNRGINEGGDLPEELLRNLYESIKNEPFKIPEDDGNDLTHTFFNPDREGWLLKLGGRVKTWKRRWFILTDNCLYYFEYTTDKEPRGIIPLENLSIREVEDPRKPNCFELYNPSHKGQVIKACKTEADGRVVEGNHVVYRISAPSPEEKEEWMKSIKASISRDPFYDMLATRKRRIANKK

SEQ ID NO: 22165 - protein, 400 aa, Homo sapiens
  Payload ID: 4477
  Gene Symbol: CYTH3
  Gene Name: cytohesin 3
  Uniprot ID: O43739
  ENSP ID: ENSP00000379967
MDEDGGGEGGGVPEDLSLEEREELLDIRRRKKELIDDIERLKYEIAEVMTEIDNLTSVEESKTTQRNKQIAMGRKKFNMDPKKGIQFLIENDLLQSSPEDVAQFLYKGEGLNKTVIGDYLGERDEFNIKVLQAFVELHEFADLNLVQALRQFLWSFRLPGEAQKIDRMMEAFASRYCLCNPGVFQSTDTCYVLSFAIIMLNTSLHNHNVRDKPTAERFIAMNRGINEGGDLPEELLRNLYESIKNEPFKIPEDDGNDLTHTFFNPDREGWLLKLGGGRVKTWKRRWFILTDNCLYYFEYTTDKEPRGIIPLENLSIREVEDPRKPNCFELYNPSHKGQVIKACKTEADGRVVEGNHVVYRISAPSPEEKEEWMKSIKASISRDPFYDMLATRKRRIANKK

SEQ ID NO: 22166 - protein, 394 aa, Homo sapiens
  Payload ID: 4478
  Gene Symbol: CYTH4
  Gene Name: cytohesin 4
  Uniprot ID: Q9UIA0
  ENSP ID: ENSP00000248901
MDLCHPEPAELSSGETEELQRIKWHRKQLLEDIQKLKDEIADVFAQIDCFESAEESRMAQKEKELCIGRKKFNMDPAKGIQYFIEHKLLTPDVQDIARFLYKGEGLNKTAIGTYLGERDPINLQVLQAFVDCHEFANLNLVQALRQFLWSFRLPGEAQKIDRMMEAFATRYCLCNPGVFQSTDTCYVLSFSIIMLNTSLHNPNVRDRPPFERFVSMNRGINNGSDLPEDQLRNLFDSIKSEPFSIPEDDGNDLTHTFFNPDREGWLLKLGGRVKTWKRRWFILTDNCLYYFEFTTDKEPRGIIPLENLSVQKVDDPKKPFCLELYNPSCRGQKIKACKTDGDGRVVEGKHESYRISATSAEERDQWIESIRASITRVPFYDLVSTRKKKIASKQ

SEQ ID NO: 22167 - protein, 157 aa, Homo sapiens
  Payload ID: 4478
  Gene Symbol: CYTH4
  Gene Name: cytohesin 4
  ENSP ID: ENSP00000384280
MDLCHPEPAELSSGETEELQRIKWHRKQLLEDIQKLKDEIADVFAQIDCFESAEESRMAQKEKELCIGRKKFNMDPAKGIQYFIEHKLLTPDVQDIARFLYKGEGLNKTAIGTYLGERDPINLQVLQAFVDCHEFANLNLVQALRFREGASDLGFGG

SEQ ID NO: 22168 - protein, 154 aa, Homo sapiens
  Payload ID: 4478
  Gene Symbol: CYTH4
  Gene Name: cytohesin 4
  ENSP ID: ENSP00000385997
MDLCHPEPAELSSGETEELQRIKWHRKQLLEDIQKLKDEIADVFAQIDCFESAEESRMAQKEKELCIGRKKFNMDPAKGIQYFIEHKLLTPDVQDIARFLYKGEGLNKTAIGTYLGERDPINLQVLQAFVDCHEFANLNLVQALRVVKTKWESV

SEQ ID NO: 22169 - protein, 117 aa, Homo sapiens
  Payload ID: 4478
  Gene Symbol: CYTH4
  Gene Name: cytohesin 4
  ENSP ID: ENSP00000405442
MDLCHPEPAELSSGETEELQRIKWHRKQLLEDIQKLKDEIADVFAQIDCFESAEESRMAQKEKELCIGRKKFNMDPAKGIQYFIEHKLLTPDVQDIARFLYKGEGLNKTAIGTYLGE

SEQ ID NO: 22170 - protein, 147 aa, Homo sapiens
  Payload ID: 4478
  Gene Symbol: CYTH4
  Gene Name: cytohesin 4
  ENSP ID: ENSP00000409579
  MOD_RES (1)..(1): Any amino acid
XTHTSGSLSSRDSQAGDSASRAGGRVKTWKRRWFILTDNCLYYFEFTTDKEPRGIIPLENLSVQKVDDPKKPFCLELYNPSCRGQKIKACKTDGDGRVVEGKHESYRISATSAEERDQWIESIRASITRVPFYDLVSTRKKKIASKQ

SEQ ID NO: 22171 - protein, 312 aa, Homo sapiens
  Payload ID: 4479
  Gene Symbol: CIAPIN1
  Gene Name: cytokine induced apoptosis inhibitor 1
  Uniprot ID: Q6FI81
  ENSP ID: ENSP00000377914
MADFGISAGQFVAVVWDKSSPVEALKGLVDKLQALTGNEGRVSVENIKQLLQSAHKESSFDIILSGLVPGSTTLHSAEILAEIARILRPGGCLFLKEPVETAVDNNSKVKTASKLCSALTLSGLVEVKELQREPLTPEEVQSVREHLGHESDNLLFVQITGKKPNFEVGSSRQLKLSITKKSSPSVKPAVDPAAAKLWTLSANDMEDDSMDLIDSDELLDPEDLKKPDPASLRAASCGEGKKRKACKNCTCGLAEELEKEKSREQMSSQPKSACGNCYLGDAFRCASCPYLGMPAFKPGEKVLLSDSNLHDA

SEQ ID NO: 22172 - protein, 266 aa, Homo sapiens
  Payload ID: 4479
  Gene Symbol: CIAPIN1
  Gene Name: cytokine induced apoptosis inhibitor 1
  ENSP ID: ENSP00000454480
MADFGISAGQFVAVVWDKSSPVEALKGLVDKLQALTGNEGRVSVENIKQLLQSAHKESSFDIILSGLVPGSTTLHSAEILAEIARILRPGGCLFLKEPVETAVDNNSKVKTASKLCSALTLSGLVEVKELQREPLTPEEVQSVREHLGHESDNLLFVQITGKKPNFEVGSSRQLKLSITKKSSPSVKPAVDPAAAKLWTLSANDMEDDSMHLWPCRRTGKREVKGTDELPTQVSLWKLLPGRCLPLCQLPLPWDASLQTWGKGASE

SEQ ID NO: 22173 - protein, 239 aa, Homo sapiens
  Payload ID: 4479
  Gene Symbol: CIAPIN1
  Gene Name: cytokine induced apoptosis inhibitor 1
  ENSP ID: ENSP00000455309
MADFGISAGQFVAVVWDKSSPVEALKGLVDKLQALTGNEGRVSVENIKQLLQSAHKESSFDIILSGLVPGSTTLHSAEILAEIARILRPGGCLFLKEPVETALQREPLTPEEVQSVREHLGHESDNLLFVQITGKKPNFEVGSSRQLKLSITKKSSPSVKPAVDPAAAKLWTLSANDMEDDSMHLWPCRRTGKREVKGTDELPTQVSLWKLLPGRCLPLCQLPLPWDASLQTWGKGASE

SEQ ID NO: 22174 - protein, 129 aa, Homo sapiens
  Payload ID: 4479
  Gene Symbol: CIAPIN1
  Gene Name: cytokine induced apoptosis inhibitor 1
  ENSP ID: ENSP00000455572
MADFGISAGQFVAVVWDKSSPVEALKGLVDKLQALTGNEGRVSVENIKQLLQSAHKESSFDIILSGLVPGSTTLHSAEILAEIARILRPGGCLFLKEPVETAVDNNSKVKTASKLCSALTLSGLVEVKE

SEQ ID NO: 22175 - protein, 299 aa, Homo sapiens
  Payload ID: 4479
  Gene Symbol: CIAPIN1
  Gene Name: cytokine induced apoptosis inhibitor 1
  Uniprot ID: Q6FI81
  ENSP ID: ENSP00000456114
MADFGISAGQFVAVVWDKSSPVEALKGLVDKLQALTGNEGRVSVENIKQLLQCLVPGSTTLHSAEILAEIARILRPGGCLFLKEPVETAVDNNSKVKTASKLCSALTLSGLVEVKELQREPLTPEEVQSVREHLGHESDNLLFVQITGKKPNFEVGSSRQLKLSITKKSSPSVKPAVDPAAAKLWTLSANDMEDDSMDLIDSDELLDPEDLKKPDPASLRAASCGEGKKRKACKNCTCGLAEELEKEKSREQMSSQPKSACGNCYLGDAFRCASCPYLGMPAFKPGEKVLLSDSNLHDA

SEQ ID NO: 22176 - protein, 266 aa, Homo sapiens; identical to SEQ ID NO: 22172
  Payload ID: 4479
  Gene Symbol: CIAPIN1
  Gene Name: cytokine induced apoptosis inhibitor 1
  ENSP ID: ENSP00000457042

SEQ ID NO: 22177 - protein, 48 aa, Homo sapiens
  Payload ID: 4479
  Gene Symbol: CIAPIN1
  Gene Name: cytokine induced apoptosis inhibitor 1
  ENSP ID: ENSP00000457318
MEDDSMDLIDSDELLDPEDLKKPDPASLRAASCGEGKKRKACKNCTCG

SEQ ID NO: 22178 - protein, 72 aa, Homo sapiens
  Payload ID: 4479
  Gene Symbol: CIAPIN1
  Gene Name: cytokine induced apoptosis inhibitor 1
  ENSP ID: ENSP00000457400
MEDDSMDLIDSDELLDPEDLKKPDPASLRAASCGEGKKRKACKNCTCGLAEELEKEKSREQMSSQPKSACGN

SEQ ID NO: 22179 - protein, 188 aa, Homo sapiens
  Payload ID: 4479
  Gene Symbol: CIAPIN1
  Gene Name: cytokine induced apoptosis inhibitor 1
  ENSP ID: ENSP00000457622
MADFGISAGQFVAVVWDKSSPVEALKGLVDKLQALTGNEGRVSVENIKQLLQSAHKESSFDIILSGLVPGSTTLHSAEILAEIARILRPGGCLFLKEPVETAVDNNSKVKTASKLCSALTLSGLVEVKELQREPLTPEEVQSVREHLGHESDNLLFVQITGKKPNFEVGSSRQLKLSITKKSSPSGSH

SEQ ID NO: 22180 - protein, 246 aa, Homo sapiens
  Payload ID: 4479
  Gene Symbol: CIAPIN1
  Gene Name: cytokine induced apoptosis inhibitor 1
  ENSP ID: ENSP00000458000
MADFGISAGQFVAVVWDKSSPVEALKGLVDKLQALTGNEGRVSVENIKQLLQSAHKESSFDIILSGLVPGSTTLHSAEILAEIARILRPGGCLFLKEPVETAVDNNSKVKTASKLCSALTLSGLVEVKELQREPLTPEEVQSVREHLGHESDNLLFVQITGKKPNFEVGSSRQLKLSITKKSSPSVKPAVDPAAAKLWTLSANDMEDDSMCYLGDAFRCASCPYLGMPAFKPGEKVLLSDSNLHDA

SEQ ID NO: 22181 - protein, 258 aa, Homo sapiens
  Payload ID: 4480
  Gene Symbol: CISH
  Gene Name: cytokine inducible SH2-containing protein
  Uniprot ID: Q9NSE2
  ENSP ID: ENSP00000294173
MVLCVQGPRPLLAVERTGQRPLWAPSLELPKPVMQPLPAGAFLEEVAEGTPAQTESEPKVLDPEEDLLCIAKTFSYLRESGWYWGSITASEARQHLQKMPEGTFLVRDSTHPSYLFTLSVKTTRGPTNVRIEYADSSFRLDSNCLSRPRILAFPDVVSLVQHYVASCTADTRSDSPDPAPTPALPMPKEDAPSDPALPAPPPATAVHLKLVQPFVRRSSARSLQHLCRLVINRLVADVDCLPLPRRMADYLRQYPFQL

SEQ ID NO: 22182 - protein, 275 aa, Homo sapiens
  Payload ID: 4480
  Gene Symbol: CISH
  Gene Name: cytokine inducible SH2-containing protein
  Uniprot ID: Q9NSE2
  ENSP ID: ENSP00000409346
MYLEHTSHCPHHDDDTAMDTPLPRPRPLLAVERTGQRPLWAPSLELPKPVMQPLPAGAFLEEVAEGTPAQTESEPKVLDPEEDLLCIAKTFSYLRESGWYWGSITASEARQHLQKMPEGTFLVRDSTHPSYLFTLSVKTTRGPTNVRIEYADSSFRLDSNCLSRPRILAFPDVVSLVQHYVASCTADTRSDSPDPAPTPALPMPKEDAPSDPALPAPPPATAVHLKLVQPFVRRSSARSLQHLCRLVINRLVADVDCLPLPRRMADYLRQYPFQL

SEQ ID NO: 22183 - protein, 422 aa, Homo sapiens
  Payload ID: 4481
  Gene Symbol: CRLF1
  Gene Name: cytokine receptor-like factor 1
  Uniprot ID: O75462
  ENSP ID: ENSP00000376188
MPAGRRGPAAQSARRPPPLLPLLLLLCVLGAPRAGSGAHTAVISPQDPTLLIGSSLLATCSVHGDPPGATAEGLYWTLNGRRLPPELSRVLNASTLALALANLNGSRQRSGDNLVCHARDGSILAGSCLYVGLPPEKPVNISCWSKNMKDLTCRWTPGAHGETFLHTNYSLKYKLRWYGQDNTCEEYHTVGPHSCHIPKDLALFTPYEIWVEATNRLGSARSDVLTLDILDVVTTDPPPDVHVSRVGGLEDQLSVRWVSPPALKDFLFQAKYQIRYRVEDSVDWKVVDDVSNQTSCRLAGLKPGTVYFVQVRCNPFGIYGSKKAGIWSEWSHPTAASTPRSERPGPGGGACEPRGGEPSSGPVRRELKQFLGWLKKHAYCSNLSFRLYDQWRAWMQKSHKTRNQDEGILPSGRRGTARGPAR

SEQ ID NO: 22184 - protein, 173 aa, Homo sapiens
  Payload ID: 4481
  Gene Symbol: CRLF1
  Gene Name: cytokine receptor-like factor 1
  ENSP ID: ENSP00000470625
  MOD_RES (1)..(1): Any amino acid
XQDNTCEEYHTVGPHSCHIPKDLALFTPYEIWVEATNRLGSARSDVLTLDILDVVTTDPPPDVHVSRVGGLEDQLSVRWVSPPALKDFLFQAKYQIRYRVEDSVDWKVVDDVSNQTSCRLAGLKPGTVYFVQVRCNPFGIYGSKKAGIWKRPGPGGGACEPRGGEPSSGPVRR

SEQ ID NO: 22185 - protein, 371 aa, Homo sapiens
  Payload ID: 4482
  Gene Symbol: CRLF2
  Gene Name: cytokine receptor-like factor 2
  Uniprot ID: Q9HC73
  ENSP ID: ENSP00000370978
MGRLVLLWGAAVFLLGGWMALGQGGAAEGVQIQIIYFNLETVQVTWNASKYSRTNLTFHYRFNGDEAYDQCTNYLLQEGHTSGCLLDAEQRDDILYFSIRNGTHPVFTASRWMVYYLKPSSPKHVRFSWHQDAVTVTCSDLSYGDLLYEVQYRSPFDTEWQSKQENTCNVTIEGLDAEKCYSFWVRVKAMEDVYGPDTYPSDWSEVTCWQRGEIRDACAETPTPPKPKLSKFILISSLAILLMVSLLLLSLWKLWRVKKFLIPSVPDPKSIFPGLFEIHQGNFQEWITDTQNVAHLHKMAGAEQESGPEEPLVVQLAKTEAESPRMLDPQTEEKEASGGSLQLPHQPLQGGDVVTIGGFTFVMNDRSYVAL

SEQ ID NO: 22186 - protein, 259 aa, Homo sapiens
  Payload ID: 4482
  Gene Symbol: CRLF2
  Gene Name: cytokine receptor-like factor 2
  Uniprot ID: Q9HC73
  ENSP ID: ENSP00000370979
MVYYLKPSSPKHVRFSWHQDAVTVTCSDLSYGDLLYEVQYRSPFDTEWQSKQENTCNVTIEGLDAEKCYSFWVRVKAMEDVYGPDTYPSDWSEVTCWQRGEIRDACAETPTPPKPKLSKFILISSLAILLMVSLLLLSLWKLWRVKKFLIPSVPDPKSIFPGLFEIHQGNFQEWITDTQNVAHLHKMAGAEQESGPEEPLVVQLAKTEAESPRMLDPQTEEKEASGGSLQLPHQPLQGGDVVTIGGFTFVMNDRSYVAL

SEQ ID NO: 22187 - protein, 371 aa, Homo sapiens; identical to SEQ ID NO: 22185
  Payload ID: 4482
  Gene Symbol: CRLF2
  Gene Name: cytokine receptor-like factor 2
  Uniprot ID: Q9HC73
  ENSP ID: ENSP00000383641

SEQ ID NO: 22188 - protein, 232 aa, Homo sapiens
  Payload ID: 4482
  Gene Symbol: CRLF2
  Gene Name: cytokine receptor-like factor 2
  ENSP ID: ENSP00000485269
MGRLVLLWGAAVFLLGGWMALGQGGAEGVQIQIIYFNLETVQVTWNASKYSRTNLTFHYRFNGDEAYDQCTNYLLQEGHTSGCLLDAEQRDDILYFSIRNGTHPVFTASRWMVYYLKPSSPKHVRFSWHQDAVTVTCSDLSYGDLLYEVQYRSPFDTEWQTQSRSVTQAGVQWCDLCLLQPSPPRFKRFSCLSLPSSWDYRHPPPRLANFCIISRDGVSPCWPGWSRTCDLR

SEQ ID NO: 22189 - protein, 442 aa, Homo sapiens
  Payload ID: 4483
  Gene Symbol: CRLF3
  Gene Name: cytokine receptor-like factor 3
  Uniprot ID: Q8IUI8
  ENSP ID: ENSP00000318804
MRGAMELEPELLLQEARENVEAAQSYRRELGHRLEGLREARRQIKESASQTRDVLKQHFNDLKGTLGKLLDERLVTLLQEVDTIEQETIKPLDDCQKLIEHGVNTAEDLVREGEIAMLGGVGEENEKLWSFTKKASHIQLDSLPEVPLLVDVPCLSAQLDDSILNIVKDHIFKHGTVASRPPVQIEELIEKPGGIIVRWCKVDDDFTAQDYRLQFRKCTSNHFEDVYVGSETEFIVLHIDPNVDYQFRVCARGDGRQEWSPWSVPQIGHSTLVPHEWTAGFEGYSLSSRRNIALRNDSESSGVLYSRAPTYFCGQTLTFRVETVGQPDRRDSIGVCAEKQDGYDSLQRDQAVCISTNGAVFVNGKEMTNQLPAVTSGSTVTFDIEAVTLGTTSNNEGGHFKLRVTISSNNREVVFDWLLDQSCGSLYFGCSFFYPGWKVLVF

SEQ ID NO: 22190 - protein, 96 aa, Homo sapiens
  Payload ID: 4483
  Gene Symbol: CRLF3
  Gene Name: cytokine receptor-like factor 3
  ENSP ID: ENSP00000462643
MRGAMELEPELLLQEARENVEAAQSYRRELGHRLEGLREARRQVKSPCLVVWEKRMRNCGALPKRPRTFSWTAYQKYLYWLMCLVYLLSWMTQFLT

SEQ ID NO: 22191 - protein, 118 aa, Homo sapiens
  Payload ID: 4483
  Gene Symbol: CRLF3
  Gene Name: cytokine receptor-like factor 3
  ENSP ID: ENSP00000463689
  MOD_RES (1)..(1): Any amino acid
XGVCAEKQDGYDSLQRDQAVCISTNGAVFVNGKEMTNQLPAVTSGSTVTFDIEAVTLGTTSNNEGGHFKLRERGLAMLSKLVSNSWAQSLRTLDSQSVRVTESRCHQAGLQWHDLNSL

SEQ ID NO: 22192 - protein, 428 aa, Homo sapiens
  Payload ID: 4484
  Gene Symbol: CLNK
  Gene Name: cytokine-dependent hematopoietic cell linker
  Uniprot ID: Q7Z7G1
  ENSP ID: ENSP00000226951
MNRQGNRKTTKEGSNDLKFQNFSLPKNRSWPRINSATGQYQRMNKPLLDWERNFAAVLDGAKGHSDDDYDDPELRMEETWQSIKILPARPIKESEYADTHYFKVAMDTPLPLDTRTSISIGQPTWNTQTRLERVDKPISKDVRSQNIKGDASVRKNKIPLPPPRPLITLPKKYQPLPPEPESSRPPLSQRHTFPEVQRMPSQISLRDLSEVLEAEKVPHNQRKPESTHLLENQNTQEIPLAISSSSFTTSNHSVQNRDHRGGMQPCSPQRCQPPASCSPHENILPYKYTSWRPPFPKRSDRKDVQHNEWYIGEYSRQAVEEAFMKENKDGSFLVRDCSTKSKEEPYVLAVFYENKVYNVKIRFLERNQQFALGTGLRGDEKFDSVEDIIEHYKNFPIILIDGKDKTGVHRKQCHLTQPLPLTRHLLPL

SEQ ID NO: 22193 - protein, 428 aa, Homo sapiens [sequence omitted]

SEQ ID NO: 22194 - protein, 169 aa, Homo sapiens
  Payload ID: 4484
  Gene Symbol: CLNK
  Gene Name: cytokine-dependent hematopoietic cell linker
  Uniprot ID: Q7Z7G1
  ENSP ID: ENSP00000427208
MNKPLLDWERNFAAVLDGAKGHSDDDYDDPELRMEETWQSIKILPARPIKESEYADTHYFKVAMDTPLPLDTRTSISIGQPTWNTQTRLERVDKPISKDVRSQNIKGDASVRKNKIPLPPPRPLITLPKKYQPLPPEPESSRPPLSQRHTFPEVQRMPSQISLRDLSEP

SEQ ID NO: 22195 - protein, 166 aa, Homo sapiens
  Payload ID: 4484
  Gene Symbol: CLNK
  Gene Name: cytokine-dependent hematopoietic cell linker
  ENSP ID: ENSP00000427256
MQPCSPQRCQPPASCSPHENILPYKYTSWRPPFPKRSDRKDVQHNEWYIGEYSRQAVEEAFMKENKDGSFLVRDCSTKSKEEPYVLAVFYENKVYNVKIRFLERNQQFALGTGLRGDEKFDSVEDIIEHYKNFPIILIDGKDKTGVHRKQCHLTQPLPLTRHLLPL

SEQ ID NO: 22196 - protein, 136 aa, Homo sapiens
  Payload ID: 4485
  Gene Symbol: CYTL1
  Gene Name: cytokine-like 1
  Uniprot ID: Q9NRR1
  ENSP ID: ENSP00000303550
MRTPGPLPVLLLLLAGAPAARPTPPTCYSRMRALSQEITRDFNLLQVSEPSEPCVRYLPRLYLDIHNYCVLDKLRDFVASPPCWKVAQVDSLKDKARKLYTIMNSFCRRDLVFLLDDCNALEYPIPVTTVLPDRQR

SEQ ID NO: 22197 - protein, 92 aa, Homo sapiens
  Payload ID: 4485
  Gene Symbol: CYTL1
  Gene Name: cytokine-like 1
  ENSP ID: ENSP00000421743
  MOD_RES (1)..(1): Any amino acid
XTPGPLPVLLLLLAGAPAARPTPPTCYSRMRALSQEITRDFNLLQVSEPSEPCVRYLPRLYLDIHDLVFLLDDCNALEYPIPVTTVLPDRQR

SEQ ID NO: 22198 - protein, 76 aa, Homo sapiens
  Payload ID: 4485
  Gene Symbol: CYTL1
  Gene Name: cytokine-like 1
  ENSP ID: ENSP00000425397
  MOD_RES (1)..(1): Any amino acid
XPGPLPVLLLLLAGAPAARPTPPTCYSRMRALSQEITRDFNLLQVSEPSDLVFLLDDCNALEYPIPVTTVLPDRQR

SEQ ID NO: 22199 - protein, 176 aa, Homo sapiens
  Payload ID: 4486
  Gene Symbol: CYFIP1
  Gene Name: cytoplasmic FMR1 interacting protein 1
  ENSP ID: ENSP00000453060
PFQNILPRVHVKEGERLDAKMKRLESKYAPLHLVPLIERLGTPQQIAIAREGDLLTKERLCCGLSMFEVILTRIRSFLDDPIWRGPLPSNGVMHVDECVEFHRLWSAMQFVYCIPVGTHEFTVEQCFGDGLHWAGCMIIVLLGQQRRFAVLDFCYHLLKVQKHDGKDEIIKNVVCG

SEQ ID NO: 22200 - protein, 151 aa, Homo sapiens
  Payload ID: 4486
  Gene Symbol: CYFIP1
  Gene Name: cytoplasmic FMR1 interacting protein 1
  ENSP ID: ENSP00000478377
MAAQVTLEDALSNVDLLEELPLPDQQPCIEPPPSSLLYQPNFNTNFEDRNAFVTGIARYIEQATVHSSMNEMLEEGQEYAVMLYTWRSCSRAIPQVKCNEQPNRVEIYEKTVEVLEPEVTKLMNFMYFQRNAIERFCGEVRRLCHAERRKD

SEQ ID NO: 22201 - protein, 1253 aa, Homo sapiens
  Payload ID: 4486
  Gene Symbol: CYFIP1
  Gene Name: cytoplasmic FMR1 interacting protein 1
  Uniprot ID: Q7L576
  ENSP ID: ENSP00000478779
MAAQVTLEDALSNVDLLEELPLPDQQPCIEPPPSSLLYQPNFNTNFEDRNAFVTGIARYIEQATVHSSMNEMLEEGQEYAVMLYTWRSCSRAIPQVKCNEQPNRVEIYEKTVEVLEPEVTKLMNFMYFQRNAIERFCGEVRRLCHAERRKDFVSEAYLITLGKFINMFAVLDELKNMKCSVKNDHSAYKRAAQFLRKMADPQSIQESQNLSMFLANHNKITQSLQQQLEVISGYEELLADIVNLCVDYYENRMYLTPSEKHMLLKVMGFGLYLMDGSVSNIYKLDAKKRINLSKIDKYFKQLQVVPLFGDMQIELARYIKTSAHYEENKSRWTCTSSGSSPQYNICEQMIQIREDHMRFISELARYSNSEVVTGSGRQEAQKTDAEYRKLFDLALQGLQLLSQWSAHVMEVYSWKLVHPTDKYSNKDCPDSAEEYERATRYNYTSEEKFALVEVIAMIKGLQVLMGRMESVFNHAIRHTVYAALQDFSQVTLREPLRQAIKKKKNVIQSVLQAIRKTVCDWETGHEPFNDPALRGEKDPKSGFDIKVPRRAVGPSSTQLYMVRTMLESLIADKSGSKKTLRSSLEGPTILDIEKFHRESFFYTHLINFSETLQQCCDLSQLWFREFFLELTMGRRIQFPIEMSMPWILTDHILETKEASMMEYVLYSLDLYNDSAHYALTRFNKQFLYDEIEAEVNLCFDQFVYKLADQIFAYYKVMAGSLLLDKRLRSECKNQGATIHLPPSNRYETLLKQRHVQLLGRSIDLNRLITQRVSAAMYKSLELAIGRFESEDLTSIVELDGLLEINRMTHKLLSRYLTLDGFDAMFREANHNVSAPYGRITLHVFWELNYDFLPNYCYNGSTNRFVRTVLPFSQEFQRDKQPNAQPQYLHGSKALNLAYSSIYGSYRNFVGPPHFQVICRLLGYQGIAVVMEELLKVVKSLLQGTILQYVKTLMEVMPKICRLPRHEYGSPGILEFFHHQLKDIVEYAELKTVCFQNLREVGNAILFCLLIEQSLSLEEVCDLLHAAPFQNILPRVHVKEGERLDAKMKRLESKYAPLHLVPLIERLGTPQQIAIAREGDLLTKERLCCGLSMFEVILTRIRSFLDDPIWRGPLPSNGVMHVDECVEFHRLWSAMQFVYCIPVGTHEFTVEQCFGDGLHWAGCMIIVLLGQQRRFAVLDFCYHLLKVQKHDGKDEIIKNVPLKKMVERIRKFQILNDEIITILDKYLKSGDGEGTPVEHVRCFQPPIHQSLASS

SEQ ID NO: 22202 - protein, 185 aa, Homo sapiens
  Payload ID: 4486
  Gene Symbol: CYFIP1
  Gene Name: cytoplasmic FMR1 interacting protein 1
  ENSP ID: ENSP00000479802
  MOD_RES (1)..(1): Any amino acid
XYTSEEKFALVEVIAMIKGLQVLMGRMESVFNHAIRHTVYAALQDFSQVTLREPLRQAIKKKKNVIQSVLQAIRKTVCDWETGHEPFNDPALRGEKDPKSGFDIKVPRRAVGPSSTQLYLVRTMAESLGSAELLRQLKSLGMERLLHAVNTFLRQSCTYLPLLTFGETLQQCCDLSQLWFREFFL

SEQ ID NO: 22203 - protein, 161 aa, Homo sapiens
  Payload ID: 4486
  Gene Symbol: CYFIP1
  Gene Name: cytoplasmic FMR1 interacting protein 1
  ENSP ID: ENSP00000480307
MAAQVTLEDALSNVDLLEELPLPDQQPCIEPPPSSLLYQPNFNTNFEDRNAFVTGIARYIEQATVHSSMNEMLEEGQEYAVMLYTWRSCSRAIPQVKCNEQPNRVEIYEKTVEVLEPEVTKLMNFMYFQRNAIERFCGEVRRLCHAERRKDFVSEAYLITL

SEQ ID NO: 22204 - protein, 822 aa, Homo sapiens
  Payload ID: 4486
  Gene Symbol: CYFIP1
  Gene Name: cytoplasmic FMR1 interacting protein 1
  Uniprot ID: Q7L576
  ENSP ID: ENSP00000480525
MAESLGSAELLRQLKSLGMERLLHAVNTFLRQSCTYLPLLTFGGKTSFVSLDVYGTEANCSATSCSFPKAAATWPRRQAPGPLGELVRGPPDQGVAEQSFSHGLFEFGITNVPCIFSPPQMFPWIIQLYMVRTMLESLIADKSGSKKTLRSSLEGPTILDIEKFHRESFFYTHLINFSETLQQCCDLSQLWFREFFLELTMGRRIQFPIEMSMPWILTDHILETKEASMMEYVLYSLDLYNDSAHYALTRFNKQFLYDEIEAEVNLCFDQFVYKLADQIFAYYKVMAGSLLLDKRLRSECKNQGATIHLPPSNRYETLLKQRHVQLLGRSIDLNRLITQRVSAAMYKSLELAIGRFESEDLTSIVELDGLLEINRMTHKLLSRYLTLDGFDAMFREANHNVSAPYGRITLHVFWELNYDFLPNYCYNGSTNRFVRTVLPFSQEFQRDKQPNAQPQYLHGSKALNLAYSSIYGSYRNFVGPPHFQVICRLLGYQGIAVVMEELLKVVKSLLQGTILQYVKTLMEVMPKICRLPRHEYGSPGILEFFHHQLKDIVEYAELKTVCFQNLREVGNAILFCLLIEQSLSLEEVCDLLHAAPFQNILPRVHVKEGERLDAKMKRLESKYAPLHLVPLIERLGTPQQIAIAREGDLLTKERLCCGLSMFEVILTRIRSFLDDPIWRGPLPSNGVMHVDECVEFHRLWSAMQFVYCIPVGTHEFTVEQCFGDGLHWAGCMIIVLLGQQRRFAVLDFCYHLLKVQKHDGKDEIIKNVPLKKMVERIRKFQILNDEIITILDKYLKSGDGEGTPVEHVRCFQPPIHQSLASS

SEQ ID NO: 22205 - protein, 77 aa, Homo sapiens
  Payload ID: 4486
  Gene Symbol: CYFIP1
  Gene Name: cytoplasmic FMR1 interacting protein 1
  ENSP ID: ENSP00000480596
MAAQVTLEDALSNVDLLEELPLPDQQPCIEPPPSSLLYQPNFNTNFEDRNAFVTGIARYIEQATVHSSMCKNNTCWF

SEQ ID NO: 22206 - protein, 1253 aa, Homo sapiens; identical to SEQ ID NO: 22201
  Payload ID: 4486
  Gene Symbol: CYFIP1
  Gene Name: cytoplasmic FMR1 interacting protein 1
  Uniprot ID: Q7L576
  ENSP ID: ENSP00000481038

SEQ ID NO: 22207 - protein, 45 aa, Homo sapiens
  Payload ID: 4486
  Gene Symbol: CYFIP1
  Gene Name: cytoplasmic FMR1 interacting protein 1
  ENSP ID: ENSP00000482459
  MOD_RES (1)..(1): Any amino acid
XCDWETGHEPFNDPALRGEKDPKSGFDIKVPRRAVGPSSTQVLVP

SEQ ID NO: 22208 - protein, 185 aa, Homo sapiens; identical to SEQ ID NO: 22202
  Payload ID: 4486
  Gene Symbol: CYFIP1
  Gene Name: cytoplasmic FMR1 interacting protein 1
  ENSP ID: ENSP00000485841
  MOD_RES (1)..(1): Any amino acid

SEQ ID NO: 22209 - protein, 862 aa, Homo sapiens
  Payload ID: 4486
  Gene Symbol: CYFIP1
  Gene Name: cytoplasmic FMR1 interacting protein 1
  ENSP ID: ENSP00000486145
MAAQVTLEDALSNVDLLEELPLPDQQPCIEPPPSSLLYQPNFNTNFEDRNAFVTGIARYIEQATVHSSMNEMLEEGQEYAVMLYTWRSCSRAIPQVKCNEQPNRVEIYEKTVEVLEPEVTKLMNFMYFQRNAIERFCGEVRRLCHAERRKDFVSEAYLITLGKFINMFAVLDELKNMKCSVKNDHSAYKRAAQFLRKMADPQSIQESQNLSMFLANHNKITQSLQQQLEVISGYEELLADIVNLCVDYYENRMYLTPSEKHMLLKVMGFGLYLMDGSVSNIYKLDAKKRINLSKIDKYFKQLQVVPLFGDMQIELARYIKTSAHYEENKSRWTCTSSGSSPQYNICEQMIQIREDHMRFISELARYSNSEVVTGSGRQEAQKTDAEYRKLFDLALQGLQLLSQWSAHVMEVYSWKLVHPTDKYSNKDCPDSAEEYERATRYNYTSEEKFALVEVIAMIKGLQVLMGRMESVFNHAIRHTVYAALQDFSQVTLREPLRQAIKKKKNVIQSVLQAIRKTVCDWETGHEPFNDPALRGEKDPKSGFDIKVPRRAVGPSSTQLYMVRTMLESLIADKSGSKKTLRSSLEGPTILDIEKFHRESFFYTHLINFSETLQQCCDLSQLWFREFFLELTMGRRIQFPIEMSMPWILTDHILETKEASMMEYVLYSLDLYNDSAHYALTRFNKQFLYDEIEAEVNLCFDQFVYKLADQIFAYYKVMAGSLLLDKRLRSECKNQGATIHLPPSNRYETLLKQRHVQLLGRSIDLNRLITQRVSAAMYKSLELAIGRFESEDLTSIVELDGLLEINRMTHKLLSRYLTLDSFDAMFREANHNVSAPYGRITLHVFWELNYDFLPNYCYNGSTN

SEQ ID NO: 22210 - protein, 862 aa, Homo sapiens; identical to SEQ ID NO: 22209
  Payload ID: 4486
  Gene Symbol: CYFIP1
  Gene Name: cytoplasmic FMR1 interacting protein 1
  ENSP ID: ENSP00000486555

SEQ ID NO: 22211 - protein, 77 aa, Homo sapiens
  Payload ID: 4486
  Gene Symbol: CYFIP1
  Gene Name: cytoplasmic FMR1 interacting protein 1
  ENSP ID: ENSP00000486724
MAAQVTLEDALSNVDLLEELPLPDQQPCIEPPPSSLLYQPNFNTNFEDRNAFVTGIARYIEQATVHSSMYKNNTCWF

SEQ ID NO: 22212 - protein, 45 aa, Homo sapiens; identical to SEQ ID NO: 22207
  Payload ID: 4486
  Gene Symbol: CYFIP1
  Gene Name: cytoplasmic FMR1 interacting protein 1
  ENSP ID: ENSP00000486951
  MOD_RES (1)..(1): Any amino acid

SEQ ID NO: 22213 - protein, 161 aa, Homo sapiens; identical to SEQ ID NO: 22203
  Payload ID: 4486
  Gene Symbol: CYFIP1
  Gene Name: cytoplasmic FMR1 interacting protein 1
  ENSP ID: ENSP00000487107

SEQ ID NO: 22214 - protein, 151 aa, Homo sapiens; identical to SEQ ID NO: 22200
  Payload ID: 4486
  Gene Symbol: CYFIP1
  Gene Name: cytoplasmic FMR1 interacting protein 1
  ENSP ID: ENSP00000487156

SEQ ID NO: 22215 - protein, 1117 aa, Homo sapiens
  Payload ID: 4487
  Gene Symbol: CYFIP2
  Gene Name: cytoplasmic FMR1 interacting protein 2
  ENSP ID: ENSP00000403793
MTTHVTLEDALSNVDLLEELPLPDQQPCIEPPPSSIMYQANFDTNFEDRNAFVTGIARYIEQATVHSSMNEMLEEGHEYAVMLYTWRSCSRAIPQVKCNEQPNRVEIYEKTVEVLEPEVTKLMKFMYFQVMGFGLYLMDGNVSNIYKLDAKKRINLSKIDKFFKQLQVVPLFGDMQIELARYIKTSAHYEENKSKWTCTQSSISPQYNICEQMVQIRDDHIRFISELARYSNSEVVTGSGLDSQKSDEEYRELFDLALRGLQLLSKWSAHVMEVYSWKLVHPTDKFCNKDCPGTAEEYERATRYNYTSEEKFAFVEVIAMIKGLQVLMGRMESVFNQAIRNTIYAALQDFAQVTLREPLRQAVRKKKNVLISVLQAIRKTICDWEGGREPPNDPCLRGEKDPKGGFDIKVPRRAVGPSSTQLYMVRTMLESLIADKSGSKKTLRSSLDGPIVLAIEDFHKQSFFFTHLLNISEALQQCCDLSQLWFREFFLELTMGRRIQFPIEMSMPWILTDHILETKEPSMMEYVLYPLDLYNDSAYYALTKFKKQFLYDEIEAEVNLCFDQFVYKLADQIFAYYKAMAGSVLLDKRFRAECKNYGVIIPYPPSNRYETLLKQRHVQLLGRSIDLNRLITQRISAAMYKSLDQAISRFESEDLTSIVELEWLLEINRLTHRLLCKHMTLDSFDAMFREANHNVSAPYGRITLHVFWELNFDFLPNYCYNGSTNRFVRTAIPFTQEPQRDKPANVQPYYLYGSKPLNIAYSHIYSSYRNFVGPPHFKTICRLLGYQGIAVVMEELLKIVKSLLQGTILQYVKTLIEVMPKICRLPRHEYGSPGILEFFHHQLKDIIEYAELKTDVFQSLREVGNAILFCLLIEQALSQEEVCDLLHAAPFQNILPRVYIKEGERLEVRMKRLEAKYAPLHLVPLIERLGTPQQIAIAREGDLLTKERLCCGLSMFEVILTRIRSYLQDPIWRGPPPTNGVMHVDECVEFHRLWSAMQFVYCIPVGTNEFTAEQCFGDGLNWAGCSIIVLLGQQRRFDLFDFCYHLLKVQRQDGKDEIIKNVPLKKMADRIRKYQILNNEVFAILNKYMKSVETDSSTVEHVRCFQPPIHQSLATTC

SEQ ID NO: 22216 - protein, 1057 aa, Homo sapiens
  Payload ID: 4487
  Gene Symbol: CYFIP2
  Gene Name: cytoplasmic FMR1 interacting protein 2
  ENSP ID: ENSP00000428009
MTTHVTLEDALSNVDLLEELPLPDQQPCIEPPPSSIMYQANFDTNFEDRNAFVTGIARYIEQATVHSSMVMGFGLYLMDGNVSNIYKLDAKKRINLSKIDKFFKQLQVVPLFGDMQIELARYIKTSAHYEENKSKWTCTQSSISPQYNICEQMVQIRDDHIRFISELARYSNSEVVTGSGLDSQKSDEEYRELFDLALRGLQLLSKWSAHVMEVYSWKLVHPTDKFCNKDCPGTAEEYERATRYNYTSEEKFAFVEVIAMIKGLQVLMGRMESVFNQAIRNTIYAALQDFAQVTLREPLRQAVRKKKNVLISVLQAIRKTICDWEGGREPPNDPCLRGEKDPKGGFDIKVPRRAVGPSSTQLYMVRTMLESLIADKSGSKKTLRSSLDGPIVLAIEDFHKQSFFFTHLLNISEALQQCCDLSQLWFREFFLELTMGRRIQFPIEMSMPWILTDHILETKEPSMMEYVLYPLDLYNDSAYYALTKFKKQFLYDEIEAEVNLCFDQFVYKLADQIFAYYKAMAGSVLLDKRFRAECKNYGVIIPYPPSNRYETLLKQRHVQLLGRSIDLNRLITQRISAAMYKSLDQAISRFESEDLTSIVELEWLLEINRLTHRLLCKHMTLDSFDAMFREANHNVSAPYGRITLHVFWELNFDFLPNYCYNGSTNRFVRTAIPFTQEPQRDKPANVQPYYLYGSKPLNIAYSHIYSSYRNFVGPPHFKTICRLLGYQGIAVVMEELLKIVKSLLQGTILQYVKTLIEVMPKICRLPRHEYGSPGILEFFHHQLKDIIEYAELKTDVFQSLREVGNAILFCLLIEQALSQEEVCDLLHAAPFQNILPRVYIKEGERLEVRMKRLEAKYAPLHLVPLIERLGTPQQIAIAREGDLLTKERLCCGLSMFEVILTRIRSYLQDPIWRGPPPTNGVMHVDECVEFHRLWSAMQFVYCIPVGTNEFTAEQCFGDGLNWAGCSIIVLLGQQRRFDLFDFCYHLLKVQRQDGKDEIIKNVPLKKMADRIRKYQILNNEVFAILNKYMKSVETDSSTVEHVRCFQPPIHQSLATTC

SEQ ID NO: 22217 - protein, 68 aa, Homo sapiens
  Payload ID: 4487
  Gene Symbol: CYFIP2
  Gene Name: cytoplasmic FMR1 interacting protein 2
  ENSP ID: ENSP00000428079
MTTHVTLEDALSNVDLLEELPLPDQQPCIEPPPSSIMYQANFDTNFEDRNAFVTGIASARPSSGSAAR

SEQ ID NO: 22218 - protein, 1227 aa, Homo sapiens
  Payload ID: 4487
  Gene Symbol: CYFIP2
  Gene Name: cytoplasmic FMR1 interacting protein 2
  ENSP ID: ENSP00000430904
MTTHVTLEDALSNVDLLEELPLPDQQPCIEPPPSSIMYQANFDTNFEDRNAFVTGIARYIEQATVHSSMVKCNEQPNRVEIYEKTVEVLEPEVTKLMKFMYFQRKAIERFCSEVKRLCHAERRKDFVSEAYLLTLGKFINMFAVLDELKNMKCSVKNDHSAYKRAAQFLRKMADPQSIQESQNLSMFLANHNRITQCLHQQLEVIPGYEELLADIVNICVDYYENKMYLTPSEKHMLLKVMGFGLYLMDGNVSNIYKLDAKKRINLSKIDKFFKQLQVVPLFGDMQIELARYIKTSAHYEENKSKWTCTQSSISPQYNICEQMVQIRDDHIRFISELARYSNSEVVTGSGLDSQKSDEEYRELFDLALRGLQLLSKWSAHVMEVYSWKLVHPTDKFCNKDCPGTAEEYERATRYNYTSEEKFAFVEVIAMIKGLQVLMGRMESVFNQAIRNTIYAALQDFAQVTLREPLRQAVRKKKNVLISVLQAIRKTICDWEGGREPPNDPCLRGEKDPKGGFDIKVPRRAVGPSSTQLYMVRTMLESLIADKSGSKKTLRSSLDGPIVLAIEDFHKQSFFFTHLLNISEALQQCCDLSQLWFREFFLELTMGRRIQFPIEMSMPWILTDHILETKEPSMMEYVLYPLDLYNDSAYYALTKFKKQFLYDEIEAEVNLCFDQFVYKLADQIFAYYKAMAGSVLLDKRFRAECKNYGVIIPYPPSNRYETLLKQRHVQLLGRSIDLNRLITQRISAAMYKSLDQAISRFESEDLTSIVELEWLLEINRLTHRLLCKHMTLDSFDAMFREANHNVSAPYGRITLHVFWELNFDFLPNYCYNGSTNRFVRTAIPFTQEPQRDKPANVQPYYLYGSKPLNIAYSHIYSSYRNFVGPPHFKTICRLLGYQGIAVVMEELLKIVKSLLQGTILQYVKTLIEVMPKICRLPRHEYGSPGILEFFHHQLKDIIEYAELKTDVFQSLREVGNAILFCLLIEQALSQEEVCDLLHAAPFQNILPRVYIKEGERLEVRMKRLEAKYAPLHLVPLIERLGTPQQIAIAREGDLLTKERLCCGLSMFEVILTRIRSYLQDPIWRGPPPTNGVMHVDECVEFHRLWSAMQFVYCIPVGTNEFTAEQCFGDGLNWAGCSIIVLLGQQRRFDLFDFCYHLLKVQRQDGKDEIIKNVPLKKMADRIRKYQILNNEVFAILNKYMKSVETDSSTVEHVRCFQPPIHQSLATTC

SEQ ID NO: 22219 - protein, 222 aa, Homo sapiens
  Payload ID: 4487
  Gene Symbol: CYFIP2
  Gene Name: cytoplasmic FMR1 interacting protein 2
  ENSP ID: ENSP00000478058
MTTHVTLEDALSNVDLLEELPLPDQQPCIEPPPSSIMYQANFDTNFEDRNAFVTGIARYIEQATVHSSMNEMLEEGHEYAVMLYTWRSCSRAIPQVKCNEQPNRVEIYEKTVEVLEPEVTKLMKFMYFQRKAIERFCSEVKRLCHAERRKDFVSEAYLLTLGKFINMFAVLDELKNMKCSVKNDHSAYKRAAQFLRKMADPQSIQESQNLSMFLANHNRITQ

SEQ ID NO: 22220 - protein, 71 aa, Homo sapiens
  Payload ID: 4487
  Gene Symbol: CYFIP2
  Gene Name: cytoplasmic FMR1 interacting protein 2
  ENSP ID: ENSP00000479211
MTTHVTLEDALSNVDLLEELPLPDQQPCIEPPPSSIMYQANFDTNFEDRNAFVTGIARYIEQATVHSSMIF

SEQ ID NO: 22221 - protein, 188 aa, Homo sapiens
  Payload ID: 4487
  Gene Symbol: CYFIP2
  Gene Name: cytoplasmic FMR1 interacting protein 2
  ENSP ID: ENSP00000479376
MTTHVTLEDALSNVDLLEELPLPDQQPCIEPPPSSIMYQANFDTNFEDRNAFVTGIARYIEQATVHSSMNEMLEEGHEYAVMLYTWRSCSRAIPQVKCNEQPNRVEIYEKTVEVLEPEVTKLMKFMYFQRKAIERFCSEVKRLCHAERRKDFVSEAYLLTLGKFINMFAVLDELKNMKCSVKNDHSAY

SEQ ID NO: 22222 - protein, 1278 aa, Homo sapiens
  Payload ID: 4487
  Gene Symbol: CYFIP2
  Gene Name: cytoplasmic FMR1 interacting protein 2
  Uniprot ID: Q96F07
  ENSP ID: ENSP00000479719
MTTHVTLEDALSNVDLLEELPLPDQQPCIEPPPSSIMYQANFDTNFEDRNAFVTGIARYIEQATVHSSMNEMLEEGHEYAVMLYTWRSCSRAIPQVKCNEQPNRVEIYEKTVEVLEPEVTKLMKFMYFQRKAIERFCSEVKRLCHAERRKDFVSEAYLLTLGKFINMFAVLDELKNMKCSVKNDHSAYKRAAQFLRKMADPQSIQESQNLSMFLANHNRITQCLHQQLEVIPGYEELLADIVNICVDYYENKMYLTPSEKHMLLKVMGFGLYLMDGNVSNIYKLDAKKRINLSKIDKFFKQLQVVPLFGDMQIELARYIKTSAHYEENKSKWTCTQSSISPQYNICEQMVQIRDDHIRFISELARYSNSEVVTGSGLDSQKSDEEYRELFDLALRGLQLLSKWSAHVMEVYSWKLVHPTDKFCNKDCPGTAEEYERATRYNYTSEEKFAFVEVIAMIKGLQVLMGRMESVFNQAIRNTIYAALQDFAQVTLREPLRQAVRKKKNVLISVLQAIRKTICDWEGGREPPNDPCLRGEKDPKGGFDIKVPRRAVGPSSTQACQWSPRALFHPTGGTQGRRGCRSLLYMVRTMLESLIADKSGSKKTLRSSLDGPIVLAIEDFHKQSFFFTHLLNISEALQQCCDLSQLWFREFFLELTMGRRIQFPIEMSMPWILTDHILETKEPSMMEYVLYPLDLYNDSAYYALTKFKKQFLYDEIEAEVNLCFDQFVYKLADQIFAYYKAMAGSVLLDKRFRAECKNYGVIIPYPPSNRYETLLKQRHVQLLGRSIDLNRLITQRISAAMYKSLDQAISRFESEDLTSIVELEWLLEINRLTHRLLCKHMTLDSFDAMFREANHNVSAPYGRITLHVFWELNFDFLPNYCYNGSTNRFVRTAIPFTQEPQRDKPANVQPYYLYGSKPLNIAYSHIYSSYRNFVGPPHFKTICRLLGYQGIAVVMEELLKIVKSLLQGTILQYVKTLIEVMPKICRLPRHEYGSPGILEFFHHQLKDIIEYAELKTDVFQSLREVGNAILFCLLIEQALSQEEVCDLLHAAPFQNILPRVYIKEGERLEVRMKRLEAKYAPLHLVPLIERLGTPQQIAIAREGDLLTKERLCCGLSMFEVILTRIRSYLQDPIWRGPPPTNGVMHVDECVEFHRLWSAMQFVYCIPVGTNEFTAEQCFGDGLNWAGCSIIVLLGQQRRFDLFDFCYHLLKVQRQDGKDEIIKNVPLKKMADRIRKYQILNNEVFAILNKYMKSVETDSSTVEHVRCFQPPIHQSLATTC

SEQ ID NO: 22223 - protein, 1253 aa, Homo sapiens
  Payload ID: 4487
  Gene Symbol: CYFIP2
  Gene Name: cytoplasmic FMR1 interacting protein 2
  Uniprot ID: Q96F07
  ENSP ID: ENSP00000479968
MTTHVTLEDALSNVDLLEELPLPDQQPCIEPPPSSIMYQANFDTNFEDRNAFVTGIARYIEQATVHSSMNEMLEEGHEYAVMLYTWRSCSRAIPQVKCNEQPNRVEIYEKTVEVLEPEVTKLMKFMYFQRKAIERFCSEVKRLCHAERRKDFVSEAYLLTLGKFINMFAVLDELKNMKCSVKNDHSAYKRAAQFLRKMADPQSIQESQNLSMFLANHNRITQCLHQQLEVIPGYEELLADIVNICVDYYENKMYLTPSEKHMLLKVMGFGLYLMDGNVSNIYKLDAKKRINLSKIDKFFKQLQVVPLFGDMQIELARYIKTSAHYEENKSKWTCTQSSISPQYNICEQMVQIRDDHIRFISELARYSNSEVVTGSGLDSQKSDEEYRELFDLALRGLQLLSKWSAHVMEVYSWKLVHPTDKFCNKDCPGTAEEYERATRYNYTSEEKFAFVEVIAMIKGLQVLMGRMESVFNQAIRNTIYAALQDFAQVTLREPLRQAVRKKKNVLISVLQAIRKTICDWEGGREPPNDPCLRGEKDPKGGFDIKVPRRAVGPSSTQLYMVRTMLESLIADKSGSKKTLRSSLDGPIVLAIEDFHKQSFFFTHLLNISEALQQCCDLSQLWFREFFLELTMGRRIQFPIEMSMPWILTDHILETKEPSMMEYVLYPLDLYNDSAYYALTKFKKQFLYDEIEAEVNLCFDQFVYKLADQIFAYYKAMAGSVLLDKRFRAECKNYGVIIPYPPSNRYETLLKQRHVQLLGRSIDLNRLITQRISAAMYKSLDQAISRFESEDLTSIVELEWLLEINRLTHRLLCKHMTLDSFDAMFREANHNVSAPYGRITLHVFWELNFDFLPNYCYNGSTNRFVRTAIPFTQEPQRDKPANVQPYYLYGSKPLNIAYSHIYSSYRNFVGPPHFKTICRLLGYQGIAVVMEELLKIVKSLLQGTILQYVKTLIEVMPKICRLPRHEYGSPGILEFFHHQLKDIIEYAELKTDVFQSLREVGNAILFCLLIEQALSQEEVCDLLHAAPFQNILPRVYIKEGERLEVRMKRLEAKYAPLHLVPLIERLGTPQQIAIAREGDLLTKERLCCGLSMFEVILTRIRSYLQDPIWRGPPPTNGVMHVDECVEFHRLWSAMQFVYCIPVGTNEFTAEQCFGDGLNWAGCSIIVLLGQQRRFDLFDFCYHLLKVQRQDGKDEIIKNVPLKKMADRIRKYQILNNEVFAILNKYMKSVETDSSTVEHVRCFQPPIHQSLATTC

SEQ ID NO: 22224 - protein, 295 aa, Homo sapiens
  Payload ID: 4487
  Gene Symbol: CYFIP2
  Gene Name: cytoplasmic FMR1 interacting protein 2
  ENSP ID: ENSP00000480605
MTTHVTLEDALSNVDLLEELPLPDQQPCIEPPPSSIMYQANFDTNFEDRNAFVTGIARYIEQATVHSSMNEMLEEGHEYAVMLYTWRSCSRAIPQVKCNEQPNRVEIYEKTVEVLEPEVTKLMKFMYFQRKAIERFCSEVKRLCHAERRKDFVSEAYLLTLGKFINMFAVLDELKNMKCSVKNDHSAYKRAAQFLRKMADPQSIQESQNLSMFLANHNRITQQLEVIPGYEELLADIVNICVDYYENKMYLTPSEKHMLLKVMGFGLYLMDGNVSNIYKLDAKKRINLSKIDKFF

SEQ ID NO: 22225 - protein, 101 aa, Homo sapiens
  Payload ID: 4487
  Gene Symbol: CYFIP2
  Gene Name: cytoplasmic FMR1 interacting protein 2
  ENSP ID: ENSP00000482739
LYMVRTMLESLIADKSGSKKTLRSSLDGPIVLAIEDFHKQSFFFTHLLNISDGVLLCCPGWSAVALSQLTATSASQVQAGVQSCDLSSPQPLPPRSPAAVL

SEQ ID NO: 22226 - protein, 234 aa, Homo sapiens
  Payload ID: 4487
  Gene Symbol: CYFIP2
  Gene Name: cytoplasmic FMR1 interacting protein 2
  ENSP ID: ENSP00000483307
MAGSVLLDKRFRAECKNYGVIIPYPPSNRYETLLKQRHVQLLGRSIDLNRLITQRISAAMYKSLDQAISRFESEDLTSIVELEWTKVTIRIKRPLNCPHGFLSLFHALLTHRLLCKHMTLDSFDAMFREANHNVSAPYGRITLHVFWELNFDFLPNYCYNGSTNRFVRTASFHPRTTTRQTCQRPALLPLWIQASQHCLQPHLQLLQEFRGATSFQDYADSWVIRASLWSWRNC

SEQ ID NO: 22227 - protein, 1253 aa, Homo sapiens; identical to SEQ ID NO: 22223
  Payload ID: 4487
  Gene Symbol: CYFIP2
  Gene Name: cytoplasmic FMR1 interacting protein 2
  Uniprot ID: Q96F07
  ENSP ID: ENSP00000484819

SEQ ID NO: 22228 - protein, 1538 aa, Homo sapiens
  Payload ID: 4488
  Gene Symbol: CLASP1
  Gene Name: cytoplasmic linker associated protein 1
  Uniprot ID: Q7Z460
  ENSP ID: ENSP00000263710
MEPRMESCLAQVLQKDVGKRLQVGQELIDYFSDKQKSADLEHDQTMLDKLVDGLATSWVNSSNYKVVLLGMDILSALVTRLQDRFKAQIGTVLPSLIDRLGDAKDSVREQDQTLLLKIMDQAANPQYVWDRMLGGFKHKNFRTREGICLCLIATLNASGAQTLTLSKIVPHICNLLGDPNSQVRDAAINSLVEIYRHVGERVRADLSKKGLPQSRLNVIFTKFDEVQKSGNMIQSANDKNFDDEDSVDGNRPSSASSTSSKAPPSSRRNVGMGTTRRLGSSTLGSKSSAAKEGAGAVDEEDFIKAFDDVPVVQIYSSRDLEESINKIREILSDDKHDWEQRVNALKKIRSLLLAGAAEYDNFFQHLRLLDGAFKLSAKDLRSQVVREACITLGHLSSVLGNKFDHGAEAIMPTIFNLIPNSAKIMATSGVVAVRLIIRHTHIPRLIPVITSNCTSKSVAVRRRCFEFLDLLLQEWQTHSLERHISVLAETIKKGIHDADSEARIEARKCYWGFHSHFSREAEHLYHTLESSYQKALQSHLKNSDSIVSLPQSDRSSSSSQESLNRPLSAKRSPTGSTTSRASTVSTKSVSTTGSLQRSRSDIDVNAAASAKSKVSSSSGTTPFSSAAALPPGSYASLGRIRTRRQSSGSATNVASTPDNRGRSRAKVVSQSQRSRSANPAGAGSRSSSPGKLLGSGYGGLTGGSSRGPPVTPSSEKRSKIPRSQGCSRETSPNRIGLARSSRIPRPSMSQGCSRDTSRESSRDTSPARGFPPLDRFGLGQPGRIPGSVNAMRVLSTSTDLEAAVADALKKPVRRRYEPYGMYSDDDANSDASSVCSERSYGSRNGGIPHYLRQTEDVAEVLNHCASSNWSERKEGLLGLQNLLKSQRTLSRVELKRLCEIFTRMFADPHSKRVFSMFLETLVDFIIIHKDDLQDWLFVLLTQLLKKMGADLLGSVQAKVQKALDVTRDSFPFDQQFNILMRFIVDQTQTPNLKVKVAILKYIESLARQMDPTDFVNSSETRLAVSRIITWTTEPKSSDVRKAAQIVLISLFELNTPEFTMLLGALPKTFQDGATKLLHNHLKNSSNTSVGSPSNTIGRTPSRHTSSRTSPLTSPTNCSHGGLSPSRLWGWSADGLAKHPPPFSQPNSIPTAPSHKALRRSYSPSMLDYDTENLNSEEIYSSLRGVTEAIEKFSFRSQEDLNEPIKRDGKKECDIVSRDGGAASPATEGRGGSEVEGGRTALDNKTSLLNTQPPRAFPGPRARDYNPYPYSDAINTYDKTALKEAVFDDDMEQLRDVPIDHSDLVADLLKELSNHNERVEERKGALLELLKITREDSLGVWEEHFKTILLLLLETLGDKDHSIRALALRVLREILRNQPARFKNYAELTIMKTLEAHKDSHKEVVRAAEEAASTLASSIHPEQCIKVLCPIIQTADYPINLAAIKMQTKVVERIAKESLLQLLVDIIPGLLQGYDNTESSVRKASVFCLVAIYSVIGEDLKPHLAQLTGSKMKLLNLYIKRAQTTNSNSSSSSDVSTHS

SEQ ID NO: 22229 - protein, 1479 aa, Homo sapiens
  Payload ID: 4488
  Gene Symbol: CLASP1
  Gene Name: cytoplasmic linker associated protein 1
  Uniprot ID: Q7Z460
  ENSP ID: ENSP00000380717
MEPRMESCLAQVLQKDVGKRLQVGQELIDYFSDKQKSADLEHDQTMLDKLVDGLATSWVNSSNYKVVLLGMDILSALVTRLQDRFKAQIGTVLPSLIDRLGDAKDSVREQDQTLLLKIMDQAANPQYVWDRMLGGFKHKNFRTREGICLCLIATLNASGAQTLTLSKIVPHICNLLGDPNSQVRDAAINSLVEIYRHVGERVRADLSKKGLPQSRLNVIFTKFDEVQKSGNMIQSANDKNFDDEDSVDGNRPSSASSTSSKAPPSSRRNVGMGTTRRLGSSTLGSKSSAAKEGAGAVDEEDFIKAFDDVPVVQIYSSRDLEESINKIREILSDDKHDWEQRVNALKKIRSLLLAGAAEYDNFFQHLRLLDGAFKLSAKDLRSQVVREACITLGHLSSVLGNKFDHGAEAIMPTIFNLIPNSAKIMATSGVVAVRLIIRHTHIPRLIPVITSNCTSKSVAVRRRCFEFLDLLLQEWQTHSLERHISVLAETIKKGIHDADSEARIEARKCYWGFHSHFSREAEHLYHTLESSYQKALQSHLKNSDSIVSLPQSDRSSSSSQESLNRPLSAKRSPTGSTTSRASTVSTKSVSTTGSLQRSRSDIDVNAAASAKSKVSSSSGTTPFSSAAALPPGSYASLDGTTTKAEGRIRTRRQSSGSATNVASTPDNRGRSRAKVVSQSQRSRSANPAGAGSRSSSPGKLLGSGYGGLTGGSSRGPPVTPSSEKRSKIPRSQGCSRETSPNRIGLDRFGLGQPGRIPGSVNAMRVLSTSTDLEAAVADALLLGDSRSKKKPVRRRYEPYGMYSDDDANSDASSVCSERSYGSRNGGIPHYLRQTEDVAEVLNHCASSNWSERKEGLLGLQNLLKSQRTLSRVELKRLCEIFTRMFADPHSKRVFSMFLETLVDFIIIHKDDLQDWLFVLLTQLLKKMGADLLGSVQAKVQKALDVTRDSFPFDQQFNILMRFIVDQTQTPNLKVKVAILKYIESLARQMDPTDFVNSSETRLAVSRIITWTTEPKSSDVRKAAQIVLISLFELNTPEFTMLLGALPKTFQDGATKLLHNHLKNSSNTSVGSPSNTIGRTPSRHTSSRTSPLTSPTNCSHGGLSPSMLDYDTENLNSEEIYSSLRGVTEAIEKFSFRSQEDLNEPIKRDGKKECDIVSRDGGAASPATEGRGGSEVEGGRTALDNKTSLLNTQPPRAFPGPRARDYNPYPYSDAINTYDKTALKEAVFDDDMEQLRDVPIDHSDLVADLLKELSNHNERVEERKGALLELLKITREDSLGVWEEHFKTILLLLLETLGDKDHSIRALALRVLREILRNQPARFKNYAELTIMKTLEAHKDSHKEVVRAAEEAASTLASSIHPEQCIKVLCPIIQTADYPINLAAIKMQTKVVERIAKESLLQLLVDIIPGLLQGYDNTESSVRKASVFCLVAIYSVIGEDLKPHLAQLTGSKMKLLNLYIKRAQTTNSNSSSSSDVSTHS

SEQ ID NO: 22230 - protein, 1471 aa, Homo sapiens
  Payload ID: 4488
  Gene Symbol: CLASP1
  Gene Name: cytoplasmic linker associated protein 1
  Uniprot ID: Q7Z460
  ENSP ID: ENSP00000386442
MEPRMESCLAQVLQKDVGKRLQVGQELIDYFSDKQKSADLEHDQTMLDKLVDGLATSWVNSSNYKVVLLGMDILSALVTRLQDRFKAQIGTVLPSLIDRLGDAKDSVREQDQTLLLKIMDQAANPQYVWDRMLGGFKHKNFRTREGICLCLIATLNASGAQTLTLSKIVPHICNLLGDPNSQVRDAAINSLVEIYRHVGERVRADLSKKGLPQSRLNVIFTKFDEVQKSGNMIQSANDKNFDDEDSVDGNRPSSASSTSSKAPPSSRRNVGMGTTRRLGSSTLGSKSSAAKEGAGAVDEEDFIKAFDDVPVVQIYSSRDLEESINKIREILSDDKHDWEQRVNALKKIRSLLLAGAAEYDNFFQHLRLLDGAFKLSAKDLRSQVVREACITLGHLSSVLGNKFDHGAEAIMPTIFNLIPNSAKIMATSGVVAVRLIIRHTHIPRLIPVITSNCTSKSVAVRRRCFEFLDLLLQEWQTHSLERHISVLAETIKKGIHDADSEARIEARKCYWGFHSHFSREAEHLYHTLESSYQKALQSHLKNSDSIVSLPQSDRSSSSSQESLNRPLSAKRSPTGSTTSRASTVSTKSVSTTGSLQRSRSDIDVNAAASAKSKVSSSSGTTPFSSAAALPPGSYASLGRIRTRRQSSGSATNVASTPDNRGRSRAKVVSQSQRSRSANPAGAGSRSSSPGKLLGSGYGGLTGGSSRGPPVTPSSEKRSKIPRSQGCSRETSPNRIGLDRFGLGQPGRIPGSVNAMRVLSTSTDLEAAVADALLLGDSRSKKKPVRRRYEPYGMYSDDDANSDASSVCSERSYGSRNGGIPHYLRQTEDVAEVLNHCASSNWSERKEGLLGLQNLLKSQRTLSRVELKRLCEIFTRMFADPHSKRVFSMFLETLVDFIIIHKDDLQDWLFVLLTQLLKKMGADLLGSVQAKVQKALDVTRDSFPFDQQFNILMRFIVDQTQTPNLKVKVAILKYIESLARQMDPTDFVNSSETRLAVSRIITWTTEPKSSDVRKAAQIVLISLFELNTPEFTMLLGALPKTFQDGATKLLHNHLKNSSNTSVGSPSNTIGRTPSRHTSSRTSPLTSPTNCSHGGLSPSMLDYDTENLNSEEIYSSLRGVTEAIEKFSFRSQEDLNEPIKRDGKKECDIVSRDGGAASPATEGRGGSEVEGGRTALDNKTSLLNTQPPRAFPGPRARDYNPYPYSDAINTYDKTALKEAVFDDDMEQLRDVPIDHSDLVADLLKELSNHNERVEERKGALLELLKITREDSLGVWEEHFKTILLLLLETLGDKDHSIRALALRVLREILRNQPARFKNYAELTIMKTLEAHKDSHKEVVRAAEEAASTLASSIHPEQCIKVLCPIIQTADYPINLAAIKMQTKVVERIAKESLLQLLVDIIPGLLQGYDNTESSVRKASVFCLVAIYSVIGEDLKPHLAQLTGSKMKLLNLYIKRAQTTNSNSSSSSDVSTHS

SEQ ID NO: 22231 - protein, 1478 aa, Homo sapiens
  Payload ID: 4488
  Gene Symbol: CLASP1
  Gene Name: cytoplasmic linker associated protein 1
  ENSP ID: ENSP00000389372
MEPRMESCLAQVLQKDVGKRLQVGQELIDYFSDKQKSADLEHDQTMLDKLVDGLATSWVNSSNYKVVLLGMDILSALVTRLQDRFKAQIGTVLPSLIDRLGDAKDSVREQDQTLLLKIMDQAANPQYVWDRMLGGFKHKNFRTREGICLCLIATLNASGAQTLTLSKIVPHICNLLGDPNSQVRDAAINSLVEIYRHVGERVRADLSKKGLPQSRLNVIFTKFDEVQKSGNMIQSANDKNFDDEDSVDGNRPSSASSTSSKAPPSSRRNVGMGTTRRLGSSTLGSKSSAAKEGAGAVDEEDFIKAFDDVPVVQIYSSRDLEESINKIREILSDDKHDWEQRVNALKKIRSLLLAGAAEYDNFFQHLRLLDGAFKLSAKDLRSQVVREACITLGHLSSVLGNKFDHGAEAIMPTIFNLIPNSAKIMATSGVVAVRLIIRHTHIPRLIPVITSNCTSKSVAVRRRCFEFLDLLLQEWQTHSLERHISVLAETIKKGIHDADSEARIEARKCYWGFHSHFSREAEHLYHTLESSYQKALQSHLKNSDSIVSLPQSDRSSSSSQESLNRPLSAKRSPTGSTTSRASTVSTKSVSTTGSLQRSRSDIDVNAAASAKSKVSSSSGTTPFSSAAALPPGSYASLDGTTTKAEGRIRTRRQSSGSATNVASTPDNRGRSRAKVVSQSQRSRSANPAGAGSRSSSPGKLLGSGYGGLTGGSSRGPPVTPSSEKRSKIPRSQGCSRETSPNRIGLDRFGLGQPGRIPGSVNAMRVLSTSTDLEAAVADALLLGDSRSKKKPVRRRYEPYGMYSDDDANSDASSVCSERSYGSRNGGIPHYLRQTEDVAEVLNHCASSNWSERKEGLLGLQNLLKSQRTLSRVELKRLCEIFTRMFADPHSKVFSMFLETLVDFIIIHKDDLQDWLFVLLTQLLKKMGADLLGSVQAKVQKALDVTRDSFPFDQQFNILMRFIVDQTQTPNLKVKVAILKYIESLARQMDPTDFVNSSETRLAVSRIITWTTEPKSSDVRKAAQIVLISLFELNTPEFTMLLGALPKTFQDGATKLLHNHLKNSSNTSVGSPSNTIGRTPSRHTSSRTSPLTSPTNCSHGGLSPSMLDYDTENLNSEEIYSSLRGVTEAIEKFSFRSQEDLNEPIKRDGKKECDIVSRDGGAASPATEGRGGSEVEGGRTALDNKTSLLNTQPPRAFPGPRARDYNPYPYSDAINTYDKTALKEAVFDDDMEQLRDVPIDHSDLVADLLKELSNHNERVEERKGALLELLKITREDSLGVWEEHFKTILLLLLETLGDKDHSIRALALRVLREILRNQPARFKNYAELTIMKTLEAHKDSHKEVVRAAEEAASTLASSIHPEQCIKVLCPIIQTADYPINLAAIKMQTKVVERIAKESLLQLLVDIIPGLLQGYDNTESSVRKASVFCLVAIYSVIGEDLKPHLAQLTGSKMKLLNLYIKRAQTTNSNSSSSSDVSTHS

SEQ ID NO: 22232 - protein, 150 aa, Homo sapiens
  Payload ID: 4488
  Gene Symbol: CLASP1
  Gene Name: cytoplasmic linker associated protein 1
  ENSP ID: ENSP00000392886
MIQSANDKNFDDEDSVDGNRPSSASSTSSKAPPSSRRNVGMGTTRRLGSSTLGSKSSAAKEGAGAVDEEDFIKAFDDVPVVQIYSSRDLEESINKIREILSDDKHDWEQRVNALKKIRSLLLAGAAEYDNFFQHLRLLDGAFKLSAKDLR

SEQ ID NO: 22233 - protein, 1275 aa, Homo sapiens
  Payload ID: 4488
  Gene Symbol: CLASP1
  Gene Name: cytoplasmic linker associated protein 1
  ENSP ID: ENSP00000400562
  MOD_RES (1)..(1): Any amino acid
XTKFDEVQKSGNMIQSANDKNFDDEDSVDGNRPSSASSTSSKAPPSSRRNVGMGTTRRLGSSTLGSKSSAAKEGAGAVDEEDFIKAFDDVPVVQIYSSRDLEESINKIREILSDDKHDWEQRVNALKKIRSLLLAGAAEYDNFFQHLRLLDGAFKLSAKDLRSQVVREACITLGHLSSVLGNKFDHGAEAIMPTIFNLIPNSAKIMATSGVVAVRLIIRHTHIPRLIPVITSNCTSKSVAVRRRCFEFLDLLLQEWQTHSLERHISVLAETIKKGIHDADSEARIEARKCYWGFHSHFSREAEHLYHTLESSYQKALQSHLKNSDSIVSLPQSDRSSSSSQESLNRPLSAKRSPTGSTTSRASTVSTKSVSTTGSLQRSRSDIDVNAAASAKSKVSSSSGTTPFSSAAALPPGSYASLGRIRTRRQSSGSATNVASTPDNRGRSRAKVVSQSQRSRSANPAGAGSRSSSPGKLLGSGYGGLTGGSSRGPPVTPSSEKRSKIPRSQGCSRETSPNRIGLDRFGLGQPGRIPGSVNAMRVLSTSTDLEAAVADALLLGDSRSKKKPVRRRYEPYGMYSDDDANSDASSVCSERSYGSRNGGIPHYLRQTEDVAEVLNHCASSNWSERKEGLLGLQNLLKSQRTLSRVELKRLCEIFTRMFADPHSKIADSEAECEDKEGNLFPSEVSCTRVFSMFLETLVDFIIIHKDDLQDWLFVLLTQLLKKMGADLLGSVQAKVQKALDVTRDSFPFDQQFNILMRFIVDQTQTPNLKVKVAILKYIESLARQMDPTDFVNSSETRLAVSRIITWTTEPKSSDVRKAAQIVLISLFELNTPEFTMLLGALPKTFQDGATKLLHNHLKNSSNTSVGSPSNTIGRTPSRHTSSRTSPLTSPTNCSHGGLSPSMLDYDTENLNSEEIYSSLRGVTEAIEKFSFRSQEDLNEPIKRDGKKECDIVSRDGGAASPATEGRGGSEVEGGRTALDNKTSLLNTQPPRAFPGPRARDYNPYPYSDAINTYDKTALKEAVFDDDMEQLRDVPIDHSDLVADLLKELSNHNERVEERKGALLELLKITREDSLGVWEEHFKTILLLLLETLGDKDHSIRALALRVLREILRNQPARFKNYAELTIMKTLEAHKDSHKEVVRAAEEAASTLASSIHPEQCIKVLCPIIQTADYPINLAAIKMQTKVVERIAKESLLQLLVDIIPGLLQGYDNTESSVRKASVFCLVAIYSVIGEDLKPHLAQLTGSKMKLLNLYIKRAQTTNSNSSSSSDVSTHS

SEQ ID NO: 22234 - protein, 110 aa, Homo sapiens
  Payload ID: 4488
  Gene Symbol: CLASP1
  Gene Name: cytoplasmic linker associated protein 1
  ENSP ID: ENSP00000402101
MIQSANDKNFDDEDSVDGNRPSSASSTSSKAPPSSRRNVGMGTTRRLGSSTLGSKSSAAKEGAGAVDEEDFIKAFDDVPVVQIYSSRDLEESINKIREILSDDKHDWEQR

SEQ ID NO: 22235 - protein, 1477 aa, Homo sapiens
  Payload ID: 4488
  Gene Symbol: CLASP1
  Gene Name: cytoplasmic linker associated protein 1
  Uniprot ID: Q7Z460
  ENSP ID: ENSP00000441625
MEPRMESCLAQVLQKDVGKRLQVGQELIDYFSDKQKSADLEHDQTMLDKLVDGLATSWVNSSNYKVVLLGMDILSALVTRLQDRFKAQIGTVLPSLIDRLGDAKDSVREQDQTLLLKIMDQAANPQYVWDRMLGGFKHKNFRTREGICLCLIATLNASGAQTLTLSKIVPHICNLLGDPNSQVRDAAINSLVEIYRHVGERVRADLSKKGLPQSRLNVIFTKFDEVQKSGNMIQSANDKNFDDEDSVDGNRPSSASSTSSKAPPSSRRNVGMGTTRRLGSSTLGSKSSAAKEGAGAVDEEDFIKAFDDVPVVQIYSSRDLEESINKIREILSDDKHDWEQRVNALKKIRSLLLAGAAEYDNFFQHLRLLDGAFKLSAKDLRSQVVREACITLGHLSSVLGNKFDHGAEAIMPTIFNLIPNSAKIMATSGVVAVRLIIRHTHIPRLIPVITSNCTSKSVAVRRRCFEFLDLLLQEWQTHSLERHISVLAETIKKGIHDADSEARIEARKCYWGFHSHFSREAEHLYHTLESSYQKALQSHLKNSDSIVSLPQSDRSSSSSQESLNRPLSAKRSPTGSTTSRASTVSTKSVSTTGSLQRSRSDIDVNAAASAKSKVSSSSGTTPFSSAAALPPGSYASLESRHMREDMEYIGLDSGRIRTRRQSSGSATNVASTPDNRGRSRAKVVSQSQPGSRSSSPGKLLGSGYGGLTGGSSRGPPVTPSSEKRSKIPRSQGCSRETSPNRIGLDRFGLGQPGRIPGSVNAMRVLSTSTDLEAAVADALLLGDSRSKKPVRRRYEPYGMYSDDDANSDASSVCSERSYGSRNGGIPHYLRQTEDVAEVLNHCASSNWSERKEGLLGLQNLLKSQRTLSRVELKRLCEIFTRMFADPHSKRVFSMFLETLVDFIIIHKDDLQDWLFVLLTQLLKKMGADLLGSVQAKVQKALDVTRDSFPFDQQFNILMRFIVDQTQTPNLKVKVAILKYIESLARQMDPTDFVNSSETRLAVSRIITWTTEPKSSDVRKAAQIVLISLFELNTPEFTMLLGALPKTFQDGATKLLHNHLKNSSNTSVGSPSNTIGRTPSRHTSSRTSPLTSPTNCSHGGLSPSMLDYDTENLNSEEIYSSLRGVTEAIEKFSFRSQEDLNEPIKRDGKKECDIVSRDGGAASPATEGRGGSEVEGGRTALDNKTSLLNTQPPRAFPGPRARDYNPYPYSDAINTYDKTALKEAVFDDDMEQLRDVPIDHSDLVADLLKELSNHNERVEERKGALLELLKITREDSLGVWEEHFKTILLLLLETLGDKDHSIRALALRVLREILRNQPARFKNYAELTIMKTLEAHKDSHKEVVRAAEEAASTLASSIHPEQCIKVLCPIIQTADYPINLAAIKMQTKVVERIAKESLLQLLVDIIPGLLQGYDNTESSVRKASVFCLVAIYSVIGEDLKPHLAQLTGSKMKLLNLYIKRAQTTNSNSSSSSDVSTHS

SEQ ID NO: 22236 - protein, 431 aa, Homo sapiens
  Payload ID: 4489
  Gene Symbol: CLASP2
  Gene Name: cytoplasmic linker associated protein 2
  Uniprot ID: O75122
  ENSP ID: ENSP00000324364
MRRLICKRICDYKSFDDEESVDGNRPSSAASAFKVPAPKTSGNPANSARKPGSAGGPKVGGASKEGGAGAVDEDDFIKAFTDVPSIQIYSSRELEETLNKIREILSDDKHDWDQRANALKKIRSLLVAGAAQYDCFFQHLRLLDGALKLSAKDLRSQVVREACITVAHLSTVLGNKFDHGAEAIVPTLFNLVPNSAKVMATSGCAAIRFIIRHTHVPRLIPLITSNCTSKSVPVRRRSFEFLDLLLQEWQTHSLERHAAVLVETIKKGIHDADAEARVEARKTYMGLRNHFPGEAETLYNSLEPSYQKSLQTYLKSSGSVASLPQSDRSSSSSQESLNRPFSSKWSTANPSTVAGRVSAGSSKASSLPGSLQRSRSDIDVNAAAGAKAHHAAGQSVRSGRLGAGALNAGSYASLECEAFWRSGRTAKLYSV

SEQ ID NO: 22237 - protein, 458 aa, Homo sapiens
  Payload ID: 4489
  Gene Symbol: CLASP2
  Gene Name: cytoplasmic linker associated protein 2
  ENSP ID: ENSP00000327760
MLIQRTFISYYISYQNKSFDDEESVDGNRPSSAASAFKVPAPKTSGNPANSARKPGSAGGPKVGGASKEGGAGAVDEDDFIKAFTDVPSIQIYSSRELEETLNKIREILSDDKHDWDQRANALKKIRSLLVAGAAQYDCFFQHLRLLDGALKLSAKDLRSQVVREACITVAHLSTVLGNKFDHGAEAIVPTLFNLVPNSAKVMATSGCAAIRFIIRHTHVPRLIPLITSNCTSKSVPVRRRSFEFLDLLLQEWQTHSLERHAAVLVETIKKGIHDADAEARVEARKTYMGLRNHFPGEAETLYNSLEPSYQKSLQTYLKSSGSVASLPQSDRSSSSSQESLNRPFSSKWSTANPSTVAGRVSAGSSKASSLPGSLQRSRSDIDVNAAAGAKAHHAAGQSVRSGRLGAGALNAGSYASLGKRTDYGKLYHVLSLISVKTSSYTLIISIHSCYLRIVHMF

SEQ ID NO: 22238 - protein, 1515 aa, Homo sapiens
  Payload ID: 4489
  Gene Symbol: CLASP2
  Gene Name: cytoplasmic linker associated protein 2
  Uniprot ID: O75122
  ENSP ID: ENSP00000352581
MEPRSMEYFCAQVQQKDVGGRLQVGQELLLYLGAPGAISDLEEDLGRLGKTVDALTGWVGSSNYRVSLMGLEILSAFVDRLSTRFKSYVAMVIVALIDRMGDAKDKVRDEAQTLILKLMDQVAPPMYIWEQLASGFKHKNFRSREGVCLCLIETLNIFGAQPLVISKLIPHLCILFGDSNSQVRDAAILAIVEIYRHVGEKVRMDLYKRGIPPARLEMIFAKFDEVQSSGGMILSVCKDKSFDDEESVDGNRPSSAASAFKVPAPKTSGNPANSARKPGSAGGPKVGAGASKEGGAGAVDEDDFIKAFTDVPSIQIYSSRELEETLNKIREILSDDKHDWDQRANALKKIRSLLVAGAAQYDCFFQHLRLLDGALKLSAKDLRSQVVREACITVAHLSTVLGNKFDHGAEAIVPTLFNLVPNSAKVMATSGCAAIRFIIRHTHVPRLIPLITSNCTSKSVPVRRRSFEFLDLLLQEWQTHSLERHAAVLVETIKKGIHDADAEARVEARKTYMGLRNHFPGEAETLYNSLEPSYQKSLQTYLKSSGSVASLPQSDRSSSSSQESLNRPFSSKWSTANPSTVAGRVSAGSSKASSLPGSLQRSRSDIDVNAAAGAKAHHAAGQSVRSGRLGAGALNAGSYASLEDTSDKLDGTASEDGRVRAKLSAPLAGMGNAKADSRGRSRTKMVSQSQPGSRSGSPGRVLTTTALSTVSSGVQRVLVNSASAQKRSKIPRSQGCSREASPSRLSVARSSRIPRPSVSQGCSREASRESSRDTSPVRSFQPLGPGYGISQSSRLSSSVSAMRVLNTGSDVEEAVADALLLGDIRTKKKPARRRYESYGMHSDDDANSDASSACSERSYSSRNGSIPTYMRQTEDVAEVLNRCASSNWSERKEGLLGLQNLLKNQRTLSRVELKRLCEIFTRMFADPHGKRVFSMFLETLVDFIQVHKDDLQDWLFVLLTQLLKKMGADLLGSVQAKVQKALDVTRESFPNDLQFNILMRFTVDQTQTPSLKVKVAILKYIETLAKQMDPGDFINSSETRLAVSRVITWTTEPKSSDVRKAAQSVLISLFELNTPEFTMLLGALPKTFQDGATKLLHNHLRNTGNGTQSSMGSPLTRPTPRSPANWSSPLTSPTNTSQNTLSPSAFDYDTENMNSEDIYSSLRGVTEAIQNFSFRSQEDMNEPLKRDSKKDDGDSMCGGPGMSDPRAGGDATDSSQTALDNKASLLHSMPTHSSPRSRDYNPYNYSDSISPFNKSALKEAMFDDDADQFPDDLSLDHSDLVAELLKELSNHNERVEERKIALYELMKLTQEESFSVWDEHFKTILLLLLETLGDKEPTIRALALKVLREILRHQPARFKNYAELTVMKTLEAHKDPHKEVVRSAEEAASVLATSISPEQCIKVLCPIIQTADYPINLAAIKMQTKVIERVSKETLNLLLPEIMPGLIQGYDNSESSVRKACVFCLVAVHAVIGDELKPHLSQLTGSKMKLLNLYIKRAQTGSGGADPTTDVSGQS

SEQ ID NO: 22239 - protein, 1513 aa, Homo sapiens
  Payload ID: 4489
  Gene Symbol: CLASP2
  Gene Name: cytoplasmic linker associated protein 2
  ENSP ID: ENSP00000382297
MEPRSMEYFCAQVQQKDVGGRLQVGQELLLYLGAPGAISDLEEDLGRLGKTVDALTGWVGSSNYRVSLMGLEILSAFVDRLSTRFKSYVAMVIVALIDRMGDAKDKVRDEAQTLILKLMDQVAPPMYIWEQLASGFKHKNFRSREGVCLCLIETLNIFGAQPLVISKLIPHLCILFGDSNSQVRDAAILAIVEIYRHVGEKVRMDLYKRGIPPARLEMIFAKFDEVQSSGGMILSVCKDKSFDDEESVDGNRPSSAASAFKVPAPKTSGNPANSARKPGSAGGPKVGGASKEGGAGAVDEDDFIKAFTDVPSIQIYSSRELEETLNKIREILSDDKHDWDQRANALKKIRSLLVAGAAQYDCFFQHLRLLDGALKLSAKDLRSQVVREACITVAHLSTVLGNKFDHGAEAIVPTLFNLVPNSAKVMATSGCAAIRFIIRHTHVPRLIPLITSNCTSKSVPVRRRSFEFLDLLLQEWQTHSLERHAAVLVETIKKGIHDADAEARVEARKTYMGLRNHFPGEAETLYNSLEPSYQKSLQTYLKSSGSVASLPQSDRSSSSSQESLNRPFSSKWSTANPSTVAGRVSAGSSKASSLPGSLQRSRSDIDVNAAAGAKAHHAAGQSVRSGRLGAGALNAGSYASLEDTSDKLDGTASEDGRVRAKLSAPLAGMGNAKADSRGRSRTKMVSQSQPGSRSGSPGRVLTTTALSTVSSGVQRVLVNSASAQKRSKIPRSQGCSREASPSRLSVARSSRIPRPSVSQGCSREASRESSRDTSPVRSFQPLGPGYGISQSSRLSSSVSAMRVLNTGSDVEEAVADALLLGDIRTKKKPARRRYESYGMHSDDDANSDASSACSERSYSSRNGSIPTYMRQTEDVAEVLNRCASSNWSERKEGLLGLQNLLKNQRTLSRVELKRLCEIFTRMFADPHGKVFSMFLETLVDFIQVHKDDLQDWLFVLLTQLLKKMGADLLGSVQAKVQKALDVTRESFPNDLQFNILMRFTVDQTQTPSLKVKVAILKYIETLAKQMDPGDFINSSETRLAVSRVITWTTEPKSSDVRKAAQSVLISLFELNTPEFTMLLGALPKTFQDGATKLLHNHLRNTGNGTQSSMGSPLTRPTPRSPANWSSPLTSPTNTSQNTLSPSAFDYDTENMNSEDIYSSLRGVTEAIQNFSFRSQEDMNEPLKRDSKKDDGDSMCGGPGMSDPRAGGDATDSSQTALDNKASLLHSMPTHSSPRSRDYNPYNYSDSISPFNKSALKEAMFDDDADQFPDDLSLDHSDLVAELLKELSNHNERVEERKIALYELMKLTQEESFSVWDEHFKTILLLLLETLGDKEPTIRALALKVLREILRHQPARFKNYAELTVMKTLEAHKDPHKEVVRSAEEAASVLATSISPEQCIKVLCPIIQTADYPINLAAIKMQTKVIERVSKETLNLLLPEIMPGLIQGYDNSESSVRKACVFCLVAVHAVIGDELKPHLSQLTGSKMKLLNLYIKRAQTGSGGADPTTDVSGQS

SEQ ID NO: 22240 - protein, 205 aa, Homo sapiens
  Payload ID: 4489
  Gene Symbol: CLASP2
  Gene Name: cytoplasmic linker associated protein 2
  ENSP ID: ENSP00000417386
  MOD_RES (1)..(1): Any amino acid
XKKMGADLLGSVQAKVQKALDVTRESFPNDLQFNILMRFTVDQTQTPSLKTVKPALRDQLHSFWSSKVKVAILKYIETLAKQMDPGDFINSSETRLAVSRVITWTTEPKSSDVRKAAQSVLISLFELNTPEFTMLLGALPKTFQDGATKLLHNHLRNTGNGTQSSMGSPLTRPTPRSPANWSSPLTSPTNTSQNTLSPSAFDYDT

SEQ ID NO: 22241 - protein, 1293 aa, Homo sapiens
  Payload ID: 4489
  Gene Symbol: CLASP2
  Gene Name: cytoplasmic linker associated protein 2
  ENSP ID: ENSP00000417518
MAMGDDKSFDDEESVDGNRPSSAASAFKVPAPKTSGNPANSARKPGSAGGPKVGGASKEGGAGAVDEDDFIKAFTDVPSIQIYSSRELEETLNKIREILSDDKHDWDQRANALKKIRSLLVAGAAQYDCFFQHLRLLDGALKLSAKDLRSQVVREACITVAHLSTVLGNKFDHGAEAIVPTLFNLVPNSAKVMATSGCAAIRFIIRHTHVPRLIPLITSNCTSKSVPVRRRSFEFLDLLLQEWQTHSLERHAAVLVETIKKGIHDADAEARVEARKTYMGLRNHFPGEAETLYNSLEPSYQKSLQTYLKSSGSVASLPQSDRSSSSSQESLNRPFSSKWSTANPSTVAGRVSAGSSKASSLPGSLQRSRSDIDVNAAAGAKAHHAAGQSVRSGRLGAGALNAGSYASLEDTSDKLDGTASEDGRVRAKLSAPLAGMGNAKADSRGRSRTKMVSQSQPGSRSGSPGRVLTTTALSTVSSGVQRVLVNSASAQKRSKIPRSQGCSREASPSRLSVARSSRIPRPSVSQGCSREASRESSRDTSPVRSFQPLASRHHSRSTGALYAPEVYGASGPGYGISQSSRLSSSVSAMRVLNTGSDVEEAVADALKKPARRRYESYGMHSDDDANSDASSACSERSYSSRNGSIPTYMRQTEDVAEVLNRCASSNWSERKEGLLGLQNLLKNQRTLSRVELKRLCEIFTRMFADPHGKVFSMFLETLVDFIQVHKDDLQDWLFVLLTQLLKKMGADLLGSVQAKVQKALDVTRESFPNDLQFNILMRFTVDQTQTPSLKVKVAILKYIETLAKQMDPGDFINSSETRLAVSRVITWTTEPKSSDVRKAAQSVLISLFELNTPEFTMLLGALPKTFQDGATKLLHNHLRNTGNGTQSSMGSPLTRPTPRSPANWSSPLTSPTNTSQNTLSPSAFDYDTENMNSEDIYSSLRGVTEAIQNFSFRSQEDMNEPLKRDSKKDDGDSMCGGPGMSDPRAGGDATDSSQTALDNKASLLHSMPTHSSPRSRDYNPYNYSDSISPFNKSALKEAMFDDDADQFPDDLSLDHSDLVAELLKELSNHNERVEERKIALYELMKLTQEESFSVWDEHFKTILLLLLETLGDKEPTIRALALKVLREILRHQPARFKNYAELTVMKTLEAHKDPHKEVVRSAEEAASVLATSISPEQCIKVLCPIIQTADYPINLAAIKMQTKVIERVSKETLNLLLPEIMPGLIQGYDNSESSVRKACVFCLVAVHAVIGDELKPHLSQLTGSKMKLLNLYIKRAQTGSGGADPTTDVSGQS

SEQ ID NO: 22242 - protein, 178 aa, Homo sapiens
  Payload ID: 4489
  Gene Symbol: CLASP2
  Gene Name: cytoplasmic linker associated protein 2
  ENSP ID: ENSP00000417666
RSQGCSREASPSRLSVARSSRIPRPSVSQGCSREASRESSRDTSPVRSFQPLASRHHSRSTGALYAPEVYGASGPGYGISQSSRLSSSVSAMRVLNTGSDVEEAVADALLLGDIRTKKKPARRRYESYGMHSDDDANSDASSACSERSYSSRNGSIPTYMRQTEDVAEVLNRCASSNW

SEQ ID NO: 22243 - protein, 178 aa, Homo sapiens
  Payload ID: 4489
  Gene Symbol: CLASP2
  Gene Name: cytoplasmic linker associated protein 2
  ENSP ID: ENSP00000418411
MAMGDDKSFDDEESVDGNRPSSAASAFKVPAPKTSGNPANSARKPGSAGGPKVGAGASKEGGAGAVDEDDFIKAFTDVPSIQIYSSRELEETLNKIREILSDDKHDWDQRANALKKIRSLLVAGAAQYDCFFQHLRLLDGALKLSAKDLRSQVVREACITVAHLSTVLGNKFDHGAEA

SEQ ID NO: 22244 - protein, 184 aa, Homo sapiens
  Payload ID: 4489
  Gene Symbol: CLASP2
  Gene Name: cytoplasmic linker associated protein 2
  ENSP ID: ENSP00000418488
  MOD_RES (1)..(1): Any amino acid
XGMSDPRAGGDATDSSQTALDNKASLLHSMPTHSSPRSRDYNPYNYSDSISPFNKSALKEAMFDDDADQFPDDLSLDHSDLVAELLKELSNHNERVEERKIALYELMKLTQEESFSVWDEHFKTILLLLLETLGDKEPTIRALALKVLREILRHQPARFKNYAELTVMKTLEAHKDPHKEVDTQ

SEQ ID NO: 22245 - protein, 454 aa, Homo sapiens
  Payload ID: 4489
  Gene Symbol: CLASP2
  Gene Name: cytoplasmic linker associated protein 2
  ENSP ID: ENSP00000418939
MRRLICKRICDYKSFDDEESVDGNRPSSAASAFKVPAPKTSGNPANSARKPGSAGGPKVGGASKEGGAGAVDEDDFIKAFTDVPSIQIYSSRELEETLNKIREILSDDKHDWDQRANALKKIRSLLVAGAAQYDCFFQHLRLLDGALKLSAKDLRSQVVREACITVAHLSTVLGNKFDHGAEAIVPTLFNLVPNSAKVMATSGCAAIRFIIRHTHVPRLIPLITSNCTSKSVPVRRRSFEFLDLLLQEWQTHSLERHAAVLVETIKKGIHDADAEARVEARKTYMGLRNHFPGEAETLYNSLEPSYQKSLQTYLKSSGSVASLPQSDRSSSSSQESLNRPFSSKWSTANPSTVAGRVSAGSSKASSLPGSLQRSRSDIDVNAAAGAKAHHAAGQSVRSGRLGAGALNAGSYASLGKRTDYGKLYHVLSLISVKTSSYTLIISIHSCYLRIVHMF

SEQ ID NO: 22246 - protein, 233 aa, Homo sapiens
  Payload ID: 4489
  Gene Symbol: CLASP2
  Gene Name: cytoplasmic linker associated protein 2
  ENSP ID: ENSP00000418945
MRRLICKRICDYKSFDDEESVDGNRPSSAASAFKVPAPKTSGNPANSARKPGSAGGPKVGGASKEGGAGAVDEDDFIKAFTDVPSIQIYSSRELEETLNKIREILSDDKHDWDQRANALKKIRSLLVAGAAQYDCFFQHLRLLDGALKLSAKDLRSQVVREACITVAHLSTVLGNKFDHGAEAIVPTLFNLVPNSAKVMATSGCAAIRFIIRHTHVPRLIPLITSNCTSKSVP

SEQ ID NO: 22247 - protein, 1273 aa, Homo sapiens
  Payload ID: 4489
  Gene Symbol: CLASP2
  Gene Name: cytoplasmic linker associated protein 2
  ENSP ID: ENSP00000419305
MAMGDDKSFDDEESVDGNRPSSAASAFKVPAPKTSGNPANSARKPGSAGGPKVGGASKEGGAGAVDEDDFIKAFTDVPSIQIYSSRELEETLNKIREILSDDKHDWDQRANALKKIRSLLVAGAAQYDCFFQHLRLLDGALKLSAKDLRSQVVREACITVAHLSTVLGNKFDHGAEAIVPTLFNLVPNSAKVMATSGCAAIRFIIRHTHVPRLIPLITSNCTSKSVPVRRRSFEFLDLLLQEWQTHSLERHAAVLVETIKKGIHDADAEARVEARKTYMGLRNHFPGEAETLYNSLEPSYQKSLQTYLKSSGSVASLPQSDRSSSSSQESLNRPFSSKWSTANPSTVAGRVSAGSSKASSLPGSLQRSRSDIDVNAAAGAKAHHAAGQSVRSGRLGAGALNAGSYASLEDTSDKLDGTASEDGRVRAKLSAPLAGMGNAKADSRGRSRTKMVSQSQPGSRSGSPGRVLTTTALSTVSSGVQRVLVNSASAQKRSKIPRSQGCSREASPSRLSVARSSRIPRPSVSQGCSREASRESSRDTSPVRSFQPLGPGYGISQSSRLSSSVSAMRVLNTGSDVEEAVADALKKPARRRYESYGMHSDDDANSDASSACSERSYSSRNGSIPTYMRQTEDVAEVLNRCASSNWSERKEGLLGLQNLLKNQRTLSRVELKRLCEIFTRMFADPHGKRVFSMFLETLVDFIQVHKDDLQDWLFVLLTQLLKKMGADLLGSVQAKVQKALDVTRESFPNDLQFNILMRFTVDQTQTPSLKVKVAILKYIETLAKQMDPGDFINSSETRLAVSRVITWTTEPKSSDVRKAAQSVLISLFELNTPEFTMLLGALPKTFQDGATKLLHNHLRNTGNGTQSSMGSPLTRPTPRSPANWSSPLTSPTNTSQNTLSPSAFDYDTENMNSEDIYSSLRGVTEAIQNFSFRSQEDMNEPLKRDSKKDDGDSMCGGPGMSDPRAGGDATDSSQTALDNKASLLHSMPTHSSPRSRDYNPYNYSDSISPFNKSALKEAMFDDDADQFPDDLSLDHSDLVAELLKELSNHNERVEERKIALYELMKLTQEESFSVWDEHFKTILLLLLETLGDKEPTIRALALKVLREILRHQPARFKNYAELTVMKTLEAHKDPHKEVVRSAEEAASVLATSISPEQCIKVLCPIIQTADYPINLAAIKMQTKVIERVSKETLNLLLPEIMPGLIQGYDNSESSVRKACVFCLVAVHAVIGDELKPHLSQLTGSKMKLLNLYIKRAQTGSGGADPTTDVSGQS

SEQ ID NO: 22248 - protein, 1514 aa, Homo sapiens
  Payload ID: 4489
  Gene Symbol: CLASP2
  Gene Name: cytoplasmic linker associated protein 2
  ENSP ID: ENSP00000419974
MEPRSMEYFCAQVQQKDVGGRLQVGQELLLYLGAPGAISDLEEDLGRLGKTVDALTGWVGSSNYRVSLMGLEILSAFVDRLSTRFKSYVAMVIVALIDRMGDAKDKVRDEAQTLILKLMDQVAPPMYIWEQLASGFKHKNFRSREGVCLCLIETLNIFGAQPLVISKLIPHLCILFGDSNSQVRDAAILAIVEIYRHVGEKVRMDLYKRGIPPARLEMIFAKFDEVQSSGGMILSVCKDKSFDDEESVDGNRPSSAASAFKVPAPKTSGNPANSARKPGSAGGPKVGAGASKEGGAGAVDEDDFIKAFTDVPSIQIYSSRELEETLNKIREILSDDKHDWDQRANALKKIRSLLVAGAAQYDCFFQHLRLLDGALKLSAKDLRSQVVREACITVAHLSTVLGNKFDHGAEAIVPTLFNLVPNSAKVMATSGCAAIRFIIRHTHVPRLIPLITSNCTSKSVPVRRRSFEFLDLLLQEWQTHSLERHAAVLVETIKKGIHDADAEARVEARKTYMGLRNHFPGEAETLYNSLEPSYQKSLQTYLKSSGSVASLPQSDRSSSSSQESLNRPFSSKWSTANPSTVAGRVSAGSSKASSLPGSLQRSRSDIDVNAAAGAKAHHAAGQSVRSGRLGAGALNAGSYASLEDTSDKLDGTASEDGRVRAKLSAPLAGMGNAKADSRGRSRTKMVSQSQPGSRSGSPGRVLTTTALSTVSSGVQRVLVNSASAQKRSKIPRSQGCSREASPSRLSVARSSRIPRPSVSQGCSREASRESSRDTSPVRSFQPLGPGYGISQSSRLSSSVSAMRVLNTGSDVEEAVADALLLGDIRTKKKPARRRYESYGMHSDDDANSDASSACSERSYSSRNGSIPTYMRQTEDVAEVLNRCASSNWSERKEGLLGLQNLLKNQRTLSRVELKRLCEIFTRMFADPHGKVFSMFLETLVDFIQVHKDDLQDWLFVLLTQLLKKMGADLLGSVQAKVQKALDVTRESFPNDLQFNILMRFTVDQTQTPSLKVKVAILKYIETLAKQMDPGDFINSSETRLAVSRVITWTTEPKSSDVRKAAQSVLISLFELNTPEFTMLLGALPKTFQDGATKLLHNHLRNTGNGTQSSMGSPLTRPTPRSPANWSSPLTSPTNTSQNTLSPSAFDYDTENMNSEDIYSSLRGVTEAIQNFSFRSQEDMNEPLKRDSKKDDGDSMCGGPGMSDPRAGGDATDSSQTALDNKASLLHSMPTHSSPRSRDYNPYNYSDSISPFNKSALKEAMFDDDADQFPDDLSLDHSDLVAELLKELSNHNERVEERKIALYELMKLTQEESFSVWDEHFKTILLLLLETLGDKEPTIRALALKVLREILRHQPARFKNYAELTVMKTLEAHKDPHKEVVRSAEEAASVLATSISPEQCIKVLCPIIQTADYPINLAAIKMQTKVIERVSKETLNLLLPEIMPGLIQGYDNSESSVRKACVFCLVAVHAVIGDELKPHLSQLTGSKMKLLNLYIKRAQTGSGGADPTTDVSGQS

SEQ ID NO: 22249 - protein, 220 aa, Homo sapiens
  Payload ID: 4489
  Gene Symbol: CLASP2
  Gene Name: cytoplasmic linker associated protein 2
  ENSP ID: ENSP00000420307
  MOD_RES (1)..(1): Any amino acid
XSMPTHSSPRSRDYNPYNYSDSISPFNKSALKEAMFDDDADQFPDDLSLDHSDLVAELLKELSNHNERVEERKIALYELMKLTQEESFSVWDEHFKTILLLLLETLGDKEPTIRALALKVLREILRHQPARFKNYAELTVMKTLEAHKDPHKEGYDNSESSVRKACVFCLVAVHAVIGDELKPHLSQLTGSKMKLLNLYIKRAQTGSGGADPTTDVSGQS

SEQ ID NO: 22250 - protein, 1304 aa, Homo sapiens
  Payload ID: 4489
  Gene Symbol: CLASP2
  Gene Name: cytoplasmic linker associated protein 2
  ENSP ID: ENSP00000489023
MRRLICKRICDYKSFDDEESVDGNRPSSAASAFKVPAPKTSGNPANSARKPGSAGGPKVGGASKEGGAGAVDEDDFIKAFTDVPSIQIYSSRELEETLNKIREILSDDKHDWDQRANALKKIRSLLVAGAAQYDCFFQHLRLLDGALKLSAKDLRSQVVREACITVAHLSTVLGNKFDHGAEAIVPTLFNLVPNSAKVMATSGCAAIRFIIRHTHVPRLIPLITSNCTSKSVPVRRRSFEFLDLLLQEWQTHSLERHAAVLVETIKKGIHDADAEARVEARKTYMGLRNHFPGEAETLYNSLEPSYQKSLQTYLKSSGSVASLPQSDRSSSSSQESLNRPFSSKWSTANPSTVAGRVSAGSSKASSLPGSLQRSRSDIDVNAAAGAKAHHAAGQSVRSGRLGAGALNAGSYASLEDTSDKLDGTASEDGRVRAKLSAPLAGMGNAKADSRGRSRTKMVSQSQRSSSPDKNEGSQSANTIGAGSRSGSPGRVLTTTALSTVSSGVQRVLVNSASAQKRSKIPRSQGCSREASPSRLSVARSSRIPRPSVSQGCSREASRESSRDTSPVRSFQPLGPGYGISQSSRLSSSVSAMRVLNTGSDVEEAVADALLLGDIRTKKKPARRRYESYGMHSDDDANSDASSACSERSYSSRNGSIPTYMRQTEDVAEVLNRCASSNWSERKEGLLGLQNLLKNQRTLSRVELKRLCEIFTRMFADPHGKVFSMFLETLVDFIQVHKDDLQDWLFVLLTQLLKKMGADLLGSVQAKVQKALDVTRESFPNDLQFNILMRFTVDQTQTPSLKVKVAILKYIETLAKQMDPGDFINSSETRLAVSRVITWTTEPKSSDVRKAAQSVLISLFELNTPEFTMLLGALPKTFQDGATKLLHNHLRNTGNGTQSSMGSPLTRPTPRSPANWSSPLTSPTNTSQNTLSPSAFDYDTENMNSEDIYSSLRGVTEAIQNFSFRSQEDMNEPLKRDSKKDDGDSMCGGPGMSDPRAGGDATDSSQTALDNKASLLHSMPTHSSPRSRDYNPYNYSDSISPFNKSALKEAMFDDDADQFPDDLSLDHSDLVAELLKELSNHNERVEERKIALYELMKLTQEESFSVWDEHFKTILLLLLETLGDKEPTIRALALKVLREILRHQPARFKNYAELTVMKTLEAHKDPHKEVVRSAEEAASVLATSISPEQCIKVLCPIIQTADYPINLAAIKMQTKVIERVSKETLNLLLPEIMPGLIQGYDNSESSVRKACVFCLVAVHAVIGDELKPHLSQLTGSKMKLLNLYIKRAQTGSGGADPTTDVSGQS

SEQ ID NO: 22251 - protein, 114 aa, Homo sapiens
  Payload ID: 4490
  Gene Symbol: CPEB1
  Gene Name: cytoplasmic polyadenylation element binding protein 1
  ENSP ID: ENSP00000455044
MLFPTSAQESSRGLPDANDLCLGLQSLSLTGWDRPWSTQDSDSSAQSSTHSVLSMLHNPLGNVLGKPPLSFLPLDPLGSDLVDKFPAPSVRGSRLDTRPILDSRSSSPSDSDTS

SEQ ID NO: 22252 - protein, 35 aa, Homo sapiens
  Payload ID: 4490
  Gene Symbol: CPEB1
  Gene Name: cytoplasmic polyadenylation element binding protein 1
  ENSP ID: ENSP00000455268
MLFPTSAQESSRGLPDANDLCLGLQSLSLTGWDRP

SEQ ID NO: 22253 - protein, 17 aa, Homo sapiens
  Payload ID: 4490
  Gene Symbol: CPEB1
  Gene Name: cytoplasmic polyadenylation element binding protein 1
  ENSP ID: ENSP00000457137
MLFPTSAQESSRGLPDA

SEQ ID NO: 22254 - protein, 486 aa, Homo sapiens
  Payload ID: 4490
  Gene Symbol: CPEB1
  Gene Name: cytoplasmic polyadenylation element binding protein 1
  Uniprot ID: Q9BZB8
  ENSP ID: ENSP00000477557
MLFPTSAQESSRGLPDANDLCLGLQSLSLTGWDRPWSTQDSDSSAQSSTHSVLSMLHNPLGNVLGKPPLSFLPLDPLGSDLVDKFPAPSVRGSRLDTRPILDSRSSSPSDSDTSGFSSGSDHLSDLISSLRISPPLPFLSLSGGGPRDPLKMGVGSRMDQEQAALAAVTPSPTSASKRWPGASVWPSWDLLEAPKDPFSIEREARLHRQAAAVNEATCTWSGQLPPRNYKNPIYSCKVFLGGVPWDITEAGLVNTFRVFGSLSVEWPGKDGKHPRCPPKGYVYLVFELEKSVRSLLQACSHDPLSPDGLSEYYFKMSSRRMRCKEVQVIPWVLADSNFVRSPSQRLDPSRTVFVGALHGMLNAEALAAILNDLFGGVVYAGIDTDKHKYPIGSGRVTFNNQRSYLKAVSAAFVEIKTTKFTKKVQIDPYLEDSLCHICSSQPGPFFCRDQVCFKYFCRSCWHWRHSMEGLRHHSPLMRNQKNRDSS

SEQ ID NO: 22255 - protein, 561 aa, Homo sapiens
  Payload ID: 4490
  Gene Symbol: CPEB1
  Gene Name: cytoplasmic polyadenylation element binding protein 1
  Uniprot ID: Q9BZB8
  ENSP ID: ENSP00000477715
MAFPLEEEAGRIKDCWDNQEAPALSTCSNANIFRRINAILDNSLDFSRVCTTPINRGIHDHLPDFQDSEETVTSRMLFPTSAQESSRGLPDANDLCLGLQSLSLTGWDRPWSTQDSDSSAQSSTHSVLSMLHNPLGNVLGKPPLSFLPLDPLGSDLVDKFPAPSVRGSRLDTRPILDSRSSSPSDSDTSGFSSGSDHLSDLISSLRISPPLPFLSLSGGGPRDPLKMGVGSRMDQEQAALAAVTPSPTSASKRWPGASVWPSWDLLEAPKDPFSIEREARLHRQAAAVNEATCTWSGQLPPRNYKNPIYSCKVFLGGVPWDITEAGLVNTFRVFGSLSVEWPGKDGKHPRCPPKGYVYLVFELEKSVRSLLQACSHDPLSPDGLSEYYFKMSSRRMRCKEVQVIPWVLADSNFVRSPSQRLDPSRTVFVGALHGMLNAEALAAILNDLFGGVVYAGIDTDKHKYPIGSGRVTFNNQRSYLKAVSAAFVEIKTTKFTKKVQIDPYLEDSLCHICSSQPGPFFCRDQVCFKYFCRSCWHWRHSMEGLRHHSPLMRNQKNRDSS

SEQ ID NO: 22256 - protein, 561 aa, Homo sapiens
  Payload ID: 4490
  Gene Symbol: CPEB1
  Gene Name: cytoplasmic polyadenylation element binding protein 1
  ENSP ID: ENSP00000478378
MALSLEEEAGRIKDCWDNQEAPALSTCSNANIFRRINAILDNSLDFSRVCTTPINRGIHDHLPDFQDSEETVTSRMLFPTSAQESSRGLPDANDLCLGLQSLSLTGWDRPWSTQDSDSSAQSSTHSVLSMLHNPLGNVLGKPPLSFLPLDPLGSDLVDKFPAPSVRGSRLDTRPILDSRSSSPSDSDTSGFSSGSDHLSDLISSLRISPPLPFLSLSGGGPRDPLKMGVGSRMDQEQAALAAVTPSPTSASKRWPGASVWPSWDLLEAPKDPFSIEREARLHRQAAAVNEATCTWSGQLPPRNYKNPIYSCKVFLGGVPWDITEAGLVNTFRVFGSLSVEWPGKDGKHPRCPPKGYVYLVFELEKSVRSLLQACSHDPLSPDGLSEYYFKMSSRRMRCKEVQVIPWVLADSNFVRSPSQRLDPSRTVFVGALHGMLNAEALAAILNDLFGGVVYAGIDTDKHKYPIGSGRVTFNNQRSYLKAVSAAFVEIKTTKFTKKVQIDPYLEDSLCHICSSQPGPFFCRDQVCFKYFCRSCWHWRHSMEGLRHHSPLMRNQKNRDSS

SEQ ID NO: 22257 - protein, 486 aa, Homo sapiens; identical to SEQ ID NO: 22254
  Payload ID: 4490
  Gene Symbol: CPEB1
  Gene Name: cytoplasmic polyadenylation element binding protein 1
  Uniprot ID: Q9BZB8
  ENSP ID: ENSP00000478558

SEQ ID NO: 22258 - protein, 626 aa, Homo sapiens
  Payload ID: 4490
  Gene Symbol: CPEB1
  Gene Name: cytoplasmic polyadenylation element binding protein 1
  ENSP ID: ENSP00000478598
MSWKSSLPTFFCHIYSFFHDFLYWLCGKSVKSCTTSGNSFFKQEFIILGMMAFMDFSVTMMALSLEEEAGRIKDCWDNQEAPALSTCSNANIFRRINAILDNSLDFSRVCTTPINRGIHDHLPDFQDSEETVTSRMLFPTSAQESSRGLPDANDLCLGLQSLSLTGWDRPWSTQDSDSSAQSSTHSVLSMLHNPLGNVLGKPPLSFLPLDPLGSDLVDKFPAPSVRGSRLDTRPILDSRSSSPSDSDTSGFSSGSDHLSDLISSLRISPPLPFLSLSGGGPRDPLKMGVGSRMDQEQAALAAVTPSPTSASKRWPGASVWPSWDLLEAPKDPFSIEREARLHRQAAAVNEATCTWSGQLPPRNYKNPIYSCKVFLGGVPWDITEAGLVNTFRVFGSLSVEWPGKDGKHPRCPPKGNMPKGYVYLVFELEKSVRSLLQACSHDPLSPDGLSEYYFKMSSRRMRCKEVQVIPWVLADSNFVRSPSQRLDPSRTVFVGALHGMLNAEALAAILNDLFGGVVYAGIDTDKHKYPIGSGRVTFNNQRSYLKAVSAAFVEIKTTKFTKKVQIDPYLEDSLCHICSSQPGPFFCRDQVCFKYFCRSCWHWRHSMEGLRHHSPLMRNQKNRDSS

SEQ ID NO: 22259 - protein, 138 aa, Homo sapiens
  Payload ID: 4490
  Gene Symbol: CPEB1
  Gene Name: cytoplasmic polyadenylation element binding protein 1
  ENSP ID: ENSP00000478841
MLFPTSAQESSRGLPDANDLCLGLQSLSLTGWDRPWSTQDSDSSAQSSTHSVKPSHFSTSALPVSVRGWSQRPFKDGGRVSDGPRASCSCCSHSLPNQCFKEMARSFCVAILGPPRSSQRPLQHRERGQAAPTSCSCE

SEQ ID NO: 22260 - protein, 564 aa, Homo sapiens
  Payload ID: 4490
  Gene Symbol: CPEB1
  Gene Name: cytoplasmic polyadenylation element binding protein 1
  ENSP ID: ENSP00000479625
MPECLWTQGVLQEVLNSYFCGSIILSTLPWEVPGGHASRICLLLLATGENKQVECYQLSPGLSSLPDFQDSEETVTSRMLFPTSAQESSRGLPDANDLCLGLQSLSLTGWDRPWSTQDSDSSAQSSTHSVLSMLHNPLGNVLGKPPLSFLPLDPLGSDLVDKFPAPSVRGSRLDTRPILDSRSSSPSDSDTSGFSSGSDHLSDLISSLRISPPLPFLSLSGGGPRDPLKMGVGSRMDQEQAALAAVTPSPTSASKRWPGASVWPSWDLLEAPKDPFSIEREARLHRQAAAVNEATCTWSGQLPPRNYKNPIYSCKVFLGGVPWDITEAGLVNTFRVFGSLSVEWPGKDGKHPRCPPKGYVYLVFELEKSVRSLLQACSHDPLSPDGLSEYYFKMSSRRMRCKEVQVIPWVLADSNFVRSPSQRLDPSRTVFVGALHGMLNAEALAAILNDLFGGVVYAGIDTDKHKYPIGSGRVTFNNQRSYLKAVSAAFVEIKTTKFTKKVQIDPYLEDSLCHICSSQPGPFFCRDQVCFKYFCRSCWHWRHSMEGLRHHSPLMRNQKNRDSS

SEQ ID NO: 22261 - protein, 486 aa, Homo sapiens; identical to SEQ ID NO: 22254
  Payload ID: 4490
  Gene Symbol: CPEB1
  Gene Name: cytoplasmic polyadenylation element binding protein 1
  Uniprot ID: Q9BZB8
  ENSP ID: ENSP00000481009

SEQ ID NO: 22262 - protein, 588 aa, Homo sapiens
  Payload ID: 4490
  Gene Symbol: CPEB1
  Gene Name: cytoplasmic polyadenylation element binding protein 1
  ENSP ID: ENSP00000481010
MFSGIATSTSSSMSGTGLEHSSLSDCLLLIPLEEEAGRIKDCWDNQEAPALSTCSNANIFRRINAILDNSLDFSRVCTTPINRGIHDHLPDFQDSEETVTSRMLFPTSAQESSRGLPDANDLCLGLQSLSLTGWDRPWSTQDSDSSAQSSTHSVLSMLHNPLGNVLGKPPLSFLPLDPLGSDLVDKFPAPSVRGSRLDTRPILDSRSSSPSDSDTSGFSSGSDHLSDLISSLRISPPLPFLSLSGGGPRDPLKMGVGSRMDQEQAALAAVTPSPTSASKRWPGASVWPSWDLLEAPKDPFSIEREARLHRQAAAVNEATCTWSGQLPPRNYKNPIYSCKVFLGGVPWDITEAGLVNTFRVFGSLSVEWPGKDGKHPRCPPKGYVYLVFELEKSVRSLLQACSHDPLSPDGLSEYYFKMSSRRMRCKEVQVIPWVLADSNFVRSPSQRLDPSRTVFVGALHGMLNAEALAAILNDLFGGVVYAGIDTDKHKYPIGSGRVTFNNQRSYLKAVSAAFVEIKTTKFTKKVQIDPYLEDSLCHICSSQPGPFFCRDQVCFKYFCRSCWHWRHSMEGLRHHSPLMRNQKNRDSS

SEQ ID NO: 22263 - protein, 491 aa, Homo sapiens
  Payload ID: 4490
  Gene Symbol: CPEB1
  Gene Name: cytoplasmic polyadenylation element binding protein 1
  Uniprot ID: Q9BZB8
  ENSP ID: ENSP00000482116
MLFPTSAQESSRGLPDANDLCLGLQSLSLTGWDRPWSTQDSDSSAQSSTHSVLSMLHNPLGNVLGKPPLSFLPLDPLGSDLVDKFPAPSVRGSRLDTRPILDSRSSSPSDSDTSGFSSGSDHLSDLISSLRISPPLPFLSLSGGGPRDPLKMGVGSRMDQEQAALAAVTPSPTSASKRWPGASVWPSWDLLEAPKDPFSIEREARLHRQAAAVNEATCTWSGQLPPRNYKNPIYSCKVFLGGVPWDITEAGLVNTFRVFGSLSVEWPGKDGKHPRCPPKGNMPKGYVYLVFELEKSVRSLLQACSHDPLSPDGLSEYYFKMSSRRMRCKEVQVIPWVLADSNFVRSPSQRLDPSRTVFVGALHGMLNAEALAAILNDLFGGVVYAGIDTDKHKYPIGSGRVTFNNQRSYLKAVSAAFVEIKTTKFTKKVQIDPYLEDSLCHICSSQPGPFFCRDQVCFKYFCRSCWHWRHSMEGLRHHSPLMRNQKNRDSS

SEQ ID NO: 22264 - protein, 486 aa, Homo sapiens; identical to SEQ ID NO: 22254
  Payload ID: 4490
  Gene Symbol: CPEB1
  Gene Name: cytoplasmic polyadenylation element binding protein 1
  Uniprot ID: Q9BZB8
  ENSP ID: ENSP00000482965

SEQ ID NO: 22265 - protein, 491 aa, Homo sapiens; identical to SEQ ID NO: 22263
  Payload ID: 4490
  Gene Symbol: CPEB1
  Gene Name: cytoplasmic polyadenylation element binding protein 1
  Uniprot ID: Q9BZB8
  ENSP ID: ENSP00000483590

SEQ ID NO: 22266 - protein, 486 aa, Homo sapiens; identical to SEQ ID NO: 22254
  Payload ID: 4490
  Gene Symbol: CPEB1
  Gene Name: cytoplasmic polyadenylation element binding protein 1
  Uniprot ID: Q9BZB8
  ENSP ID: ENSP00000483857

SEQ ID NO: 22267 - protein, 561 aa, Homo sapiens; identical to SEQ ID NO: 22256
  Payload ID: 4490
  Gene Symbol: CPEB1
  Gene Name: cytoplasmic polyadenylation element binding protein 1
  ENSP ID: ENSP00000483951

SEQ ID NO: 22268 - protein, 486 aa, Homo sapiens; identical to SEQ ID NO: 22254
  Payload ID: 4490
  Gene Symbol: CPEB1
  Gene Name: cytoplasmic polyadenylation element binding protein 1
  Uniprot ID: Q9BZB8
  ENSP ID: ENSP00000484549

SEQ ID NO: 22269 - protein, 486 aa, Homo sapiens; identical to SEQ ID NO: 22254
  Payload ID: 4490
  Gene Symbol: CPEB1
  Gene Name: cytoplasmic polyadenylation element binding protein 1
  Uniprot ID: Q9BZB8
  ENSP ID: ENSP00000487757

SEQ ID NO: 22270 - protein, 17 aa, Homo sapiens
  Payload ID: 4490
  Gene Symbol: CPEB1
  Gene Name: cytoplasmic polyadenylation element binding protein 1
  ENSP ID: ENSP00000487897
MLFPTSAQESSRGLPDA

SEQ ID NO: 22271 - protein, 626 aa, Homo sapiens; identical to SEQ ID NO: 22258
  Payload ID: 4490
  Gene Symbol: CPEB1
  Gene Name: cytoplasmic polyadenylation element binding protein 1
  ENSP ID: ENSP00000488102

SEQ ID NO: 22272 - protein, 138 aa, Homo sapiens
  Payload ID: 4490
  Gene Symbol: CPEB1
  Gene Name: cytoplasmic polyadenylation element binding protein 1
  ENSP ID: ENSP00000488206
MLFPTSAQESSRGLPDANDLCLGLQSLSLTGWDRPWSTQDSDSSAQSSTHSVKPSHFSTSALPVSVRGWSQRPFKDGGRVSDGPRASCSCCSHSLPNQCFKEMARSFCVAVLGPPRSSQRPLQHRERGQAAPTSCSCE

SEQ ID NO: 22273 - protein, 486 aa, Homo sapiens; identical to SEQ ID NO: 22254
  Payload ID: 4490
  Gene Symbol: CPEB1
  Gene Name: cytoplasmic polyadenylation element binding protein 1
  Uniprot ID: Q9BZB8
  ENSP ID: ENSP00000488352

SEQ ID NO: 22274 - protein, 556 aa, Homo sapiens
  Payload ID: 4490
  Gene Symbol: CPEB1
  Gene Name: cytoplasmic polyadenylation element binding protein 1
  ENSP ID: ENSP00000488484
EEEAGRIKDCWDNQEAPALSTCSNANIFRRINAILDNSLDFSRVCTTPINRGIHDHLPDFQDSEETVTSRMLFPTSAQESSRGLPDANDLCLGLQSLSLTGWDRPWSTQDSDSSAQSSTHSVLSMLHNPLGNVLGKPPLSFLPLDPLGSDLVDKFPAPSVRGSRLDTRPILDSRSSSPSDSDTSGFSSGSDHLSDLISSLRISPPLPFLSLSGGGPRDPLKMGVGSRMDQEQAALAAVTPSPTSASKRWPGASVWPSWDLLEAPKDPFSIEREARLHRQAAAVNEATCTWSGQLPPRNYKNPIYSCKVFLGGVPWDITEAGLVNTFRVFGSLSVEWPGKDGKHPRCPPKGYVYLVFELEKSVRSLLQACSHDPLSPDGLSEYYFKMSSRRMRCKEVQVIPWVLADSNFVRSPSQRLDPSRTVFVGALHGMLNAEALAAILNDLFGGVVYAGIDTDKHKYPIGSGRVTFNNQRSYLKAVSAAFVEIKTTKFTKKVQIDPYLEDSLCHICSSQPGPFFCRDQVCFKYFCRSCWHWRHSMEGLRHHSPLMRNQKNRDSS

SEQ ID NO: 22275 - protein, 35 aa, Homo sapiens; identical to SEQ ID NO: 22252
  Payload ID: 4490
  Gene Symbol: CPEB1
  Gene Name: cytoplasmic polyadenylation element binding protein 1
  ENSP ID: ENSP00000488508

SEQ ID NO: 22276 - protein, 114 aa, Homo sapiens; identical to SEQ ID NO: 22251
  Payload ID: 4490
  Gene Symbol: CPEB1
  Gene Name: cytoplasmic polyadenylation element binding protein 1
  ENSP ID: ENSP00000488628

SEQ ID NO: 22277 - protein, 564 aa, Homo sapiens; identical to SEQ ID NO: 22260
  Payload ID: 4490
  Gene Symbol: CPEB1
  Gene Name: cytoplasmic polyadenylation element binding protein 1
  ENSP ID: ENSP00000488842

SEQ ID NO: 22278 - protein, 597 aa, Homo sapiens; identical to SEQ ID NO: 20124
  Payload ID: 4491
  Gene Symbol: CPEB2
  Gene Name: cytoplasmic polyadenylation element binding protein 2
  ENSP ID: ENSP00000259997

SEQ ID NO: 22279 - protein, 559 aa, Homo sapiens; identical to SEQ ID NO: 20119
  Payload ID: 4491
  Gene Symbol: CPEB2
  Gene Name: cytoplasmic polyadenylation element binding protein 2
  Uniprot ID: Q7Z5Q1
  ENSP ID: ENSP00000334058

SEQ ID NO: 22280 - protein, 567 aa, Homo sapiens; identical to SEQ ID NO: 20122
  Payload ID: 4491
  Gene Symbol: CPEB2
  Gene Name: cytoplasmic polyadenylation element binding protein 2
  Uniprot ID: Q7Z5Q1
  ENSP ID: ENSP00000371832

SEQ ID NO: 22281 - protein, 562 aa, Homo sapiens; identical to SEQ ID NO: 20121
  Payload ID: 4491
  Gene Symbol: CPEB2
  Gene Name: cytoplasmic polyadenylation element binding protein 2
  Uniprot ID: Q7Z5Q1
  ENSP ID: ENSP00000371838

SEQ ID NO: 22282 - protein, 1007 aa, Homo sapiens; identical to SEQ ID NO: 20120
  Payload ID: 4491
  Gene Symbol: CPEB2
  Gene Name: cytoplasmic polyadenylation element binding protein 2
  Uniprot ID: Q7Z5Q1
  ENSP ID: ENSP00000414270

SEQ ID NO: 22283 - protein, 167 aa, Homo sapiens; identical to SEQ ID NO: 20118
  Payload ID: 4491
  Gene Symbol: CPEB2
  Gene Name: cytoplasmic polyadenylation element binding protein 2
  ENSP ID: ENSP00000423890

SEQ ID NO: 22284 - protein, 589 aa, Homo sapiens; identical to SEQ ID NO: 20117
  Payload ID: 4491
  Gene Symbol: CPEB2
  Gene Name: cytoplasmic polyadenylation element binding protein 2
  Uniprot ID: Q7Z5Q1
  ENSP ID: ENSP00000424084

SEQ ID NO: 22285 - protein, 1034 aa, Homo sapiens; identical to SEQ ID NO: 20123
  Payload ID: 4491
  Gene Symbol: CPEB2
  Gene Name: cytoplasmic polyadenylation element binding protein 2
  Uniprot ID: Q7Z5Q1
  ENSP ID: ENSP00000443985

SEQ ID NO: 22286 - protein, 698 aa, Homo sapiens
  Payload ID: 4492
  Gene Symbol: CPEB3
  Gene Name: cytoplasmic polyadenylation element binding protein 3
  Uniprot ID: Q8NE35
  ENSP ID: ENSP00000265997
MQDDLLMDKSKTQPQPQQQQRQQQQPQPESSVSEAPSTPLSSETPKPEENSAVPALSPAAAPPAPNGPDKMQMESPLLPGLSFHQPPQQPPPPQEPAAPGASLSPSFGSTWSTGTTNAVEDSFFQGITPVNGTMLFQNFPHHVNPVFGGTFSPQIGLAQTQHHQQPPPPAPAPQPAQPAQPPQAQPPQQRRSPASPSQAPYAQRSAAAAYGHQPIMTSKPSSSSAVAAAAAAAAASSASSSWNTHQSVNAAWSAPSNPWGGLQAGRDPRRAVGVGVGVGVGVPSPLNPISPLKKPFSSNVIAPPKFPRAAPLTSKSWMEDNAFRTDNGNNLLPFQDRSRPYDTFNLHSLENSLMDMIRTDHEPLKGKHYPPSGPPMSFADIMWRNHFAGRMGINFHHPGTDNIMALNNAFLDDSHGDQALSSGLSSPTRCQNGERVERYSRKVFVGGLPPDIDEDEITASFRRFGPLVVDWPHKAESKSYFPPKGYAFLLFQEESSVQALIDACLEEDGKLYLCVSSPTIKDKPVQIRPWNLSDSDFVMDGSQPLDPRKTIFVGGVPRPLRAVELAMIMDRLYGGVCYAGIDTDPELKYPKGAGRVAFSNQQSYIAAISARFVQLQHNDIDKRVEVKPYVLDDQMCDECQGTRCGGKFAPFFCANVTCLQYYCEYCWASIHSRAGREFHKPLVKEGGDRPRHVPFRWS

SEQ ID NO: 22287 - protein, 684 aa, Homo sapiens
  Payload ID: 4492
  Gene Symbol: CPEB3
  Gene Name: cytoplasmic polyadenylation element binding protein 3
  Uniprot ID: Q8NE35
  ENSP ID: ENSP00000398310
MQDDLLMDKSKTQPQPQQQQRQQQQPQPESSVSEAPSTPLSSETPKPEENSAVPALSPAAAPPAPNGPDKMQMESPLLPGLSFHQPPQQPPPPQEPAAPGASLSPSFGSTWSTGTTNAVEDSFFQGITPVNGTMLFQNFPHHVNPVFGGTFSPQIGLAQTQHHQQPPPPAPAPQPAQPAQPPQAQPPQQRRSPASPSQAPYAQRSAAAAYGHQPIMTSKPSSSSAVAAAAAAAAASSASSSWNTHQSVNAAWSAPSNPWGGLQAGRDPRRAVGVGVGVGVGVPSPLNPISPLKKPFSSNVIAPPKFPRAAPLTSKSWMEDNAFRTDNGNNLLPFQDRSRPYDTFNLHSLENSLMDMIRTDHEPLKGRMGINFHHPGTDNIMALNSRSSLFPFEDAFLDDSHGDQALSSGLSSPTRCQNGERVERYSRKVFVGGLPPDIDEDEITASFRRFGPLVVDWPHKAESKSYFPPKGYAFLLFQEESSVQALIDACLEEDGKLYLCVSSPTIKDKPVQIRPWNLSDSDFVMDGSQPLDPRKTIFVGGVPRPLRAVELAMIMDRLYGGVCYAGIDTDPELKYPKGAGRVAFSNQQSYIAAISARFVQLQHNDIDKRVEVKPYVLDDQMCDECQGTRCGGKFAPFFCANVTCLQYYCEYCWASIHSRAGREFHKPLVKEGGDRPRHVPFRWS

SEQ ID NO: 22288 - protein, 698 aa, Homo sapiens; identical to SEQ ID NO: 22286
  Payload ID: 4492
  Gene Symbol: CPEB3
  Gene Name: cytoplasmic polyadenylation element binding protein 3
  Uniprot ID: Q8NE35
  ENSP ID: ENSP00000482128

SEQ ID NO: 22289 - protein, 729 aa, Homo sapiens
  Payload ID: 4493
  Gene Symbol: CPEB4
  Gene Name: cytoplasmic polyadenylation element binding protein 4
  Uniprot ID: Q17RY0
  ENSP ID: ENSP00000265085
MGDYGFGVLVQSNTGNKSAFPVRFHPHLQPPHHHQNATPSPAAFINNNTAANGSSAGSAWLFPAPATHNIQDEILGSEKAKSQQQEQQDPLEKQQLSPSPGQEAGILPETEKAKSEENQGDNSSENGNGKEKIRIESPVLTGFDYQEATGLGTSTQPLTSSASSLTGFSNWSAAIAPSSSTIINEDASFFHQGGVPAASANNGALLFQNFPHHVSPGFGGSFSPQIGPLSQHHPHHPHFQHHHSQHQQQRRSPASPHPPPFTHRNAAFNQLPHLANNLNKPPSPWSSYQSPSPTPSSSWSPGGGGYGGWGGSQGRDHRRGLNGGITPLNSISPLKKNFASNHIQLQKYARPSSAFAPKSWMEDSLNRADNIFPFPDRPRTFDMHSLESSLIDIMRAENDTIKGRLNYSYPGSDSSLLINARTYGRRRGQSSLFPMEDGFLDDGRGDQPLHSGLGSPHCFSHQNGERVERYSRKVFVGGLPPDIDEDEITASFRRFGPLIVDWPHKAESKSYFPPKGYAFLLFQDESSVQALIDACIEEDGKLYLCVSSPTIKDKPVQIRPWNLSDSDFVMDGSQPLDPRKTIFVGGVPRPLRAVELAMIMDRLYGGVCYAGIDTDPELKYPKGAGRVAFSNQQSYIAAISARFVQLQHGEIDKRVEVKPYVLDDQLCDECQGARCGGKFAPFFCANVTCLQYYCEYCWAAIHSRAGREFHKPLVKEGGDRPRHISFRWN

SEQ ID NO: 22290 - protein, 712 aa, Homo sapiens
  Payload ID: 4493
  Gene Symbol: CPEB4
  Gene Name: cytoplasmic polyadenylation element binding protein 4
  Uniprot ID: Q17RY0
  ENSP ID: ENSP00000334533
MGDYGFGVLVQSNTGNKSAFPVRFHPHLQPPHHHQNATPSPAAFINNNTAANGSSAGSAWLFPAPATHNIQDEILGSEKAKSQQQEQQDPLEKQQLSPSPGQEAGILPETEKAKSEENQGDNSSENGNGKEKIRIESPVLTGFDYQEATGLGTSTQPLTSSASSLTGFSNWSAAIAPSSSTIINEDASFFHQGGVPAASANNGALLFQNFPHHVSPGFGGSFSPQIGPLSQHHPHHPHFQHHHSQHQQQRRSPASPHPPPFTHRNAAFNQLPHLANNLNKPPSPWSSYQSPSPTPSSSWSPGGGGYGGWGGSQGRDHRRGLNGGITPLNSISPLKKNFASNHIQLQKYARPSSAFAPKSWMEDSLNRADNIFPFPDRPRTFDMHSLESSLIDIMRAENDTIKARTYGRRRGQSSLFPMEDGFLDDGRGDQPLHSGLGSPHCFSHQNGERVERYSRKVFVGGLPPDIDEDEITASFRRFGPLIVDWPHKAESKSYFPPKGYAFLLFQDESSVQALIDACIEEDGKLYLCVSSPTIKDKPVQIRPWNLSDSDFVMDGSQPLDPRKTIFVGGVPRPLRAVELAMIMDRLYGGVCYAGIDTDPELKYPKGAGRVAFSNQQSYIAAISARFVQLQHGEIDKRVEVKPYVLDDQLCDECQGARCGGKFAPFFCANVTCLQYYCEYCWAAIHSRAGREFHKPLVKEGGDRPRHISFRWN

SEQ ID NO: 22291 - protein, 322 aa, Homo sapiens
  Payload ID: 4493
  Gene Symbol: CPEB4
  Gene Name: cytoplasmic polyadenylation element binding protein 4
  Uniprot ID: Q17RY0
  ENSP ID: ENSP00000427990
MHSLESSLIDIMRAENDTIKGQSSLFPMEDGFLDDGRGDQPLHSGLGSPHCFSHQNGERVERYSRKVFVGGLPPDIDEDEITASFRRFGPLIVDWPHKAESKSYFPPKGYAFLLFQDESSVQALIDACIEEDGKLYLCVSSPTIKDKPVQIRPWNLSDSDFVMDGSQPLDPRKTIFVGGVPRPLRAVELAMIMDRLYGGVCYAGIDTDPELKYPKGAGRVAFSNQQSYIAAISARFVQLQHGEIDKRVEVKPYVLDDQLCDECQGARCGGKFAPFFCANVTCLQYYCEYCWAAIHSRAGREFHKPLVKEGGDRPRHISFRWN

SEQ ID NO: 22292 - protein, 639 aa, Homo sapiens
  Payload ID: 4493
  Gene Symbol: CPEB4
  Gene Name: cytoplasmic polyadenylation element binding protein 4
  ENSP ID: ENSP00000429048
MGDYGFGVLVQSNTGNKSAFPVRFHPHLQPPHHHQNATPSPAAFINNNTAANGSSAGSAWLFPAPATHNIQDEILGSEKAKSQQQEQQDPLEKQQLSPSPGQEAGILPETEKAKSEENQGDNSSENGNGKEKIRIESPVLTGFDYQEATGLGTSTQPLTSSASSLTGFSNWSAAIAPSSSTIINEDASFFHQGGVPAASANNGALLFQNFPHHVSPGFGGSFSPQIGPLSQHHPHHPHFQHHHSQHQQQRRSPASPHPPPFTHRNAAFNQLPHLANNLNKPPSPWSSYQSPSPTPSSSWSPGGGGYGGWGGSQGRDHRRGLNGGITPLNSISPLKKNFASNHIQLQKYARPSSAFAPKSWMEDSLNRADNIFPFPDRPRTFDMHSLESSLIDIMRAENDTIKGQSSLFPMEDGFLDDGRGDQPLHSGLGSPHCFSHQNGERVERYSRKVFVGGLPPDIDEDEITASFRRFGPLIVDWPHKAESKSYFPPKGYAFLLFQDESSVQALIDACIEEDGKLYLCVSSPTIKDKPVQIRPWNLSDSDFVMDGSQPLDPRKTIFVGGVPRPLRAVELAMIMDRLYGGVCYAGIDTDPELKYPKGAGRVAFSNQQSYIAAISARFVQLQHGEIDKRVSLILHFGKF

SEQ ID NO: 22293 - protein, 704 aa, Homo sapiens
  Payload ID: 4493
  Gene Symbol: CPEB4
  Gene Name: cytoplasmic polyadenylation element binding protein 4
  ENSP ID: ENSP00000429092
MGDYGFGVLVQSNTGNKSAFPVRFHPHLQPPHHHQNATPSPAAFINNNTAANGSSAGSAWLFPAPATHNIQDEILGSEKAKSQQQEQQDPLEKQQLSPSPGQEAGILPETEKAKSEENQGDNSSENGNGKEKIRIESPVLTGFDYQEATGLGTSTQPLTSSASSLTGFSNWSAAIAPSSSTIINEDASFFHQGGVPAASANNGALLFQNFPHHVSPGFGGSFSPQIGPLSQHHPHHPHFQHHHSQHQQQRRSPASPHPPPFTHRNAAFNQLPHLANNLNKPPSPWSSYQSPSPTPSSSWSPGGGGYGGWGGSQGRDHRRGLNGGITPLNSISPLKKNFASNHIQLQKYARPSSAFAPKSWMEDSLNRADNIFPFPDRPRTFDMHSLESSLIDIMRAENDTIKGQSSLFPMEDGFLDDGRGDQPLHSGLGSPHCFSHQNGERVERYSRKVFVGGLPPDIDEDEITASFRRFGPLIVDWPHKAESKSYFPPKGYAFLLFQDESSVQALIDACIEEDGKLYLCVSSPTIKDKPVQIRPWNLSDSDFVMDGSQPLDPRKTIFVGGVPRPLRAVELAMIMDRLYGGVCYAGIDTDPELKYPKGAGRVAFSNQQSYIAAISARFVQLQHGEIDKRVEVKPYVLDDQLCDECQGARCGGKFAPFFCANVTCLQYYCEYCWAAIHSRAGREFHKPLVKEGGDRPRHISFRWN

SEQ ID NO: 22294 - protein, 147 aa, Homo sapiens
  Payload ID: 4493
  Gene Symbol: CPEB4
  Gene Name: cytoplasmic polyadenylation element binding protein 4
  ENSP ID: ENSP00000429423
  MOD_RES (1)..(1): Any amino acid
XDHRRGLNGGITPLNSISPLKKNFASNHIQLQKYARPSSAFAPKSWMEDSLNRADNIFPFPDRPRTFDMHSLESSLIDIMRAENDTIKGRLNYSYPGSDSSLLINGQSSLFPMEDGFLDDGRGDQPLHSGLGSPHCFSHQNGERVER

SEQ ID NO: 22295 - protein, 339 aa, Homo sapiens
  Payload ID: 4493
  Gene Symbol: CPEB4
  Gene Name: cytoplasmic polyadenylation element binding protein 4
  ENSP ID: ENSP00000430345
MHSLESSLIDIMRAENDTIKGRLNYSYPGSDSSLLINGQSSLFPMEDGFLDDGRGDQPLHSGLGSPHCFSHQNGERVERYSRKVFVGGLPPDIDEDEITASFRRFGPLIVDWPHKAESKSYFPPKGYAFLLFQDESSVQALIDACIEEDGKLYLCVSSPTIKDKPVQIRPWNLSDSDFVMDGSQPLDPRKTIFVGGVPRPLRAVELAMIMDRLYGGVCYAGIDTDPELKYPKGAGRVAFSNQQSYIAAISARFVQLQHGEIDKRVEVKPYVLDDQLCDECQGARCGGKFAPFFCANVTCLQYYCEYCWAAIHSRAGREFHKPLVKEGGDRPRHISFRWN

SEQ ID NO: 22296 - protein, 682 aa, Homo sapiens
  Payload ID: 4494
  Gene Symbol: CKAP2
  Gene Name: cytoskeleton associated protein 2
  Uniprot ID: Q8WWK9
  ENSP ID: ENSP00000258607
MSTPAVPQDLQLPPSQRAQSAFKEQRRQKLKEHLLRRKTLFAYKQENEMLSSRDQRVVTSEDQVQEGTKVLKLKTKMADKENMKRPAESKNNTVVGKHCIPLKPSNELTNSTVVIDTHKPKDSNQTPHLLLTEDDPQSQHMTLSQAFHLKNNSKKKQMTTEKQKQDANMPKKPVLGSYRGQIVQSKINSFRKPLQVKDESSAATKKLSATIPKATKPQPVNTSSVTVKSNRSSNMTATTKFVSTTSQNTQLVRPPIRSHHSNTRDTVKQGISRTSANVTIRKGPHEKELLQSKTALSSVKTSSSQGIIRNKTLSRSIASEVIARPASLSNDKLMEKSEPVDQRRHTAGKAIVDSRSAQPKETSEERKARLSEWKAGKGRVLKRPPNSVVTQHEPAGQNEKPVGSFWTTMAEEDEQRLFTEKVNNTFSECLNLINEGCPKEDILVTLNDLIKNIPDAKKLVKYWICLALIEPITSPIENIIAIYEKAILAGAQPIEEMRHTIVDILTMKSQEKANLGENMEKSCASKEEVKEVSIEDTGVDVDPEKLEMESKLHRNLLFQDCEKEQDNKTKDPTHDVKTPNTETRTSCLIKYNVSTTPYLQSVKKKVQFDGTNSAFKELKFLTPVRRSRRLQEKTSKLPDMLKDHYPCVSSLEQLTELGRETDAFVCRPNAALCRVYYEADTT

SEQ ID NO: 22297 - protein, 494 aa, Homo sapiens
  Payload ID: 4494
  Gene Symbol: CKAP2
  Gene Name: cytoskeleton associated protein 2
  Uniprot ID: Q8WWK9
  ENSP ID: ENSP00000367273
MSTPAVPQDLQLPPSQRAQSAFKEQRRQKLKEHLLRRKTLFAYKQENEMLSSRDQRVVTSEDQVQEGTKVLKLKTKMADKENMKRPAESKNNTVVGKHCIPLKPSNELTNSTVVIDTHKPKDSNQTPHLLLTEDDPQSQHMTLSQAFHLKNNSKKKQMTTEKQKQDANMPKKPVLGSYRGQIVQSKINSFRKPLQVKDESSAATKKLSATIPKATKPQPVNTSSVTVKSNRSSNMTATTKFVSTTSQNTQLVRPPIRSHHSNTRDTVKQGISRTSANVTIRKGPHEKELLQSKTALSSVKTSSSQGIIRNKTLSRSIASEVIARPASLSNDKLMEKSEPVDQRRHTAGKAIVDSRSAQPKETSEERKARLSEWKAGKGRVLKRPPNSVVTQHEPAGQNEKPVGSFWTTMAEEDEQRLFTEKVNNTFSECLNLINEGCPKEDILVTLNDLIKNIPDAKKLVKYWICLALIEPITSPIENIIAIYEKAILAGAQVR

SEQ ID NO: 22298 - protein, 683 aa, Homo sapiens
  Payload ID: 4494
  Gene Symbol: CKAP2
  Gene Name: cytoskeleton associated protein 2
  Uniprot ID: Q8WWK9
  ENSP ID: ENSP00000367276
MSTPAVPQDLQLPPSQRAQSAFKEQRRQKLKEHLLRRKTLFAYKQENEMLSSSRDQRVVTSEDQVQEGTKVLKLKTKMADKENMKRPAESKNNTVVGKHCIPLKPSNELTNSTVVIDTHKPKDSNQTPHLLLTEDDPQSQHMTLSQAFHLKNNSKKKQMTTEKQKQDANMPKKPVLGSYRGQIVQSKINSFRKPLQVKDESSAATKKLSATIPKATKPQPVNTSSVTVKSNRSSNMTATTKFVSTTSQNTQLVRPPIRSHHSNTRDTVKQGISRTSANVTIRKGPHEKELLQSKTALSSVKTSSSQGIIRNKTLSRSIASEVIARPASLSNDKLMEKSEPVDQRRHTAGKAIVDSRSAQPKETSEERKARLSEWKAGKGRVLKRPPNSVVTQHEPAGQNEKPVGSFWTTMAEEDEQRLFTEKVNNTFSECLNLINEGCPKEDILVTLNDLIKNIPDAKKLVKYWICLALIEPITSPIENIIAIYEKAILAGAQPIEEMRHTIVDILTMKSQEKANLGENMEKSCASKEEVKEVSIEDTGVDVDPEKLEMESKLHRNLLFQDCEKEQDNKTKDPTHDVKTPNTETRTSCLIKYNVSTTPYLQSVKKKVQFDGTNSAFKELKFLTPVRRSRRLQEKTSKLPDMLKDHYPCVSSLEQLTELGRETDAFVCRPNAALCRVYYEADTT

SEQ ID NO: 22299 - protein, 634 aa, Homo sapiens
  Payload ID: 4494
  Gene Symbol: CKAP2
  Gene Name: cytoskeleton associated protein 2
  Uniprot ID: Q8WWK9
  ENSP ID: ENSP00000417830
MLSSRDQRVVTSEDQVQEGTKVLKLKTKMADKENMKRPAESKNNTVVGKHCIPLKPSNELTNSTVVIDTHKPKDSNQTPHLLLTEDDPQSQHMTLSQAFHLKNNSKKKQMTTEKQKQDANMPKKPVLGSYRGQIVQSKINSFRKPLQVKDESSAATKKLSATIPKATKPQPVNTSSVTVKSNRSSNMTATTKFVSTTSQNTQLVRPPIRSHHSNTRDTVKQGISRTSANVTIRKGPHEKELLQSKTALSSVKTSSSQGIIRNKTLSRSIASEVIARPASLSNDKLMEKSEPVDQRRHTAGKAIVDSRSAQPKETSEERKARLSEWKAGKGRVLKRPPNSVVTQHEPAGQNEKPVGSFWTTMAEEDEQRLFTEKVNNTFSECLNLINEGCPKEDILVTLNDLIKNIPDAKKLVKYWICLALIEPITSPIENIIAIYEKAILAGAQPIEEMRHTIVDILTMKSQEKANLGENMEKSCASKEEVKEVSIEDTGVDVDPEKLEMESKLHRNLLFQDCEKEQDNKTKDPTHDVKTPNTETRTSCLIKYNVSTTPYLQSVKKKVQFDGTNSAFKELKFLTPVRRSRRLQEKTSKLPDMLKDHYPCVSSLEQLTELGRETDAFVCRPNAALCRVYYEADTT

SEQ ID NO: 22300 - protein, 97 aa, Homo sapiens
  Payload ID: 4494
  Gene Symbol: CKAP2
  Gene Name: cytoskeleton associated protein 2
  ENSP ID: ENSP00000418224
MLSSSRDQRVVTSEDQVQEGTKVLKLKTKMADKENMKRPAESKNNTVVGKHCIPLKPSNELTNSTVVIDTHKPKDSNQTPHLLLTEDDPQSQHMTLS

SEQ ID NO: 22301 - protein, 93 aa, Homo sapiens
  Payload ID: 4494
  Gene Symbol: CKAP2
  Gene Name: cytoskeleton associated protein 2
  ENSP ID: ENSP00000418431
MKRPAESKNNTVVGKHCIPLKPSNELTNSTVVIDTHKPKDSNQTPHLLLTEDDPQSQHMTLSQAFHLKNNSKKKQMTTEKQKQDANMPKKPVL

SEQ ID NO: 22302 - protein, 745 aa, Homo sapiens
  Payload ID: 4495
  Gene Symbol: CKAP2L
  Gene Name: cytoskeleton associated protein 2-like
  Uniprot ID: Q8IYA6
  ENSP ID: ENSP00000305204
MVGPGPTAAAAVEERQRKLQEYLAAKGKLKSQNTKPYLKSKNNCQNQPPSKSTIRPKNDVTNHVVLPVKPKRSISIKLQPRPPNTAGSQKPKLEPPKLLGKRLTSECVSSNPYSKPSSKSFQQCEAGSSTTGELSRKPVGSLNIEQLKTTKQQLTDQGNGKCIDFMNNIHVENESLDNFLKETNKENLLDILTEPERKPDPKLYTRSKPKTDSYNQTKNSLVPKQALGKSSVNSAVLKDRVNKQFVGETQSRTFPVKSQQLSRGADLARPGVKPSRTVPSHFIRTLSKVQSSKKPVVKNIKDIKVNRSQYERPNETKIRSYPVTEQRVKHTKPRTYPSLLQGEYNNRHPNIKQDQKSSQVCIPQTSCVLQKSKAISQRPNLTVGRFNSAIPSTPSIRPNGTSGNKHNNNGFQQKAQTLDSKLKKAVPQNHFLNKTAPKTQADVTTVNGTQTNPNIKKKATAEDRRKQLEEWQKSKGKTYKRPPMELKTKRKVIKEMNISFWKSIEKEEEEKKAQLELSSKINNTLTECLNLIEGGVPSNEILNILSSIPEAEKFAKFWICKAKLLASKGTFDVIGLYEEAIKNGATPIQELRKVVLNILQDSNRTTEGITSDSLVAETSITSVEELAKKMESVKSCLSPKEREQVTATPRIAKAEQHNYPGIKLQIGPIPRINGMPEVQDMKFITPVRRSSRIERAVSRYPEMLQEHDLVVASLDELLEVEETKCFIFRRNEALPVTLGFQTPES

SEQ ID NO: 22303 - protein, 188 aa, Homo sapiens
  Payload ID: 4495
  Gene Symbol: CKAP2L
  Gene Name: cytoskeleton associated protein 2-like
  ENSP ID: ENSP00000414834
MVGPGPTAAAAVEERQRKLQEYLAAKGKLKSQNTKPYLKSKNNCQNQPPSKSTIRPKNDVTNHVVLPVKPKRSISIKLQPRPPNTAGSQKPKLEPPKLLGKRLTSECVSSNPYSKPSSKSFQQCEAGSSTTGELSRKPVGSLNIEQLKTTKQQLTDQGNAKSTDFGLQVEKGCSPEPFSEQDSSQNSS

SEQ ID NO: 22304 - protein, 1972 aa, Homo sapiens
  Payload ID: 4496
  Gene Symbol: CKAP5
  Gene Name: cytoskeleton associated protein 5
  Uniprot ID: Q14008
  ENSP ID: ENSP00000310227
MGDDSEWLKLPVDQKCEHKLWKARLSGYEEALKIFQKIKDEKSPEWSKFLGLIKKFVTDSNAVVQLKGLEAALVYVENAHVAGKTTGEVVSGVVSKVFNQPKAKAKELGIEICLMYIEIEKGEAVQEELLKGLDNKNPKIIVACIETLRKALSEFGSKIILLKPIIKVLPKLFESREKAVRDEAKLIAVEIYRWIRDALRPPLQNINSVQLKELEEEWVKLPTSAPRPTRFLRSQQELEAKLEQQQSAGGDAEGGGDDGDEVPQIDAYELLEAVEILSKLPKDFYDKIEAKKWQERKEALESVEVLIKNPKLEAGDYADLVKALKKVVGKDTNVMLVALAAKCLTGLAVGLRKKFGQYAGHVVPTILEKFKEKKPQVVQALQEAIDAIFLTTTLQNISEDVLAVMDNKNPTIKQQTSLFIARSFRHCTASTLPKSLLKPFCAALLKHINDSAPEVRDAAFEALGTALKVVGEKAVNPFLADVDKLKLDKIKECSEKVELIHGKKAGLAADKKEFKPLPGRTAASGAAGDKDTKDISAPKPGPLKKAPAAKAGGPPKKGKPAAPGGAGNTGTKNKKGLETKEIVEPELSIEVCEEKASAVLPPTCIQLLDSSNWKERLACMEEFQKAVELMDRTEMPCQALVRMLAKKPGWKETNFQVMQMKLHIVALIAQKGNFSKTSAQVVLDGLVDKIGDVKCGNNAKEAMTAIAEACMLPWTAEQVVSMAFSQKNPKNQSETLNWLSNAIKEFGFSGLNVKAFISNVKTALAATNPAVRTAAITLLGVMYLYVGPSLRMFFEDEKPALLSQIDAEFEKMQGQSPPAPTRGISKHSTSGTDEGEDGDEPDDGSNDVVDLLPRTEISDKITSELVSKIGDKNWKIRKEGLDEVAGIINDAKFIQPNIGELPTALKGRLNDSNKILVQQTLNILQQLAVAMGPNIKQHVKNLGIPIITVLGDSKNNVRAAALATVNAWAEQTGMKEWLEGEDLSEELKKENPFLRQELLGWLAEKLPTLRSTPTDLILCVPHLYSCLEDRNGDVRKKAQDALPFFMMHLGYEKMAKATGKLKPTSKDQVLAMLEKAKVNMPAKPAPPTKATSKPMGGSAPAKFQPASAPAEDCISSSTEPKPDPKKAKAPGLSSKAKSAQGKKMPSKTSLKEDEDKSGPIFIVVPNGKEQRMKDEKGLKVLKWNFTTPRDEYIEQLKTQMSSCVAKWLQDEMFHSDFQHHNKALAVMVDHLESEKEGVIGCLDLILKWLTLRFFDTNTSVLMKALEYLKLLFTLLSEEEYHLTENEASSFIPYLVVKVGEPKDVIRKDVRAILNRMCLVYPASKMFPFIMEGTKSKNSKQRAECLEELGCLVESYGMNVCQPTPGKALKEIAVHIGDRDNAVRNAALNTIVTVYNVHGDQVFKLIGNLSEKDMSMLEERIKRSAKRPSAAPIKQVEEKPQRAQNISSNANMLRKGPAEDMSSKLNQARSMSGHPEAAQMVRREFQLDLDEIENDNGTVRCEMPELVQHKLDDIFEPVLIPEPKIRAVSPHFDDMHSNTASTINFIISQVASGDINTSIQALTQLFQIESLAREASTGVLKDLMHGLITLMLDSRIEDLEEGQQVIRSVNLLVVKVLEKSDQTNILSALLVLLQDSLLATASSPKFSELVMKCLWRMVRLLPDTINSINLDRILLDIHIFMKVFPKEKLKQCKSEFPIRTLKTLLHTLCKLKGPKILDHLTMIDNKNESELEAHLCRMMKHSMDQTGSKSDKETEKGASRIDEKSSKAKVNDFLAEIFKKIGSKENTKEGLAELYEYKKKYSDADIEPFLKNSSQFFQSYVERGLRVIEMEREGKGRISTSTGISPQMEVTCVPTPTSTVSSIGNTNGEEVGPSVYLERLKILRQRCGLDNTKQDDRPPLTSLLSKPAVPTVASSTDMLHSKLSQLRESREQHQHSDLDSNQTHSSGTVTSSSSTANIDDLKKRLERIKSSRK

SEQ ID NO: 22305 - protein, 1972 aa, Homo sapiens; identical to SEQ ID NO: 22304
  Payload ID: 4496
  Gene Symbol: CKAP5
  Gene Name: cytoskeleton associated protein 5
  Uniprot ID: Q14008
  ENSP ID: ENSP00000346566

SEQ ID NO: 22306 - protein, 166 aa, Homo sapiens
  Payload ID: 4496
  Gene Symbol: CKAP5
  Gene Name: cytoskeleton associated protein 5
  ENSP ID: ENSP00000431509
  MOD_RES (1)..(1): Any amino acid
XRKGPAEDMSSKLKIMYRTYRIQARSMSGHPEAAQMVRREFQLDLDEIENDNGTVRCEMPELVQHKLDDIFEPVLIPEPKIRAVSPHFDDMHSNTASTINFIISQVASGDINTSIQALTQLRLIYNTHMADEKLEKDEIIKLYSCIIGNMISLFQIESLAREASTG

SEQ ID NO: 22307 - protein, 2032 aa, Homo sapiens
  Payload ID: 4496
  Gene Symbol: CKAP5
  Gene Name: cytoskeleton associated protein 5
  Uniprot ID: Q14008
  ENSP ID: ENSP00000432768
MGDDSEWLKLPVDQKCEHKLWKARLSGYEEALKIFQKIKDEKSPEWSKFLGLIKKFVTDSNAVVQLKGLEAALVYVENAHVAGKTTGEVVSGVVSKVFNQPKAKAKELGIEICLMYIEIEKGEAVQEELLKGLDNKNPKIIVACIETLRKALSEFGSKIILLKPIIKVLPKLFESREKAVRDEAKLIAVEIYRWIRDALRPPLQNINSVQLKELEEEWVKLPTSAPRPTRFLRSQQELEAKLEQQQSAGGDAEGGGDDGDEVPQIDAYELLEAVEILSKLPKDFYDKIEAKKWQERKEALESVEVLIKNPKLEAGDYADLVKALKKVVGKDTNVMLVALAAKCLTGLAVGLRKKFGQYAGHVVPTILEKFKEKKPQVVQALQEAIDAIFLTTTLQNISEDVLAVMDNKNPTIKQQTSLFIARSFRHCTASTLPKSLLKPFCAALLKHINDSAPEVRDAAFEALGTALKVVGEKAVNPFLADVDKLKLDKIKECSEKVELIHGKKAGLAADKKEFKPLPGRTAASGAAGDKDTKDISAPKPGPLKKAPAAKAGGPPKKGKPAAPGGAGNTGTKNKKGLETKEIVEPELSIEVCEEKASAVLPPTCIQLLDSSNWKERLACMEEFQKAVELMDRTEMPCQALVRMLAKKPGWKETNFQVMQMKLHIVALIAQKGNFSKTSAQVVLDGLVDKIGDVKCGNNAKEAMTAIAEACMLPWTAEQVVSMAFSQKNPKNQSETLNWLSNAIKEFGFSGLNVKAFISNVKTALAATNPAVRTAAITLLGVMYLYVGPSLRMFFEDEKPALLSQIDAEFEKMQGQSPPAPTRGISKHSTSGTDEGEDGDEPDDGSNDVVDLLPRTEISDKITSELVSKIGDKNWKIRKEGLDEVAGIINDAKFIQPNIGELPTALKGRLNDSNKILVQQTLNILQQLAVAMGPNIKQHVKNLGIPIITVLGDSKNNVRAAALATVNAWAEQTGMKEWLEGEDLSEELKKENPFLRQELLGWLAEKLPTLRSTPTDLILCVPHLYSCLEDRNGDVRKKAQDALPFFMMHLGYEKMAKATGKLKPTSKDQVLAMLEKAKVNMPAKPAPPTKATSKPMGGSAPAKFQPASAPAEDCISSSTEPKPDPKKAKAPGLSSKAKSAQGKKMPSKTSLKEDEDKSGPIFIVVPNGKEQRMKDEKGLKVLKWNFTTPRDEYIEQLKTQMSSCVAKWLQDEMFHSDFQHHNKALAVMVDHLESEKEGVIGCLDLILKWLTLRFFDTNTSVLMKALEYLKLLFTLLSEEEYHLTENEASSFIPYLVVKVGEPKDVIRKDVRAILNRMCLVYPASKMFPFIMEGTKSKNSKQRAECLEELGCLVESYGMNVCQPTPGKALKEIAVHIGDRDNAVRNAALNTIVTVYNVHGDQVFKLIGNLSEKDMSMLEERIKRSAKRPSAAPIKQVEEKPQRAQNISSNANMLRKGPAEDMSSKLNQARSMSGHPEAAQMVRREFQLDLDEIENDNGTVRCEMPELVQHKLDDIFEPVLIPEPKIRAVSPHFDDMHSNTASTINFIISQVASGDINTSIQALTQIDEVLRQEDKAEAMSGHIDQFLIATFMQLRLIYNTHMADEKLEKDEIIKLYSCIIGNMISLFQIESLAREASTGVLKDLMHGLITLMLDSRIEDLEEGQQVIRSVNLLVVKVLEKSDQTNILSALLVLLQDSLLATASSPKFSELVMKCLWRMVRLLPDTINSINLDRILLDIHIFMKVFPKEKLKQCKSEFPIRTLKTLLHTLCKLKGPKILDHLTMIDNKNESELEAHLCRMMKHSMDQTGSKSDKETEKGASRIDEKSSKAKVNDFLAEIFKKIGSKENTKEGLAELYEYKKKYSDADIEPFLKNSSQFFQSYVERGLRVIEMEREGKGRISTSTGISPQMEVTCVPTPTSTVSSIGNTNGEEVGPSVYLERLKILRQRCGLDNTKQDDRPPLTSLLSKPAVPTVASSTDMLHSKLSQLRESREQHQHSDLDSNQTHSSGTVTSSSSTANIDDLKKRLERIKSSRK

SEQ ID NO: 22308 - protein, 203 aa, Homo sapiens
  Payload ID: 4496
  Gene Symbol: CKAP5
  Gene Name: cytoskeleton associated protein 5
  ENSP ID: ENSP00000434523
  MOD_RES (1)..(1): Any amino acid
XLLHTLCKLKGPKILDHLTMIDNKNESELEAHLCRMMKHSMDQTGSKSDKETEKGASRIDEKSSKAKVNDFLAEIFKKIGSKENTKEGLAELYEYKKKYSDADIEPFLKNSSQFFQSYVERGLRVIEMEREGKGRISTSTGISPQMEVTCVPTPTSTVSSIGNTNGEEVGPSVYLERLKILRQRCGLDNTKVLLLFFCAVQGG

SEQ ID NO: 22309 - protein, 190 aa, Homo sapiens
  Payload ID: 4496
  Gene Symbol: CKAP5
  Gene Name: cytoskeleton associated protein 5
  ENSP ID: ENSP00000436052
ISSNANMLRKGPAEDMSSKLKIMYRTYRIQARSMSGHPEAAQMVRREFQLDLDEIENDNGTVRCEMPELVQHKLDDIFEPVLIPEPKIRAVSPHFDDMHSNTASTINFIISQVASGDINTSIQALTQIDEVLRQEDKAEAMSGHIDQFLIATFMQLRLIYNTHMADEKLEKDEIIKLYSCIIGNMISLFQ

SEQ ID NO: 22310 - protein, 151 aa, Homo sapiens
  Payload ID: 4496
  Gene Symbol: CKAP5
  Gene Name: cytoskeleton associated protein 5
  ENSP ID: ENSP00000436769
MGDDSEWLKLPVDQKCEHKLWKARLSGYEEALKIFQKIKDEKSPEWSKFLGLIKKFVTDSNAVVQLKGLEAALVYVENAHVAGKTTGEVVSGVVSKVFNQPKAKAKELGIEICLMYIEIEKGEAVQEELLKGLDNKNPKIIVACIETLRKA

SEQ ID NO: 22311 - protein, 602 aa, Homo sapiens
  Payload ID: 4497
  Gene Symbol: CKAP4
  Gene Name: cytoskeleton-associated protein 4
  Uniprot ID: Q07065
  ENSP ID: ENSP00000367265
MPSAKQRGSKGGHGAASPSEKGAHPSGGADDVAKKPPPAPQQPPPPPAPHPQQHPQQHPQNQAHGKGGHRGGGGGGGKSSSSSSASAAAAAAAASSSASCSRRLGRALNFLFYLALVAAAAFSGWCVHHVLEEVQQVRRSHQDFSRQREELGQGLQGVEQKVQSLQATFGTFESILRSSQHKQDLTEKAVKQGESEVSRISEVLQKLQNEILKDLSDGIHVVKDARERDFTSLENTVEERLTELTKSINDNIAIFTEVQKRSQKEINDMKAKVASLEESEGNKQDLKALKEAVKEIQTSAKSREWDMEALRSTLQTMESDIYTEVRELVSLKQEQQAFKEAADTERLALQALTEKLLRSEESVSRLPEEIRRLEEELRQLKSDSHGPKEDGGFRHSEAFEALQQKSQGLDSRLQHVEDGVLSMQVASARQTESLESLLSKSQEHEQRLAALQGRLEGLGSSEADQDGLASTVRSLGETQLVLYGDVEELKRSVGELPSTVESLQKVQEQVHTLLSQDQAQAARLPPQDFLDRLSSLDNLKASVSQVEADLKMLRTAVDSLVAYSVKIETNENNLESAKGLLDDLRNDLDRLFVKVEKIHEKV

SEQ ID NO: 22312 - protein, 26 aa, Homo sapiens
  Payload ID: 4497
  Gene Symbol: CKAP4
  Gene Name: cytoskeleton-associated protein 4
  ENSP ID: ENSP00000449240
MPAGGGPRSLWPVKFWLVQSLQATFG

SEQ ID NO: 22313 - protein, 339 aa, Homo sapiens
  Payload ID: 4498
  Gene Symbol: CIAO1
  Gene Name: cytosolic iron-sulfur assembly component 1
  Uniprot ID: O76071
  ENSP ID: ENSP00000418287
MKDSLVLLGRVPAHPDSRCWFLAWNPAGTLLASCGGDRRIRIWGTEGDSWICKSVLSEGHQRTVRKVAWSPCGNYLASASFDATTCIWKKNQDDFECVTTLEGHENEVKSVAWAPSGNLLATCSRDKSVWVWEVDEEDEYECVSVLNSHTQDVKHVVWHPSQELLASASYDDTVKLYREEEDDWVCCATLEGHESTVWSLAFDPSGQRLASCSDDRTVRIWRQYLPGNEQGVACSGSDPSWKCICTLSGFHSRTIYDIAWCQLTGALATACGDDAIRVFQEDPNSDPQQPTFSLTAHLHQAHSQDVNCVAWNPKEPGLLASCSDDGEVAFWKYQRPEGL

SEQ ID NO: 22314 - protein, 348 aa, Homo sapiens
  Payload ID: 4499
  Gene Symbol: CTU1
  Gene Name: cytosolic thiouridylase subunit 1
  Uniprot ID: Q7Z7A3
  ENSP ID: ENSP00000390011
MPAPPCASCHAARAALRRPLSGQALCGACFCAAFEAEVLHTVLAGRLLPPGAVVAVGASGGKDSTVLAHVLRALAPRLGISLQLVAVDEGIGGYRDAALAAVRRQAARWELPLTVVAYEDLFGGWTMDAVARSTAGSGRSRSCCTFCGVLRRRALEEGARRVGATHIVTGHNADDMAETVLMNFLRGDAGRLARGGGLGSPGEGGALPRCRPLQFASQKEVVLYAHFRRLDYFSEECVYAPEAFRGHARDLLKRLEAARPSAVLDLVHSAERLALAPAARPPRPGACSRCGALASRALCQACALLDGLNRGRPRLAIGKGRRGLDEEATPGTPGDPARPPASKAVPTF

SEQ ID NO: 22315 - protein, 485 aa, Homo sapiens
  Payload ID: 4500
  Gene Symbol: CTU2
  Gene Name: cytosolic thiouridylase subunit 2 homolog (S. pombe)
  Uniprot ID: Q2VPK5
  ENSP ID: ENSP00000308617
MCQVGEDYGEPAPEEPPPAPRPSREQKCVKCKEAQPVVVIRAGDAFCRDCFKAFYVHKFRAMLGKNRLIFPGEKVLLAWSGGPSSSSMVWQVLEGLSQDSAKRLRFVAGVIFVDEGAACGQSLEERSKTLAEVKPILQATGFPWHVVALEEVFSLPPSVLWCSAQELVGSEGAYKAAVDSFLQQQHVLGAGGGPGPTQGEEQPPQPPLDPQNLARPPAPAQTEALSQLFCSVRTLTAKEELLQTLRTHLILHMARAHGYSKVMTGDSCTRLAIKLMTNLALGRGAFLAWDTGFSDERHGDVVVVRPMRDHTLKEVAFYNRLFSVPSVFTPAVDTKAPEKASIHRLMEAFILRLQTQFPSTVSTVYRTSEKLVKGPRDGPAAGDSGPRCLLCMCALDVDAADSATAFGAQTSSRLSQMQSPIPLTETRTPPGPCCSPGVGWAQRCGQGACRREDPQACIEEQLCYSCRVNMKDLGLGLAGDPGLSD

SEQ ID NO: 22316 - protein, 515 aa, Homo sapiens
  Payload ID: 4500
  Gene Symbol: CTU2
  Gene Name: cytosolic thiouridylase subunit 2 homolog (S. pombe)
  Uniprot ID: Q2VPK5
  ENSP ID: ENSP00000388320
MCQVGEDYGEPAPEEPPPAPRPSREQKCVKCKEAQPVVVIRAGDAFCRDCFKAFYVHKFRAMLGKNRLIFPGEKVLLAWSGGPSSSSMVWQVLEGLSQDSAKRLRFVAGVIFVDEGAACGQSLEERSKTLAEVKPILQATGFPWHVVALEEVFSLPPSVLWCSAQELVGSEGAYKAAVDSFLQQQHVLGAGGGPGPTQGEEQPPQPPLDPQNLARPPAPAQTEALSQLFCSVRTLTAKEELLQTLRTHLILHMARAHGYSKVMTGDSCTRLAIKLMTNLALGRGAFLAWDTGFSDERHGDVVVVRPMRDHTLKEVAFYNRLFSVPSVFTPAVDTKAPEKASIHRLMEAFILRLQTQFPSTVSTVYRTSEKLVKGPRDGPAAGDSGPRCLLCMCALDVDAADSATAFGAQTSSRLSQMQSPIPLTETRTPPGPCCSPGVGWAQRCGQGACRREDPQACIEEQLCYSCRVNMKDLPSLDPLPPYILAEAQLRTQRAWGLQEIRDCLIEDSDDEAGQS

SEQ ID NO: 22317 - protein, 69 aa, Homo sapiens
  Payload ID: 4500
  Gene Symbol: CTU2
  Gene Name: cytosolic thiouridylase subunit 2 homolog (S. pombe)
  ENSP ID: ENSP00000454923
MCQVGEDYGEPAPEEPPPAPRPSREQKCVKCKEAQPVVVIRAGDAFCRCSWRGLGGLRPAPWSGRFLRA

SEQ ID NO: 22318 - protein, 89 aa, Homo sapiens
  Payload ID: 4500
  Gene Symbol: CTU2
  Gene Name: cytosolic thiouridylase subunit 2 homolog (S. pombe)
  ENSP ID: ENSP00000455010
MLGKNRLIFPGEKVLLAWSGGPSSSSMVWQVLEGLSQDSAKRLRFVAGVIFVDEGAACGQSLEERSKTLAEVKPILQATGFPWHVVALE

SEQ ID NO: 22319 - protein, 108 aa, Homo sapiens
  Payload ID: 4500
  Gene Symbol: CTU2
  Gene Name: cytosolic thiouridylase subunit 2 homolog (S. pombe)
  ENSP ID: ENSP00000455305
CCSPGVGWAQRCGQGACRREDPQACIEEQLCYSCRVNMKDLPSLDPLPPYILAEAQLRTQRYWGPHCRGAWVRGLGAGAHCSFLSRAWGLQEIRDCLIEDSDDEAGQS

SEQ ID NO: 22320 - protein, 586 aa, Homo sapiens
  Payload ID: 4500
  Gene Symbol: CTU2
  Gene Name: cytosolic thiouridylase subunit 2 homolog (S. pombe)
  ENSP ID: ENSP00000456908
MCQVGEDYGEPAPEEPPPAPRPSREQKCVKCKEAQPVVVIRAGDAFCRDCFKAFYVHKFRAMLGKNRLIFPGEKVLLAWSGGPSSSSMVWQVLEGLSQDSAKRLRFVAGVIFVDERTPGVLTVALRSAAREKPLPKGKWPTPHSSARKHRPAERGLEGFSQVEVALQPALPGSSLSPDSFCLGFSEGAACGQSLEERSKTLAEVKPILQATGFPWHVVALEEVFSLPPSVLWCSAQELVGSEGAYKAAVDSFLQQQHVLGAGGGPGPTQGEEQPPQPPLDPQNLARPPAPAQTEALSQLFCSVRTLTAKEELLQTLRTHLILHMARAHGYSKVMTGDSCTRLAIKLMTNLALGRGAFLAWDTGFSDERHGDVVVVRPMRDHTLKEVAFYNRLFSVPSVFTPAVDTKAPEKASIHRLMEAFILRLQTQFPSTVSTVYRTSEKLVKGPRDGPAAGDSGPRCLLCMCALDVDAADSATAFGAQTSSRLSQMQSPIPLTETRTPPGPCCSPGVGWAQRCGQGACRREDPQACIEEQLCYSCRVNMKDLPSLDPLPPYILAEAQLRTQRAWGLQEIRDCLIEDSDDEAGQS

SEQ ID NO: 22321 - protein, 393 aa, Homo sapiens
  Payload ID: 4501
  Gene Symbol: CRTAM
  Gene Name: cytotoxic and regulatory T cell molecule
  Uniprot ID: O95727
  ENSP ID: ENSP00000227348
MWWRVLSLLAWFPLQEASLTNHTETITVEEGQTLTLKCVTSLRKNSSLQWLTPSGFTIFLNEYPALKNSKYQLLHHSANQLSITVPNVTLQDEGVYKCLHYSDSVSTKEVKVIVLATPFKPILEASVIRKQNGEEHVVLMCSTMRSKPPPQITWLLGNSMEVSGGTLHEFETDGKKCNTTSTLIIHTYGKNSTVDCIIRHRGLQGRKLVAPFRFEDLVTDEETASDALERNSLSSQDPQQPTSTVSVTEDSSTSEIDKEEKEQTTQDPDLTTEANPQYLGLARKKSGILLLTLVSFLIFILFIIVQLFIMKLRKAHVIWKKENEVSEHTLESYRSRSNNEETSSEEKNGQSSHPMRCMNYITKLYSEAKTKRKENVQHSKLEEKHIQVPESIV

SEQ ID NO: 22322 - protein, 194 aa, Homo sapiens
  Payload ID: 4501
  Gene Symbol: CRTAM
  Gene Name: cytotoxic and regulatory T cell molecule
  Uniprot ID: O95727
  ENSP ID: ENSP00000433728
MWVKLLSIVAEFCFSPFLVTDEETASDALERNSLSSQDPQQPTSTVSVTEDSSTSEIDKEEKEQTTQDPDLTTEANPQYLGLARKKSGILLLTLVSFLIFILFIIVQLFIMKLRKAHVIWKKENEVSEHTLESYRSRSNNEETSSEEKNGQSSHPMRCMNYITKLYSEAKTKRKENVQHSKLEEKHIQVPESIV

SEQ ID NO: 22323 - protein, 174 aa, Homo sapiens
  Payload ID: 4502
  Gene Symbol: CTLA4
  Gene Name: cytotoxic T-lymphocyte-associated protein 4
  Uniprot ID: P16410
  ENSP ID: ENSP00000295854
MACLGFQRHKAQLNLATRTWPCTLLFFLLFIPVFCKAMHVAQPAVVLASSRGIASFVCEYASPGKATEVRVTVLRQADSQVTEVCAATYMMGNELTFLDDSICTGTSSGNQVNLTIQGLRAMDTGLYICKVELMYPPPYYLGIGNGTQIYVIAKEKKPSYNRGLCENAPNRARM

SEQ ID NO: 22324 - protein, 223 aa, Homo sapiens
  Payload ID: 4502
  Gene Symbol: CTLA4
  Gene Name: cytotoxic T-lymphocyte-associated protein 4
  Uniprot ID: P16410
  ENSP ID: ENSP00000303939
MACLGFQRHKAQLNLATRTWPCTLLFFLLFIPVFCKAMHVAQPAVVLASSRGIASFVCEYASPGKATEVRVTVLRQADSQVTEVCAATYMMGNELTFLDDSICTGTSSGNQVNLTIQGLRAMDTGLYICKVELMYPPPYYLGIGNGTQIYVIDPEPCPDSDFLLWILAAVSSGLFFYSFLLTAVSLSKMLKKRSPLTTGVYVKMPPTEPECEKQFQPYFIPIN

SEQ ID NO: 22325 - protein, 137 aa, Homo sapiens
  Payload ID: 4502
  Gene Symbol: CTLA4
  Gene Name: cytotoxic T-lymphocyte-associated protein 4
  ENSP ID: ENSP00000409707
MHVAQPAVVLASSRGIASFVCEYASPGKATEVRVTVLRQADSQVTEVCAATYMMGNELTFLDDSICTGTSSGNQVNLTIQGLRAMDTGLYICKVELMYPPPYYLGIGNGTQIYVIAKEKKPSYNRGLCENAPNRARM

SEQ ID NO: 22326 - protein, 79 aa, Homo sapiens
  Payload ID: 4502
  Gene Symbol: CTLA4
  Gene Name: cytotoxic T-lymphocyte-associated protein 4
  Uniprot ID: P16410
  ENSP ID: ENSP00000417779
MACLGFQRHKAQLNLATRTWPCTLLFFLLFIPVFCKAMHVAQPAVVLASSRGIASFVSKEKKPSYNRGLCENAPNRARM

SEQ ID NO: 22327 - protein, 325 aa, Homo sapiens
  Payload ID: 4503
  Gene Symbol: DBP
  Gene Name: D site of albumin promoter (albumin D-box) binding protein
  Uniprot ID: Q10586
  ENSP ID: ENSP00000222122
MARPVSDRTPAPLLLGGPAGTPPGGGALLGLRSLLQGTSKPKEPASCLLKEKERKAALPAATTPGPGLETAGPADAPAGAVVGGGSPRGRPGPVPAPGLLAPLLWERTLPFGDVEYVDLDAFLLEHGLPPSPPPPGGPSPEPSPARTPAPSPGPGSCGSASPRSSPGHAPARAALGTASGHRAGLTSRDTPSPVDPDTVEVLMTFEPDPADLALSSIPGHETFDPRRHRFSEEELKPQPIMKKARKIQVPEEQKDEKYWSRRYKNNEAAKRSRDARRLKENQISVRAAFLEKENALLRQEVVAVRQELSHYRAVLSRYQAQHGAL

SEQ ID NO: 22328 - protein, 262 aa, Homo sapiens
  Payload ID: 4503
  Gene Symbol: DBP
  Gene Name: D site of albumin promoter (albumin D-box) binding protein
  ENSP ID: ENSP00000469291
MARPVSDRTPAPLLLGGPAGTPPGGGALLGLRSLLQGTSKPKEPASCLLKEKERKAALPAATTPGPGLETAGPADAPAGAVVGGGSPRGRPGPVPAPGLLAPLLWERTLPFGDVEYVDLDAFLLEHGLPPSPPPPGGPSPEPSPARTPAPSPGPGSCGSASPRSSPGHAPARAALGTASGHRAGLTSRDTPSPVDPDTVEVLMTFEPDPADLALSSIPGHETFDPRRHRFSEEELKPQPIMKKARKIQVPEEQKVSRAGCGR

SEQ ID NO: 22329 - protein, 123 aa, Homo sapiens
  Payload ID: 4503
  Gene Symbol: DBP
  Gene Name: D site of albumin promoter (albumin D-box) binding protein
  ENSP ID: ENSP00000469426
MTFEPDPADLALSSIPGHETFDPRRHRFSEEELKPQPIMKKARKIQVPEEQKDEKYWSRRYKNNEAAKRSRDARRLKENQISVRAAFLEKENALLRQEVVAVRQELSHYRAVLSRYQAQHGAL

SEQ ID NO: 22330 - protein, 123 aa, Homo sapiens; identical to SEQ ID NO: 22329
  Payload ID: 4503
  Gene Symbol: DBP
  Gene Name: D site of albumin promoter (albumin D-box) binding protein
  ENSP ID: ENSP00000471220

SEQ ID NO: 22331 - protein, 521 aa, Homo sapiens
  Payload ID: 4504
  Gene Symbol: D2HGDH
  Gene Name: D-2-hydroxyglutarate dehydrogenase
  Uniprot ID: Q8N465
  ENSP ID: ENSP00000315351
MLPRRPLAWPAWLLRGAPGAAGSWGRPVGPLARRGCCSAPGTPEVPLTRERYPVRRLPFSTVSKQDLAAFERIVPGGVVTDPEALQAPNVDWLRTLRGCSKVLLRPRTSEEVSHILRHCHERNLAVNPQGGNTGMVGGSVPVFDEIILSTARMNRVLSFHSVSGILVCQAGCVLEELSRYVEERDFIMPLDLGAKGSCHIGGNVATNAGGLRFLRYGSLHGTVLGLEVVLADGTVLDCLTSLRKDNTGYDLKQLFIGSEGTLGIITTVSILCPPKPRAVNVAFLGCPGFAEVLQTFSTCKGMLGEILSAFEFMDAVCMQLVGRHLHLASPVQESPFYVLIETSGSNAGHDAEKLGHFLEHALGSGLVTDGTMATDQRKVKMLWALRERITEALSRDGYVYKYDLSLPVERLYDIVTDLRARLGPHAKHVVGYGHLGDGNLHLNVTAEAFSPSLLAALEPHVYEWTAGQQGSVSAEHGVGFRKRDVLGYSKPPGALQLMQQLKALLDPKGILNPYKTLPSQA

SEQ ID NO: 22332 - protein, 320 aa, Homo sapiens
  Payload ID: 4504
  Gene Symbol: D2HGDH
  Gene Name: D-2-hydroxyglutarate dehydrogenase
  ENSP ID: ENSP00000383580
MLPRRPLAWPAWLLRGAPGAAGSWGRPVGPLARRGCCSAPGTPEVPLTRERYPVRRLPFSTVSKQDLAAFERIVPGGVVTDPEALQAPNVDWLRTLRGCSKVLLRPRTSEEVSHILRHCHERNLAVNPQGGNTGMVGGSVPVFDEIILSTARMNRVLSFHSVSGILVCQAGCVLEELSRYVEERDFIMPLDLGAKGSCHIGGNVATNAGGLRFLRYGSLHGTVLGLEVVLADGTVLDCLTSLRKDNTGYDLKQLFIGSEGTLGIITTVSILCPPKPRAVNVAFLDAVGPEGKDHRGAEPGWLRVQVRPLPPCGAALRHRD

SEQ ID NO: 22333 - protein, 387 aa, Homo sapiens
  Payload ID: 4504
  Gene Symbol: D2HGDH
  Gene Name: D-2-hydroxyglutarate dehydrogenase
  ENSP ID: ENSP00000384723
MVGGSVPVFDEIILSTARMNRVLSFHSVSGILVCQAGCVLEELSRYVEERDFIMPLDLGAKGSCHIGGNVATNAGGLRFLRYGSLHGTVLGLEVVLADGTVLDCLTSLRKDNTGYDLKQLFIGSEGTLGIITTVSILCPPKPRAVNVAFLGCPGFAEVLQTFSTCKGMLGEILSAFEFMDAVCMQLVGRHLHLASPVQESPFYVLIETSGSNAGHDAEKLGHFLEHALGSGLVTDGTMATDQRKVKMLWALRERITEALSRDGYVYKYDLSLPVERLYDIVTDLRARLGPHAKHVVGYGHLGDGNLHLNVTAEAFSPSLLAALEPHVYEWTAGQQGSVSAEHGVGFRKRDVLGYSKPPGALQLMQQLKALLDPKGILNPYKTLPSQA

SEQ ID NO: 22334 - protein, 318 aa, Homo sapiens
  Payload ID: 4504
  Gene Symbol: D2HGDH
  Gene Name: D-2-hydroxyglutarate dehydrogenase
  ENSP ID: ENSP00000387479
  MOD_RES (1)..(1): Any amino acid
XSHANHRPICLSPRIWPGSASATSTVCSSSESFLPRGPPAVSLLLHGPPTVSFPPPWPTHHVLPSPVAHPPCPCLPPDMPLELPGPCCCPHCLCDSAPPSLPCPTLVQGASRPILILRAFPGPCHSVPCHDLKLQVGASPFRHGCPPSVRCPSRLIAGVPGCSVLSWSLGHSLSGIDSRMLWALRERITEALSRDGYVYKYDLSLPVERLYDIVTDLRARLGPHAKHVVGYGHLGDGNLHLNVTAEAFSPSLLAALEPHVYEWTAGQQGSVSAEHGVGFRKRDVLGYSKPPGALQLMQQLKALLDPKGILNPYKTLPS

SEQ ID NO: 22335 - protein, 152 aa, Homo sapiens
  Payload ID: 4504
  Gene Symbol: D2HGDH
  Gene Name: D-2-hydroxyglutarate dehydrogenase
  ENSP ID: ENSP00000392602
  MOD_RES (1)..(1): Any amino acid
XHSVSGILVCQAGCVLEELSRYVEERDFIMPLDLGAKGSCHIGGNVATNAGGLRFLRYGSLHGTVLGLEVVLADGTVLDCLTSLRKDNTGYDLKQLFIGSEGTLGIITTVSILCPPKPRAVNVAFLGFLCSALIPLQLQSPVCRPPVVLGAR

SEQ ID NO: 22336 - protein, 189 aa, Homo sapiens
  Payload ID: 4504
  Gene Symbol: D2HGDH
  Gene Name: D-2-hydroxyglutarate dehydrogenase
  ENSP ID: ENSP00000395837
  MOD_RES (1)..(1): Any amino acid
XSVFCSDPTPTAVTCVPPACGPGSPRPARLPHPALRTPGCPGFAEVLQTFSTCKGMLGEILSAFEFMDAVCMQLVGRHLHLASPVQESPFYVLIETSGSNAGHDAEKLGHFLEHALGSGLVTDGTMATDQRKVKMLWALRERITEALSRDGYVYKYDLSLPVERLYDIVTDLRARLGPHAKHVVGYGHL

SEQ ID NO: 22337 - protein, 243 aa, Homo sapiens
  Payload ID: 4504
  Gene Symbol: D2HGDH
  Gene Name: D-2-hydroxyglutarate dehydrogenase
  ENSP ID: ENSP00000400212
MLPRRPLAWPAWLLRGAPGAAGSWGRPVGPLARRGCCSAPGTPEVPLTRERYPVRRLPFSTVSKQDLAAFERIVPGGVVTDPEALQAPNVDWLRTLRGCSKVLLRPRTSEEVSHILRHCHERNLAVNPQGGNTGMVGGSVPVFDEIILSTARMNRVLSFHSVSGGLRPGGAEPVCGGTGLHHAAGLRSQGQLPHRGKRGNQRWRPAVSSIWLTAWDCPGPGSGAGRRHCPGLPDLPEEGQHGL

SEQ ID NO: 22338 - protein, 78 aa, Homo sapiens
  Payload ID: 4504
  Gene Symbol: D2HGDH
  Gene Name: D-2-hydroxyglutarate dehydrogenase
  ENSP ID: ENSP00000404596
GNTGMVGGSVPVFDEIILSTARMNRVLSFHSVSESPFYVLIETSGSNAGHDAEKLGHFLEHALGSGLVTDGTMATDQR

SEQ ID NO: 22339 - protein, 89 aa, Homo sapiens
  Payload ID: 4504
  Gene Symbol: D2HGDH
  Gene Name: D-2-hydroxyglutarate dehydrogenase
  ENSP ID: ENSP00000412511
RHCHERNLAVNPQGGNTGMVGGSVPVFDEIILSTARMNRVLSFHSVSGCPGFAEVLQTFSTCKGMLGEILSAFEFMDAVCMQLVGRHLH

SEQ ID NO: 22340 - protein, 202 aa, Homo sapiens
  Payload ID: 4504
  Gene Symbol: D2HGDH
  Gene Name: D-2-hydroxyglutarate dehydrogenase
  ENSP ID: ENSP00000481906
MSFPPLWPTRHVPASHPTCPLSCLGPCCPHCLCDSAPPSLPCPTLVQGASRPILILRAFPGPCHSVPCHDLKLQVGASPFRHGCPPSVRCPSRLIAGVPGCSVLSWSLGHSLSGIDSRVGATPGLGHSLSWVRAPPGLGHSLSGVGATPGLGHLLSGVGASPGEDTEHAAALTPCGVPPVPGCRSHSQPLSHLVSSSRCCGP

SEQ ID NO: 22341 - protein, 414 aa, Homo sapiens
  Payload ID: 4505
  Gene Symbol: DPF1
  Gene Name: D4, zinc and double PHD fingers family 1
  Uniprot ID: Q92782
  ENSP ID: ENSP00000347716
MGGLSARPTAGRTDPAGTCWGQDPGSKMATVIPGPLSLGEDFYREAIEHCRSYNARLCAERSLRLPFLDSQTGVAQNNCYIWMEKTHRGPGLAPGQIYTYPARCWRKKRRLNILEDPRLRPCEYKIDCEAPLKKEGGLPEGPVLEALLCAETGEKKIELKEEETIMDCQKQQLLEFPHDLEVEDLEDDIPRRKNRAKGKAYGIGGLRKRQDTASLEDRDKPYVCDICGKRYKNRPGLSYHYTHTHLAEEEGEENAERHALPFHRKNNHKQFYKELAWVPEAQRKHTAKKAPDGTVIPNGYCDFCLGGSKKTGCPEDLISCADCGRSGHPSCLQFTVNMTAAVRTYRWQCIECKSCSLCGTSENDDQLLFCDDCDRGYHMYCLSPPMAEPPEGSWSCHLCLRHLKEKASAYITLT

SEQ ID NO: 22342 - protein, 398 aa, Homo sapiens
  Payload ID: 4505
  Gene Symbol: DPF1
  Gene Name: D4, zinc and double PHD fingers family 1
  ENSP ID: ENSP00000390223
MATAIQNPLKSLGEDFYREAIEHCRSYNARLCAERSLRLPFLDSQTGVAQNNCYIWMEKTHRGPGLAPGQIYTYPARCWRKKRRLNILEDPRLRPCEYKIDCEAPLKKEGGLPEGPVLEALLCAETGEKKIELKEEETIMDCQKQQLLEFPHDLEVEDLEDDIPRRKNRAKGKAYGIGGLRKRQDTASLEDRDKPYVCDICGKRYKNRPGLSYHYTHTHLAEEEGEENAERHALPFHRKNNHKQFYKELAWVPEAQRKHTAKKAPDGTVIPNGYCDFCLGGSKKTGCPEDLISCADCGRSGHPSCLQFTVNMTAAVRTYRWQCIECKSCSLCGTSENDGASWAGLTPQDQLLFCDDCDRGYHMYCLSPPMAEPPEGSWSCHLCLRHLKEKASAYITLT

SEQ ID NO: 22343 - protein, 332 aa, Homo sapiens
  Payload ID: 4505
  Gene Symbol: DPF1
  Gene Name: D4, zinc and double PHD fingers family 1
  Uniprot ID: Q92782
  ENSP ID: ENSP00000391884
MEKTHRGPGLAPGQIYTYPARCWRKKRRLNILEDPRLRPCEYKIDCEAPLKKEGGLPEGPVLEALLCAETGEKKIELKEEETIMDCQKQQLLEFPHDLEVEDLEDDIPRRKNRAKGKAYGIGGLRKRQDTASLEDRDKPYVCDICGKRYKNRPGLSYHYTHTHLAEEEGEENAERHALPFHRKNNHKQFYKELAWVPEAQRKHTAKKAPDGTVIPNGYCDFCLGGSKKTGCPEDLISCADCGRSGHPSCLQFTVNMTAAVRTYRWQCIECKSCSLCGTSENDDQLLFCDDCDRGYHMYCLSPPMAEPPEGSWSCHLCLRHLKEKASAYITLT

SEQ ID NO: 22344 - protein, 380 aa, Homo sapiens
  Payload ID: 4505
  Gene Symbol: DPF1
  Gene Name: D4, zinc and double PHD fingers family 1
  Uniprot ID: Q92782
  ENSP ID: ENSP00000397354
MGGLSARPTAGRTDPAGTCWGQDPGSKMATVIPGPLSLGEDFYREAIEHCRSYNARLCAERSLRLPFLDSQTGVAQNNCYIWMEKTHRGPGLAPGQIYTYPARCWRKKRRLNILEDPRLRPCEYKIDCEAPLKKEGGLPEGPVLEALLCAETGEKKIELKEEETIMDCQKQQLLEFPHDLEVEDLEDDIPRRKNRAKGKAYGIGGLRKRQDTASLEDRDKPYVCDKFYKELAWVPEAQRKHTAKKAPDGTVIPNGYCDFCLGGSKKTGCPEDLISCADCGRSGHPSCLQFTVNMTAAVRTYRWQCIECKSCSLCGTSENDGASWAGLTPQDQLLFCDDCDRGYHMYCLSPPMAEPPEGSWSCHLCLRHLKEKASAYITLT

SEQ ID NO: 22345 - protein, 98 aa, Homo sapiens
  Payload ID: 4505
  Gene Symbol: DPF1
  Gene Name: D4, zinc and double PHD fingers family 1
  ENSP ID: ENSP00000399015
MEKTHRGPGLAPGQIYTYPARCWRKKRRLNILEDPRLRPCEYKIDCEAPLKKEGGLPEGPVLEALLCAETGEKKIELKEEETIMDCQKQQLLEFPHDL

SEQ ID NO: 22346 - protein, 100 aa, Homo sapiens
  Payload ID: 4505
  Gene Symbol: DPF1
  Gene Name: D4, zinc and double PHD fingers family 1
  ENSP ID: ENSP00000408201
MATAIQNPLKSRGLLPRGHRALPQLQRAPVRRAQPATALPRLADRRGPEQLLHLDGEDPPRAGFGPGTDLHVPRPLLEEETETQHPGGPQTQALRVQDRL

SEQ ID NO: 22347 - protein, 388 aa, Homo sapiens
  Payload ID: 4505
  Gene Symbol: DPF1
  Gene Name: D4, zinc and double PHD fingers family 1
  ENSP ID: ENSP00000411569
MATAIQNPLKSLGEDFYREAIEHCRSYNARLCAERSLRLPFLDSQTGVAQNNCYIWMEKTHRGPGLAPGQIYTYPARCWRKKRRLNILEDPRLRPCEYKIDCEAPLKKEGGLPEGPVLEALLCAETGEKKIELKEEETIMDCQKQQLLEFPHDLEVEDLEDDIPRRKNRAKGKAYGIGGLRKRQDTASLEDRDKPYVCDICGKRYKNRPGLSYHYTHTHLAEEEGEENAERHALPFHRKNNHKQFYKELAWVPEAQRKHTAKKAPDGTVIPNGYCDFCLGGSKKTGCPEDLISCADCGRSGHPSCLQFTVNMTAAVRTYRWQCIECKSCSLCGTSENDDQLLFCDDCDRGYHMYCLSPPMAEPPEGSWSCHLCLRHLKEKASAYITLT

SEQ ID NO: 22348 - protein, 332 aa, Homo sapiens; identical to SEQ ID NO: 22343
  Payload ID: 4505
  Gene Symbol: DPF1
  Gene Name: D4, zinc and double PHD fingers family 1
  Uniprot ID: Q92782
  ENSP ID: ENSP00000412098

SEQ ID NO: 22349 - protein, 210 aa, Homo sapiens
  Payload ID: 4505
  Gene Symbol: DPF1
  Gene Name: D4, zinc and double PHD fingers family 1
  ENSP ID: ENSP00000416347
MEKTHRGPGLAPGQIYTYPARCWRKKRRLNILEDPRLRPCEYKIDCEAPLKKEGGLPEGPVLEALLCAETGEKKIELKEEETIMDCQKQQLLEFPHDLEVEDLEDDIPRRKNRAKGKAYGIGGLRKRQDTASLEDRDKPYVCDICGKRYKNRPGLSYHYTHTHLAEEEGEENAERHALPFHRKNNHKQFYKELAWVPEAQRKHTAKKAPD

SEQ ID NO: 22350 - protein, 54 aa, Homo sapiens
  Payload ID: 4505
  Gene Symbol: DPF1
  Gene Name: D4, zinc and double PHD fingers family 1
  ENSP ID: ENSP00000465123
MEKTHRGPGLAPGQIYTYPARCWRKKRRLNILEDPRLRPCEYKIDCEAPLKKEG

SEQ ID NO: 22351 - protein, 397 aa, Homo sapiens
  Payload ID: 4505
  Gene Symbol: DPF1
  Gene Name: D4, zinc and double PHD fingers family 1
  ENSP ID: ENSP00000483226
MATVIPGPLSLGEDFYREAIEHCRSYNARLCAERSLRLPFLDSQTGVAQNNCYIWMEKTHRGPGLAPGQIYTYPARCWRKKRRLNILEDPRLRPCEYKIDCEAPLKKEGGLPEGPVLEALLCAETGEKKIELKEEETIMDCQKQQLLEFPHDLEVEDLEDDIPRRKNRAKGKAYGIGGLRKRQDTASLEDRDKPYVCDICGKRYKNRPGLSYHYTHTHLAEEEGEENAERHALPFHRKNNHKQFYKELAWVPEAQRKHTAKKAPDGTVIPNGYCDFCLGGSKKTGCPEDLISCADCGRSGHPSCLQFTVNMTAAVRTYRWQCIECKSCSLCGTSENDGASWAGLTPQDQLLFCDDCDRGYHMYCLSPPMAEPPEGSWSCHLCLRHLKEKASAYITLT

SEQ ID NO: 22352 - protein, 405 aa, Homo sapiens
  Payload ID: 4506
  Gene Symbol: DPF2
  Gene Name: D4, zinc and double PHD fingers family 2
  ENSP ID: ENSP00000252268
MAAVVENVVKLLGEQYYKDAMEQCHNYNARLCAERSVRLPFLDSQTGVAQSNCYIWMEKRHRGPGLASGQLYSYPARRWRKKRRAHPPEDPRLSFPSIKPDTDQTLKKEGLISQDGSSLEALLRTDPLEKRGAPDPRVDDDSLGEFPVTNSRARKRILEPDDFLDDLDDEDYEEDTPKRRGKGKSKGKGVGSARKKLDASILEDRDKPYACDNSFKQKHTSKAPQRVCGKRYKNRPGLSYHYAHSHLAEEEGEDKEDSQPPTPVSQRSEEQKSKKGPDGLALPNNYCDFCLGDSKINKKTGQPEELVSCSDCGRSGHPSCLQFTPVMMAAVKTYRWQCIECKCCNICGTSENDDQLLFCDDCDRGYHMYCLTPSMSEPPEGSWSCHLCLDLLKEKASIYQNQNSS

SEQ ID NO: 22353 - protein, 207 aa, Homo sapiens
  Payload ID: 4506
  Gene Symbol: DPF2
  Gene Name: D4, zinc and double PHD fingers family 2
  Uniprot ID: Q92785
  ENSP ID: ENSP00000399714
MAAVVENVVKLLGEQYYKDAMEQCHNYNARLCAERSVRLPFLDSQTGVAQSNCYIWMEKRHRGPGLASGQLYSYPARRWRKKRRAHPPEDPRLSFPSIKPDTDQTLKKEGLISQDGSSLEALLRTDPLEKRGAPDPRVDDDSLGEFPVTNSRARKDQLLFCDDCDRGYHMYCLTPSMSEPPEGSWSCHLCLDLLKEKASIYQNQNSS

SEQ ID NO: 22354 - protein, 106 aa, Homo sapiens
  Payload ID: 4506
  Gene Symbol: DPF2
  Gene Name: D4, zinc and double PHD fingers family 2
  ENSP ID: ENSP00000434885
MAAVVENVVKLLGEQYYKDAMEQCHNYNARLCAERSVRLPFLDSQTGVAQSNCYIWMEKRHRGPGLASGQLYSYPARRWRKKRRAHPPEDPRLSFPSIKPADPRTR

SEQ ID NO: 22355 - protein, 116 aa, Homo sapiens
  Payload ID: 4506
  Gene Symbol: DPF2
  Gene Name: D4, zinc and double PHD fingers family 2
  ENSP ID: ENSP00000435887
ARTRKTLNHPLLFPRGLRSRNPKRVLMDWPCPTTTVTSAWGTQRLTRRRDNPRSWCPVLTVAAQDQLLFCDDCDRGYHMYCLTPSMSEPPEGSWSCHLCLDLLKEKASIYQNQNSS

SEQ ID NO: 22356 - protein, 391 aa, Homo sapiens
  Payload ID: 4506
  Gene Symbol: DPF2
  Gene Name: D4, zinc and double PHD fingers family 2
  Uniprot ID: Q92785
  ENSP ID: ENSP00000436901
MAAVVENVVKLLGEQYYKDAMEQCHNYNARLCAERSVRLPFLDSQTGVAQSNCYIWMEKRHRGPGLASGQLYSYPARRWRKKRRAHPPEDPRLSFPSIKPDTDQTLKKEGLISQDGSSLEALLRTDPLEKRGAPDPRVDDDSLGEFPVTNSRARKRILEPDDFLDDLDDEDYEEDTPKRRGKGKSKGKGVGSARKKLDASILEDRDKPYACDICGKRYKNRPGLSYHYAHSHLAEEEGEDKEDSQPPTPVSQRSEEQKSKKGPDGLALPNNYCDFCLGDSKINKKTGQPEELVSCSDCGRSGHPSCLQFTPVMMAAVKTYRWQCIECKCCNICGTSENDDQLLFCDDCDRGYHMYCLTPSMSEPPEGSWSCHLCLDLLKEKASIYQNQNSS

SEQ ID NO: 22357 - protein, 357 aa, Homo sapiens
  Payload ID: 4507
  Gene Symbol: DPF3
  Gene Name: D4, zinc and double PHD fingers, family 3
  Uniprot ID: Q92784
  ENSP ID: ENSP00000370614
MATVIHNPLKALGDQFYKEAIEHCRSYNSRLCAERSVRLPFLDSQTGVAQNNCYIWMEKRHRGPGLAPGQLYTYPARCWRKKRRLHPPEDPKLRLLEIKPEVELPLKKDGFTSESTTLEALLRGEGVEKKVDAREEESIQEIQRVLENDENVEEGNEEEDLEEDIPKRKNRTRGRARGSAGGRRRHDAASQEDHDKPYVCDICGKRYKNRPGLSYHYAHTHLASEEGDEAQDQETRSPPNHRNENHRPQKGPDGTVIPNNYCDFCLGGSNMNKKSGRPEELVSCADCGRSAHLGGEGRKEKEAAAAARTTEDLFGSTSESDTSTFHGFDEDDLEEPRSCRGRRSGRGSPTADKKGSC

SEQ ID NO: 22358 - protein, 412 aa, Homo sapiens
  Payload ID: 4507
  Gene Symbol: DPF3
  Gene Name: D4, zinc and double PHD fingers, family 3
  ENSP ID: ENSP00000381791
MFYGRINGRNFAASSLPVAFAATPLMLFLPNPQLIFSFPISSRNHITGLMPPGKLKLENLFHMCTRLGDQFYKEAIEHCRSYNSRLCAERSVRLPFLDSQTGVAQNNCYIWMEKRHRGPGLAPGQLYTYPARCWRKKRRLHPPEDPKLRLLEIKPEVELPLKKDGFTSESTTLEALLRGEGVEKKVDAREEESIQEIQRVLENDENVEEGNEEEDLEEDIPKRKNRTRGRARGSAGGRRRHDAASQEDHDKPYVCDICGKRYKNRPGLSYHYAHTHLASEEGDEAQDQETRSPPNHRNENHRPQKGPDGTVIPNNYCDFCLGGSNMNKKSGRPEELVSCADCGRSAHLGGEGRKEKEAAAAARTTEDLFGSTSESDTSTFHGFDEDDLEEPRSCRGRRSGRGSPTADKKGSC

SEQ ID NO: 22359 - protein, 357 aa, Homo sapiens; identical to SEQ ID NO: 22357
  Payload ID: 4507
  Gene Symbol: DPF3
  Gene Name: D4, zinc and double PHD fingers, family 3
  Uniprot ID: Q92784
  ENSP ID: ENSP00000441640

SEQ ID NO: 22360 - protein, 367 aa, Homo sapiens
  Payload ID: 4507
  Gene Symbol: DPF3
  Gene Name: D4, zinc and double PHD fingers, family 3
  Uniprot ID: Q92784
  ENSP ID: ENSP00000444662
MGFTDLEEPISGCPGGPWALGLGDQFYKEAIEHCRSYNSRLCAERSVRLPFLDSQTGVAQNNCYIWMEKRHRGPGLAPGQLYTYPARCWRKKRRLHPPEDPKLRLLEIKPEVELPLKKDGFTSESTTLEALLRGEGVEKKVDAREEESIQEIQRVLENDENVEEGNEEEDLEEDIPKRKNRTRGRARGSAGGRRRHDAASQEDHDKPYVCDICGKRYKNRPGLSYHYAHTHLASEEGDEAQDQETRSPPNHRNENHRPQKGPDGTVIPNNYCDFCLGGSNMNKKSGRPEELVSCADCGRSAHLGGEGRKEKEAAAAARTTEDLFGSTSESDTSTFHGFDEDDLEEPRSCRGRRSGRGSPTADKKGSC

SEQ ID NO: 22361 - protein, 378 aa, Homo sapiens
  Payload ID: 4507
  Gene Symbol: DPF3
  Gene Name: D4, zinc and double PHD fingers, family 3
  Uniprot ID: Q92784
  ENSP ID: ENSP00000450518
MATVIHNPLKALGDQFYKEAIEHCRSYNSRLCAERSVRLPFLDSQTGVAQNNCYIWMEKRHRGPGLAPGQLYTYPARCWRKKRRLHPPEDPKLRLLEIKPEVELPLKKDGFTSESTTLEALLRGEGVEKKVDAREEESIQEIQRVLENDENVEEGNEEEDLEEDIPKRKNRTRGRARGSAGGRRRHDAASQEDHDKPYVCDICGKRYKNRPGLSYHYAHTHLASEEGDEAQDQETRSPPNHRNENHRPQKGPDGTVIPNNYCDFCLGGSNMNKKSGRPEELVSCADCGRSGHPTCLQFTLNMTEAVKTYKWQCIECKSCILCGTSENDDQLLFCDDCDRGYHMYCLNPPVAEPPEGSWSCHLCWELLKEKASAFGCQA

SEQ ID NO: 22362 - protein, 412 aa, Homo sapiens; identical to SEQ ID NO: 22358
  Payload ID: 4507
  Gene Symbol: DPF3
  Gene Name: D4, zinc and double PHD fingers, family 3
  ENSP ID: ENSP00000479526

SEQ ID NO: 22363 - protein, 367 aa, Homo sapiens; identical to SEQ ID NO: 22360
  Payload ID: 4507
  Gene Symbol: DPF3
  Gene Name: D4, zinc and double PHD fingers, family 3
  Uniprot ID: Q92784
  ENSP ID: ENSP00000481992

SEQ ID NO: 22364 - protein, 770 aa, Homo sapiens
  Payload ID: 4508
  Gene Symbol: DAB2
  Gene Name: Dab, mitogen-responsive phosphoprotein, homolog 2 (Drosophila)
  Uniprot ID: P98082
  ENSP ID: ENSP00000313391
MSNEVETSATNGQPDQQAAPKAPSKKEKKKGPEKTDEYLLARFKGDGVKYKAKLIGIDDVPDARGDKMSQDSMMKLKGMAAAGRSQGQHKQRIWVNISLSGIKIIDEKTGVIEHEHPVNKISFIARDVTDNRAFGYVCGGEGQHQFFAIKTGQQAEPLVVDLKDLFQVIYNVKKKEEEKKKIEEASKAVENGSEALMILDDQTNKLKSGVDQMDLFGDMSTPPDLNSPTESKDILLVDLNSEIDTNQNSLRENPFLTNGITSCSLPRPTPQASFLPENAFSANLNFFPTPNPDPFRDDPFTQPDQSTPSSFDSLKSPDQKKENSSSSSTPLSNGPLNGDVDYFGQQFDQISNRTGKQEAQAGPWPFSSSQTQPAVRTQNGVSEREQNGFSVKSSPNPFVGSPPKGLSIQNGVKQDLESSVQSSPHDSIAIIPPPQSTKPGRGRRTAKSSANDLLASDIFAPPVSEPSGQASPTGQPTALQPNPLDLFKTSAPAPVGPLVGLGGVTVTLPQAGPWNTASLVFNQSPSMAPGAMMGGQPSGFSQPVIFGTSPAVSGWNQPSPFAASTPPPVPVVWGPSASVAPNAWSTTSPLGNPFQSNIFPAPAVSTQPPSMHSSLLVTPPQPPPRAGPPKDISSDAFTALDPLGDKEIKDVKEMFKDFQLRQPPAVPARKGEQTSSGTLSAFASYFNSKVGIPQENADHDDFDANQLLNKINEPPKPAPRQVSLPVTKSTDNAFENPFFKDSFGSSQASVASSQPVSSEMYRDPFGNPFA

SEQ ID NO: 22365 - protein, 552 aa, Homo sapiens
  Payload ID: 4508
  Gene Symbol: DAB2
  Gene Name: Dab, mitogen-responsive phosphoprotein, homolog 2 (Drosophila)
  Uniprot ID: P98082
  ENSP ID: ENSP00000345508
MSNEVETSATNGQPDQQAAPKAPSKKEKKKGPEKTDEYLLARFKGDGVKYKAKLIGIDDVPDARGDKMSQDSMMKLKGMAAAGRSQGQHKQRIWVNISLSGIKIIDEKTGVIEHEHPVNKISFIARDVTDNRAFGYVCGGEGQHQFFAIKTGQQAEPLVVDLKDLFQVIYNVKKKEEEKKKIEEASKAVENGSEALMILDDQTNKLKSGVDQMDLFGDMSTPPDLNSPTSSANDLLASDIFAPPVSEPSGQASPTGQPTALQPNPLDLFKTSAPAPVGPLVGLGGVTVTLPQAGPWNTASLVFNQSPSMAPGAMMGGQPSGFSQPVIFGTSPAVSGWNQPSPFAASTPPPVPVVWGPSASVAPNAWSTTSPLGNPFQSNIFPAPAVSTQPPSMHSSLLVTPPQPPPRAGPPKDISSDAFTALDPLGDKEIKDVKEMFKDFQLRQPPAVPARKGEQTSSGTLSAFASYFNSKVGIPQENADHDDFDANQLLNKINEPPKPAPRQVSLPVTKSTDNAFENPFFKDSFGSSQASVASSQPVSSEMYRDPFGNPFA

SEQ ID NO: 22366 - protein, 38 aa, Homo sapiens
  Payload ID: 4508
  Gene Symbol: DAB2
  Gene Name: Dab, mitogen-responsive phosphoprotein, homolog 2 (Drosophila)
  ENSP ID: ENSP00000421086
MSNEVETSATNGQPDQQAAPKAPSKKEKKKGPEKTDEY

SEQ ID NO: 22367 - protein, 116 aa, Homo sapiens
  Payload ID: 4508
  Gene Symbol: DAB2
  Gene Name: Dab, mitogen-responsive phosphoprotein, homolog 2 (Drosophila)
  ENSP ID: ENSP00000421526
MSNEVETSATNGQPDQQAAPKAPSKKEKKKGPEKTDEYLLARFKGDGVKYKAKLIGIDDVPDARGDKMSQDSMMKLKGMAAAGRSQGQHKQRIWVNISLSGIKIIDEKTGVRIHIC

SEQ ID NO: 22368 - protein, 67 aa, Homo sapiens
  Payload ID: 4508
  Gene Symbol: DAB2
  Gene Name: Dab, mitogen-responsive phosphoprotein, homolog 2 (Drosophila)
  ENSP ID: ENSP00000425088
MSNEVETSATNGQPDQQAAPKAPSKKEKKKGPEKTDEYLLARFKGDGVKYKAKLIGIDDVPDARGDK

SEQ ID NO: 22369 - protein, 749 aa, Homo sapiens
  Payload ID: 4508
  Gene Symbol: DAB2
  Gene Name: Dab, mitogen-responsive phosphoprotein, homolog 2 (Drosophila)
  Uniprot ID: P98082
  ENSP ID: ENSP00000426245
MSNEVETSATNGQPDQQAAPKAPSKKEKKKGPEKTDEYLLARFKGDGVKYKAKLIGIDDVPDARGDKMSQDSMMKLKGMAAAGRSQGQHKQRIWVNISLSGIKIIDEKTGVIEHEHPVNKISFIARDVTDNRAFGYVCGGEGQHQFFAIKTGQQAEPLVVDLKDLFQVIYNVKKKEEEKKKIEEASKAVENGSEALMILDDQTNKLKSESKDILLVDLNSEIDTNQNSLRENPFLTNGITSCSLPRPTPQASFLPENAFSANLNFFPTPNPDPFRDDPFTQPDQSTPSSFDSLKSPDQKKENSSSSSTPLSNGPLNGDVDYFGQQFDQISNRTGKQEAQAGPWPFSSSQTQPAVRTQNGVSEREQNGFSVKSSPNPFVGSPPKGLSIQNGVKQDLESSVQSSPHDSIAIIPPPQSTKPGRGRRTAKSSANDLLASDIFAPPVSEPSGQASPTGQPTALQPNPLDLFKTSAPAPVGPLVGLGGVTVTLPQAGPWNTASLVFNQSPSMAPGAMMGGQPSGFSQPVIFGTSPAVSGWNQPSPFAASTPPPVPVVWGPSASVAPNAWSTTSPLGNPFQSNIFPAPAVSTQPPSMHSSLLVTPPQPPPRAGPPKDISSDAFTALDPLGDKEIKDVKEMFKDFQLRQPPAVPARKGEQTSSGTLSAFASYFNSKVGIPQENADHDDFDANQLLNKINEPPKPAPRQVSLPVTKSTDNAFENPFFKDSFGSSQASVASSQPVSSEMYRDPFGNPFA

SEQ ID NO: 22370 - protein, 75 aa, Homo sapiens
  Payload ID: 4508
  Gene Symbol: DAB2
  Gene Name: Dab, mitogen-responsive phosphoprotein, homolog 2 (Drosophila)
  ENSP ID: ENSP00000427541
MSNEVETSATNGQPDQQAAPKAPSKKEKKKGPEKTDEYLLARFKGDGVKYKAKLIGIDDVPDARGDKMSQDSMMK

SEQ ID NO: 22371 - protein, 749 aa, Homo sapiens; identical to SEQ ID NO: 22369
  Payload ID: 4508
  Gene Symbol: DAB2
  Gene Name: Dab, mitogen-responsive phosphoprotein, homolog 2 (Drosophila)
  Uniprot ID: P98082
  ENSP ID: ENSP00000439919

SEQ ID NO: 22372 - protein, 204 aa, Homo sapiens
  Payload ID: 4509
  Gene Symbol: DAB1
  Gene Name: Dab, reelin signal transducer, homolog 1 (Drosophila)
  ENSP ID: ENSP00000329120
MSTETELQVAVKTSAKKDSRKKGQDRSEATLIKRFKGEGVRYKAKLIGIDEVSAARGDKLCQDSMMKLKGVVAGARSKGEHKQKIFLTISFGGIKIFDEKTGALQHHHAVHEISYIAKDITDHRAFGYVCGKEGNHRFVAIKTAQAAEPVILDLRDLFQLIYELKQREELEKKAQKDKQCEQAVYQVPTSQKKEGVYDVPKSQP

SEQ ID NO: 22373 - protein, 213 aa, Homo sapiens
  Payload ID: 4509
  Gene Symbol: DAB1
  Gene Name: Dab, reelin signal transducer, homolog 1 (Drosophila)
  Uniprot ID: O75553
  ENSP ID: ENSP00000360274
MSTETELQVAVKTSAKKDSRKKGQDRSEATLIKRFKGEGVRYKAKLIGIDEVSAARGDKLCQDSMMKLKGVVAGARSKGEHKQKIFLTISFGGIKIFDEKTGALQHHHAVHEISYIAKDITDHRAFGYVCGKEGNHRFVAIKTAQAAEPVILDLRDLFQLIYELKQREELEKKAQKDKQCEQAVYQTILEEDVEDPVYQVISETSRGFRFKSD

SEQ ID NO: 22374 - protein, 588 aa, Homo sapiens
  Payload ID: 4509
  Gene Symbol: DAB1
  Gene Name: Dab, reelin signal transducer, homolog 1 (Drosophila)
  Uniprot ID: O75553
  ENSP ID: ENSP00000360275
MSTETELQVAVKTSAKKDSRKKGQDRSEATLIKRFKGEGVRYKAKLIGIDEVSAARGDKLCQDSMMKLKGVVAGARSKGEHKQKIFLTISFGGIKIFDEKTGALQHHHAVHEISYIAKDITDHRAFGYVCGKEGNHRFVAIKTAQAAEPVILDLRDLFQLIYELKQREELEKKAQKDKQCEQAVYQTILEEDVEDPVYQYIVFEAGHEPIRDPETEENIYQVPTSQKKEGVYDVPKSQPVSNGYSFEDFEERFAAATPNRNLPTDFDEIFEATKAVTQLELFGDMSTPPDITSPPTPATPGDAFIPSSSQTLPASADVFSSVPFGTAAVPSGYVAMGAVLPSFWGQQPLVQQQMVMGAQPPVAQVMPGAQPIAWGQPGLFPATQQPWPTVAGQFPPAAFMPTQTVMPLPAAMFQGPLTPLATVPGTSDSTRSSPQTDKPRQKMGKETFKDFQMAQPPPVPSRKPDQPSLTCTSEAFSSYFNKVGVAQDTDDCDDFDISQLNLTPVTSTTPSTNSPPTPAPRQSSPSKSSASHASDPTTDDIFEEGFESPSKSEEQEAPDGSQASSNSDPFGEPSGEPSGDNISPQAGS

SEQ ID NO: 22375 - protein, 239 aa, Homo sapiens
  Payload ID: 4509
  Gene Symbol: DAB1
  Gene Name: Dab, reelin signal transducer, homolog 1 (Drosophila)
  ENSP ID: ENSP00000360276
MSTETELQVAVKTSAKKDSRKKGQDRSEATLIKRFKGEGVRYKAKLIGIDEVSAARGDKLCQDSMMKLKGVVAGARSKGEHKQKIFLTISFGGIKIFDEKTGVPTSQKKEGVYDVPKSQPVSNGYSFEDFEERFAAATPNRNLPTDFDEIFEATKAVTQLELFGDMSTPPDITSPPTPATPGDAFIPSSSQTLPASADVFSSVPFGTAAVPSGYVAMGAVLPSFWGQQPLVQQQMVMGA

SEQ ID NO: 22376 - protein, 555 aa, Homo sapiens
  Payload ID: 4509
  Gene Symbol: DAB1
  Gene Name: Dab, reelin signal transducer, homolog 1 (Drosophila)
  Uniprot ID: O75553
  ENSP ID: ENSP00000360280
MSTETELQVAVKTSAKKDSRKKGQDRSEATLIKRFKGEGVRYKAKLIGIDEVSAARGDKLCQDSMMKLKGVVAGARSKGEHKQKIFLTISFGGIKIFDEKTGALQHHHAVHEISYIAKDITDHRAFGYVCGKEGNHRFVAIKTAQAAEPVILDLRDLFQLIYELKQREELEKKAQKDKQCEQAVYQTILEEDVEDPVYQYIVFEAGHEPIRDPETEENIYQVPTSQKKEGVYDVPKSQPVSAVTQLELFGDMSTPPDITSPPTPATPGDAFIPSSSQTLPASADVFSSVPFGTAAVPSGYVAMGAVLPSFWGQQPLVQQQMVMGAQPPVAQVMPGAQPIAWGQPGLFPATQQPWPTVAGQFPPAAFMPTQTVMPLPAAMFQGPLTPLATVPGTSDSTRSSPQTDKPRQKMGKETFKDFQMAQPPPVPSRKPDQPSLTCTSEAFSSYFNKVGVAQDTDDCDDFDISQLNLTPVTSTTPSTNSPPTPAPRQSSPSKSSASHASDPTTDDIFEEGFESPSKSEEQEAPDGSQASSNSDPFGEPSGEPSGDNISPQAGS

SEQ ID NO: 22377 - protein, 555 aa, Homo sapiens; identical to SEQ ID NO: 22376
  Payload ID: 4509
  Gene Symbol: DAB1
  Gene Name: Dab, reelin signal transducer, homolog 1 (Drosophila)
  Uniprot ID: O75553
  ENSP ID: ENSP00000387581

SEQ ID NO: 22378 - protein, 553 aa, Homo sapiens
  Payload ID: 4509
  Gene Symbol: DAB1
  Gene Name: Dab, reelin signal transducer, homolog 1 (Drosophila)
  Uniprot ID: O75553
  ENSP ID: ENSP00000395296
MSTETELQVAVKTSAKKDSRKKGQDRSEATLIKRFKGEGVRYKAKLIGIDEVSAARGDKLCQDSMMKLKGVVAGARSKGEHKQKIFLTISFGGIKIFDEKTGALQHHHAVHEISYIAKDITDHRAFGYVCGKEGNHRFVAIKTAQAAEPVILDLRDLFQLIYELKQREELEKKAQKDKQCEQAVYQVPTSQKKEGVYDVPKSQPVSNGYSFEDFEERFAAATPNRNLPTDFDEIFEATKAVTQLELFGDMSTPPDITSPPTPATPGDAFIPSSSQTLPASADVFSSVPFGTAAVPSGYVAMGAVLPSFWGQQPLVQQQMVMGAQPPVAQVMPGAQPIAWGQPGLFPATQQPWPTVAGQFPPAAFMPTQTVMPLPAAMFQGPLTPLATVPGTSDSTRSSPQTDKPRQKMGKETFKDFQMAQPPPVPSRKPDQPSLTCTSEAFSSYFNKVGVAQDTDDCDDFDISQLNLTPVTSTTPSTNSPPTPAPRQSSPSKSSASHASDPTTDDIFEEGFESPSKSEEQEAPDGSQASSNSDPFGEPSGEPSGDNISPQAGS

SEQ ID NO: 22379 - protein, 1132 aa, Homo sapiens
  Payload ID: 4510
  Gene Symbol: DAB2IP
  Gene Name: DAB2 interacting protein
  Uniprot ID: Q5VWQ8
  ENSP ID: ENSP00000259371
MEPDSLLDQDDSYESPQERPGSRRSLPGSLSEKSPSMEPSAATPFRVTGFLSRRLKGSIKRTKSQPKLDRNHSFRHILPGFRSAAAAAADNERSHLMPRLKESRSHESLLSPSSAVEALDLSMEEEVVIKPVHSSILGQDYCFEVTTSSGSKCFSCRSAAERDKWMENLRRAVHPNKDNSRRVEHILKLWVIEAKDLPAKKKYLCELCLDDVLYARTTGKLKTDNVFWGEHFEFHNLPPLRTVTVHLYRETDKKKKKERNSYLGLVSLPAASVAGRQFVEKWYPVVTPNPKGGKGPGPMIRIKARYQTITILPMEMYKEFAEHITNHYLGLCAALEPILSAKTKEEMASALVHILQSTGKVKDFLTDLMMSEVDRCGDNEHLIFRENTLATKAIEEYLKLVGQKYLQDALGEFIKALYESDENCEVDPSKCSAADLPEHQGNLKMCCELAFCKIINSYCVFPRELKEVFASWRQECSSRGRPDISERLISASLFLRFLCPAIMSPSLFNLLQEYPDDRTARTLTLIAKVTQNLANFAKFGSKEEYMSFMNQFLEHEWTNMQRFLLEISNPETLSNTAGFEGYIDLGRELSSLHSLLWEAVSQLEQSIVSKLGPLPRILRDVHTALSTPGSGQLPGTNDLASTPGSGSSSISAGLQKMVIENDLSGLIDFTRLPSPTPENKDLFFVTRSSGVQPSPARSSSYSEANEPDLQMANGGKSLSMVDLQDARTLDGEAGSPAGPDVLPTDGQAAAAQLVAGWPARATPVNLAGLATVRRAGQTPTTPGTSEGAPGRPQLLAPLSFQNPVYQMAAGLPLSPRGLGDSGSEGHSSLSSHSNSEELAAAAKLGSFSTAAEELARRPGELARRQMSLTEKGGQPTVPRQNSAGPQRRIDQPPPPPPPPPPAPRGRTPPNLLSTLQYPRPSSGTLASASPDWVGPSTRLRQQSSSSKGDSPELKPRAVHKQGPSPVSPNALDRTAAWLLTMNAQLLEDEGLGPDPPHRDRLRSKDELSQAEKDLAVLQDKLRISTKKLEEYETLFKCQEETTQKLVLEYQARLEEGEERLRRQQEDKDIQMKGIISRLMSVEEELKKDHAEMQAAVDSKQKIIDAQEKRIASLDAANARLMSALTQLKESMH

SEQ ID NO: 22380 - protein, 1065 aa, Homo sapiens
  Payload ID: 4510
  Gene Symbol: DAB2IP
  Gene Name: DAB2 interacting protein
  Uniprot ID: Q5VWQ8
  ENSP ID: ENSP00000310827
MPRLKESRSHESLLSPSSAVEALDLSMEEEVVIKPVHSSILGQDYCFEVTTSSGSKCFSCRSAAERDKWMENLRRAVHPNKDNSRRVEHILKLWVIEAKDLPAKKKYLCELCLDDVLYARTTGKLKTDNVFWGEHFEFHNLPPLRTVTVHLYRETDKKKKKERNSYLGLVSLPAASVAGRQFVEKWYPVVTPNPKGGKGPGPMIRIKARYQTITILPMEMYKEFAEHITNHYLGLCAALEPILSAKTKEEMASALVHILQSTGKVKDFLTDLMMSEVDRCGDNEHLIFRENTLATKAIEEYLKLVGQKYLQDALGEFIKALYESDENCEVDPSKCSAADLPEHQGNLKMCCELAFCKIINSYCVFPRELKEVFASWRQECSSRGRPDISERLISASLFLRFLCPAIMSPSLFNLLQEYPDDRTARTLTLIAKVTQNLANFAKFGSKEEYMSFMNQFLEHEWTNMQRFLLEISNPETLSNTAGFEGYIDLGRELSSLHSLLWEAVSQLEQSIVSKLGPLPRILRDVHTALSTPGSGQLPGTNDLASTPGSGSSSISAGLQKMVIENDLSGLIDFTRLPSPTPENKDLFFVTRSSGVQPSPARSSSYSEANEPDLQMANGGKSLSMVDLQDARTLDGEAGSPAGPDVLPTDGQAAAAQLVAGWPARATPVNLAGLATVRRAGQTPTTPGTSEGAPGRPQLLAPLSFQNPVYQMAAGLPLSPRGLGDSGSEGHSSLSSHSNSEELAAAAKLGSFSTAAEELARRPGELARRQMSLTEKGGQPTVPRQNSAGPQRRIDQPPPPPPPPPPAPRGRTPPNLLSTLQYPRPSSGTLASASPDWVGPSTRLRQQSSSSKGDSPELKPRAVHKQGPSPVSPNALDRTAAWLLTMNAQLLEDEGLGPDPPHRDRLRSKDELSQAEKDLAVLQDKLRISTKKLEEYETLFKCQEETTQKLVLEYQARLEEGEERLRRQQEDKDIQMKGIISRLMSVEEELKKDHAEMQAAVDSKQKIIDAQEKRIASLDAANARLMSALTQLKERYSMQARNGISPTNPTKLQITENGEFRNSSNC

SEQ ID NO: 22381 - protein, 1069 aa, Homo sapiens
  Payload ID: 4510
  Gene Symbol: DAB2IP
  Gene Name: DAB2 interacting protein
  ENSP ID: ENSP00000362887
SQPKLDRNHSFRHILPGFRSAAAAAADNERSHLMPRLKESRSHESLLSPSSAVEALDLSMEEEVVIKPVHSSILGQDYCFEVTTSSGSKCFSCRSAAERDKWMENLRRAVHPNKDNSRRVEHILKLWVIEAKDLPAKKKYLCELCLDDVLYARTTGKLKTDNVFWGEHFEFHNLPPLRTVTVHLYRETDKKKKKERNSYLGLVSLPAASVAGRQFVEKWYPVVTPNPKGGKGPGPMIRIKARYQTITILPMEMYKEFAEHITNHYLGLCAALEPILSAKTKEEMASALVHILQSTGKVKDFLTDLMMSEVDRCGDNEHLIFRENTLATKAIEEYLKLVGQKYLQDALGEFIKALYESDENCEVDPSKCSAADLPEHQGNLKMCCELAFCKIINSYCVFPRELKEVFASWRQECSSRGRPDISERLISASLFLRFLCPAIMSPSLFNLLQEYPDDRTARTLTLIAKVTQNLANFAKFGSKEEYMSFMNQFLEHEWTNMQRFLLEISNPETLSNTAGFEGYIDLGRELSSLHSLLWEAVSQLEQSIVSKLGPLPRILRDVHTALSTPGSGQLPGTNDLASTPGSGSSSISAGLQKMVIENDLSGLIDFTRLPSPTPENKDLFFVTRSSGVQPSPARSSSYSEANEPDLQMANGGKSLSMVDLQDARTLDGEAGSPAGPDVLPTDGQAAAAQLVAGWPARATPVNLAGLATVRRAGQTPTTPGTSEGAPGRPQLLAPLSFQNPVYQMAAGLPLSPRGLGDSGSEGHSSLSSHSNSEELAAAAKLGSFSTAAEELARRPGELARRQMSLTEKGGQPTVPRQNSAGPQRRIDQPPPPPPPPPPAPRGRTPPNLLSTLQYPRPSSGTLASASPDWVGPSTRLRQQSSSSKGDSPELKPRAVHKQGPSPVSPNALDRTAAWLLTMNAQLLEDEGLGPDPPHRDRLRSKDELSQAEKDLAVLQDKLRISTKKLEEYETLFKCQEETTQKLVLEYQARLEEGEERLRRQQEDKDIQMKGIISRLMSVEEELKKDHAEMQAAVDSKQKIIDAQEKRIASLDAANARLMSALTQLKESMH

SEQ ID NO: 22382 - protein, 291 aa, Homo sapiens
  Payload ID: 4510
  Gene Symbol: DAB2IP
  Gene Name: DAB2 interacting protein
  ENSP ID: ENSP00000377872
MEPDSLLDQDDSYESPQERPGSRRSLPGSLSEKSPSMEPSAATPFRVTGFLSRRLKGSIKRTKSQPKLDRNHSFRHILPGFRSAAAAAADNERSHLMPRLKESRSHESLLSPSSAVEALDLSMEEEVVIKPVHSSILGQDYCFEVTTSSGSKCFSCRSAAERDKWMENLRRAVHPNKDNSRRVEHILKLWVIEAKDLPAKKKYLCELCLDDVLYARTTGKLKTDNVFWGEHFEFHNLPPLRTVTVHLYRETDKKKKKERNSYLGLVSLPAASVAGRQFVEKWYPVVTPNPK

SEQ ID NO: 22383 - protein, 1189 aa, Homo sapiens
  Payload ID: 4510
  Gene Symbol: DAB2IP
  Gene Name: DAB2 interacting protein
  Uniprot ID: Q5VWQ8
  ENSP ID: ENSP00000386183
MSAGGSARKSTGRSSYYYRLLRRPRLQRQRSRSRSRTRPARESPQERPGSRRSLPGSLSEKSPSMEPSAATPFRVTGFLSRRLKGSIKRTKSQPKLDRNHSFRHILPGFRSAAAAAADNERSHLMPRLKESRSHESLLSPSSAVEALDLSMEEEVVIKPVHSSILGQDYCFEVTTSSGSKCFSCRSAAERDKWMENLRRAVHPNKDNSRRVEHILKLWVIEAKDLPAKKKYLCELCLDDVLYARTTGKLKTDNVFWGEHFEFHNLPPLRTVTVHLYRETDKKKKKERNSYLGLVSLPAASVAGRQFVEKWYPVVTPNPKGGKGPGPMIRIKARYQTITILPMEMYKEFAEHITNHYLGLCAALEPILSAKTKEEMASALVHILQSTGKVKDFLTDLMMSEVDRCGDNEHLIFRENTLATKAIEEYLKLVGQKYLQDALGEFIKALYESDENCEVDPSKCSAADLPEHQGNLKMCCELAFCKIINSYCVFPRELKEVFASWRQECSSRGRPDISERLISASLFLRFLCPAIMSPSLFNLLQEYPDDRTARTLTLIAKVTQNLANFAKFGSKEEYMSFMNQFLEHEWTNMQRFLLEISNPETLSNTAGFEGYIDLGRELSSLHSLLWEAVSQLEQSIVSKLGPLPRILRDVHTALSTPGSGQLPGTNDLASTPGSGSSSISAGLQKMVIENDLSGLIDFTRLPSPTPENKDLFFVTRSSGVQPSPARSSSYSEANEPDLQMANGGKSLSMVDLQDARTLDGEAGSPAGPDVLPTDGQAAAAQLVAGWPARATPVNLAGLATVRRAGQTPTTPGTSEGAPGRPQLLAPLSFQNPVYQMAAGLPLSPRGLGDSGSEGHSSLSSHSNSEELAAAAKLGSFSTAAEELARRPGELARRQMSLTEKGGQPTVPRQNSAGPQRRIDQPPPPPPPPPPAPRGRTPPNLLSTLQYPRPSSGTLASASPDWVGPSTRLRQQSSSSKGDSPELKPRAVHKQGPSPVSPNALDRTAAWLLTMNAQLLEDEGLGPDPPHRDRLRSKDELSQAEKDLAVLQDKLRISTKKLEEYETLFKCQEETTQKLVLEYQARLEEGEERLRRQQEDKDIQMKGIISRLMSVEEELKKDHAEMQAAVDSKQKIIDAQEKRIASLDAANARLMSALTQLKERYSMQARNGISPTNPTKLQITENGEFRNSSNC

SEQ ID NO: 22384 - protein, 229 aa, Homo sapiens
  Payload ID: 4510
  Gene Symbol: DAB2IP
  Gene Name: DAB2 interacting protein
  ENSP ID: ENSP00000409327
MPRLKESRSHESLLSPSSAVEALDLSMEEEVVIKPVHSSILGQDYCFEVTTSSGSKCFSCRSAAERDKWMENLRRAVHPNKDNSRRVEHILKLWVIEAKDLPAKKKYLCELCLDDVLYARTTGKLKTDNVFWGEHFEFHNLPPLRTVTVHLYRETDKKKKKERNSYLGLVSLPAASVAGRQFVEKWYPVVTPNPKGGKGPGPMIRIKARYQTITILPMEMYKEFAEHIT

SEQ ID NO: 22385 - protein, 504 aa, Homo sapiens
  Payload ID: 4511
  Gene Symbol: DACH1
  Gene Name: dachshund family transcription factor 1
  ENSP ID: ENSP00000481551
MAVPAALIPPTQLVPPQPPISTSASSSGTTTSTSSATSSPAPSIGPPASSGPTLFRPEPIASAAAAAATVTSTGGGGGGGGSGGGGGSSGNGGGGGGGGGGSNCNPNLAAASNGSGGGGGGISAGGGVASSTPINASTGSSSSSSSSSSSSSSSSSSSSSSSSCGPLPGKPVYSTPSPVENTPQNNECKMVDLRGAKVASFTVEGCELICLPQAFDLFLKHLVGGLHTVYTKLKRLEITPVVCNVEQVRILRGLGAIQPGVNRCKLISRKDFETLYNDCTNASSRPGRPPKRTQSVTSPENSHIMPHSVPGLMSPGIIPPTDETPLSTPTARDSLDKLSLTGHGQPLPPGFPSPFLFPDGLSSIETLLTNIQGLLKVAIDNARAQEKQVQLEKTELKMDFLRERELRETLEKQLAMEQKNRAIVQKRLKKEKKAKRKLQEALEFETKRREQAEQTLKQAASTDSLRVLNDSLTPEIEADRSGGRTDAERTIQDGRLYLKTTVMY

SEQ ID NO: 22386 - protein, 706 aa, Homo sapiens
  Payload ID: 4511
  Gene Symbol: DACH1
  Gene Name: dachshund family transcription factor 1
  Uniprot ID: Q9UI36
  ENSP ID: ENSP00000482245
MAVPAALIPPTQLVPPQPPISTSASSSGTTTSTSSATSSPAPSIGPPASSGPTLFRPEPIASAAAAAATVTSTGGGGGGGGSGGGGGSSGNGGGGGGGGGGSNCNPNLAAASNGSGGGGGGISAGGGVASSTPINASTGSSSSSSSSSSSSSSSSSSSSSSSSCGPLPGKPVYSTPSPVENTPQNNECKMVDLRGAKVASFTVEGCELICLPQAFDLFLKHLVGGLHTVYTKLKRLEITPVVCNVEQVRILRGLGAIQPGVNRCKLISRKDFETLYNDCTNASSRPGRPPKRTQSVTSPENSHIMPHSVPGLMSPGIIPPTGLTAAAAAAAAATNAAIAEAMKVKKIKLEAMSNYHASNNQHGADSENGDMNSSVGLELPFMMMPHPLIPVSLPPASVTMAMSQMNHLSTIANMAAAAQVQSPPSRVETSVIKERVPDSPSPAPSLEEGRRPGSHPSSHRSSSVSSSPARTESSSDRIPVHQNGLSMNQMLMGLSPNVLPGPKEGDLAGHDMGHESKRMHIEKDETPLSTPTARDSLDKLSLTGHGQPLPPGFPSPFLFPDGLSSIETLLTNIQGLLKVAIDNARAQEKQVQLEKTELKMDFLRERELRETLEKQLAMEQKNRAIVQKRLKKEKKAKRKLQEALEFETKRREQAEQTLKQAASTDSLRVLNDSLTPEIEADRSGGRTDAERTIQDGRLYLKTTVMY

SEQ ID NO: 22387 - protein, 558 aa, Homo sapiens
  Payload ID: 4511
  Gene Symbol: DACH1
  Gene Name: dachshund family transcription factor 1
  ENSP ID: ENSP00000482493
MAVPAALIPPTQLVPPQPPISTSASSSGTTTSTSSATSSPAPSIGPPASSGPTLFRPEPIASAAAAAATVTSTGGGGGGGGSGGGGGSSGNGGGGGGGGGGSNCNPNLAAASNGSGGGGGGISAGGGVASSTPINASTGSSSSSSSSSSSSSSSSSSSSSSSSCGPLPGKPVYSTPSPVENTPQNNECKMVDLRGAKVASFTVEGCELICLPQAFDLFLKHLVGGLHTVYTKLKRLEITPVVCNVEQVRILRGLGAIQPGVNRCKLISRKDFETLYNDCTNASSRPGRPPKRTQSVTSPENSHIMPHSVPGLMSPGIIPPTGLTAAAAAAAAATNAAIAEAMKVKKIKLEAMSNYHASNNQHGADSENGDMNSSVDETPLSTPTARDSLDKLSLTGHGQPLPPGFPSPFLFPDGLSSIETLLTNIQGLLKVAIDNARAQEKQVQLEKTELKMDFLRERELRETLEKQLAMEQKNRAIVQKRLKKEKKAKRKLQEALEFETKRREQAEQTLKQAASTDSLRVLNDSLTPEIEADRSGGRTDAERTIQDGRLYLKTTVMY

SEQ ID NO: 22388 - protein, 758 aa, Homo sapiens
  Payload ID: 4511
  Gene Symbol: DACH1
  Gene Name: dachshund family transcription factor 1
  ENSP ID: ENSP00000482797
MAVPAALIPPTQLVPPQPPISTSASSSGTTTSTSSATSSPAPSIGPPASSGPTLFRPEPIASAAAAAATVTSTGGGGGGGGSGGGGGSSGNGGGGGGGGGGSNCNPNLAAASNGSGGGGGGISAGGGVASSTPINASTGSSSSSSSSSSSSSSSSSSSSSSSSCGPLPGKPVYSTPSPVENTPQNNECKMVDLRGAKVASFTVEGCELICLPQAFDLFLKHLVGGLHTVYTKLKRLEITPVVCNVEQVRILRGLGAIQPGVNRCKLISRKDFETLYNDCTNASSRPGRPPKRTQSVTSPENSHIMPHSVPGLMSPGIIPPTGLTAAAAAAAAATNAAIAEAMKVKKIKLEAMSNYHASNNQHGADSENGDMNSSVGSSDGSWDKETLPSSPSQGPQASITHPRMPGARSLPLSHPLNHLQQSHLLPNGLELPFMMMPHPLIPVSLPPASVTMAMSQMNHLSTIANMAAAAQVQSPPSRVETSVIKERVPDSPSPAPSLEEGRRPGSHPSSHRSSSVSSSPARTESSSDRIPVHQNGLSMNQMLMGLSPNVLPGPKEGDLAGHDMGHESKRMHIEKDETPLSTPTARDSLDKLSLTGHGQPLPPGFPSPFLFPDGLSSIETLLTNIQGLLKVAIDNARAQEKQVQLEKTELKMDFLRERELRETLEKQLAMEQKNRAIVQKRLKKEKKAKRKLQEALEFETKRREQAEQTLKQAASTDSLRVLNDSLTPEIEADRSGGRTDAERTIQDGRLYLKTTVMY

SEQ ID NO: 22389 - protein, 599 aa, Homo sapiens
  Payload ID: 4512
  Gene Symbol: DACH2
  Gene Name: dachshund family transcription factor 2
  Uniprot ID: Q96NX9
  ENSP ID: ENSP00000362217
MAVSASPVISATSSGAGVPGGLFRAEPLYSTPREPPRLTPNMINSFVVNNHSNSAGGGGRGNTNTNECRMVDMHGMKVASFLMDGQELICLPQVFDLFLKHLVGGLHTVYTKLKRLDISPVVCTVEQVRILRGLGAIQPGVNRCKLITRKDFETLFTDCTNARRKRQMTRKQAVNSSRPGRPPKRSLGVLQENARLLTHAVPGLLSPGLITPTGITAAAMAEAMKLQKMKLMAMNTLQGNGSQNGTESEPDDLNSNTGGSESSWDKDKMQSPFAAPGPQHGIAHAALAGQPGIGGAPTLNPLQQNHLLTNRLDLPFMMMPHPLLPVSLPPASVAMAMNQMNHLNTIANMAAAAQIHSPLSRAGTSVIKERIPESPSPAPSLEENHRPGSQTSSHTSSSVSSSPSQMDHHLERMEEVPVQIPIMKSPLDKIQLTPGQALPAGFPGPFIFADSLSSVETLLTNIQGLLKVALDNARIQEKQIQQEKKELRLELYREREIRENLERQLAVELQSRTTMQKRLKKEKKTKRKLQEALEFESKRREQVEQALKQATTSDSGLRMLKDTGIPDIEIENNGTPHDSAAMQGGNYYCLEMAQQLYSA

SEQ ID NO: 22390 - protein, 571 aa, Homo sapiens
  Payload ID: 4512
  Gene Symbol: DACH2
  Gene Name: dachshund family transcription factor 2
  Uniprot ID: Q96NX9
  ENSP ID: ENSP00000362223
MAVSASPVISATSSGAGVPGGLFRAEPLYSTPREPPRLTPNMINSFVVNNHSNSAGGGGRGNTNTNECRMVDMHGMKVASFLMDGQELICLPQVFDLFLKHLVGGLHTVYTKLKRLDISPVVCTVEQVRILRGLGAIQPGVNRCKLITRKDFETLFTDCTNASSRPGRPPKRSLGVLQENARLLTHAVPGLLSPGLITPTGITAAAMAEAMKLQKMKLMAMNTLQGNGSQNGTESEPDDLNSNTGGSESSWDKDKMQSPFAAPGPQHGIAHAALAGQPGIGGAPTLNPLQQNHLLTNRLDLPFMMMPHPLLPVSLPPASVAMAMNQMNHLNTIANMAAAAQIHSPLSRAGTSVIKERIPESPSPAPSLEENHRPGSQTSSHTSSSVSSSPSQMDHHLERMEEVPVQIPIMKSPLDKIQLTPGQALPAGFPGPFIFADSLSSVETLLTNIQGLLKVALDNARIQEKQIQQEKKELRLELYREREIRENLERQLAVELQSRTTMQKRLKKEKKTKRKLQEALEFESKRREQVEQALKQATTSDSGLRMLKDTGIPDIEIENNGTPHDSAAMQA

SEQ ID NO: 22391 - protein, 432 aa, Homo sapiens
  Payload ID: 4512
  Gene Symbol: DACH2
  Gene Name: dachshund family transcription factor 2
  Uniprot ID: Q96NX9
  ENSP ID: ENSP00000420896
MTRKQAVNSSRPGRPPKRSLGVLQENARLLTHAVPGLLSPGLITPTGITAAAMAEAMKLQKMKLMAMNTLQGNGSQNGTESEPDDLNSNTGGSESSWDKDKMQSPFAAPGPQHGIAHAALAGQPGIGGAPTLNPLQQNHLLTNRLDLPFMMMPHPLLPVSLPPASVAMAMNQMNHLNTIANMAAAAQIHSPLSRAGTSVIKERIPESPSPAPSLEENHRPGSQTSSHTSSSVSSSPSQMDHHLERMEEVPVQIPIMKSPLDKIQLTPGQALPAGFPGPFIFADSLSSVETLLTNIQGLLKVALDNARIQEKQIQQEKKELRLELYREREIRENLERQLAVELQSRTTMQKRLKKEKKTKRKLQEALEFESKRREQVEQALKQATTSDSGLRMLKDTGIPDIEIENNGTPHDSAAMQGGNYYCLEMAQQLYSA

SEQ ID NO: 22392 - protein, 440 aa, Homo sapiens
  Payload ID: 4512
  Gene Symbol: DACH2
  Gene Name: dachshund family transcription factor 2
  ENSP ID: ENSP00000421509
MAVSASPVISATSSGAGVPGGLFRAEPLYSTPREPPRLTPNMINSFVVNNHSNSAGGGGRGNTNTNECRMVDMHGMKVASFLMDGQELICLPQVFDLFLKHLVGGLHTVYTKLKRLDISPVVCTVEQVRILRGLGAIQPGVNRCKLITRKDFETLFTDCTNARRKRQMTRKQAVNSSRPGRPPKRSLGVLQENARLLTHAVPGLLSPGLITPTGITAAAMAEAMKLQKMKLMAMNTLQGNGSQNGTESEPDDLNSNTGGSESSWDKDKMQSPFAAPGPQHGIAHAALAGQPGIGGAPTLNPLQQNHLLTNRLDLPFMMMPHPLLPVSLPPASVAMAMNQMNHLNTIANMAAAAQIHSPLSRAGTSVIKERIPESPSPAPSLEENHRPGSQTSSHTSSSVSSSPSQMDHHLERMVMMPNNREELIVDQDNGLTIKKFQKDN

SEQ ID NO: 22393 - protein, 380 aa, Homo sapiens
  Payload ID: 4512
  Gene Symbol: DACH2
  Gene Name: dachshund family transcription factor 2
  Uniprot ID: Q96NX9
  ENSP ID: ENSP00000421919
MAEAMKLQKMKLMAMNTLQGNGSQNGTESEPDDLNSNTGGSESSWDKDKMQSPFAAPGPQHGIAHAALAGQPGIGGAPTLNPLQQNHLLTNRLDLPFMMMPHPLLPVSLPPASVAMAMNQMNHLNTIANMAAAAQIHSPLSRAGTSVIKERIPESPSPAPSLEENHRPGSQTSSHTSSSVSSSPSQMDHHLERMEEVPVQIPIMKSPLDKIQLTPGQALPAGFPGPFIFADSLSSVETLLTNIQGLLKVALDNARIQEKQIQQEKKELRLELYREREIRENLERQLAVELQSRTTMQKRLKKEKKTKRKLQEALEFESKRREQVEQALKQATTSDSGLRMLKDTGIPDIEIENNGTPHDSAAMQGGNYYCLEMAQQLYSA

SEQ ID NO: 22394 - protein, 249 aa, Homo sapiens
  Payload ID: 4512
  Gene Symbol: DACH2
  Gene Name: dachshund family transcription factor 2
  ENSP ID: ENSP00000422727
IANMAAAAQIHSPLSRAGTSVIKERIPESPSPAPSLEENHRPGSQTSSHTSSSVSSSPSQMDHHLERMEEVPVQIPIMKSPLDKIQLTPGQALPAGFPGPFIFADSLSSVETLLTNIQVNNISINKINGLLKVALDNARIQEKQIQQEKKELRLELYREREIRENLERQLAVELQSRTTMQKRLKKEKKTKRKLQEALEFESKRREQVEQALKQATTSDSGLRMLKDTGIPDIEIENNGTPHDSAAMQA

SEQ ID NO: 22395 - protein, 175 aa, Homo sapiens
  Payload ID: 4512
  Gene Symbol: DACH2
  Gene Name: dachshund family transcription factor 2
  ENSP ID: ENSP00000426837
MAVSASPVISATSSGAGVPGGLFRAEPLYSTPREPPRLTPNMINSFVVNNHSNSAGGGGRGNTNTNECRMVDMHGMKVASFLMDGQELICLPQVFDLFLKHLVGGLHTVYTKLKRLDISPVVCTVEQVRILRGLGAIQPGVNRCKLITRKDFETLFTDCTNARVSLCCPGCSAVV

SEQ ID NO: 22396 - protein, 427 aa, Homo sapiens [sequence omitted]

SEQ ID NO: 22397 - protein, 3298 aa, Homo sapiens
  Payload ID: 4513
  Gene Symbol: DCHS1
  Gene Name: dachsous cadherin-related 1
  Uniprot ID: Q96JQ0
  ENSP ID: ENSP00000299441
MQKELGIVPSCPGMKSPRPHLLLPLLLLLLLLLGAGVPGAWGQAGSLDLQIDEEQPAGTLIGDISAGLPAGTAAPLMYFISAQEGSGVGTDLAIDEHSGVVRTARVLDREQRDRYRFTAVTPDGATVEVTVRVADINDHAPAFPQARAALQVPEHTAFGTRYPLEPARDADAGRLGTQGYALSGDGAGETFRLETRPGPDGTPVPELVVTGELDRENRSHYMLQLEAYDGGSPPRRAQALLDVTLLDINDHAPAFNQSRYHAVVSESLAPGSPVLQVFASDADAGVNGAVTYEINRRQSEGDGPFSIDAHTGLLQLERPLDFEQRRVHELVVQARDGGAHPELGSAFVTVHVRDANDNQPSMTVIFLSADGSPQVSEAAPPGQLVARISVSDPDDGDFAHVNVSLEGGEGHFALSTQDSVIYLVCVARRLDREERDAYNLRVTATDSGSPPLRAEAAFVLHVTDVNDNAPAFDRQLYRPEPLPEVALPGSFVVRVTARDPDQGTNGQVTYSLAPGAHTHWFSIDPTSGIITTAASLDYELEPQPQLIVVATDGGLPPLASSATVSVALQDVNDNEPQFQRTFYNASLPEGTQPGTCFLQVTATDADSGPFGLLSYSLGAGLGSSGSPPFRIDAHSGDVCTTRTLDRDQGPSSFDFTVTAVDGGGLKSMVYVKVFLSDENDNPPQFYPREYAASISAQSPPGTAVLRLRAHDPDQGSHGRLSYHILAGNSPPLFTLDEQSGLLTVAWPLARRANSVVQLEIGAEDGGGLQAEPSARVDISIVPGTPTPPIFEQLQYVFSVPEDVAPGTSVGIVQAHNPPGRLAPVTLSLSGGDPRGLFSLDAVSGLLQTLRPLDRELLGPVLELEVRAGSGVPPAFAVARVRVLLDDVNDNSPAFPAPEDTVLLPPNTAPGTPIYTLRALDPDSGVNSRVTFTLLAGGGGAFTVDPTTGHVRLMRPLGPSGGPAHELELEARDGGSPPRTSHFRLRVVVQDVGTRGLAPRFNSPTYRVDLPSGTTAGTQVLQVQAQAPDGGPITYHLAAEGASSPFGLEPQSGWLWVRAALDREAQELYILKVMAVSGSKAELGQQTGTATVRVSILNQNEHSPRLSEDPTFLAVAENQPPGTSVGRVFATDRDSGPNGRLTYSLQQLSEDSKAFRIHPQTGEVTTLQTLDREQQSSYQLLVQVQDGGSPPRSTTGTVHVAVLDLNDNSPTFLQASGAAGGGLPIQVPDRVPPGTLVTTLQAKDPDEGENGTILYTLTGPGSELFSLHPHSGELLTAAPLIRAERPHYVLTLSAHDQGSPPRSASLQLLVQVLPSARLAEPPPDLAERDPAAPVPVVLTVTAAEGLRPGSLLGSVAAPEPAGVGALTYTLVGGADPEGTFALDAASGRLYLARPLDFEAGPPWRALTVRAEGPGGAGARLLRVQVQVQDENEHAPAFARDPLALALPENPEPGAALYTFRASDADGPGPNSDVRYRLLRQEPPVPALRLDARTGALSAPRGLDRETTPALLLLVEATDRPANASRRRAARVSARVFVTDENDNAPVFASPSRVRLPEDQPPGPAALHVVARDPDLGEAARVSYRLASGGDGHFRLHSSTGALSVVRPLDREQRAEHVLTVVASDHGSPPRSATQVLTVSVADVNDEAPTFQQQEYSVLLRENNPPGTSLLTLRATDPDVGANGQVTYGGVSSESFSLDPDTGVLTTLRALDREEQEEINLTVYAQDRGSPPQLTHVTVRVAVEDENDHAPTFGSAHLSLEVPEGQDPQTLTMLRASDPDVGANGQLQYRILDGDPSGAFVLDLASGEFGTMRPLDREVEPAFQLRIEARDGGQPALSATLLLTVTVLDANDHAPAFPVPAYSVEVPEDVPAGTLLLQLQAHDPDAGANGHVTYYLGAGTAGAFLLEPSSGELRTAAALDREQCPSYTFSVSAVDGAAAGPLSTTVSVTITVRDVNDHAPTFPTSPLRLRLPRPGPSFSTPTLALATLRAEDRDAGANASILYRLAGTPPPGTTVDSYTGEIRVARSPVALGPRDRVLFIVATDLGRPARSATGVIIVGLQGEAERGPRFPRASSEATIRENAPPGTPIVSPRAVHAGGTNGPITYSILSGNEKGTFSIQPSTGAITVRSAEGLDFEVSPRLRLVLQAESGGAFAFTVLTLTLQDANDNAPRFLRPHYVAFLPESRPLEGPLLQVEADDLDQGSGGQISYSLAASQPARGLFHVDPTTGTITTTAILDREIWAETRLVLMATDRGSPALVGSATLTVMVIDTNDNRPTIPQPWELRVSEDALLGSEIAQVTGNDVDSGPVLWYVLSPSGPQDPFSVGRYGGRVSLTGPLDFEQCDRYQLQLLAHDGPHEGRANLTVLVEDVNDNAPAFSQSLYQVMLLEHTPPGSAILSVSATDRDSGANGHISYHLASPADGFSVDPNNGTLFTIVGTVALGHDGSGAVDVVLEARDHGAPGRAARATVHVQLQDQNDHAPSFTLSHYRVAVTEDLPPGSTLLTLEATDADGSRSHAAVDYSIISGNWGRVFQLEPRLAEAGESAGPGPRALGCLVLLEPLDFESLTQYNLTVAAADRGQPPQSSVVPVTVTVLDVNDNPPVFTRASYRVTVPEDTPVGAELLHVEASDADPGPHGLVRFTVSSGDPSGLFELDESSGTLRLAHALDCETQARHQLVVQAADPAGAHFALAPVTIEVQDVNDHGPAFPLNLLSTSVAENQPPGTLVTTLHAIDGDAGAFGRLRYSLLEAGPGPEGREAFALNSSTGELRARVPFDYEHTESFRLLVGAADAGNLSASVTVSVLVTGEDEYDPVFLAPAFHFQVPEGARRGHSLGHVQATDEDGGADGLVLYSLATSSPYFGINQTTGALYLRVDSRAPGSGTATSGGGGRTRREAPRELRLEVIARGPLPGSRSATVPVTVDITHTALGLAPDLNLLLVGAVAASLGVVVVLALAALVLGLVRARSRKAEAAPGPMSQAAPLASDSLQKLGREPPSPPPSEHLYHQTLPSYGGPGAGGPYPRGGSLDPSHSSGRGSAEAAEDDEIRMINEFPRVASVASSLAARGPDSGIQQDADGLSDTSCEPPAPDTWYKGRKAGLLLPGAGATLYREEGPPATATAFLGGCGLSPAPTGDYGFPADGKPCVAGALTAIVAGEEELRGSYNWDYLLSWCPQFQPLASVFTEIARLKDEARPCPPAPRIDPPPLITAVAHPGAKSVPPKPANTAAARAIFPPASHRSPISHEGSLSSAAMSPSFSPSLSPLAARSPVVSPFGVAQGPSASALSAESGLEPPDDTELHI

SEQ ID NO: 22398 - protein, 1369 aa, Homo sapiens
  Payload ID: 4514
  Gene Symbol: DCHS2
  Gene Name: dachsous cadherin-related 2
  ENSP ID: ENSP00000345062
MSPCGRKMGEGRQQRRAPVGKLLLLPGRRDTPHGRSGSSGARTQRSLLWLLVHVWLWAASGSSAQLFNLTLSVDEGLPPDTLVGDIRAGLPAAQQQEGSGFFLSEDSDDSPLLDDFHVHPDTGIIRTARRLDRERRDHYSFVAATLLGAVVQVEIRVNDVNDHSPRFPLDSLQLDVSELSPPGTAFRLPVAHDPDAGLFSTQGYTLVQPSDLPKDPAGPFFQLRYRTPGPLPSPLLPGSSSPLEPLDLVLLRRLDREEAAAHRLQIEAWDGGRPRRTGLLSVELRVLDENDNPPVFEQDEYRAAVREDAQPGAEVCRVRATDRDLGPNGFVRYSVRARQVPGAGSGGGALGDAAYFAVEELSGVVRVWRPLDREAQAWHQLVVEARDGGAEPEVATVRVSIAVLDVNDNRPAIHVLFLTEGGVARVSEGARPGDYVARVSVSDADGDWEKEDEATGELGVGLGDGSISLSLEGGEGDFALLPGGPPGVFFLCVEGPLDRESRDLYELLLVATDAGSPPLSTEETLLLRVADLNDQPPLFSQQHYKASVSEAAAPGTVVMWVSASDADEAGSDHAWLRYTVVQLSAPCNLGSLQSKMVHTAECGPSFAIDSESGAISTIRTLDREVQEAVELKVVAQDLGEPPLSATCLVSITVDDVNDNEPIFWRQVYNATIAEHAPVGHCFLQVTASDADSGLYGFIEYSLYDGFLSYEAPQAFRIDPHDGQICVSQDIDRERDPATYDLLVEAKDGGGLSAQAFVRVDLEDVNDNHPVFNPSTYVTSISDETQPGTEIINVLATDQDSGIYGTVAYELIPGNVSSLFTIDSTTGIIYLTLPLSHLESTTLSLMVSAQDGGGLTAVINADVTIHIFQTTLAPAEFERPKYTFLVYEDVPEDSPIGTVKAREPLNSSEPIFYRISSGDLGGKFSIHPRLGTIRTRKPLDHETQPVVVLTVQAQLGSAPACSSTEVNITVMDVNDNHPAFLRTSDEIRISQTTPPGTALYLARAEDRDSGRNGLIRYSIASPQPGVFAIDRALGVLFLNGSLGAGEQRELTLTLRAEDQGVHPQAALLVLTVVIEKREHSPSWTFEHLVYQVEVSESLSPMTQMLQTQAHPLGPQRAASPLRYSLEPSVDSAMFGIRPYTGWIYLRRQFDYESTQTYNFRVFAWIPEDGFLQNVSTTVIVRVWDENDNSPTFLHDVLFLKVEESPVPQGVIGKITAIDMDSGKNGQLLYFLLSDGKFFKMNPNTGELINWVALDREHRGHHEMTVLVTDRGSPPRNATMAVYVSVTDINDNRPFFPQCLPGKELHVKVLEGQPVNMLVTTVFAKDPDEGNNAEVTYSVSSARPMPLKGKTAFGKQSCKKQTNKQTNKILT

SEQ ID NO: 22399 - protein, 2916 aa, Homo sapiens
  Payload ID: 4514
  Gene Symbol: DCHS2
  Gene Name: dachsous cadherin-related 2
  ENSP ID: ENSP00000349768
  MOD_RES (1)..(1): Any amino acid
XRLDEITKSENEDGEKKMFTQQFESTDACVYEVYVKINSIVKSQSQCGLKRGSPETELWGAIVFRSQEENAKPVKETEVTASDADSGLYGFIEYSLYDGFLSYEAPQAFRIDPHDGQICVSQDIDRERDPATYDLLVEAKDGDEQRMTHLALVKGGLSAQAFVRVDLEDVNDNHPVFNPSTYVTSISDETQPGTEIINVLATDQDSGIYGTVAYELIPGNVSSLFTIDSTTGLYSPEVEILSAVNFSADKEVMNSLEMFLPLLRHFKKVERDEEAAEKKFEASRGWFMRFKGRRHLHYLKVQDEAASADGEAAARYVANLAKILGEGIIYLTLPLSHLESTTLSLMVSAQDGGGLTAVINADVTIHIFQTTLAPAEFERPKYTFLVYEDVPEDSPIGTVKAREPLNSSEPIFYRISSGDLGGKFSIHPRLGTIRTRKPLDHETQPVVVLTVQAQLGSAPACSSTEVNITVMDVNDNHPAFLRTSDEIRISQTTPPGTALYLARAEDRDSGRNGLIRYSIASPQPGVFAIDRALGVLFLNGSLGAGEQRELTLTLRAEDQGVHPQAALLVLTVVIEKREHSPSWTFEHLVYQVEVSESLSPMTQMLQTQAHPLGPQRAASPLRYSLEPSVDSAMFGIRPYTGWIYLRRQFDYESTQTYNFRVFAWIPEDGFLQNVSTTVIVRVWDENDNSPTFLHDVLFLKVEESPVPQGVIGKITAIDMDSGKNGQLLYFLLSDGKFFKMNPNTGPAGTIYVITWADGAAAFSGTDFAFSSDELQAFVLKSLFCELGEGELINWVALDREHRGHHEMTVLVTDRGSPPRNATMAVYVSVTDINDNRPFFPQCLPGKELHVKVLEGQPVNMLVTTVFAKDPDEGNNAEVTYSVSSEDSSDHFKIDANNGEIRTTTILSYDYRPSYRMSVIATDQGVPPLQGQAVVNIQVIPLSKGRAIMSQNIRHLIIPENLKPTKIMSLIKSSDHLQQHYNGKLHFSIVADDKDGHFEIDSSTGDLFLSKELDYETTSHYLFRVITTDHSKNLSLSSTVFLSIDVEDQNDHSPSFQDELIVISVEENVPIGTLVYVFNAKDDDGSFLNSRIQYYIESHNPGTNPFLIHPSFGTLVTVSRLDRESIPTVILTVTASDQAVNVTDRRLRSLTAQIVILDVNDHNPTFISFPNAHVKEDVTVGSLVHHITAHDPDEGRNGKVTYSILSGNENMTFMLDESSGLLTTTCPLDYEMKTQHILTVLALDDGTPALSSSQTLTVTVLDVNDEAPVFKQHLYEASVKENQNPGEFVTRVEALDRDSGVNSKLQFEIMPGASFELFEINSDTGEVVTTTILDREIQEVFTLRVLVRDGGFPSLSSTTTILCTVEDENDHAPEFIVSSYDIEVLENQEPEVVYTVLASDMDAGNNRAVEYHIIDGNTDECFTINEMSGELSTTRALDREQISNFTLVILCSDLGDPPRSSVIHLQVRVLDANDHSPSFPTLYYQSSVREDAEVGTVVLVLSAVDKDEGLNGQTEYFLTDEASGAFTIDPMSGTLKTSNTLDREARSQHTFSAVARDCSIQGSRSTTVIIKVYVTDVNDNDPVLEQNPFDVFLSPESPTNQTTVIVRADDLDLGPNGTVVFSFAETQSMFSIDKYTGEIQFQQNPSSEYFPIWLQLKVTDQGIPARTTTGLLVIHMEGEDVKISFSHHLYKGLVTENCEAGTSIVTVKAFAPDSIQDSMKYSIFSGNEDGVLSLCSKSGQLTVKEPKFLDFEVRNEVQLIVLAESSGHRAYCKVAVLIQDENDNSPCFEQSIYQASVSESQLYNAHVIQVFATDLDSGLNGLIEYSILSGNQEEAFQIDALSGVITTKAILDYELTSSYSLIVQATDKGMPRLSNTTVIKVQVTDINDNAPAFLPSEAVEITEDSLPGVIVTHVSVHDVDLNSAFIFSFAKESNPGTKFAIDQNTGVVVLVKTLDFEEMTEYELLIQISDSVHYTEGALVVRVLDVNDNPPVFSQDFYQVTVPESIPVGYSVLTLSATDLESNENISYRILSSSKEFSIDPKNGTIFTISPVLLLDTISTTQFLVEASDGGNPDLRALTLVEIGIEDMNNYAPEFTVKSYNLSLSEDALVGSTLVTFSNIDHDWTRENTYVEYSIISGNSQNNFHVETKFFHSEYPYKQVGYLVLLHSLDREASASHELVILASDSGCPPLSSTAVISIQVLDVNDNPPNFSSLSYHTHVKESTPLGSHITVVSANDRDTGSHAEIIYNIISGNEKGHFYLEENTGVLYLIKPLDYEKMTKFTLTVQASDAEKKHFSFAVVFVSVLDDNDHAPQFMFSSFSCIVPENLPISSTICSINALDFDAGPYGELTYSIVSPCFLTHGMSYDHDLFLIDPLTGDIHAKQILDYENGNKYCLTVQAKDKGDATASLVVWVDIEGIDEFEPIFTQDQYFFTLPEKNKDRQLIGRVEASDADAGIDGVILYSLGTSSPFFSVNKTNGNIYLIRALPLIKSQLNKEDTLEMKIIAHSPKSDSKFASCTVFVNVSFSSEGTPLAVFASSFSISLVVSFLVFLILICILIVMILRHKQKDTINNYEEKKTSSLDADLRVTRDASVLKAFQKTDDCSNEVVPVDATPEWLSLISIMEKDIVNLYRHSNSSGHCSVEGETAEDKEIQRINEHPYRKCSDSALSDHESRVPDSGIPRDSDQLSCLSGETDVMVTAETAEASQTFGEGDQGEGCSTTCAQNNVLPQTVQKREAKESILADVRKESVFISGDQEVRCAALSTQTTSDHDGKDNYHWNYLLSWEPKFQPLASVFNDIAKLKDEHLHMPGIPKEKKSFVFPPPLITAVAQPGIKAVPPRMPAVNLGQVPPKHPRSPIPYHLGSLPEGMTPNFSPSLSLLTMQPPALSPLLREGELLGTHISGTCHELKAEDEVQI

SEQ ID NO: 22400 - protein, 2916 aa, Homo sapiens
  Payload ID: 4514
  Gene Symbol: DCHS2
  Gene Name: dachsous cadherin-related 2
  Uniprot ID: Q6V1P9
  ENSP ID: ENSP00000485514
MRLDEITKSENEDGEKKMFTQQFESTDACVYEVYVKINSIVKSQSQCGLKRGSPETELWGAIVFRSQEENAKPVKETEVTASDADSGLYGFIEYSLYDGFLSYEAPQAFRIDPHDGQICVSQDIDRERDPATYDLLVEAKDGDEQRMTHLALVKGGLSAQAFVRVDLEDVNDNHPVFNPSTYVTSISDETQPGTEIINVLATDQDSGIYGTVAYELIPGNVSSLFTIDSTTGLYSPEVEILSAVNFSADKEVMNSLEMFLPLLRHFKKVERDEEAAEKKFEASRGWFMRFKGRRHLHYLKVQDEAASADGEAAARYVANLAKILGEGIIYLTLPLSHLESTTLSLMVSAQDGGGLTAVINADVTIHIFQTTLAPAEFERPKYTFLVYEDVPEDSPIGTVKAREPLNSSEPIFYRISSGDLGGKFSIHPRLGTIRTRKPLDHETQPVVVLTVQAQLGSAPACSSTEVNITVMDVNDNHPAFLRTSDEIRISQTTPPGTALYLARAEDRDSGRNGLIRYSIASPQPGVFAIDRALGVLFLNGSLGAGEQRELTLTLRAEDQGVHPQAALLVLTVVIEKREHSPSWTFEHLVYQVEVSESLSPMTQMLQTQAHPLGPQRAASPLRYSLEPSVDSAMFGIRPYTGWIYLRRQFDYESTQTYNFRVFAWIPEDGFLQNVSTTVIVRVWDENDNSPTFLHDVLFLKVEESPVPQGVIGKITAIDMDSGKNGQLLYFLLSDGKFFKMNPNTGPAGTIYVITWADGAAAFSGTDFAFSSDELQAFVLKSLFCELGEGELINWVALDREHRGHHEMTVLVTDRGSPPRNATMAVYVSVTDINDNRPFFPQCLPGKELHVKVLEGQPVNMLVTTVFAKDPDEGNNAEVTYSVSSEDSSDHFKIDANNGEIRTTTILSYDYRPSYRMSVIATDQGVPPLQGQAVVNIQVIPLSKGRAIMSQNIRHLIIPENLKPTKIMSLIKSSDHLQQHYNGKLHFSIVADDKDGHFEIDSSTGDLFLSKELDYETTSHYLFRVITTDHSKNLSLSSTVFLSIDVEDQNDHSPSFQDELIVISVEENVPIGTLVYVFNAKDDDGSFLNSRIQYYIESHNPGTNPFLIHPSFGTLVTVSRLDRESIPTVILTVTASDQAVNVTDRRLRSLTAQIVILDVNDHNPTFISFPNAHVKEDVTVGSLVHHITAHDPDEGRNGKVTYSILSGNENMTFMLDESSGLLTTTCPLDYEMKTQHILTVLALDDGTPALSSSQTLTVTVLDVNDEAPVFKQHLYEASVKENQNPGEFVTRVEALDRDSGVNSKLQFEIMPGASFELFEINSDTGEVVTTTILDREIQEVFTLRVLVRDGGFPSLSSTTTILCTVEDENDHAPEFIVSSYDIEVLENQEPEVVYTVLASDMDAGNNRAVEYHIIDGNTDECFTINEMSGELSTTRALDREQISNFTLVILCSDLGDPPRSSVIHLQVRVLDANDHSPSFPTLYYQSSVREDAEVGTVVLVLSAVDKDEGLNGQTEYFLTDEASGAFTIDPMSGTLKTSNTLDREARSQHTFSAVARDCSIQGSRSTTVIIKVYVTDVNDNDPVLEQNPFDVFLSPESPTNQTTVIVRADDLDLGPNGTVVFSFAETQSMFSIDKYTGEIQFQQNPSSEYFPIWLQLKVTDQGIPARTTTGLLVIHMEGEDVKISFSHHLYKGLVTENCEAGTSIVTVKAFAPDSIQDSMKYSIFSGNEDGVLSLCSKSGQLTVKEPKFLDFEVRNEVQLIVLAESSGHRAYCKVAVLIQDENDNSPCFEQSIYQASVSESQLYNAHVIQVFATDLDSGLNGLIEYSILSGNQEEAFQIDALSGVITTKAILDYELTSSYSLIVQATDKGMPRLSNTTVIKVQVTDINDNAPAFLPSEAVEITEDSLPGVIVTHVSVHDVDLNSAFIFSFAKESNPGTKFAIDQNTGVVVLVKTLDFEEMTEYELLIQISDSVHYTEGALVVRVLDVNDNPPVFSQDFYQVTVPESIPVGYSVLTLSATDLESNENISYRILSSSKEFSIDPKNGTIFTISPVLLLDTISTTQFLVEASDGGNPDLRALTLVEIGIEDMNNYAPEFTVKSYNLSLSEDALVGSTLVTFSNIDHDWTRENTYVEYSIISGNSQNNFHVETKFFHSEYPYKQVGYLVLLHSLDREASASHELVILASDSGCPPLSSTAVISIQVLDVNDNPPNFSSLSYHTHVKESTPLGSHITVVSANDRDTGSHAEIIYNIISGNEKGHFYLEENTGVLYLIKPLDYEKMTKFTLTVQASDAEKKHFSFAVVFVSVLDDNDHAPQFMFSSFSCIVPENLPISSTICSINALDFDAGPYGELTYSIVSPCFLTHGMSYDHDLFLIDPLTGDIHAKQILDYENGNKYCLTVQAKDKGDATASLVVWVDIEGIDEFEPIFTQDQYFFTLPEKNKDRQLIGRVEASDADAGIDGVILYSLGTSSPFFSVNKTNGNIYLIRALPLIKSQLNKEDTLEMKIIAHSPKSDSKFASCTVFVNVSFSSEGTPLAVFASSFSISLVVSFLVFLILICILIVMILRHKQKDTINNYEEKKTSSLDADLRVTRDASVLKAFQKTDDCSNEVVPVDATPEWLSLISIMEKDIVNLYRHSNSSGHCSVEGETAEDKEIQRINEHPYRKCSDSALSDHESRVPDSGIPRDSDQLSCLSGETDVMVTAETAEASQTFGEGDQGEGCSTTCAQNNVLPQTVQKREAKESILADVRKESVFISGDQEVRCAALSTQTTSDHDGKDNYHWNYLLSWEPKFQPLASVFNDIAKLKDEHLHMPGIPKEKKSFVFPPPLITAVAQPGIKAVPPRMPAVNLGQVPPKHPRSPIPYHLGSLPEGMTPNFSPSLSLLTMQPPALSPLLREGELLGTHISGTCHELKAEDEVQI

SEQ ID NO: 22401 - protein, 382 aa, Homo sapiens
  Payload ID: 4515
  Gene Symbol:
  Gene Name: DADB-110M10.7
  ENSP ID: ENSP00000413440
MAVLFLLLFLCGTPQAADNMQAIYVALGEAVELPCPSPPTLHGDEHLSWFCSPAAGSFTTLVAQVQVGRPAPDPGKPGRESRLRLLGNYSLWLEGSKEEDAGRYWCAVLGQHHNYQNWRVYDVLVLKGSQLSARAADGSPCNVLLCSVVPSRRMDSVTWQEGKGPVRGRVQSFWGSEAALLLVCPGEGLSEPRSRRPRIIRCLMTHNKGVSFSLAASIDASPALCAPSTGWDMPWILMLLLTMGQGVVILALSIVLWRQRVRGAPGRGNRMRCYNCGGSPSSSCKEAVTTCGEGRPQPGLEQIKLPGNPPVTLIHQHPACVAAHHCNQVETESVGDVTYPAHRDCYLGDLCNSAVASHVAPAGILAAAATALTCLLPGLWSG

SEQ ID NO: 22402 - protein, 228 aa, Homo sapiens; identical to SEQ ID NO: 12141
  Payload ID: 4516
  Gene Symbol:
  Gene Name: DADB-127H9.10
  ENSP ID: ENSP00000392194

SEQ ID NO: 22403 - protein, 212 aa, Homo sapiens
  Payload ID: 4516
  Gene Symbol:
  Gene Name: DADB-127H9.10
  ENSP ID: ENSP00000416121
DFGYCPRVYCENQPMLPIGVLVMVGFTVGKVPVPDIRTCHFCLVEDPSVGCISGSEKCTISSSSLCMVITIYYDVKVRFIVRGCGQYISYRCQEKRNTYFAEYWYQAQCCQYDYCNSWSSPQLQSSLPEPHDRPLALPLSDSQIQWFYQALNLSLPLPNFHAGTEPDGLDPMVTLSLNLGLSFAELRRMYLFLNSSGLLVLPQAGLLTPHPS

SEQ ID NO: 22404 - protein, 304 aa, Homo sapiens; identical to SEQ ID NO: 12174
  Payload ID: 4516
  Gene Symbol:
  Gene Name: DADB-127H9.10
  ENSP ID: ENSP00000479902

SEQ ID NO: 22405 - protein, 228 aa, Homo sapiens; identical to SEQ ID NO: 12141
  Payload ID: 4516
  Gene Symbol:
  Gene Name: DADB-127H9.10
  ENSP ID: ENSP00000482951

SEQ ID NO: 22406 - protein, 161 aa, Homo sapiens; identical to SEQ ID NO: 12169
  Payload ID: 4516
  Gene Symbol:
  Gene Name: DADB-127H9.10
  ENSP ID: ENSP00000483731

SEQ ID NO: 22407 - protein, 376 aa, Homo sapiens
  Payload ID: 4517
  Gene Symbol: DALRD3
  Gene Name: DALR anticodon binding domain containing 3
  Uniprot ID: Q5D0E6
  ENSP ID: ENSP00000323265
MLTFLQQLRVDWPAASERASSHTLRSHALEELTSANDGRTLSPGILGRLCLKELVEEQGRTAGYDPNLDNCLVTEDLLSVLAELQEALWHWPEDSHPGLAGASDTGTGGCLVVHVVSCEEEFQQQKLDLLWQKLVDKAPLRQKHLICGPVKVAGAPGTLMTAPEYYEFRHTQVCKASALKHGGDLAQDPAWTEIFGVLSVATIKFEMLSTAPQSQLFLALADSSISTKGTKSGTFVMYNCARLATLFESYKCSMEQGLYPTFPPVSSLDFSLLHDEGEWLLLFNSILPFPDLLSRTAVLDCTAPGLHIAVRTEMICKFLVQLSMDFSSYYNRVHILGEPRPHLFGQMFVRLQLLRAVREVLHTGLAMLGLPPLSHI

SEQ ID NO: 22408 - protein, 543 aa, Homo sapiens
  Payload ID: 4517
  Gene Symbol: DALRD3
  Gene Name: DALR anticodon binding domain containing 3
  Uniprot ID: Q5D0E6
  ENSP ID: ENSP00000344989
MATRRLGVGETLGALNAALGPGGPVWIKETRTRHLRSRDFLAPHRALQARFDDGQVPEHLLHALACLQGPGVAPVLRCAPTPAGLSLQLQRSAVFERVLSAVAAYATPASPASLGQRVLLHCPALRSSPCALRLSQLRTVLVADHLARALRAHGVCVRLVPAVRDPHMLTFLQQLRVDWPAASERASSHTLRSHALEELTSANDGRTLSPGILGRLCLKELVEEQGRTAGYDPNLDNCLVTEDLLSVLAELQEALWHWPEDSHPGLAGASDTGTGGCLVVHVVSCEEEFQQQKLDLLWQKLVDKAPLRQKHLICGPVKVAGAPGTLMTAPEYYEFRHTQVCKASALKHGGDLAQDPAWTEIFGVLSVATIKFEMLSTAPQSQLFLALADSSISTKGTKSGTFVMYNCARLATLFESYKCSMEQGLYPTFPPVSSLDFSLLHDEGEWLLLFNSILPFPDLLSRTAVLDCTAPGLHIAVRTEMICKFLVQLSMDFSSYYNRVHILGEPRPHLFGQMFVRLQLLRAVREVLHTGLAMLGLPPLSHI

SEQ ID NO: 22409 - protein, 184 aa, Homo sapiens
  Payload ID: 4517
  Gene Symbol: DALRD3
  Gene Name: DALR anticodon binding domain containing 3
  ENSP ID: ENSP00000396650
  MOD_RES (1)..(1): Any amino acid
XPAWTEIFGVLSVATIKFEMLSTAPQSQLFLALADSSISTKGTKSGTFVMYNCARLATLFESYKCSMEQGLYPTFPPVSSLDFSLLHDEGEWLLLFNSILPFPDLLSRTAVLDCTAPGLHIAVRTEMICKFLVQLSMDFSSYYNREPRPHLFGQMFVRLQLLRAVREVLHTGLAMLGLPPLSHI

SEQ ID NO: 22410 - protein, 293 aa, Homo sapiens
  Payload ID: 4517
  Gene Symbol: DALRD3
  Gene Name: DALR anticodon binding domain containing 3
  ENSP ID: ENSP00000397385
MATRRLGVGETLGALNAALGPGGPVWIKETRTRHLRSRDFLAPHRALQARFDDGQRSAVFERVLSAVAAYATPASPASLGQRVLLHCPALRSSPCALRLSQLRTVLVADHLARALRAHGVCVRLVPAVRDPHMLTFLQQLRVDWPAASERASSHTLRSHALEELTSANDGRTLSPGILGRLCLKELVEEQGRTAGYDPNLDNCLVTEDLLSVLAELQEALWHWPEDSHPGLAGASDTGTGGCLVVHVVSCEEEFQQQKLDLLWQKLVDKAPLRQKHLICGPVKVAGAPGTLMT

SEQ ID NO: 22411 - protein, 386 aa, Homo sapiens
  Payload ID: 4517
  Gene Symbol: DALRD3
  Gene Name: DALR anticodon binding domain containing 3
  ENSP ID: ENSP00000403770
MLTFLQQLRVDWPAASERASSHTLRSHALEELTSANDGRTLSPGILGRLCLKELVEEQGRTAGYDPNLDNCLVTEDLLSVLAELQEALWHWPEDSHPGLAGASDTGTGGCLVVHVVSCEEEFQQQKLDLLWQKLVDKAPLRQKHLICGPVKVAGAPGTLMTAPEYYEFRHTQVCKASALKHGGDLAQDPAWTEIFGVLSVATIKFEMLSTAPQSQLFLALADSSISTKGTKSGTFVMYNCARLATLFESYKCSMEQGLYPTFPPVSSLDFSLLHDEGEWLLLFNSILPFPDLLSRTAVLDCTAPGLHIAVRTEMVRHRQPGHSTLYSLFWPGAQEQRDGPVTQSLSLDMQVPGTAQHGFQLLLQPGASTTPLWSDVRPPAASESCA

SEQ ID NO: 22412 - protein, 516 aa, Homo sapiens
  Payload ID: 4517
  Gene Symbol: DALRD3
  Gene Name: DALR anticodon binding domain containing 3
  Uniprot ID: Q5D0E6
  ENSP ID: ENSP00000410623
MATRRLGVGETLGALNAALGPGGPVWIKETRTRHLRSRDFLAPHRALQARFDDGQVPEHLLHALACLQGPGVAPVLRCAPTPAGLSLQLQRSAVFERVLSAVAAYATPASPASLGQRVLLHCPALRSSPCALRLSQLRTVLVADHLARALRAHGVCVRLVPAVRDPHMLTFLQQLRVDWPAASERASSHTLRSHALEELTSANDGRTLSPGILGRLCLKELVEEQGRTAGYDPNLDNCLVTEDLLSVLAELQEALWHWPEDSHPGLAGASDTGTGGCLVVHVVSCEEEFQQQKLDLLWQKLVDKAPLRQKHLICGPVKVAGAPGTLMTAPEYYEFRHTQVCKASALKHGGDLAQDPAWTEIFGVLSVATIKFEMLSTAPQSQLFLALADSSISTKGTKSGTFVMYNCARLATLFESYKCSMEQGLYPTFPPVSSLDFSLLHDEYPPLSGSAEPDSSAGLHSPGAPHCCTHRDDMQVPGTAQHGFQLLLQPGTHPGGASTTPLWSDVRPPAASESCA

SEQ ID NO: 22413 - protein, 72 aa, Homo sapiens
  Payload ID: 4517
  Gene Symbol: DALRD3
  Gene Name: DALR anticodon binding domain containing 3
  ENSP ID: ENSP00000485305
MLTFLQQLRVDWPAASERASSHTLRSHALEELTSANDGRTLSPGILGRLCLKELVEEQGRTAGYDPNLDNCL

SEQ ID NO: 22414 - protein, 382 aa, Homo sapiens; identical to SEQ ID NO: 22401
  Payload ID: 4518
  Gene Symbol:
  Gene Name: DAMA-236L13.19
  ENSP ID: ENSP00000412362

SEQ ID NO: 22415 - protein, 228 aa, Homo sapiens; identical to SEQ ID NO: 12141
  Payload ID: 4519
  Gene Symbol:
  Gene Name: DAMA-236L13.20
  ENSP ID: ENSP00000390345

SEQ ID NO: 22416 - protein, 212 aa, Homo sapiens; identical to SEQ ID NO: 22403
  Payload ID: 4519
  Gene Symbol:
  Gene Name: DAMA-236L13.20
  ENSP ID: ENSP00000406867

SEQ ID NO: 22417 - protein, 304 aa, Homo sapiens; identical to SEQ ID NO: 12174
  Payload ID: 4519
  Gene Symbol:
  Gene Name: DAMA-236L13.20
  ENSP ID: ENSP00000477860

SEQ ID NO: 22418 - protein, 228 aa, Homo sapiens; identical to SEQ ID NO: 12141
  Payload ID: 4519
  Gene Symbol:
  Gene Name: DAMA-236L13.20
  ENSP ID: ENSP00000478227

SEQ ID NO: 22419 - protein, 161 aa, Homo sapiens; identical to SEQ ID NO: 12169
  Payload ID: 4519
  Gene Symbol:
  Gene Name: DAMA-236L13.20
  ENSP ID: ENSP00000482874

SEQ ID NO: 22420 - protein, 1140 aa, Homo sapiens [sequence omitted]

SEQ ID NO: 22421 - protein, 1092 aa, Homo sapiens
  Payload ID: 4520
  Gene Symbol: DDB1
  Gene Name: damage-specific DNA binding protein 1, 127kDa
  ENSP ID: ENSP00000440269
MSYNYVVTAQKPTAVNGCVTGHFTSAEDLNLLIAKNTRLEIYVVTAEGLRPVKEVGMYGKIAVMELFRPKGESKDLLFILTAKYNACILEYKQSGESIDIITRAHGNVQDRIGRPSETGIIGIIDPECRMIGLRLYDGLFKVIPLDRDNKELKAFNIRLEELHVIDVKFLYGCQAPTICFVYQDPQGRHVKTYEVSLREKEFNKGPWKQENVEAEASMVIAVPEPFGGAIIIGQESITYHNGDKYLAIAPPIIKQSTIVCHNRVDPNGSRYLLGDMEGRLFMLLLEKEEQMDGTVTLKDLRVELLGETSIAECLTYLDNGVVFVGSRLGDSQLVKLNVDSNEQGSYVVAMETFTNLGPIVDMCVVDLERQGQGQLVTCSGAFKEGSLRIIRNGIGIHEHASIDLPGIKGLWPLRSDPNRETDDTLVLSFVGQTRVLMLNGEEVEETELMGFVDDQQTFFCGNVAHQQLIQITSASVRLVSQEPKALVSEWKEPQAKNISVASCNSSQVVVAVGRALYYLQIHPQELRQISHTEMEHEVACLDITPLGDSNGLSPLCAIGLWTDISARILKLPSFELLHKEMLGGEIIPRSILMTTFESSHYLLCALGDGALFYFGLNIETGLLSDRKKVTLGTQPTVLRTFRSLSTTNVFACSDRPTVIYSSNHKLVFSNVNLKEVNYMCPLNSDGYPDSLALANNSTLTIGTIDEIQKLHIRTVPLYESPRKICYQEVSQCFGVLSSRIEVQDTSGGTTALRPSASTQALSSSVSSSKLFSSSTAPHETSFGEEVEVHNLLIIDQHTFEVLHAHQFLQNEYALSLVSCKLGKDPNTYFIVGTAMVYPEEAEPKQGRIVVFQYSDGKLQTVAEKEVKGAVYSMVEFNGKLLASINSTVRLYEWTTEKELRTECNHYNNIMALYLKTKGDFILVGDLMRSVLLLAYKPMEGNFEEIARDFNPNWMSAVEILDDDNFLGAENAFNLFVCQKDSAATTDEERQHLQEVGLFHLGEFVNVFCHGSLVMQNLGETSTPTQGSVLFGTVNGMIGLVTSLSESWYNLLLDMQNRLNKVIKSVGKIEHSFHLEILSHRAEDRTSHRFHRR

SEQ ID NO: 22422 - protein, 109 aa, Homo sapiens
  Payload ID: 4520
  Gene Symbol: DDB1
  Gene Name: damage-specific DNA binding protein 1, 127kDa
  ENSP ID: ENSP00000440660
MSYNYVVTAQKPTAVNGCVTGHFTSAEDLNLLIAKNTRLEIYVVTAEGLRPVKEVGMYGKIAVMELFRPKGESKDLLFILTAKYNACILEYKQSGESIDIITRAHGNVQ

SEQ ID NO: 22423 - protein, 139 aa, Homo sapiens
  Payload ID: 4520
  Gene Symbol: DDB1
  Gene Name: damage-specific DNA binding protein 1, 127kDa
  ENSP ID: ENSP00000441825
MYGKIAVMELFRPKGESKDLLFILTAKYNACILEYKQSGESIDIITRAHGNVQDRIGRPSETGIIGIIDPECRMIGLRLYDGLFKVIPLDRDNKELKAFNIRLEELHVIDVKFLYGCQAPTICFVYQVLDQEERARNCE

SEQ ID NO: 22424 - protein, 146 aa, Homo sapiens
  Payload ID: 4520
  Gene Symbol: DDB1
  Gene Name: damage-specific DNA binding protein 1, 127kDa
  ENSP ID: ENSP00000444105
MSYNYVVTAQKPTAVNGCVTGHFTSAEDLNLLIAKNTRLEIYVVTAEGLRPVKEVGMYGKIAVMELFRPKGESKDLLFILTAKYNACILEYKQSGESIDIITRAHGNVQDRIGRPSETGIIGIIDPECRMIGLRLYDGLFKVIPLD

SEQ ID NO: 22425 - protein, 165 aa, Homo sapiens
  Payload ID: 4520
  Gene Symbol: DDB1
  Gene Name: damage-specific DNA binding protein 1, 127kDa
  ENSP ID: ENSP00000445554
MYGKIAVMELFRPKGESKDLLFILTAKYNACILEYKQSGESIDIITRAHGNVQDRIGRPSETGIIGIIDPECRMIGLRLYDGLFKVIPLDRDNKELKAFNIRLEELHVIDVKFLYGCQAPTICFVYQDPQGRHVKTYEVSLREKEFNKGPWKQENVEAEASMVIA

SEQ ID NO: 22426 - protein, 162 aa, Homo sapiens
  Payload ID: 4520
  Gene Symbol: DDB1
  Gene Name: damage-specific DNA binding protein 1, 127kDa
  ENSP ID: ENSP00000445844
MSYNYVVTAQKPTAVNGCVTGHFTSAEDLNLLIAKNTRLEIYVVTAEGLRPVKEVGMYGKIAVMELFRPKALSSSVSSSKLFSSSTAPHETSFGEEVEVHNLLIIDQHTFEVLHAHQFLQNEYALSLVSCKLGKDPNTYFIVGTAMVYPEEAEPKQGRIVVF

SEQ ID NO: 22427 - protein, 427 aa, Homo sapiens
  Payload ID: 4521
  Gene Symbol: DDB2
  Gene Name: damage-specific DNA binding protein 2, 48kDa
  Uniprot ID: Q92466
  ENSP ID: ENSP00000256996
MAPKKRPETQKTSEIVLRPRNKRSRSPLELEPEAKKLCAKGSGPSRRCDSDCLWVGLAGPQILPPCRSIVRTLHQHKLGRASWPSVQQGLQQSFLHTLDSYRILQKAAPFDRRATSLAWHPTHPSTVAVGSKGGDIMLWNFGIKDKPTFIKGIGAGGSITGLKFNPLNTNQFYASSMEGTTRLQDFKGNILRVFASSDTINIWFCSLDVSASSRMVVTGDNVGNVILLNMDGKELWNLRMHKKKVTHVALNPCCDWFLATASVDQTVKIWDLRQVRGKASFLYSLPHRHPVNAACFSPDGARLLTTDQKSEIRVYSASQWDCPLGLIPHPHRHFQHLTPIKAAWHPRYNLIVVGRYPDPNFKSCTPYELRTIDVFDGNSGKMMCQLYDPESSGISSLNEFNPMGDTLASAMGYHILIWSQEEARTRK

SEQ ID NO: 22428 - protein, 238 aa, Homo sapiens
  Payload ID: 4521
  Gene Symbol: DDB2
  Gene Name: damage-specific DNA binding protein 2, 48kDa
  Uniprot ID: Q92466
  ENSP ID: ENSP00000367863
MAPKKRPETQKTSEIVLRPRNKRSRSPLELEPEAKKLCAKGSGPSRRCDSDCLWVGLAGPQILPPCRSIVRTLHQHKLGRASWPSVQQGLQQSFLHTLDSYRILQKAAPFDRRATSLAWHPTHPSTVAVGSKGGDIMLWNFGIKDKPTFIKGAAWHPRYNLIVVGRYPDPNFKSCTPYELRTIDVFDGNSGKMMCQLYDPESSGISSLNEFNPMGDTLASAMGYHILIWSQEEARTRK

SEQ ID NO: 22429 - protein, 244 aa, Homo sapiens
  Payload ID: 4521
  Gene Symbol: DDB2
  Gene Name: damage-specific DNA binding protein 2, 48kDa
  Uniprot ID: Q92466
  ENSP ID: ENSP00000367864
MAPKKRPETQKTSEIVLRPRNKRSRSPLELEPEAKKLCAKGSGPSRRCDSDCLWVGLAGPQILPPCRSIVRTLHQHKLGRASWPSVQQGLQQSFLHTLDSYRILQKAAPFDRRATSLAWHPTHPSTVAVGSKGGDIMLWNFGIKDKPTFIKGIGAGGSITGLKFNPLNTNQFYASSMEGTTRLQDFKGNILRVFASSDTINIWFCSLDVSASSRMVVTGDNVGNVILLNMDGKELVSVPMEPGS

SEQ ID NO: 22430 - protein, 363 aa, Homo sapiens
  Payload ID: 4521
  Gene Symbol: DDB2
  Gene Name: damage-specific DNA binding protein 2, 48kDa
  Uniprot ID: Q92466
  ENSP ID: ENSP00000367866
MAPKKRPETQKTSEIVLRPRNKRSRSPLELEPEAKKLCAKGSGPSRRCDSDCLWVGLAGPQILPPCRSIVRTLHQHKLGRASWPSVQQIGAGGSITGLKFNPLNTNQFYASSMEGTTRLQDFKGNILRVFASSDTINIWFCSLDVSASSRMVVTGDNVGNVILLNMDGKELWNLRMHKKKVTHVALNPCCDWFLATASVDQTVKIWDLRQVRGKASFLYSLPHRHPVNAACFSPDGARLLTTDQKSEIRVYSASQWDCPLGLIPHPHRHFQHLTPIKAAWHPRYNLIVVGRYPDPNFKSCTPYELRTIDVFDGNSGKMMCQLYDPESSGISSLNEFNPMGDTLASAMGYHILIWSQEEARTRK

SEQ ID NO: 22431 - protein, 91 aa, Homo sapiens
  Payload ID: 4521
  Gene Symbol: DDB2
  Gene Name: damage-specific DNA binding protein 2, 48kDa
  ENSP ID: ENSP00000478063
MAPKKRPETQKTSEIVLRPRNKRSRSPLELEPEAKKLCAKGSDHTDMERPQEVMRQRLTVPNETRLPFGEFSRKTFREIGEENMSVLLGRS

SEQ ID NO: 22432 - protein, 156 aa, Homo sapiens
  Payload ID: 4521
  Gene Symbol: DDB2
  Gene Name: damage-specific DNA binding protein 2, 48kDa
  Uniprot ID: Q92466
  ENSP ID: ENSP00000478411
MAPKKRPETQKTSEIVLRPRNKRSRSPLELEPEAKKLCAKGSGPSRRCDSDCLWVGLAGPQILPPCRSIVRTLHQHKLGRASWPSVQQGLQQSFLHTLDSYRILQKAAPFDRRATSLAWHPTHPSTVAVGSKGGDIMLWNFGIKDKPTFIKGHLVL

SEQ ID NO: 22433 - protein, 93 aa, Homo sapiens
  Payload ID: 4521
  Gene Symbol: DDB2
  Gene Name: damage-specific DNA binding protein 2, 48kDa
  ENSP ID: ENSP00000479196
MAPKKRPETQKTSEIVLRPRNKRSRSPLELEPEAKKLCAKGSGPSRRCDSDCLWVGLAGPQILPPCRSIVRTLHQHKLGRASWPSVQQGLQQS

SEQ ID NO: 22434 - protein, 162 aa, Homo sapiens
  Payload ID: 4521
  Gene Symbol: DDB2
  Gene Name: damage-specific DNA binding protein 2, 48kDa
  ENSP ID: ENSP00000479994
MAPKKRPETQKTSEIVLRPRNKRSRSPLELEPEAKKLCAKGSGTACPSRRCDSDCLWVGLAGPQILPPCRSIVRTLHQHKLGRASWPSVQQGLQQSFLHTLDSYRILQKAAPFDRRATSLAWHPTHPSTVAVGSKGGDIMLWNFGIKDKPTFIKGIGAGGSI

SEQ ID NO: 22435 - protein, 95 aa, Homo sapiens
  Payload ID: 4521
  Gene Symbol: DDB2
  Gene Name: damage-specific DNA binding protein 2, 48kDa
  ENSP ID: ENSP00000482080
  MOD_RES (1)..(1): Any amino acid
XAPFDRRATSLAWHPTHPSTVAVGSKGGDIMLWNFGIKDKPTFIKGIGAGGSITGLKFNPLNTNQFYASSMEGTTRLQDFKGNILRVFASSDTIK

SEQ ID NO: 22436 - protein, 227 aa, Homo sapiens
  Payload ID: 4521
  Gene Symbol: DDB2
  Gene Name: damage-specific DNA binding protein 2, 48kDa
  ENSP ID: ENSP00000483718
MAPKKRPETQKTSEIVLRPRNKRSRSPLELEPEAKKLCAKGSGPSRRCDSDCLWVGLAGPQILPPCRSIVRTLHQHKLGRASWPSVQQGLQQSFLHTLDSYRILQKAAPFDRRATSLAWHPTHPSTVAVGSKGGDIMLWNFGIKDKPTFIKGIGAGGSITGLKFNPLNTNQFYASSMEGTTRLQDFKGNILRVFASSDTINIWFCSLDVSASSRMVVTGDNVGNVIL

SEQ ID NO: 22437 - protein, 82 aa, Homo sapiens
  Payload ID: 4522
  Gene Symbol: DAOA
  Gene Name: D-amino acid oxidase activator
  Uniprot ID: P59103
  ENSP ID: ENSP00000329951
MAQRHLQRSLCPWVSYLPQPYAELEEVSSHVGKVFMARNYEFLAYEASKDRRQPLERMWTCNYNQQKDQSCNHKEITSTKAE

SEQ ID NO: 22438 - protein, 153 aa, Homo sapiens
  Payload ID: 4522
  Gene Symbol: DAOA
  Gene Name: D-amino acid oxidase activator
  Uniprot ID: P59103
  ENSP ID: ENSP00000365103
MLEKLMGADSLQLFRSRYTLGKIYFIGFQRSILLSKSENSLNSIAKETEEGRETVTRKEGWKRRHEDGYLEMAQRHLQRSLCPWVSYLPQPYAELEEVSSHVGKVFMARNYEFLAYEASKDRRQPLERMWTCNYNQQKDQSCNHKEITSTKAE

SEQ ID NO: 22439 - protein, 82 aa, Homo sapiens; identical to SEQ ID NO: 22437
  Payload ID: 4522
  Gene Symbol: DAOA
  Gene Name: D-amino acid oxidase activator
  Uniprot ID: P59103
  ENSP ID: ENSP00000453831

SEQ ID NO: 22440 - protein, 125 aa, Homo sapiens
  Payload ID: 4522
  Gene Symbol: DAOA
  Gene Name: D-amino acid oxidase activator
  ENSP ID: ENSP00000469539
MRTAIWKWHRGIYRDHYVLGSLTFLSPMQRAGTSNQWNMGKVMTLDSGDEVTFHKTWPTETGSPYRLEEVSSHVGKVFMARNYEFLAYEASKDRRQPLERMWTCNYNQQKDQSCNHKEITSTKAE

SEQ ID NO: 22441 - protein, 126 aa, Homo sapiens
  Payload ID: 4522
  Gene Symbol: DAOA
  Gene Name: D-amino acid oxidase activator
  Uniprot ID: P59103
  ENSP ID: ENSP00000470244
MLEKLMGADSLQLFRSRYTLGKIYFIGFQRSILLSKSENSLNSIAKETEEGRETVTRKEGWKRRHEDGYLEMAQRHLQRSLCPWVSYLPQPYAEHSKVILNGNLHCHFKRISQIFAGHFMEGDTEA

SEQ ID NO: 22442 - protein, 55 aa, Homo sapiens
  Payload ID: 4522
  Gene Symbol: DAOA
  Gene Name: D-amino acid oxidase activator
  ENSP ID: ENSP00000471091
MAQRHLQRSLCPWVSYLPQPYAEHSKVILNGNLHCHFKRISQIFAGHFMEGDTEA

SEQ ID NO: 22443 - protein, 98 aa, Homo sapiens
  Payload ID: 4522
  Gene Symbol: DAOA
  Gene Name: D-amino acid oxidase activator
  ENSP ID: ENSP00000471306
MLEKLMGADSLQLFRSRYTLGKIYFIGFQRSILLSKSENSLNSIAKETEEGRETVTRKEGWKRRHEDGYLEMAQRHLQRSLCPWVSYLPQPYAESWDF

SEQ ID NO: 22444 - protein, 82 aa, Homo sapiens; identical to SEQ ID NO: 22437
  Payload ID: 4522
  Gene Symbol: DAOA
  Gene Name: D-amino acid oxidase activator
  Uniprot ID: P59103
  ENSP ID: ENSP00000472260

SEQ ID NO: 22445 - protein, 63 aa, Homo sapiens
  Payload ID: 4522
  Gene Symbol: DAOA
  Gene Name: D-amino acid oxidase activator
  ENSP ID: ENSP00000472676
MLEKLMGADSLQLFRSRYTLGKIYFIGFQRSILLSKSENSLNSIGDRRRKRDGNKERRMEEKA

SEQ ID NO: 22446 - protein, 30 aa, Homo sapiens
  Payload ID: 4522
  Gene Symbol: DAOA
  Gene Name: D-amino acid oxidase activator
  ENSP ID: ENSP00000472857
  MOD_RES (1)..(1): Any amino acid
XSKSENSLNSIGSHYVAQAGVQQRLGLPKC

SEQ ID NO: 22447 - protein, 153 aa, Homo sapiens; identical to SEQ ID NO: 22438
  Payload ID: 4522
  Gene Symbol: DAOA
  Gene Name: D-amino acid oxidase activator
  Uniprot ID: P59103
  ENSP ID: ENSP00000483757

SEQ ID NO: 22448 - protein, 347 aa, Homo sapiens
  Payload ID: 4523
  Gene Symbol: DAO
  Gene Name: D-amino-acid oxidase
  Uniprot ID: P14920
  ENSP ID: ENSP00000228476
MRVVVIGAGVIGLSTALCIHERYHSVLQPLDIKVYADRFTPLTTTDVAAGLWQPYLSDPNNPQEADWSQQTFDYLLSHVHSPNAENLGLFLISGYNLFHEAIPDPSWKDTVLGFRKLTPRELDMFPDYGYGWFHTSLILEGKNYLQWLTERLTERGVKFFQRKVESFEEVAREGADVIVNCTGVWAGALQRDPLLQPGRGQIMKVDAPWMKHFILTHDPERGIYNSPYIIPGTQTVTLGGIFQLGNWSELNNIQDHNTIWEGCCRLEPTLKNARIIGERTGFRPVRPQIRLEREQLRTGPSNTEVIHNYGHGGYGLTIHWGCALEAAKLFGRILEEKKLSRMPPSHL

SEQ ID NO: 22449 - protein, 281 aa, Homo sapiens
  Payload ID: 4523
  Gene Symbol: DAO
  Gene Name: D-amino-acid oxidase
  ENSP ID: ENSP00000446853
MRVVVIGAGVIGLSTALCIHERYHSVLQPLDIKVYADRFTPLTTTDVAAGLWQPYLSDPNNPQEADWSQQTFDYLLSHVHSPNAENLGLFLISGYNLFHEAIPVAREGADVIVNCTGVWAGALQRDPLLQPGRGQIMKVDAPWMKHFILTHDPERGIYNSPYIIPGTQTVTLGGIFQLGNWSELNNIQDHNTIWEGCCRLEPTLKNARIIGERTGFRPVRPQIRLEREQLRTGPSNTEVIHNYGHGGYGLTIHWGCALEAAKLFGRILEEKKLSRMPPSHL

SEQ ID NO: 22450 - protein, 196 aa, Homo sapiens
  Payload ID: 4523
  Gene Symbol: DAO
  Gene Name: D-amino-acid oxidase
  ENSP ID: ENSP00000447104
MRVVVIGAGVIGLSTALCIHERYHSVLQPLDIKVYADRFTPLTTTDVAAGLWQPYLSDPNNPQEADWSQQTFDYLLSHVHSPNAENLGLFLISGYNLFHEAIPDPSWKDTVLGFRKLTPRELDMFPDYGYGWFHTSLILEGKNYLQWLTERLTERGVKFFQRKVESFEEVAREGADVIVNCTGVWAGALQRDPLLQ

SEQ ID NO: 22451 - protein, 78 aa, Homo sapiens
  Payload ID: 4523
  Gene Symbol: DAO
  Gene Name: D-amino-acid oxidase
  ENSP ID: ENSP00000448095
MRVVVIGAGVIGLSTALCIHERYHSVLQPLDIKVYADRFTPLTTTDVAAGLWQPYLSDPNNPQEATLPGRTQFWDFGS

SEQ ID NO: 22452 - protein, 123 aa, Homo sapiens
  Payload ID: 4523
  Gene Symbol: DAO
  Gene Name: D-amino-acid oxidase
  ENSP ID: ENSP00000449248
MRVVVIGAGVIGLSTALCIHERYHSVLQPLDIKVYADRFTPLTTTDVAAGLWQPYLSDPNNPQEADWSQQTFDYLLSHVHSPNAENLGLFLISGYNLFHEAIPLWLVPHKPNSGGKELSTVAD

SEQ ID NO: 22453 - protein, 166 aa, Homo sapiens
  Payload ID: 4523
  Gene Symbol: DAO
  Gene Name: D-amino-acid oxidase
  ENSP ID: ENSP00000449967
MFPDYGYGWFHTSLILEGKNYLQWLTERLTERGVKFFQRKVESFEEVAREGADVIVNCTGVWAGALQRDPLLQPGRGQIMKVDAPWMKHFILTHDPERGIYNSPYIIPGTQTVTLGGIFQLGNWSELNNIQDHNTIWEGCCRLEPTLKNARIIGERTGFRPVRPQI

SEQ ID NO: 22454 - protein, 189 aa, Homo sapiens
  Payload ID: 4524
  Gene Symbol: DAND5
  Gene Name: DAN domain family member 5, BMP antagonist
  Uniprot ID: Q8N907
  ENSP ID: ENSP00000323155
MLLGQLSTLLCLLSGALPTGSGRPEPQSPRPQSWAAANQTWALGPGALPPLVPASALGSWKAFLGLQKARQLGMGRLQRGQDEVAAVTLPLNPQEVIQGMCKAVPFVQVFSRPGCSAIRLRNHLCFGHCSSLYIPGSDPTPLVLCNSCMPARKRWAPVVLWCLTGSSASRRRVKISTMLIEGCHCSPKA

SEQ ID NO: 22455 - protein, 163 aa, Homo sapiens
  Payload ID: 4524
  Gene Symbol: DAND5
  Gene Name: DAN domain family member 5, BMP antagonist
  ENSP ID: ENSP00000467806
MPLTRQQGRLLVTLSPVRTDRQADRRTDKQMLLGQLSTLLCLLSGALPTGSGRPEPQSPRPQSWAAANQTWALGPGALPPLVPASALGSWKAFLGLQKARQLGMGRLQRGQDEVAAVTLPLNPQEVIQGMCKAVPFVQTRESRYVAQASLELLASSNPPTSAS

SEQ ID NO: 22456 - protein, 301 aa, Homo sapiens
  Payload ID: 4525
  Gene Symbol:
  Gene Name: DAQB-143M3.10
  ENSP ID: ENSP00000475541
MLGLWGQRLPAAWVLLLLPFLPLLLLAAPAPHRASYKPVIVVHGLFDSSYSFRHLLEYINETHPGTVVTVLDLFDGRESLRPLWEQVQGFREAVVPIMAKAPQGVHLICYSQGGLVCRALLSVMDDHNVDSFISLSSPQMGQYGDTDYLKWLFPTSMRSNLYRICYSPWGQEFSICNYWHDPHHDDLYLNASSFLALINGERDHPNATVWRKNFLRVGHLVLIGGPDDGVITPWQSSFFGFYDANETVLEMEEQLPARPTHQSELLLLRLVCLKPPRRKKPACRVQRQSESWGPGLSCALS

SEQ ID NO: 22457 - protein, 127 aa, Homo sapiens
  Payload ID: 4525
  Gene Symbol:
  Gene Name: DAQB-143M3.10
  ENSP ID: ENSP00000475961
  MOD_RES (1)..(1): Any amino acid
XHDDLYLNASSFLALINGERDHPNATVWRKNFLRVGHLVLIGGPDDGVITPWQSSFFGFYDANETVLEMEEQLPARPTHQSELLLLRLVCLKPPRRKKPGGNGEREEACRVQRQSESWGPGLSCALS

SEQ ID NO: 22458 - protein, 301 aa, Homo sapiens; identical to SEQ ID NO: 22456
  Payload ID: 4525
  Gene Symbol:
  Gene Name: DAQB-143M3.10
  ENSP ID: ENSP00000476061

SEQ ID NO: 22459 - protein, 70 aa, Homo sapiens
  Payload ID: 4526
  Gene Symbol:
  Gene Name: DAQB-331I12.15
  ENSP ID: ENSP00000429583
  MOD_RES (1)..(1): Any amino acid
XPFPGTIKSRDMSWKRHHLIPETFGVKRRRKRGPVESDPLRGEPEGASRAGGDQNRPAGLRLGCPWNYLH

SEQ ID NO: 22460 - protein, 310 aa, Homo sapiens
  Payload ID: 4527
  Gene Symbol: DDO
  Gene Name: D-aspartate oxidase
  Uniprot ID: Q99489
  ENSP ID: ENSP00000357919
MRPARHWETRFGARDFGGFQDCFFRDRLMDTARIAVVGAGVVGLSTAVCISKLVPRCSVTIISDKFTPDTTSDVAAGMLIPHTYPDTPIHTQKQWFRETFNHLFAIANSAEAGDAGVHLVSGIKGSGGWTLTRRIEDLWELHPSFDIVVNCSGLGSRQLAGDSKIFPVRGQVLQVQAPWVEHFIRDGSGLTYIYPGTSHVTLGGTRQKGDWNLSPDAENSREILSRCCALEPSLHGACNIREKVGLRPYRPGVRLQTELLARDGQRLPVVHHYGHGSGGISVHWGTALEAARLVSECVHALRTPIPKSNL

SEQ ID NO: 22461 - protein, 369 aa, Homo sapiens
  Payload ID: 4527
  Gene Symbol: DDO
  Gene Name: D-aspartate oxidase
  Uniprot ID: Q99489
  ENSP ID: ENSP00000357920
MRPARHWETRFGARDFGGFQDCFFRDRLMDTARIAVVGAGVVGLSTAVCISKLVPRCSVTIISDKFTPDTTSDVAAGMLIPHTYPDTPIHTQKQWFRETFNHLFAIANSAEAGDAGVHLVSGWQIFQSTPTEEVPFWADVVLGFRKMTEAELKKFPQYVFGQAFTTLKCECPAYLPWLEKRIKGSGGWTLTRRIEDLWELHPSFDIVVNCSGLGSRQLAGDSKIFPVRGQVLQVQAPWVEHFIRDGSGLTYIYPGTSHVTLGGTRQKGDWNLSPDAENSREILSRCCALEPSLHGACNIREKVGLRPYRPGVRLQTELLARDGQRLPVVHHYGHGSGGISVHWGTALEAARLVSECVHALRTPIPKSNL

SEQ ID NO: 22462 - protein, 110 aa, Homo sapiens
  Payload ID: 4527
  Gene Symbol: DDO
  Gene Name: D-aspartate oxidase
  ENSP ID: ENSP00000436642
MRPARHWETRFGARDFGGFQDCFFRDRLMDTARIAVVGAGVVGLSTAVCISKLVPRCSVTIISDKFTPDTTSDVAAGMLIPHTYPVGRYFRALRLKKCHSGLTWFWDFER

SEQ ID NO: 22463 - protein, 99 aa, Homo sapiens; identical to SEQ ID NO: 7151
  Payload ID: 4528
  Gene Symbol:
  Gene Name: DASS-161H22.6
  ENSP ID: ENSP00000454426

SEQ ID NO: 22464 - protein, 382 aa, Homo sapiens
  Payload ID: 4529
  Gene Symbol:
  Gene Name: DASS-312M4.10
  ENSP ID: ENSP00000412832
MAVLFLLLFLCGTPQAADNMQAIYVALGEAVELPCPSPPTLHGDEHLSWFCSPAAGSFTTLVAQVQVGRPAPDPGKPGRESRLRLLGNYSLWLEGSKEEDAGRYWCTVLGQHHNYQNWRVYDVLVLKGSQLSARAADGSPCNVLLCSVVPSRRMDSVTWQEGKGPVRGRVQSFWGSEAALLLVCPGEGLSEPRSRRPRIIRCLMTHNKGVSFSLAASIDASPALCAPSTGWDMPWILMLLLTMGQGVVILALSIVLWRQRVRGAPGRGNRMRCYNCGGSPSSTCKEAVTTCGEGRPQPGLEQIKLPGNPPVTLIHQHPACVAAHHCNQVETESVGDVTYPAHRDCYLGDLCNSAVASHVAPAGILAAAATALTCLLPGLWSG

SEQ ID NO: 22465 - protein, 407 aa, Homo sapiens
  Payload ID: 4530
  Gene Symbol: DAZAP1
  Gene Name: DAZ associated protein 1
  Uniprot ID: Q96EP5
  ENSP ID: ENSP00000233078
MNNSGADEIGKLFVGGLDWSTTQETLRSYFSQYGEVVDCVIMKDKTTNQSRGFGFVKFKDPNCVGTVLASRPHTLDGRNIDPKPCTPRGMQPERTRPKEGWQKGPRSDNSKSNKIFVGGIPHNCGETELREYFKKFGVVTEVVMIYDAEKQRPRGFGFITFEDEQSVDQAVNMHFHDIMGKKVEVKRAEPRDSKSQAPGQPGASQWGSRVVPNAANGWAGQPPPTWQQGYGPQGMWVPAGQAIGGYGPPPAGRGAPPPPPPFTSYIVSTPPGGFPPPQGFPQGYGAPPQFSFGYGPPPPPPDQFAPPGVPPPPATPGAAPLAFPPPPSQAAPDMSKPPTAQPDFPYGQYAGYGQDLSGFGQGFSDPSQQPPSYGGPSVPGSGGPPAGGSGFGRGQNHNVQGFHPYRR

SEQ ID NO: 22466 - protein, 378 aa, Homo sapiens
  Payload ID: 4530
  Gene Symbol: DAZAP1
  Gene Name: DAZ associated protein 1
  Uniprot ID: Q96EP5
  ENSP ID: ENSP00000337132
MNNSGADEIGKLFVGGLDWSTTQETLRSYFSQYGEVVDCVIMKDKTTNQSRGFGFVKFKDPNCVGTVLASRPHTLDGRNIDPKPCTPRGMQPERTRPKEGWQKGPRSDNSKSNKIFVGGIPHNCGETELREYFKKFGVVTEVVMIYDAEKQRPRGFGFITFEDEQSVDQAVNMHFHDIMGKKVEVKRAEPRDSKSQAPGQPGASQWGSRVVPNAANGWAGQPPPTWQQGYGPQGMWVPAGQAIGGYGPPPAGRGAPPPPPPFTSYIVSTPPGGFPPPQGFPQGYGAPPQFSFGYGPPPPPPDQFAPPGVPPPPATPGAAPLAFPPPPSQAAPDMSKPPTAQPDFPYGQYGLGSYSPAPPGCGPHFVYSLMVRLSSDVA

SEQ ID NO: 22467 - protein, 406 aa, Homo sapiens
  Payload ID: 4530
  Gene Symbol: DAZAP1
  Gene Name: DAZ associated protein 1
  ENSP ID: ENSP00000465433
MNNSGADEIGKLFVGGLDWSTTQETLRSYFSQYGEVVDCVIMKDKTTNQSRGFGFVKFKDPNCVGTVLASRPHTLDGRNIDPKPCTPRGMQPERTRPKEGWKGPRSDNSKSNKIFVGGIPHNCGETELREYFKKFGVVTEVVMIYDAEKQRPRGFGFITFEDEQSVDQAVNMHFHDIMGKKVEVKRAEPRDSKSQAPGQPGASQWGSRVVPNAANGWAGQPPPTWQQGYGPQGMWVPAGQAIGGYGPPPAGRGAPPPPPPFTSYIVSTPPGGFPPPQGFPQGYGAPPQFSFGYGPPPPPPDQFAPPGVPPPPATPGAAPLAFPPPPSQAAPDMSKPPTAQPDFPYGQYAGYGQDLSGFGQGFSDPSQQPPSYGGPSVPGSGGPPAGGSGFGRGQNHNVQGFHPYRR

SEQ ID NO: 22468 - protein, 327 aa, Homo sapiens
  Payload ID: 4530
  Gene Symbol: DAZAP1
  Gene Name: DAZ associated protein 1
  ENSP ID: ENSP00000467613
MNNSGADEIGKLFVGGLDWSTTQETLRSYFSQYGEVVDCVIMKDKTTNQSRGFGFVKFKDPNCVGTVLASRPHTLDGRNQKGPRSDNSKSNKIFVGGIPHNCGETELREYFKKFGVVTEVVMIYDAEKQRPRGFGFITFEDEQSVDQAVNMHFHDIMGKKVEVKRAEPRDSKSQAPGQPGASQWGSRVVPNAANGWAGQPPPTWQQGYGPQGMWVPAGQAIGGYGPPPAGRGAPPPPPPFTSYIVSTPPGGFPPPQGFPQGYGAPPQFSFGYGPPPPPPDQFAPPGVPPPPATPGAAPLAFPPPPSQAAPDMSKPPTAQPDFPYGQY

SEQ ID NO: 22469 - protein, 406 aa, Homo sapiens
  Payload ID: 4530
  Gene Symbol: DAZAP1
  Gene Name: DAZ associated protein 1
  ENSP ID: ENSP00000467680
MNNSGADEIGKLFVGGLDWSTTQETLRSYFSQYGEVVDCVIMKDKTTNQSRGFGFVKFKDPNCVGTVLASRPHTLDGRNIDPKPCTPRGMQPERTRPKEGWQKGPRSDNSKSNKIFVGGIPHNCGETELREYFKKFGVVTEVVMIYDAEKQRPRGFGFITFEDEQSVDQAVNMHFHDIMGKKVEVKRAEPRDSKSQAPGQPGASQWGSRVVPNAANGWAGQPPPTWQQGYGPQGMWVPAGQAIGGYGPPPAGRGAPPPPPPFTSYIVSTPPGGFPPPQGFPQGYGAPPQFSFGYGPPPPPPDQFAPPGVPPPPATPGAAPLAFPPPPSQAAPDMSKPPTAQPDFPYGQYGYGQDLSGFGQGFSDPSQQPPSYGGPSVPGSGGPPAGGSGFGRGQNHNVQGFHPYRR

SEQ ID NO: 22470 - protein, 168 aa, Homo sapiens
  Payload ID: 4531
  Gene Symbol: DAZAP2
  Gene Name: DAZ associated protein 2
  Uniprot ID: Q15038
  ENSP ID: ENSP00000394699
MNSKGQYPTQPTYPVQPPGNPVYPQTLHLPQAPPYTDAPPAYSELYRPSFVHPGAATVPTMSAAFPGASLYLPMAQSVAVGPLGSTIPMAYYPVGPIYPPGSTVLVEGGYDAGARFGAGATAGNIPPPPPGCPPNAAQLAVMQGANVLVTQRKGNFFMGGSDGGYTIW

SEQ ID NO: 22471 - protein, 86 aa, Homo sapiens
  Payload ID: 4531
  Gene Symbol: DAZAP2
  Gene Name: DAZ associated protein 2
  Uniprot ID: Q15038
  ENSP ID: ENSP00000398804
MNSKGQYPTQPTYPVQPPGNPVYPQTLHLPQAPPYTDAPPAYSEPPPPGCPPNAAQLAVMQGANVLVTQRKGNFFMGGSDGGYTIW

SEQ ID NO: 22472 - protein, 73 aa, Homo sapiens
  Payload ID: 4531
  Gene Symbol: DAZAP2
  Gene Name: DAZ associated protein 2
  ENSP ID: ENSP00000404968
MNSKGQYPTQPTYPVQPPGNPVYPQTLHLPQAPPYTDAPPAYSEGLPQSPPCQPHFLEPLCIFPWPSLWLLGL

SEQ ID NO: 22473 - protein, 153 aa, Homo sapiens
  Payload ID: 4531
  Gene Symbol: DAZAP2
  Gene Name: DAZ associated protein 2
  Uniprot ID: Q15038
  ENSP ID: ENSP00000408251
MNSKGQYPTQPTYPVQPPGNPVYPQTLHLPQAPPYTDAPPAYSELYRPSFVHPGAATVPTMSAAFPGASLYLPMAQSVAVGPLGSTIPMAYYPVGPIYPPGSTVLVEGGYDAGARFGAGATAGNIPVKEDQDHDREQGEEDNGDNNLERRGKM

SEQ ID NO: 22474 - protein, 146 aa, Homo sapiens
  Payload ID: 4531
  Gene Symbol: DAZAP2
  Gene Name: DAZ associated protein 2
  Uniprot ID: Q15038
  ENSP ID: ENSP00000412812
MNSKGQYPTQPTYPVQPPGNPVYPQTLHLPQAPPYTDAPPAYSELYRPSFVHPGAATVPTMSAAIPMAYYPVGPIYPPGSTVLVEGGYDAGARFGAGATAGNIPPPPPGCPPNAAQLAVMQGANVLVTQRKGNFFMGGSDGGYTIW

SEQ ID NO: 22475 - protein, 136 aa, Homo sapiens
  Payload ID: 4531
  Gene Symbol: DAZAP2
  Gene Name: DAZ associated protein 2
  Uniprot ID: Q15038
  ENSP ID: ENSP00000446554
MNSKGQYPTQPTYPVQPPGNPVYPQTLHLPQAPPYTDAPPAYSESVAVGPLGSTIPMAYYPVGPIYPPGSTVLVEGGYDAGARFGAGATAGNIPPPPPGCPPNAAQLAVMQGANVLVTQRKGNFFMGGSDGGYTIW

SEQ ID NO: 22476 - protein, 108 aa, Homo sapiens
  Payload ID: 4531
  Gene Symbol: DAZAP2
  Gene Name: DAZ associated protein 2
  ENSP ID: ENSP00000447842
MSAAFPGASLYLPMAQSVAVGPLGSTIPMAYYPVGPIYPPGSTVLVEGGYDAGARFGAGATAGNIPPPPPGCPPNAAQLAVMQGANVLVTQRKGNFFMGGSDGGYTIW

SEQ ID NO: 22477 - protein, 207 aa, Homo sapiens
  Payload ID: 4531
  Gene Symbol: DAZAP2
  Gene Name: DAZ associated protein 2
  Uniprot ID: Q15038
  ENSP ID: ENSP00000448051
MNSKGQYPTQPTYPVQPPGNPVYPQTLHLPQAPPYTDAPPAYSELYRPSFVHPGAATVPTMSAAFPGASLYLPMAQSVAVGPLGSTIPMAYYPVGPIYPPASTSWMPSQCCSACSHAGSQRPRNSAEGELLHGWFRWWLHHLVRNQGHLCAGKDITYLQHFSQCNCFSHINLKLQFRHMLLGCLSGAQTFRHFSNLIRNHVMVAVPP

SEQ ID NO: 22478 - protein, 134 aa, Homo sapiens
  Payload ID: 4531
  Gene Symbol: DAZAP2
  Gene Name: DAZ associated protein 2
  ENSP ID: ENSP00000474597
MNSKGQYPTQPTYPVQPPGNPVYPQTLHLPQAPPYTDAPPAYSELYRPSFVHPGAATVPTMSAAFPGASLYLPMAQSVAVGPLGSTIPMAYYPVGPIYPPGSTVLVEGGYDAGARFGAGATAGNIPVCVLKLGR

SEQ ID NO: 22479 - protein, 867 aa, Homo sapiens
  Payload ID: 4532
  Gene Symbol: DZIP1
  Gene Name: DAZ interacting zinc finger protein 1
  Uniprot ID: Q86YF9
  ENSP ID: ENSP00000257312
MQAEAADWFSSMPFQKHVYYPLASGPEGPDVAVAAAAAGAASMACAPPSAASGPLPFFQFRPRLESVDWRRLSAIDVDKVAGAVDVLTLQENIMNITFCKLEDEKCPHCQSGVDPVLLKLIRLAQFTIEYLLHSQEFLTSQLHTLEERLRLSHCDGEQSKKLLTKQAGEIKTLKEECKRRKKMISTQQLMIEAKANYYQCHFCDKAFMNQAFLQSHIQRRHTEENSHFEYQKNAQIEKLRSEIVVLKEELQLTRSELEAAHHASAVRFSKEYEMQKTKEEDFLKLFDRWKEEEKEKLVDEMEKVKEMFMKEFKELTSKNSALEYQLSEIQKSNMQIKSNIGTLKDAHEFKEDRSPYPQDFHNVMQLLDSQESKWTARVQAIHQEHKKEKGRLLSHIEKLRTSMIDDLNASNVFYKKRIEELGQRLQEQNELIITQRQQIKDFTCNPLNSISEPKGNPLAWQAFESQPAAPAVPMNAPALHTLETKSSLPMVHEQAFSSHILEPIEELSEEEKGRENEQKLNNNKMHLRKALKSNSSLTKGLRTMVEQNLMEKLETLGINADIRGISSDQLHRVLKSVESERHKQEREIPNFHQIREFLEHQVSCKIEEKALLSSDQCSVSQMDTLSTGEVPKMIQLPSKNRQLIRQKAVSTDRTSVPKIKKNVMEDPFPRKSSTITTPPFSSEEEQEDDDLIRAYASPGPLPVPPPQNKGSFGKNTVKSDADGTEGSEIEDTDDSPKPAGVAVKTPTEKVEKMFPHRKNVNKPVGGTNVPEMFIKKEELQELKCADVEDEDWDISSLEEEISLGKKSGKEQKEPPPAKNEPHFAHVLNAWGAFNPKGPKGEGLQENESSTLKSSLVTVTDWSDTSDV

SEQ ID NO: 22480 - protein, 848 aa, Homo sapiens
  Payload ID: 4532
  Gene Symbol: DZIP1
  Gene Name: DAZ interacting zinc finger protein 1
  Uniprot ID: Q86YF9
  ENSP ID: ENSP00000355018
MQAEAADWFSSMPFQKHVYYPLASGPEGPDVAVAAAAAGAASMACAPPSAASGPLPFFQFRPRLESVDWRRLSAIDVDKVAGAVDVLTLQENIMNITFCKLEDEKCPHCQSGVDPVLLKLIRLAQFTIEYLLHSQEFLTSQLHTLEERLRLSHCDGEQSKKLLTKQAGEIKTLKEECKRRKKMISTQQLMIEAKANYYQCHFCDKAFMNQAFLQSHIQRRHTEENSHFEYQKNAQIEKLRSEIVVLKEELQLTRSELEAAHHASAVRFSKEYEMQKTKEEDFLKLFDRWKEEEKEKLVDEMEKVKEMFMKEFKELTSKNSALEYQLSEIQKSNMQIKSNIGTLKDAHEFKEDRSPYPQDFHNVMQLLDSQESKWTARVQAIHQEHKKEKGRLLSHIEKLRTSMIDDLNASNVFYKKRIEELGQRLQEQNELIITQRQQIKDFTCNPLNSISEPKVNAPALHTLETKSSLPMVHEQAFSSHILEPIEELSEEEKGRENEQKLNNNKMHLRKALKSNSSLTKGLRTMVEQNLMEKLETLGINADIRGISSDQLHRVLKSVESERHKQEREIPNFHQIREFLEHQVSCKIEEKALLSSDQCSVSQMDTLSTGEVPKMIQLPSKNRQLIRQKAVSTDRTSVPKIKKNVMEDPFPRKSSTITTPPFSSEEEQEDDDLIRAYASPGPLPVPPPQNKGSFGKNTVKSDADGTEGSEIEDTDDSPKPAGVAVKTPTEKVEKMFPHRKNVNKPVGGTNVPEMFIKKEELQELKCADVEDEDWDISSLEEEISLGKKSGKEQKEPPPAKNEPHFAHVLNAWGAFNPKGPKGEGLQENESSTLKSSLVTVTDWSDTSDV

SEQ ID NO: 22481 - protein, 848 aa, Homo sapiens; identical to SEQ ID NO: 22480
  Payload ID: 4532
  Gene Symbol: DZIP1
  Gene Name: DAZ interacting zinc finger protein 1
  Uniprot ID: Q86YF9
  ENSP ID: ENSP00000355175

SEQ ID NO: 22482 - protein, 867 aa, Homo sapiens; identical to SEQ ID NO: 22479
  Payload ID: 4532
  Gene Symbol: DZIP1
  Gene Name: DAZ interacting zinc finger protein 1
  Uniprot ID: Q86YF9
  ENSP ID: ENSP00000366025

SEQ ID NO: 22483 - protein, 277 aa, Homo sapiens
  Payload ID: 4532
  Gene Symbol: DZIP1
  Gene Name: DAZ interacting zinc finger protein 1
  Uniprot ID: Q86YF9
  ENSP ID: ENSP00000431168
MQAEAADWFSSMVRGGRPGRPRRGCRAGENRGFPGPPAPQPARPPSPPPAALSLCPPQPFQKHVYYPLASGPEGPDVAVAAAAAGAASMACAPPSAASGPLPFFQFRPRLESVDWRRLSAIDVDKVAGAVDVLTLQENIMNITFCKLEDEKCPHCQSGVDPVLLKLIRLAQFTIEYLLHSQEFLTSQLHTLEERLRLSHCDGEQSKKLLTKQAGEIKTLKEECKRRKKMISTQQLMIEAKANYYQCHFCDKAFMNQAFLQSHIQRRHTEENSHFGHL

SEQ ID NO: 22484 - protein, 767 aa, Homo sapiens
  Payload ID: 4533
  Gene Symbol: DZIP1L
  Gene Name: DAZ interacting zinc finger protein 1-like
  Uniprot ID: Q8IYY4
  ENSP ID: ENSP00000332148
MQSPAATAEGLSGPLFGAYTFPTFKFQPRHDSMDWRRISTLDVDRVARELDVATLQENIAGITFCNLDREVCSRCGQPVDPALLKVLRLAQLIIEYLLHCQDCLSASVAQLEARLQTSLGQQQRGQQELGRQADELKGVREESRRRRKMISTLQQLLMQTGTHSYHTCHLCDKTFMNATFLRGHIQRRHAGVAEGGKQKKQEQPVEEVLEELRAKLKWTQGELEAQREAERQRQLQEAELIHQREIEAKKEFDKWKEQEWTKLYGEIDKLKKLFWDEFKNVAKQNSTLEEKLRALQSHSVMESKLGSLRDEESEEWLRQARELQALREKTEIQKTEWKRKVKELHEEHMAEKKELQEENQRLQASLSQDQKKAAAQSQCQISTLRAQLQEQARIIASQEEMIQSLSLRKVEGIHKVPKAVDTEEDSPEEEMEDSQDEQHKVLAALRRNPTLLKHFRPILEDTLEEKLESMGIRKDAKGISIQTLRHLESLLRVQREQKARKFSEFLSLRGKLVKEVTSRAKERQENGAVVSQPDGQPSVKSQQSTLVTREAQPKTRTLQVALPSTPAEPPPPTRQSHGSHGSSLTQVSAPAPRPGLHGPSSTPPSSGPGMSTPPFSSEEDSEGDRVQRVSLQPPKVPSRMVPRPKDDWDWSDTETSEENAQPPGQGSGTLVQSMVKNLEKQLEAPAKKPAGGVSLFFMPNAGPQRAATPGRKPQLSEDESDLEISSLEDLPLDLDQREKPKPLSRSKLPEKFGTGPQSSGQPRVPAW

SEQ ID NO: 22485 - protein, 148 aa, Homo sapiens
  Payload ID: 4533
  Gene Symbol: DZIP1L
  Gene Name: DAZ interacting zinc finger protein 1-like
  ENSP ID: ENSP00000417228
  MOD_RES (1)..(1): Any amino acid
XQPPKVPSRMVPRPKDDWDWSDTETSEENAQPPGQGSGTLVQSMVKNLEKQLEAPAKKPAGGVSLFFMPNAGPQRAATPGRKPQVGCRMLRVYSGILYRTSSEFGGPGVKVGEGPASVILCPSGTLWVTSLCPCAHGEMASLEYLYPS

SEQ ID NO: 22486 - protein, 539 aa, Homo sapiens
  Payload ID: 4533
  Gene Symbol: DZIP1L
  Gene Name: DAZ interacting zinc finger protein 1-like
  Uniprot ID: Q8IYY4
  ENSP ID: ENSP00000419486
MQSPAATAEGLSGPLFGAYTFPTFKFQPRHDSMDWRRISTLDVDRVARELDVATLQENIAGITFCNLDREVCSRCGQPVDPALLKVLRLAQLIIEYLLHCQDCLSASVAQLEARLQTSLGQQQRGQQELGRQADELKGVREESRRRRKMISTLQQLLMQTGTHSYHTCHLCDKTFMNATFLRGHIQRRHAGVAEGGKQKKQEQPVEEVLEELRAKLKWTQGELEAQREAERQRQLQEAELIHQREIEAKKEFDKWKEQEWTKLYGEIDKLKKLFWDEFKNVAKQNSTLEEKLRALQSHSVMESKLGSLRDEESEEWLRQARELQALREKTEIQKTEWKRKVKELHEEHMAEKKELQEENQRLQASLSQDQKKAAAQSQCQISTLRAQLQEQARIIASQEEMIQSLSLRKVEGIHKVPKAVDTEEDSPEEEMEDSQDEQHKVLAALRRNPTLLKHFRPILEDTLEEKLESMGIRKDAKGISIQTLRHLESLLRVQREQKARKFSEFLSLRGKLVKEVTSRAKERQENGAVVSQPDGQPSG

SEQ ID NO: 22487 - protein, 39 aa, Homo sapiens
  Payload ID: 4533
  Gene Symbol: DZIP1L
  Gene Name: DAZ interacting zinc finger protein 1-like
  ENSP ID: ENSP00000420051
MQSPAATAEGLSGPLFGAYTFPTFKFQPRHDSMDWRRIS

SEQ ID NO: 22488 - protein, 67 aa, Homo sapiens
  Payload ID: 4533
  Gene Symbol: DZIP1L
  Gene Name: DAZ interacting zinc finger protein 1-like
  ENSP ID: ENSP00000420600
MQSPAATAEGLSGPLFGAYTFPTFKFQPRHDSMDWRRISTLDVDRVARELDVATLQENIAGITFCNL

SEQ ID NO: 22489 - protein, 1208 aa, Homo sapiens
  Payload ID: 4534
  Gene Symbol: DZIP3
  Gene Name: DAZ interacting zinc finger protein 3
  Uniprot ID: Q86Y13
  ENSP ID: ENSP00000355028
MDSLPDEFFVRHPAVEDQRKEETENKLEKSSGQLNKQENDIPTDLVPVNLLLEVKKLLNAINTLPKGVVPHIKKFLQEDFSFQTMQREVAANSQNGEEIVPALTLRFLITQLEAALRNIQAGNYTAHQINIGYYLTLLFLYGVALTERGKKEDYTEAENKFLVMKMMIQENEICENFMSLVYFGRGLLRCAQKRYNGGLLEFHKSLQEIGDKNDHWFDIDPTEDEDLPTTFKDLLNNFIKTTESNIMKQTICSYLDCERSCEADILKNTSYKGFFQLMCSKSCCVYFHKICWKKFKNLKYPGENDQSFSGKKCLKEGCTGDMVRMLQCDVPGIVKILFEVVRKDEYITIENLGASYRKLISLKITDTDIRPKISLKFNTKDEMPIFKLDYNYFYHLLHIIIISGTDIVRQIFDEAMPPPLLKKELLIHKNVLESYYNHLWTNHPLGGSWHLLYPPNKELPQSKQFDLCLLLALIKHLNVFPAPKKGWNMEPPSSDISKSADILRLCKYRDILLSEILMNGLTESQFNSIWKKVSDILLRLGMMQEDIDKVKENPIENISLDYHQLSVYLGIPVPEIIQRMLSCYQQGIALQSITGSQRIEIEELQNEEEELSPPLMEYNINVKSHPEIQFAEINKDGTSIPSESSTESLKDLQEVKSKQRKKKKTKNKKNKDSKEDQVPYVVEKEEQLRKEQANPHSVSRLIKDDASDVQEDSAMEDKFYSLDELHILDMIEQGSAGKVTTDYGETEKERLARQRQLYKLHYQCEDFKRQLRTVTFRWQENQMQIKKKDKIIASLNQQVAFGINKVSKLQRQIHAKDNEIKNLKEQLSMKRSQWEMEKHNLESTMKTYVSKLNAETSRALTAEVYFLQCRRDFGLLHLEQTEKECLNQLARVTHMAASNLESLQLKAAVDSWNAIVADVRNKIAFLRTQYNEQINKVKQGFALSTLPPVQLPPPPPSPEILMQQFLGRPLVKESFFRPILTVPQMPAVCPGVVSATGQPRAPLMTGIAWALPAPVGDAVPPSAGLRSDPSIMNWERITDRLKTAFPQQTRKELTDFLRKLKDAYGKSLSELTFDEIVCKISQFIDPKKSQSQGKSVSNVNCVSPSHSPSQPDAAQPPKPAWRPLTSQGPATWEGASNPDEEEEEEEPCVICHENLSPENLSVLPCAHKFHAQCIRPWLMQQGTCPTCRLHVLLPEEFPGHPSRQLPKI

SEQ ID NO: 22490 - protein, 71 aa, Homo sapiens
  Payload ID: 4534
  Gene Symbol: DZIP3
  Gene Name: DAZ interacting zinc finger protein 3
  ENSP ID: ENSP00000417829
MDSLPDEFFVRHPAVEDQRKEETENKLEKSSGQLNKQENDIPTDLVPVNLLLEVKKLLNAINTLPKGVVPH

SEQ ID NO: 22491 - protein, 654 aa, Homo sapiens
  Payload ID: 4534
  Gene Symbol: DZIP3
  Gene Name: DAZ interacting zinc finger protein 3
  ENSP ID: ENSP00000418115
MDSLPDEFFVRHPAVEDQRKEETENKLEKSSGQLNKQENDIPTDLVPVNLLLEVKKLLNAINTLPKGVVPHIKKFLQEDFSFQTMQREVAANSQNGEEIVPALTLRFLITQLEAALRNIQAGNYTAHQINIGYYLTLLFLYGVALTERGKKEDYTEAENKFLVMKMMIQENEICENFMSLVYFGRGLLRCAQKRYNGGLLEFHKSLQEIGDKNDHWFDIDPTEDEDLPTTFKDLLNNFIKTTESNIMKQTICSYLDCERSCEADILKNTSYKGFFQLMCSKSCCVYFHKICWKKFKNLKYPGENDQSFSGKKCLKEGCTGDMVRMLQCDVPGIVKILFEVVRKDEYITIENLGASYRKLISLKITDTDIRPKISLKFNTKDEMPIFKLDYNYFYHLLHIIIISGTDIVRQIFDEAMPPPLLKKELLIHKNVLESYYNHLWTNHPLGGSWHLLYPPNKELPQSKQFDLCLLLALIKHLNVFPAPKKGWNMEPPSSDISKSADILRLCKYRDILLSEILMNGLTESQFNSIWKKVSDILLRLGMMQEDIDKVKENPIENISLDYHQLSVYLGIPVPEIIQRMLSCYQQGIALQSITGSQRIEIEELQNEEEELSPPLMEYNINVKSHPEIQFAEINKDGTSIPSESSTESLKDLQE

SEQ ID NO: 22492 - protein, 303 aa, Homo sapiens
  Payload ID: 4534
  Gene Symbol: DZIP3
  Gene Name: DAZ interacting zinc finger protein 3
  Uniprot ID: Q86Y13
  ENSP ID: ENSP00000418871
MDSLPDEFFVRHPAVEDQRKEETENKLEKSSGQLNKQENDIPTDLVPVNLLLEVKKLLNAINTLPKGVVPHIKKFLQEDFSFQTMQREVAANSQNGEEIVPALTLRFLITQLEAALRNIQAGNYTAHQINIGYYLTLLFLYGVALTERGKKEDYTEAENKFLVMKMMIQENEICENFMSLVYFGRGLLRCAQKRYNGGLLEFHKSLQEIGDKNDHWFDIDPTEDEDLPTTFKDLLNNFIKTTESNIMKQTICSYLDCERSCEADILKNTSYKGFFQLMCSKSCCVYFHKICWKKFKNLKYPEF

SEQ ID NO: 22493 - protein, 1208 aa, Homo sapiens; identical to SEQ ID NO: 22489
  Payload ID: 4534
  Gene Symbol: DZIP3
  Gene Name: DAZ interacting zinc finger protein 3
  Uniprot ID: Q86Y13
  ENSP ID: ENSP00000419981

SEQ ID NO: 22494 - protein, 126 aa, Homo sapiens
  Payload ID: 4534
  Gene Symbol: DZIP3
  Gene Name: DAZ interacting zinc finger protein 3
  ENSP ID: ENSP00000420030
MQREVAANSQNGEEIVPALTLRFLITQLEAALRNIQAGNYTAHQINIGYYLTLLFLYGVALTERGKKEDYTEAENKFLVMKMMIQENEICENFMSLVYFGRGLLRCAQKRYNGGLLEFHKSLQEIG

SEQ ID NO: 22495 - protein, 674 aa, Homo sapiens
  Payload ID: 4535
  Gene Symbol: DBF4
  Gene Name: DBF4 zinc finger
  Uniprot ID: Q9UBU7
  ENSP ID: ENSP00000265728
MNSGAMRIHSKGHFQGGIQVKNEKNRPSLKSLKTDNRPEKSKCKPLWGKVFYLDLPSVTISEKLQKDIKDLGGRVEEFLSKDISYLISNKKEAKFAQTLGRISPVPSPESAYTAETTSPHPSHDGSSFKSPDTVCLSRGKLLVEKAIKDHDFIPSNSILSNALSWGVKILHIDDIRYYIEQKKKELYLLKKSSTSVRDGGKRVGSGAQKTRTGRLKKPFVKVEDMSQLYRPFYLQLTNMPFINYSIQKPCSPFDVDKPSSMQKQTQVKLRIQTDGDKYGGTSIQLQLKEKKKKGYCECCLQKYEDLETHLLSEQHRNFAQSNQYQVVDDIVSKLVFDFVEYEKDTPKKKRIKYSVGSLSPVSASVLKKTEQKEKVELQHISQKDCQEDDTTVKEQNFLYKETQETEKKLLFISEPIPHPSNELRGLNEKMSNKCSMLSTAEDDIRQNFTQLPLHKNKQECILDISEHTLSENDLEELRVDHYKCNIQASVHVSDFSTDNSGSQPKQKSDTVLFPAKDLKEKDLHSIFTHDSGLITINSSQEHLTVQAKAPFHTPPEEPNECDFKNMDSLPSGKIHRKVKIILGRNRKENLEPNAEFDKRTEFITQEENRICSSPVQSLLDLFQTSEEKSEFLGFTSYTEKSGICNVLDIWEEENSDNLLTAFFSSPSTSTFTGF

SEQ ID NO: 22496 - protein, 217 aa, Homo sapiens
  Payload ID: 4535
  Gene Symbol: DBF4
  Gene Name: DBF4 zinc finger
  ENSP ID: ENSP00000389397
MNSGAMRIHSKGHFQGGIQVKNEKNRPSLKSLKTDNRPEKSKCKPLWGKVFYLDLPSVTISEKLQKDIKDLGGRVEEFLSKDISYLISNKKEAKFAQTLGRISPVPSPESAYTAETTSPHPSHDGSSFKSPDTVCLSRGKLLVEKAIKDHDFIPSNSILSNALSWGVKILHIDDIRYYIEQKKKELYLLKKSSTSVRDGGKRVGSGAQKTRKALQSI

SEQ ID NO: 22497 - protein, 44 aa, Homo sapiens
  Payload ID: 4535
  Gene Symbol: DBF4
  Gene Name: DBF4 zinc finger
  ENSP ID: ENSP00000407116
MNSGAMRIHSKGHFQGGIQVKNEKNRPSLKSLKTDNRPEKSKSS

SEQ ID NO: 22498 - protein, 234 aa, Homo sapiens
  Payload ID: 4535
  Gene Symbol: DBF4
  Gene Name: DBF4 zinc finger
  Uniprot ID: Q9UBU7
  ENSP ID: ENSP00000414083
MNSGAMRIHSKGHFQGGIQVKNEKNRPSLKSLKTDNRPEKSKCKPLWGKVFYLDLPSVTISEKLQKDIKDLGGRVEEFLSKDISYLISNKKEAKFAQTLGRISPVPSPESAYTAETTSPHPSHDGSSFKSPDTVCLSRGKLLVEKAIKDHDFIPSNSILSNALSWGVKILHIDDIRYYIEQKKKELYLLKKSSTSVRDGGKRVGSGAQKTRTGRLKKPFVKVEDMSQSPAVHLM

SEQ ID NO: 22499 - protein, 615 aa, Homo sapiens
  Payload ID: 4536
  Gene Symbol: DBF4B
  Gene Name: DBF4 zinc finger B
  Uniprot ID: Q8NFT6
  ENSP ID: ENSP00000323663
MSEPGKGDDCLELESSMAESRLRAPDLGVSRCLGKCQKNSPGARKHPFSGKSFYLDLPAGKNLQFLTGAIQQLGGVIEGFLSKEVSYIVSSRREVKAESSGKSHRGCPSPSPSEVRVETSAMVDPKGSHPRPSRKPVDSVPLSRGKELLQKAIRNQGSISGGGSGGSSSLLTNARSWGVRILHVDEMMMHVQQLSLASLCVKKQQPKKPEGTCPAAESRTRKVARLKAPFLKIEDESRKFRPFHHQFKSFPEISFLGPKDASPFEAPTTLGSMHHTRESKDGEPSPRSAAHTMPRRKKGYCECCQEAFEELHVHLQSAQHRSFALEAHLYAEVDRIIAQLSHSFADIPFQAGLPRWSGSPASDCDPLCPETLHPHQPSHPRAASPRIRKEDSCQASVTQGRAAGQQRWTESLDGVMGPPASHTCVSATTLLPALPKGSREQGCLCPCPASFTQSHLVTSLALLPGEWSPAEDMPLHPSQENSFAPADIPVKGPLLFPEARPWLMSARCWVRPFPFVTWGCLIPHDTTPLHEEVSPCPCLRLGYLYLLLTQSLWCRVRVPSLSTAGPIPRTSHPCTLAFPSYLNDHDLGHLCQAKPQGWNTPQPFLHCGFLAVDSG

SEQ ID NO: 22500 - protein, 431 aa, Homo sapiens
  Payload ID: 4536
  Gene Symbol: DBF4B
  Gene Name: DBF4 zinc finger B
  Uniprot ID: Q8NFT6
  ENSP ID: ENSP00000377178
MSEPGKGDDCLELESSMAESRLRAPDLGVSRCLGKCQKNSPGARKHPFSGKSFYLDLPAGKNLQFLTGAIQQLGGVIEGFLSKEVSYIVSSRREVKAESSGKSHRGCPSPSPSEVRVETSAMVDPKGSHPRPSRKPVDSVPLSRGKELLQKAIRNQGSISGGGSGGSSSLLTNARSWGVRILHVDEMMMHVQQLSLASLCVKKQQPKKPEGTCPAAESRTRKVARLKAPFLKIEDESRKFRPFHHQFKSFPEISFLGPKDASPFEAPTTLGSMHHTRESKDGEPSPRSAAHTMPRRKKGYCECCQEAFEELHVHLQSAQHRSFALEAHLYAEVDRIIAQLSHSFADIPFQAGLPRWSGSPASDCDPLCPETLHPHQPSHPRAASPRIRKEDSCQASVTQGRAAGQQRWTESLDGVMGPPASHTCHRPCRLP

SEQ ID NO: 22501 - protein, 157 aa, Homo sapiens
  Payload ID: 4536
  Gene Symbol: DBF4B
  Gene Name: DBF4 zinc finger B
  ENSP ID: ENSP00000431158
MSEPGKGDDCLELESSMAESRLRAPDLGVSRCLGKCQKNSPGARKHPFSGKSFYLDLPAGKNLQFLTGAIQQLGGVIEGFLSKEVSYIVSSRREVKAESSGKSHRGCPSPSPSEVRVETSAMVDPKGSHPRPSRKPVDSVPLSRGKELLQKAIRNQK

SEQ ID NO: 22502 - protein, 772 aa, Homo sapiens
  Payload ID: 4537
  Gene Symbol: DCC
  Gene Name: DCC netrin 1 receptor
  ENSP ID: ENSP00000304146
  MOD_RES (1)..(1): Any amino acid
XGVPVIKWKKDGIHLALGMDERKQQLSNGSLLIQNILHSRHHKPDEGLYQCEASLGDSGSIISRTAKVAVAGPLRFLSQTESVTAFMGDTVLLKCEVIGEPMPTIHWQKNQQDLTPIPGDSRVVVLPSGALQISRLQPGDIGIYRCSARNPASSRTGNEAEVRILSDPGLHRQLYFLQRPSNVVAIEGKDAVLECCVSGYPPPSFTWLRGEEVIQLRSKKYSLLGGSNLLISNVTDDDSGMYTCVVTYKNENISASAELTVLVPPWFLNHPSNLYAYESMDIEFECTVSGKPVPTVNWMKNGDVVIPSDYFQIVGGSNLRILGVVKSDEGFYQCVAENEAGNAQTSAQLIVPKPAIPSSSVLPSAPRDVVPVLVSSRFVRLSWRPPAEAKGNIQTFTVFFSREGDNRERALNTTQPGSLQLTVGNLKPEAMYTFRVVAYNEWGPGESSQPIKVATQPELQVPGPVENLQAVSTSPTSILITWEPPAYANGPVQGYRLFCTEVSTGKEQNIEVDGLSYKLEGLKKFTEYSLRFLAYNRYGPGVSTDDITVVTLSDVPSAPPQNVSLEVVNSRSIKVSWLPPPSGTQNGFITGYKIRHRKTTRRGEMETLEPNNLWYLFTGLEKGSQYSFQVSAMTVNGTGPPSNWYTAETPENDLDESQVPDQPSSLHVRPQTNCIIMSWTPPLNPNIVVRGYIIGYGVGSPYAETVRVDSKQRYYSIERLESSSHYVISLKAFNNAGEGVPLYESATTRSITVRRHNISKLHSNRPQTKHNV

SEQ ID NO: 22503 - protein, 1447 aa, Homo sapiens
  Payload ID: 4537
  Gene Symbol: DCC
  Gene Name: DCC netrin 1 receptor
  Uniprot ID: P43146
  ENSP ID: ENSP00000389140
MENSLRCVWVPKLAFVLFGASLFSAHLQVTGFQIKAFTALRFLSEPSDAVTMRGGNVLLDCSAESDRGVPVIKWKKDGIHLALGMDERKQQLSNGSLLIQNILHSRHHKPDEGLYQCEASLGDSGSIISRTAKVAVAGPLRFLSQTESVTAFMGDTVLLKCEVIGEPMPTIHWQKNQQDLTPIPGDSRVVVLPSGALQISRLQPGDIGIYRCSARNPASSRTGNEAEVRILSDPGLHRQLYFLQRPSNVVAIEGKDAVLECCVSGYPPPSFTWLRGEEVIQLRSKKYSLLGGSNLLISNVTDDDSGMYTCVVTYKNENISASAELTVLVPPWFLNHPSNLYAYESMDIEFECTVSGKPVPTVNWMKNGDVVIPSDYFQIVGGSNLRILGVVKSDEGFYQCVAENEAGNAQTSAQLIVPKPAIPSSSVLPSAPRDVVPVLVSSRFVRLSWRPPAEAKGNIQTFTVFFSREGDNRERALNTTQPGSLQLTVGNLKPEAMYTFRVVAYNEWGPGESSQPIKVATQPELQVPGPVENLQAVSTSPTSILITWEPPAYANGPVQGYRLFCTEVSTGKEQNIEVDGLSYKLEGLKKFTEYSLRFLAYNRYGPGVSTDDITVVTLSDVPSAPPQNVSLEVVNSRSIKVSWLPPPSGTQNGFITGYKIRHRKTTRRGEMETLEPNNLWYLFTGLEKGSQYSFQVSAMTVNGTGPPSNWYTAETPENDLDESQVPDQPSSLHVRPQTNCIIMSWTPPLNPNIVVRGYIIGYGVGSPYAETVRVDSKQRYYSIERLESSSHYVISLKAFNNAGEGVPLYESATTRSITDPTDPVDYYPLLDDFPTSVPDLSTPMLPPVGVQAVALTHDAVRVSWADNSVPKNQKTSEVRLYTVRWRTSFSASAKYKSEDTTSLSYTATGLKPNTMYEFSVMVTKNRRSSTWSMTAHATTYEAAPTSAPKDLTVITREGKPRAVIVSWQPPLEANGKITAYILFYTLDKNIPIDDWIMETISGDRLTHQIMDLNLDTMYYFRIQARNSKGVGPLSDPILFRTLKVEHPDKMANDQGRHGDGGYWPVDTNLIDRSTLNEPPIGQMHPPHGSVTPQKNSNLLVIIVVTVGVITVLVVVIVAVICTRRSSAQQRKKRATHSAGKRKGSQKDLRPPDLWIHHEEMEMKNIEKPSGTDPAGRDSPIQSCQDLTPVSHSQSETQLGSKSTSHSGQDTEEAGSSMSTLERSLAARRAPRAKLMIPMDAQSNNPAVVSAIPVPTLESAQYPGILPSPTCGYPHPQFTLRPVPFPTLSVDRGFGAGRSQSVSEGPTTQQPPMLPPSQPEHSSSEEAPSRTIPTACVRPTHPLRSFANPLLPPPMSAIEPKVPYTPLLSQPGPTLPKTHVKTASLGLAGKARSPLLPVSVPTAPEVSEESHKPTEDSANVYEQDDLSEQMASLEGLMKQLNAITGSAF

SEQ ID NO: 22504 - protein, 1424 aa, Homo sapiens
  Payload ID: 4537
  Gene Symbol: DCC
  Gene Name: DCC netrin 1 receptor
  ENSP ID: ENSP00000397322
SLCSLVPGFQIKAFTALRFLSEPSDAVTMRGGNVLLDCSAESDRGVPVIKWKKDGIHLALGMDERKQQLSNGSLLIQNILHSRHHKPDEGLYQCEASLGDSGSIISRTAKVAVAGPLRFLSQTESVTAFMGDTVLLKCEVIGEPMPTIHWQKNQQDLTPIPGDSRVVVLPSGALQISRLQPGDIGIYRCSARNPASSRTGNEAEVRILSDPGLHRQLYFLQRPSNVVAIEGKDAVLECCVSGYPPPSFTWLRGEEVIQLRSKKYSLLGGSNLLISNVTDDDSGMYTCVVTYKNENISASAELTVLVPPWFLNHPSNLYAYESMDIEFECTVSGKPVPTVNWMKNGDVVIPSDYFQIVGGSNLRILGVVKSDEGFYQCVAENEAGNAQTSAQLIVPKPAIPSSSVLPSAPRDVVPVLVSSRFVRLSWRPPAEAKGNIQTFTVFFSREGDNRERALNTTQPGSLQLTVGNLKPEAMYTFRVVAYNEWGPGESSQPIKVATQPELQVPGPVENLQAVSTSPTSILITWEPPAYANGPVQGYRLFCTEVSTGKEQNIEVDGLSYKLEGLKKFTEYSLRFLAYNRYGPGVSTDDITVVTLSDVPSAPPQNVSLEVVNSRSIKVSWLPPPSGTQNGFITGYKIRHRKTTRRGEMETLEPNNLWYLFTGLEKGSQYSFQVSAMTVNGTGPPSNWYTAETPENDLDESQVPDQPSSLHVRPQTNCIIMSWTPPLNPNIVVRGYIIGYGVGSPYAETVRVDSKQRYYSIERLESSSHYVISLKAFNNAGEGVPLYESATTRSITDPTDPVDYYPLLDDFPTSVPDLSTPMLPPVGVQAVALTHDAVRVSWADNSVPKNQKTSEVRLYTVRWRTSFSASAKYKSEDTTSLSYTATGLKPNTMYEFSVMVTKNRRSSTWSMTAHATTYEAAPTSAPKDLTVITREGKPRAVIVSWQPPLEANGKITAYILFYTLDKNIPIDDWIMETISGDRLTHQIMDLNLDTMYYFRIQARNSKGVGPLSDPILFRTLKVEHPDKMANDQGRHGDGGYWPVDTNLIDRSTLNEPPIGQMHPPHGSVTPQKNSNLLVIIVVTVGVITVLVVVIVAVICTRRSSAQQRKKRATHSAGKRKGSQKDLRPPDLWIHHEEMEMKNIEKPSGTDPAGRDSPIQSCQDLTPVSHSQSETQLGSKSTSHSGQDTEEAGSSMSTLERSLAARRAPRAKLMIPMDAQSNNPAVVSAIPVPTLESAQYPGILPSPTCGYPHPQFTLRPVPFPTLSVDRGFGAGRSQSVSEGPTTQQPPMLPPSQPEHSSSEEAPSRTIPTACVRPTHPLRSFANPLLPPPMSAIEPKVPYTPLLSQPGPTLPKTHVKTASLGLAGKARSPLLPVSVPTAPEVSEESHKPTEDSANVYEQDDLSEQMASLEGLMKQLNAITGSAF

SEQ ID NO: 22505 - protein, 88 aa, Homo sapiens
  Payload ID: 4537
  Gene Symbol: DCC
  Gene Name: DCC netrin 1 receptor
  ENSP ID: ENSP00000463131
RGVPVIKWKKDGIHLALGMDERKQQLSNGSLLIQNILHSRHHKPDEGLYQCEASLGDSGSIISRTAKVAVAEGNVRLRKFGQHSHGSL

SEQ ID NO: 22506 - protein, 70 aa, Homo sapiens
  Payload ID: 4537
  Gene Symbol: DCC
  Gene Name: DCC netrin 1 receptor
  ENSP ID: ENSP00000463463
VPVIKWKKDGIHLALGMDERKQQLSNGSLLIQNILHSRHHKPDEGLYQCEASLGDSGSIISRTAKVAVAD

SEQ ID NO: 22507 - protein, 181 aa, Homo sapiens
  Payload ID: 4537
  Gene Symbol: DCC
  Gene Name: DCC netrin 1 receptor
  ENSP ID: ENSP00000463699
  MOD_RES (1)..(1): Any amino acid
XIKAFTALRFLSEPSDAVTMRGGNVLLDCSAESDRGVPVIKWKKDGIHLALGMDERKQQLSNGSLLIQNILHSRHHKPDEGLYQCEASLGDSGSIISRTAKVAVAGANIRILPRRSTSSCAAVWKMYPRALEYAQNSIWEGLVTVQSFPFYIYRDIVYFQMISRKLNCSDSVILNDLMIFI

SEQ ID NO: 22508 - protein, 102 aa, Homo sapiens
  Payload ID: 4537
  Gene Symbol: DCC
  Gene Name: DCC netrin 1 receptor
  ENSP ID: ENSP00000463766
MDIEFECTVSGKPVPTVNWMKNGDVVIPSDYFQIVGGSNLRILGVVKSDEGFYQCVAENEAGNAQTSAQLIVPKPAIPSSSVLPSAPRDVVPVLVSSRFVRL

SEQ ID NO: 22509 - protein, 74 aa, Homo sapiens
  Payload ID: 4537
  Gene Symbol: DCC
  Gene Name: DCC netrin 1 receptor
  ENSP ID: ENSP00000464277
  MOD_RES (1)..(1): Any amino acid
XVPVIKWKKDGIHLALGMDERKQQLSNGSLLIQNILHSRHHKPDEGLYQCEASLGDSGSIISRTAKVAVAGLCS

SEQ ID NO: 22510 - protein, 208 aa, Homo sapiens
  Payload ID: 4537
  Gene Symbol: DCC
  Gene Name: DCC netrin 1 receptor
  ENSP ID: ENSP00000464292
  MOD_RES (1)..(1): Any amino acid
XSWADNSVPKNQKTSEVRLYTVRWRTSFSASAKYKSEDTTSLSYTATGLKPNTMYEFSVMVTKNRRSSTWSMTAHATTYEAAPTSAPKDLTVITREGKPRAVIVSWQPPLEANGKITAYILFYTLDKNIPIDDWIMETISGDRLTHQIMDLNLDTMYYFRIQARNSKGVGPLSDPILFRTLKVEHPDKMANDQDTGVTINLVNEVLLG

SEQ ID NO: 22511 - protein, 1076 aa, Homo sapiens
  Payload ID: 4537
  Gene Symbol: DCC
  Gene Name: DCC netrin 1 receptor
  ENSP ID: ENSP00000464582
MDIEFECTVSGKPVPTVNWMKNGDVVIPSDYFQIVGGSNLRILGVVKSDEGFYQCVAENEAGNAQTSAQLIVPKPAIPSSSVLPSAPRDVVPVLVSSRFVRLSWRPPAEAKGNIQTFTVFFSREGDNRERALNTTQPGSLQLTVGNLKPEAMYTFRVVAYNEWGPGESSQPIKVATQPELQVPGPVENLQAVSTSPTSILITWEPPAYANGPVQGYRLFCTEVSTGKEQNIEVDGLSYKLEGLKKFTEYSLRFLAYNRYGPGVSTDDITVVTLSDVPSAPPQNVSLEVVNSRSIKVSWLPPPSGTQNGFITGYKIRHRKTTRRGEMETLEPNNLWYLFTGLEKGSQYSFQVSAMTVNGTGPPSNWYTAETPENDLDESQVPDQPSSLHVRPQTNCIIMSWTPPLNPNIVVRGYIIGYGVGSPYAETVRVDSKQRYYSIERLESSSHYVISLKAFNNAGEGVPLYESATTRSITDLSTPMLPPVGVQAVALTHDAVRVSWADNSVPKNQKTSEVRLYTVRWRTSFSASAKYKSEDTTSLSYTATGLKPNTMYEFSVMVTKNRRSSTWSMTAHATTYEAAPTSAPKDLTVITREGKPRAVIVSWQPPLEANGKITAYILFYTLDKNIPIDDWIMETISGDRLTHQIMDLNLDTMYYFRIQARNSKGVGPLSDPILFRTLKVEHPDKMANDQGRHGDGGYWPVDTNLIDRSTLNEPPIGQMHPPHGSVTPQKNSNLLVIIVVTVGVITVLVVVIVAVICTRRSSAQQRKKRATHSAGKRKGSQKDLRPPDLWIHHEEMEMKNIEKPSGTDPAGRDSPIQSCQDLTPVSHSQSETQLGSKSTSHSGQDTEEAGSSMSTLERSLAARRAPRAKLMIPMDAQSNNPAVVSAIPVPTLESAQYPGILPSPTCGYPHPQFTLRPVPFPTLSVDRGFGAGRTVSEGPTTQQPPMLPPSQPEHSSSEEAPSRTIPTACVRPTHPLRSFANPLLPPPMSAIEPKVPYTPLLSQPGPTLPKTHVKTASLGLAGKARSPLLPVSVPTAPEVSEESHKPTEDSANVEMEWVKQYAISYYPLLLPASSFSV

SEQ ID NO: 22512 - protein, 189 aa, Homo sapiens
  Payload ID: 4538
  Gene Symbol: DCTD
  Gene Name: dCMP deaminase
  Uniprot ID: P32321
  ENSP ID: ENSP00000349576
MVGGGQPCGPNMSEVSCKKRDDYLEWPEYFMAVAFLSAQRSKDPNSQVGACIVNSENKIVGIGYNGMPNGCSDDVLPWRRTAENKLDTKYPYVCHAELNAIMNKNSTDVKGCSMYVALFPCNECAKLIIQAGIKEVIFMSDKYHDSDEATAARLLFNMAGVTFRKFIPKCSKIVIDFDSINSRPSQKLQ

SEQ ID NO: 22513 - protein, 178 aa, Homo sapiens
  Payload ID: 4538
  Gene Symbol: DCTD
  Gene Name: dCMP deaminase
  Uniprot ID: P32321
  ENSP ID: ENSP00000398194
MSEVSCKKRDDYLEWPEYFMAVAFLSAQRSKDPNSQVGACIVNSENKIVGIGYNGMPNGCSDDVLPWRRTAENKLDTKYPYVCHAELNAIMNKNSTDVKGCSMYVALFPCNECAKLIIQAGIKEVIFMSDKYHDSDEATAARLLFNMAGVTFRKFIPKCSKIVIDFDSINSRPSQKLQ

SEQ ID NO: 22514 - protein, 73 aa, Homo sapiens
  Payload ID: 4538
  Gene Symbol: DCTD
  Gene Name: dCMP deaminase
  ENSP ID: ENSP00000421792
MSEVSCKKRDDYLEWPEYFMAVAFLSAQRSKDPNSQVGACIVNSENKIVGIGYNGMPNGCSDDVLPWRRTAEN

SEQ ID NO: 22515 - protein, 44 aa, Homo sapiens
  Payload ID: 4538
  Gene Symbol: DCTD
  Gene Name: dCMP deaminase
  ENSP ID: ENSP00000422386
MLGLSPHRALVGVQPHQEKAPRGLTGPFPLLLFPRPPWLPLPPI

SEQ ID NO: 22516 - protein, 169 aa, Homo sapiens
  Payload ID: 4538
  Gene Symbol: DCTD
  Gene Name: dCMP deaminase
  ENSP ID: ENSP00000422662
MSEVSCKKRDDYLEWPEYFMAVAFLSAQRSKDPNSQVGACIVNSENKIVGIGYNGMPNGCSDDVLPWRRTAENKLDTKYPYVCHAELNAIMNKNSTDVKGCSMYVALFPCNECAKLIIQAGIKEVIFMSDKYHDSDEATAARLLFNMAGVTFRKFIPKCSKIVIDFDSI

SEQ ID NO: 22517 - protein, 59 aa, Homo sapiens
  Payload ID: 4538
  Gene Symbol: DCTD
  Gene Name: dCMP deaminase
  ENSP ID: ENSP00000422729
MSEVSCKKRDDYLEWPEYFMAVAFLSAQRSKDPNSQVGACIVNSENKIVGIGYNGMPNG

SEQ ID NO: 22518 - protein, 119 aa, Homo sapiens
  Payload ID: 4538
  Gene Symbol: DCTD
  Gene Name: dCMP deaminase
  ENSP ID: ENSP00000423182
MSEVSCKKRDDYLEWPEYFMAVAFLSAQRSKDPNSQVGACIVNSENKIVGIGYNGMPNGCSDDVLPWRRTAENKLDTKYPYVCHAELNAIMNKNSTDVKGCSMYVALFPCNECAKLIIQ

SEQ ID NO: 22519 - protein, 44 aa, Homo sapiens; identical to SEQ ID NO: 22515
  Payload ID: 4538
  Gene Symbol: DCTD
  Gene Name: dCMP deaminase
  ENSP ID: ENSP00000423498

SEQ ID NO: 22520 - protein, 98 aa, Homo sapiens
  Payload ID: 4538
  Gene Symbol: DCTD
  Gene Name: dCMP deaminase
  ENSP ID: ENSP00000423894
MSEVSCKKRDDYLEWPEYFMAVAFLSAQRSKDPNSQVGACIVNSENKIVGIGYNGMPNGCSDDVLPWRRTAENKLDTKYPYVCHAELNAIMNKNSTDV

SEQ ID NO: 22521 - protein, 178 aa, Homo sapiens; identical to SEQ ID NO: 22513
  Payload ID: 4538
  Gene Symbol: DCTD
  Gene Name: dCMP deaminase
  Uniprot ID: P32321
  ENSP ID: ENSP00000424017

SEQ ID NO: 22522 - protein, 120 aa, Homo sapiens
  Payload ID: 4538
  Gene Symbol: DCTD
  Gene Name: dCMP deaminase
  ENSP ID: ENSP00000424050
MSEVSCKKRDDYLEWPEYFMAVAFLSAQRSKDPNSQVGACIVNSENKIVGIGYNGMPNGCSDDVLPWRRTAENKLDTKYPYVCHAELNAIMNKNSTDVKGCSMYVALFPCNECAKLIIQA

SEQ ID NO: 22523 - protein, 41 aa, Homo sapiens
  Payload ID: 4538
  Gene Symbol: DCTD
  Gene Name: dCMP deaminase
  ENSP ID: ENSP00000425287
MSEVSCKKRDDYLEWPEYFMAVAFLSAQRSKDPNSQCAMRS

SEQ ID NO: 22524 - protein, 41 aa, Homo sapiens; identical to SEQ ID NO: 22523
  Payload ID: 4538
  Gene Symbol: DCTD
  Gene Name: dCMP deaminase
  ENSP ID: ENSP00000425462

SEQ ID NO: 22525 - protein, 17 aa, Homo sapiens
  Payload ID: 4538
  Gene Symbol: DCTD
  Gene Name: dCMP deaminase
  ENSP ID: ENSP00000425904
MVGGGQPCGWASVLTGL

SEQ ID NO: 22526 - protein, 23 aa, Homo sapiens
  Payload ID: 4538
  Gene Symbol: DCTD
  Gene Name: dCMP deaminase
  ENSP ID: ENSP00000427282
MSEVSCKKRDDYLEWPEYFMAVA

SEQ ID NO: 22527 - protein, 44 aa, Homo sapiens; identical to SEQ ID NO: 22515
  Payload ID: 4538
  Gene Symbol: DCTD
  Gene Name: dCMP deaminase
  ENSP ID: ENSP00000427470

SEQ ID NO: 22528 - protein, 259 aa, Homo sapiens
  Payload ID: 4539
  Gene Symbol: DCUN1D1
  Gene Name: DCN1, defective in cullin neddylation 1, domain containing 1
  Uniprot ID: Q96GG9
  ENSP ID: ENSP00000292782
MNKLKSSQKDKVRQFMIFTQSSEKTAVSCLSQNDWKLDVATDNFFQNPELYIRESVKGSLDRKKLEQLYNRYKDPQDENKIGIDGIQQFCDDLALDPASISVLIIAWKFRAATQCEFSKQEFMDGMTELGCDSIEKLKAQIPKMEQELKEPGRFKDFYQFTFNFAKNPGQKGLDLEMAIAYWNLVLNGRFKFLDLWNKFLLEHHKRSIPKDTWNLLLDFSTMIADDMSNYDEEGAWPVLIDDFVEFARPQIAGTKSTTV

SEQ ID NO: 22529 - protein, 128 aa, Homo sapiens
  Payload ID: 4539
  Gene Symbol: DCUN1D1
  Gene Name: DCN1, defective in cullin neddylation 1, domain containing 1
  ENSP ID: ENSP00000417675
MIFTQSSEKTAVSCLSQNDWKLDVATDNFFQNPELYIRESVKGSLDRKKLEQLYNRYKDPQDENKIGIDGIQQFCDDLALDPASISVLIIAWKFRAATQCEFSKQEFMDGMTELGCDSIEKLKAQIPK

SEQ ID NO: 22530 - protein, 92 aa, Homo sapiens
  Payload ID: 4539
  Gene Symbol: DCUN1D1
  Gene Name: DCN1, defective in cullin neddylation 1, domain containing 1
  ENSP ID: ENSP00000418913
MIFTQSSEKTAVSCLSQNDWKLDVATDNFFQNPELYIRESVKGSLDRKKLEQLYNRYKDPQDENKIGIDGIQQFCDDLALDPASISVLIIAW

SEQ ID NO: 22531 - protein, 35 aa, Homo sapiens
  Payload ID: 4539
  Gene Symbol: DCUN1D1
  Gene Name: DCN1, defective in cullin neddylation 1, domain containing 1
  ENSP ID: ENSP00000418935
MNKLKSSQKDKVRQFMIFTQSSEKTATLKMRIKLE

SEQ ID NO: 22532 - protein, 244 aa, Homo sapiens
  Payload ID: 4539
  Gene Symbol: DCUN1D1
  Gene Name: DCN1, defective in cullin neddylation 1, domain containing 1
  ENSP ID: ENSP00000419359
MIFTQSSEKTAVSCLSQNDWKLDVATDNFFQNPELYIRESVKGSLDRKKLEQLYNRYKDPQDENKIGIDGIQQFCDDLALDPASISVLIIAWKFRAATQCEFSKQEFMDGMTELGCDSIEKLKAQIPKMEQELKEPGRFKDFYQFTFNFAKNPGQKGLDLEMAIAYWNLVLNGRFKFLDLWNKFLLEHHKRSIPKDTWNLLLDFSTMIADDMSNYDEEGAWPVLIDDFVEFARPQIAGTKSTTV

SEQ ID NO: 22533 - protein, 98 aa, Homo sapiens
  Payload ID: 4539
  Gene Symbol: DCUN1D1
  Gene Name: DCN1, defective in cullin neddylation 1, domain containing 1
  ENSP ID: ENSP00000419440
MIFTQSSEKTAVSCLSQNDWKLDVATDNFFQNPELYIRESVKGSLDRKKLEQLYNRYKDPQDENKIGIDGIQQFCDDLALDPASISVLIIAWKFRAAT

SEQ ID NO: 22534 - protein, 75 aa, Homo sapiens
  Payload ID: 4539
  Gene Symbol: DCUN1D1
  Gene Name: DCN1, defective in cullin neddylation 1, domain containing 1
  ENSP ID: ENSP00000420073
MIFTQSSEKTAVSCLSQNDWKLDVATDNFFQNPELYIRESVKGSLDRKKLEQLYNRYKDPQDENKIGIDGIQQFC

SEQ ID NO: 22535 - protein, 244 aa, Homo sapiens; identical to SEQ ID NO: 22532
  Payload ID: 4539
  Gene Symbol: DCUN1D1
  Gene Name: DCN1, defective in cullin neddylation 1, domain containing 1
  ENSP ID: ENSP00000488427

SEQ ID NO: 22536 - protein, 126 aa, Homo sapiens
  Payload ID: 4540
  Gene Symbol: DCUN1D2
  Gene Name: DCN1, defective in cullin neddylation 1, domain containing 2
  ENSP ID: ENSP00000330629
MEKLKALLPRLEQELKDTAKFKDFYQFTFTFAKNPGQKGLDLEMAVAYWKLVLSGRFKFLDLWNTFLMEHHKRSIPRDTWNLLLDFGNMIADDMSNYDEEGAWPVLIDDFVEYARPVVTGGKRSLF

SEQ ID NO: 22537 - protein, 186 aa, Homo sapiens
  Payload ID: 4540
  Gene Symbol: DCUN1D2
  Gene Name: DCN1, defective in cullin neddylation 1, domain containing 2
  Uniprot ID: Q6PH85
  ENSP ID: ENSP00000364552
MHKLKSSQKDKVRQFMACTQAGERTAIYCLTQNEWRLDEATDSFFQNPDSLHRESMRNAVDKKKLERLYGRYKDPQDENKIGVDGIQQFCDDLSLDPASISVLVIAWKFRAATQCEFSRKEFLDGMTELGCDSMEKLKALLPRLEQELKDTAKFKDFYQFTFTFAKNPGQKGLGSPPFLNVKALHH

SEQ ID NO: 22538 - protein, 244 aa, Homo sapiens
  Payload ID: 4540
  Gene Symbol: DCUN1D2
  Gene Name: DCN1, defective in cullin neddylation 1, domain containing 2
  ENSP ID: ENSP00000403543
  MOD_RES (1)..(1): Any amino acid
XRRRRRAGCGRPSPASCAGRSAWIRGRNAPRAREPERWRRRRGTAGSAGLTRSREGRPGHKLKSSQKDKVRQFMACTQAGERTAIYCLTQNEWRLDEATDSFFQNPDSLHRESMRNAVDKKKLERLYGRYKDPQDENKIGVDGIQQFCDDLSLDPASISVLVIAWKFRAATQCEFSRKEFLDGMTELGCDSMEKLKALLPRLEQELKDTAKFKDFYQFTFTFAKNPGQKGLGSPPFLNVKALHH

SEQ ID NO: 22539 - protein, 90 aa, Homo sapiens
  Payload ID: 4540
  Gene Symbol: DCUN1D2
  Gene Name: DCN1, defective in cullin neddylation 1, domain containing 2
  ENSP ID: ENSP00000414773
MACTQAGERTAIYCLTQNEWRLDEATDSFFQNPDSLHRESMRNAVDKKKLERLYGRYKDPQDENKIGVDGIQQFCDDLSLDPASISVLVI

SEQ ID NO: 22540 - protein, 17 aa, Homo sapiens
  Payload ID: 4540
  Gene Symbol: DCUN1D2
  Gene Name: DCN1, defective in cullin neddylation 1, domain containing 2
  ENSP ID: ENSP00000417394
MACTQAGERTAIYCLTQ

SEQ ID NO: 22541 - protein, 119 aa, Homo sapiens
  Payload ID: 4540
  Gene Symbol: DCUN1D2
  Gene Name: DCN1, defective in cullin neddylation 1, domain containing 2
  ENSP ID: ENSP00000417398
MPGVGVPAAGSRHCPGAEGRGRPRTRAEPPPRLRRRPGPARSGRRGGDDPQDENKIGVDGIQQFCDDLSLDPASISVLVIAWKFRAATQCEFSRKEFLDGMTELGCDSMEKLKALLPRL

SEQ ID NO: 22542 - protein, 259 aa, Homo sapiens
  Payload ID: 4540
  Gene Symbol: DCUN1D2
  Gene Name: DCN1, defective in cullin neddylation 1, domain containing 2
  Uniprot ID: Q6PH85
  ENSP ID: ENSP00000417706
MHKLKSSQKDKVRQFMACTQAGERTAIYCLTQNEWRLDEATDSFFQNPDSLHRESMRNAVDKKKLERLYGRYKDPQDENKIGVDGIQQFCDDLSLDPASISVLVIAWKFRAATQCEFSRKEFLDGMTELGCDSMEKLKALLPRLEQELKDTAKFKDFYQFTFTFAKNPGQKGLDLEMAVAYWKLVLSGRFKFLDLWNTFLMEHHKRSIPRDTWNLLLDFGNMIADDMSNYDEEGAWPVLIDDFVEYARPVVTGGKRSLF

SEQ ID NO: 22543 - protein, 134 aa, Homo sapiens
  Payload ID: 4540
  Gene Symbol: DCUN1D2
  Gene Name: DCN1, defective in cullin neddylation 1, domain containing 2
  ENSP ID: ENSP00000418030
MACTQAGERTAIYCLTQNEWRLDEATDSFFQNPDSLHRESMRNAVDKKKLERLYGRYKDPQDENKIGVDGIQQFCDDLSLDPASISVLVIAWKFRAATQCEFSRKEFLDGMTELGCDSMEKLKALLPRLEQELK

SEQ ID NO: 22544 - protein, 304 aa, Homo sapiens
  Payload ID: 4541
  Gene Symbol: DCUN1D3
  Gene Name: DCN1, defective in cullin neddylation 1, domain containing 3
  Uniprot ID: Q8IWE4
  ENSP ID: ENSP00000319482
MGQCVTKCKNPSSTLGSKNGDREPSNKSHSRRGAGHREEQVPPCGKPGGDILVNGTKKAEAATEACQLPTSSGDAGRESKSNAEESSLQRLEELFRRYKDEREDAILEEGMERFCNDLCVDPTEFRVLLLAWKFQAATMCKFTRKEFFDGCKAISADSIDGICARFPSLLTEAKQEDKFKDLYRFTFQFGLDSEEGQRSLHREIAIALWKLVFTQNNPPVLDQWLNFLTENPSGIKGISRDTWNMFLNFTQVIGPDLSNYSEDEAWPSLFDTFVEWEMERRKREGEGRGALSSGPEGLCPEEQT

SEQ ID NO: 22545 - protein, 304 aa, Homo sapiens; identical to SEQ ID NO: 22544
  Payload ID: 4541
  Gene Symbol: DCUN1D3
  Gene Name: DCN1, defective in cullin neddylation 1, domain containing 3
  Uniprot ID: Q8IWE4
  ENSP ID: ENSP00000454762

SEQ ID NO: 22546 - protein, 292 aa, Homo sapiens
  Payload ID: 4542
  Gene Symbol: DCUN1D4
  Gene Name: DCN1, defective in cullin neddylation 1, domain containing 4
  Uniprot ID: Q92564
  ENSP ID: ENSP00000334625
MHSDAAAVNFQLNSHLSTLANIHKIYHTLNKLNLTEDIGQDDHQTGSLRSCSSSDCFNKVMPPRKKRRPASGDDLSAKKSRHDSMYRKYDSTRIKTEEEAFSSKRCLEWFYEYAGTDDVVGPEGMEKFCEDIGVEPENVVMLVLAWKLDAQNMGYFTLQEWLKGMTSLQCDTTEKLRNTLDYLRSFLNDSTNFKLIYRYAFDFAREKDQRSLDINTAKCMLGLLLGKIWPLFPVFHQFLEQSKYKVINKDQWCNVLEFSRTINLDLSNYDEDGAWPVLLDEFVEWYKDKQMS

SEQ ID NO: 22547 - protein, 257 aa, Homo sapiens
  Payload ID: 4542
  Gene Symbol: DCUN1D4
  Gene Name: DCN1, defective in cullin neddylation 1, domain containing 4
  Uniprot ID: Q92564
  ENSP ID: ENSP00000370850
MHSDAAAVNFQLNSHLSTLANIHKIYHTLNKLNLTEDIGQDDHQTGSLRSCSSSDCFNKVMPPRKKRRPASGDDLSAKKSRHDSMYRKYDSTRIKTEEEAFSSKRCLEWFYEYAGTDDVVGPEGMEKFCEDIGVEPENVVMLVLAWKLDAQNMGYFTLQEWLKGMTSLQCDTTEKLRNTLDYLRSFLNDSTNFKLIYRYAFDFARQSKYKVINKDQWCNVLEFSRTINLDLSNYDEDGAWPVLLDEFVEWYKDKQMS

SEQ ID NO: 22548 - protein, 336 aa, Homo sapiens
  Payload ID: 4542
  Gene Symbol: DCUN1D4
  Gene Name: DCN1, defective in cullin neddylation 1, domain containing 4
  Uniprot ID: Q92564
  ENSP ID: ENSP00000389900
MEVEAALGCSGQGRGCGGVAPAGRGRERASERGTRVRISKGLSGAGGSVRKADFQLNSHLSTLANIHKIYHTLNKLNLTEDIGQDDHQTGSLRSCSSSDCFNKVMPPRKKRRPASGDDLSAKKSRHDSMYRKYDSTRIKTEEEAFSSKRCLEWFYEYAGTDDVVGPEGMEKFCEDIGVEPENVVMLVLAWKLDAQNMGYFTLQEWLKGMTSLQCDTTEKLRNTLDYLRSFLNDSTNFKLIYRYAFDFAREKDQRSLDINTAKCMLGLLLGKIWPLFPVFHQFLEQSKYKVINKDQWCNVLEFSRTINLDLSNYDEDGAWPVLLDEFVEWYKDKQMS

SEQ ID NO: 22549 - protein, 63 aa, Homo sapiens
  Payload ID: 4542
  Gene Symbol: DCUN1D4
  Gene Name: DCN1, defective in cullin neddylation 1, domain containing 4
  ENSP ID: ENSP00000421127
MHSDAAAVSFTGSMVLASAWLLESLTIVEEGEWRAGTPHGESRSEREKGFSAELSSLNTGKYS

SEQ ID NO: 22550 - protein, 207 aa, Homo sapiens
  Payload ID: 4542
  Gene Symbol: DCUN1D4
  Gene Name: DCN1, defective in cullin neddylation 1, domain containing 4
  ENSP ID: ENSP00000421699
MEVEAALGCSGQGRGCGGVAPAGRGRERASERGTRVRISKGLSGAGGSVRKADFQLNSHLSTLANIHKIYHTLNKLNLTEDIGQDDHQTGSLRSCSSSDCFNKVMPPRKKRRPASGDDLSAKKSRHDSMYRKYDSTRIKTEEEAFSSKRCLEWFYEYAGTDDVVGPEGMEKFCEDIGVEPENMESRTVARLECNGMMSAHCNLCLPG

SEQ ID NO: 22551 - protein, 116 aa, Homo sapiens
  Payload ID: 4542
  Gene Symbol: DCUN1D4
  Gene Name: DCN1, defective in cullin neddylation 1, domain containing 4
  ENSP ID: ENSP00000422711
  MOD_RES (1)..(1): Any amino acid
XTDDVVGPEGMEKFCEDIGVEPENVVMLVLAWKLDAQNMGYFTLQEWLKGMTSLQCDTTEKLRNTLDYLRSFLNDSTNFKLIYRYAFDFARAEDGVSDCELLAGTLAEQEKRTSAA

SEQ ID NO: 22552 - protein, 21 aa, Homo sapiens
  Payload ID: 4542
  Gene Symbol: DCUN1D4
  Gene Name: DCN1, defective in cullin neddylation 1, domain containing 4
  ENSP ID: ENSP00000423794
NFKLIYRYAFDFARFYMMLES

SEQ ID NO: 22553 - protein, 24 aa, Homo sapiens
  Payload ID: 4542
  Gene Symbol: DCUN1D4
  Gene Name: DCN1, defective in cullin neddylation 1, domain containing 4
  ENSP ID: ENSP00000423808
MHSDAAAVNISFRECGVEKFSRKE

SEQ ID NO: 22554 - protein, 143 aa, Homo sapiens
  Payload ID: 4542
  Gene Symbol: DCUN1D4
  Gene Name: DCN1, defective in cullin neddylation 1, domain containing 4
  ENSP ID: ENSP00000424476
MHSDAAAVNFQLNSHLSTLANIHKIYHTLNKLNLTEDIGQDDHQTGSLRSCSSSDCFNKVMPPRKKRRPASGDDLSAKKSRHDSMYRKYDSTRIKTEEEAFSSKRCLEWFYEYAGTDDVVGPEGMEKFCEDIGVEPENVSQTY

SEQ ID NO: 22555 - protein, 46 aa, Homo sapiens
  Payload ID: 4542
  Gene Symbol: DCUN1D4
  Gene Name: DCN1, defective in cullin neddylation 1, domain containing 4
  ENSP ID: ENSP00000425644
MHSDAAAVNFQLNSHLSTLANIHKIYHTLNKLEVCGLAVLQTALIK

SEQ ID NO: 22556 - protein, 46 aa, Homo sapiens; identical to SEQ ID NO: 22555
  Payload ID: 4542
  Gene Symbol: DCUN1D4
  Gene Name: DCN1, defective in cullin neddylation 1, domain containing 4
  ENSP ID: ENSP00000425792

SEQ ID NO: 22557 - protein, 102 aa, Homo sapiens
  Payload ID: 4542
  Gene Symbol: DCUN1D4
  Gene Name: DCN1, defective in cullin neddylation 1, domain containing 4
  ENSP ID: ENSP00000426048
LFYSTGVVKRNDFSPEKDQRSLDINTAKCMLGLLLGKIWPLFPVFHQFLEQSKYKVINKDQWCNVLEFSRTINLDLSNYDEDGAWPVLLDEFVEWYKDKQMS

SEQ ID NO: 22558 - protein, 212 aa, Homo sapiens
  Payload ID: 4542
  Gene Symbol: DCUN1D4
  Gene Name: DCN1, defective in cullin neddylation 1, domain containing 4
  ENSP ID: ENSP00000426982
MEVEAALGCSGQGRGCGGVAPAGRGRERASERGTRVRISKGLSGAGGSVRKADFQLNSHLSTLANIHKIYHTLNKLNLTEDIGQDDHQTGSLRSCSSSDCFNKVMPPRKKRRPASGDDLSAKKSRHDSMYRKYDSTRIKTEEEAFSSKRCLEWFYEYAGTDDVVGPEGMEKFCEDIGVEPENVVMLVLAWKLDAQNMGYFTLQEWLKGMTSL

SEQ ID NO: 22559 - protein, 237 aa, Homo sapiens
  Payload ID: 4543
  Gene Symbol: DCUN1D5
  Gene Name: DCN1, defective in cullin neddylation 1, domain containing 5
  Uniprot ID: Q9BTE7
  ENSP ID: ENSP00000260247
MPVKKKRKSPGVAAAVAEDGGLKKCKISSYCRSQPPARLISGEEHFSSKKCLAWFYEYAGPDEVVGPEGMEKFCEDIGVEPENIIMLVLAWKLEAESMGFFTKEEWLKGMTSLQCDCTEKLQNKFDFLRSQLNDISSFKNIYRYAFDFARDKDQRSLDIDTAKSMLALLLGRTWPLFSVFYQYLEQSKYRVMNKDQWYNVLEFSRTVHADLSNYDEDGAWPVLLDEFVEWQKVRQTS

SEQ ID NO: 22560 - protein, 71 aa, Homo sapiens
  Payload ID: 4543
  Gene Symbol: DCUN1D5
  Gene Name: DCN1, defective in cullin neddylation 1, domain containing 5
  ENSP ID: ENSP00000431311
MPVKKKRKSPGVAAAVAEDGGLKKCKISRYHLPPPFKLPSSLLCWTTGGKGVGPGLPGWGWRQLLQIPTPC

SEQ ID NO: 22561 - protein, 195 aa, Homo sapiens
  Payload ID: 4543
  Gene Symbol: DCUN1D5
  Gene Name: DCN1, defective in cullin neddylation 1, domain containing 5
  ENSP ID: ENSP00000432027
  MOD_RES (1)..(1): Any amino acid
XYCRSQPPARLISGEEHFSSKKCLAWFYEYAGPDEVVGPEGMEKFCEDIGVEPENIIMLVLAWKLEAESMGFFTKEEWLKGMTSLQCDCTEKLQNKFDFLRSQLNDISSFKNIYRYAFDFARDKDQRSLDIDTAKSMLALLLGRTWPLFSVFYQYLEGLFFLMNLLSGKKSVRHHSKNYVKKMQTFQFPRVYKLM

SEQ ID NO: 22562 - protein, 84 aa, Homo sapiens
  Payload ID: 4543
  Gene Symbol: DCUN1D5
  Gene Name: DCN1, defective in cullin neddylation 1, domain containing 5
  ENSP ID: ENSP00000432488
MPVKKKRKSPGVAAAVAEDGGLKKCKISSYCRSQPPARLISGEEHFSSKKCLAWFYEYAGPDEVVGPEGMEKFCEDIGVEPENV

SEQ ID NO: 22563 - protein, 67 aa, Homo sapiens
  Payload ID: 4543
  Gene Symbol: DCUN1D5
  Gene Name: DCN1, defective in cullin neddylation 1, domain containing 5
  ENSP ID: ENSP00000433073
MPVKKKRKSPGVAAAVAEDGGLKKCKISRYHLPPPFKLPSSLLCWTTGGKGVGPGLPGWGWRQVRPL

SEQ ID NO: 22564 - protein, 68 aa, Homo sapiens
  Payload ID: 4543
  Gene Symbol: DCUN1D5
  Gene Name: DCN1, defective in cullin neddylation 1, domain containing 5
  ENSP ID: ENSP00000433134
  MOD_RES (1)..(1): Any amino acid
XKKRKSPGVAAAVAEDGGLKKCKISRYHLPPPFKLPSSLLCWTTGGKGVGPGLPGWGWRQLLQIPTPC

SEQ ID NO: 22565 - protein, 30 aa, Homo sapiens
  Payload ID: 4543
  Gene Symbol: DCUN1D5
  Gene Name: DCN1, defective in cullin neddylation 1, domain containing 5
  ENSP ID: ENSP00000433344
MPVKKKRKSPGVAAAVAEDGGLKKCKISRS

SEQ ID NO: 22566 - protein, 152 aa, Homo sapiens
  Payload ID: 4543
  Gene Symbol: DCUN1D5
  Gene Name: DCN1, defective in cullin neddylation 1, domain containing 5
  ENSP ID: ENSP00000435035
MPVKKKRKSPGVAAAVAEDGGLKKCKISRCDCTEKLQNKFDFLRSQLNDISSFKNIYRYAFDFARDKDQRSLDIDTAKSMLALLLGRTWPLFSVFYQYLEQSKYRVMNKDQWYNVLEFSRTVHADLSNYDEDGAWPVLLDEFVEWQKVRQTS

SEQ ID NO: 22567 - protein, 30 aa, Homo sapiens; identical to SEQ ID NO: 22565
  Payload ID: 4543
  Gene Symbol: DCUN1D5
  Gene Name: DCN1, defective in cullin neddylation 1, domain containing 5
  ENSP ID: ENSP00000437260

SEQ ID NO: 22568 - protein, 42 aa, Homo sapiens
  Payload ID: 4543
  Gene Symbol: DCUN1D5
  Gene Name: DCN1, defective in cullin neddylation 1, domain containing 5
  ENSP ID: ENSP00000463796
IIMLVLAWKLEAESMGFFTKEEWLKGMTSLQLSITELAFLFV

SEQ ID NO: 22569 - protein, 706 aa, Homo sapiens
  Payload ID: 4544
  Gene Symbol: DCST1
  Gene Name: DC-STAMP domain containing 1
  Uniprot ID: Q5T197
  ENSP ID: ENSP00000295542
MDIKHHQNGTRGQRRKQPHTTVQRLLTWGLPVSCSWFLWRQPGEFPVTALLLGAGAGGLLAIGLFQLLVNPMNIYEEQKIMFLYSLVGLGAMGWGTSPHIRCASLLLVPKMLGKEGRLFVLGYALAAIYVGPVANLRHNLNNVIASLGCTVELQINNTRAAWRISTAPLRAMFKDLLSSKELLRAETRNISATFEDLDAQVNSETGYTPEDTMDSGETAQGREARQAPASRLHLSTQKMYELKTKLRCSYVVNQAILSCRRWFDRKHEQCMKHIWVPLLTHLLCLPMKFKFFCGIAKVMEVWCRNRIPVEGNFGQTYDSLNQSIRGLDGEFSANIDFKEEKQAGVLGLNTSWERVSTEVRDYVYRQEARLEWALGLLHVLLSCTFLLVLHASFSYMDSYNHDIRFDNIYISTYFCQIDDRRKKLGKRTLLPLRKAEEKTVIFPCKPTIQASEMSNVVRELLETLPILLLLVVLCGLDWALYSIFDTIRHHSFLQYSFRSSHKLEVKVGGDSMLARLLRKTIGALNTSSETVMESNNMPCLPQPVGLDARAYWRAAVPIGLLVCLCLLQAFGYRLRRVIAAFYFPKREKKRILFLYNDLLKKRAAFTKLRRAAILRRERQQKAPRHPLADILHRGCPLLRRWLCRRCVVCQAPETPESYVCRTLDCEAVYCWSCWDDMRQRCPVCTPREELSSSAFSDSNDDTAYAG

SEQ ID NO: 22570 - protein, 664 aa, Homo sapiens
  Payload ID: 4544
  Gene Symbol: DCST1
  Gene Name: DC-STAMP domain containing 1
  Uniprot ID: Q5T197
  ENSP ID: ENSP00000357404
MDIKHHQNGTRGQRRKQPHTTVQRLLTWGLPVSCSWFLWRQPGEFPVTALLLGAGAGGLLAIGLFQLLVNPMNIYEEQKIMFLYSLVGLGAMGWGTSPHIRCASLLLVPKMLGKEGRLFVLGYALAAIYVGPVANLRHNLNNVIASLGCTVELQINNTRAAWRISTAPLRAMFKDLLSSKELLRAETRNISATFEDLDAQVNSETGYTPEDTMDSGETAQGREARQAPASRLHLSTQKMYELKTKLRCSYVVNQAILSCRRWFDRKHEQCMKHIWVPLLTHLLCLPMKFKFFCGIAKVMEVWCRNRIPVEGNFGQTYDSLNQSIRGLDGEFSANIDFKEEKQAGVLGLNTSWERVSTEVRDYVYRQEARLEWALGLLHVLLSCTFLLVLHASFSYMDSYNHDIRFDNIYISTYFCQIDDRRKKLGKRTLLPLRKAEEKTVIFPCKPTIQASEMSNVVRELLETLPILLLLVVLCGLDWALYSIFDTIRHHSFLQYSFRSSHKLEVKVGGDSMLARLLRKTIGALNTSSETVMESNNMPCLPQPVGLDARAYWRAAVPIGLLVCLCLLQAFGYRLRRVIAAFYFPKREKKRILFLYNDLLKKRAAFTKLRRAAILRRERQQKAPVFTEPQFLPLKNGKTGEICKACSLEISLEWWSGVGLRCQRA

SEQ ID NO: 22571 - protein, 681 aa, Homo sapiens
  Payload ID: 4544
  Gene Symbol: DCST1
  Gene Name: DC-STAMP domain containing 1
  Uniprot ID: Q5T197
  ENSP ID: ENSP00000387369
MDIKHHQNGTRGQRRKQPHTTVQRLLTWGLPVSCSWFLWRQPGEFPVTALLLGAGAGGLLAIGLGAMGWGTSPHIRCASLLLVPKMLGKEGRLFVLGYALAAIYVGPVANLRHNLNNVIASLGCTVELQINNTRAAWRISTAPLRAMFKDLLSSKELLRAETRNISATFEDLDAQVNSETGYTPEDTMDSGETAQGREARQAPASRLHLSTQKMYELKTKLRCSYVVNQAILSCRRWFDRKHEQCMKHIWVPLLTHLLCLPMKFKFFCGIAKVMEVWCRNRIPVEGNFGQTYDSLNQSIRGLDGEFSANIDFKEEKQAGVLGLNTSWERVSTEVRDYVYRQEARLEWALGLLHVLLSCTFLLVLHASFSYMDSYNHDIRFDNIYISTYFCQIDDRRKKLGKRTLLPLRKAEEKTVIFPCKPTIQASEMSNVVRELLETLPILLLLVVLCGLDWALYSIFDTIRHHSFLQYSFRSSHKLEVKVGGDSMLARLLRKTIGALNTSSETVMESNNMPCLPQPVGLDARAYWRAAVPIGLLVCLCLLQAFGYRLRRVIAAFYFPKREKKRILFLYNDLLKKRAAFTKLRRAAILRRERQQKAPRHPLADILHRGCPLLRRWLCRRCVVCQAPETPESYVCRTLDCEAVYCWSCWDDMRQRCPVCTPREELSSSAFSDSNDDTAYAG

SEQ ID NO: 22572 - protein, 528 aa, Homo sapiens
  Payload ID: 4544
  Gene Symbol: DCST1
  Gene Name: DC-STAMP domain containing 1
  ENSP ID: ENSP00000433667
MAQEGKEENSLIPVSPASIHLQALNPNEPHPRQKSGLLSYPVPLLAVQRLLTWGLPVSCSWFLWRQPGEFPVTALLLGAGAGGLLAIGLFQLLVNPMNIYEEQKIMFLYSLVGLGAMGWGTSPHIRCASLLLVPKMLGKEGRLFVLGYALAAIYVGPVANLRHNLNNVIASLGCTVELQINNTRAAWRISTAPLRAMFKDLLSSKELLRAETRNISATFEDLDAQVNSETGYTPEDTMDSGETAQGREARQAPASRLHLSTQKMYELKTKLRCSYVVNQAILSCRRWFDRKHEQCMKHIWVPLLTHLLCLPMKFKFFCGIAKVMEVWCRNRIPVEGNFGQTYDSLNQSIRGLDGEFSANIDFKEEKQAGVLGLNTSWERVSTEVRDYVYRQEARLEWALGLLHVLLSCTFLLVLHASFSYMDSYNHDIRFDNIYISTYFCQIDDRRKKLGKRTLLPLRKAEEKTVIFPCKPTIQASEMSNVVRELLETLPILLLLVVLCGLDWALYSIFDTIRHHSFLQYSFRSRRQS

SEQ ID NO: 22573 - protein, 773 aa, Homo sapiens
  Payload ID: 4545
  Gene Symbol: DCST2
  Gene Name: DC-STAMP domain containing 2
  Uniprot ID: Q5T1A1
  ENSP ID: ENSP00000357409
MPKVMKDVVHPLGGEEPSMARAVVRSVGGFTLGLSLATAYGLLELLVEGHSPWGCLVGTLTLAAFLSLGMGFSRQVRATVLLLLPQAFSRQGRTLLLVAAFGLVLQGPCANTLRNFTRASEAVACGAELALNQTAEVLQRAKQPLVSALNKIKAIARKTKEVADRVRKFFRSIMDGVKHIARALRNVWQWLLHIGDVCNSELGNPYLKCARVFDDAKDSCMMVIPQAYHLCYVLMPFKLALCGLASLVQVFCVIPKYIQPFLRQTIGTPVIQLLNRVRQEFEFNMTATHHFSVDLNASRSLSQVAMDLHEAVSMKLHRVREALALMGFTTPLLLVLLYLQALFYRYCYLNWDHYDNIYITSRFLRMEAVRSTAGLPTVLPLSAHEARRYIPPGSIFLSQWEKFFYILETFNLIRHLLLVLFLVFLDYAVFWVLDLARHQLQGEIVARSPVLVSLTVEGTGYAGNIYRDLVSAFDVLQQGNISILSRRCLLRPSEPDSTGYIVIGVMYGLCFFITLFGSYVSRLRRVICASYYPSREQERISYLYNVLLSRRTNLLAALHRSVRRRAADQGHRSAFLVLASRCPCLGPFVSHFWLHQAYCLGCGQPQDEGDMENTVSCSTPGCQGLYCLTCFRLLDNTCSVCASPLSYQGDLDLELDSSDEEGPQLWLAAAQRKDPEQAWLLQQQLQEVLGRSLSMESTSESSDLDEEKGPQQRKHGQQPLPEAHQPVSILTSPEPHRPPETSSATKGAPTPASEPSVPLSPPSLPDPSHPPPK

SEQ ID NO: 22574 - protein, 639 aa, Homo sapiens
  Payload ID: 4545
  Gene Symbol: DCST2
  Gene Name: DC-STAMP domain containing 2
  Uniprot ID: Q5T1A1
  ENSP ID: ENSP00000436964
MPKVMKDVVHPLGGEEPSMARAVVRSVGGFTLGLSLATAYGLLELLVEGHSPWGCLVGTLTLAAFLSLGMGFSRQVRATVLLLLPQAFSRQGRTLLLVAAFGLVLQGPCANTLRNFTRASEAVACGAELALNQTAEVLQRAKQPLVSALNKIKAIARKTKEVADRVRKFFRSIMDGVKHIARALRNVWQWLLHIGDVCNSELGNPYLKCARVFDDAKDSCMMVIPQAYHLCYVLMPFKLALCGLASLVQVFCVIPKYIQPFLRQTIGTPVIQLLNRVRQEFEFNMTATHHFSVDLNASRSLSQVAMDLHEAVSMKLHRVREALALMGFTTPLLLVLLYLQALFYRYCYLNWDHYDNIYITSRFLRMEAVRSTAGLPTVLPLSAHEARRYIPPGSIFLSQWEKFFYILETFNLIRHLLLVLFLVFLDYAVFWVLDLARHQLQGEIVARSPVLVSLTVEGTGYAGNIYRDLVSAFDVLQQGNISILSRRCLLRPSEPDSTGYIVIGVMYGLCFFITLFGSYVSRLRRVICASYYPSREQERISYLYNVLLSRRTNLLAALHRSVRRRAADQGHRSAFLVLASRCPCLGPFVSHFWLHQAYCLGCGQPQDEGDMENTVSCSTPGCQGFICKWHCSSSLVCTP

SEQ ID NO: 22575 - protein, 19 aa, Homo sapiens
  Payload ID: 4545
  Gene Symbol: DCST2
  Gene Name: DC-STAMP domain containing 2
  ENSP ID: ENSP00000437330
LLRPSEPDSTGYIVIGAPA

SEQ ID NO: 22576 - protein, 170 aa, Homo sapiens
  Payload ID: 4546
  Gene Symbol: DCTPP1
  Gene Name: dCTP pyrophosphatase 1
  Uniprot ID: Q9H773
  ENSP ID: ENSP00000322524
MSVAGGEIRGDTGGEDTAAPGRFSFSPEPTLEDIRRLHAEFAAERDWEQFHQPRNLLLALVGEVGELAELFQWKTDGEPGPQGWSPRERAALQEELSDVLIYLVALAARCRVDLPLAVLSKMDINRRRYPAHLARSSSRKYTELPHGAISEDQAVGPADIPCDSTGQTST

SEQ ID NO: 22577 - protein, 49 aa, Homo sapiens
  Payload ID: 4546
  Gene Symbol: DCTPP1
  Gene Name: dCTP pyrophosphatase 1
  ENSP ID: ENSP00000455391
MDINRRRYPAHLARSSSRKYTELPHGAISEDQAVGPADIPCDSTGQTST

SEQ ID NO: 22578 - protein, 71 aa, Homo sapiens
  Payload ID: 4546
  Gene Symbol: DCTPP1
  Gene Name: dCTP pyrophosphatase 1
  ENSP ID: ENSP00000456612
MSVAGGEIPRCRVDLPLAVLSKMDINRRRYPAHLARSSSRKYTELPHGAISEDQAVGPADIPCDSTGQTST

SEQ ID NO: 22579 - protein, 49 aa, Homo sapiens; identical to SEQ ID NO: 22577
  Payload ID: 4546
  Gene Symbol: DCTPP1
  Gene Name: dCTP pyrophosphatase 1
  ENSP ID: ENSP00000460764

SEQ ID NO: 22580 - protein, 49 aa, Homo sapiens; identical to SEQ ID NO: 22577
  Payload ID: 4546
  Gene Symbol: DCTPP1
  Gene Name: dCTP pyrophosphatase 1
  ENSP ID: ENSP00000460933

SEQ ID NO: 22581 - protein, 386 aa, Homo sapiens
  Payload ID: 4547
  Gene Symbol: DCAF10
  Gene Name: DDB1 and CUL4 associated factor 10
  ENSP ID: ENSP00000242323
MLSRSHRSVLTVACEQTEVLLFDPISSKHIKTLSEAHEDCVNNIRFLDNRLFATCSDDTTIALWDLRKLNTKVCTLHGHTSWVKNIEYDTNTRLLVTSGFDGNVIIWDTNRYTEDGCPHKKFFHTRFLMRMRLTPDCSKMLISTSSGYLLILHDLDLTKSLEVGSYPILRARRTTSSSDLTTSSSSSGPRVSGSPCHHSDSNSSEKHMSRASQREGVSPRNSLEVVTPEVLGESDHGNCITSLQLHPKGWATLLRCSSNSDDEECTCVYEFQEGAPVRPVSPRCSLRLTHYIEEANVGRGYIKELCFSPDGRMISSPHGYGIRLLGFDKQCSELVDCLPKEASPLRVIRSLYSHNDVVLTTKFSPTHCQIASGCLSGRVSLYQPKF

SEQ ID NO: 22582 - protein, 559 aa, Homo sapiens
  Payload ID: 4547
  Gene Symbol: DCAF10
  Gene Name: DDB1 and CUL4 associated factor 10
  Uniprot ID: Q5QP82
  ENSP ID: ENSP00000366953
MFPFGPHSPGGDGSAGAGAEEPTPHEGQAAATGPPSPLHPGADATHPPPPARSPRRPGAPSLSPAPRSGELGLPGAPESSTASAPGEPSPPSPPCRRPGPDCRAKSRGRHGLGAGLGGPGARLFGWLKERSLGRGLFVDPARDNFRTMTSLYGSIHPADSVYLSTRTHGAVFNLEYSPDGSVLTVACEQTEVLLFDPISSKHIKTLSEAHEDCVNNIRFLDNRLFATCSDDTTIALWDLRKLNTKVCTLHGHTSWVKNIEYDTNTRLLVTSGFDGNVIIWDTNRYTEDGCPHKKFFHTRFLMRMRLTPDCSKMLISTSSGYLLILHDLDLTKSLEVGSYPILRARRTTSSSDLTTSSSSSGPRVSGSPCHHSDSNSSEKHMSRASQREGVSPRNSLEVVTPEVLGESDHGNCITSLQLHPKGWATLLRCSSNSDDEECTCVYEFQEGAPVRPVSPRCSLRLTHYIEEANVGRGYIKELCFSPDGRMISSPHGYGIRLLGFDKQCSELVDCLPKEASPLRVIRSLYSHNDVVLTTKFSPTHCQIASGCLSGRVSLYQPKF

SEQ ID NO: 22583 - protein, 71 aa, Homo sapiens
  Payload ID: 4548
  Gene Symbol: DCAF11
  Gene Name: DDB1 and CUL4 associated factor 11
  ENSP ID: ENSP00000323680
MGSRNSSSAGSGSGDPSEGLPRRGAGLRRSEEEEEEDEDVDLAQRPSEVGAGRRCSKFTIHSGPLGLRGRE

SEQ ID NO: 22584 - protein, 446 aa, Homo sapiens
  Payload ID: 4548
  Gene Symbol: DCAF11
  Gene Name: DDB1 and CUL4 associated factor 11
  Uniprot ID: Q8TEB1
  ENSP ID: ENSP00000380142
MTELGMVVLGIDTTHLWMLPLTPGSWNSMRSRHKWNWPQGSWGLGGPPRSTAFLECCTSFLPNDLGFTDSYSQKAFCGIYSKDGQIFMSACQDQTIRLYDCRYGRFRKFKSIKARDVGWSVLDVAFTPDGNHFLYSSWSDYIHICNIYGEGDTHTALDLRPDERRFAVFSIAVSSDGREVLGGANDGCLYVFDREQNRRTLQIESHEDDVNAVAFADISSQILFSGGDDAICKVWDRRTMREDDPKPVGALAGHQDGITFIDSKGDARYLISNSKDQTIKLWDIRRFSSREGMEASRQAATQQNWDYRWQQVPKKAWRKLKLPGDSSLMTYRGHGVLHTLIRCRFSPIHSTGQQFIYSGCSTGKVVVYDLLSGHIVKKLTNHKACVRDVSWHPFEEKIVSSSWDGNLRLWQYRQAEYFQDDMPESEECASAPAPVPQSSTPFSSPQ

SEQ ID NO: 22585 - protein, 520 aa, Homo sapiens
  Payload ID: 4548
  Gene Symbol: DCAF11
  Gene Name: DDB1 and CUL4 associated factor 11
  Uniprot ID: Q8TEB1
  ENSP ID: ENSP00000380146
MGSRNSSSAGSGSGDPSEGLPRRGAGLRRSEEEEEEDEDVDLAQALLDSEEENDRAWDGRLGDRYNPPVDATPDTRELEFNEIKTQVELATGQLGLRRAAQKHSFPRMLHQRERGLCHRGSFSLGEQSRVISHFLPNDLGFTDSYSQKAFCGIYSKDGQIFMSACQDQTIRLYDCRYGRFRKFKSIKARDVGWSVLDVAFTPDGNHFLYSSWSDYIHICNIYGEGDTHTALDLRPDERRFAVFSIAVSSDGREVLGGANDGCLYVFDREQNRRTLQIESHEDDVNAVAFADISSQILFSGGDDAICKVWDRRTMREDDPKPVGALAGHQDGITFIDSKGDARYLISNSKDQTIKLWDIRRFSSREGMEASRQAATQQNWDYRWQQVPKKAWRKLKLPGDSSLMTYRGHGVLHTLIRCRFSPIHSTGQQFIYSGCSTGKVVVYDLLSGHIVKKLTNHKACVRDVSWHPFEEKIVSSSWDGNLRLWQYRQAEYFQDDMPESEECASAPAPVPQSSTPFSSPQ

SEQ ID NO: 22586 - protein, 546 aa, Homo sapiens
  Payload ID: 4548
  Gene Symbol: DCAF11
  Gene Name: DDB1 and CUL4 associated factor 11
  Uniprot ID: Q8TEB1
  ENSP ID: ENSP00000415556
MGSRNSSSAGSGSGDPSEGLPRRGAGLRRSEEEEEEDEDVDLAQVLAYLLRRGQVRLVQGGGAANLQFIQALLDSEEENDRAWDGRLGDRYNPPVDATPDTRELEFNEIKTQVELATGQLGLRRAAQKHSFPRMLHQRERGLCHRGSFSLGEQSRVISHFLPNDLGFTDSYSQKAFCGIYSKDGQIFMSACQDQTIRLYDCRYGRFRKFKSIKARDVGWSVLDVAFTPDGNHFLYSSWSDYIHICNIYGEGDTHTALDLRPDERRFAVFSIAVSSDGREVLGGANDGCLYVFDREQNRRTLQIESHEDDVNAVAFADISSQILFSGGDDAICKVWDRRTMREDDPKPVGALAGHQDGITFIDSKGDARYLISNSKDQTIKLWDIRRFSSREGMEASRQAATQQNWDYRWQQVPKKAWRKLKLPGDSSLMTYRGHGVLHTLIRCRFSPIHSTGQQFIYSGCSTGKVVVYDLLSGHIVKKLTNHKACVRDVSWHPFEEKIVSSSWDGNLRLWQYRQAEYFQDDMPESEECASAPAPVPQSSTPFSSPQ

SEQ ID NO: 22587 - protein, 546 aa, Homo sapiens; identical to SEQ ID NO: 22586
  Payload ID: 4548
  Gene Symbol: DCAF11
  Gene Name: DDB1 and CUL4 associated factor 11
  Uniprot ID: Q8TEB1
  ENSP ID: ENSP00000452898

SEQ ID NO: 22588 - protein, 142 aa, Homo sapiens
  Payload ID: 4548
  Gene Symbol: DCAF11
  Gene Name: DDB1 and CUL4 associated factor 11
  ENSP ID: ENSP00000452915
MGSRNSSSAGSGSGDPSEGLPRRGAGLRRSEEEEEEDEDVDLAQVLAYLLRRGQVRLVQGGGAANLQFIQALLDSEEENDRAWDGRLGDRYNPPVDATPDTRELEFNEIKTQVELATGQLGLRRAAQKHSFPRMLHQRERGL

SEQ ID NO: 22589 - protein, 137 aa, Homo sapiens
  Payload ID: 4548
  Gene Symbol: DCAF11
  Gene Name: DDB1 and CUL4 associated factor 11
  ENSP ID: ENSP00000453035
MGSRNSSSAGSGSGDPSEGLPRRGAGLRRSEEEEEEDEDVDLAQVLAYLLRRPSWTQRKRMTELGMVVLGIDTTHLWMLPLTPGSWNSMRSRHKWNWPQGSWGLGGPPRSTAFLECCTRENGASAIGEASPLENSLE

SEQ ID NO: 22590 - protein, 122 aa, Homo sapiens
  Payload ID: 4548
  Gene Symbol: DCAF11
  Gene Name: DDB1 and CUL4 associated factor 11
  ENSP ID: ENSP00000453074
MGSRNSSSAGSGSGDPSEGLPRRGAGLRRSEEEEEEDEDVDLAQVLAYLLRRGQVRLVQGGGAANLQFIQALLDSEEENDRAWDGRLGDRYNPPVDATPDTRELEFNEIKTQVELATGQLGL

SEQ ID NO: 22591 - protein, 265 aa, Homo sapiens
  Payload ID: 4548
  Gene Symbol: DCAF11
  Gene Name: DDB1 and CUL4 associated factor 11
  ENSP ID: ENSP00000453115
PDERRFAVFSIAVSSDGREVLGGANDGCLYVFDREQNRRTLQIESHEDDVNAVAFADISSQILFSGGDDAICKVWDRRTMREDDPKPVGALAGHQDGITFIDSKGDARYLISNSKDQTIKLWDIRRFSSREGMEASRQAATQQNWDYRWQQVPKKAWRKLKLPGDSSLMTYRGHGVLHTLIRCRFSPIHSTGQQFIYSGCSTGKVVVYDLLSGHIVKKLTNHKACVRDVSWHPFEEKIVSSSVRLQGLRVLAHVWGLDLGGGSTS

SEQ ID NO: 22592 - protein, 145 aa, Homo sapiens
  Payload ID: 4548
  Gene Symbol: DCAF11
  Gene Name: DDB1 and CUL4 associated factor 11
  ENSP ID: ENSP00000453132
MGSRNSSSAGSGSGDPSEGLPRRGAGLRRSEEEEEEDEDVDLAQVLAYLLRRPSWTQRKRMTELGMVVLGIDTTHLWMLPLTPGSWNSMRSRHKWNWPQGSWGLGGPPRSTAFLECCTSFLPNDLGFTDSYSQKAFCGIYSKDGQ

SEQ ID NO: 22593 - protein, 56 aa, Homo sapiens
  Payload ID: 4548
  Gene Symbol: DCAF11
  Gene Name: DDB1 and CUL4 associated factor 11
  ENSP ID: ENSP00000453184
MGSRNSSSAGSGSGDPSEGLPRRGAGLRRSEEEEEEDEDVDLAQVLAYLLRSGCYP

SEQ ID NO: 22594 - protein, 116 aa, Homo sapiens
  Payload ID: 4548
  Gene Symbol: DCAF11
  Gene Name: DDB1 and CUL4 associated factor 11
  ENSP ID: ENSP00000453208
MGSRNSSSAGSGSGDPSEGLPRRGAGLRRSEEEEEEDEDVDLAQALLDSEEENDRAWDGRLGDRYNPPVDATPDTRELEFNEIKTQVELATGQLGLRRAAQKHSFPRMLHQRERGL

SEQ ID NO: 22595 - protein, 30 aa, Homo sapiens
  Payload ID: 4548
  Gene Symbol: DCAF11
  Gene Name: DDB1 and CUL4 associated factor 11
  ENSP ID: ENSP00000453290
MGSRNSSSAGSGSGDPSEGLPRRGAGLRRS

SEQ ID NO: 22596 - protein, 67 aa, Homo sapiens
  Payload ID: 4548
  Gene Symbol: DCAF11
  Gene Name: DDB1 and CUL4 associated factor 11
  ENSP ID: ENSP00000453381
MGSRNSSSAGSGSGDPSEGLPRRGAGLRRSEEEEEEDEDVDLAQRPSEVGAGRRCSKFTIHSGPLGL

SEQ ID NO: 22597 - protein, 71 aa, Homo sapiens; identical to SEQ ID NO: 22583
  Payload ID: 4548
  Gene Symbol: DCAF11
  Gene Name: DDB1 and CUL4 associated factor 11
  ENSP ID: ENSP00000453462

SEQ ID NO: 22598 - protein, 108 aa, Homo sapiens
  Payload ID: 4548
  Gene Symbol: DCAF11
  Gene Name: DDB1 and CUL4 associated factor 11
  ENSP ID: ENSP00000453470
MGSRNSSSAGSGSGDPSEGLPRRGAGLRRSEEEEEEDEDVDLAQVLAYLLRRGQVRLVQGGGAANLQFIQALLDSEEENDRAWDGRLGDRYNPPVDATPDTRELEFNE

SEQ ID NO: 22599 - protein, 149 aa, Homo sapiens
  Payload ID: 4548
  Gene Symbol: DCAF11
  Gene Name: DDB1 and CUL4 associated factor 11
  ENSP ID: ENSP00000453505
MGSRNSSSAGSGSGDPSEGLPRRGAGLRRSEEEEEEDEDVDLAQALLDSEEENDRAWDGRLGDRYNPPVDATPDTRELEFNEIKTQVELATGQLGLRRAAQKHSFPRMLHQRERGLCHRGSFSLGEQSRVISHFLPNDLGFTDSYSQKA

SEQ ID NO: 22600 - protein, 71 aa, Homo sapiens; identical to SEQ ID NO: 22583
  Payload ID: 4548
  Gene Symbol: DCAF11
  Gene Name: DDB1 and CUL4 associated factor 11
  ENSP ID: ENSP00000453550

SEQ ID NO: 22601 - protein, 118 aa, Homo sapiens
  Payload ID: 4548
  Gene Symbol: DCAF11
  Gene Name: DDB1 and CUL4 associated factor 11
  ENSP ID: ENSP00000453587
MGSRNSSSAGSGSGDPSEGLPRRGAGLRRSEEEEEEDEDVDLAQVLAYLLRRPSWTQRKRMTELGMVVLGIDTTHLWMLPLTPGSWNSMRSRHKWNWPQGSWGLGGPPRSTAFLECCT

SEQ ID NO: 22602 - protein, 56 aa, Homo sapiens; identical to SEQ ID NO: 22593
  Payload ID: 4548
  Gene Symbol: DCAF11
  Gene Name: DDB1 and CUL4 associated factor 11
  ENSP ID: ENSP00000453632

SEQ ID NO: 22603 - protein, 128 aa, Homo sapiens
  Payload ID: 4548
  Gene Symbol: DCAF11
  Gene Name: DDB1 and CUL4 associated factor 11
  ENSP ID: ENSP00000453678
MGSRNSSSAGSGSGDPSEGLPRRGAGLRRSEEEEEEDEDVDLAQALLDSEEENDRAWDGRLGDRYNPPVDATPDTRELEFNEIKTQVELATGQLGLRRAAQKHSFPRMLHQRERGLCHRGSFSLGEQS

SEQ ID NO: 22604 - protein, 56 aa, Homo sapiens; identical to SEQ ID NO: 22593
  Payload ID: 4548
  Gene Symbol: DCAF11
  Gene Name: DDB1 and CUL4 associated factor 11
  ENSP ID: ENSP00000453803

SEQ ID NO: 22605 - protein, 93 aa, Homo sapiens
  Payload ID: 4548
  Gene Symbol: DCAF11
  Gene Name: DDB1 and CUL4 associated factor 11
  ENSP ID: ENSP00000453805
MGSRNSSSAGSGSGDPSEGLPRRGAGLRRSEEEEEEDEDVDLAQVLAYLLRRGQVRLVQGGGAANLQFIQALLDSEEENDRAWDGRLGDRYNP

SEQ ID NO: 22606 - protein, 71 aa, Homo sapiens; identical to SEQ ID NO: 22583
  Payload ID: 4548
  Gene Symbol: DCAF11
  Gene Name: DDB1 and CUL4 associated factor 11
  ENSP ID: ENSP00000453814

SEQ ID NO: 22607 - protein, 106 aa, Homo sapiens
  Payload ID: 4548
  Gene Symbol: DCAF11
  Gene Name: DDB1 and CUL4 associated factor 11
  ENSP ID: ENSP00000453826
MGSRNSSSAGSGSGDPSEGLPRRGAGLRRSEEEEEEDEDVDLAQVLAYLLRRPSWTQRKRMTELGMVVLGIDTTHLWMLPLTPGSWNSMRSRHKWNWPQGSWGLGG

SEQ ID NO: 22608 - protein, 90 aa, Homo sapiens
  Payload ID: 4548
  Gene Symbol: DCAF11
  Gene Name: DDB1 and CUL4 associated factor 11
  ENSP ID: ENSP00000453832
MGSRNSSSAGSGSGDPSEGLPRRGAGLRRSEEEEEEDEDVDLAQALLDSEEENDRAWDGRLGDRYNPPVDATPDTRELEFNEIKTQVELA

SEQ ID NO: 22609 - protein, 182 aa, Homo sapiens
  Payload ID: 4548
  Gene Symbol: DCAF11
  Gene Name: DDB1 and CUL4 associated factor 11
  ENSP ID: ENSP00000453916
MGSRNSSSAGSGSGDPSEGLPRRGAGLRRSEEEEEEDEDVDLAQALLDSEEENDRAWDGRLGDRYNPPVDATPDTRELEFNEIKTQVELATGQLGLRRAAQKHSFPRMLHQRERGLCHRGSFSLGEQSRVISHFLPNDLGFTDSYSQKAFCGIYSKDGQIFMSACQDQTIRLYDCRYGRFRK

SEQ ID NO: 22610 - protein, 73 aa, Homo sapiens
  Payload ID: 4548
  Gene Symbol: DCAF11
  Gene Name: DDB1 and CUL4 associated factor 11
  ENSP ID: ENSP00000454044
MGSRNSSSAGSGSGDPSEGLPRRGAGLRRSEEEEEEDEDVDLAQVLAYLLRRGQVRLVQGGGAANLQFIQALL

SEQ ID NO: 22611 - protein, 154 aa, Homo sapiens
  Payload ID: 4548
  Gene Symbol: DCAF11
  Gene Name: DDB1 and CUL4 associated factor 11
  ENSP ID: ENSP00000454129
MGSRNSSSAGSGSGDPSEGLPRRGAGLRRSEEEEEEDEDVDLAQVLAYLLRRGQVRLVQGGGAANLQFIQALLDSEEENDRAWDGRLGDRYNPPVDATPDTRELEFNEIKTQVELATGQLGLRRAAQKHSFPRMLHQRERGLCHRGSFSLGEQS

SEQ ID NO: 22612 - protein, 104 aa, Homo sapiens
  Payload ID: 4548
  Gene Symbol: DCAF11
  Gene Name: DDB1 and CUL4 associated factor 11
  ENSP ID: ENSP00000454139
MGSRNSSSAGSGSGDPSEGLPRRGAGLRRSEEEEEEDEDVDLAQVLAYLLRRPSWTQRKRMTELGMVVLGIDTTHLWMLPLTPGSWNSMRSRHKWNWPQGSWGL

SEQ ID NO: 22613 - protein, 453 aa, Homo sapiens
  Payload ID: 4549
  Gene Symbol: DCAF12
  Gene Name: DDB1 and CUL4 associated factor 12
  Uniprot ID: Q5T6F0
  ENSP ID: ENSP00000355114
MARKVVSRKRKAPASPGAGSDAQGPQFGWDHSLHKRKRLPPVKRSLVYYLKNREVRLQNETSYSRVLHGYAAQQLPSLLKEREFHLGTLNKVFASQWLNHRQVVCGTKCNTLFVVDVQTSQITKIPILKDREPGGVTQQGCGIHAIELNPSRTLLATGGDNPNSLAIYRLPTLDPVCVGDDGHKDWIFSIAWISDTMAVSGSRDGSMGLWEVTDDVLTKSDARHNVSRVPVYAHITHKALKDIPKEDTNPDNCKVRALAFNNKNKELGAVSLDGYFHLWKAENTLSKLLSTKLPYCRENVCLAYGSEWSVYAVGSQAHVSFLDPRQPSYNVKSVCSRERGSGIRSVSFYEHIITVGTGQGSLLFYDIRAQRFLEERLSACYGSKPRLAGENLKLTTGKGWLNHDETWRNYFSDIDFFPNAVYTHCYDSSGTKLFVAGGPLPSGLHGNYAGLWS

SEQ ID NO: 22614 - protein, 227 aa, Homo sapiens
  Payload ID: 4549
  Gene Symbol: DCAF12
  Gene Name: DDB1 and CUL4 associated factor 12
  ENSP ID: ENSP00000380187
MEPQGYPAFGWDHSLHKRKRLPPVKRSLVYYLKNREVRLQNETSYSRVLHGYAAQQLPSLLKEREFHLGTLNKVFASQWLNHRQVVCGTKCNTLFVVDVQTSQITKIPILKDREPGGVTQQGCGIHAIELNPSRTLLATGGDNPNSLAIYRLPTLDPVCVGDDGHKDWIFSIAWISDTMAVSGSRDGSMGLWEVTDDVLTKSDARHNVSRVPVYAHITHKALKDIPK

SEQ ID NO: 22615 - protein, 189 aa, Homo sapiens
  Payload ID: 4549
  Gene Symbol: DCAF12
  Gene Name: DDB1 and CUL4 associated factor 12
  ENSP ID: ENSP00000415833
MQPMSFGWDHSLHKRKRLPPVKRSLVYYLKNREVRLQNETSYSRVLHGYAAQQLPSLLKEREFHLGTLNKVFASQWLNHRQVVCGTKCNTLFVVDVQTSQITKIPILKDREPGGVTQQGCGIHAIELNPSRTLLATGGDNPNSLAIYRLPTLDPVCVGDDGHKDWIFSIAWISDTMAVSGSRDGSMGLW

SEQ ID NO: 22616 - protein, 463 aa, Homo sapiens
  Payload ID: 4550
  Gene Symbol: DCAF12L1
  Gene Name: DDB1 and CUL4 associated factor 12-like 1
  Uniprot ID: Q5VU92
  ENSP ID: ENSP00000360167
MAQQQTGSRKRKAPAVEADAESSPSQGLAAADGEGPLLLKRQRRPATYRSMAHYLKVREVGGWGPARLQGFDGELRGYAVQRLPELLTERQLELGTVNKVFASQWLNSRQVVCGTKCNTLFVVDVESGHIARIPLLRDSEARLAQDQQGCGIHAIELNPSKTLLATGGENPNSLAIYQLPSLDPLCLGDRHGHKDWIFAVAWLSDTVAVSGSRDGTVALWRMDPDKFDDTVAWHSEVGLPVYAHIRPRDVEAIPRAIINPSNRKVRALACGGKNQELGAVSLDGYFHLWKAGSALSRLLSIRLPYFRDNVCLTYCDDMSVYAVGSHSHVSFLDLRQDQQNIRPLCSREGGTGVRSLSFYRHIITVGTGQGSLLFYDVRAQKFLEERASATLESSSGPARRKLRLACGRGWLNHNDFWVNYFGGMEVFPNALYTHCYNWPEMKLFVAGGPLPAGLHGNYAGLWS

SEQ ID NO: 22617 - protein, 463 aa, Homo sapiens
  Payload ID: 4551
  Gene Symbol: DCAF12L2
  Gene Name: DDB1 and CUL4 associated factor 12-like 2
  Uniprot ID: Q5VW00
  ENSP ID: ENSP00000353128
MAQQQTGSRKRKAPAVEAGAGSSSSQGLAAADGEGPLLPKKQKRPATRRRLVHYLKGREVGARGPAGLQGFEGELRGYAVQRLPELLTERQLDLGTLNKVFASQWLNARQVVCGTKCNTLFVVDVQSGHITRIPLMRDKEAGLAQAHQGCGIHAIELNPSKTLLATGGENPNSLAIYQLPTLDPLCLGDRHGHKDWIFAVAWLSDTVAVSGSRDGTVALWRMDPDMFNGSIAWHSEVGLPVYAHIRPRDVEAIPRASTNPSNRKVRALAFSGKNQELGAVSLDGYFHLWKARSTLSRLLSIRLPYCRENVCLTYCDELSLYAVGSQSHVSFLDPRQRQQNIRPLCSREGGTGVRSLSFYQHIITVGTGHGSLLFYDIRAQKFLEERASSSLDSMPGPAGRKLKLACGRGWLNQDDVWVNYFGGMGEFPNALYTHCYNWPEMKLFVAGGPLPSGLHGNYAGLWS

SEQ ID NO: 22618 - protein, 597 aa, Homo sapiens
  Payload ID: 4552
  Gene Symbol: DCAF13
  Gene Name: DDB1 and CUL4 associated factor 13
  ENSP ID: ENSP00000297579
MQWPPPWRRSPLVSATPPPGPTRGLLCPRRVSEAGDSSTEGARTGHRHYVTPAESAMEGRSQPLPSLRPASPTNAPAHGRGSDCTAKEPPLANVCRQNYGAAQDPVEPAGRRSASHVTGSSLGKAEVACGRRWRWAELLADTSWSPAGRATEMKVKMLSRNPDNYVRETKLDLQRVPRNYDPALHPFEVPREYIRALNATKLERVFAKPFLASLDGHRDGVNCLAKHPEKLATVLSGACDGEVRIWNLTQRNCIRTIQAHEGFVRGICTRFCGTSFFTVGDDKTVKQWKMDGPGYGDEEEPLHTILGKTVYTGIDHHWKEAVFATCGQQVDIWDEQRTNPICSMTWGFDSISSVKFNPIETFLLGSCASDRNIVLYDMRQATPLKKVILDMRTNTICWNPMEAFIFTAANEDYNLYTFDMRALDTPVMVHMDHVSAVLDVDYSPTGKEFVSASFDKSIRIFPVDKSRSREVYHTKRMQHVICVKWTSDSKYIMCGSDEMNIRLWKANASEKLGVLTSREKAAKDYNQKLKEKFQHYPHIKRIARHRHLPKSIYSQIQEQRIMKEARRRKEVNRIKHSKPGSVPLVSEKKKHVVAVVK

SEQ ID NO: 22619 - protein, 221 aa, Homo sapiens
  Payload ID: 4552
  Gene Symbol: DCAF13
  Gene Name: DDB1 and CUL4 associated factor 13
  ENSP ID: ENSP00000430411
MKVKMLSRNPDNYVRETKLDLQRVPRNYDPALHPFEVPREYIRALNATKLERVFAKPFLASLDGHRDGVNCLAKHPEKLATVLSGACDGEVRIWNLTQRNCIRTIQAHEGFVRGICTRFCGTSFFTVGDDKTVKQWKMDGPGYGDEEEPLHTILGKTVYTGIDHHWKEAVFATCGQQVDIWDEQRTNPICSMTWGFDSISSVKFNPIEVMFFFKYVLLIMA

SEQ ID NO: 22620 - protein, 185 aa, Homo sapiens
  Payload ID: 4552
  Gene Symbol: DCAF13
  Gene Name: DDB1 and CUL4 associated factor 13
  ENSP ID: ENSP00000430883
MKVKMLSRNPDNYVRETKLDLQRVPRNYDPALHPFEVPREYIRALNATKLERVFAKPFLASLDGHRDGVNCLAKHPEKLATVLSGACDGEVGDDKTVKQWKMDGPGYGDEEEPLHTILGKTVYTGIDHHWKEAVFATCGQQVDIWDEQRTNPICSMTWGFDSISSVKFNPIEVMFFFKYVLLIMA

SEQ ID NO: 22621 - protein, 597 aa, Homo sapiens; identical to SEQ ID NO: 22618
  Payload ID: 4552
  Gene Symbol: DCAF13
  Gene Name: DDB1 and CUL4 associated factor 13
  ENSP ID: ENSP00000477526

SEQ ID NO: 22622 - protein, 96 aa, Homo sapiens
  Payload ID: 4552
  Gene Symbol: DCAF13
  Gene Name: DDB1 and CUL4 associated factor 13
  Uniprot ID: Q9NV06
  ENSP ID: ENSP00000480810
MKVKMLSRNPDNYVRETKLDLQRVPRNYDPALHPFEVPREYIRALNATKLERVFAKPFLASLDGHRDGVNCLAKHPEKLATVLSGACDGELVMTKL

SEQ ID NO: 22623 - protein, 204 aa, Homo sapiens
  Payload ID: 4552
  Gene Symbol: DCAF13
  Gene Name: DDB1 and CUL4 associated factor 13
  ENSP ID: ENSP00000484168
MDGPGYGDEEEPLHTILGKTVYTGIDHHWKEAVFATCGQQVDIWDEQRTNPICSMTWGFDSISSVKFNPIETFLLGSCASDRNIVLYDMRQATPLKKVILDMRTNTICWNPMEAFIFTAANEDYNLYTFDMRALDTPVMVHMDHVSAVLDVDYSPTGKEFVSASFDKSIRIFPVDKSRSREVYHTKRMQHVICVKWTSDSKYIM

SEQ ID NO: 22624 - protein, 445 aa, Homo sapiens
  Payload ID: 4552
  Gene Symbol: DCAF13
  Gene Name: DDB1 and CUL4 associated factor 13
  Uniprot ID: Q9NV06
  ENSP ID: ENSP00000484962
MKVKMLSRNPDNYVRETKLDLQRVPRNYDPALHPFEVPREYIRALNATKLERVFAKPFLASLDGHRDGVNCLAKHPEKLATVLSGACDGEVRIWNLTQRNCIRTIQAHEGFVRGICTRFCGTSFFTVGDDKTVKQWKMDGPGYGDEEEPLHTILGKTVYTGIDHHWKEAVFATCGQQVDIWDEQRTNPICSMTWGFDSISSVKFNPIETFLLGSCASDRNIVLYDMRQATPLKKVILDMRTNTICWNPMEAFIFTAANEDYNLYTFDMRALDTPVMVHMDHVSAVLDVDYSPTGKEFVSASFDKSIRIFPVDKSRSREVYHTKRMQHVICVKWTSDSKYIMCGSDEMNIRLWKANASEKLGVLTSREKAAKDYNQKLKEKFQHYPHIKRIARHRHLPKSIYSQIQEQRIMKEARRRKEVNRIKHSKPGSVPLVSEKKKHVVAVVK

SEQ ID NO: 22625 - protein, 600 aa, Homo sapiens
  Payload ID: 4553
  Gene Symbol: DCAF15
  Gene Name: DDB1 and CUL4 associated factor 15
  Uniprot ID: Q66K64
  ENSP ID: ENSP00000254337
MAPSSKSERNSGAGSGGGGPGGAGGKRAAGRRREHVLKQLERVKISGQLSPRLFRKLPPRVCVSLKNIVDEDFLYAGHIFLGFSKCGRYVLSYTSSSGDDDFSFYIYHLYWWEFNVHSKLKLVRQVRLFQDEEIYSDLYLTVCEWPSDASKVIVFGFNTRSANGMLMNMMMMSDENHRDIYVSTVAVPPPGRCAACQDASRAHPGDPNAQCLRHGFMLHTKYQVVYPFPTFQPAFQLKKDQVVLLNTSYSLVACAVSVHSAGDRSFCQILYDHSTCPLAPASPPEPQSPELPPALPSFCPEAAPARSSGSPEPSPAIAKAKEFVADIFRRAKEAKGGVPEEARPALCPGPSGSRCRAHSEPLALCGETAPRDSPPASEAPASEPGYVNYTKLYYVLESGEGTEPEDELEDDKISLPFVVTDLRGRNLRPMRERTAVQGQYLTVEQLTLDFEYVINEVIRHDATWGHQFCSFSDYDIVILEVCPETNQVLINIGLLLLAFPSPTEEGQLRPKTYHTSLKVAWDLNTGIFETVSVGDLTEVKGQTSGSVWSSYRKSCVDMVMKWLVPESSGRYVNRMTNEALHKGCSLKVLADSERYTWIVL

SEQ ID NO: 22626 - protein, 272 aa, Homo sapiens
  Payload ID: 4553
  Gene Symbol: DCAF15
  Gene Name: DDB1 and CUL4 associated factor 15
  ENSP ID: ENSP00000466048
  MOD_RES (1)..(1): Any amino acid
XVYPFPTFQPAFQLKKDQVVLLNTSYSLVACAVSVHSAGDRSFCQILYDHSTCPLAPASPPEPQSPELPPALPSFCPEAAPARSSGSPEPSPAIAKAKEFVADIFRRAKEAKGGVPEEARPALCPGPSGSRCRAHSEPLALCGETAPRDSPPASEAPASEPGYVNYTKLYYVLESGEGTEPEDELEDDKISLPFVVTDLRGRNLRPMRERTAVQVGVGSGRAKDSPGELPGGSWHRPLRLPTHPQGQYLTVEQLTLDFEYVINEVIRHDATW

SEQ ID NO: 22627 - protein, 54 aa, Homo sapiens
  Payload ID: 4553
  Gene Symbol: DCAF15
  Gene Name: DDB1 and CUL4 associated factor 15
  ENSP ID: ENSP00000466932
APSSKSERNSGAGSGGGGPGGAGGKRAAGRRREHVLKQLERVKSPCRWLWASSA

SEQ ID NO: 22628 - protein, 201 aa, Homo sapiens
  Payload ID: 4553
  Gene Symbol: DCAF15
  Gene Name: DDB1 and CUL4 associated factor 15
  ENSP ID: ENSP00000468330
  MOD_RES (1)..(1): Any amino acid
XPLPASPELEDDKISLPFVVTDLRGRNLRPMRERTAVQGQYLTVEQLTLDFEYVINEVIRHDATWGHQFCSFSDYDIVILEVCPETNQVLINIGLLLLAFPSPTEEGQLRPKTYHTSLKVAWDLNTGIFETVSVGDLTEVKGQTSGSVWSSYRKSCVDMVMKWLVPESSGRYVNRMTNEALHKGCSLKVLADSERYTWIVL

SEQ ID NO: 22629 - protein, 216 aa, Homo sapiens
  Payload ID: 4554
  Gene Symbol: DCAF16
  Gene Name: DDB1 and CUL4 associated factor 16
  Uniprot ID: Q9NXF7
  ENSP ID: ENSP00000371682
MGPRNPSPDHLSESESEEEENISYLNESSGEEWDSSEEEDSMVPNLSPLESLAWQVKCLLKYSTTWKPLNPNSWLYHAKLLDPSTPVHILREIGLRLSHCSHCVPKLEPIPEWPPLASCGVPPFQKPLTSPSRLSRDHATLNGALQFATKQLSRTLSRATPIPEYLKQIPNSCVSGCCCGWLTKTVKETTRTEPINTTYSYTDFQKAVNKLLTASL

SEQ ID NO: 22630 - protein, 271 aa, Homo sapiens
  Payload ID: 4555
  Gene Symbol: DCAF17
  Gene Name: DDB1 and CUL4 associated factor 17
  ENSP ID: ENSP00000342160
  MOD_RES (1)..(1): Any amino acid
XRHSTTCFAVPCSVPSSTFFTCRDSRDQQKDMPPLLFEVSSLENAFQIGGHPWHYIVTPNKKKQKGVFHICALKDNSLAKNGIQEMDCCSLESDWIYFHPDASGRIIHVGPNQVKVLKLTEIENNSSQHQISEDFVILANRENHKNENVLTVTASGRVVKKSFNLLDDDPEQETFKIVDYEDELDLLSVVAVTQIDAEGKAHLDFHCNEYGTLLKSIPLVESWDVTYSHEVYFDRDLVLHIEQKPNRVFSCYVYQMICDTGEEEETINRSC

SEQ ID NO: 22631 - protein, 520 aa, Homo sapiens
  Payload ID: 4555
  Gene Symbol: DCAF17
  Gene Name: DDB1 and CUL4 associated factor 17
  Uniprot ID: Q5H9S7
  ENSP ID: ENSP00000364404
MGPTRKPNVCSRLSRRALGCFSRDAGVVQRTNLGILRALVCQESTKFKNVWTTHSRSPIAYERGRIYFDNYRRCVSSVASEPRKLYEMPKCSKSEKIEDALLWECPVGDILPNSSDYKSSLIALTAHNWLLRISATTGKILEKIYLAPYCKFRYLSWDTPQEVIAVKSAQNRGSAVARQAGIQQHVLLYLAVFRVLPFSLVGILEINKKIFGNVTDATLSHGILIVMYSSGLVRLYSFQTIAEQFMQQKLDLGCACRWGGTTGTVGEAPFGIPCNIKITDMPPLLFEVSSLENAFQIGGHPWHYIVTPNKKKQKGVFHICALKDNSLAKNGIQEMDCCSLESDWIYFHPDASGRIIHVGPNQVKVLKLTEIENNSSQHQISEDFVILANRENHKNENVLTVTASGRVVKKSFNLLDDDPEQETFKIVDYEDELDLLSVVAVTQIDAEGKAHLDFHCNEYGTLLKSIPLVESWDVTYSHEVYFDRDLVLHIEQKPNRVFSCYVYQMICDTGEEEETINRSC

SEQ ID NO: 22632 - protein, 128 aa, Homo sapiens
  Payload ID: 4555
  Gene Symbol: DCAF17
  Gene Name: DDB1 and CUL4 associated factor 17
  ENSP ID: ENSP00000400335
  MOD_RES (1)..(1): Any amino acid
XRTNLGILRALVCQESTKFKNVWTTHSRSPIAYERGRIYFDNYRRCVSSVASEPRKLYEMPKCSKSEKIEDALLWECPVMESSVARLECSGTISAHRNLHLPGSSDSPASASQVAGIIGRYTSQFIRL

SEQ ID NO: 22633 - protein, 222 aa, Homo sapiens
  Payload ID: 4555
  Gene Symbol: DCAF17
  Gene Name: DDB1 and CUL4 associated factor 17
  ENSP ID: ENSP00000403992
  MOD_RES (1)..(1): Any amino acid
XEIKLNDFCKASEVNISKLMFVPSASGYKAKNGIQEMDCCSLESDWIYFHPDASGRIIHVGPNQVKVLKLTEIENNSSQHQISEDFVILANRENHKNENVLTVTASGRVVKKSFNLLDDDPEQETFKIVDYEDELDLLSVVAVTQIDAEGKAHLDFHCNEYGTLLKSIPLVESWDVTYSHEVYFDRDLVLHIEQKPNRVFSCYVYQMICDTGEEEETINRSC

SEQ ID NO: 22634 - protein, 453 aa, Homo sapiens
  Payload ID: 4555
  Gene Symbol: DCAF17
  Gene Name: DDB1 and CUL4 associated factor 17
  ENSP ID: ENSP00000442238
MGPTRKPNVCSRLSRRALGCFSRDAGVVQRTNLGILRALVCQESTKFKNVWTTHSRSPIAYERGRIYFDNYRRCVSSVASEPRKLYEMPKCSKSEKIEDALLWECPVGDILPNSSDYKSSLIALTAHNWLLRISATTGKILEKIYLAPYCKFRYLSWDTPQEVIAVKSAQNRGSAVARQAGIQQHVLLYLAVFRVLPFSLVGILEINKKIFGNVTDATLSHGILIVMYSSGLVRLYSFQTIAEQFMQQKLDLGCACRWGGTTGTVGEAPFGIPCNIKITDMPPLLFEVSSLENAFQIGGHPWHYIVTPNKKKQKGVFHICALKDNSLNENVLTVTASGRVVKKSFNLLDDDPEQETFKIVDYEDELDLLSVVAVTQIDAEGKAHLDFHCNEYGTLLKSIPLVESWDVTYSHEVYFDRDLVLHIEQKPNRVFSCYVYQMICDTGEEEETINRSC

SEQ ID NO: 22635 - protein, 240 aa, Homo sapiens
  Payload ID: 4555
  Gene Symbol: DCAF17
  Gene Name: DDB1 and CUL4 associated factor 17
  Uniprot ID: Q5H9S7
  ENSP ID: ENSP00000477604
MPPLLFEVSSLENAFQIGGHPWHYIVTPNKKKQKGVFHICALKDNSLAKNGIQEMDCCSLESDWIYFHPDASGRIIHVGPNQVKVLKLTEIENNSSQHQISEDFVILANRENHKNENVLTVTASGRVVKKSFNLLDDDPEQETFKIVDYEDELDLLSVVAVTQIDAEGKAHLDFHCNEYGTLLKSIPLVESWDVTYSHEVYFDRDLVLHIEQKPNRVFSCYVYQMICDTGEEEETINRSC

SEQ ID NO: 22636 - protein, 325 aa, Homo sapiens
  Payload ID: 4556
  Gene Symbol: DCAF4
  Gene Name: DDB1 and CUL4 associated factor 4
  ENSP ID: ENSP00000345176
MNKSRWQSRRRHGRRSHQQNPWFRLRDSEDRSDSRAAQPAHDSGHGDDESPSTSSGTAGTSSVPELPGFYFDPEKKRYFRLLPGHNNCNPLTKESIRQKEMESKRLRLLQEEDRRKKADTNSDRLFTVNDVKVGGSKYGIINLQSLKTPTLKVFMHENLYFTNRKAPLLFNGCRSGEIFAIDLRCGNQGKGWKATRLFHDSAVTSVRILQDEQYLMASDMAGKIKLWDLRTTKCVRQYEGHVNEYAYLPLHVHEEEGILVAVGQDCYTRIWSLHDARLLRTIPSPYPASKADIPSVAFSSRLGGSRGAPGLLMAVGQDLYCYSYS

SEQ ID NO: 22637 - protein, 495 aa, Homo sapiens
  Payload ID: 4556
  Gene Symbol: DCAF4
  Gene Name: DDB1 and CUL4 associated factor 4
  Uniprot ID: Q8WV16
  ENSP ID: ENSP00000351147
MNKSRWQSRRRHGRRSHQQNPWFRLRDSEDRSDSRAAQPAHDSGHGDDESPSTSSGTAGTSSVPELPGFYFDPEKKRYFRLLPGHNNCNPLTKESIRQKEMESKRLRLLQEEDRRKKIARMGFNASSMLRKSQLGFLNVTNYCHLAHELRLSCMERKKVQIRSMDPSALASDRFNLILADTNSDRLFTVNDVKVGGSKYGIINLQSLKTPTLKVFMHENLYFTNRKVNSVCWASLNHLDSHILLCLMGLAETPGCATLLPASLFVNSHPGIDRPGMLCSFRIPGAWSCAWSLNIQANNCFSTGLSRRVLLTNVVTGHRQSFGTNSDVLAQQFALMAPLLFNGCRSGEIFAIDLRCGNQGKGWKATRLFHDSAVTSVRILQDEQYLMASDMAGKIKLWDLRTTKCVRQYEGHVNEYAYLPLHVHEEEGILVAVGQDCYTRIWSLHDARLLRTIPSPYPASKADIPSVAFSSRLGGSRGAPGLLMAVGQDLYCYSYS

SEQ ID NO: 22638 - protein, 395 aa, Homo sapiens
  Payload ID: 4556
  Gene Symbol: DCAF4
  Gene Name: DDB1 and CUL4 associated factor 4
  Uniprot ID: Q8WV16
  ENSP ID: ENSP00000377781
MESKRLRLLQEEDRRKKIARMGFNASSMLRKSQLGFLNVTNYCHLAHELRLSCMERKKVQIRSMDPSALASDRFNLILADTNSDRLFTVNDVKVGGSKYGIINLQSLKTPTLKVFMHENLYFTNRKVNSVCWASLNHLDSHILLCLMGLAETPGCATLLPASLFVNSHPGIDRPGMLCSFRIPGAWSCAWSLNIQANNCFSTGLSRRVLLTNVVTGHRQSFGTNSDVLAQQFALMAPLLFNGCRSGEIFAIDLRCGNQGKGWKATRLFHDSAVTSVRILQDEQYLMASDMAGKIKLWDLRTTKCVRQYEGHVNEYAYLPLHVHEEEGILVAVGQDCYTRIWSLHDARLLRTIPSPYPASKADIPSVAFSSRLGGSRGAPGLLMAVGQDLYCYSYS

SEQ ID NO: 22639 - protein, 74 aa, Homo sapiens
  Payload ID: 4556
  Gene Symbol: DCAF4
  Gene Name: DDB1 and CUL4 associated factor 4
  ENSP ID: ENSP00000422270
MNKSRWQSRRRHGRRSHQQNPWFRLRDSEDRSDSRAAQPAHDSGHGDDESPSTSSGTAGTSSVPETLLPLAPWT

SEQ ID NO: 22640 - protein, 435 aa, Homo sapiens
  Payload ID: 4556
  Gene Symbol: DCAF4
  Gene Name: DDB1 and CUL4 associated factor 4
  Uniprot ID: Q8WV16
  ENSP ID: ENSP00000426178
MNKSRWQSRRRHGRRSHQQNPWFRLRDSEDRSDSRAAQPAHDSGHGDDESPSTSSGTAGTSSVPELPGFYFDPEKKRYFRLLPGHNNCNPLTKESIRQKEMESKRLRLLQEEDRRKKADTNSDRLFTVNDVKVGGSKYGIINLQSLKTPTLKVFMHENLYFTNRKVNSVCWASLNHLDSHILLCLMGLAETPGCATLLPASLFVNSHPAGIDRPGMLCSFRIPGAWSCAWSLNIQANNCFSTGLSRRVLLTNVVTGHRQSFGTNSDVLAQQFALMAPLLFNGCRSGEIFAIDLRCGNQGKGWKATRLFHDSAVTSVRILQDEQYLMASDMAGKIKLWDLRTTKCVRQYEGHVNEYAYLPLHVHEEEGILVAVGQDCYTRIWSLHDARLLRTIPSPYPASKADIPSVAFSSRLGGSRGAPGLLMAVGQDLYCYSYS

SEQ ID NO: 22641 - protein, 333 aa, Homo sapiens
  Payload ID: 4556
  Gene Symbol: DCAF4
  Gene Name: DDB1 and CUL4 associated factor 4
  ENSP ID: ENSP00000451186
MESKRLRLLQEEDRRKKIARMGFNASSMLRKSQLGFLNVTNYCHLAHELRLSCMERKKVQIRSMDPSALASDRFNLILADTNSDRLFTVNDVKVGGSKYGIINLQSLKTPTLKVFMHENLYFTNRKVNSVCWASLNHLDSHILLCLMGLAETPGCATLLPASLFVNSHPGIDRPGMLCSFRIPGAWSCAWSLNIQANNCFSTGLSRRVLLTNVVTGHRQSFGTNSDVLAQQFALMAPLLFNGCRSGEIFAIDLRCGNQGKGWKATRLFHDSAVTSVRILQDEQYLMASDMAGKIKLWDLRTTKCVRQYEGHVNEYAYLPLHVHEEEGILVAGT

SEQ ID NO: 22642 - protein, 489 aa, Homo sapiens
  Payload ID: 4556
  Gene Symbol: DCAF4
  Gene Name: DDB1 and CUL4 associated factor 4
  Uniprot ID: Q8WV16
  ENSP ID: ENSP00000452131
MNKSRWQSRRRHGRRSHQQNPWFRLRDSEDRSDSRAAQPAHDSGHGDDESPSTSSGTAGTSSVPELPGFYFDPEKKRYFRLLPGHNNCNPLTKESIRQKEMESKRLRLLQEEDRRKKIARMGFNASSMLRKSQLGFLNVTNYCHLAHELRLSCMERKKVQIRSMDPSALASDRFNLILADTNSDRLFTVNDVKVGGSKYGIINLQSLKTPTLKVFMHENLYFTNRKVNSVCWASLNHLDSHILLCLMGLAETPGCATLLPASLFVNSHPAGIDRPGMLCSFRIPGAWSCAWSLNIQANNCFSTGLSRRVLLTNVVTGHRQSFGTNSDVLAPLLFNGCRSGEIFAIDLRCGNQGKGWKATRLFHDSAVTSVRILQDEQYLMASDMAGKIKLWDLRTTKCVRQYEGHVNEYAYLPLHVHEEEGILVAVGQDCYTRIWSLHDARLLRTIPSPYPASKADIPSVAFSSRLGGSRGAPGLLMAVGQDLYCYSYS

SEQ ID NO: 22643 - protein, 396 aa, Homo sapiens
  Payload ID: 4557
  Gene Symbol: DCAF4L1
  Gene Name: DDB1 and CUL4 associated factor 4-like 1
  Uniprot ID: Q3SXM0
  ENSP ID: ENSP00000327796
MEAERLRLLEEEAKLKKVARMGFNASSMLRKSQLGFLNVTSYSRLANELRVSCMERKKVQIRSLDPSSLASDRFNFILASTNSDQLFVVNQVEVEGSKYGIISLRTLKIPSFHVYVLRNLYVPNRKVKSLCWASLNQLDSHVLLCFEGITDAPSCAVLLPASRFLSVHTRVNQPGMLCSFQIPEAWSCAWSLNTRAYHCFSAGLSQQVLLTSVATGHQQSFDTSSDVLAQQFASTAPLLFNGCRSGEIFAIDLRCRNRGKGWRATRLFHDSAVTSVQILQEEQCLMASDMTGKIKLWDLRATKCVRQYEGHVNESAYLPLHVHEEEGIVVAVGQDCYTRIWSLHDAHLLRTIPSPYSASEDDIPSVAFASRLGGIRGAAPGLLMAVRQDLYCFPFS

SEQ ID NO: 22644 - protein, 395 aa, Homo sapiens
  Payload ID: 4558
  Gene Symbol: DCAF4L2
  Gene Name: DDB1 and CUL4 associated factor 4-like 2
  Uniprot ID: Q8NA75
  ENSP ID: ENSP00000316496
MESKRPRLLEEADKQKKTVRVGLNAPSMLRKNQLGFLRFANYCRIARELRVSCMQRKKVQIHSWDPSSLASDRFNRILANTNTDQLFTVNQVEAGGSKYGIITMRGLTTPELRVYPHKTLYVPNRKVNSMCWASLNHLDSHLLLCFVGLADTPSCAVLLPASLFIGSFPGMRRPGMLCSFQIPDAWSCAWSLSIHAYHSFSTGLSQQVLLTNVVTGHQQSFGTSSDVLAQQFAIMTPLLFNGCRSGEIFGIDLRCGNQGSGWKAICLSHDSAVTSLQILQDGQFLVSSDMTGTIKLWDLRATKCVTQYEGHVNNSAYLPVHVNEEEGVVAAVGQDCYTRIWSLRHGHLLTTIPSPYPASENDIPSVAFSSRLGGFRGAPGLLMAVREDLYCFSYG

SEQ ID NO: 22645 - protein, 942 aa, Homo sapiens
  Payload ID: 4559
  Gene Symbol: DCAF5
  Gene Name: DDB1 and CUL4 associated factor 5
  Uniprot ID: Q96JK2
  ENSP ID: ENSP00000341351
MKRRAGLGGSMRSVVGFLSQRGLHGDPLLTQDFQRRRLRGCRNLYKKDLLGHFGCVNAIEFSNNGGQWLVSGGDDRRVLLWHMEQAIHSRVKPIQLKGEHHSNIFCLAFNSGNTKVFSGGNDEQVILHDVESSETLDVFAHEDAVYGLSVSPVNDNIFASSSDDGRVLIWDIRESPHGEPFCLANYPSAFHSVMFNPVEPRLLATANSKEGVGLWDIRKPQSSLLRYGGNLSLQSAMSVRFNSNGTQLLALRRRLPPVLYDIHSRLPVFQFDNQGYFNSCTMKSCCFAGDRDQYILSGSDDFNLYMWRIPADPEAGGIGRVVNGAFMVLKGHRSIVNQVRFNPHTYMICSSGVEKIIKIWSPYKQPGCTGDLDGRIEDDSRCLYTHEEYISLVLNSGSGLSHDYANQSVQEDPRMMAFFDSLVRREIEGWSSDSDSDLSESTILQLHAGVSERSGYTDSESSASLPRSPPPTVDESADNAFHLGPLRVTTTNTVASTPPTPTCEDAASRQQRLSALRRYQDKRLLALSNESDSEENVCEVELDTDLFPRPRSPSPEDESSSSSSSSSSEDEEELNERRASTWQRNAMRRRQKTTREDKPSAPIKPTNTYIGEDNYDYPQIKVDDLSSSPTSSPERSTSTLEIQPSRASPTSDIESVERKIYKAYKWLRYSYISYSNNKDGETSLVTGEADEGRAGTSHKDNPAPSSSKEACLNIAMAQRNQDLPPEGCSKDTFKEETPRTPSNGPGHEHSSHAWAEVPEGTSQDTGNSGSVEHPFETKKLNGKALSSRAEEPPSPPVPKASGSTLNSGSGNCPRTQSDDSEERSLETICANHNNGRLHPRPPHPHNNGQNLGELEVVAYSSPGHSDTDRDNSSLTGTLLHKDCCGSEMACETPNAGTREDPTDTPATDSSRAVHGHSGLKRQRIELEDTDSENSSSEKKLKT

SEQ ID NO: 22646 - protein, 326 aa, Homo sapiens
  Payload ID: 4559
  Gene Symbol: DCAF5
  Gene Name: DDB1 and CUL4 associated factor 5
  ENSP ID: ENSP00000374647
MKRRAGLGGSMRSVVGFLSQRGLHGDPLLTQDFQRRRLRGCRNLYKKDLLGHFGCVNAIEFSNNGGQWLVSGGDDRRVLLWHMEQAIHSRVKPIQLKGEHHSNIFCLAFNSGNTKVFSGGNDEQVILHDVESSETLDVFAHEDAVYGLSVSPVNDNIFASSSDDGRVLIWDIRESPHGEPFCLANYPSAFHSVMFNPVEPRLLATANSKEGVGLWDIRKPQSSLLRYGGNLSLQSAMSVRFNSNGTQLLALRRRLPPVLYDIHSRLPVFQFDNQGYFNSCTMKSCCFAGDRDQHHNWKWRAQAVSFQPFLSLTRNGDADVDLKLAV

SEQ ID NO: 22647 - protein, 210 aa, Homo sapiens
  Payload ID: 4559
  Gene Symbol: DCAF5
  Gene Name: DDB1 and CUL4 associated factor 5
  ENSP ID: ENSP00000451394
MEQAIHSRVKPIQLKGEHHSNIFCLAFNSGNTKVFSGGNDEQVILHDVESETLDVFAHEDAVYGLSVSPVNDNIFASSSDDGRVLIWDIRESPHGEPFCLANYPSAFHSVMFNPVEPRLLATANSKEGVGLWDIRKPQSSLLRYGGNLSLQSAMSVRFNSNGTQLLALRRRLPPVLYDIHSRLPVFQFDNQGYFNSCTMKSCCFAGDRDQ

SEQ ID NO: 22648 - protein, 860 aa, Homo sapiens
  Payload ID: 4559
  Gene Symbol: DCAF5
  Gene Name: DDB1 and CUL4 associated factor 5
  Uniprot ID: Q96JK2
  ENSP ID: ENSP00000451551
MEQAIHSRVKPIQLKGEHHSNIFCLAFNSGNTKVFSGGNDEQVILHDVESSETLDVFAHEDAVYGLSVSPVNDNIFASSSDDGRVLIWDIRESPHGEPFCLANYPSAFHSVMFNPVEPRLLATANSKEGVGLWDIRKPQSSLLRYGGNLSLQSAMSVRFNSNGTQLLALRRRLPPVLYDIHSRLPVFQFDNQGYFNSCTMKSCCFAGDRDQYILSGSDDFNLYMWRIPADPEAGGIGRVVNGAFMVLKGHRSIVNQVRFNPHTYMICSSGVEKIIKIWSPYKQPGCTGDLDGRIEDDSRCLYTHEEYISLVLNSGSGLSHDYANQSVQEDPRMMAFFDSLVRREIEGWSSDSDSDLSESTILQLHAGVSERSGYTDSESSASLPRSPPPTVDESADNAFHLGPLRVTTTNTVASTPPTPTCEDAASRQQRLSALRRYQDKRLLALSNESDSEENVCEVELDTDLFPRPRSPSPEDESSSSSSSSSSEDEEELNERRASTWQRNAMRRRQKTTREDKPSAPIKPTNTYIGEDNYDYPQIKVDDLSSSPTSSPERSTSTLEIQPSRASPTSDIESVERKIYKAYKWLRYSYISYSNNKDGETSLVTGEADEGRAGTSHKDNPAPSSSKEACLNIAMAQRNQDLPPEGCSKDTFKEETPRTPSNGPGHEHSSHAWAEVPEGTSQDTGNSGSVEHPFETKKLNGKALSSRAEEPPSPPVPKASGSTLNSGSGNCPRTQSDDSEERSLETICANHNNGRLHPRPPHPHNNGQNLGELEVVAYSSPGHSDTDRDNSSLTGTLLHKDCCGSEMACETPNAGTREDPTDTPATDSSRAVHGHSGLKRQRIELEDTDSENSSSEKKLKT

SEQ ID NO: 22649 - protein, 941 aa, Homo sapiens
  Payload ID: 4559
  Gene Symbol: DCAF5
  Gene Name: DDB1 and CUL4 associated factor 5
  Uniprot ID: Q96JK2
  ENSP ID: ENSP00000451845
MKRRAGLGGSMRSVVGFLSQRGLHGDPLLTQDFQRRRLRGCRNLYKKDLLGHFGCVNAIEFSNNGGQWLVSGGDDRRVLLWHMEQAIHSRVKPIQLKGEHHSNIFCLAFNSGNTKVFSGGNDEQVILHDVESETLDVFAHEDAVYGLSVSPVNDNIFASSSDDGRVLIWDIRESPHGEPFCLANYPSAFHSVMFNPVEPRLLATANSKEGVGLWDIRKPQSSLLRYGGNLSLQSAMSVRFNSNGTQLLALRRRLPPVLYDIHSRLPVFQFDNQGYFNSCTMKSCCFAGDRDQYILSGSDDFNLYMWRIPADPEAGGIGRVVNGAFMVLKGHRSIVNQVRFNPHTYMICSSGVEKIIKIWSPYKQPGCTGDLDGRIEDDSRCLYTHEEYISLVLNSGSGLSHDYANQSVQEDPRMMAFFDSLVRREIEGWSSDSDSDLSESTILQLHAGVSERSGYTDSESSASLPRSPPPTVDESADNAFHLGPLRVTTTNTVASTPPTPTCEDAASRQQRLSALRRYQDKRLLALSNESDSEENVCEVELDTDLFPRPRSPSPEDESSSSSSSSSSEDEEELNERRASTWQRNAMRRRQKTTREDKPSAPIKPTNTYIGEDNYDYPQIKVDDLSSSPTSSPERSTSTLEIQPSRASPTSDIESVERKIYKAYKWLRYSYISYSNNKDGETSLVTGEADEGRAGTSHKDNPAPSSSKEACLNIAMAQRNQDLPPEGCSKDTFKEETPRTPSNGPGHEHSSHAWAEVPEGTSQDTGNSGSVEHPFETKKLNGKALSSRAEEPPSPPVPKASGSTLNSGSGNCPRTQSDDSEERSLETICANHNNGRLHPRPPHPHNNGQNLGELEVVAYSSPGHSDTDRDNSSLTGTLLHKDCCGSEMACETPNAGTREDPTDTPATDSSRAVHGHSGLKRQRIELEDTDSENSSSEKKLKT

SEQ ID NO: 22650 - protein, 860 aa, Homo sapiens; identical to SEQ ID NO: 22648
  Payload ID: 4559
  Gene Symbol: DCAF5
  Gene Name: DDB1 and CUL4 associated factor 5
  Uniprot ID: Q96JK2
  ENSP ID: ENSP00000452052

SEQ ID NO: 22651 - protein, 83 aa, Homo sapiens
  Payload ID: 4559
  Gene Symbol: DCAF5
  Gene Name: DDB1 and CUL4 associated factor 5
  ENSP ID: ENSP00000452077
MTTFLPVPQMMAGFSFGTFGNPPMESPSAWQTIHQPFIVSCLTLWSPGCWPQPIQRKEWDSGTFENLRVLSCAMVETCPSKVP

SEQ ID NO: 22652 - protein, 860 aa, Homo sapiens
  Payload ID: 4560
  Gene Symbol: DCAF6
  Gene Name: DDB1 and CUL4 associated factor 6
  Uniprot ID: Q58WW2
  ENSP ID: ENSP00000311949
MSRGGSYPHLLWDVRKRSLGLEDPSRLRSRYLGRREFIQRLKLEATLNVHDGCVNTICWNDTGEYILSGSDDTKLVISNPYSRKVLTTIRSGHRANIFSAKFLPCTNDKQIVSCSGDGVIFYTNVEQDAETNRQCQFTCHYGTTYEIMTVPNDPYTFLSCGEDGTVRWFDTRIKTSCTKEDCKDDILINCRRAATSVAICPPIPYYLAVGCSDSSVRIYDRRMLGTRATGNYAGRGTTGMVARFIPSHLNNKSCRVTSLCYSEDGQEILVSYSSDYIYLFDPKDDTARELKTPSAEERREELRQPPVKRLRLRGDWSDTGPRARPESERERDGEQSPNVSLMQRMSDMLSRWFEEASEVAQSNRGRGRSRPRGGTSQSDISTLPTVPSSPDLEVSETAMEVDTPAEQFLQPSTSSTMSAQAHSTSSPTESPHSTPLLSSPDSEQRQSVEASGHHTHHQSDNNNEKLSPKPGTGEPVLSLHYSTEGTTTSTIKLNFTDEWSSIASSSRGIGSHCKSEGQEESFVPQSSVQPPEGDSETKAPEESSEDVTKYQEGVSAENPVENHINITQSDKFTAKPLDSNSGERNDLNLDRSCGVPEESASSEKAKEPETSDQTSTESATNENNTNPEPQFQTEATGPSAHEETSTRDSALQDTDDSDDDPVLIPGARYRAGPGDRRSAVARIQEFFRRRKERKEMEELDTLNIRRPLVKMVYKGHRNSRTMIKEANFWGANFVMSGSDCGHIFIWDRHTAEHLMLLEADNHVVNCLQPHPFDPILASSGIDYDIKIWSPLEESRIFNRKLADEVITRNELMLEETRNTITVPASFMLRMLASLNHIRADRLEGDRSEGSGQENENEDEE

SEQ ID NO: 22653 - protein, 951 aa, Homo sapiens
  Payload ID: 4560
  Gene Symbol: DCAF6
  Gene Name: DDB1 and CUL4 associated factor 6
  Uniprot ID: Q58WW2
  ENSP ID: ENSP00000356814
MSRGGSYPHLLWDVRKRSLGLEDPSRLRSRYLGRREFIQRLKLEATLNVHDGCVNTICWNDTGEYILSGSDDTKLVISNPYSRKVLTTIRSGHRANIFSAKFLPCTNDKQIVSCSGDGVIFYTNVEQDAETNRQCQFTCHYGTTYEIMTVPNDPYTFLSCGEDGTVRWFDTRIKTSCTKEDCKDDILINCRRAATSVAICPPIPYYLAVGCSDSSVRIYDRRMLGTRATGNYAGRGTTGMVARFIPSHLNNKSCRVTSLCYSEDGQEILVSYSSDYIYLFDPKDDTARELKTPSAEERREELRQPPVKRLRLRGDWSDTGPRARPESERERDGEQSPNVSLMQRMSDMLSRWFEEASEVAQSNRGRGRSRPRGGTSQSDISTLPTVPSSPDLEVSETAMEVDTPAEQFLQPSTSSTMSAQAHSTSSPTESPHSTPLLSSPDSEQRQSVEASGHHTHHQSEFLRGPEIALLRKRLQQLRLKKAEQQRQQELAAHTQQQPSTSDQSSHEGSSQDPHASDSPSSVVNKQLGSMSLDEQQDNNNEKLSPKPGTGEPVLSLHYSTEGTTTSTIKLNFTDEWSSIASSSRGIGSHCKSEGQEESFVPQSSVQPPEGDSETKAPEESSEDVTKYQEGVSAENPVENHINITQSDKFTAKPLDSNSGERNDLNLDRSCGVPEESASSEKAKEPETSDQTSTESATNENNTNPEPQFQTEATGPSAHEETSTRDSALQDTDDSDDDPVLIPGARYRAGPGDRFNIRGTTIGDRIMRRSAVARIQEFFRRRKERKEMEELDTLNIRRPLVKMVYKGHRNSRTMIKEANFWGANFVMSGSDCGHIFIWDRHTAEHLMLLEADNHVVNCLQPHPFDPILASSGIDYDIKIWSPLEESRIFNRKLADEVITRNELMLEETRNTITVPASFMLRMLASLNHIRADRLEGDRSEGSGQENENEDEE

SEQ ID NO: 22654 - protein, 880 aa, Homo sapiens
  Payload ID: 4560
  Gene Symbol: DCAF6
  Gene Name: DDB1 and CUL4 associated factor 6
  Uniprot ID: Q58WW2
  ENSP ID: ENSP00000356817
MSRGGSYPHLLWDVRKRSLGLEDPSRLRSRYLGRREFIQRLKLEATLNVHDGCVNTICWNDTGEYILSGSDDTKLVISNPYSRKVLTTIRSGHRANIFSAKFLPCTNDKQIVSCSGDGVIFYTNVEQDAETNRQCQFTCHYGTTYEIMTVPNDPYTFLSCGEDGTVRWFDTRIKTSCTKEDCKDDILINCRRAATSVAICPPIPYYLAVGCSDSSVRIYDRRMLGTRATGNYAGRGTTGMVARFIPSHLNNKSCRVTSLCYSEDGQEILVSYSSDYIYLFDPKDDTARELKTPSAEERREELRQPPVKRLRLRGDWSDTGPRARPESERERDGEQSPNVSLMQRMSDMLSRWFEEASEVAQSNRGRGRSRPRGGTSQSDISTLPTVPSSPDLEVSETAMEVDTPAEQFLQPSTSSTMSAQAHSTSSPTESPHSTPLLSSPDSEQRQSVEASGHHTHHQSDSPSSVVNKQLGSMSLDEQQDNNNEKLSPKPGTGEPVLSLHYSTEGTTTSTIKLNFTDEWSSIASSSRGIGSHCKSEGQEESFVPQSSVQPPEGDSETKAPEESSEDVTKYQEGVSAENPVENHINITQSDKFTAKPLDSNSGERNDLNLDRSCGVPEESASSEKAKEPETSDQTSTESATNENNTNPEPQFQTEATGPSAHEETSTRDSALQDTDDSDDDPVLIPGARYRAGPGDRRSAVARIQEFFRRRKERKEMEELDTLNIRRPLVKMVYKGHRNSRTMIKEANFWGANFVMSGSDCGHIFIWDRHTAEHLMLLEADNHVVNCLQPHPFDPILASSGIDYDIKIWSPLEESRIFNRKLADEVITRNELMLEETRNTITVPASFMLRMLASLNHIRADRLEGDRSEGSGQENENEDEE

SEQ ID NO: 22655 - protein, 920 aa, Homo sapiens
  Payload ID: 4560
  Gene Symbol: DCAF6
  Gene Name: DDB1 and CUL4 associated factor 6
  Uniprot ID: Q58WW2
  ENSP ID: ENSP00000396238
MSRGGSYPHLLWDVRKRSLGLEDPSRLRSRYLGRREFIQRLKLEATLNVHDGCVLTTIRSGHRANIFSAKFLPCTNDKQIVSCSGDGVIFYTNVEQDAETNRQCQFTCHYGTTYEIMTVPNDPYTFLSCGEDGTVRWFDTRIKTSCTKEDCKDDILINCRRAATSVAICPPIPYYLAVGCSDSSVRIYDRRMLGTRATGNYAGRGTTGMVARFIPSHLNNKSCRVTSLCYSEDGQEILVSYSSDYIYLFDPKDDTARELKTPSAEERREELRQPPVKRLRLRGDWSDTGPRARPESERERDGEQSPNVSLMQRMSDMLSRWFEEASEVAQSNRGRGRSRPRGGTSQSDISTLPTVPSSPDLEVSETAMEVDTPAEQFLQPSTSSTMSAQAHSTSSPTESPHSTPLLSSPDSEQRQSVEASGHHTHHQSEFLRGPEIALLRKRLQQLRLKKAEQQRQQELAAHTQQQPSTSDQSSHEGSSQDPHASDSPSSVVNKQLGSMSLDEQQDNNNEKLSPKPGTGEPVLSLHYSTEGTTTSTIKLNFTDEWSSIASSSRGIGSHCKSEGQEESFVPQSSVQPPEGDSETKAPEESSEDVTKYQEGVSAENPVENHINITQSDKFTAKPLDSNSGERNDLNLDRSCGVPEESASSEKAKEPETSDQTSTESATNENNTNPEPQFQTEATGPSAHEETSTRDSALQDTDDSDDDPVLIPGARYRAGPGDRFNIRGTTIGDRIMRRSAVARIQEFFRRRKERKEMEELDTLNIRRPLVKMVYKGHRNSRTMIKEANFWGANFVMSGSDCGHIFIWDRHTAEHLMLLEADNHVVNCLQPHPFDPILASSGIDYDIKIWSPLEESRIFNRKLADEVITRNELMLEETRNTITVPASFMLRMLASLNHIRADRLEGDRSEGSGQENENEDEE

SEQ ID NO: 22656 - protein, 472 aa, Homo sapiens
  Payload ID: 4560
  Gene Symbol: DCAF6
  Gene Name: DDB1 and CUL4 associated factor 6
  ENSP ID: ENSP00000432304
MSRGGSYPHLLWDVRKRSLGLEDPSRLRSRYLGRREFIQRLKLEATLNVHDGCVNTICWNDTGEYILSGSDDTKLVISNPYSRKVLTTIRSGHRANIFSAKFLPCTNDKQIVSCSGDGVIFYTNVEQDAETNRQCQFTCHYGTTYEIMTVPNDPYTFLSCGEDGTVRWFDTRIKTSCTKEDCKDDILINCRRAATSVAICPPIPYYLAVGCSDSSVRIYDRRMLGTRATGNYAGRGTTGMVARFIPSHLNNKSCRVTSLCYSEDGQEILVSYSSDYIYLFDPKDDTARELKTPSAEERREELRQPPVKRLRLRGDWSDTGPRARPESERERDGEQSPNVSLMQRMSDMLSRWFEEASEVAQSNRGRGRSRPRGGTSQSDISTLPTVPSSPDLEVSETAMEVDTPAEQFLQPSTSSTMSAQAHSTSSPTESPHSTPLLSSPDSEQRQSVEASGHHTHHQSGPLKSWVAGSCSE

SEQ ID NO: 22657 - protein, 342 aa, Homo sapiens
  Payload ID: 4561
  Gene Symbol: DCAF7
  Gene Name: DDB1 and CUL4 associated factor 7
  Uniprot ID: P61962
  ENSP ID: ENSP00000402312
MSLHGKRKEIYKYEAPWTVYAMNWSVRPDKRFRLALGSFVEEYNNKVQLVGLDEESSEFICRNTFDHPYPTTKLMWIPDTKGVYPDLLATSGDYLRVWRVGETETRLECLLNNNKNSDFCAPLTSFDWNEVDPYLLGTSSIDTTCTIWGLETGQVLGRVNLVSGHVKTQLIAHDKEVYDIAFSRAGGGRDMFASVGADGSVRMFDLRHLEHSTIIYEDPQHHPLLRLCWNKQDPNYLATMAMDGMEVVILDVRVPCTPVARLNNHRACVNGIAWAPHSSCHICTAADDHQALIWDIQQMPRAIEDPILAYTAEGEINNVQWASTQPDWIAICYNNCLEILRV

SEQ ID NO: 22658 - protein, 142 aa, Homo sapiens
  Payload ID: 4561
  Gene Symbol: DCAF7
  Gene Name: DDB1 and CUL4 associated factor 7
  Uniprot ID: P61962
  ENSP ID: ENSP00000403920
MSLHGKRKEIYKYEAPWTVYAMNWSVRPDKRFRLALGSFVEEYNNKVVILDVRVPCTPVARLNNHRACVNGIAWAPHSSCHICTAADDHQALIWDIQQMPRAIEDPILAYTAEGEINNVQWASTQPDWIAICYNNCLEILRV

SEQ ID NO: 22659 - protein, 206 aa, Homo sapiens
  Payload ID: 4561
  Gene Symbol: DCAF7
  Gene Name: DDB1 and CUL4 associated factor 7
  ENSP ID: ENSP00000480250
MSLHGKRKEIYKYEAPWTVYAMNWSVRPDKRFRLALGSFVEEYNNKVGETETRLECLLNNNKNSDFCAPLTSFDWNEVDPYLLGTSSIDTTCTIWGLETGQVLGRVNLVSGHVKTQLIAHDKEVYDIAFSRAGGGRDMFASVGADGSVRMFDLRHLEHSTIIYEDPQHHPLLRLCWNKQDPNYLATMAMDGMEVVILDVRVPCTPV

SEQ ID NO: 22660 - protein, 342 aa, Homo sapiens; identical to SEQ ID NO: 22657
  Payload ID: 4561
  Gene Symbol: DCAF7
  Gene Name: DDB1 and CUL4 associated factor 7
  Uniprot ID: P61962
  ENSP ID: ENSP00000483236

SEQ ID NO: 22661 - protein, 597 aa, Homo sapiens
  Payload ID: 4562
  Gene Symbol: DCAF8
  Gene Name: DDB1 and CUL4 associated factor 8
  Uniprot ID: Q5TAQ9
  ENSP ID: ENSP00000318227
MSSKGSSTDGRTDLANGSLSSSPEEMSGAEEGRETSSGIEVEASDLSLSLTGDDGGPNRTSTESRGTDTESSGEDKDSDSMEDTGHYSINDENRVHDRSEEEEEEEEEEEEEQPRRRVQRKRANRDQDSSDDERALEDWVSSETSALPRPRWQALPALRERELGSSARFVYEACGARVFVQRFRLQHGLEGHTGCVNTLHFNQRGTWLASGSDDLKVVVWDWVRRQPVLDFESGHKSNVFQAKFLPNSGDSTLAMCARDGQVRVAELSATQCCKNTKRVAQHKGASHKLALEPDSPCTFLSAGEDAVVFTIDLRQDRPASKLVVTKEKEKKVGLYTIYVNPANTHQFAVGGRDQFVRIYDQRKIDENENNGVLKKFCPHHLVNSESKANITCLVYSHDGTELLASYNDEDIYLFNSSHSDGAQYVKRYKGHRNNATVKGVNFYGPKSEFVVSGSDCGHIFLWEKSSCQIIQFMEGDKGGVVNCLEPHPHLPVLATSGLDHDVKIWAPTAEASTELTGLKDVIKKNKRERDEDSLHQTDLFDSHMLWFLMHHLRQRRHHRRWREPGVGATDADSDESPSSSDTSDEEEGPDRVQCMPS

SEQ ID NO: 22662 - protein, 597 aa, Homo sapiens; identical to SEQ ID NO: 22661
  Payload ID: 4562
  Gene Symbol: DCAF8
  Gene Name: DDB1 and CUL4 associated factor 8
  Uniprot ID: Q5TAQ9
  ENSP ID: ENSP00000357052

SEQ ID NO: 22663 - protein, 597 aa, Homo sapiens; identical to SEQ ID NO: 22661
  Payload ID: 4562
  Gene Symbol: DCAF8
  Gene Name: DDB1 and CUL4 associated factor 8
  Uniprot ID: Q5TAQ9
  ENSP ID: ENSP00000357053

SEQ ID NO: 22664 - protein, 106 aa, Homo sapiens
  Payload ID: 4562
  Gene Symbol: DCAF8
  Gene Name: DDB1 and CUL4 associated factor 8
  ENSP ID: ENSP00000384118
MSSKGSSTDGRTDLANGSLSSSPEEMSGAEEGRETSSGIEVEASDLSLSLTGDDGGPNRTSTESRGTDTESSGEDKDSDSMEDTGHYSINDENRVHDRSEEEEEEE

SEQ ID NO: 22665 - protein, 40 aa, Homo sapiens
  Payload ID: 4562
  Gene Symbol: DCAF8
  Gene Name: DDB1 and CUL4 associated factor 8
  ENSP ID: ENSP00000409434
MSSKGSSTDGRTDLANGSLSSSPEEMSGAEEGRETSSGIE

SEQ ID NO: 22666 - protein, 109 aa, Homo sapiens
  Payload ID: 4562
  Gene Symbol: DCAF8
  Gene Name: DDB1 and CUL4 associated factor 8
  ENSP ID: ENSP00000411875
MSSKGSSTDGRTDLANGSLSSSPEEMSGAEEGRETSSGIEVEASDLSLSLTGDDGGPNRTSTESRGTDTESSGEDKDSDSMEDTGHYSINDENRVHDRSEEEEEEEEEE

SEQ ID NO: 22667 - protein, 212 aa, Homo sapiens
  Payload ID: 4562
  Gene Symbol: DCAF8
  Gene Name: DDB1 and CUL4 associated factor 8
  ENSP ID: ENSP00000413688
MSSKGSSTDGRTDLANGSLSSSPEEMSGAEEGRETSSGIEVEASDLSLSLTGDDGGPNRTSTESRGTDTESSGEDKDSDSMEDTGHYSINDENRVHDRSEEEEEEEEEEEEEQPRRRVQRKRANRDQDSSDDERALEDWVSSETSALPRPRWQALPALRERELGSSARFVYEACGARVFVQRFRLQHGLEGHTGCVNTLHFNQRGTWLASGS

SEQ ID NO: 22668 - protein, 273 aa, Homo sapiens
  Payload ID: 4562
  Gene Symbol: DCAF8
  Gene Name: DDB1 and CUL4 associated factor 8
  Uniprot ID: Q5TAQ9
  ENSP ID: ENSP00000476351
MSSKGSSTDGRTDLANGSLSSSPEEMSGAEEGRETSSGIEVEASDLSLSLTGDDGGPNRTSTESRGTDTESSGEDKDSDSMEDTGHYSINDENRVHDRSEEEEEEEEEEEEEQPRRRVQRKRANRDQDSSDDERALEDWVSSETSALPRPRWQALPALRERELGSSARFVYEACGARVFVQRFRLQHGLEGHTGCVNTLHFNQRGTWLASGSDDLKVVVWDWVRRQPVLDFESGHKSNVFQVRQGSIIATERIRHELEKSELQHGLGADSELL

SEQ ID NO: 22669 - protein, 417 aa, Homo sapiens
  Payload ID: 4562
  Gene Symbol: DCAF8
  Gene Name: DDB1 and CUL4 associated factor 8
  ENSP ID: ENSP00000476407
MSSKGSSTDGRTDLANGSLSSSPEEMSGAEEGRETSSGIEVEASDLSLSLTGDDGGPNRTSTESRGTDTESSGEDKDSDSMEDTGHYSINDENRVHDRSEEEEEEEEEEEEEQPRRRVQRKRANRDQDSSDDERALEDWVSSETSALPRPRWQALPALRERELGSSARFVYEACGARVFVQRFRLQHGLEGHTGCVNTLHFNQRGTWLASGSDDLKVVVWDWVRRQPVLDFESGHKSNVFQAKFLPNSGDSTLAMCARDGQVRVAELSATQCCKNTKRVAQHKGASHKLALEPDSPCTFLSAGEDAVVFTIDLRQDRPASKLVVTKEKEKKVGLYTIYVNPANTHQFAVGGRDQFVRIYDQRKIDENENNGVLKKFCPHHLSSWPVTMMKTFTSSTPLTVMGPSMLRDTRATEIMPQ

SEQ ID NO: 22670 - protein, 81 aa, Homo sapiens
  Payload ID: 4562
  Gene Symbol: DCAF8
  Gene Name: DDB1 and CUL4 associated factor 8
  ENSP ID: ENSP00000476539
  MOD_RES (1)..(1): Any amino acid
XLKDVIKKNKRERDEDSLHQTDLFDSHMLWFLMHHLRQRRHHRRWREPGVGATDADSDESPSSSDTSDEEEGPDRVQCMPS

SEQ ID NO: 22671 - protein, 125 aa, Homo sapiens
  Payload ID: 4562
  Gene Symbol: DCAF8
  Gene Name: DDB1 and CUL4 associated factor 8
  ENSP ID: ENSP00000477012
MSGAEEGRETSSGIEVEASDLSLSLTGDDGGPNRTSTESRGTDTESSGEDKDSDSMEDTGHYSINDENRVHDRSEEEEEEEEEEEEEQPRRRVQRKRANRDQDSSDDERALEDWVSSETSALPRP

SEQ ID NO: 22672 - protein, 109 aa, Homo sapiens
  Payload ID: 4562
  Gene Symbol: DCAF8
  Gene Name: DDB1 and CUL4 associated factor 8
  ENSP ID: ENSP00000477255
  MOD_RES (1)..(1): Any amino acid
XEDIYLFNSSHSDGAQYVKRYKGHRNNATVKGVNFYGPKSEFVVSGSDCGHIFLWEKSSCQIIQFMEGDKGGVRDAGLNALSQASICPFSKSILQASLLLAQPMPGFDD

SEQ ID NO: 22673 - protein, 66 aa, Homo sapiens
  Payload ID: 4562
  Gene Symbol: DCAF8
  Gene Name: DDB1 and CUL4 associated factor 8
  ENSP ID: ENSP00000477386
RYKGHRNNATVKGVNFYGPKSEFVVSGSDCGHIFLWEKSSCQIIQFMEGDKGGWEEVGGGAEVKEE

SEQ ID NO: 22674 - protein, 273 aa, Homo sapiens; identical to SEQ ID NO: 22668
  Payload ID: 4562
  Gene Symbol: DCAF8
  Gene Name: DDB1 and CUL4 associated factor 8
  Uniprot ID: Q5TAQ9
  ENSP ID: ENSP00000477464

SEQ ID NO: 22675 - protein, 600 aa, Homo sapiens
  Payload ID: 4563
  Gene Symbol: DCAF8L1
  Gene Name: DDB1 and CUL4 associated factor 8-like 1
  Uniprot ID: A6NGE4
  ENSP ID: ENSP00000405222
MSHQEGSTGGLPDLVTESLFSSPEEQSGVAAVTAASSDIEMAATEPSTGDGGDTRDGGFLNDASTENQNTDSESSSEDVELESMGEGLFGYPLVGEETEREEEEEEMEEEGEEEEQPRMCPRCGGTNHDQCLLDEDQALEEWISSETSALPRSRWQVLTALRQRQLGSSARFVYEACGARTFVQRFRLQYLLGSHAGSVSTIHFNQRGTRLASSGDDLRVIVWDWVRQKPVLNFESGHDINVIQAKFFPNCGDSTLAMCGHDGQVRVAELINASYCENTKRVAKHRGPAHELALEPDSPYKFLTSGEDAVVFTIDLRQDRPASKVVVTRENDKKVGLYTISMNPANIYQFAVGGHDQFVRIYDQRRIDKKENNGVLKKFTPHHLVYCDFPTNITCVVYSHDGTELLASYNDEDIYLFNSSLSDGAQYVKRYKGHRNNDTIKCVNFYGPRSEFVVSGSDCGHVFFWEKSSSQIIQFMEGDRGDIVNCLEPHPYLPVLATSGLDQHVRIWTPTAKTATELTGLKDVIKKNKQERDEDNLNYTDSFDNRMLRFFVRHLLQRAHQPGWRDHGAEFPDEEELDESSSTSDTSEEEGQDRVQCIPS

SEQ ID NO: 22676 - protein, 631 aa, Homo sapiens
  Payload ID: 4564
  Gene Symbol: DCAF8L2
  Gene Name: DDB1 and CUL4 associated factor 8-like 2
  Uniprot ID: P0C7V8
  ENSP ID: ENSP00000462745
MSHQEGSTDGLPDLGTESLFSSPEEQSGAVAATEASSDIDIATSELSVTVTGDGSDSRDGGFPNDASTENRSSDQESASEDIELESLEDFEHFLMSGESLFHYPLVGEEETEREEEDEEIQEEGGEEEEEEEEEEEEEEEEEEEEEEQPRAGPQGSGGNHEQYSLEEDQALEEWVSSETSALPRPRWQVVTALHQRQLGSRPRFVYEACGARAFVQRFRLQYRLADHVGCVNTVHFNQRGTRLASSGDDLKVIVWDWVRQRPVLNFESGHTNNVFQAKFLPNCGDSTLAMCARDGQVRVAELINASYFNNTKCVAQHRGPAHKLALEPDSPYKFLTSGEDAVVFTIDLRQDRPASKVVVTRENDKKVGLYTITVNPANTYQFAVGGQDQFVRIYDQRKIDKKENNGVLKKFTPHHLVNCDFPTNITCVVYSHDGTELLASYNDDDIYLFNSSHSDGAQYSKRFKGHRNNTTVKGVNFYGPRSEFVVSGSDCGHIFFWEKSSCQIIQFLKGSREGTINCLEPHPYLPVLACSGLDHDVKIWTPTAKAATELTGLKKVIKKNKWERDEDSLHHGSLFDQYMLWFLLRHVTQRGRHQDWRSGEAEFPDEESDESSSTSETSEEEVQDRVQCMPS

SEQ ID NO: 22677 - protein, 29 aa, Homo sapiens
  Payload ID: 4564
  Gene Symbol: DCAF8L2
  Gene Name: DDB1 and CUL4 associated factor 8-like 2
  ENSP ID: ENSP00000464235
MSHQEGSTDGLPDLGTESLFSSPEEQSGA

SEQ ID NO: 22678 - protein, 631 aa, Homo sapiens; identical to SEQ ID NO: 22676
  Payload ID: 4564
  Gene Symbol: DCAF8L2
  Gene Name: DDB1 and CUL4 associated factor 8-like 2
  Uniprot ID: P0C7V8
  ENSP ID: ENSP00000479800

SEQ ID NO: 22679 - protein, 900 aa, Homo sapiens
  Payload ID: 4565
  Gene Symbol: DDHD1
  Gene Name: DDHD domain containing 1
  Uniprot ID: Q8NEL9
  ENSP ID: ENSP00000327104
MNYPGRGSPRSPEHNGRGGGGGAWELGSDARPAFGGGVCCFEHLPGGDPDDGDVPLALLRGEPGLHLAPGTDDHNHHLALDPCLSDENYDFSSAESGSSLRYYSEGESGGGGSSLSLHPPQQPPLVPTNSGGGGATGGSPGERKRTRLGGPAARHRYEVVTELGPEEVRWFYKEDKKTWKPFIGYDSLRIELAFRTLLQTTGARPQGGDRDGDHVCSPTGPASSSGEDDDEDRACGFCQSTTGHEPEMVELVNIEPVCVRGGLYEVDVTQGECYPVYWNQADKIPVMRGQWFIDGTWQPLEEEESNLIEQEHLNCFRGQQMQENFDIEVSKSIDGKDAVHSFKLSRNHVDWHSVDEVYLYSDATTSKIARTVTQKLGFSKASSSGTRLHRGYVEEATLEDKPSQTTHIVFVVHGIGQKMDQGRIIKNTAMMREAARKIEERHFSNHATHVEFLPVEWRSKLTLDGDTVDSITPDKVRGLRDMLNSSAMDIMYYTSPLYRDELVKGLQQELNRLYSLFCSRNPDFEEKGGKVSIVSHSLGCVITYDIMTGWNPVRLYEQLLQKEEELPDERWMSYEERHLLDELYITKRRLKEIEERLHGLKASSMTQTPALKFKVENFFCMGSPLAVFLALRGIRPGNTGSQDHILPREICNRLLNIFHPTDPVAYRLEPLILKHYSNISPVQIHWYNTSNPLPYEHMKPSFLNPAKEPTSVSENEGISTIPSPVTSPVLSRRHYGESITNIGKASILGAASIGKGLGGMLFSRFGRSSTTQSSETSKDSMEDEKKPVASPSATTVGTQTLPHSSSGFLDSAYFRLQESFFNLPQLLFPENVMQNKDNALVELDHRIDFELREGLVESRYWSAVTSHTAYWSSLDVALFLLTFMYKHEHDDDAKPNLDPI

SEQ ID NO: 22680 - protein, 872 aa, Homo sapiens
  Payload ID: 4565
  Gene Symbol: DDHD1
  Gene Name: DDHD domain containing 1
  Uniprot ID: Q8NEL9
  ENSP ID: ENSP00000350401
MNYPGRGSPRSPEHNGRGGGGGAWELGSDARPAFGGGVCCFEHLPGGDPDDGDVPLALLRGEPGLHLAPGTDDHNHHLALDPCLSDENYDFSSAESGSSLRYYSEGESGGGGSSLSLHPPQQPPLVPTNSGGGGATGGSPGERKRTRLGGPAARHRYEVVTELGPEEVRWFYKEDKKTWKPFIGYDSLRIELAFRTLLQTTGARPQGGDRDGDHVCSPTGPASSSGEDDDEDRACGFCQSTTGHEPEMVELVNIEPVCVRGGLYEVDVTQGECYPVYWNQADKIPVMRGQWFIDGTWQPLEEEESNLIEQEHLNCFRGQQMQENFDIEVSKSIDGKDAVHSFKLSRNHVDWHSVDEVYLYSDATTSKIARTVTQKLGFSKASSSGTRLHRGYVEEATLEDKPSQTTHIVFVVHGIGQKMDQGRIIKNTAMMREAARKIEERHFSNHATHVEFLPVEWRSKLTLDGDTVDSITPDKVRGLRDMLNSSAMDIMYYTSPLYRDELVKGLQQELNRLYSLFCSRNPDFEEKGGKVSIVSHSLGCVITYDIMTGWNPVRLYEQLLQKEEELPDERWMSYEERHLLDELYITKRRLKEIEERLHGLKASSMTQTPALKFKVENFFCMGSPLAVFLALRGIRPGNTGSQDHILPREICNRLLNIFHPTDPVAYRLEPLILKHYSNISPVQIHWYNTSNPLPYEHMKPSFLNPAKEPTSVSENEGISTIPSPVTSPVLSRRHYGESITNIGKASILGAASIGKGLGGMLFSRFGRSSTTQSSETSKDSMEDEKKPVASPSATTVGTQTLPHSSSGFLDSALELDHRIDFELREGLVESRYWSAVTSHTAYWSSLDVALFLLTFMYKHEHDDDAKPNLDPI

SEQ ID NO: 22681 - protein, 879 aa, Homo sapiens
  Payload ID: 4565
  Gene Symbol: DDHD1
  Gene Name: DDHD domain containing 1
  Uniprot ID: Q8NEL9
  ENSP ID: ENSP00000378970
MNYPGRGSPRSPEHNGRGGGGGAWELGSDARPAFGGGVCCFEHLPGGDPDDGDVPLALLRGEPGLHLAPGTDDHNHHLALDPCLSDENYDFSSAESGSSLRYYSEGESGGGGSSLSLHPPQQPPLVPTNSGGGGATGGSPGERKRTRLGGPAARHRYEVVTELGPEEVRWFYKEDKKTWKPFIGYDSLRIELAFRTLLQTTGARPQGGDRDGDHVCSPTGPASSSGEDDDEDRACGFCQSTTGHEPEMVELVNIEPVCVRGGLYEVDVTQGECYPVYWNQADKIPVMRGQWFIDGTWQPLEEEESNLIEQEHLNCFRGQQMQENFDIEVSKSIDGKDGSGINYSAVHSFKLSRNHVDWHSVDEVYLYSDATTSKIARTVTQKLGFSKASSSGTRLHRGYVEEATLEDKPSQTTHIVFVVHGIGQKMDQGRIIKNTAMMREAARKIEERHFSNHATHVEFLPVEWRSKLTLDGDTVDSITPDKVRGLRDMLNSSAMDIMYYTSPLYRDELVKGLQQELNRLYSLFCSRNPDFEEKGGKVSIVSHSLGCVITYDIMTGWNPVRLYEQLLQKEEELPDERWMSYEERHLLDELYITKRRLKEIEERLHGLKASSMTQTPALKFKVENFFCMGSPLAVFLALRGIRPGNTGSQDHILPREICNRLLNIFHPTDPVAYRLEPLILKHYSNISPVQIHWYNTSNPLPYEHMKPSFLNPAKEPTSVSENEGISTIPSPVTSPVLSRRHYGESITNIGKASILGAASIGKGLGGMLFSRFGRSSTTQSSETSKDSMEDEKKPVASPSATTVGTQTLPHSSSGFLDSALELDHRIDFELREGLVESRYWSAVTSHTAYWSSLDVALFLLTFMYKHEHDDDAKPNLDPI

SEQ ID NO: 22682 - protein, 92 aa, Homo sapiens
  Payload ID: 4565
  Gene Symbol: DDHD1
  Gene Name: DDHD domain containing 1
  ENSP ID: ENSP00000450785
MRGQWFIDGTWQPLEEEESNLIEQEHLNCFRGQQMQENFDIEVSKSIDGKDAVHSFKLSRNHVDWHSVDEVYLYSDATTSKIARTVTQKLGF

SEQ ID NO: 22683 - protein, 771 aa, Homo sapiens
  Payload ID: 4565
  Gene Symbol: DDHD1
  Gene Name: DDHD domain containing 1
  ENSP ID: ENSP00000483405
MNYPGRGSPRSPEHNGRGGGGGAWELGSDARPAFGGGVCCFEHLPGGDPDDGDVPLALLRGEPGLHLAPGTDDHNHHLALDPCLSDENYDFSSAESGSSLRYYSEGESGGGGSSLSLHPPQQPPLVPTNSGGGLYEVDVTQGECYPVYWNQADKIPVMRGQWFIDGTWQPLEEEESNLIEQEHLNCFRGQQMQENFDIEVSKSIDGKDAVHSFKLSRNHVDWHSVDEVYLYSDATTSKIARTVTQKLGFSKASSSGTRLHRGYVEEATLEDKPSQTTHIVFVVHGIGQKMDQGRIIKNTAMMREAARKIEERHFSNHATHVEFLPVEWRSKLTLDGDTVDSITPDKVRGLRDMLNSSAMDIMYYTSPLYRDELVKGLQQELNRLYSLFCSRNPDFEEKGGKVSIVSHSLGCVITYDIMTGWNPVRLYEQLLQKEEELPDERWMSYEERHLLDELYITKRRLKEIEERLHGLKASSMTQTPALKFKVENFFCMGSPLAVFLALRGIRPGNTGSQDHILPREICNRLLNIFHPTDPVAYRLEPLILKHYSNISPVQIHWYNTSNPLPYEHMKPSFLNPAKEPTSVSENEGISTIPSPVTSPVLSRRHYGESITNIGKASILGAASIGKGLGGMLFSRFGRSSTTQSSETSKDSMEDEKKPVASPSATTVGTQTLPHSSSGFLDSAYFRLQESFFNLPQLLFPENVMQNKDNALVELDHRIDFELREGLVESRYWSAVTSHTAYWSSLDVALFLLTFMYKHEHDDDAKPNLDPI

SEQ ID NO: 22684 - protein, 711 aa, Homo sapiens
  Payload ID: 4566
  Gene Symbol: DDHD2
  Gene Name: DDHD domain containing 2
  Uniprot ID: O94830
  ENSP ID: ENSP00000380352
MSSVQSQQEQLSQSDPSPSPNSCSSFELIDMDAGSLYEPVSPHWFYCKIIDSKETWIPFNSEDSQQLEEAYSSGKGCNGRVVPTDGGRYDVHLGERMRYAVYWDELASEVRRCTWFYKGDKDNKYVPYSESFSQVLEETYMLAVTLDEWKKKLESPNREIIILHNPKLMVHYQPVAGSDDWGSTPTEQGRPRTVKRGVENISVDIHCGEPLQIDHLVFVVHGIGPACDLRFRSIVQCVNDFRSVSLNLLQTHFKKAQENQQIGRVEFLPVNWHSPLHSTGVDVDLQRITLPSINRLRHFTNDTILDVFFYNSPTYCQTIVDTVASEMNRIYTLFLQRNPDFKGGVSIAGHSLGSLILFDILTNQKDSLGDIDSEKDSLNIVMDQGDTPTLEEDLKKLQLSEFFDIFEKEKVDKEALALCTDRDLQEIGIPLGPRKKILNYFSTRKNSMGIKRPAPQPASGANIPKESEFCSSSNTRNGDYLDVGIGQVSVKYPRLIYKPEIFFAFGSPIGMFLTVRGLKRIDPNYRFPTCKGFFNIYHPFDPVAYRIEPMVVPGVEFEPMLIPHHKGRKRMHLELREGLTRMSMDLKNNLLGSLRMAWKSFTRAPYPALQASETPEETEAEPESTSEKPSDVNTEETSVAVKEEVLPINVGMLNGGQRIDYVLQEKPIESFNEYLFALQSHLCYWESEDTVLLVLKEIYQTQGIFLDQPLQ

SEQ ID NO: 22685 - protein, 330 aa, Homo sapiens
  Payload ID: 4566
  Gene Symbol: DDHD2
  Gene Name: DDHD domain containing 2
  Uniprot ID: O94830
  ENSP ID: ENSP00000429017
MDQGDTPTLEEDLKKLQLSEFFDIFEKEKVDKEALALCTDRDLQEIGIPLGPRKKILNYFSTRKNSMGIKRPAPQPASGANIPKESEFCSSSNTRNGDYLDVGIGQVSVKYPRLIYKPEIFFAFGSPIGMFLTVRGLKRIDPNYRFPTCKGFFNIYHPFDPVAYRIEPMVVPGVEFEPMLIPHHKGRKRMHLELREGLTRMSMDLKNNLLGSLRMAWKSFTRAPYPALQASETPEETEAEPESTSEKPSDVNTEETSVAVKEEVLPINVGMLNGGQRIDYVLQEKPIESFNEYLFALQSHLCYWESEDTVLLVLKEIYQTQGIFLDQPLQ

SEQ ID NO: 22686 - protein, 711 aa, Homo sapiens; identical to SEQ ID NO: 22684
  Payload ID: 4566
  Gene Symbol: DDHD2
  Gene Name: DDHD domain containing 2
  Uniprot ID: O94830
  ENSP ID: ENSP00000429932

SEQ ID NO: 22687 - protein, 162 aa, Homo sapiens
  Payload ID: 4566
  Gene Symbol: DDHD2
  Gene Name: DDHD domain containing 2
  ENSP ID: ENSP00000431638
MVVPGVEFEPMLIPHHKGRKRMHLELREGLTRMSMDLKNNLLGSLRMAWKSFTRAPYPALQASETPEETEAEPESTSEKPSDVNTEETSVAVKEEVLPINVGMLNGGQRIDYVLQEKPIESFNEYLFALQSHLCYWESEDTVLLVLKEIYQTQGIFLDQPLQ

SEQ ID NO: 22688 - protein, 142 aa, Homo sapiens
  Payload ID: 4566
  Gene Symbol: DDHD2
  Gene Name: DDHD domain containing 2
  ENSP ID: ENSP00000432024
MDAGSLYEPVSPHWFYCKIIDSKETWIPFNSEDSQQLEEAYSSGKGCNGRVVPTDGGRYDVHLGERMRYAVYWDELASEVRRCTWFYKGDKDNKYVPYSESFSQVLEETYMLAVTLDEWKKKLESPNREIIILHNPKENLYK

SEQ ID NO: 22689 - protein, 156 aa, Homo sapiens
  Payload ID: 4566
  Gene Symbol: DDHD2
  Gene Name: DDHD domain containing 2
  ENSP ID: ENSP00000432433
MSSVQSQQEQLSQSDPSPSPNSCSSFELIDMDAGSLYEPVSPHWFYCKIIDSKETWIPFNSEDSQQLEEAYSSGKGCNGRVVPTDGGRYDVHLGERMRYAVYWDELASEVRRCTWFYKGDKDNKYVPYSESFSQVLEETYMLAVTLDEWKKKLESP

SEQ ID NO: 22690 - protein, 137 aa, Homo sapiens
  Payload ID: 4566
  Gene Symbol: DDHD2
  Gene Name: DDHD domain containing 2
  ENSP ID: ENSP00000432678
MSSVQSQQEQLSQSDPSPSPNSCSSFELIDMDAGSLYEPVSPHWFYCKIIDSKETWIPFNSEDSQQLEEAYSSGKGCNGRVVPTDGGRYDVHLGERMRYAVYWDELASEVRRCTWFYKGDKDNKYVPYSESFSQVLE

SEQ ID NO: 22691 - protein, 161 aa, Homo sapiens
  Payload ID: 4566
  Gene Symbol: DDHD2
  Gene Name: DDHD domain containing 2
  ENSP ID: ENSP00000433118
MSSVQSQQEQLSQSDPSPSPNSCSSFELIDMDAGSLYEPVSPHWFYCKIIDSKETWIPFNSEDSQQLEEAYSSGCNGRVVPTDGGRYDVHLGERMRYAVYWDELASEVRRCTWFYKGDKDNKYVPYSESFSQVLEETYMLAVTLDEWKKKLESPNREIIIL

SEQ ID NO: 22692 - protein, 222 aa, Homo sapiens
  Payload ID: 4566
  Gene Symbol: DDHD2
  Gene Name: DDHD domain containing 2
  ENSP ID: ENSP00000433578
MSSVQSQQEQLSQSDPSPSPNSCSSFELIDMDAGSLYEPVSPHWFYCKIIDSKETWIPFNSEDSQQLEEAYSSGKGCNGRVVPTDGGRYDVHLGERMRYAVYWDELASEVRRCTWFYKGDKDNKYVPYSESFSQVLEETYMLAVTLDEWKKKLESPNREIIILHNPKLMVHYQPVAGSDDWGSTPTEQGRPRTVKRGVENISVDIHCVNDFRSVSLNLLQTH

SEQ ID NO: 22693 - protein, 79 aa, Homo sapiens
  Payload ID: 4566
  Gene Symbol: DDHD2
  Gene Name: DDHD domain containing 2
  ENSP ID: ENSP00000435040
NTEETSVAVKEEVLPINVGMLNGGQRIDYVLQEKPIESFNEYLFALQSHLCYWESEDTVLLVLKEIYQTQGIFLDQPLQ

SEQ ID NO: 22694 - protein, 57 aa, Homo sapiens
  Payload ID: 4566
  Gene Symbol: DDHD2
  Gene Name: DDHD domain containing 2
  ENSP ID: ENSP00000436444
MRYAVYWDELASEVRRCTWFYKGDKDNKYVPYSESFSQVLEETYMLAVTLDEWKKKL

SEQ ID NO: 22695 - protein, 83 aa, Homo sapiens
  Payload ID: 4566
  Gene Symbol: DDHD2
  Gene Name: DDHD domain containing 2
  ENSP ID: ENSP00000436994
MSSVQSQQEQLSQSDPSPSPNSCSSFELIDMDAGSLYEPVSPHWFYCKIIDSKETWIPFNSEDSQQLEEAYSSGNLHACCNFG

SEQ ID NO: 22696 - protein, 213 aa, Homo sapiens
  Payload ID: 4566
  Gene Symbol: DDHD2
  Gene Name: DDHD domain containing 2
  ENSP ID: ENSP00000437029
  MOD_RES (1)..(1): Any amino acid
XEIFFAFGSPIGMFLTVRGLKRIDPNYRFPTCKGFFNIYHPFDPVAYRIEPMVVPGVEFEPMLIPHHKGRKRMHLELREGLTRMSMDLKNNLLGSLRMAWKSFTRAPYPALQASETPEETEAEPESTSEKPSDVNTEETSVAVKEEVLPINVGMLNGGQRIDYVLQEKPIESFNEYLFALQSHLCYWESEDTVLLVLKEIYQTQGIFLDQPLQ

SEQ ID NO: 22697 - protein, 183 aa, Homo sapiens
  Payload ID: 4566
  Gene Symbol: DDHD2
  Gene Name: DDHD domain containing 2
  ENSP ID: ENSP00000437097
  MOD_RES (1)..(1): Any amino acid
XEPLQIDHLVFVVHGIGPACDLRFRSIVQCVNDFRSVSLNLLQTHFKKAQENQQIGRVEFLPVNWHSPLHSTGVDVDLQRITLPSINRLRHFTNDTILDVFFYNSPTYCQTIVDTVASEMNRIYTLFLQRNPDFKGGVSIAGHSLGSLILFDILTNQKDSLGDIDSEKGIKRPAPQPASGANI

SEQ ID NO: 22698 - protein, 118 aa, Homo sapiens
  Payload ID: 4567
  Gene Symbol: DDT
  Gene Name: D-dopachrome tautomerase
  Uniprot ID: P30046
  ENSP ID: ENSP00000215773
MPFLELDTNLPANRVPAGLEKRLCAAAASILGKPADRVNVTVRPGLAMALSGSTEPCAQLSISSIGVVGTAEDNRSHSAHFFEFLTKELALGQDRILIRFFPLESWQIGKIGTVMTFL

SEQ ID NO: 22699 - protein, 118 aa, Homo sapiens; identical to SEQ ID NO: 22698
  Payload ID: 4567
  Gene Symbol: DDT
  Gene Name: D-dopachrome tautomerase
  Uniprot ID: P30046
  ENSP ID: ENSP00000381386

SEQ ID NO: 22700 - protein, 166 aa, Homo sapiens
  Payload ID: 4567
  Gene Symbol: DDT
  Gene Name: D-dopachrome tautomerase
  ENSP ID: ENSP00000384866
MPFLELDTNLPANRVPAGLEKRLCAAAASILGKPADRVNVTVRPGLAMALSGSTEPCAQLSISSIGVVGTAEDNRSHSAHFFEFLTKELALGQDRFQVKFTGDSQSSERPLAWMSRHLLSGSCIAGGPQTNLEMNHLQLATSSSVNTGEKTSLPHKKRLQPKPGVL

SEQ ID NO: 22701 - protein, 132 aa, Homo sapiens
  Payload ID: 4567
  Gene Symbol: DDT
  Gene Name: D-dopachrome tautomerase
  ENSP ID: ENSP00000385714
MQLFLLAVSVPLPAMPFLELDTNLPANRVPAGLEKRLCAAAASILGKPADRVNVTVRPGLAMALSGSTEPCAQLSISSIGVVGTAEDNRSHSAHFFEFLTKELALGQDRILIRFFPLESWQIGKIGTVMTFL

SEQ ID NO: 22702 - protein, 107 aa, Homo sapiens
  Payload ID: 4567
  Gene Symbol: DDT
  Gene Name: D-dopachrome tautomerase
  Uniprot ID: P30046
  ENSP ID: ENSP00000399768
MPFLELDTNLPANRVPAGLEKRLCAAAASILGKPADRVNVTVRPGLAMALSGSTEPCAQLSISSIGVVGTAEDNRSHSAHFFEFLTKELALGQDRQVPGEVHGRLTE

SEQ ID NO: 22703 - protein, 50 aa, Homo sapiens
  Payload ID: 4567
  Gene Symbol: DDT
  Gene Name: D-dopachrome tautomerase
  ENSP ID: ENSP00000409440
  MOD_RES (1)..(1): Any amino acid
XKDLPPPQEASATQTWRSVTELKFPLGILIRFFPLESWQIGKIGTVMTFL

SEQ ID NO: 22704 - protein, 118 aa, Homo sapiens; identical to SEQ ID NO: 22698
  Payload ID: 4567
  Gene Symbol: DDT
  Gene Name: D-dopachrome tautomerase
  Uniprot ID: P30046
  ENSP ID: ENSP00000481175

SEQ ID NO: 22705 - protein, 166 aa, Homo sapiens; identical to SEQ ID NO: 22700
  Payload ID: 4567
  Gene Symbol: DDT
  Gene Name: D-dopachrome tautomerase
  ENSP ID: ENSP00000485690

SEQ ID NO: 22706 - protein, 107 aa, Homo sapiens; identical to SEQ ID NO: 22702
  Payload ID: 4567
  Gene Symbol: DDT
  Gene Name: D-dopachrome tautomerase
  Uniprot ID: P30046
  ENSP ID: ENSP00000486384

SEQ ID NO: 22707 - protein, 50 aa, Homo sapiens; identical to SEQ ID NO: 22703
  Payload ID: 4567
  Gene Symbol: DDT
  Gene Name: D-dopachrome tautomerase
  ENSP ID: ENSP00000486480
  MOD_RES (1)..(1): Any amino acid

SEQ ID NO: 22708 - protein, 118 aa, Homo sapiens; identical to SEQ ID NO: 22698
  Payload ID: 4567
  Gene Symbol: DDT
  Gene Name: D-dopachrome tautomerase
  Uniprot ID: P30046
  ENSP ID: ENSP00000486829

SEQ ID NO: 22709 - protein, 132 aa, Homo sapiens; identical to SEQ ID NO: 22701
  Payload ID: 4567
  Gene Symbol: DDT
  Gene Name: D-dopachrome tautomerase
  ENSP ID: ENSP00000486856

SEQ ID NO: 22710 - protein, 134 aa, Homo sapiens
  Payload ID: 4568
  Gene Symbol: DDTL
  Gene Name: D-dopachrome tautomerase-like
  Uniprot ID: A6NHG4
  ENSP ID: ENSP00000215770
MPFLELDTNLPANRVPAGLEKRLCAAAASILGKPADRVNVTVRPGLAMALSGSTEPCAQLSISSIGVVGTAEDNRSHSAHFFEFLTKELALGQDRFPTVLSTSPAAHGGPRCPGEIIEGKKSCLNEEALFIYFI

SEQ ID NO: 22711 - protein, 134 aa, Homo sapiens; identical to SEQ ID NO: 22710
  Payload ID: 4568
  Gene Symbol: DDTL
  Gene Name: D-dopachrome tautomerase-like
  Uniprot ID: A6NHG4
  ENSP ID: ENSP00000479063

SEQ ID NO: 22712 - protein, 314 aa, Homo sapiens
  Payload ID: 4569
  Gene Symbol: DDRGK1
  Gene Name: DDRGK domain containing 1
  Uniprot ID: Q96HY6
  ENSP ID: ENSP00000346483
MVAPVWYLVAAALLVGFILFLTRSRGRAASAGQEPLHNEELAGAGRVAQPGPLEPEEPRAGGRPRRRRDLGSRLQAQRRAQRVAWAEADENEEEAVILAQEEEGVEKPAETHLSGKIGAKKLRKLEEKQARKAQREAEEAEREERKRLESQREAEWKKEEERLRLEEEQKEEEERKAREEQAQREHEEYLKLKEAFVVEEEGVGETMTEEQSQSFLTEFINYIKQSKVVLLEDLASQVGLRTQDTINRIQDLLAEGTITGVIDDRGKFIYITPEELAAVANFIRQRGRVSIAELAQASNSLIAWGRESPAQAPA

SEQ ID NO: 22713 - protein, 298 aa, Homo sapiens
  Payload ID: 4569
  Gene Symbol: DDRGK1
  Gene Name: DDRGK domain containing 1
  ENSP ID: ENSP00000369548
MVAPVWYLVAAALLVGFILFLTRSRGRAASAGQEPLHNEELAGAGRVAQPGPLEPEEPRAGGRPRRRRDLGSRLQAQRRAQRVAWAEADENEEEAVILAQEEEGVEKPAETHLSGKIGAKKLRKLEEKQARKAQREAEEAEREERKRLESQREAEWKKEEERLRLEEEQKEEEERKAREEQAQREHEEYLKLKEAFVVEEEGVGETMTEEQSQSFLTEFINYIKQSKVVLLEDLASQVGLRTQVSPGTWPAVCSVARGLWLAERTCPKDRVLMHRLPCPQPRVSSAQKSPGTLGILHF

SEQ ID NO: 22714 - protein, 740 aa, Homo sapiens
  Payload ID: 4570
  Gene Symbol: DDX1
  Gene Name: DEAD (Asp-Glu-Ala-Asp) box helicase 1
  Uniprot ID: Q92499
  ENSP ID: ENSP00000233084
MAAFSEMGVMPEIAQAVEEMDWLLPTDIQAESIPLILGGGDVLMAAETGSGKTGAFSIPVIQIVYETLKDQQEGKKGKTTIKTGASVLNKWQMNPYDRGSAFAIGSDGLCCQSREVKEWHGCRATKGLMKGKHYYEVSCHDQGLCRVGWSTMQASLDLGTDKFGFGFGGTGKKSHNKQFDNYGEEFTMHDTIGCYLDIDKGHVKFSKNGKDLGLAFEIPPHMKNQALFPACVLKNAELKFNFGEEEFKFPPKDGFVALSKAPDGYIVKSQHSGNAQVTQTKFLPNAPKALIVEPSRELAEQTLNNIKQFKKYIDNPKLRELLIIGGVAARDQLSVLENGVDIVVGTPGRLDDLVSTGKLNLSQVRFLVLDEADGLLSQGYSDFINRMHNQIPQVTSDGKRLQVIVCSATLHSFDVKKLSEKIMHFPTWVDLKGEDSVPDTVHHVVVPVNPKTDRLWERLGKSHIRTDDVHAKDNTRPGANSPEMWSEAIKILKGEYAVRAIKEHKMDQAIIFCRTKIDCDNLEQYFIQQGGGPDKKGHQFSCVCLHGDRKPHERKQNLERFKKGDVRFLICTDVAARGIDIHGVPYVINVTLPDEKQNYVHRIGRVGRAERMGLAISLVATEKEKVWYHVCSSRGKGCYNTRLKEDGGCTIWYNEMQLLSEIEEHLNCTISQVEPDIKVPVDEFDGKVTYGQKRAAGGGSYKGHVDILAPTVQELAALEKEAQTSFLHLGYLPNQLFRTF

SEQ ID NO: 22715 - protein, 740 aa, Homo sapiens; identical to SEQ ID NO: 22714
  Payload ID: 4570
  Gene Symbol: DDX1
  Gene Name: DEAD (Asp-Glu-Ala-Asp) box helicase 1
  Uniprot ID: Q92499
  ENSP ID: ENSP00000370745

SEQ ID NO: 22716 - protein, 16 aa, Homo sapiens
  Payload ID: 4570
  Gene Symbol: DDX1
  Gene Name: DEAD (Asp-Glu-Ala-Asp) box helicase 1
  ENSP ID: ENSP00000413767
MAAFSEMGVMPEIAQA

SEQ ID NO: 22717 - protein, 659 aa, Homo sapiens [sequence omitted]

SEQ ID NO: 22718 - protein, 659 aa, Homo sapiens [sequence omitted]

SEQ ID NO: 22719 - protein, 731 aa, Homo sapiens
  Payload ID: 4571
  Gene Symbol: DDX17
  Gene Name: DEAD (Asp-Glu-Ala-Asp) box helicase 17
  ENSP ID: ENSP00000380033
LPTGFVAPILCVLLPSPTREAATVASATGDSASERESAAPAAAPTAEAPPPSVVTRPEPQALPSPAIRAPLPDLYPFGTMRGGGFGDRDRDRDRGGFGARGGGGLPPKKFGNPGERLRKKKWDLSELPKFEKNFYVEHPEVARLTPYEVDELRRKKEITVRGGDVCPKPVFAFHHANFPQYVMDVLMDQHFTEPTPIQCQGFPLALSGRDMVGIAQTGSGKTLAYLLPAIVHINHQPYLERGDGPICLVLAPTRELAQQVQQVADDYGKCSRLKSTCIYGGAPKGPQIRDLERGVEICIATPGRLIDFLESGKTNLRRCTYLVLDEADRMLDMGFEPQIRKIVDQIRPDRQTLMWSATWPKEVRQLAEDFLRDYTQINVGNLELSANHNILQIVDVCMESEKDHKLIQLMEEIMAEKENKTIIFVETKRRCDDLTRRMRRDGWPAMCIHGDKSQPERDWVLNEFRSGKAPILIATDVASRGLDVEDVKFVINYDYPNSSEDYVHRIGRTARSTNKGTAYTFFTPGNLKQARELIKVLEEANQAINPKLMQLVDHRGGGGGGGKGGRSRYRTTSSANNPNLMYQDECDRRLRGVKDGGRRDSASYRDRSETDRAGYANGSGYGSPNSAFGAQAGQYTYGQGTYGAAAYGTSSYTAQEYGAGTYGASSTTSTGRSSQSSSQQFSGIGRSGQQPQPLMSQQFAQPPGATNMIGYMGQTAYQYPPPPPPPPPSRK

SEQ ID NO: 22720 - protein, 729 aa, Homo sapiens
  Payload ID: 4571
  Gene Symbol: DDX17
  Gene Name: DEAD (Asp-Glu-Ala-Asp) box helicase 17
  Uniprot ID: Q92841
  ENSP ID: ENSP00000385536
LPTGFVAPILCVLLPSPTREAATVASATGDSASERESAAPAAAPTAEAPPPSVVTRPEPQALPSPAIRAPLPDLYPFGTMRGGGFGDRDRDRDRGGFGARGGGGLPPKKFGNPGERLRKKKWDLSELPKFEKNFYVEHPEVARLTPYEVDELRRKKEITVRGGDVCPKPVFAFHHANFPQYVMDVLMDQHFTEPTPIQCQGFPLALSGRDMVGIAQTGSGKTLAYLLPAIVHINHQPYLERGDGPICLVLAPTRELAQQVQQVADDYGKCSRLKSTCIYGGAPKGPQIRDLERGVEICIATPGRLIDFLESGKTNLRRCTYLVLDEADRMLDMGFEPQIRKIVDQIRPDRQTLMWSATWPKEVRQLAEDFLRDYTQINVGNLELSANHNILQIVDVCMESEKDHKLIQLMEEIMAEKENKTIIFVETKRRCDDLTRRMRRDGWPAMCIHGDKSQPERDWVLNEFRSGKAPILIATDVASRGLDVEDVKFVINYDYPNSSEDYVHRIGRTARSTNKGTAYTFFTPGNLKQARELIKVLEEANQAINPKLMQLVDHRGGGGGGGGRSRYRTTSSANNPNLMYQDECDRRLRGVKDGGRRDSASYRDRSETDRAGYANGSGYGSPNSAFGAQAGQYTYGQGTYGAAAYGTSSYTAQEYGAGTYGASSTTSTGRSSQSSSQQFSGIGRSGQQPQPLMSQQFAQPPGATNMIGYMGQTAYQYPPPPPPPPPSRK

SEQ ID NO: 22721 - protein, 56 aa, Homo sapiens
  Payload ID: 4571
  Gene Symbol: DDX17
  Gene Name: DEAD (Asp-Glu-Ala-Asp) box helicase 17
  ENSP ID: ENSP00000489029
  MOD_RES (1)..(1): Any amino acid
XWPAMCIHGDKSQPERDWVLNEFRSGKAPILIATDVASRGLGSPALGNQMGLQRSI

SEQ ID NO: 22722 - protein, 783 aa, Homo sapiens
  Payload ID: 4572
  Gene Symbol: DDX21
  Gene Name: DEAD (Asp-Glu-Ala-Asp) box helicase 21
  Uniprot ID: Q9NR30
  ENSP ID: ENSP00000346120
MPGKLRSDAGLESDTAMKKGETLRKQTEEKEKKEKPKSDKTEEIAEEEETVFPKAKQVKKKAEPSEVDMNSPKSKKAKKKEEPSQNDISPKTKSLRKKKEPIEKKVVSSKTKKVTKNEEPSEEEIDAPKPKKMKKEKEMNGETREKSPKLKNGFPHPEPDCNPSEAASEESNSEIEQEIPVEQKEGAFSNFPISEETIKLLKGRGVTFLFPIQAKTFHHVYSGKDLIAQARTGTGKTFSFAIPLIEKLHGELQDRKRGRAPQVLVLAPTRELANQVSKDFSDITKKLSVACFYGGTPYGGQFERMRNGIDILVGTPGRIKDHIQNGKLDLTKLKHVVLDEVDQMLDMGFADQVEEILSVAYKKDSEDNPQTLLFSATCPHWVFNVAKKYMKSTYEQVDLIGKKTQKTAITVEHLAIKCHWTQRAAVIGDVIRVYSGHQGRTIIFCETKKEAQELSQNSAIKQDAQSLHGDIPQKQREITLKGFRNGSFGVLVATNVAARGLDIPEVDLVIQSSPPKDVESYIHRSGRTGRAGRTGVCICFYQHKEEYQLVQVEQKAGIKFKRIGVPSATEIIKASSKDAIRLLDSVPPTAISHFKQSAEKLIEEKGAVEALAAALAHISGATSVDQRSLINSNVGFVTMILQCSIEMPNISYAWKELKEQLGEEIDSKVKGMVFLKGKLGVCFDVPTASVTEIQEKWHDSRRWQLSVATEQPELEGPREGYGGFRGQREGSRGFRGQRDGNRRFRGQREGSRGPRGQRSGGGNKSNRSQNKGQKRSFSKAFGQ

SEQ ID NO: 22723 - protein, 715 aa, Homo sapiens
  Payload ID: 4572
  Gene Symbol: DDX21
  Gene Name: DEAD (Asp-Glu-Ala-Asp) box helicase 21
  Uniprot ID: Q9NR30
  ENSP ID: ENSP00000480334
MNSPKSKKAKKKEEPSQNDISPKTKSLRKKKEPIEKKVVSSKTKKVTKNEEPSEEEIDAPKPKKMKKEKEMNGETREKSPKLKNGFPHPEPDCNPSEAASEESNSEIEQEIPVEQKEGAFSNFPISEETIKLLKGRGVTFLFPIQAKTFHHVYSGKDLIAQARTGTGKTFSFAIPLIEKLHGELQDRKRGRAPQVLVLAPTRELANQVSKDFSDITKKLSVACFYGGTPYGGQFERMRNGIDILVGTPGRIKDHIQNGKLDLTKLKHVVLDEVDQMLDMGFADQVEEILSVAYKKDSEDNPQTLLFSATCPHWVFNVAKKYMKSTYEQVDLIGKKTQKTAITVEHLAIKCHWTQRAAVIGDVIRVYSGHQGRTIIFCETKKEAQELSQNSAIKQDAQSLHGDIPQKQREITLKGFRNGSFGVLVATNVAARGLDIPEVDLVIQSSPPKDVESYIHRSGRTGRAGRTGVCICFYQHKEEYQLVQVEQKAGIKFKRIGVPSATEIIKASSKDAIRLLDSVPPTAISHFKQSAEKLIEEKGAVEALAAALAHISGATSVDQRSLINSNVGFVTMILQCSIEMPNISYAWKELKEQLGEEIDSKVKGMVFLKGKLGVCFDVPTASVTEIQEKWHDSRRWQLSVATEQPELEGPREGYGGFRGQREGSRGFRGQRDGNRRFRGQREGSRGPRGQRSGGGNKSNRSQNKGQKRSFSKAFGQ

SEQ ID NO: 22724 - protein, 804 aa, Homo sapiens
  Payload ID: 4573
  Gene Symbol: DDX24
  Gene Name: DEAD (Asp-Glu-Ala-Asp) box helicase 24
  Uniprot ID: Q9GZR7
  ENSP ID: ENSP00000328690
MKLKDTKSRPKQSSCGKFQTKGIKVVGKWKEVKIDPNMFADGQMDDLVCFEELTDYQLVSPAKNPSSLFSKEAPKRKAQAVSEEEEEEEGKSSSPKKKIKLKKSKNVATEGTSTQKEFEVKDPELEAQGDDMVCDDPEAGEMTSENLVQTAPKKKKNKGKKGLEPSQSTAAIRDKLDILGAAETGSGKTLAFAIPMIHAVLQWQKRNAAPPPSNTEAPPGETRTEAGAETRSPGKAEAESDALPDDTVIESEALPSDIAAEARAKTGGTVSDQALLFGDDDAGEGPSSLIREKPVPKQNENEEENLDKEQTGNLKQELDDKSATCKAYPKRPLLGLVLTPTRELAVQVKQHIDAVARFTGIKTAILVGGMSTQKQQRMLNRRPEIVVATPGRLWELIKEKHYHLRNLRQLRCLVVDEADRMVEKGHFAELSQLLEMLNDSQYNPKRQTLVFSATLTLVHQAPARILHKKHTKKMDKTAKLDLLMQKIGMRGKPKVIDLTRNEATVETLTETKIHCETDEKDFYLYYFLMQYPGRSLVFANSISCIKRLSGLLKVLDIMPLTLHACMHQKQRLRNLEQFARLEDCVLLATDVAARGLDIPKVQHVIHYQVPRTSEIYVHRSGRTARATNEGLSLMLIGPEDVINFKKIYKTLKKDEDIPLFPVQTKYMDVVKERIRLARQIEKSEYRNFQACLHNSWIEQAAAALEIELEEDMYKGGKADQQEERRRQKQMKVLKKELRHLLSQPLFTESQKTKYPTQSGKPPLLVSAPSKSESALSCLSKQKKKKTKKPKEPQPEQPQPSTSAN

SEQ ID NO: 22725 - protein, 609 aa, Homo sapiens
  Payload ID: 4573
  Gene Symbol: DDX24
  Gene Name: DEAD (Asp-Glu-Ala-Asp) box helicase 24
  ENSP ID: ENSP00000440623
MIHAVLQWQKRNAAPPPSNTEAPPGETRTEAGAETRSPGKAEAESDALPDDTVIESEALPSDIAAEARAKTGGTVSDQALLFGDDDAGEGPSSLIREKPVPKQNENEEENLDKEQTGNLKQELDDKSATCKAYPKRPLLGLVLTPTRELAVQVKQHIDAVARFTGIKTAILVGGMSTQKQQRMLNRRPEIVVATPGRLWELIKEKHYHLRNLRQLRCLVVDEADRMVEKGHFAELSQLLEMLNDSQYNPKRQTLVFSATLTLVHQAPARILHKKHTKKMDKTAKLDLLMQKIGMRGKPKVIDLTRNEATVETLTETKIHCETDEKDFYLYYFLMQYPGRSLVFANSISCIKRLSGLLKVLDIMPLTLHACMHQKQRLRNLEQFARLEDCVLLATDVAARGLDIPKVQHVIHYQVPRTSEIYVHRSGRTARATNEGLSLMLIGPEDVINFKKIYKTLKKDEDIPLFPVQTKYMDVVKERIRLARQIEKSEYRNFQACLHNSWIEQAAAALEIELEEDMYKGGKADQQEERRRQKQMKVLKKELRHLLSQPLFTESQKTKYPTQSGKPPLLVSAPSKSESALSCLSKQKKKKTKKPKEPQPEQPQPSTSAN

SEQ ID NO: 22726 - protein, 816 aa, Homo sapiens
  Payload ID: 4573
  Gene Symbol: DDX24
  Gene Name: DEAD (Asp-Glu-Ala-Asp) box helicase 24
  ENSP ID: ENSP00000452145
MDDLVCFEELTDYQLVSPAKNPSSLFSKEAPKRKAQAVSEEEEEEEGKSSSPKKKIKLKKSKNVATEGTSTQKEFEVKDPELEAQGDDMVCDDPEAGEMTSENLVQTAPKKKKNKGKKGLEPSQSTAAKVPKKAKTWIPEVHDQKADVSAWKDLFVPRPVLRALSFLGFSAPTPIQALTLAPAIRDKLDILGAAETGSGKTLAFAIPMIHAVLQWQKRNAAPPPSNTEAPPGETRTEAGAETRSPGKAEAESDALPDDTVIESEALPSDIAAEARAKTGGTVSDQALLFGDDDAGEGPSSLIREKPVPKQNENEEENLDKEQTGNLKQELDDKSATCKAYPKRPLLGLVLTPTRELAVQVKQHIDAVARFTGIKTAILVGGMSTQKQQRMLNRRPEIVVATPGRLWELIKEKHYHLRNLRQLRCLVVDEADRMVEKGHFAELSQLLEMLNDSQYNPKRQTLVFSATLTLVHQAPARILHKKHTKKMDKTAKLDLLMQKIGMRGKPKVIDLTRNEATVETLTETKIHCETDEKDFYLYYFLMQYPGRSLVFANSISCIKRLSGLLKVLDIMPLTLHACMHQKQRLRNLEQFARLEDCVLLATDVAARGLDIPKVQHVIHYQVPRTSEIYVHRSGRTARATNEGLSLMLIGPEDVINFKKIYKTLKKDEDIPLFPVQTKYMDVVKERIRLARQIEKSEYRNFQACLHNSWIEQAAAALEIELEEDMYKGGKADQQEERRRQKQMKVLKKELRHLLSQPLFTESQKTKYPTQSGKPPLLVSAPSKSESALSCLSKQKKKKTKKPKEPQPEQPQPSTSAN

SEQ ID NO: 22727 - protein, 804 aa, Homo sapiens; identical to SEQ ID NO: 22724
  Payload ID: 4573
  Gene Symbol: DDX24
  Gene Name: DEAD (Asp-Glu-Ala-Asp) box helicase 24
  Uniprot ID: Q9GZR7
  ENSP ID: ENSP00000478630

SEQ ID NO: 22728 - protein, 816 aa, Homo sapiens; identical to SEQ ID NO: 22726
  Payload ID: 4573
  Gene Symbol: DDX24
  Gene Name: DEAD (Asp-Glu-Ala-Asp) box helicase 24
  ENSP ID: ENSP00000480033

SEQ ID NO: 22729 - protein, 485 aa, Homo sapiens
  Payload ID: 4573
  Gene Symbol: DDX24
  Gene Name: DEAD (Asp-Glu-Ala-Asp) box helicase 24
  ENSP ID: ENSP00000481317
MTKAPCKAYPKRPLLGLVLTPTRELAVQVKQHIDAVARFTGIKTAILVGGMSTQKQQRMLNRRPEIVVATPGRLWELIKEKHYHLRNLRQLRCLVVDEADRMVEKGHFAELSQLLEMLNDSQYNPKRQTLVFSATLTLVHQAPARILHKKHTKKMDKTAKLDLLMQKIGMRGKPKVIDLTRNEATVETLTETKIHCETDEKDFYLYYFLMQYPGRSLVFANSISCIKRLSGLLKVLDIMPLTLHACMHQKQRLRNLEQFARLEDCVLLATDVAARGLDIPKVQHVIHYQVPRTSEIYVHRSGRTARATNEGLSLMLIGPEDVINFKKIYKTLKKDEDIPLFPVQTKYMDVVKERIRLARQIEKSEYRNFQACLHNSWIEQAAAALEIELEEDMYKGGKADQQEERRRQKQMKVLKKELRHLLSQPLFTESQKTKYPTQSGKPPLLVSAPSKSESALSCLSKQKKKKTKKPKEPQPEQPQPSTSAN

SEQ ID NO: 22730 - protein, 859 aa, Homo sapiens
  Payload ID: 4573
  Gene Symbol: DDX24
  Gene Name: DEAD (Asp-Glu-Ala-Asp) box helicase 24
  Uniprot ID: Q9GZR7
  ENSP ID: ENSP00000481495
MKLKDTKSRPKQSSCGKFQTKGIKVVGKWKEVKIDPNMFADGQMDDLVCFEELTDYQLVSPAKNPSSLFSKEAPKRKAQAVSEEEEEEEGKSSSPKKKIKLKKSKNVATEGTSTQKEFEVKDPELEAQGDDMVCDDPEAGEMTSENLVQTAPKKKKNKGKKGLEPSQSTAAKVPKKAKTWIPEVHDQKADVSAWKDLFVPRPVLRALSFLGFSAPTPIQALTLAPAIRDKLDILGAAETGSGKTLAFAIPMIHAVLQWQKRNAAPPPSNTEAPPGETRTEAGAETRSPGKAEAESDALPDDTVIESEALPSDIAAEARAKTGGTVSDQALLFGDDDAGEGPSSLIREKPVPKQNENEEENLDKEQTGNLKQELDDKSATCKAYPKRPLLGLVLTPTRELAVQVKQHIDAVARFTGIKTAILVGGMSTQKQQRMLNRRPEIVVATPGRLWELIKEKHYHLRNLRQLRCLVVDEADRMVEKGHFAELSQLLEMLNDSQYNPKRQTLVFSATLTLVHQAPARILHKKHTKKMDKTAKLDLLMQKIGMRGKPKVIDLTRNEATVETLTETKIHCETDEKDFYLYYFLMQYPGRSLVFANSISCIKRLSGLLKVLDIMPLTLHACMHQKQRLRNLEQFARLEDCVLLATDVAARGLDIPKVQHVIHYQVPRTSEIYVHRSGRTARATNEGLSLMLIGPEDVINFKKIYKTLKKDEDIPLFPVQTKYMDVVKERIRLARQIEKSEYRNFQACLHNSWIEQAAAALEIELEEDMYKGGKADQQEERRRQKQMKVLKKELRHLLSQPLFTESQKTKYPTQSGKPPLLVSAPSKSESALSCLSKQKKKKTKKPKEPQPEQPQPSTSAN

SEQ ID NO: 22731 - protein, 859 aa, Homo sapiens; identical to SEQ ID NO: 22730
  Payload ID: 4573
  Gene Symbol: DDX24
  Gene Name: DEAD (Asp-Glu-Ala-Asp) box helicase 24
  Uniprot ID: Q9GZR7
  ENSP ID: ENSP00000482106

SEQ ID NO: 22732 - protein, 485 aa, Homo sapiens; identical to SEQ ID NO: 22729
  Payload ID: 4573
  Gene Symbol: DDX24
  Gene Name: DEAD (Asp-Glu-Ala-Asp) box helicase 24
  ENSP ID: ENSP00000484301

SEQ ID NO: 22733 - protein, 609 aa, Homo sapiens; identical to SEQ ID NO: 22725
  Payload ID: 4573
  Gene Symbol: DDX24
  Gene Name: DEAD (Asp-Glu-Ala-Asp) box helicase 24
  ENSP ID: ENSP00000486353

SEQ ID NO: 22734 - protein, 483 aa, Homo sapiens
  Payload ID: 4574
  Gene Symbol: DDX25
  Gene Name: DEAD (Asp-Glu-Ala-Asp) box helicase 25
  Uniprot ID: Q9UHL0
  ENSP ID: ENSP00000263576
MASLLWGGDAGAAESERLNSHFSNLSQPRKNLWGIKSTAVRNIDGSINNINEDDEEDVVDLAANSLLNKLIHQSLVESSHRVEVLQKDPSSPLYSVKTFEELRLKEELLKGIYAMGFNRPSKIQEMALPMMLAHPPQNLIAQSQSGTGKTAAFVLAMLSRVNALELFPQCLCLAPTYELALQTGRVVEQMGKFCVDVQVMYAIRGNRIPRGTDITKQIIIGTPGTVLDWCFKLKLIDLTKIRVFVLDEADVMIDTQGFSDHSIRIQRALPSECQMLLFSATFEDSVWHFAERIIPDPNVIKLRKEELTLNNIRQYYVLCEHRKDKYQALCNIYGSITIGQAIIFCQTRRNAKWLTVEMIQDGHQVSLLSGELTVEQRASIIQRFRDGKEKVLITTNVCARGIDVKQVTIVVNFDLPVKQGEEPDYETYLHRIGRTGRFGKKGLAFNMIEVDELPSLMKIQDHFNSSIKQLNAEDMDEIEKIDY

SEQ ID NO: 22735 - protein, 191 aa, Homo sapiens
  Payload ID: 4574
  Gene Symbol: DDX25
  Gene Name: DEAD (Asp-Glu-Ala-Asp) box helicase 25
  ENSP ID: ENSP00000432800
ASVRSGASDAGGEMREGFGRGPQRETPSPPPREFSNLSQPRKNLWGIKSTAVRNIDGSINNINEDDEEDVVDLAANSLLNKLIHQSLVESSHRVEVLQKDPSSPLYSVKTFEELRLKEELLKGIYAMGFNRPSKIQEMALPMMLAHPPQNLIAQSQSGTGKTAAFVLAMLSRVNALELFPQCLCLAPTYEL

SEQ ID NO: 22736 - protein, 407 aa, Homo sapiens
  Payload ID: 4574
  Gene Symbol: DDX25
  Gene Name: DEAD (Asp-Glu-Ala-Asp) box helicase 25
  ENSP ID: ENSP00000436087
  MOD_RES (1)..(1): Any amino acid
XLVDLAANSLLNKLIHQSLVESSHRVEVLQKDPSSPLYSVKTFEELRLKEELLKGIYAMGFNRPSKIQEMALPMMLAHPPQNLIAQSQSGTGKTAAFVLAMLSRVNALELFPQCLCLAPTYELALQTGRVVEQMGKFCVDVQVMYAIRGNRNWCFKLKLIDLTKIRVFVLDEADVMIDTQGFSDHSIRIQRALPSECQMLLFSATFEDSVWHFAERIIPDPNVIKLRKEELTLNNIRQYYVLCEHRKDKYQALCNIYGSITIGQAIIFCQTRRNAKWLTVEMIQDGHQVSLLSGELTVEQRASIIQRFRDGKEKVLITTNVCARGIDVKQVTIVVNFDLPVKQGEEPDYETYLHRIGRTGRFGKKGLAFNMIEVDELPSLMKIQDHFNSSIKQLNAEDMDEIEKIDY

SEQ ID NO: 22737 - protein, 468 aa, Homo sapiens
  Payload ID: 4574
  Gene Symbol: DDX25
  Gene Name: DEAD (Asp-Glu-Ala-Asp) box helicase 25
  ENSP ID: ENSP00000463333
IAAMASLLWGGDAGAAESERLNSHFSNLSQPRKNLWGIKSTAVRNIDGSINNINEDDEEDVVDLAANSLLNKLIHQSLVESSHRVEVLQKDPSSPLYSVKTFEELRLKEELLKGIYAMGFNRPSKIQEMALPMMLAHPPQNLIAQSQSGTGKTAAFVLAMLSRVNALELFPQCLCLAPTYELALQTGRVVEQMGKFCVDVQVMYAIRGNRIPRGTDITKQIIIGTPGTVLDWCFKLKLIDLTKIRVFVLDEADVMIDTQGFSDHSIRIQRALPSECQMLLFSATFEDSVWHFAERIIPDPNVIKLRKEELTLNNIRQYYVLCEHRKDKYQALCNIYGSITIGQAIIFCQTRRNAKWLTVEMIQDGHQVSLLSGELTVEQRASIIQRFRDGKEKVLITTNVCARGIDVKQVTIVVNFDLPVKQGEEPDYETYLHRIGRTGRFGKKGLAFNMIEVDELPSLMKIQDHFSK

SEQ ID NO: 22738 - protein, 67 aa, Homo sapiens
  Payload ID: 4574
  Gene Symbol: DDX25
  Gene Name: DEAD (Asp-Glu-Ala-Asp) box helicase 25
  ENSP ID: ENSP00000464251
  MOD_RES (1)..(1): Any amino acid
XGIDVKQVTIVVNFDLPVKQGEEPDYETYLHRIGRTGRFGKKGLAFNMIEVDELPSLMKIQDHFRKS

SEQ ID NO: 22739 - protein, 662 aa, Homo sapiens
  Payload ID: 4575
  Gene Symbol: DDX3X
  Gene Name: DEAD (Asp-Glu-Ala-Asp) box helicase 3, X-linked
  Uniprot ID: O00571
  ENSP ID: ENSP00000382840
MSHVAVENALGLDQQFAGLDLNSSDNQSGGSTASKGRYIPPHLRNREATKGFYDKDSSGWSSSKDKDAYSSFGSRSDSRGKSSFFSDRGSGSRGRFDDRGRSDYDGIGSRGDRSGFGKFERGGNSRWCDKSDEDDWSKPLPPSERLEQELFSGGNTGINFEKYDDIPVEATGNNCPPHIESFSDVEMGEIIMGNIELTRYTRPTPVQKHAIPIIKEKRDLMACAQTGSGKTAAFLLPILSQIYSDGPGEALRAMKENGRYGRRKQYPISLVLAPTRELAVQIYEEARKFSYRSRVRPCVVYGGADIGQQIRDLERGCHLLVATPGRLVDMMERGKIGLDFCKYLVLDEADRMLDMGFEPQIRRIVEQDTMPPKGVRHTMMFSATFPKEIQMLARDFLDEYIFLAVGRVGSTSENITQKVVWVEESDKRSFLLDLLNATGKDSLTLVFVETKKGADSLEDFLYHEGYACTSIHGDRSQRDREEALHQFRSGKSPILVATAVAARGLDISNVKHVINFDLPSDIEEYVHRIGRTGRVGNLGLATSFFNERNINITKDLLDLLVEAKQEVPSWLENMAYEHHYKGSSRGRSKSSRFSGGFGARDYRQSSGASSSSFSSSRASSSRSGGGGHGSSRGFGGGGYGGFYNSDGYGGNYNSQGVDWWGN

SEQ ID NO: 22740 - protein, 646 aa, Homo sapiens
  Payload ID: 4575
  Gene Symbol: DDX3X
  Gene Name: DEAD (Asp-Glu-Ala-Asp) box helicase 3, X-linked
  Uniprot ID: O00571
  ENSP ID: ENSP00000392494
MSHVAVENALGLDQQFAGLDLNSSDNQSGGSTASSFYDKDSSGWSSSKDKDAYSSFGSRSDSRGKSSFFSDRGSGSRGRFDDRGRSDYDGIGSRGDRSGFGKFERGGNSRWCDKSDEDDWSKPLPPSERLEQELFSGGNTGINFEKYDDIPVEATGNNCPPHIESFSDVEMGEIIMGNIELTRYTRPTPVQKHAIPIIKEKRDLMACAQTGSGKTAAFLLPILSQIYSDGPGEALRAMKENGRYGRRKQYPISLVLAPTRELAVQIYEEARKFSYRSRVRPCVVYGGADIGQQIRDLERGCHLLVATPGRLVDMMERGKIGLDFCKYLVLDEADRMLDMGFEPQIRRIVEQDTMPPKGVRHTMMFSATFPKEIQMLARDFLDEYIFLAVGRVGSTSENITQKVVWVEESDKRSFLLDLLNATGKDSLTLVFVETKKGADSLEDFLYHEGYACTSIHGDRSQRDREEALHQFRSGKSPILVATAVAARGLDISNVKHVINFDLPSDIEEYVHRIGRTGRVGNLGLATSFFNERNINITKDLLDLLVEAKQEVPSWLENMAYEHHYKGSSRGRSKSSRFSGGFGARDYRQSSGASSSSFSSSRASSSRSGGGGHGSSRGFGGGGYGGFYNSDGYGGNYNSQGVDWWGN

SEQ ID NO: 22741 - protein, 139 aa, Homo sapiens
  Payload ID: 4575
  Gene Symbol: DDX3X
  Gene Name: DEAD (Asp-Glu-Ala-Asp) box helicase 3, X-linked
  ENSP ID: ENSP00000414281
MSHVAVENALGLDQQFAGLDLNSSDNQSGGSTASKGRYIPPHLRNREATKGFYDKDSSGWSSSKDKDAYSSFGSRSDSRGKSSFFSDRGSGSRGRFDDRGRSDYDGIGSRGDRSGYGGFYNSDGYGGNYNSQGVDWWGN

SEQ ID NO: 22742 - protein, 662 aa, Homo sapiens; identical to SEQ ID NO: 22739
  Payload ID: 4575
  Gene Symbol: DDX3X
  Gene Name: DEAD (Asp-Glu-Ala-Asp) box helicase 3, X-linked
  Uniprot ID: O00571
  ENSP ID: ENSP00000478443

SEQ ID NO: 22743 - protein, 138 aa, Homo sapiens
  Payload ID: 4575
  Gene Symbol: DDX3X
  Gene Name: DEAD (Asp-Glu-Ala-Asp) box helicase 3, X-linked
  ENSP ID: ENSP00000479790
  MOD_RES (1)..(1): Any amino acid
XDIEEYVHRIGRTGRVGNLGLATSFFNERNINITKDLLDLLVEAKQEVPSWLENMAYEHHYKGSSRGRSKSSRFSGGFGARDYRQSSGASSSSFSSSRASSSRSGGGGHGSSRGFGGGSSRSQEEMKGTISSPVQKVV

SEQ ID NO: 22744 - protein, 98 aa, Homo sapiens
  Payload ID: 4575
  Gene Symbol: DDX3X
  Gene Name: DEAD (Asp-Glu-Ala-Asp) box helicase 3, X-linked
  ENSP ID: ENSP00000480647
MSHVAVENALGLDQQFAGLDLNSSDNQSGGSTASKGRYIPPHLRNREATKGFYDKDSSGWSSSKDKDAYSSFGSRSDSRGKSSFFSDRGSGSRGSVVN

SEQ ID NO: 22745 - protein, 733 aa, Homo sapiens
  Payload ID: 4575
  Gene Symbol: DDX3X
  Gene Name: DEAD (Asp-Glu-Ala-Asp) box helicase 3, X-linked
  ENSP ID: ENSP00000486306
MSHVAVENALGLDQQFAGLDLNSSDNQSGGSTASKGRYIPPHLRNREATKGFYDKDSSGWSSSKDKDAYSSFGSRSDSRGKSSFFSDRGSGSRGRFDDRGRSDYDGIGSRGDRSGFGKFERGGNSRWCDKSDEDDWSKPLPPSERLEQELFSGGNTGINFEKYDDIPVEATGNNCPPHIESFSDVEMGEIIMGNIELTRYTRPTPVQKHAIPIIKEKRDLMACAQTGSGKTAAFLLPILSQIYSDGPGEALRAMKENGRYGRRKQYPISLVLAPTRELAVQIYEEARKFSYRSRVRPCVVYGGADIGQQIRDLERGCHLLVATPGRLVDMMERGKIGLDFCKYLVLDEADRMLDMGFEPQIRRIVEQDTMPPKGVRHTMMFSATFPKEIQMLARDFLDEYIFLAVGRVGSTSENITQKVVWVEESDKRSFLLDLLNATGKDSLTLVFVETKKGADSLEDFLYHEGYACTSIHGDRSQRDREEALHQFRSGKSPILVATAVAARGLDISNVKHVINFDLPSDIEEYVHRIGRTGRVGNLGLATSFFNERNINITKDLLDLLVEAKQEVPSWLENMAYEHHYKGSSRGRSKSSRFSGGFGARDYRQSSGASSSSFSSSRASSSRSGGGGHGSSRGFGGGSSRSQEEMKGTISSPVQKDHAPLWSKCLHEMPYFVKKVHAGIFRSPACSHGSLRYLRPTNPPDEDNHNSCRHESNLERDAQKCVNWSVTTKMRTAC

SEQ ID NO: 22746 - protein, 640 aa, Homo sapiens
  Payload ID: 4575
  Gene Symbol: DDX3X
  Gene Name: DEAD (Asp-Glu-Ala-Asp) box helicase 3, X-linked
  ENSP ID: ENSP00000486443
MSHVAVENALGLDQQFAGLDLNSSDNQSGGSTASKGRYIPPHLRNREATKGFYDKDSSGWSSSKDKDAYSSFGSRSDSRGKSSFFSDRGSGSRGRFDDRGRSDYDGIGSRGDRSGFGKFERGGNSRWCDKSDEDDWSKPLPPSERLEQELFSGGNTGINFEKYDDIPVEATGNNCPPHIESFSDVEMGEIIMGNIELTRYTRPTPVQKHAIPIIKEKRDLMACAQTGSGKTAAFLLPILSQIYSDGPGEALRAMKENGRYGRRKQYPISLVLAPTRELAVQIYEEARKFSYRSRVRPCVVYGGADIGQQIRDLERGCHLLVATPGRLVDMMERGKIGLDFCKYLVLDEADRMLDMGFEPQIRRIVEQDTMPPKGVRHTMMFSATFPKEIQMLARDFLDEYIFLAVGRVGSTSENITQKVVWVEESDKRSFLLDLLNATGKDSLTLVFVETKKGADSLEDFLYHEGYACTSIHGDRSQRDREEALHQFRSGKSPILVATAVAARGLDISNVKHVINFDLPSDIEEYVHRIGRTGRVGNLGLATSFFNERNINITKDLLDLLVEAKQEVPSWLENMAYEHHYKGSSRGRSKSSRFSGGFGARDYRQSSGASSSSFSSSRASSSRSGGGGHGSSRGFGGELGA

SEQ ID NO: 22747 - protein, 647 aa, Homo sapiens
  Payload ID: 4575
  Gene Symbol: DDX3X
  Gene Name: DEAD (Asp-Glu-Ala-Asp) box helicase 3, X-linked
  ENSP ID: ENSP00000486514
MSHVAVENALGLDQQFAGLDLNSSDNQSGGSTASKGRYIPPHLRNREATKGFYDKDSSGWSSSKDKDAYSSFGSRSDSRGKSSFFSDRGSGSRGRFDDRGRSDYDGIGSRGDRSGFGKFERGGNSRWCDKSDEDDWSKPLPPSERLEQELFSGGNTGINFEKYDDIPVEATGNNCPPHIESFSDVEMGEIIMGNIELTRYTRPTPVQKHAIPIIKEKRDLMACAQTGSGKTAAFLLPILSQIYSDGPGEALRAMKENGRYGRRKQYPISLVLAPTRELAVQIYEEARKFSYRSRVRPCVVYGGADIGQQIRDLERGCHLLVATPGRLVDMMERGKIGLDFCKYLVLDEADRMLDMGFEPQIRRIVEQDTMPPKGVRHTMMFSATFPKEIQMLARDFLDEYIFLAVGRVGSTSENITQKVVWVEESDKRSFLLDLLNATGKDSLTLVFVETKKGADSLEDFLYHEGYACTSIHGDRSQRDREEALHQFRSGKSPILVATAVAARGLDISNVKHVINFDLPSDIEEYVHRIGRTGRVGNLGLATSFFNERNINITKDLLDLLVEAKQEVPSWLENMAYEHHYKGSSRGRSKSSRFSGGFGARDYRQSSGASSSSFSSSRASSSRSGGGGHGSSRGFGGGSCSSVEQVPP

SEQ ID NO: 22748 - protein, 662 aa, Homo sapiens; identical to SEQ ID NO: 22739
  Payload ID: 4575
  Gene Symbol: DDX3X
  Gene Name: DEAD (Asp-Glu-Ala-Asp) box helicase 3, X-linked
  Uniprot ID: O00571
  ENSP ID: ENSP00000486516

SEQ ID NO: 22749 - protein, 662 aa, Homo sapiens; identical to SEQ ID NO: 22739
  Payload ID: 4575
  Gene Symbol: DDX3X
  Gene Name: DEAD (Asp-Glu-Ala-Asp) box helicase 3, X-linked
  Uniprot ID: O00571
  ENSP ID: ENSP00000486720

SEQ ID NO: 22750 - protein, 647 aa, Homo sapiens; identical to SEQ ID NO: 22747
  Payload ID: 4575
  Gene Symbol: DDX3X
  Gene Name: DEAD (Asp-Glu-Ala-Asp) box helicase 3, X-linked
  ENSP ID: ENSP00000487062

SEQ ID NO: 22751 - protein, 662 aa, Homo sapiens; identical to SEQ ID NO: 22739
  Payload ID: 4575
  Gene Symbol: DDX3X
  Gene Name: DEAD (Asp-Glu-Ala-Asp) box helicase 3, X-linked
  Uniprot ID: O00571
  ENSP ID: ENSP00000487224

SEQ ID NO: 22752 - protein, 164 aa, Homo sapiens
  Payload ID: 4575
  Gene Symbol: DDX3X
  Gene Name: DEAD (Asp-Glu-Ala-Asp) box helicase 3, X-linked
  ENSP ID: ENSP00000487626
  MOD_RES (1)..(1): Any amino acid
XLHQFRSGKSPILVATAVAARGLDISNVKHVINFDLPSDIEEYVHRIGRTGRVGNLGLATSFFNERNINITKDLLDLLVEAKQEVPSWLENMAYEHHYKGSSRGRSKSRFSGGFGARDYRQSSGASSSSFSSSRASSSRSGGGGHGSSRGFGGGSCSSVEQVPP

SEQ ID NO: 22753 - protein, 164 aa, Homo sapiens
  Payload ID: 4575
  Gene Symbol: DDX3X
  Gene Name: DEAD (Asp-Glu-Ala-Asp) box helicase 3, X-linked
  ENSP ID: ENSP00000488854
MSHVAVENALGLDQQFAGLDLNSSDNQSGGSTASSFYDKDSSGWSSSKDKDAYSSFGSRSDSRGKSSFFSDRGSGSRGRFDDRGRSDYDGIGSRGDRSGFGKFERGGNSRWCDKSDEDDWSKPLPPSERLEQELFSGGNTGINFEKYDDIPVEATGNNCPPHIE

SEQ ID NO: 22754 - protein, 660 aa, Homo sapiens
  Payload ID: 4576
  Gene Symbol: DDX3Y
  Gene Name: DEAD (Asp-Glu-Ala-Asp) box helicase 3, Y-linked
  Uniprot ID: O15523
  ENSP ID: ENSP00000336725
MSHVVVKNDPELDQQLANLDLNSEKQSGGASTASKGRYIPPHLRNREASKGFHDKDSSGWSCSKDKDAYSSFGSRDSRGKPGYFSERGSGSRGRFDDRGRSDYDGIGNRERPGFGRFERSGHSRWCDKSVEDDWSKPLPPSERLEQELFSGGNTGINFEKYDDIPVEATGSNCPPHIENFSDIDMGEIIMGNIELTRYTRPTPVQKHAIPIIKGKRDLMACAQTGSGKTAAFLLPILSQIYTDGPGEALKAVKENGRYGRRKQYPISLVLAPTRELAVQIYEEARKFSYRSRVRPCVVYGGADIGQQIRDLERGCHLLVATPGRLVDMMERGKIGLDFCKYLVLDEADRMLDMGFEPQIRRIVEQDTMPPKGVRHTMMFSATFPKEIQMLARDFLDEYIFLAVGRVGSTSENITQKVVWVEDLDKRSFLLDILGATGSDSLTLVFVETKKGADSLEDFLYHEGYACTSIHGDRSQRDREEALHQFRSGKSPILVATAVAARGLDISNVRHVINFDLPSDIEEYVHRIGRTGRVGNLGLATSFFNEKNMNITKDLLDLLVEAKQEVPSWLENMAYEHHYKGGSRGRSKSNRFSGGFGARDYRQSSGSSSSGFGASRGSSSRSGGGGYGNSRGFGGGGYGGFYNSDGYGGNYNSQGVDWWGN

SEQ ID NO: 22755 - protein, 660 aa, Homo sapiens; identical to SEQ ID NO: 22754
  Payload ID: 4576
  Gene Symbol: DDX3Y
  Gene Name: DEAD (Asp-Glu-Ala-Asp) box helicase 3, Y-linked
  Uniprot ID: O15523
  ENSP ID: ENSP00000353284

SEQ ID NO: 22756 - protein, 224 aa, Homo sapiens
  Payload ID: 4576
  Gene Symbol: DDX3Y
  Gene Name: DEAD (Asp-Glu-Ala-Asp) box helicase 3, Y-linked
  ENSP ID: ENSP00000398953
MSHVVVKNDPELDQQLANLDLNSEKQSGGASTASKGRYIPPHLRNREASKGFHDKDSSGWSCSKDKDAYSSFGSRDSRGKPGYFSERGSGSRGRFDDRGRSDYDGIGNRERPGFGRFERSGHSRWCDKSVEDDWSKPLPPSERLEQELFSGGNTGINFEKYDDIPVEATGSNCPPHIENFSDIDMGEIIMGNIELTRYTRPTPVQKHAIPIIKGKRDLMACAQT

SEQ ID NO: 22757 - protein, 250 aa, Homo sapiens
  Payload ID: 4576
  Gene Symbol: DDX3Y
  Gene Name: DEAD (Asp-Glu-Ala-Asp) box helicase 3, Y-linked
  ENSP ID: ENSP00000400377
MEIGRPRKDTWKLANLDLNSEKQSGGASTASKGRYIPPHLRNREASKGFHDKDSSGWSCSKDKDAYSSFGSRDSRGKPGYFSERGSGSRGRFDDRGRSDYDGIGNRERPGFGRFERSGHSRWCDKSVEDDWSKPLPPSERLEQELFSGGNTGINFEKYDDIPVEATGSNCPPHIENFSDIDMGEIIMGNIELTRYTRPTPVQKHAIPIIKGKRDLMACAQTGSGKTAAFLLPILSQIYTDGPGEALKAVK

SEQ ID NO: 22758 - protein, 819 aa, Homo sapiens
  Payload ID: 4577
  Gene Symbol: DDX42
  Gene Name: DEAD (Asp-Glu-Ala-Asp) box helicase 42
  Uniprot ID: Q86XP3
  ENSP ID: ENSP00000352308
MAEVEDQAARDMKRLEEKDKERKNVKGIRDDIEEEDDQEAYFRYMAENPTAGVVQEEEEDNLEYDSDGNPIAPTKKIIDPLPPIDHSEIDYPPFEKNFYNEHEEITNLTPQQLIDLRHKLNLRVSGAAPPRPGSSFAHFGFDEQLMHQIRKSEYTQPTPIQCQGVPVALSGRDMIGIAKTGSGKTAAFIWPMLIHIMDQKELEPGDGPIAVIVCPTRELCQQIHAECKRFGKAYNLRSVAVYGGGSMWEQAKALQEGAEIVVCTPGRLIDHVKKKATNLQRVSYLVFDEADRMFDMGFEYQVRSIASHVRPDRQTLLFSATFRKKIEKLARDILIDPIRVVQGDIGEANEDVTQIVEILHSGPSKWNWLTRRLVEFTSSGSVLLFVTKKANAEELANNLKQEGHNLGLLHGDMDQSERNKVISDFKKKDIPVLVATDVAARGLDIPSIKTVINYDVARDIDTHTHRIGRTGRAGEKGVAYTLLTPKDSNFAGDLVRNLEGANQHVSKELLDLAMQNAWFRKSRFKGGKGKKLNIGGGGLGYRERPGLGSENMDRGNNNVMSNYEAYKPSTGAMGDRLTAMKAAFQSQYKSHFVAASLSNQKAGSSAAGASGWTSAGSLNSVPTNSAQQGHNSPDSPVTSAAKGIPGFGNTGNISGAPVTYPSAGAQGVNNTASGNNSREGTGGSNGKRERYTENRGSSRHSHGETGNRHSDSPRHGDGGRHGDGYRHPESSSRHTDGHRHGENRHGGSAGRHGENRGANDGRNGESRKEAFNRESKMEPKMEPKVDSSKMDKVDSKTDKTADGFAVPEPPKRKKSRWDS

SEQ ID NO: 22759 - protein, 938 aa, Homo sapiens
  Payload ID: 4577
  Gene Symbol: DDX42
  Gene Name: DEAD (Asp-Glu-Ala-Asp) box helicase 42
  Uniprot ID: Q86XP3
  ENSP ID: ENSP00000374574
MNWNKGGPGTKRGFGFGGFAISAGKKEEPKLPQQSHSAFGATSSSSGFGKSAPPQLPSFYKIGSKRANFDEENAYFEDEEEDSSNVDLPYIPAENSPTRQQFHSKPVDSDSDDDPLEAFMAEVEDQAARDMKRLEEKDKERKNVKGIRDDIEEEDDQEAYFRYMAENPTAGVVQEEEEDNLEYDSDGNPIAPTKKIIDPLPPIDHSEIDYPPFEKNFYNEHEEITNLTPQQLIDLRHKLNLRVSGAAPPRPGSSFAHFGFDEQLMHQIRKSEYTQPTPIQCQGVPVALSGRDMIGIAKTGSGKTAAFIWPMLIHIMDQKELEPGDGPIAVIVCPTRELCQQIHAECKRFGKAYNLRSVAVYGGGSMWEQAKALQEGAEIVVCTPGRLIDHVKKKATNLQRVSYLVFDEADRMFDMGFEYQVRSIASHVRPDRQTLLFSATFRKKIEKLARDILIDPIRVVQGDIGEANEDVTQIVEILHSGPSKWNWLTRRLVEFTSSGSVLLFVTKKANAEELANNLKQEGHNLGLLHGDMDQSERNKVISDFKKKDIPVLVATDVAARGLDIPSIKTVINYDVARDIDTHTHRIGRTGRAGEKGVAYTLLTPKDSNFAGDLVRNLEGANQHVSKELLDLAMQNAWFRKSRFKGGKGKKLNIGGGGLGYRERPGLGSENMDRGNNNVMSNYEAYKPSTGAMGDRLTAMKAAFQSQYKSHFVAASLSNQKAGSSAAGASGWTSAGSLNSVPTNSAQQGHNSPDSPVTSAAKGIPGFGNTGNISGAPVTYPSAGAQGVNNTASGNNSREGTGGSNGKRERYTENRGSSRHSHGETGNRHSDSPRHGDGGRHGDGYRHPESSSRHTDGHRHGENRHGGSAGRHGENRGANDGRNGESRKEAFNRESKMEPKMEPKVDSSKMDKVDSKTDKTADGFAVPEPPKRKKSRWDS

SEQ ID NO: 22760 - protein, 708 aa, Homo sapiens
  Payload ID: 4577
  Gene Symbol: DDX42
  Gene Name: DEAD (Asp-Glu-Ala-Asp) box helicase 42
  ENSP ID: ENSP00000390121
MAEVEDQAARDMKRLEEKDKERKNVKGIRDDIEEEDDQEAYFRYMAENPTAGVVQEEEEDNLEYDSDGNPIAPTKKIIDPLPPIDHSEIDYPPFEKNFYNEHEEITNLTPQQLIDLRHKLNLRVSGAAPPRPGSSFAHFGFDEQLMHQIRKSEYTQPTPIQCQGVPVALSGRDMIGIAKTGSGKTAAFIWPMLIHIMDQKELEPGDGPIAVIVCPTRELCQQIHAECKRFGKAYNLRSVAVYGGGSMWEQAKALQEGAEIVVCTPGRLIDHVKKKATNLQRVSYLVFDEADRMFDMGFEYQVRSIASHVRPDRQTLLFSATFRKKIEKLARDILIDPIRVVQGDIGEANEDVTQIVEILHSGPSKWNWLTRRLVEFTSSGSVLLFVTKKANAEELANNLKQEGHNLGLLHGDMDQSERNKVISDFKKKDIPVLVATDVAARGLDIPSIKTVINYDVARDIDTHTHRIGRTGRAGEKGVAYTLLTPKDSNFAGDLVRNLEGANQHVSKELLDLAMQNAWFRKSRFKGGKGKKLNIGGGGLGYRERPGLGSENMDRGNNNVMSNYEAYKPSTGAMGDRLTAMKAAFQSQYKSHFVAASLSNQKAGSSAAGASGWTSAGSLNSVPTNSAQQGHNSPDSPVTSAAKGIPGFGNTGNISGAPVTYPSAGAQGVNNTASGNNSREGTGGSNGKRERYTENRGSPSQSRRDWQSA

SEQ ID NO: 22761 - protein, 99 aa, Homo sapiens
  Payload ID: 4577
  Gene Symbol: DDX42
  Gene Name: DEAD (Asp-Glu-Ala-Asp) box helicase 42
  ENSP ID: ENSP00000461957
  MOD_RES (1)..(1): Any amino acid
XDPLEAFMAEVEDQAARDMKRLEEKDKERKNVKGIRDDIEEEDDQEAYFRYMAENPTAGVVQEEEEDNLEYDSDGNPIAPTKKIIDPLPPIDHSETNFE

SEQ ID NO: 22762 - protein, 70 aa, Homo sapiens
  Payload ID: 4577
  Gene Symbol: DDX42
  Gene Name: DEAD (Asp-Glu-Ala-Asp) box helicase 42
  ENSP ID: ENSP00000462174
  MOD_RES (1)..(1): Any amino acid
XQQFHSKPVDSDSDDDPLEAFMAEVEDQAARDMKRLEEKDKERKNVKKLIFDTWQKTQLLVWFRRKRKTI

SEQ ID NO: 22763 - protein, 159 aa, Homo sapiens
  Payload ID: 4577
  Gene Symbol: DDX42
  Gene Name: DEAD (Asp-Glu-Ala-Asp) box helicase 42
  ENSP ID: ENSP00000463038
MNWNKGGPGTKRGFGFGGFAISAGKKEEPKLPQQSHSAFGATSSSSGFGKSAPPQLPSFYKIGSKRANFDEENAYFEDEEEDSSNVDLPYIPAENSPTRQQFHSKPVDSDSDDDPLEAFMAEVEDQAARDMKRLEEKDKERKNVNVESSCAVWNSTLIC

SEQ ID NO: 22764 - protein, 938 aa, Homo sapiens; identical to SEQ ID NO: 22759
  Payload ID: 4577
  Gene Symbol: DDX42
  Gene Name: DEAD (Asp-Glu-Ala-Asp) box helicase 42
  Uniprot ID: Q86XP3
  ENSP ID: ENSP00000463561

SEQ ID NO: 22765 - protein, 938 aa, Homo sapiens; identical to SEQ ID NO: 22759
  Payload ID: 4577
  Gene Symbol: DDX42
  Gene Name: DEAD (Asp-Glu-Ala-Asp) box helicase 42
  Uniprot ID: Q86XP3
  ENSP ID: ENSP00000464050

SEQ ID NO: 22766 - protein, 104 aa, Homo sapiens
  Payload ID: 4577
  Gene Symbol: DDX42
  Gene Name: DEAD (Asp-Glu-Ala-Asp) box helicase 42
  ENSP ID: ENSP00000464232
MNWNKGGPGTKRGFGFGGFAISAGKKEEPKLPQQSHSAFGATSSSSGFGKSAPPQLPSFYKIGSKRANFDEENAYFEDEEEDSSNVDLPYIPAENSPTRQQFHS

SEQ ID NO: 22767 - protein, 614 aa, Homo sapiens
  Payload ID: 4578
  Gene Symbol: DDX5
  Gene Name: DEAD (Asp-Glu-Ala-Asp) box helicase 5
  Uniprot ID: P17844
  ENSP ID: ENSP00000225792
MSGYSSDRDRGRDRGFGAPRFGGSRAGPLSGKKFGNPGEKLVKKKWNLDELPKFEKNFYQEHPDLARRTAQEVETYRRSKEITVRGHNCPKPVLNFYEANFPANVMDVIARQNFTEPTAIQAQGWPVALSGLDMVGVAQTGSGKTLSYLLPAIVHINHQPFLERGDGPICLVLAPTRELAQQVQQVAAEYCRACRLKSTCIYGGAPKGPQIRDLERGVEICIATPGRLIDFLECGKTNLRRTTYLVLDEADRMLDMGFEPQIRKIVDQIRPDRQTLMWSATWPKEVRQLAEDFLKDYIHINIGALELSANHNILQIVDVCHDVEKDEKLIRLMEEIMSEKENKTIVFVETKRRCDELTRKMRRDGWPAMGIHGDKSQQERDWVLNEFKHGKAPILIATDVASRGLDVEDVKFVINYDYPNSSEDYIHRIGRTARSTKTGTAYTFFTPNNIKQVSDLISVLREANQAINPKLLQLVEDRGSGRSRGRGGMKDDRRDRYSAGKRGGFNTFRDRENYDRGYSSLLKRDFGAKTQNGVYSAANYTNGSFGSNFVSAGIQTSFRTGNPTGTYQNGYDSTQQYGSNVPNMHNGMNQQAYAYPATAAAPMIGYPMPTGYSQ

SEQ ID NO: 22768 - protein, 535 aa, Homo sapiens
  Payload ID: 4578
  Gene Symbol: DDX5
  Gene Name: DEAD (Asp-Glu-Ala-Asp) box helicase 5
  Uniprot ID: P17844
  ENSP ID: ENSP00000403085
MSGYSSDRDRGRDRGFGAPRFGGSRAGPLSGKKFGNPGEKLVKKKWNLDELPKFEKNFYQEHPDLARRTAQEVETYRRSKEITVRGDGPICLVLAPTRELAQQVQQVAAEYCRACRLKSTCIYGGAPKGPQIRDLERGVEICIATPGRLIDFLECGKTNLRRTTYLVLDEADRMLDMGFEPQIRKIVDQIRPDRQTLMWSATWPKEVRQLAEDFLKDYIHINIGALELSANHNILQIVDVCHDVEKDEKLIRLMEEIMSEKENKTIVFVETKRRCDELTRKMRRDGWPAMGIHGDKSQQERDWVLNEFKHGKAPILIATDVASRGLDVEDVKFVINYDYPNSSEDYIHRIGRTARSTKTGTAYTFFTPNNIKQVSDLISVLREANQAINPKLLQLVEDRGSGRSRGRGGMKDDRRDRYSAGKRGGFNTFRDRENYDRGYSSLLKRDFGAKTQNGVYSAANYTNGSFGSNFVSAGIQTSFRTGNPTGTYQNGYDSTQQYGSNVPNMHNGMNQQAYAYPATAAAPMIGYPMPTGYSQ

SEQ ID NO: 22769 - protein, 96 aa, Homo sapiens
  Payload ID: 4578
  Gene Symbol: DDX5
  Gene Name: DEAD (Asp-Glu-Ala-Asp) box helicase 5
  ENSP ID: ENSP00000440276
MSGYSSDRDRGRDRGFGAPRFGGSRAGPLSGKKFGNPGEKLVKKKWNLDELPKFEKNFYQEHPDLARRTAQMSWMLLQDRISLNPLLFKLRDGQLL

SEQ ID NO: 22770 - protein, 120 aa, Homo sapiens
  Payload ID: 4578
  Gene Symbol: DDX5
  Gene Name: DEAD (Asp-Glu-Ala-Asp) box helicase 5
  ENSP ID: ENSP00000462206
MSGYSSDRDRGRDRGFGAPRFGGSRAGPLSGKKFGNPGEKLVKKKWNLDELPKFEKNFYQEHPDLARRTAQEVETYRRSKEITVRGHNCPKPVLNFYEANFPANVMDVIARQNFTEPTAI

SEQ ID NO: 22771 - protein, 166 aa, Homo sapiens
  Payload ID: 4578
  Gene Symbol: DDX5
  Gene Name: DEAD (Asp-Glu-Ala-Asp) box helicase 5
  ENSP ID: ENSP00000462222
ERGDGPICLVLAPTRELAQQVQQVAAEYCRACRLKSTCIYGGAPKGPQIRDLERGVEICIATPGRLIDFLECGKTNLRRTTYLVLDEADRMLDMGFEPQIRKIVDQIRPDRQTLMWSATWPKEVRQLAEDFLKDYIHINIGALELSANHNILQIVDVCHDVEKDEK

SEQ ID NO: 22772 - protein, 614 aa, Homo sapiens
  Payload ID: 4578
  Gene Symbol: DDX5
  Gene Name: DEAD (Asp-Glu-Ala-Asp) box helicase 5
  ENSP ID: ENSP00000462885
MKAGRFEADEGTSVRFGAPRFGGSRAGPLSGKKFGNPGEKLVKKKWNLDELPKFEKNFYQEHPDLARRTAQEVETYRRSKEITVRGHNCPKPVLNFYEANFPANVMDVIARQNFTEPTAIQAQGWPVALSGLDMVGVAQTGSGKTLSYLLPAIVHINHQPFLERGDGPICLVLAPTRELAQQVQQVAAEYCRACRLKSTCIYGGAPKGPQIRDLERGVEICIATPGRLIDFLECGKTNLRRTTYLVLDEADRMLDMGFEPQIRKIVDQIRPDRQTLMWSATWPKEVRQLAEDFLKDYIHINIGALELSANHNILQIVDVCHDVEKDEKLIRLMEEIMSEKENKTIVFVETKRRCDELTRKMRRDGWPAMGIHGDKSQQERDWVLNEFKHGKAPILIATDVASRGLDVEDVKFVINYDYPNSSEDYIHRIGRTARSTKTGTAYTFFTPNNIKQVSDLISVLREANQAINPKLLQLVEDRGSGRSRGRGGMKDDRRDRYSAGKRGGFNTFRDRENYDRGYSSLLKRDFGAKTQNGVYSAANYTNGSFGSNFVSAGIQTSFRTGNPTGTYQNGYDSTQQYGSNVPNMHNGMNQQAYAYPATAAAPMIGYPMPTGYSQ

SEQ ID NO: 22773 - protein, 38 aa, Homo sapiens
  Payload ID: 4578
  Gene Symbol: DDX5
  Gene Name: DEAD (Asp-Glu-Ala-Asp) box helicase 5
  ENSP ID: ENSP00000463101
MDVIARQNFTEPTAIQAQGWPVALSGLDMVGVAQTGSG

SEQ ID NO: 22774 - protein, 44 aa, Homo sapiens
  Payload ID: 4578
  Gene Symbol: DDX5
  Gene Name: DEAD (Asp-Glu-Ala-Asp) box helicase 5
  ENSP ID: ENSP00000463168
MSGYSSDRDRGRDRGFGAPRFGGSRAGPLSGKKFGNPGEKLVKK

SEQ ID NO: 22775 - protein, 46 aa, Homo sapiens
  Payload ID: 4578
  Gene Symbol: DDX5
  Gene Name: DEAD (Asp-Glu-Ala-Asp) box helicase 5
  ENSP ID: ENSP00000463541
MDVIARQNFTEPTAIQAQGWPVALSGLDMVGVAQTGSGKTLSYLLP

SEQ ID NO: 22776 - protein, 10 aa, Homo sapiens
  Payload ID: 4578
  Gene Symbol: DDX5
  Gene Name: DEAD (Asp-Glu-Ala-Asp) box helicase 5
  ENSP ID: ENSP00000463903
MDVIARQNFT

SEQ ID NO: 22777 - protein, 99 aa, Homo sapiens
  Payload ID: 4578
  Gene Symbol: DDX5
  Gene Name: DEAD (Asp-Glu-Ala-Asp) box helicase 5
  ENSP ID: ENSP00000463975
MSGYSSDRDRGRDRGFGAPRFGGSRAGPLSGKKFGNPGEKLVKKKWNLDELPKFEKNFYQEHPDLARRTAQEVETYRRSKEITVRVWKNQSEKNNLPCP

SEQ ID NO: 22778 - protein, 52 aa, Homo sapiens
  Payload ID: 4578
  Gene Symbol: DDX5
  Gene Name: DEAD (Asp-Glu-Ala-Asp) box helicase 5
  ENSP ID: ENSP00000464064
MDVIARQNFTEPTAIQAQGWPVALSGLDMVGVAQTGSGKTLSYLLPAIVHIN

SEQ ID NO: 22779 - protein, 65 aa, Homo sapiens
  Payload ID: 4578
  Gene Symbol: DDX5
  Gene Name: DEAD (Asp-Glu-Ala-Asp) box helicase 5
  ENSP ID: ENSP00000464304
MDVIARQNFTEPTAIQAQGWPVALSGLDMVGVAQTGSGKTLSYLLPAIVHINHQPFLERGDGPIC

SEQ ID NO: 22780 - protein, 212 aa, Homo sapiens
  Payload ID: 4578
  Gene Symbol: DDX5
  Gene Name: DEAD (Asp-Glu-Ala-Asp) box helicase 5
  ENSP ID: ENSP00000464337
MSGYSSDRDRGRDRGFGAPRFGGSRAGPLSGKKFGNPGEKLVKKKWNLDELPKFEKNFYQEHPDLARRTAQEVETYRRSKEITVRGHNCPKPVLNFYEANFPANVMDVIARQNFTEPTAIQAQGWPVALSGLDMVGVAQTGSGKTLSYLLPAIVHINHQPFLERGDGPICLVLAPTRELAQQVQQVAAEYCRACRLKSTCIYGGAPKGPQIR

SEQ ID NO: 22781 - protein, 38 aa, Homo sapiens
  Payload ID: 4578
  Gene Symbol: DDX5
  Gene Name: DEAD (Asp-Glu-Ala-Asp) box helicase 5
  ENSP ID: ENSP00000464566
MSGYSSDRDRGRDRGKRWKHTEEARKLQLEVTTARSQF

SEQ ID NO: 22782 - protein, 31 aa, Homo sapiens
  Payload ID: 4578
  Gene Symbol: DDX5
  Gene Name: DEAD (Asp-Glu-Ala-Asp) box helicase 5
  ENSP ID: ENSP00000464587
MDVIARQNFTEPTAIQAQGWPVALSGLDMVG

SEQ ID NO: 22783 - protein, 153 aa, Homo sapiens
  Payload ID: 4578
  Gene Symbol: DDX5
  Gene Name: DEAD (Asp-Glu-Ala-Asp) box helicase 5
  ENSP ID: ENSP00000464659
  MOD_RES (1)..(1): Any amino acid
XRGVEICIATPGRLIDFLECGKTNLRRTTYLVLDEADRMLDMGFEPQIRKIVDQIRPDRQTLMWSATWPKEVRQLAEDFLKDYIHINIGALELSANHNILQIVDVCHDVEKDEKLIRLMEEIMSEKENKTIVFVETKRRCDELTRKMRRDGYV

SEQ ID NO: 22784 - protein, 16 aa, Homo sapiens
  Payload ID: 4578
  Gene Symbol: DDX5
  Gene Name: DEAD (Asp-Glu-Ala-Asp) box helicase 5
  ENSP ID: ENSP00000465791
MDVIARQNFTEPTAIQ

SEQ ID NO: 22785 - protein, 99 aa, Homo sapiens; identical to SEQ ID NO: 22777
  Payload ID: 4578
  Gene Symbol: DDX5
  Gene Name: DEAD (Asp-Glu-Ala-Asp) box helicase 5
  ENSP ID: ENSP00000485764

SEQ ID NO: 22786 - protein, 547 aa, Homo sapiens
  Payload ID: 4579
  Gene Symbol: DDX56
  Gene Name: DEAD (Asp-Glu-Ala-Asp) box helicase 56
  Uniprot ID: Q9NY93
  ENSP ID: ENSP00000258772
MEDSEALGFEHMGLDPRLLQAVTDLGWSRPTLIQEKAIPLALEGKDLLARARTGSGKTAAYAIPMLQLLLHRKATGPVVEQAVRGLVLVPTKELARQAQSMIQQLATYCARDVRVANVSAAEDSVSQRAVLMEKPDVVVGTPSRILSHLQQDSLKLRDSLELLVVDEADLLFSFGFEEELKSLLCHLPRIYQAFLMSATFNEDVQALKELILHNPVTLKLQESQLPGPDQLQQFQVVCETEEDKFLLLYALLKLSLIRGKSLLFVNTLERSYRLRLFLEQFSIPTCVLNGELPLRSRCHIISQFNQGFYDCVIATDAEVLGAPVKGKRRGRGPKGDKASDPEAGVARGIDFHHVSAVLNFDLPPTPEAYIHRAGRTARANNPGIVLTFVLPTEQFHLGKIEELLSGENRGPILLPYQFRMEEIEGFRYRCRDAMRSVTKQAIREARLKEIKEELLHSEKLKTYFEDNPRDLQLLRHDLPLHPAVVKPHLGHVPDYLVPPALRGLVRPHKKRKKLSSSCRKAKRAKSQNPLRSFKHKGKKFRPTAKPS

SEQ ID NO: 22787 - protein, 103 aa, Homo sapiens
  Payload ID: 4579
  Gene Symbol: DDX56
  Gene Name: DEAD (Asp-Glu-Ala-Asp) box helicase 56
  ENSP ID: ENSP00000388310
MEDSEALGFEHMGLDPRLLQAVTDLGWSRPTLIQEKAIPLALEGKDLLARARTGSGKTAAYAIPMLQLLLHRKASCADGEARCGSRDPISHIKPLAARQPETS

SEQ ID NO: 22788 - protein, 182 aa, Homo sapiens
  Payload ID: 4579
  Gene Symbol: DDX56
  Gene Name: DEAD (Asp-Glu-Ala-Asp) box helicase 56
  ENSP ID: ENSP00000390553
HLGKIEELLSGENRGPILLPYQFRMEEIEGFRYRCRDAMRSVTKQAIREARLKEIKEELLHSEKLKTYFEDNPRDLQLLRHDLPLHPAVVKPHLGHVPDYLVPPALRGLVRPHKKRKKLSSSCRKAKVRLLGTADSPRTPPNLLFCHHQNVEAPCPREGKRGCPREGKRGHPRTGPQKSGVG

SEQ ID NO: 22789 - protein, 375 aa, Homo sapiens
  Payload ID: 4579
  Gene Symbol: DDX56
  Gene Name: DEAD (Asp-Glu-Ala-Asp) box helicase 56
  ENSP ID: ENSP00000392139
MEDSEALGFEHMGLDPRLLQAVTDLGWSRPTLIQEKAIPLALEGKDLLARARTGSGKTAAYAIPMLQLLLHRKATGPVVEQAVRGLVLVPTKELARQAQSMIQQLATYCARDVRVANVSAAEDSVSQRAVLMEKPDVVVGTPSRILSHLQQDSLKLRDSLELLVVDEADLLFSFGFEEELKSLLCHLPRIYQAFLMSATFNEDVQALKELILHNPVTLKLQESQLPGPDQLQQFQVVCETEEDKFLLLYALLKLSLIRGKSLLFVNTLERSYRLRLFLEQFSIPTCVLNGELPLRSRCHIISQFNQGFYDCVIATDAEVLGAPVKGKRRGRGPKGDKASDPEAGVARGIDFHHVSAVLNFDLPPTPEAYIHRAGR

SEQ ID NO: 22790 - protein, 507 aa, Homo sapiens
  Payload ID: 4579
  Gene Symbol: DDX56
  Gene Name: DEAD (Asp-Glu-Ala-Asp) box helicase 56
  Uniprot ID: Q9NY93
  ENSP ID: ENSP00000393488
MEDSEALGFEHMGLDPRLLQAVTDLGWSRPTLIQEKAIPLALEGKDLLARARTGSGKTAAYAIPMLQLLLHRKATGPVVEQAVRGLVLVPTKELARQAQSMIQQLATYCARDVRVANVSAAEDSVSQRAVLMEKPDVVVGTPSRILSHLQQDSLKLRDSLELLVVDEADLLFSFGFEEELKSLLCHLPRIYQAFLMSATFNEDVQALKELILHNPVTLKLQESQLPGPDQLQQFQVVCETEEDKFLLLYALLKLSLIRGKSLLFVNTLERSYRLRLFLEQFSIPTCVLNGELPLRSRASDPEAGVARGIDFHHVSAVLNFDLPPTPEAYIHRAGRTARANNPGIVLTFVLPTEQFHLGKIEELLSGENRGPILLPYQFRMEEIEGFRYRCRDAMRSVTKQAIREARLKEIKEELLHSEKLKTYFEDNPRDLQLLRHDLPLHPAVVKPHLGHVPDYLVPPALRGLVRPHKKRKKLSSSCRKAKRAKSQNPLRSFKHKGKKFRPTAKPS

SEQ ID NO: 22791 - protein, 185 aa, Homo sapiens
  Payload ID: 4579
  Gene Symbol: DDX56
  Gene Name: DEAD (Asp-Glu-Ala-Asp) box helicase 56
  ENSP ID: ENSP00000402989
MEDSEALGFEHMGLDPRLLQAVTDLGWSRPTLIQEKAIPLALEGKDLLARARTGSGKTAAYAIPMLQLLLHRKATGPVVEQAVRGLVLVPTKELARQAQSMIQQLATYCARDVRVANVSAAEDSVSQRAVLMEKPDVVVGTPSRILSHLQQDSLKLRDSLELLVVDEADLLFSFGFEEELKSLLW

SEQ ID NO: 22792 - protein, 396 aa, Homo sapiens
  Payload ID: 4579
  Gene Symbol: DDX56
  Gene Name: DEAD (Asp-Glu-Ala-Asp) box helicase 56
  ENSP ID: ENSP00000411456
  MOD_RES (1)..(1): Any amino acid
XLARARTGSGKTAAYAIPMLQLLLHRKATGPVVEQAVRGLVLVPTKELARQAQSMIQQLATYCARDVRVANVSAAEDSVSQRAVLMEKPDVVVGTPSRILSHLQQDSLKLRDSLELLVVDEADLLFSFGFEEELKSLLCHLPRIYQAFLMSATFNEDVQALKELILHNPVTLKLQESQLPGPDQLQQFQVVCETEEDKFLLLYALLKLSLIRGKSLLFVNTLERSYRLRLFLEQFSIPTCVLNGELPLRSRCHIISQFNQGFYDCVIATDAEVLGAPVKGKRRGRGPKGDKASDPEAGVARGIDFHHVSAVLNFDLPPTPEAYIHRAGRTARANNPGIVLTFVLPTEQFHLGKIEELLSGENRGPILLPYQFRMEEIEGFRYRCRCPPPGCHALSD

SEQ ID NO: 22793 - protein, 483 aa, Homo sapiens
  Payload ID: 4580
  Gene Symbol: DDX6
  Gene Name: DEAD (Asp-Glu-Ala-Asp) box helicase 6
  Uniprot ID: P26196
  ENSP ID: ENSP00000433704
MSTARTENPVIMGLSSQNGQLRGPVKPTGGPGGGGTQTQQQMNQLKNTNTINNGTQQQAQSMTTTIKPGDDWKKTLKLPPKDLRIKTSDVTSTKGNEFEDYCLKRELLMGIFEMGWEKPSPIQEESIPIALSGRDILARAKNGTGKSGAYLIPLLERLDLKKDNIQAMVIVPTRELALQVSQICIQVSKHMGGAKVMATTGGTNLRDDIMRLDDTVHVVIATPGRILDLIKKGVAKVDHVQMIVLDEADKLLSQDFVQIMEDIILTLPKNRQILLYSATFPLSVQKFMNSHLQKPYEINLMEELTLKGVTQYYAYVTERQKVHCLNTLFSRLQINQSIIFCNSSQRVELLAKKISQLGYSCFYIHAKMRQEHRNRVFHDFRNGLCRNLVCTDLFTRGIDIQAVNVVINFDFPKLAETYLHRIGRSGRFGHLGLAINLITYDDRFNLKSIEEQLGTEIKPIPSNIDKSLYVAEYHSEPVEDEKP

SEQ ID NO: 22794 - protein, 483 aa, Homo sapiens; identical to SEQ ID NO: 22793
  Payload ID: 4580
  Gene Symbol: DDX6
  Gene Name: DEAD (Asp-Glu-Ala-Asp) box helicase 6
  Uniprot ID: P26196
  ENSP ID: ENSP00000442266

SEQ ID NO: 22795 - protein, 483 aa, Homo sapiens; identical to SEQ ID NO: 22793
  Payload ID: 4580
  Gene Symbol: DDX6
  Gene Name: DEAD (Asp-Glu-Ala-Asp) box helicase 6
  Uniprot ID: P26196
  ENSP ID: ENSP00000478754

SEQ ID NO: 22796 - protein, 187 aa, Homo sapiens [sequence omitted]

SEQ ID NO: 22797 - protein, 875 aa, Homo sapiens
  Payload ID: 4581
  Gene Symbol: DDX10
  Gene Name: DEAD (Asp-Glu-Ala-Asp) box polypeptide 10
  Uniprot ID: Q13206
  ENSP ID: ENSP00000314348
MGKTANSPGSGARPDPVRSFNRWKKKHSHRQNKKKQLRKQLKKPEWQVERESISRLMQNYEKINVNEITRFSDFPLSKKTLKGLQEAQYRLVTEIQKQTIGLALQGKDVLGAAKTGSGKTLAFLVPVLEALYRLQWTSTDGLGVLIISPTRELAYQTFEVLRKVGKNHDFSAGLIIGGKDLKHEAERINNINILVCTPGRLLQHMDETVSFHATDLQMLVLDEADRILDMGFADTMNAVIENLPKKRQTLLFSATQTKSVKDLARLSLKNPEYVWVHEKAKYSTPATLEQNYIVCELQQKISVLYSFLRSHLKKKSIVFFSSCKEVQYLYRVFCRLRPGVSILALHGRQQQMRRMEVYNEFVRKRAAVLFATDIAARGLDFPAVNWVLQFDCPEDANTYIHRAGRTARYKEDGEALLILLPSEKAMVQQLLQKKVPVKEIKINPEKLIDVQKKLESILAQDQDLKERAQRCFVSYVRSVYLMKDKEVFDVSKLPIPEYALSLGLAVAPRVRFLQKMQKQPTKELVRSQADKVIEPRAPSLTNDEVEEFRAYFNEKMSILQKGGKRLEGTEHRQDNDTGNEEQEEEEDDEEEMEEKLAKAKGSQAPSLPNTSEAQKIKEVPTQFLDRDEEEEDADFLKVKRHNVFGLDLKDEKTLQKKEPSKSSIKKKMTKVAEAKKVMKRNFKVNKKITFTDEGELVQQWPQMQKSAIKDAEEDDDTGGINLHKAKERLQEEDKFDKEEYRKKIKAKHREKRLKEREARREANKRQAKAKDEEEAFLDWSDDDDDDDDGFDPSTLPDPDKYRSSEDSDSEDMENKISDTKKKQGMKKRSNSEVEDVGPTSHNRKKARWDTLEPLDTGLSLAEDEELVLHLLRSQS

SEQ ID NO: 22798 - protein, 835 aa, Homo sapiens
  Payload ID: 4581
  Gene Symbol: DDX10
  Gene Name: DEAD (Asp-Glu-Ala-Asp) box polypeptide 10
  ENSP ID: ENSP00000432032
MGKTANSPGSGARPDPVRSFNRWKKKHSHRQNKKKQLRKQLKKPEWQVERESISRLMQNYEKINVNEITRFSDFPLSKKTLKGLQEAQYRLVTEIQKQTIGLALQGKDVLGAAKTGSGKTLAFLVPVLEALYRLQWTSTDGLGVLIISPTRELAYQTFEVLRKVGKNHDFSAGLIIGGKDLKHEAERINNINILVCTPGRLLQHMDETVSFHATDLQMLVLDEADRILDMGFADTMNAVIENLPKKRQTLLFSATQTKSVKDLARLSLKNPEYVWVHEKAKYSTPATLEQNYIVCELQQKISVLYSFLRSHLKKKSIVFFSSCKEVQYLYRVFCRLRPGVSILALHGRQQQMRRMEVYNEFVRKRAAVLFATDIAARGLDFPAVNWVLQFDCPEDANTYIHRAGRTARYKEDGEALLILLPSEKAMVQQLLQKKVPVKEIKINPEKLIDVQKKLESILAQDQDLKERAQRCFVSYVRSVYLMKDKEVFDVSKLPIPEYALSLGLAVAPRVRFLQKMQKQPTKELVRSQADKVIEPRAPSLTNDEVEEFRAYFNEKMSILQKGGKRLEGTEHRQDNDTGNEEQEEEEDDEEEMEEKLAKAKGSQAPSLPNTSEAQKIKEVPTQFLDRDEEEEDADFLKVKRHNVFGLDLKDEKTLQKKEPSKSSIKKKMTKVAEAKKVMKRNFKVNKKITFTDEGELVQQWPQMQKSAIKDAEEDDDTGGINLHKAKERLQEEDKFDKEEYRKKIKAKHREKRLKEREARREANKRQAKAKDEEEAFLDWSDDDDDDDDGFDPSTLPDPDKYRSSEDSDSEDMENKIRYVFTMGMKYILSTLTSVF

SEQ ID NO: 22799 - protein, 670 aa, Homo sapiens
  Payload ID: 4582
  Gene Symbol: DDX18
  Gene Name: DEAD (Asp-Glu-Ala-Asp) box polypeptide 18
  Uniprot ID: Q9NVP1
  ENSP ID: ENSP00000263239
MSHLPMKLLRKKIEKRNLKLRQRNLKFQGASNLTLSETQNGDVSEETMGSRKVKKSKQKPMNVGLSETQNGGMSQEAVGNIKVTKSPQKSTVLTNGEAAMQSSNSESKKKKKKKRKMVNDAEPDTKKAKTENKGKSEEESAETTKETENNVEKPDNDEDESEVPSLPLGLTGAFEDTSFASLCNLVNENTLKAIKEMGFTNMTEIQHKSIRPLLEGRDLLAAAKTGSGKTLAFLIPAVELIVKLRFMPRNGTGVLILSPTRELAMQTFGVLKELMTHHVHTYGLIMGGSNRSAEAQKLGNGINIIVATPGRLLDHMQNTPGFMYKNLQCLVIDEADRILDVGFEEELKQIIKLLPTRRQTMLFSATQTRKVEDLARISLKKEPLYVGVDDDKANATVDGLEQGYVVCPSEKRFLLLFTFLKKNRKKKLMVFFSSCMSVKYHYELLNYIDLPVLAIHGKQKQNKRTTTFFQFCNADSGTLLCTDVAARGLDIPEVDWIVQYDPPDDPKEYIHRVGRTARGLNGRGHALLILRPEELGFLRYLKQSKVPLSEFDFSWSKISDIQSQLEKLIEKNYFLHKSAQEAYKSYIRAYDSHSLKQIFNVNNLNLPQVALSFGFKVPPFVDLNVNSNEGKQKKRGGGGGFGYQKTKKVEKSKIFKHISKKSSDSRQFSH

SEQ ID NO: 22800 - protein, 214 aa, Homo sapiens
  Payload ID: 4582
  Gene Symbol: DDX18
  Gene Name: DEAD (Asp-Glu-Ala-Asp) box polypeptide 18
  ENSP ID: ENSP00000415604
NTPGFMYKNLQCLVIDEADRILDVGFEEELKQIIKLLPTRRQTMLFSATQTRKVEDLARISLKKEPLYVGVDDDKANATVDGLEQKNRKKKLMVFFSSCMSVKYHYELLNYIDLPVLAIHGKQKQNKRTTTFFQFCNADSGTLLCTDVAARGLDIPEVDWIVQYDPPDDPKEYIHRVGRTARGLNGRGHALLILRPEELGFLRYLKQSKVPLSE

SEQ ID NO: 22801 - protein, 478 aa, Homo sapiens
  Payload ID: 4583
  Gene Symbol: DDX19A
  Gene Name: DEAD (Asp-Glu-Ala-Asp) box polypeptide 19A
  Uniprot ID: Q9NUU7
  ENSP ID: ENSP00000306117
MATDSWALAVDEQEAAVKSMTNLQIKEEKVKADTNGIIKTSTTAEKTDEEEKEDRAAQSLLNKLIRSNLVDNTNQVEVLQRDPNSPLYSVKSFEELRLKPQLLQGVYAMGFNRPSKIQENALPMMLAEPPQNLIAQSQSGTGKTAAFVLAMLSRVEPSDRYPQCLCLSPTYELALQTGKVIEQMGKFYPELKLAYAVRGNKLERGQKISEQIVIGTPGTVLDWCSKLKFIDPKKIKVFVLDEADVMIATQGHQDQSIRIQRMLPRNCQMLLFSATFEDSVWKFAQKVVPDPNVIKLKREEETLDTIKQYYVLCSSRDEKFQALCNLYGAITIAQAMIFCHTRKTASWLAAELSKEGHQVALLSGEMMVEQRAAVIERFREGKEKVLVTTNVCARGIDVEQVSVVINFDLPVDKDGNPDNETYLHRIGRTGRFGKRGLAVNMVDSKHSMNILNRIQEHFNKKIERLDTDDLDEIEKIAN

SEQ ID NO: 22802 - protein, 447 aa, Homo sapiens
  Payload ID: 4583
  Gene Symbol: DDX19A
  Gene Name: DEAD (Asp-Glu-Ala-Asp) box polypeptide 19A
  ENSP ID: ENSP00000410243
MATDSWALAVDEQEAAVKSMTNLQIKEEKVKADTNGIIKTSTTAEKTDEEEKEDRAAQSLLNKLIRSNLVDNTNQVEVLQRDPNSPLYSVKSFEELRLPQNLIAQSQSGTGKTAAFVLAMLSRVEPSDRYPQCLCLSPTYELALQTGKVIEQMGKFYPELKLAYAVRGNKLERGQKISEQIVIGTPGTVLDWCSKLKFIDPKKIKVFVLDEADVMIATQGHQDQSIRIQRMLPRNCQMLLFSATFEDSVWKFAQKVVPDPNVIKLKREEETLDTIKQYYVLCSSRDEKFQALCNLYGAITIAQAMIFCHTRKTASWLAAELSKEGHQVALLSGEMMVEQRAAVIERFREGKEKVLVTTNVCARGIDVEQVSVVINFDLPVDKDGNPDNETYLHRIGRTGRFGKRGLAVNMVDSKHSMNILNRIQEHFNKKIERLDTDDLDEIEKIAN

SEQ ID NO: 22803 - protein, 47 aa, Homo sapiens
  Payload ID: 4583
  Gene Symbol: DDX19A
  Gene Name: DEAD (Asp-Glu-Ala-Asp) box polypeptide 19A
  ENSP ID: ENSP00000455134
MATDSWALAVDEQEAAVKSVLSKPVPLPRKQMKRRKRTELPSPYSTS

SEQ ID NO: 22804 - protein, 51 aa, Homo sapiens
  Payload ID: 4583
  Gene Symbol: DDX19A
  Gene Name: DEAD (Asp-Glu-Ala-Asp) box polypeptide 19A
  ENSP ID: ENSP00000455152
MATDSWALAVDEQEAAVKSRRGFSMLVRLVSNSRPQVIRPPRPPKVLGLQP

SEQ ID NO: 22805 - protein, 78 aa, Homo sapiens
  Payload ID: 4583
  Gene Symbol: DDX19A
  Gene Name: DEAD (Asp-Glu-Ala-Asp) box polypeptide 19A
  ENSP ID: ENSP00000456765
MATDSWALAVDEQEAAVKSMTNLQIKEEKVKADTNGIIKTSTTAEKTDEEEKGNHSFSRESMPWASIDPPRYKRTHYP

SEQ ID NO: 22806 - protein, 129 aa, Homo sapiens
  Payload ID: 4583
  Gene Symbol: DDX19A
  Gene Name: DEAD (Asp-Glu-Ala-Asp) box polypeptide 19A
  ENSP ID: ENSP00000457103
MATDSWALAVDEQEAAVKSMTNLQIKEEKVKADTNGIIKTSTTAEKTDEEEKEDRAAQSLLNKLIRSNLVDNTNQVEVLQRDPNSPLYSVKSFEELRLKPQLLQGVYAMGFNRPSKIQENALPMMLAEP

SEQ ID NO: 22807 - protein, 396 aa, Homo sapiens
  Payload ID: 4583
  Gene Symbol: DDX19A
  Gene Name: DEAD (Asp-Glu-Ala-Asp) box polypeptide 19A
  ENSP ID: ENSP00000460180
  MOD_RES (1)..(1): Any amino acid
XWLTGDFWMSGTFLIRKPQLLQGVYAMGFNRPSKIQENALPMMLAEPPQNLIAQSQSGTGKTAAFVLAMLSRVEPSDRYPQCLCLSPTYELALQTGKVIEQMGKFYPELKLAYAVRGNKLERGQKISEQIVIGTPGTVLDWCSKLKFIDPKKIKVFVLDEADVMIATQGHQDQSIRIQRMLPRNCQMLLFSATFEDSVWKFAQKVVPDPNVIKLKREEETLDTIKQYYVLCSSRDEKFQALCNLYGAITIAQAMIFCHTRKTASWLAAELSKEGHQVALLSGEMMVEQRAAVIERFREGKEKVLVTTNVCARGIDVEQVSVVINFDLPVDKDGNPDNETYLHRIGRTGRFGKRGLAVNMVDSKHSMNILNRIQEHFNKKIERLDTDDLDEIEKIAN

SEQ ID NO: 22808 - protein, 64 aa, Homo sapiens
  Payload ID: 4583
  Gene Symbol: DDX19A
  Gene Name: DEAD (Asp-Glu-Ala-Asp) box polypeptide 19A
  ENSP ID: ENSP00000464207
MATDSWALAVDEQEAAVKSMTNLQIKEEKVKADTNGIIKTSTTAEKTDEEEKVLTQQADQKQPC

SEQ ID NO: 22809 - protein, 479 aa, Homo sapiens
  Payload ID: 4584
  Gene Symbol: DDX19B
  Gene Name: DEAD (Asp-Glu-Ala-Asp) box polypeptide 19B
  Uniprot ID: Q9UMR2
  ENSP ID: ENSP00000288071
MATDSWALAVDEQEAAAESLSNLHLKEEKIKPDTNGAVVKTNANAEKTDEEEKEDRAAQSLLNKLIRSNLVDNTNQVEVLQRDPNSPLYSVKSFEELRLKPQLLQGVYAMGFNRPSKIQENALPLMLAEPPQNLIAQSQSGTGKTAAFVLAMLSQVEPANKYPQCLCLSPTYELALQTGKVIEQMGKFYPELKLAYAVRGNKLERGQKISEQIVIGTPGTVLDWCSKLKFIDPKKIKVFVLDEADVMIATQGHQDQSIRIQRMLPRNCQMLLFSATFEDSVWKFAQKVVPDPNVIKLKREEETLDTIKQYYVLCSSRDEKFQALCNLYGAITIAQAMIFCHTRKTASWLAAELSKEGHQVALLSGEMMVEQRAAVIERFREGKEKVLVTTNVCARGIDVEQVSVVINFDLPVDKDGNPDNETYLHRIGRTGRFGKRGLAVNMVDSKHSMNILNRIQEHFNKKIERLDTDDLDEIEKIAN

SEQ ID NO: 22810 - protein, 448 aa, Homo sapiens
  Payload ID: 4584
  Gene Symbol: DDX19B
  Gene Name: DEAD (Asp-Glu-Ala-Asp) box polypeptide 19B
  Uniprot ID: Q9UMR2
  ENSP ID: ENSP00000348271
MATDSWALAVDEQEAAAESLSNLHLKEEKIKPDTNGAVVKTNANAEKTDEEEKEDRAAQSLLNKLIRSNLVDNTNQVEVLQRDPNSPLYSVKSFEELRLPQNLIAQSQSGTGKTAAFVLAMLSQVEPANKYPQCLCLSPTYELALQTGKVIEQMGKFYPELKLAYAVRGNKLERGQKISEQIVIGTPGTVLDWCSKLKFIDPKKIKVFVLDEADVMIATQGHQDQSIRIQRMLPRNCQMLLFSATFEDSVWKFAQKVVPDPNVIKLKREEETLDTIKQYYVLCSSRDEKFQALCNLYGAITIAQAMIFCHTRKTASWLAAELSKEGHQVALLSGEMMVEQRAAVIERFREGKEKVLVTTNVCARGIDVEQVSVVINFDLPVDKDGNPDNETYLHRIGRTGRFGKRGLAVNMVDSKHSMNILNRIQEHFNKKIERLDTDDLDEIEKIAN

SEQ ID NO: 22811 - protein, 370 aa, Homo sapiens
  Payload ID: 4584
  Gene Symbol: DDX19B
  Gene Name: DEAD (Asp-Glu-Ala-Asp) box polypeptide 19B
  Uniprot ID: Q9UMR2
  ENSP ID: ENSP00000377267
MGFNRPSKIQENALPLMLAEPPQNLIAQSQSGTGKTAAFVLAMLSQVEPANKYPQCLCLSPTYELALQTGKVIEQMGKFYPELKLAYAVRGNKLERGQKISEQIVIGTPGTVLDWCSKLKFIDPKKIKVFVLDEADVMIATQGHQDQSIRIQRMLPRNCQMLLFSATFEDSVWKFAQKVVPDPNVIKLKREEETLDTIKQYYVLCSSRDEKFQALCNLYGAITIAQAMIFCHTRKTASWLAAELSKEGHQVALLSGEMMVEQRAAVIERFREGKEKVLVTTNVCARGIDVEQVSVVINFDLPVDKDGNPDNETYLHRIGRTGRFGKRGLAVNMVDSKHSMNILNRIQEHFNKKIERLDTDDLDEIEKIAN

SEQ ID NO: 22812 - protein, 453 aa, Homo sapiens
  Payload ID: 4584
  Gene Symbol: DDX19B
  Gene Name: DEAD (Asp-Glu-Ala-Asp) box polypeptide 19B
  Uniprot ID: Q9UMR2
  ENSP ID: ENSP00000392639
MAGAAGRVQDRALRRFPITLPVGDLSNLHLKEEKIKPDTNGAVVKTNANAEKTDEEEKEDRAAQSLLNKLIRSNLVDNTNQVEVLQRDPNSPLYSVKSFEELRLPQNLIAQSQSGTGKTAAFVLAMLSQVEPANKYPQCLCLSPTYELALQTGKVIEQMGKFYPELKLAYAVRGNKLERGQKISEQIVIGTPGTVLDWCSKLKFIDPKKIKVFVLDEADVMIATQGHQDQSIRIQRMLPRNCQMLLFSATFEDSVWKFAQKVVPDPNVIKLKREEETLDTIKQYYVLCSSRDEKFQALCNLYGAITIAQAMIFCHTRKTASWLAAELSKEGHQVALLSGEMMVEQRAAVIERFREGKEKVLVTTNVCARGIDVEQVSVVINFDLPVDKDGNPDNETYLHRIGRTGRFGKRGLAVNMVDSKHSMNILNRIQEHFNKKIERLDTDDLDEIEKIAN

SEQ ID NO: 22813 - protein, 233 aa, Homo sapiens
  Payload ID: 4584
  Gene Symbol: DDX19B
  Gene Name: DEAD (Asp-Glu-Ala-Asp) box polypeptide 19B
  ENSP ID: ENSP00000454495
MQLREKLSNLHLKEEKIKPDTNGAVVKTNANAEKTDEEEKEDRAAQSLLNKLIRSNLVDNTNQVEVLQRDPNSPLYSVKSFEELRLKPQLLQGVYAMGFNRPSKIQENALPLMLAEPPQNLIAQSQSGTGKTAAFVLAMLSQVEPANKYPQCLCLSPTYELALQTGKVIEQMGKFYPELKLAYAVRGNKLERGQKISEQIVIGTPGTVLDWCSKLKFIDPKKIKVFVLDEADV

SEQ ID NO: 22814 - protein, 32 aa, Homo sapiens
  Payload ID: 4584
  Gene Symbol: DDX19B
  Gene Name: DEAD (Asp-Glu-Ala-Asp) box polypeptide 19B
  ENSP ID: ENSP00000454571
MATDSWALAVDEQEAAAESPTELNCPISVWYW

SEQ ID NO: 22815 - protein, 30 aa, Homo sapiens
  Payload ID: 4584
  Gene Symbol: DDX19B
  Gene Name: DEAD (Asp-Glu-Ala-Asp) box polypeptide 19B
  ENSP ID: ENSP00000455193
MATDSWALAVDEQEAAAESRTELPSPYSTS

SEQ ID NO: 22816 - protein, 484 aa, Homo sapiens
  Payload ID: 4584
  Gene Symbol: DDX19B
  Gene Name: DEAD (Asp-Glu-Ala-Asp) box polypeptide 19B
  ENSP ID: ENSP00000455813
MAGAAGRVQDRALRRFPITLPVGDLSNLHLKEEKIKPDTNGAVVKTNANAEKTDEEEKEDRAAQSLLNKLIRSNLVDNTNQVEVLQRDPNSPLYSVKSFEELRLKPQLLQGVYAMGFNRPSKIQENALPLMLAEPPQNLIAQSQSGTGKTAAFVLAMLSQVEPANKYPQCLCLSPTYELALQTGKVIEQMGKFYPELKLAYAVRGNKLERGQKISEQIVIGTPGTVLDWCSKLKFIDPKKIKVFVLDEADVMIATQGHQDQSIRIQRMLPRNCQMLLFSATFEDSVWKFAQKVVPDPNVIKLKREEETLDTIKQYYVLCSSRDEKFQALCNLYGAITIAQAMIFCHTRKTASWLAAELSKEGHQVALLSGEMMVEQRAAVIERFREGKEKVLVTTNVCARGIDVEQVSVVINFDLPVDKDGNPDNETYLHRIGRTGRFGKRGLAVNMVDSKHSMNILNRIQEHFNKKIERLDTDDLDEIEKIAN

SEQ ID NO: 22817 - protein, 370 aa, Homo sapiens; identical to SEQ ID NO: 22811
  Payload ID: 4584
  Gene Symbol: DDX19B
  Gene Name: DEAD (Asp-Glu-Ala-Asp) box polypeptide 19B
  Uniprot ID: Q9UMR2
  ENSP ID: ENSP00000456574

SEQ ID NO: 22818 - protein, 370 aa, Homo sapiens; identical to SEQ ID NO: 22811
  Payload ID: 4584
  Gene Symbol: DDX19B
  Gene Name: DEAD (Asp-Glu-Ala-Asp) box polypeptide 19B
  Uniprot ID: Q9UMR2
  ENSP ID: ENSP00000456757

SEQ ID NO: 22819 - protein, 41 aa, Homo sapiens
  Payload ID: 4584
  Gene Symbol: DDX19B
  Gene Name: DEAD (Asp-Glu-Ala-Asp) box polypeptide 19B
  ENSP ID: ENSP00000457366
MATDSWALAVDEQEAAAESLSNLHLKEEKIKPDTNGLYKNF

SEQ ID NO: 22820 - protein, 48 aa, Homo sapiens
  Payload ID: 4584
  Gene Symbol: DDX19B
  Gene Name: DEAD (Asp-Glu-Ala-Asp) box polypeptide 19B
  ENSP ID: ENSP00000457633
MATDSWALAVDEQEAAAESVLLSRPMPMQRRQMKKRKRTELPSPYSTS

SEQ ID NO: 22821 - protein, 48 aa, Homo sapiens; identical to SEQ ID NO: 22820
  Payload ID: 4584
  Gene Symbol: DDX19B
  Gene Name: DEAD (Asp-Glu-Ala-Asp) box polypeptide 19B
  ENSP ID: ENSP00000459407

SEQ ID NO: 22822 - protein, 824 aa, Homo sapiens
  Payload ID: 4585
  Gene Symbol: DDX20
  Gene Name: DEAD (Asp-Glu-Ala-Asp) box polypeptide 20
  Uniprot ID: Q9UHI6
  ENSP ID: ENSP00000358716
MAAAFEASGALAAVATAMPAEHVAVQVPAPEPTPGPVRILRTAQDLSSPRTRTGDVLLAEPADFESLLLSRPVLEGLRAAGFERPSPVQLKAIPLGRCGLDLIVQAKSGTGKTCVFSTIALDSLVLENLSTQILILAPTREIAVQIHSVITAIGIKMEGLECHVFIGGTPLSQDKTRLKKCHIAVGSPGRIKQLIELDYLNPGSIRLFILDEADKLLEEGSFQEQINWIYSSLPASKQMLAVSATYPEFLANALTKYMRDPTFVRLNSSDPSLIGLKQYYKVVNSYPLAHKVFEEKTQHLQELFSRIPFNQALVFSNLHSRAQHLADILSSKGFPAECISGNMNQNQRLDAMAKLKHFHCRVLISTDLTSRGIDAEKVNLVVNLDVPLDWETYMHRIGRAGRFGTLGLTVTYCCRGEEENMMMRIAQKCNINLLPLPDPIPSGLMEECVDWDVEVKAAVHTYGIASVPNQPLKKQIQKIERTLQIQKAHGDHMASSRNNSVSGLSVKSKNNTKQKLPVKSHSECGIIEKATSPKELGCDRQSEEQMKNSVQTPVENSTNSQHQVKEALPVSLPQIPCLSSFKIHQPYTLTFAELVEDYEHYIKEGLEKPVEIIRHYTGPGDQTVNPQNGFVRNKVIEQRVPVLASSSQSGDSESDSDSYSSRTSSQSKGNKSYLEGSSDNQLKDSESTPVDDRISLEQPPNGSDTPNPEKYQESPGIQMKTRLKEGASQRAKQSRRNLPRRSSFRLQTEAQEDDWYDCHREIRLSFSDTYQDYEEYWRAYYRAWQEYYAAASHSYYWNAQRHPSWMAAYHMNTIYLQEMMHSNQ

SEQ ID NO: 22823 - protein, 138 aa, Homo sapiens
  Payload ID: 4585
  Gene Symbol: DDX20
  Gene Name: DEAD (Asp-Glu-Ala-Asp) box polypeptide 20
  Uniprot ID: Q9UHI6
  ENSP ID: ENSP00000434085
MAAAFEASGALAAVATAMPAEHVAVQVPAPEPTPGPVRILRTAQDLSSPRTRTGDVLLAEPADFESLLLSRPVLEGLRAAGFERPSPVQLKAIPLGRCGLDLIVQAKSGTGKTCVFSTIALDSLVLENLSTQAELSNS

SEQ ID NO: 22824 - protein, 432 aa, Homo sapiens [sequence omitted]

SEQ ID NO: 22825 - protein, 820 aa, Homo sapiens
  Payload ID: 4586
  Gene Symbol: DDX23
  Gene Name: DEAD (Asp-Glu-Ala-Asp) box polypeptide 23
  Uniprot ID: Q9BUQ8
  ENSP ID: ENSP00000310723
MAGELADKKDRDASPSKEERKRSRTPDRERDRDRDRKSSPSKDRKRHRSRDRRRGGSRSRSRSRSKSAERERRHKERERDKERDRNKKDRDRDKDGHRRDKDRKRSSLSPGRGKDFKSRKDRDSKKDEEDEHGDKKPKAQPLSLEELLAKKKAEEEAEAKPKFLSKAEREAEALKRRQQEVEERQRMLEEERKKRKQFQDLGRKMLEDPQERERRERRERMERETNGNEDEEGRQKIREEKDKSKELHAIKERYLGGIKKRRRTRHLNDRKFVFEWDASEDTSIDYNPLYKERHQVQLLGRGFIAGIDLKQQKREQSRFYGDLMEKRRTLEEKEQEEARLRKLRKKEAKQRWDDRHWSQKKLDEMTDRDWRIFREDYSITTKGGKIPNPIRSWKDSSLPPHILEVIDKCGYKEPTPIQRQAIPIGLQNRDIIGVAETGSGKTAAFLIPLLVWITTLPKIDRIEESDQGPYAIILAPTRELAQQIEEETIKFGKPLGIRTVAVIGGISREDQGFRLRMGCEIVIATPGRLIDVLENRYLVLSRCTYVVLDEADRMIDMGFEPDVQKILEHMPVSNQKPDTDEAEDPEKMLANFESGKHKYRQTVMFTATMPPAVERLARSYLRRPAVVYIGSAGKPHERVEQKVFLMSESEKRKKLLAILEQGFDPPIIIFVNQKKGCDVLAKSLEKMGYNACTLHGGKGQEQREFALSNLKAGAKDILVATDVAGRGIDIQDVSMVVNYDMAKNIEDYIHRIGRTGRAGKSGVAITFLTKEDSAVFYELKQAILESPVSSCPPELANHPDAQHKPGTILTKKRREETIFA

SEQ ID NO: 22826 - protein, 108 aa, Homo sapiens
  Payload ID: 4586
  Gene Symbol: DDX23
  Gene Name: DEAD (Asp-Glu-Ala-Asp) box polypeptide 23
  Uniprot ID: Q9BUQ8
  ENSP ID: ENSP00000446770
MAGELADKKDRDASPSKEERKRSRTPDRERDRDRDRKSSPSKDRKRHRSRDRRRGGSRSRSRSRSKSAERERRHKERERDKERDRNKKDRDRDKDGHRRDKDRKRSRH

SEQ ID NO: 22827 - protein, 138 aa, Homo sapiens
  Payload ID: 4586
  Gene Symbol: DDX23
  Gene Name: DEAD (Asp-Glu-Ala-Asp) box polypeptide 23
  ENSP ID: ENSP00000446948
MAGELADKKDRDASPSKEERKRSRTPDRERDRDRDRKSSPSKDRKRHRSRDRRRGGSRSRSRSRSKSAERERRHKERERDKERDRNKKDRDRDKDGHRRDKDRKRSSLSPGRGKDFKSRKDRDSKKDEEDEHGDKKPK

SEQ ID NO: 22828 - protein, 152 aa, Homo sapiens
  Payload ID: 4586
  Gene Symbol: DDX23
  Gene Name: DEAD (Asp-Glu-Ala-Asp) box polypeptide 23
  ENSP ID: ENSP00000448542
  MOD_RES (1)..(1): Any amino acid
XDYSITTKGGKIPNPIRSWKDSSLPPHILEVIDKCGYKEPTPIQRQAIPIGLQNRDIIGVAETGSGKTAAFLIPLLVWITTLPKIDRLECSGVILAYSNRCLPGSYPPTSASQVAGITGSKSQTKALMPSSWLPPVSWLNRLRKRPSSLGNR

SEQ ID NO: 22829 - protein, 182 aa, Homo sapiens
  Payload ID: 4586
  Gene Symbol: DDX23
  Gene Name: DEAD (Asp-Glu-Ala-Asp) box polypeptide 23
  ENSP ID: ENSP00000449639
MAGELADKKDRDASPSKEERKRSRTPDRERDRDRDRKSSPSKDRKRHRSRDRRRGGSRSRSRSRSKSAERERRHKERERDKERDRNKKDRDRDKDGHRRDKDRKRSSLSPGRGKDFKSRKDRDSKKDEEDEHGDKKPKAQPLSLEELLAKKKAEEEAEAKPKFLSKAEREAEALKRRQQEVE

SEQ ID NO: 22830 - protein, 259 aa, Homo sapiens
  Payload ID: 4586
  Gene Symbol: DDX23
  Gene Name: DEAD (Asp-Glu-Ala-Asp) box polypeptide 23
  ENSP ID: ENSP00000449657
AEAKPKFLSKAEREAEALKRRQQEVEERQRMLEEERKKRKQFQDLGRKMLEDPQERERRERRERMERETNGNEDEEGRQKIREEKDKSKELHAIKERYLGGIKKRRRTRHLNDRKFVFEWDASEDTSIDYNPLYKERHHPHQEAPGRDHLCLTQHSSCGLRASPKLPDACFSEPSHPSFQVLTLGIWGLRKTIQLPSPDPQVRRPACGAAKGEDDAVGGRESKLPQLLGPVLPFFALGLHWAISSCQAMGAASWHCSPD

SEQ ID NO: 22831 - protein, 796 aa, Homo sapiens
  Payload ID: 4587
  Gene Symbol: DDX27
  Gene Name: DEAD (Asp-Glu-Ala-Asp) box polypeptide 27
  Uniprot ID: Q96GQ7
  ENSP ID: ENSP00000360828
MVLAQRRRGGCEKLRAGPQAVLASGSGFCDNMLADLGLIGTIGEDDEVPVEPESDSGDEEEEGPIVLGRRQKALGKNRSADFNPDFVFTEKEGTYDGSWALADVMSQLKKKRAATTLDEKIEKVRKKRKTEDKEAKSGKLEKEKEAKEGSEPKEQEDLQENDEEGSEDEASETDYSSADENILTKADTLKVKDRKKKKKKGQEAGGFFEDASQYDENLSFQDMNLSRPLLKAITAMGFKQPTPIQKACIPVGLLGKDICACAATGTGKTAAFALPVLERLIYKPRQAPVTRVLVLVPTRELGIQVHSVTRQLAQFCNITTCLAVGGLDVKSQEAALRAAPDILIATPGRLIDHLHNCPSFHLSSIEVLILDEADRMLDEYFEEQMKEIIRMCSHHRQTMLFSATMTDEVKDLASVSLKNPVRIFVNSNTDVAPFLRQEFIRIRPNREGDREAIVAALLTRTFTDHVMLFTQTKKQAHRMHILLGLMGLQVGELHGNLSQTQRLEALRRFKDEQIDILVATDVAARGLDIEGVKTVINFTMPNTIKHYVHRVGRTARAGRAGRSVSLVGEDERKMLKEIVKAAKAPVKARILPQDVILKFRDKIEKMEKDVYAVLQLEAEEKEMQQSEAQINTAKRLLEKGKEAVVQEPERSWFQTKEERKKEKIAKALQEFDLALRGKKKRKKFMKDAKKKGEMTAEERSQFEILKAQMFAERLAKRNRRAKRARAMPEEEPVRGPAKKQKQGKKSVFDEELTNTSKKALKQYRAGPSFEERKQLGLPHQRRGGNFKSKSRYKRRK

SEQ ID NO: 22832 - protein, 169 aa, Homo sapiens
  Payload ID: 4587
  Gene Symbol: DDX27
  Gene Name: DEAD (Asp-Glu-Ala-Asp) box polypeptide 27
  ENSP ID: ENSP00000481808
MLADLGLIGTIGEDDEVPVEPESDSGDEEEEGPIVLGRRQKALGKNRSADFNPDFVFTEKEGTYDGSWALADVMSQLKKKRAATTLDEKIEKVRKKRKTEDKEAKSGKLEKEKEAKEGSEPKEQEDLQENDEEGSEDEASETDYSSADENILTKAGKLLHHAATKCPHL

SEQ ID NO: 22833 - protein, 765 aa, Homo sapiens
  Payload ID: 4587
  Gene Symbol: DDX27
  Gene Name: DEAD (Asp-Glu-Ala-Asp) box polypeptide 27
  ENSP ID: ENSP00000482680
MLADLGLIGTIGEDDEVPVEPESDSGDEEEEGPIVLGRRQKALGKNRSADFNPDFVFTEKEGTYDGSWALADVMSQLKKKRAATTLDEKIEKVRKKRKTEDKEAKSGKLEKEKEAKEGSEPKEQEDLQENDEEGSEDEASETDYSSADENILTKADTLKVKDRKKKKKKGQEAGGFFEDASQYDENLSFQDMNLSRPLLKAITAMGFKQPTPIQKACIPVGLLGKDICACAATGTGKTAAFALPVLERLIYKPRQAPVTRVLVLVPTRELGIQVHSVTRQLAQFCNITTCLAVGGLDVKSQEAALRAAPDILIATPGRLIDHLHNCPSFHLSSIEVLILDEADRMLDEYFEEQMKEIIRMCSHHRQTMLFSATMTDEVKDLASVSLKNPVRIFVNSNTDVAPFLRQEFIRIRPNREGDREAIVAALLTRTFTDHVMLFTQTKKQAHRMHILLGLMGLQVGELHGNLSQTQRLEALRRFKDEQIDILVATDVAARGLDIEGVKTVINFTMPNTIKHYVHRVGRTARAGRAGRSVSLVGEDERKMLKEIVKAAKAPVKARILPQDVILKFRDKIEKMEKDVYAVLQLEAEEKEMQQSEAQINTAKRLLEKGKEAVVQEPERSWFQTKEERKKEKIAKALQEFDLALRGKKKRKKFMKDAKKKGEMTAEERSQFEILKAQMFAERLAKRNRRAKRARAMPEEEPVRGPAKKQKQGKKSVFDEELTNTSKKALKQYRAGPSFEERKQLGLPHQRRGGNFKSKSRYKRRK

SEQ ID NO: 22834 - protein, 275 aa, Homo sapiens
  Payload ID: 4587
  Gene Symbol: DDX27
  Gene Name: DEAD (Asp-Glu-Ala-Asp) box polypeptide 27
  ENSP ID: ENSP00000483119
  MOD_RES (1)..(1): Any amino acid
XVKDRKKKKKKGQEAGGFFEDASQYDENLSFQDMNLSRPLLKAITAMGFKQPTPIQKACIPVGLLGKDICACAATGTGKTAAFALPVLERLIYKPRQAPVTRVLVLVPTRELGIQVHSVTRQLAQFCNITTCLAVGGLDVKSQEAALRAAPDILIATPGRLIDHLHNCPSFHLSSIEVLILDEADSPPVDTAWPHAPTLWLLHLPFPQPGAISCPFRMLDEYFEEQMKEIIRMCSHHRQTMLFSATMTDEVKDLASVSLKNPVRIFVNSNTDVAP

SEQ ID NO: 22835 - protein, 796 aa, Homo sapiens; identical to SEQ ID NO: 22831
  Payload ID: 4587
  Gene Symbol: DDX27
  Gene Name: DEAD (Asp-Glu-Ala-Asp) box polypeptide 27
  Uniprot ID: Q96GQ7
  ENSP ID: ENSP00000483495

SEQ ID NO: 22836 - protein, 540 aa, Homo sapiens
  Payload ID: 4588
  Gene Symbol: DDX28
  Gene Name: DEAD (Asp-Glu-Ala-Asp) box polypeptide 28
  Uniprot ID: Q9NUL7
  ENSP ID: ENSP00000332340
MALTRPVRLFSLVTRLLLAPRRGLTVRSPDEPLPVVRIPVALQRQLEQRQSRRRNLPRPVLVRPGPLLVSARRPELNQPARLTLGRWERAPLASQGWKSRRARRDHFSIERAQQEAPAVRKLSSKGSFADLGLEPRVLHALQEAAPEVVQPTTVQSSTIPSLLRGRHVVCAAETGSGKTLSYLLPLLQRLLGQPSLDSLPIPAPRGLVLVPSRELAQQVRAVAQPLGRSLGLLVRDLEGGHGMRRIRLQLSRQPSADVLVATPGALWKALKSRLISLEQLSFLVLDEADTLLDESFLELVDYILEKSHIAEGPADLEDPFNPKAQLVLVGATFPEGVGQLLNKVASPDAVTTITSSKLHCIMPHVKQTFLRLKGADKVAELVHILKHRDRAERTGPSGTVLVFCNSSSTVNWLGYILDDHKIQHLRLQGQMPALMRVGIFQSFQKSSRDILLCTDIASRGLDSTGVELVVNYDFPPTLQDYIHRAGRVGRVGSEVPGTVISFVTHPWDVSLVQKIELAARRRRSLPGLASSVKEPLPQAT

SEQ ID NO: 22837 - protein, 585 aa, Homo sapiens
  Payload ID: 4589
  Gene Symbol: DDX31
  Gene Name: DEAD (Asp-Glu-Ala-Asp) box polypeptide 31
  Uniprot ID: Q9H8H2
  ENSP ID: ENSP00000310539
MAPDLASQRHSESFPSVNSRPNVILPGREGRREGLPPGGGTRGSLVPTRPVPPSPAPLGTSPYSWSRSGPGRGGGAGSSRVPRGVPGPAVCAPGSLLHHASPTQTMAAADGSLFDNPRTFSRRPPAQASRQAKATKRKYQASSEAPPAKRRNETSFLPAKKTSVKETQRTFKGNAQKMFSPKKHSVSTSDRNQEERQCIKTSSLFKNNPDIPELHRPVVKQVQEKVFTSAAFHELGLHPHLISTINTVLKMSSMTSVQKQSIPVLLEGRDALVRSQTGSGKTLAYCIPVVQSLQAMESKIQRSDGPYALVLVPTRELALQSFDTVQKLLKPFTWIVPGVLMGGEKRKSEKARLRKGINILISTPGRLVDHIKSTKNIHFSRLRWLVFDEADRILDLGFEKDITVILNAVNAECQKRQNVLLSATLTEGVTRLADISLHDPVSISVLDKSHDQLNPKDKAVQEVCPPPAGDKLDSFAIPESLKQHVTVVPSKLRLVCLAAFILQKCKFEEDQKMVVFFSSCELVEFHYSLFLQTLLSSSGAPASGQLPSASMRLKFLRLHGGMEQEERTAVFQEFSHSRRGVLLCT

SEQ ID NO: 22838 - protein, 851 aa, Homo sapiens
  Payload ID: 4589
  Gene Symbol: DDX31
  Gene Name: DEAD (Asp-Glu-Ala-Asp) box polypeptide 31
  Uniprot ID: Q9H8H2
  ENSP ID: ENSP00000361226
MAPDLASQRHSESFPSVNSRPNVILPGREGRREGLPPGGGTRGSLVPTRPVPPSPAPLGTSPYSWSRSGPGRGGGAGSSRVPRGVPGPAVCAPGSLLHHASPTQTMAAADGSLFDNPRTFSRRPPAQASRQAKATKRKYQASSEAPPAKRRNETSFLPAKKTSVKETQRTFKGNAQKMFSPKKHSVSTSDRNQEERQCIKTSSLFKNNPDIPELHRPVVKQVQEKVFTSAAFHELGLHPHLISTINTVLKMSSMTSVQKQSIPVLLEGRDALVRSQTGSGKTLAYCIPVVQSLQAMESKIQRSDGPYALVLVPTRELALQSFDTVQKLLKPFTWIVPGVLMGGEKRKSEKARLRKGINILISTPGRLVDHIKSTKNIHFSRLRWLVFDEADRILDLGFEKDITVILNAVNAECQKRQNVLLSATLTEGVTRLADISLHDPVSISVLDKSHDQLNPKDKAVQEVCPPPAGDKLDSFAIPESLKQHVTVVPSKLRLVCLAAFILQKCKFEEDQKMVVFFSSCELVEFHYSLFLQTLLSSSGAPASGQLPSASMRLKFLRLHGGMEQEERTAVFQEFSHSRRGVLLCTDVAARGLDLPQVTWIVQYNAPSSPAEYIHRIGRTARIGCHGSSLLILAPSEAEYVNSLASHKINVSEIKMEDILCVLTRDDCFKGKRWGAQKSHAVGPQEIRERATVLQTVFEDYVHSSERRVSWAKKALQSFIQAYATYPRELKHIFHVRSLHLGHVAKSFGLRDAPRNLSALTRKKRKAHVKRPDLHKKTQSKHSLAEILRSEYSSGMEADIAKVKKQNAPGEPGGRPLQHSLQPTPCFGRGKTLKWRKTQKGVQRDSKTSQKV

SEQ ID NO: 22839 - protein, 851 aa, Homo sapiens; identical to SEQ ID NO: 22838
  Payload ID: 4589
  Gene Symbol: DDX31
  Gene Name: DEAD (Asp-Glu-Ala-Asp) box polypeptide 31
  Uniprot ID: Q9H8H2
  ENSP ID: ENSP00000361232

SEQ ID NO: 22840 - protein, 746 aa, Homo sapiens
  Payload ID: 4589
  Gene Symbol: DDX31
  Gene Name: DEAD (Asp-Glu-Ala-Asp) box polypeptide 31
  ENSP ID: ENSP00000387730
MAAADGSLFDNPRTFSRRPPAQASRQAKATKRKYQASSEAPPAKRRNETSFLPAKKTSVKETQRTFKGNAQKMFSPKKHSVSTSDRNQEERQCIKTSSLFKNNPDIPELHRPVVKQVQEKVFTSAAFHELGLHPHLISTINTVLKMSSMTSVQKQSIPVLLEGRDALVRSQTGSGKTLAYCIPVVQSLQAMESKIQRSDGPYALVLVPTRELALQSFDTVQKLLKPFTWIVPGVLMGGEKRKSEKARLRKGINILISTPGRLVDHIKSTKNIHFSRLRWLVFDEADRILDLGFEKDITVILNAVNAECQKRQNVLLSATLTEGVTRLADISLHDPVSISVLDKSHDQLNPKDKAVQEVCPPPAGDKLDSFAIPESLKQHVTVVPSKLRLVCLAAFILQKCKFEEDQKMVVFFSSCELVEFHYSLFLQTLLSSSGAPASGQLPSASMRLKFLRLHGGMEQEERTAVFQEFSHSRRGVLLCTDVAARGLDLPQVTWIVQYNAPSSPAEYIHRIGRTARIGCHGSSLLILAPSEAEYVNSLASHKINVSEIKMEDILCVLTRDDCFKGKRWGAQKSHAVGPQEIRERATVLQTVFEDYVHSSERRVSWAKKALQSFIQAYATYPRELKHIFHVRSLHLGHVAKSFGLRDAPRNLSALTRKKRKAHVKRPDLHKKTQSKHSLAEILRSEYSSGMEADIAKVKKQNAPGEPGGRPLQHSLQPTPCFGRGKTLKWRKTQKGVQRDSKTSQKV

SEQ ID NO: 22841 - protein, 319 aa, Homo sapiens
  Payload ID: 4589
  Gene Symbol: DDX31
  Gene Name: DEAD (Asp-Glu-Ala-Asp) box polypeptide 31
  Uniprot ID: Q9H8H2
  ENSP ID: ENSP00000479697
MAPDLASQRHSESFPSVNSRPNVILPGREGRREGLPPGGGTRGSLVPTRPVPPSPAPLGTSPYSWSRSGPGRGGGAGSSRVPRGVPGPAVCAPGSLLHHASPTQTMAAADGSLFDNPRTFSRRPPAQASRQAKATKRKYQASSEAPPAKRRNETSFLPAKKTSVKETQRTFKGNAQKMFSPKKHSVSTSDRNQEERQCIKTSSLFKNNPDIPELHRPVVKQVQEKVFTSAAFHELGLHPHLISTINTVLKMSSMTSVQKQSIPVLLEGRDALVRSQTGSGKTLAYCIPVVQSLQAMESKIQVLLLSTFYEEEQRLRKVK

SEQ ID NO: 22842 - protein, 427 aa, Homo sapiens
  Payload ID: 4590
  Gene Symbol: DDX39A
  Gene Name: DEAD (Asp-Glu-Ala-Asp) box polypeptide 39A
  Uniprot ID: O00148
  ENSP ID: ENSP00000242776
MAEQDVENDLLDYDEEEEPQAPQESTPAPPKKDIKGSYVSIHSSGFRDFLLKPELLRAIVDCGFEHPSEVQHECIPQAILGMDVLCQAKSGMGKTAVFVLATLQQIEPVNGQVTVLVMCHTRELAFQISKEYERFSKYMPSVKVSVFFGGLSIKKDEEVLKKNCPHVVVGTPGRILALVRNRSFSLKNVKHFVLDECDKMLEQLDMRRDVQEIFRLTPHEKQCMMFSATLSKDIRPVCRKFMQDPMEVFVDDETKLTLHGLQQYYVKLKDSEKNRKLFDLLDVLEFNQVIIFVKSVQRCMALAQLLVEQNFPAIAIHRGMAQEERLSRYQQFKDFQRRILVATNLFGRGMDIERVNIVFNYDMPEDSDTYLHRVARAGRFGTKGLAITFVSDENDAKILNDVQDRFEVNVAELPEEIDISTYIEQSR

SEQ ID NO: 22843 - protein, 322 aa, Homo sapiens
  Payload ID: 4590
  Gene Symbol: DDX39A
  Gene Name: DEAD (Asp-Glu-Ala-Asp) box polypeptide 39A
  Uniprot ID: O00148
  ENSP ID: ENSP00000322749
MAEQDVENDLLDYDEEEEPQAPQESTPAPPKKDIKGSYVSIHSSGFRDFLLKPELLRAIVDCGFEHPSEVQHECIPQAILGMDVLCQAKSGMGKTAVFVLATLQQIEPVNGQVTVLVMCHTRELAFQISKEYERFSKYMPSVKVSVFFGGLSIKKDEEVLKKNCPHVVVGTPGRILALVRNRSFSLKNVKHFVLDECDKMLEQLDMRRDVQEIFRLTPHEKQCMMFSATLSKDIRPVCRKFMQDPMEVFVDDETKLTLHGLQQYYVKLKDSEKNRKLFDLLDVLEFNQPVTLSAVQGFPAADPGGHQSVWPGDGHRASQHRL

SEQ ID NO: 22844 - protein, 267 aa, Homo sapiens
  Payload ID: 4590
  Gene Symbol: DDX39A
  Gene Name: DEAD (Asp-Glu-Ala-Asp) box polypeptide 39A
  Uniprot ID: O00148
  ENSP ID: ENSP00000392929
MAEQDVENDLLDYDEEEEPQAPQESTPAPPKKDIKGSYVSIHSSGFRDFLLKPELLRAIVDCGFEHPSEVQHECIPQAILGMDVLCQAKSGMGKTAVFVLATLQQIEPVNGQVTVLVMCHTRELAFQISKEYERFSKYMPSVKVSVFFGGLSIKKDEEVLKKNCPHVVVGTPGRILALVRNRSFSLKNVKHFVLDECDKMLEQLDMRRDVQEIFRLTPHEKQCMMFSATLSKDIRPVCRKFMQDVLWEVSHKGVAHWKVLGRRDAQR

SEQ ID NO: 22845 - protein, 125 aa, Homo sapiens
  Payload ID: 4590
  Gene Symbol: DDX39A
  Gene Name: DEAD (Asp-Glu-Ala-Asp) box polypeptide 39A
  ENSP ID: ENSP00000464801
MAEQDVENDLLDYDEEEEPQAPQESTPAPPKKDIKGSYVSIHSSGFRDFLLKPELLRAIVDCGFEHPSEVQHECIPQAILGMDVLCQAKSGMGKTAVFVLATLQQIEPVNGQVTVLVMCHTRELA

SEQ ID NO: 22846 - protein, 108 aa, Homo sapiens
  Payload ID: 4590
  Gene Symbol: DDX39A
  Gene Name: DEAD (Asp-Glu-Ala-Asp) box polypeptide 39A
  ENSP ID: ENSP00000465926
MAEQDVENDLLDYDEEEEPQAPQESTPAPPKKDIKGSYVSIHSSGFRDFLLKPELLRAIVDCGFEHPSEVQHECIPQAILGMDVLCQAKSGMGKTAVFVLATLQQIEP

SEQ ID NO: 22847 - protein, 130 aa, Homo sapiens
  Payload ID: 4590
  Gene Symbol: DDX39A
  Gene Name: DEAD (Asp-Glu-Ala-Asp) box polypeptide 39A
  ENSP ID: ENSP00000466810
MAEQDVENDLLDYDEEEEPQAPQESTPAPPKKDIKGSYVSIHSSGFRDFLLKPELLRAIVDCGFEHPSEVQHECIPQAILGMDVLCQAKSGMGKTAVFVLATLQQIEPVNGQVTVLVMCHTRELAFQISK

SEQ ID NO: 22848 - protein, 92 aa, Homo sapiens
  Payload ID: 4590
  Gene Symbol: DDX39A
  Gene Name: DEAD (Asp-Glu-Ala-Asp) box polypeptide 39A
  ENSP ID: ENSP00000467040
MAEQDVENDLLDYDEEEEPQAPQESTPAPPKKDIKGSYVSIHSSGFRDFLLKPELLRAIVDCGFEHPSEVQHECIPQAILGMDVLCQAKSGM

SEQ ID NO: 22849 - protein, 189 aa, Homo sapiens
  Payload ID: 4590
  Gene Symbol: DDX39A
  Gene Name: DEAD (Asp-Glu-Ala-Asp) box polypeptide 39A
  ENSP ID: ENSP00000467411
  MOD_RES (1)..(1): Any amino acid
XDEEEEPQAPQESTPAPPKKDIKGSYVSIHSSGFRDFLLKPELLRAIVDCGFEHPSEVQHECIPQAILGMDVLCQAKSGMGKTAVFVLATLQQIEPVNGQVTVLVMCHTRELAFQISKEYERFSKYMPSVKDEEVLKKNCPHVVVGTPGRILALVRNRSFSLKNVKHFVLDECDKMLEQLDMRRDVQEI

SEQ ID NO: 22850 - protein, 267 aa, Homo sapiens; identical to SEQ ID NO: 22844
  Payload ID: 4590
  Gene Symbol: DDX39A
  Gene Name: DEAD (Asp-Glu-Ala-Asp) box polypeptide 39A
  Uniprot ID: O00148
  ENSP ID: ENSP00000467862

SEQ ID NO: 22851 - protein, 255 aa, Homo sapiens
  Payload ID: 4590
  Gene Symbol: DDX39A
  Gene Name: DEAD (Asp-Glu-Ala-Asp) box polypeptide 39A
  ENSP ID: ENSP00000467911
MAEQDVENDLLDYDEEEEPQAPQESTPAPPKKDIKGSYVSIHSSGFRDFLLKPELLRAIVDCGFEHPSEGSRPSRSASPAVQHECIPQAILGMDVLCQAKSGMGKTAVFVLATLQQIEPVNGQVTVLVMCHTRELAFQISKEYERFSKYMPSVKVSVFFGGLSIKKDEEVLKKNCPHVVVGTPGRILALVRNRSFSLKNVKHFVLDECDKMLEQLDMRRDVQEIFRLTPHEKQCMMFSATLSKDIRPVCRKFMQD

SEQ ID NO: 22852 - protein, 96 aa, Homo sapiens
  Payload ID: 4590
  Gene Symbol: DDX39A
  Gene Name: DEAD (Asp-Glu-Ala-Asp) box polypeptide 39A
  ENSP ID: ENSP00000485838
VTVLVMCHTRELAFQISKEYERFSKYMPSVKVSVFFGGLSIKKDEEVLKKNCPHVVVGTPGRILALVRNRSFSLKNVKHFVLDECDKMLEQLGSPP

SEQ ID NO: 22853 - protein, 425 aa, Homo sapiens
  Payload ID: 4591
  Gene Symbol: DDX39B
  Gene Name: DEAD (Asp-Glu-Ala-Asp) box polypeptide 39B
  ENSP ID: ENSP00000365347
MAENDVDNELLDYEDDEVETAAGGDGAEAPAKKDVKGSYVSIHSSGFRDFLLKPELLRAIVDCGFEHPSEVQHECIPQAILGMDVLCQAKSGMGKTAVFVLATLQQLEPVTGQVSVLVMCHTRELAFQISKEYERFSKYMPNVKVAVFFGGLSIKKDEEVLKKNCPHIVVGTPGRILALARNKSLNLKHIKHFILDECDKMLEQLDMRRDVQEIFRMTPHEKQVMMFSATLSKEIRPVCRKFMQDPMEIFVDDETKLTLHGLQQYYVKLKDNEKNRKLFDLLDVLEFNQVVIFVKSVQRCIALAQLLVEQNFPAIAIHRGMPQEERLSRYQQFKDFQRRILVATNLFGRGMDIERVNIAFNYDMPEDSDTYLHRCYPLSPSRWPEQAGLAPRAWLSHLCPMRMMPRSSMMCRIALRSILVSCLMR

SEQ ID NO: 22854 - protein, 428 aa, Homo sapiens
  Payload ID: 4591
  Gene Symbol: DDX39B
  Gene Name: DEAD (Asp-Glu-Ala-Asp) box polypeptide 39B
  Uniprot ID: Q13838
  ENSP ID: ENSP00000373000
MAENDVDNELLDYEDDEVETAAGGDGAEAPAKKDVKGSYVSIHSSGFRDFLLKPELLRAIVDCGFEHPSEVQHECIPQAILGMDVLCQAKSGMGKTAVFVLATLQQLEPVTGQVSVLVMCHTRELAFQISKEYERFSKYMPNVKVAVFFGGLSIKKDEEVLKKNCPHIVVGTPGRILALARNKSLNLKHIKHFILDECDKMLEQLDMRRDVQEIFRMTPHEKQVMMFSATLSKEIRPVCRKFMQDPMEIFVDDETKLTLHGLQQYYVKLKDNEKNRKLFDLLDVLEFNQVVIFVKSVQRCIALAQLLVEQNFPAIAIHRGMPQEERLSRYQQFKDFQRRILVATNLFGRGMDIERVNIAFNYDMPEDSDTYLHRVARAGRFGTKGLAITFVSDENDAKILNDVQDRFEVNISELPDEIDISSYIEQTR

SEQ ID NO: 22855 - protein, 428 aa, Homo sapiens; identical to SEQ ID NO: 22854
  Payload ID: 4591
  Gene Symbol: DDX39B
  Gene Name: DEAD (Asp-Glu-Ala-Asp) box polypeptide 39B
  Uniprot ID: Q13838
  ENSP ID: ENSP00000379475

SEQ ID NO: 22856 - protein, 425 aa, Homo sapiens; identical to SEQ ID NO: 22853
  Payload ID: 4591
  Gene Symbol: DDX39B
  Gene Name: DEAD (Asp-Glu-Ala-Asp) box polypeptide 39B
  ENSP ID: ENSP00000383149

SEQ ID NO: 22857 - protein, 428 aa, Homo sapiens; identical to SEQ ID NO: 22854
  Payload ID: 4591
  Gene Symbol: DDX39B
  Gene Name: DEAD (Asp-Glu-Ala-Asp) box polypeptide 39B
  Uniprot ID: Q13838
  ENSP ID: ENSP00000383151

SEQ ID NO: 22858 - protein, 428 aa, Homo sapiens; identical to SEQ ID NO: 22854
  Payload ID: 4591
  Gene Symbol: DDX39B
  Gene Name: DEAD (Asp-Glu-Ala-Asp) box polypeptide 39B
  Uniprot ID: Q13838
  ENSP ID: ENSP00000383152

SEQ ID NO: 22859 - protein, 187 aa, Homo sapiens
  Payload ID: 4591
  Gene Symbol: DDX39B
  Gene Name: DEAD (Asp-Glu-Ala-Asp) box polypeptide 39B
  ENSP ID: ENSP00000387452
  MOD_RES (1)..(1): Any amino acid
XSEERDIGKPMEIFVDDETKLTLHGLQQYYVKLKDNEKNRKLFDLLDVLEFNQVVIFVKSVQRCIALAQLLVEQNFPAIAIHRGMPQEERLSRYQQFKDFQRRILVATNLFGRGMDIERVNIAFNYDMPEDSDTYLHRVARAGRFGTKGLAITFVSDENDAKILNDVQDRFEVNISELPDEIDISSY

SEQ ID NO: 22860 - protein, 428 aa, Homo sapiens; identical to SEQ ID NO: 22854
  Payload ID: 4591
  Gene Symbol: DDX39B
  Gene Name: DEAD (Asp-Glu-Ala-Asp) box polypeptide 39B
  Uniprot ID: Q13838
  ENSP ID: ENSP00000387994

SEQ ID NO: 22861 - protein, 187 aa, Homo sapiens; identical to SEQ ID NO: 22859
  Payload ID: 4591
  Gene Symbol: DDX39B
  Gene Name: DEAD (Asp-Glu-Ala-Asp) box polypeptide 39B
  ENSP ID: ENSP00000388243
  MOD_RES (1)..(1): Any amino acid

SEQ ID NO: 22862 - protein, 197 aa, Homo sapiens
  Payload ID: 4591
  Gene Symbol: DDX39B
  Gene Name: DEAD (Asp-Glu-Ala-Asp) box polypeptide 39B
  ENSP ID: ENSP00000388382
MAENDVDNELLDYEDDEVETAAGGDGAEAPAKKDVKGSYVSIHSSGFRDFLLKPELLRAIVDCGFEHPSEVQHECIPQAILGMDVLCQAKSGMGKTAVFVLATLQQLEPVTGQVCFCDSHFPRGDNEELHLPYVSVYFLPKVSVLVMCHTRELAFQISKEYERFSKYMPNVKVAVFFGGLSIKKDEEVLKKNCPHIV

SEQ ID NO: 22863 - protein, 136 aa, Homo sapiens
  Payload ID: 4591
  Gene Symbol: DDX39B
  Gene Name: DEAD (Asp-Glu-Ala-Asp) box polypeptide 39B
  ENSP ID: ENSP00000388776
MGGGRRPYDVFFSKVMAENDVDNELLDYEDDEVETAAGGDGAEAPAKKDVKGSYVSIHSSGFRDFLLKPELLRAIVDCGFEHPSEVQHECIPQAILGMDVLCQAKSGMGKTAVFVLATLQQLEPVTGQVSVLVMCH

SEQ ID NO: 22864 - protein, 428 aa, Homo sapiens; identical to SEQ ID NO: 22854
  Payload ID: 4591
  Gene Symbol: DDX39B
  Gene Name: DEAD (Asp-Glu-Ala-Asp) box polypeptide 39B
  Uniprot ID: Q13838
  ENSP ID: ENSP00000388880

SEQ ID NO: 22865 - protein, 425 aa, Homo sapiens; identical to SEQ ID NO: 22853
  Payload ID: 4591
  Gene Symbol: DDX39B
  Gene Name: DEAD (Asp-Glu-Ala-Asp) box polypeptide 39B
  ENSP ID: ENSP00000389350

SEQ ID NO: 22866 - protein, 231 aa, Homo sapiens
  Payload ID: 4591
  Gene Symbol: DDX39B
  Gene Name: DEAD (Asp-Glu-Ala-Asp) box polypeptide 39B
  ENSP ID: ENSP00000390562
MAENDVDNELLDYEDDEVETAAGGDGAEAPAKKDVKGSYVSIHSSGFRDFLLKPELLRAIVDCGFEHPSEVQHECIPQAILGMDVLCQAKSGMGKTAVFVLATLQQLEPVTGQVSVLVMCHTRELAFQISKEYERFSKYMPNVKVAVFFGGLSIKKDEEVLKKNCPHIVVGTPGRILALARNKSLNLKHIKHFILDECDKMLEQLDMRRDVQEIFRMTPHEKQVMMFSATL

SEQ ID NO: 22867 - protein, 428 aa, Homo sapiens; identical to SEQ ID NO: 22854
  Payload ID: 4591
  Gene Symbol: DDX39B
  Gene Name: DEAD (Asp-Glu-Ala-Asp) box polypeptide 39B
  Uniprot ID: Q13838
  ENSP ID: ENSP00000390999

SEQ ID NO: 22868 - protein, 95 aa, Homo sapiens
  Payload ID: 4591
  Gene Symbol: DDX39B
  Gene Name: DEAD (Asp-Glu-Ala-Asp) box polypeptide 39B
  ENSP ID: ENSP00000391070
MAENDVDNELLDYEDDEVETAAGGDGAEAPAKKDVKGSYVSIHSSGFRDFLLKPELLRAIVDCGFEHPSEVQHECIPQAILGMDVLCQAKSGMGK

SEQ ID NO: 22869 - protein, 187 aa, Homo sapiens; identical to SEQ ID NO: 22859
  Payload ID: 4591
  Gene Symbol: DDX39B
  Gene Name: DEAD (Asp-Glu-Ala-Asp) box polypeptide 39B
  ENSP ID: ENSP00000391335
  MOD_RES (1)..(1): Any amino acid

SEQ ID NO: 22870 - protein, 95 aa, Homo sapiens; identical to SEQ ID NO: 22868
  Payload ID: 4591
  Gene Symbol: DDX39B
  Gene Name: DEAD (Asp-Glu-Ala-Asp) box polypeptide 39B
  ENSP ID: ENSP00000391441

SEQ ID NO: 22871 - protein, 428 aa, Homo sapiens; identical to SEQ ID NO: 22854
  Payload ID: 4591
  Gene Symbol: DDX39B
  Gene Name: DEAD (Asp-Glu-Ala-Asp) box polypeptide 39B
  Uniprot ID: Q13838
  ENSP ID: ENSP00000391463

SEQ ID NO: 22872 - protein, 187 aa, Homo sapiens
  Payload ID: 4591
  Gene Symbol: DDX39B
  Gene Name: DEAD (Asp-Glu-Ala-Asp) box polypeptide 39B
  ENSP ID: ENSP00000391480
MGSSHIGGLSINERRCSASLGLVMAENDVDNELLDYEDDEVETAAGGDGAEAPAKKDVKGSYVSIHSSGFRDFLLKPELLRAIVDCGFEHPSEVQHECIPQAILGMDVLCQAKSGMGKTAVFVLATLQQLEPVTGQVSVLVMCHTRELAFQISKEYERFSKYMPNVKVAVFFGGLSIKKDEEVLKKN

SEQ ID NO: 22873 - protein, 136 aa, Homo sapiens; identical to SEQ ID NO: 22863
  Payload ID: 4591
  Gene Symbol: DDX39B
  Gene Name: DEAD (Asp-Glu-Ala-Asp) box polypeptide 39B
  ENSP ID: ENSP00000391580

SEQ ID NO: 22874 - protein, 187 aa, Homo sapiens; identical to SEQ ID NO: 22859
  Payload ID: 4591
  Gene Symbol: DDX39B
  Gene Name: DEAD (Asp-Glu-Ala-Asp) box polypeptide 39B
  ENSP ID: ENSP00000392644
  MOD_RES (1)..(1): Any amino acid

SEQ ID NO: 22875 - protein, 238 aa, Homo sapiens
  Payload ID: 4591
  Gene Symbol: DDX39B
  Gene Name: DEAD (Asp-Glu-Ala-Asp) box polypeptide 39B
  ENSP ID: ENSP00000392672
MAENDVDNELLDYEDDEVETAAGGDGAEAPAKKDVKGSYVSIHSSGFRDFLLKPELLRAIVDCGFEHPSEVQHECIPQAILGMDVLCQAKSGMGKTAVFVLATLQQLEPVTGQVSVLVMCHTRELAFQISKEYERFSKYMPNVKVAVFFGGLSIKKDEEVLKKNCPHIVVGTPGRILALARNKSLNLKHIKHFILDECDKMLEQLDMRRDVQEIFRMTPHEKQVMMFSATLSKEIRPV

SEQ ID NO: 22876 - protein, 235 aa, Homo sapiens
  Payload ID: 4591
  Gene Symbol: DDX39B
  Gene Name: DEAD (Asp-Glu-Ala-Asp) box polypeptide 39B
  ENSP ID: ENSP00000392819
MAENDVDNELLDYEDDEVETAAGGDGAEAPAKKDVKGSYVSIHSSGFRDFLLKPELLRAIVDCGFEHPSEVQHECIPQAILGMDVLCQAKSGMGKTAVFVLATLQQLEPVTGQVSVLVMCHTRELAFQISKEYERFSKYMPNVKVAVFFGGLSIKKDEEVLKKNCPHIVVGTPGRILALARNKSLNLKHIKHFILDECDKMLEQLDMRRDVQEIFRMTPHEKQVMMFSATLSKEI

SEQ ID NO: 22877 - protein, 231 aa, Homo sapiens; identical to SEQ ID NO: 22866
  Payload ID: 4591
  Gene Symbol: DDX39B
  Gene Name: DEAD (Asp-Glu-Ala-Asp) box polypeptide 39B
  ENSP ID: ENSP00000392922

SEQ ID NO: 22878 - protein, 245 aa, Homo sapiens
  Payload ID: 4591
  Gene Symbol: DDX39B
  Gene Name: DEAD (Asp-Glu-Ala-Asp) box polypeptide 39B
  ENSP ID: ENSP00000393172
MWTMSSWTMKMMRWRQQLGEMGLRPLPRRMSRAPMSPSTALAFVTSCSSQSCSGPLSTVALSIRQKVAVFFGGLSIKKDEEVLKKNCPHIVVGTPGRILALARNKSLNLKHIKHFILDECDKMLEQLDMRRDVQEIFRMTPHEKQVMMFSATLSKEIRPVCRKFMQDPMEIFVDDETKLTLHGLQQYYVKLKDNEKNRKLFDLLDVLEFNQVVIFVKSVQRCIALAQLLVEQNFPAIAIHRGMPQ

SEQ ID NO: 22879 - protein, 95 aa, Homo sapiens; identical to SEQ ID NO: 22868
  Payload ID: 4591
  Gene Symbol: DDX39B
  Gene Name: DEAD (Asp-Glu-Ala-Asp) box polypeptide 39B
  ENSP ID: ENSP00000393650

SEQ ID NO: 22880 - protein, 428 aa, Homo sapiens; identical to SEQ ID NO: 22854
  Payload ID: 4591
  Gene Symbol: DDX39B
  Gene Name: DEAD (Asp-Glu-Ala-Asp) box polypeptide 39B
  Uniprot ID: Q13838
  ENSP ID: ENSP00000393712

SEQ ID NO: 22881 - protein, 125 aa, Homo sapiens
  Payload ID: 4591
  Gene Symbol: DDX39B
  Gene Name: DEAD (Asp-Glu-Ala-Asp) box polypeptide 39B
  ENSP ID: ENSP00000393984
MAENDVDNELLDYEDDEVETAAGGDGAEAPAKKDVKGSYVSIHSSGFRDFLLKPELLRAIVDCGFEHPSEVQHECIPQAILGMDVLCQAKSGMGKTAVFVLATLQQLEPVTGQVSVLVMCHTREL

SEQ ID NO: 22882 - protein, 428 aa, Homo sapiens; identical to SEQ ID NO: 22854
  Payload ID: 4591
  Gene Symbol: DDX39B
  Gene Name: DEAD (Asp-Glu-Ala-Asp) box polypeptide 39B
  Uniprot ID: Q13838
  ENSP ID: ENSP00000394160

SEQ ID NO: 22883 - protein, 425 aa, Homo sapiens; identical to SEQ ID NO: 22853
  Payload ID: 4591
  Gene Symbol: DDX39B
  Gene Name: DEAD (Asp-Glu-Ala-Asp) box polypeptide 39B
  ENSP ID: ENSP00000394329

SEQ ID NO: 22884 - protein, 135 aa, Homo sapiens
  Payload ID: 4591
  Gene Symbol: DDX39B
  Gene Name: DEAD (Asp-Glu-Ala-Asp) box polypeptide 39B
  ENSP ID: ENSP00000394491
  MOD_RES (1)..(1): Any amino acid
XATLQQLEPVTGQVSVLVMCHTRELAFQISKEYERFSKYMPNVKVAVFFGGLSIKKDEEVLKKNCPHIVVGTPGRILALARNKSLNLKHIKHFILDECDKMLEQLDMRRDVQEIFRMTPHEKQVMMFSATLSKEI

SEQ ID NO: 22885 - protein, 125 aa, Homo sapiens; identical to SEQ ID NO: 22881
  Payload ID: 4591
  Gene Symbol: DDX39B
  Gene Name: DEAD (Asp-Glu-Ala-Asp) box polypeptide 39B
  ENSP ID: ENSP00000394963

SEQ ID NO: 22886 - protein, 238 aa, Homo sapiens; identical to SEQ ID NO: 22875
  Payload ID: 4591
  Gene Symbol: DDX39B
  Gene Name: DEAD (Asp-Glu-Ala-Asp) box polypeptide 39B
  ENSP ID: ENSP00000395058

SEQ ID NO: 22887 - protein, 132 aa, Homo sapiens
  Payload ID: 4591
  Gene Symbol: DDX39B
  Gene Name: DEAD (Asp-Glu-Ala-Asp) box polypeptide 39B
  ENSP ID: ENSP00000395105
MAENDVDNELLDYEDDEVETAAGGDGAEAPAKKDVKGSYVSIHSSGFRDFLLKPELLRAIVDCGFEHPSEVQHECIPQAILGMDVLCQAKSGMGKTAVFVLATLQQLEPVTGQVCFCDSHFPRGDNEELHLP

SEQ ID NO: 22888 - protein, 238 aa, Homo sapiens; identical to SEQ ID NO: 22875
  Payload ID: 4591
  Gene Symbol: DDX39B
  Gene Name: DEAD (Asp-Glu-Ala-Asp) box polypeptide 39B
  ENSP ID: ENSP00000395618

SEQ ID NO: 22889 - protein, 289 aa, Homo sapiens
  Payload ID: 4591
  Gene Symbol: DDX39B
  Gene Name: DEAD (Asp-Glu-Ala-Asp) box polypeptide 39B
  ENSP ID: ENSP00000395671
MAENDVDNELLDYEDDEVETAAGGDGAEAPAKKDVKGSYVSIHSSGFRDFLLKPELLRAIVDCGFEHPSEVQHECIPQAILGMDVLCQAKSGMGKTAVFVLATLQQLEPVTGQVSVLVMCHTRELAFQISKEYERFSKYMPNVKVAVFFGGLSIKKDEEVLKKNCPHIVVGTPGRILALARNKSLNLKHIKHFILDECDKMLEQLDMRRDVQEIFRMTPHEKQVMMFSATLSKEIRPVCRKFMQDPMEIFVDDETKLTLHGLQQYYVKLKDNEKNRKLFDLLDVLEFNQ

SEQ ID NO: 22890 - protein, 187 aa, Homo sapiens; identical to SEQ ID NO: 22859
  Payload ID: 4591
  Gene Symbol: DDX39B
  Gene Name: DEAD (Asp-Glu-Ala-Asp) box polypeptide 39B
  ENSP ID: ENSP00000396021
  MOD_RES (1)..(1): Any amino acid

SEQ ID NO: 22891 - protein, 189 aa, Homo sapiens
  Payload ID: 4591
  Gene Symbol: DDX39B
  Gene Name: DEAD (Asp-Glu-Ala-Asp) box polypeptide 39B
  ENSP ID: ENSP00000396559
  MOD_RES (1)..(1): Any amino acid
XATLQQLEPVTGQVSVLVMCHTRELAFQISKEYERFSKYMPNVKVAVFFGGLSIKKDEEVLKKNCPHIVVGTPGRILALARNKSLNLKHIKHFILDECDKMLEQLDMRRDVQEIFRMTPHEKQVMMFSATLSKEIRPVCRKFMQDPMEIFVDDETKLTLHGLQQYYVKLKDNEKNRKLFDLLDVLEFNQ

SEQ ID NO: 22892 - protein, 235 aa, Homo sapiens; identical to SEQ ID NO: 22876
  Payload ID: 4591
  Gene Symbol: DDX39B
  Gene Name: DEAD (Asp-Glu-Ala-Asp) box polypeptide 39B
  ENSP ID: ENSP00000396623

SEQ ID NO: 22893 - protein, 21 aa, Homo sapiens
  Payload ID: 4591
  Gene Symbol: DDX39B
  Gene Name: DEAD (Asp-Glu-Ala-Asp) box polypeptide 39B
  ENSP ID: ENSP00000396811
  MOD_RES (1)..(1): Any amino acid
XATLQQLEPVTGQVSVLVMCH

SEQ ID NO: 22894 - protein, 187 aa, Homo sapiens; identical to SEQ ID NO: 22872
  Payload ID: 4591
  Gene Symbol: DDX39B
  Gene Name: DEAD (Asp-Glu-Ala-Asp) box polypeptide 39B
  ENSP ID: ENSP00000396885

SEQ ID NO: 22895 - protein, 238 aa, Homo sapiens; identical to SEQ ID NO: 22875
  Payload ID: 4591
  Gene Symbol: DDX39B
  Gene Name: DEAD (Asp-Glu-Ala-Asp) box polypeptide 39B
  ENSP ID: ENSP00000396930

SEQ ID NO: 22896 - protein, 25 aa, Homo sapiens
  Payload ID: 4591
  Gene Symbol: DDX39B
  Gene Name: DEAD (Asp-Glu-Ala-Asp) box polypeptide 39B
  ENSP ID: ENSP00000397591
  MOD_RES (1)..(1): Any amino acid
XATLQQLEPVTGQVSVLVMCHTREL

SEQ ID NO: 22897 - protein, 187 aa, Homo sapiens; identical to SEQ ID NO: 22859
  Payload ID: 4591
  Gene Symbol: DDX39B
  Gene Name: DEAD (Asp-Glu-Ala-Asp) box polypeptide 39B
  ENSP ID: ENSP00000398190
  MOD_RES (1)..(1): Any amino acid

SEQ ID NO: 22898 - protein, 132 aa, Homo sapiens; identical to SEQ ID NO: 22887
  Payload ID: 4591
  Gene Symbol: DDX39B
  Gene Name: DEAD (Asp-Glu-Ala-Asp) box polypeptide 39B
  ENSP ID: ENSP00000398274

SEQ ID NO: 22899 - protein, 136 aa, Homo sapiens; identical to SEQ ID NO: 22863
  Payload ID: 4591
  Gene Symbol: DDX39B
  Gene Name: DEAD (Asp-Glu-Ala-Asp) box polypeptide 39B
  ENSP ID: ENSP00000398492

SEQ ID NO: 22900 - protein, 428 aa, Homo sapiens; identical to SEQ ID NO: 22854
  Payload ID: 4591
  Gene Symbol: DDX39B
  Gene Name: DEAD (Asp-Glu-Ala-Asp) box polypeptide 39B
  Uniprot ID: Q13838
  ENSP ID: ENSP00000398775

SEQ ID NO: 22901 - protein, 245 aa, Homo sapiens; identical to SEQ ID NO: 22878
  Payload ID: 4591
  Gene Symbol: DDX39B
  Gene Name: DEAD (Asp-Glu-Ala-Asp) box polypeptide 39B
  ENSP ID: ENSP00000398978

SEQ ID NO: 22902 - protein, 428 aa, Homo sapiens; identical to SEQ ID NO: 22854
  Payload ID: 4591
  Gene Symbol: DDX39B
  Gene Name: DEAD (Asp-Glu-Ala-Asp) box polypeptide 39B
  Uniprot ID: Q13838
  ENSP ID: ENSP00000399030

SEQ ID NO: 22903 - protein, 289 aa, Homo sapiens; identical to SEQ ID NO: 22889
  Payload ID: 4591
  Gene Symbol: DDX39B
  Gene Name: DEAD (Asp-Glu-Ala-Asp) box polypeptide 39B
  ENSP ID: ENSP00000399371

SEQ ID NO: 22904 - protein, 328 aa, Homo sapiens
  Payload ID: 4591
  Gene Symbol: DDX39B
  Gene Name: DEAD (Asp-Glu-Ala-Asp) box polypeptide 39B
  ENSP ID: ENSP00000399542
  MOD_RES (1)..(1): Any amino acid
XATLQQLEPVTGQVSVLVMCHTRELAFQISKEYERFSKYMPNVKVAVFFGGLSIKKDEEVLKKNCPHIVVGTPGRILALARNKSLNLKHIKHFILDECDKMLEQLDMRRDVQEIFRMTPHEKQVMMFSATLSKEIRPVCRKFMQDPMEIFVDDETKLTLHGLQQYYVKLKDNEKNRKLFDLLDVLEFNQVVIFVKSVQRCIALAQLLVEQNFPAIAIHRGMPQEERLSRYQQFKDFQRRILVATNLFGRGMDIERVNIAFNYDMPEDSDTYLHRVARAGRFGTKGLAITFVSDENDAKILNDVQDRFEVNISELPDEIDISSYIEQTR

SEQ ID NO: 22905 - protein, 235 aa, Homo sapiens; identical to SEQ ID NO: 22876
  Payload ID: 4591
  Gene Symbol: DDX39B
  Gene Name: DEAD (Asp-Glu-Ala-Asp) box polypeptide 39B
  ENSP ID: ENSP00000399659

SEQ ID NO: 22906 - protein, 136 aa, Homo sapiens; identical to SEQ ID NO: 22863
  Payload ID: 4591
  Gene Symbol: DDX39B
  Gene Name: DEAD (Asp-Glu-Ala-Asp) box polypeptide 39B
  ENSP ID: ENSP00000399841

SEQ ID NO: 22907 - protein, 428 aa, Homo sapiens; identical to SEQ ID NO: 22854
  Payload ID: 4591
  Gene Symbol: DDX39B
  Gene Name: DEAD (Asp-Glu-Ala-Asp) box polypeptide 39B
  Uniprot ID: Q13838
  ENSP ID: ENSP00000400326

SEQ ID NO: 22908 - protein, 125 aa, Homo sapiens; identical to SEQ ID NO: 22881
  Payload ID: 4591
  Gene Symbol: DDX39B
  Gene Name: DEAD (Asp-Glu-Ala-Asp) box polypeptide 39B
  ENSP ID: ENSP00000400556

SEQ ID NO: 22909 - protein, 132 aa, Homo sapiens; identical to SEQ ID NO: 22887
  Payload ID: 4591
  Gene Symbol: DDX39B
  Gene Name: DEAD (Asp-Glu-Ala-Asp) box polypeptide 39B
  ENSP ID: ENSP00000402876

SEQ ID NO: 22910 - protein, 125 aa, Homo sapiens; identical to SEQ ID NO: 22881
  Payload ID: 4591
  Gene Symbol: DDX39B
  Gene Name: DEAD (Asp-Glu-Ala-Asp) box polypeptide 39B
  ENSP ID: ENSP00000402942

SEQ ID NO: 22911 - protein, 238 aa, Homo sapiens; identical to SEQ ID NO: 22875
  Payload ID: 4591
  Gene Symbol: DDX39B
  Gene Name: DEAD (Asp-Glu-Ala-Asp) box polypeptide 39B
  ENSP ID: ENSP00000403358

SEQ ID NO: 22912 - protein, 95 aa, Homo sapiens; identical to SEQ ID NO: 22868
  Payload ID: 4591
  Gene Symbol: DDX39B
  Gene Name: DEAD (Asp-Glu-Ala-Asp) box polypeptide 39B
  ENSP ID: ENSP00000403593

SEQ ID NO: 22913 - protein, 425 aa, Homo sapiens; identical to SEQ ID NO: 22853
  Payload ID: 4591
  Gene Symbol: DDX39B
  Gene Name: DEAD (Asp-Glu-Ala-Asp) box polypeptide 39B
  ENSP ID: ENSP00000404228

SEQ ID NO: 22914 - protein, 428 aa, Homo sapiens; identical to SEQ ID NO: 22854
  Payload ID: 4591
  Gene Symbol: DDX39B
  Gene Name: DEAD (Asp-Glu-Ala-Asp) box polypeptide 39B
  Uniprot ID: Q13838
  ENSP ID: ENSP00000404695

SEQ ID NO: 22915 - protein, 231 aa, Homo sapiens; identical to SEQ ID NO: 22866
  Payload ID: 4591
  Gene Symbol: DDX39B
  Gene Name: DEAD (Asp-Glu-Ala-Asp) box polypeptide 39B
  ENSP ID: ENSP00000404735

SEQ ID NO: 22916 - protein, 132 aa, Homo sapiens; identical to SEQ ID NO: 22887
  Payload ID: 4591
  Gene Symbol: DDX39B
  Gene Name: DEAD (Asp-Glu-Ala-Asp) box polypeptide 39B
  ENSP ID: ENSP00000405245

SEQ ID NO: 22917 - protein, 125 aa, Homo sapiens; identical to SEQ ID NO: 22881
  Payload ID: 4591
  Gene Symbol: DDX39B
  Gene Name: DEAD (Asp-Glu-Ala-Asp) box polypeptide 39B
  ENSP ID: ENSP00000405374

SEQ ID NO: 22918 - protein, 125 aa, Homo sapiens; identical to SEQ ID NO: 22881
  Payload ID: 4591
  Gene Symbol: DDX39B
  Gene Name: DEAD (Asp-Glu-Ala-Asp) box polypeptide 39B
  ENSP ID: ENSP00000405386

SEQ ID NO: 22919 - protein, 238 aa, Homo sapiens; identical to SEQ ID NO: 22875
  Payload ID: 4591
  Gene Symbol: DDX39B
  Gene Name: DEAD (Asp-Glu-Ala-Asp) box polypeptide 39B
  ENSP ID: ENSP00000405489

SEQ ID NO: 22920 - protein, 428 aa, Homo sapiens; identical to SEQ ID NO: 22854
  Payload ID: 4591
  Gene Symbol: DDX39B
  Gene Name: DEAD (Asp-Glu-Ala-Asp) box polypeptide 39B
  Uniprot ID: Q13838
  ENSP ID: ENSP00000405560

SEQ ID NO: 22921 - protein, 138 aa, Homo sapiens
  Payload ID: 4591
  Gene Symbol: DDX39B
  Gene Name: DEAD (Asp-Glu-Ala-Asp) box polypeptide 39B
  ENSP ID: ENSP00000405665
  MOD_RES (1)..(1): Any amino acid
XATLQQLEPVTGQVSVLVMCHTRELAFQISKEYERFSKYMPNVKVAVFFGGLSIKKDEEVLKKNCPHIVVGTPGRILALARNKSLNLKHIKHFILDECDKMLEQLDMRRDVQEIFRMTPHEKQVMMFSATLSKEIRPV

SEQ ID NO: 22922 - protein, 197 aa, Homo sapiens; identical to SEQ ID NO: 22862
  Payload ID: 4591
  Gene Symbol: DDX39B
  Gene Name: DEAD (Asp-Glu-Ala-Asp) box polypeptide 39B
  ENSP ID: ENSP00000405707

SEQ ID NO: 22923 - protein, 197 aa, Homo sapiens; identical to SEQ ID NO: 22862
  Payload ID: 4591
  Gene Symbol: DDX39B
  Gene Name: DEAD (Asp-Glu-Ala-Asp) box polypeptide 39B
  ENSP ID: ENSP00000405964

SEQ ID NO: 22924 - protein, 132 aa, Homo sapiens; identical to SEQ ID NO: 22887
  Payload ID: 4591
  Gene Symbol: DDX39B
  Gene Name: DEAD (Asp-Glu-Ala-Asp) box polypeptide 39B
  ENSP ID: ENSP00000406006

SEQ ID NO: 22925 - protein, 64 aa, Homo sapiens
  Payload ID: 4591
  Gene Symbol: DDX39B
  Gene Name: DEAD (Asp-Glu-Ala-Asp) box polypeptide 39B
  ENSP ID: ENSP00000406060
  MOD_RES (1)..(1): Any amino acid
XATLQQLEPVTGQVSVLVMCHTRELAFQISKEYERFSKYMPNVKVAVFFGGLSIKKDEEVLKKN

SEQ ID NO: 22926 - protein, 289 aa, Homo sapiens; identical to SEQ ID NO: 22889
  Payload ID: 4591
  Gene Symbol: DDX39B
  Gene Name: DEAD (Asp-Glu-Ala-Asp) box polypeptide 39B
  ENSP ID: ENSP00000406085

SEQ ID NO: 22927 - protein, 238 aa, Homo sapiens; identical to SEQ ID NO: 22875
  Payload ID: 4591
  Gene Symbol: DDX39B
  Gene Name: DEAD (Asp-Glu-Ala-Asp) box polypeptide 39B
  ENSP ID: ENSP00000406096

SEQ ID NO: 22928 - protein, 328 aa, Homo sapiens; identical to SEQ ID NO: 22904
  Payload ID: 4591
  Gene Symbol: DDX39B
  Gene Name: DEAD (Asp-Glu-Ala-Asp) box polypeptide 39B
  ENSP ID: ENSP00000406348
  MOD_RES (1)..(1): Any amino acid

SEQ ID NO: 22929 - protein, 187 aa, Homo sapiens; identical to SEQ ID NO: 22859
  Payload ID: 4591
  Gene Symbol: DDX39B
  Gene Name: DEAD (Asp-Glu-Ala-Asp) box polypeptide 39B
  ENSP ID: ENSP00000406422
  MOD_RES (1)..(1): Any amino acid

SEQ ID NO: 22930 - protein, 231 aa, Homo sapiens; identical to SEQ ID NO: 22866
  Payload ID: 4591
  Gene Symbol: DDX39B
  Gene Name: DEAD (Asp-Glu-Ala-Asp) box polypeptide 39B
  ENSP ID: ENSP00000406504

SEQ ID NO: 22931 - protein, 131 aa, Homo sapiens
  Payload ID: 4591
  Gene Symbol: DDX39B
  Gene Name: DEAD (Asp-Glu-Ala-Asp) box polypeptide 39B
  ENSP ID: ENSP00000406739
  MOD_RES (1)..(1): Any amino acid
XATLQQLEPVTGQVSVLVMCHTRELAFQISKEYERFSKYMPNVKVAVFFGGLSIKKDEEVLKKNCPHIVVGTPGRILALARNKSLNLKHIKHFILDECDKMLEQLDMRRDVQEIFRMTPHEKQVMMFSATL

SEQ ID NO: 22932 - protein, 289 aa, Homo sapiens; identical to SEQ ID NO: 22889
  Payload ID: 4591
  Gene Symbol: DDX39B
  Gene Name: DEAD (Asp-Glu-Ala-Asp) box polypeptide 39B
  ENSP ID: ENSP00000407054

SEQ ID NO: 22933 - protein, 428 aa, Homo sapiens; identical to SEQ ID NO: 22854
  Payload ID: 4591
  Gene Symbol: DDX39B
  Gene Name: DEAD (Asp-Glu-Ala-Asp) box polypeptide 39B
  Uniprot ID: Q13838
  ENSP ID: ENSP00000407419

SEQ ID NO: 22934 - protein, 425 aa, Homo sapiens; identical to SEQ ID NO: 22853
  Payload ID: 4591
  Gene Symbol: DDX39B
  Gene Name: DEAD (Asp-Glu-Ala-Asp) box polypeptide 39B
  ENSP ID: ENSP00000407427

SEQ ID NO: 22935 - protein, 187 aa, Homo sapiens; identical to SEQ ID NO: 22872
  Payload ID: 4591
  Gene Symbol: DDX39B
  Gene Name: DEAD (Asp-Glu-Ala-Asp) box polypeptide 39B
  ENSP ID: ENSP00000407519

SEQ ID NO: 22936 - protein, 425 aa, Homo sapiens; identical to SEQ ID NO: 22853
  Payload ID: 4591
  Gene Symbol: DDX39B
  Gene Name: DEAD (Asp-Glu-Ala-Asp) box polypeptide 39B
  ENSP ID: ENSP00000407647

SEQ ID NO: 22937 - protein, 245 aa, Homo sapiens; identical to SEQ ID NO: 22878
  Payload ID: 4591
  Gene Symbol: DDX39B
  Gene Name: DEAD (Asp-Glu-Ala-Asp) box polypeptide 39B
  ENSP ID: ENSP00000408000

SEQ ID NO: 22938 - protein, 132 aa, Homo sapiens; identical to SEQ ID NO: 22887
  Payload ID: 4591
  Gene Symbol: DDX39B
  Gene Name: DEAD (Asp-Glu-Ala-Asp) box polypeptide 39B
  ENSP ID: ENSP00000408067

SEQ ID NO: 22939 - protein, 197 aa, Homo sapiens; identical to SEQ ID NO: 22862
  Payload ID: 4591
  Gene Symbol: DDX39B
  Gene Name: DEAD (Asp-Glu-Ala-Asp) box polypeptide 39B
  ENSP ID: ENSP00000408191

SEQ ID NO: 22940 - protein, 197 aa, Homo sapiens; identical to SEQ ID NO: 22862
  Payload ID: 4591
  Gene Symbol: DDX39B
  Gene Name: DEAD (Asp-Glu-Ala-Asp) box polypeptide 39B
  ENSP ID: ENSP00000408609

SEQ ID NO: 22941 - protein, 97 aa, Homo sapiens
  Payload ID: 4591
  Gene Symbol: DDX39B
  Gene Name: DEAD (Asp-Glu-Ala-Asp) box polypeptide 39B
  ENSP ID: ENSP00000408832
  MOD_RES (1)..(1): Any amino acid
XATLQQLEPVTGQVCFCDSHFPRGDNEELHLPYVSVYFLPKVSVLVMCHTRELAFQISKEYERFSKYMPNVKVAVFFGGLSIKKDEEVLKKNCPHIV

SEQ ID NO: 22942 - protein, 187 aa, Homo sapiens; identical to SEQ ID NO: 22872
  Payload ID: 4591
  Gene Symbol: DDX39B
  Gene Name: DEAD (Asp-Glu-Ala-Asp) box polypeptide 39B
  ENSP ID: ENSP00000408908

SEQ ID NO: 22943 - protein, 197 aa, Homo sapiens; identical to SEQ ID NO: 22862
  Payload ID: 4591
  Gene Symbol: DDX39B
  Gene Name: DEAD (Asp-Glu-Ala-Asp) box polypeptide 39B
  ENSP ID: ENSP00000409162

SEQ ID NO: 22944 - protein, 235 aa, Homo sapiens; identical to SEQ ID NO: 22876
  Payload ID: 4591
  Gene Symbol: DDX39B
  Gene Name: DEAD (Asp-Glu-Ala-Asp) box polypeptide 39B
  ENSP ID: ENSP00000409290

SEQ ID NO: 22945 - protein, 187 aa, Homo sapiens
  Payload ID: 4591
  Gene Symbol: DDX39B
  Gene Name: DEAD (Asp-Glu-Ala-Asp) box polypeptide 39B
  ENSP ID: ENSP00000409426
MGSSHIGGLSINERRRSASLGLVMAENDVDNELLDYEDDEVETAAGGDGAEAPAKKDVKGSYVSIHSSGFRDFLLKPELLRAIVDCGFEHPSEVQHECIPQAILGMDVLCQAKSGMGKTAVFVLATLQQLEPVTGQVSVLVMCHTRELAFQISKEYERFSKYMPNVKVAVFFGGLSIKKDEEVLKKN

SEQ ID NO: 22946 - protein, 136 aa, Homo sapiens; identical to SEQ ID NO: 22863
  Payload ID: 4591
  Gene Symbol: DDX39B
  Gene Name: DEAD (Asp-Glu-Ala-Asp) box polypeptide 39B
  ENSP ID: ENSP00000409451

SEQ ID NO: 22947 - protein, 32 aa, Homo sapiens
  Payload ID: 4591
  Gene Symbol: DDX39B
  Gene Name: DEAD (Asp-Glu-Ala-Asp) box polypeptide 39B
  ENSP ID: ENSP00000409602
  MOD_RES (1)..(1): Any amino acid
XATLQQLEPVTGQVCFCDSHFPRGDNEELHLP

SEQ ID NO: 22948 - protein, 197 aa, Homo sapiens; identical to SEQ ID NO: 22862
  Payload ID: 4591
  Gene Symbol: DDX39B
  Gene Name: DEAD (Asp-Glu-Ala-Asp) box polypeptide 39B
  ENSP ID: ENSP00000409810

SEQ ID NO: 22949 - protein, 125 aa, Homo sapiens; identical to SEQ ID NO: 22881
  Payload ID: 4591
  Gene Symbol: DDX39B
  Gene Name: DEAD (Asp-Glu-Ala-Asp) box polypeptide 39B
  ENSP ID: ENSP00000409929

SEQ ID NO: 22950 - protein, 187 aa, Homo sapiens; identical to SEQ ID NO: 22859
  Payload ID: 4591
  Gene Symbol: DDX39B
  Gene Name: DEAD (Asp-Glu-Ala-Asp) box polypeptide 39B
  ENSP ID: ENSP00000410112
  MOD_RES (1)..(1): Any amino acid

SEQ ID NO: 22951 - protein, 289 aa, Homo sapiens; identical to SEQ ID NO: 22889
  Payload ID: 4591
  Gene Symbol: DDX39B
  Gene Name: DEAD (Asp-Glu-Ala-Asp) box polypeptide 39B
  ENSP ID: ENSP00000410277

SEQ ID NO: 22952 - protein, 235 aa, Homo sapiens; identical to SEQ ID NO: 22876
  Payload ID: 4591
  Gene Symbol: DDX39B
  Gene Name: DEAD (Asp-Glu-Ala-Asp) box polypeptide 39B
  ENSP ID: ENSP00000410313

SEQ ID NO: 22953 - protein, 245 aa, Homo sapiens; identical to SEQ ID NO: 22878
  Payload ID: 4591
  Gene Symbol: DDX39B
  Gene Name: DEAD (Asp-Glu-Ala-Asp) box polypeptide 39B
  ENSP ID: ENSP00000410915

SEQ ID NO: 22954 - protein, 428 aa, Homo sapiens; identical to SEQ ID NO: 22854
  Payload ID: 4591
  Gene Symbol: DDX39B
  Gene Name: DEAD (Asp-Glu-Ala-Asp) box polypeptide 39B
  Uniprot ID: Q13838
  ENSP ID: ENSP00000411136

SEQ ID NO: 22955 - protein, 132 aa, Homo sapiens; identical to SEQ ID NO: 22887
  Payload ID: 4591
  Gene Symbol: DDX39B
  Gene Name: DEAD (Asp-Glu-Ala-Asp) box polypeptide 39B
  ENSP ID: ENSP00000411371

SEQ ID NO: 22956 - protein, 187 aa, Homo sapiens; identical to SEQ ID NO: 22872
  Payload ID: 4591
  Gene Symbol: DDX39B
  Gene Name: DEAD (Asp-Glu-Ala-Asp) box polypeptide 39B
  ENSP ID: ENSP00000411458

SEQ ID NO: 22957 - protein, 231 aa, Homo sapiens; identical to SEQ ID NO: 22866
  Payload ID: 4591
  Gene Symbol: DDX39B
  Gene Name: DEAD (Asp-Glu-Ala-Asp) box polypeptide 39B
  ENSP ID: ENSP00000411538

SEQ ID NO: 22958 - protein, 428 aa, Homo sapiens; identical to SEQ ID NO: 22854
  Payload ID: 4591
  Gene Symbol: DDX39B
  Gene Name: DEAD (Asp-Glu-Ala-Asp) box polypeptide 39B
  Uniprot ID: Q13838
  ENSP ID: ENSP00000411853

SEQ ID NO: 22959 - protein, 95 aa, Homo sapiens; identical to SEQ ID NO: 22868
  Payload ID: 4591
  Gene Symbol: DDX39B
  Gene Name: DEAD (Asp-Glu-Ala-Asp) box polypeptide 39B
  ENSP ID: ENSP00000411865

SEQ ID NO: 22960 - protein, 245 aa, Homo sapiens; identical to SEQ ID NO: 22878
  Payload ID: 4591
  Gene Symbol: DDX39B
  Gene Name: DEAD (Asp-Glu-Ala-Asp) box polypeptide 39B
  ENSP ID: ENSP00000411967

SEQ ID NO: 22961 - protein, 245 aa, Homo sapiens; identical to SEQ ID NO: 22878
  Payload ID: 4591
  Gene Symbol: DDX39B
  Gene Name: DEAD (Asp-Glu-Ala-Asp) box polypeptide 39B
  ENSP ID: ENSP00000412286

SEQ ID NO: 22962 - protein, 328 aa, Homo sapiens; identical to SEQ ID NO: 22904
  Payload ID: 4591
  Gene Symbol: DDX39B
  Gene Name: DEAD (Asp-Glu-Ala-Asp) box polypeptide 39B
  ENSP ID: ENSP00000412609
  MOD_RES (1)..(1): Any amino acid

SEQ ID NO: 22963 - protein, 187 aa, Homo sapiens; identical to SEQ ID NO: 22945
  Payload ID: 4591
  Gene Symbol: DDX39B
  Gene Name: DEAD (Asp-Glu-Ala-Asp) box polypeptide 39B
  ENSP ID: ENSP00000413149

SEQ ID NO: 22964 - protein, 289 aa, Homo sapiens; identical to SEQ ID NO: 22889
  Payload ID: 4591
  Gene Symbol: DDX39B
  Gene Name: DEAD (Asp-Glu-Ala-Asp) box polypeptide 39B
  ENSP ID: ENSP00000413576

SEQ ID NO: 22965 - protein, 235 aa, Homo sapiens; identical to SEQ ID NO: 22876
  Payload ID: 4591
  Gene Symbol: DDX39B
  Gene Name: DEAD (Asp-Glu-Ala-Asp) box polypeptide 39B
  ENSP ID: ENSP00000413790

SEQ ID NO: 22966 - protein, 95 aa, Homo sapiens; identical to SEQ ID NO: 22868
  Payload ID: 4591
  Gene Symbol: DDX39B
  Gene Name: DEAD (Asp-Glu-Ala-Asp) box polypeptide 39B
  ENSP ID: ENSP00000413793

SEQ ID NO: 22967 - protein, 289 aa, Homo sapiens; identical to SEQ ID NO: 22889
  Payload ID: 4591
  Gene Symbol: DDX39B
  Gene Name: DEAD (Asp-Glu-Ala-Asp) box polypeptide 39B
  ENSP ID: ENSP00000413832

SEQ ID NO: 22968 - protein, 136 aa, Homo sapiens; identical to SEQ ID NO: 22863
  Payload ID: 4591
  Gene Symbol: DDX39B
  Gene Name: DEAD (Asp-Glu-Ala-Asp) box polypeptide 39B
  ENSP ID: ENSP00000414082

SEQ ID NO: 22969 - protein, 245 aa, Homo sapiens; identical to SEQ ID NO: 22878
  Payload ID: 4591
  Gene Symbol: DDX39B
  Gene Name: DEAD (Asp-Glu-Ala-Asp) box polypeptide 39B
  ENSP ID: ENSP00000414096

SEQ ID NO: 22970 - protein, 231 aa, Homo sapiens; identical to SEQ ID NO: 22866
  Payload ID: 4591
  Gene Symbol: DDX39B
  Gene Name: DEAD (Asp-Glu-Ala-Asp) box polypeptide 39B
  ENSP ID: ENSP00000414984

SEQ ID NO: 22971 - protein, 325 aa, Homo sapiens
  Payload ID: 4591
  Gene Symbol: DDX39B
  Gene Name: DEAD (Asp-Glu-Ala-Asp) box polypeptide 39B
  ENSP ID: ENSP00000415802
  MOD_RES (1)..(1): Any amino acid
XATLQQLEPVTGQVSVLVMCHTRELAFQISKEYERFSKYMPNVKVAVFFGGLSIKKDEEVLKKNCPHIVVGTPGRILALARNKSLNLKHIKHFILDECDKMLEQLDMRRDVQEIFRMTPHEKQVMMFSATLSKEIRPVCRKFMQDPMEIFVDDETKLTLHGLQQYYVKLKDNEKNRKLFDLLDVLEFNQVVIFVKSVQRCIALAQLLVEQNFPAIAIHRGMPQEERLSRYQQFKDFQRRILVATNLFGRGMDIERVNIAFNYDMPEDSDTYLHRCYPLSPSRWPEQAGLAPRAWLSHLCPMRMMPRSSMMCRIALRSILVSCLMR

SEQ ID NO: 22972 - protein, 428 aa, Homo sapiens; identical to SEQ ID NO: 22854
  Payload ID: 4591
  Gene Symbol: DDX39B
  Gene Name: DEAD (Asp-Glu-Ala-Asp) box polypeptide 39B
  Uniprot ID: Q13838
  ENSP ID: ENSP00000416269

SEQ ID NO: 22973 - protein, 231 aa, Homo sapiens; identical to SEQ ID NO: 22866
  Payload ID: 4591
  Gene Symbol: DDX39B
  Gene Name: DEAD (Asp-Glu-Ala-Asp) box polypeptide 39B
  ENSP ID: ENSP00000416350

SEQ ID NO: 22974 - protein, 179 aa, Homo sapiens
  Payload ID: 4591
  Gene Symbol: DDX39B
  Gene Name: DEAD (Asp-Glu-Ala-Asp) box polypeptide 39B
  ENSP ID: ENSP00000416358
VAVFFGGLSIKKDEEVLKKNCPHIVVGTPGRILALARNKSLNLKHIKHFILDECDKMLEQLDMRRDVQEIFRMTPHEKQVMMFSATLSKEIRPVCRKFMQDPMEIFVDDETKLTLHGLQQYYVKLKDNEKNRKLFDLLDVLEFNQVVIFVKSVQRCIALAQLLVEQNFPAIAIHRGMPQ

SEQ ID NO: 22975 - protein, 235 aa, Homo sapiens; identical to SEQ ID NO: 22876
  Payload ID: 4591
  Gene Symbol: DDX39B
  Gene Name: DEAD (Asp-Glu-Ala-Asp) box polypeptide 39B
  ENSP ID: ENSP00000416407

SEQ ID NO: 22976 - protein, 136 aa, Homo sapiens; identical to SEQ ID NO: 22863
  Payload ID: 4591
  Gene Symbol: DDX39B
  Gene Name: DEAD (Asp-Glu-Ala-Asp) box polypeptide 39B
  ENSP ID: ENSP00000416843

SEQ ID NO: 22977 - protein, 141 aa, Homo sapiens
  Payload ID: 4591
  Gene Symbol: DDX39B
  Gene Name: DEAD (Asp-Glu-Ala-Asp) box polypeptide 39B
  ENSP ID: ENSP00000431377
  MOD_RES (1)..(1): Any amino acid
XDVQEIFRMTPHEKQVMMFSATLSKEIRPVCRKFMQDPMEIFVDDETKLTLHGLQQYYVKLKDNEKNRKLFDLLDVLEFNQVVIFVKSVQRCIALAQLLVEQNFPAIAIHRGMPQEESLKIFNDEFLWLPTYLAEAWTSSG

SEQ ID NO: 22978 - protein, 141 aa, Homo sapiens; identical to SEQ ID NO: 22977
  Payload ID: 4591
  Gene Symbol: DDX39B
  Gene Name: DEAD (Asp-Glu-Ala-Asp) box polypeptide 39B
  ENSP ID: ENSP00000431969
  MOD_RES (1)..(1): Any amino acid

SEQ ID NO: 22979 - protein, 141 aa, Homo sapiens; identical to SEQ ID NO: 22977
  Payload ID: 4591
  Gene Symbol: DDX39B
  Gene Name: DEAD (Asp-Glu-Ala-Asp) box polypeptide 39B
  ENSP ID: ENSP00000432296
  MOD_RES (1)..(1): Any amino acid

SEQ ID NO: 22980 - protein, 141 aa, Homo sapiens; identical to SEQ ID NO: 22977
  Payload ID: 4591
  Gene Symbol: DDX39B
  Gene Name: DEAD (Asp-Glu-Ala-Asp) box polypeptide 39B
  ENSP ID: ENSP00000433192
  MOD_RES (1)..(1): Any amino acid

SEQ ID NO: 22981 - protein, 141 aa, Homo sapiens; identical to SEQ ID NO: 22977
  Payload ID: 4591
  Gene Symbol: DDX39B
  Gene Name: DEAD (Asp-Glu-Ala-Asp) box polypeptide 39B
  ENSP ID: ENSP00000433234
  MOD_RES (1)..(1): Any amino acid

SEQ ID NO: 22982 - protein, 141 aa, Homo sapiens; identical to SEQ ID NO: 22977
  Payload ID: 4591
  Gene Symbol: DDX39B
  Gene Name: DEAD (Asp-Glu-Ala-Asp) box polypeptide 39B
  ENSP ID: ENSP00000434615
  MOD_RES (1)..(1): Any amino acid

SEQ ID NO: 22983 - protein, 141 aa, Homo sapiens; identical to SEQ ID NO: 22977
  Payload ID: 4591
  Gene Symbol: DDX39B
  Gene Name: DEAD (Asp-Glu-Ala-Asp) box polypeptide 39B
  ENSP ID: ENSP00000434736
  MOD_RES (1)..(1): Any amino acid

SEQ ID NO: 22984 - protein, 141 aa, Homo sapiens; identical to SEQ ID NO: 22977
  Payload ID: 4591
  Gene Symbol: DDX39B
  Gene Name: DEAD (Asp-Glu-Ala-Asp) box polypeptide 39B
  ENSP ID: ENSP00000436220
  MOD_RES (1)..(1): Any amino acid

SEQ ID NO: 22985 - protein, 247 aa, Homo sapiens
  Payload ID: 4591
  Gene Symbol: DDX39B
  Gene Name: DEAD (Asp-Glu-Ala-Asp) box polypeptide 39B
  ENSP ID: ENSP00000437017
MWTMSSWTMKMMRWRQQLGEMGLRPLPRRMSRAPMSPSTALAFVTSCSSQSCSGPLSTVALSIRQKVAVFFGGLSIKKDEEVLKKNCPHIVVGTPGRILALARNKSLNLKHIKHFILDECDKMLEQLDMRRDVQEIFRMTPHEKQVMMFSATLSKEIRPVCRKFMQDPMEIFVDDETKLTLHGLQQYYVKLKDNEKNRKLFDLLDVLEFNQVVIFVKSVQRCIALAQLLVEQNFPAIAIHRGMPQEE

SEQ ID NO: 22986 - protein, 690 aa, Homo sapiens
  Payload ID: 4592
  Gene Symbol: DDX4
  Gene Name: DEAD (Asp-Glu-Ala-Asp) box polypeptide 4
  Uniprot ID: Q9NQI0
  ENSP ID: ENSP00000334167
MGDEDWEAEINPHMSSYVPIFEKDRYSGENGDNFNRTPASSSEMDDGPSRRDHFMKSGFASGRNFGNRDAGECNKRDNTSTMGGFGVGKSFGNRGFSNSRFEDGDSSGFWRESSNDCEDNPTRNRGFSKRGDNDLDPDECMQRTGGLFGSRRPVLSGTGNGDTSQSRSGSGSERGGYKGLNEEVITGSGKNSWKSEAEGGESSDTQGPKVTYIPPPPPEDEDSIFAHYQTGINFDKYDTILVEVSGHDAPPAILTFEEANLCQTLNNNIAKAGYTKLTPVQKYSIPIILAGRDLMACAQTGSGKTAAFLLPILAHMMHDGITASRFKELQEPECIIVAPTRELVNQIYLEARKFSFGTCVRAVVIYGGTQLGHSIRQIVQGCNILCATPGRLMDIIGKEKIGLKQIKYLVLDEADRMLDMGFGPEMKKLISCPGMPSKEQRQTLMFSATFPEEIQRLAAEFLKSNYLFVAVGQVGGACRDVQQTVLQVGQFSKREKLVEILRNIGDERTMVFVETKKKADFIATFLCQEKISTTSIHGDREQREREQALGDFRFGKCPVLVATSVAARGLDIENVQHVINFDLPSTIDEYVHRIGRTGRCGNTGRAISFFDLESDNHLAQPLVKVLTDAQQDVPAWLEEIAFSTYIPGFSGSTRGNVFASVDTRKGKSTLNTAGFSSSQAPNPVDDESWD

SEQ ID NO: 22987 - protein, 690 aa, Homo sapiens; identical to SEQ ID NO: 22986
  Payload ID: 4592
  Gene Symbol: DDX4
  Gene Name: DEAD (Asp-Glu-Ala-Asp) box polypeptide 4
  Uniprot ID: Q9NQI0
  ENSP ID: ENSP00000347087

SEQ ID NO: 22988 - protein, 105 aa, Homo sapiens
  Payload ID: 4592
  Gene Symbol: DDX4
  Gene Name: DEAD (Asp-Glu-Ala-Asp) box polypeptide 4
  ENSP ID: ENSP00000421960
MGDEDWEAEINPHMSSYVPIFEKDRYSGENGDNFNRTPASSSEMDDGPSRRDHFMKSGFASGRNFGNRDAGECNKRDNTSTMGGFGVGKSFGNRGFSNSRFEDGD

SEQ ID NO: 22989 - protein, 305 aa, Homo sapiens
  Payload ID: 4592
  Gene Symbol: DDX4
  Gene Name: DEAD (Asp-Glu-Ala-Asp) box polypeptide 4
  ENSP ID: ENSP00000423102
  MOD_RES (1)..(1): Any amino acid
XFSNSRFEDGDSSGFWRESSNDCEDNPTRNRGFSKRGGYRDGNNSEASGPYRRGGRGSFRGCRGGFGLGSPNNDLDPDECMQRTGGLFGSRRPVLSGTGNGDTSQSRSGSGSERGGYKGLNEEVITGSGKNSWKSEAEGGESSDTQGPKVTYIPPPPPEDEDSIFAHYQTGINFDKYDTILVEVSGHDAPPAILTFEEANLCQTLNNNIAKAGYTKLTPVQKYSIPIILAGRDLMACAQTGSGKTAAFLLPILAHMMHDGITASRFKELQEPECIIVAPTRELVNQIYLEARKFSFGLVSNRSNT

SEQ ID NO: 22990 - protein, 575 aa, Homo sapiens
  Payload ID: 4592
  Gene Symbol: DDX4
  Gene Name: DEAD (Asp-Glu-Ala-Asp) box polypeptide 4
  Uniprot ID: Q9NQI0
  ENSP ID: ENSP00000423123
MGSRNLFLTNSPESSNDCEDNPTRNRGFSKRGDNDLDPDECMQRTGGLFGSRRPVLSGTGNGDTSQSRSGSGSERDSWKSEAEGGESSDTQGPKVTYIPPPPPEDEDSIFAHYQTGINFDKYDTILVEVSGHDAPPAILTFEEANLCQTLNNNIAKAGYTKLTPVQKYSIPIILAGRDLMACAQTGSGKTAAFLLPILAHMMHDGITASRFKELQEPECIIVAPTRELVNQIYLEARKFSFGTCVRAVVIYGGTQLGHSIRQIVQGCNILCATPGRLMDIIGKEKIGLKQIKYLVLDEADRMLDMGFGPEMKKLISCPGMPSKEQRQTLMFSATFPEEIQRLAAEFLKSNYLFVAVGQVGGACRDVQQTVLQVGQFSKREKLVEILRNIGDERTMVFVETKKKADFIATFLCQEKISTTSIHGDREQREREQALGDFRFGKCPVLVATSVAARGLDIENVQHVINFDLPSTIDEYVHRIGRTGRCGNTGRAISFFDLESDNHLAQPLVKVLTDAQQDVPAWLEEIAFSTYIPGFSGSTRGNVFASVDTRKGKSTLNTAGFSSSQAPNPVDDESWD

SEQ ID NO: 22991 - protein, 159 aa, Homo sapiens
  Payload ID: 4592
  Gene Symbol: DDX4
  Gene Name: DEAD (Asp-Glu-Ala-Asp) box polypeptide 4
  ENSP ID: ENSP00000424112
MGDEDWEAEINPHMSSYVPIFEKDRYSGENGDNFNRTPASSSEMDDGPSRRDHFMKSGFASGRNFGNRDAGECNKRDNTSTMGGFGVGKSFGNRGFSNSRFEDGDSSGFWRESSNDCEDNPTRNRGFSKRGGYRDGNNSEASGPYRRGGRGSFRGCRGG

SEQ ID NO: 22992 - protein, 142 aa, Homo sapiens
  Payload ID: 4592
  Gene Symbol: DDX4
  Gene Name: DEAD (Asp-Glu-Ala-Asp) box polypeptide 4
  ENSP ID: ENSP00000424779
MGDEDWEAEINPHMSSYVPIFEKDRYSGENGDNFNRTPASSSDAGECNKRDNTSTMGGFGVGKSFGNRGFSNSRFEDGDSSGFWRESSNDCEDNPTRNRGFSKRGGYRDGNNSEASGPYRRGGRGSFRGCRGGFGLGSPNND

SEQ ID NO: 22993 - protein, 724 aa, Homo sapiens
  Payload ID: 4592
  Gene Symbol: DDX4
  Gene Name: DEAD (Asp-Glu-Ala-Asp) box polypeptide 4
  Uniprot ID: Q9NQI0
  ENSP ID: ENSP00000424838
MGDEDWEAEINPHMSSYVPIFEKDRYSGENGDNFNRTPASSSEMDDGPSRRDHFMKSGFASGRNFGNRDAGECNKRDNTSTMGGFGVGKSFGNRGFSNSRFEDGDSSGFWRESSNDCEDNPTRNRGFSKRGGYRDGNNSEASGPYRRGGRGSFRGCRGGFGLGSPNNDLDPDECMQRTGGLFGSRRPVLSGTGNGDTSQSRSGSGSERGGYKGLNEEVITGSGKNSWKSEAEGGESSDTQGPKVTYIPPPPPEDEDSIFAHYQTGINFDKYDTILVEVSGHDAPPAILTFEEANLCQTLNNNIAKAGYTKLTPVQKYSIPIILAGRDLMACAQTGSGKTAAFLLPILAHMMHDGITASRFKELQEPECIIVAPTRELVNQIYLEARKFSFGTCVRAVVIYGGTQLGHSIRQIVQGCNILCATPGRLMDIIGKEKIGLKQIKYLVLDEADRMLDMGFGPEMKKLISCPGMPSKEQRQTLMFSATFPEEIQRLAAEFLKSNYLFVAVGQVGGACRDVQQTVLQVGQFSKREKLVEILRNIGDERTMVFVETKKKADFIATFLCQEKISTTSIHGDREQREREQALGDFRFGKCPVLVATSVAARGLDIENVQHVINFDLPSTIDEYVHRIGRTGRCGNTGRAISFFDLESDNHLAQPLVKVLTDAQQDVPAWLEEIAFSTYIPGFSGSTRGNVFASVDTRKGKSTLNTAGFSSSQAPNPVDDESWD

SEQ ID NO: 22994 - protein, 704 aa, Homo sapiens
  Payload ID: 4592
  Gene Symbol: DDX4
  Gene Name: DEAD (Asp-Glu-Ala-Asp) box polypeptide 4
  Uniprot ID: Q9NQI0
  ENSP ID: ENSP00000425359
MGDEDWEAEINPHMSSYVPIFEKDRYSGENGDNFNRTPASSSEMDDGPSRRDHFMKSGFASGRNFGNRDAGECNKRDNTSTMGGFGVGKSFGNRGFSNSRFEDGDSSGFWRGYRDGNNSEASGPYRRGGRGSFRGCRGGFGLGSPNNDLDPDECMQRTGGLFGSRRPVLSGTGNGDTSQSRSGSGSERGGYKGLNEEVITGSGKNSWKSEAEGGESSDTQGPKVTYIPPPPPEDEDSIFAHYQTGINFDKYDTILVEVSGHDAPPAILTFEEANLCQTLNNNIAKAGYTKLTPVQKYSIPIILAGRDLMACAQTGSGKTAAFLLPILAHMMHDGITASRFKELQEPECIIVAPTRELVNQIYLEARKFSFGTCVRAVVIYGGTQLGHSIRQIVQGCNILCATPGRLMDIIGKEKIGLKQIKYLVLDEADRMLDMGFGPEMKKLISCPGMPSKEQRQTLMFSATFPEEIQRLAAEFLKSNYLFVAVGQVGGACRDVQQTVLQVGQFSKREKLVEILRNIGDERTMVFVETKKKADFIATFLCQEKISTTSIHGDREQREREQALGDFRFGKCPVLVATSVAARGLDIENVQHVINFDLPSTIDEYVHRIGRTGRCGNTGRAISFFDLESDNHLAQPLVKVLTDAQQDVPAWLEEIAFSTYIPGFSGSTRGNVFASVDTRKGKSTLNTAGFSSSQAPNPVDDESWD

SEQ ID NO: 22995 - protein, 518 aa, Homo sapiens
  Payload ID: 4592
  Gene Symbol: DDX4
  Gene Name: DEAD (Asp-Glu-Ala-Asp) box polypeptide 4
  ENSP ID: ENSP00000427167
MGDEDWEAEINPHMSSYVPIFEKDRYSGENGDNFNRTPASSSEMDDGPSRRDHFMKSGFASGRNFGNRDAGECNKRDNTSTMGGFGVGKSFGNRGFSNSRFEDGDSSGFWRGYRDGNNSEASGPYRRGGRGSFRGCRGGFGLGSPNNDLDPDECMQRTGGLFGSRRPVLSGTGNGDTSQSRSGSGSERGGYKGLNEEVITGSGKNSWKSEAEGGESSDTQGPKVTYIPPPPPEDEDSIFAHYQTGINFDKYDTILVEVSGHDAPPAILTFEEANLCQTLNNNIAKAGYTKLTPVQKYSIPIILAGRDLMACAQTGSGKTAAFLLPILAHMMHDGITASRFKELQEPECIIVAPTRELVNQIYLEARKFSFGTCVRAVVIYGGTQLGHSIRQIVQGCNILCATPGRLMDIIGKEKIGLKQIKYLVLDEADRMLDMGFGPEMKKLISCPGMPSKEQRQTLMFSATFPEEIQRLAAEFLKSNYLFVAVGQVGGACRDVQQTVLQVGQFSKREKLVEILRNI

SEQ ID NO: 22996 - protein, 156 aa, Homo sapiens
  Payload ID: 4592
  Gene Symbol: DDX4
  Gene Name: DEAD (Asp-Glu-Ala-Asp) box polypeptide 4
  ENSP ID: ENSP00000427522
MWQLYSPEISTIRHLHVACRLIGDRYSGENGDNFNRTPASSSEMDDGPSRRDHFMKSGFASGRNFGNRDAGECNKRDNTSTMGGFGVGKSFGNRGFSNSRFEDGDSSGFWRESSNDCEDNPTRNRGFSKRGGYRDGNNSEASGPYRRGGRGSFRGC

SEQ ID NO: 22997 - protein, 50 aa, Homo sapiens
  Payload ID: 4592
  Gene Symbol: DDX4
  Gene Name: DEAD (Asp-Glu-Ala-Asp) box polypeptide 4
  ENSP ID: ENSP00000430431
  MOD_RES (1)..(1): Any amino acid
XGSRNLFLTNSPESSNDCEDNPTRNRGFSKRGGKDHILEQFVLNTETLNW

SEQ ID NO: 22998 - protein, 640 aa, Homo sapiens
  Payload ID: 4593
  Gene Symbol: DDX41
  Gene Name: DEAD (Asp-Glu-Ala-Asp) box polypeptide 41
  ENSP ID: ENSP00000330349
RREARPRACGSGREEGSRPCLTGVCLQRARTDEVPAGGSRSEAEDEDDEDYVPYVPLRQRRQLLLQKLLQRRRKGAAEEEQQDSGSEPRGDEDDIPLGPQSNVSLLDQHQHLKEKAEARKESAKEKQLKEEEKILESVAEGRALMSVKEMAKGITYDDPIKTSWTPPRYVLSMSEERHERVRKKYHILVEGDGIPPPIKSFKEMKFPAAILRGLKKKGIHHPTPIQIQGIPTILSGRDMIGIAFTGSGKTLVFTLPVIMFCLEQEKRLPFSKREGPYGLIICPSRELARQTHGILEYYCRLLQEDSSPLLRCALCIGGMSVKEQMETIRHGVHMMVATPGRLMDLLQKKMVSLDICRYLALDEADRMIDMGFEGDIRTIFSYFKGQRQTLLFSATMPKKIQNFAKSALVKPVTINVGRAGAASLDVIQEVEYVKEEAKMVYLLECLQKTPPPVLIFAEKKADVDAIHEYLLLKGVEAVAIHGGKDQEERTKAIEAFREGKKDVLVATDVASKGLDFPAIQHVINYDMPEEIENYVHRIGRTGRSGNTGIATTFINKACDESVLMDLKALLLEAKQKVPPVLQVLHCGDESMLDIGGERGCAFCGGLGHRITDCPKLEAMQTKQVSNIGRKDYLAHSSMDF

SEQ ID NO: 22999 - protein, 173 aa, Homo sapiens
  Payload ID: 4593
  Gene Symbol: DDX41
  Gene Name: DEAD (Asp-Glu-Ala-Asp) box polypeptide 41
  ENSP ID: ENSP00000421460
  MOD_RES (1)..(1): Any amino acid
XIPPPIKSFKEMKFPAAILRGLKKKGIHHPTPIQIQGIPTILSGRDMIGIAFTGSGKTLVFTLPVIMFCLEQEKRLPFSKREGPYGLIICPSRELARQTHGILEYYCRLLQEDSSPLLRCALCIGGMSVKEQMETIRHAVQSSADHQRPWTRPSVHRWARPHPGGLPPRTSEY

SEQ ID NO: 23000 - protein, 622 aa, Homo sapiens
  Payload ID: 4593
  Gene Symbol: DDX41
  Gene Name: DEAD (Asp-Glu-Ala-Asp) box polypeptide 41
  Uniprot ID: Q9UJV9
  ENSP ID: ENSP00000422753
MEESEPERKRARTDEVPAGGSRSEAEDEDDEDYVPYVPLRQRRQLLLQKLLQRRRKGAAEEEQQDSGSEPRGDEDDIPLGPQSNVSLLDQHQHLKEKAEARKESAKEKQLKEEEKILESVAEGRALMSVKEMAKGITYDDPIKTSWTPPRYVLSMSEERHERVRKKYHILVEGDGIPPPIKSFKEMKFPAAILRGLKKKGIHHPTPIQIQGIPTILSGRDMIGIAFTGSGKTLVFTLPVIMFCLEQEKRLPFSKREGPYGLIICPSRELARQTHGILEYYCRLLQEDSSPLLRCALCIGGMSVKEQMETIRHGVHMMVATPGRLMDLLQKKMVSLDICRYLALDEADRMIDMGFEGDIRTIFSYFKGQRQTLLFSATMPKKIQNFAKSALVKPVTINVGRAGAASLDVIQEVEYVKEEAKMVYLLECLQKTPPPVLIFAEKKADVDAIHEYLLLKGVEAVAIHGGKDQEERTKAIEAFREGKKDVLVATDVASKGLDFPAIQHVINYDMPEEIENYVHRIGRTGRSGNTGIATTFINKACDESVLMDLKALLLEAKQKVPPVLQVLHCGDESMLDIGGERGCAFCGGLGHRITDCPKLEAMQTKQVSNIGRKDYLAHSSMDF

SEQ ID NO: 23001 - protein, 126 aa, Homo sapiens
  Payload ID: 4593
  Gene Symbol: DDX41
  Gene Name: DEAD (Asp-Glu-Ala-Asp) box polypeptide 41
  ENSP ID: ENSP00000425739
LDQHQHLKEKAEARKESAKEKQLKEEEKILESVAEGRALMSVKEMAKGITYDDPIKTSWTPPRYVLSMSEERHERVRKKYHILVEGDGIPPPIKSFKEMKFPAVSSSATCRGSASFTGFGALRKYL

SEQ ID NO: 23002 - protein, 201 aa, Homo sapiens
  Payload ID: 4593
  Gene Symbol: DDX41
  Gene Name: DEAD (Asp-Glu-Ala-Asp) box polypeptide 41
  ENSP ID: ENSP00000426330
MEESEPERKRARTDEVPAGGSRSEAEDEDDEDYVPYVPLRQRRQLLLQKLLQRRRKGAAEEEQQDSGSEPRGDEDDIPLGPQSNVSLLDQHQHLKEKAEARKESAKEKQLKEEEKILESVAEGRALMSVKEMAKGITYDDPIKTSWTPPRYVLSMSEERHERVRKKYHILVEGDGIPPPIKSFKEMKFPAGVVPVLQALGL

SEQ ID NO: 23003 - protein, 49 aa, Homo sapiens
  Payload ID: 4593
  Gene Symbol: DDX41
  Gene Name: DEAD (Asp-Glu-Ala-Asp) box polypeptide 41
  ENSP ID: ENSP00000427082
MEESEPERKRARTDEVPAGGSRSEAEDEDDEDYVPYVPLRQRRQLLPGS

SEQ ID NO: 23004 - protein, 201 aa, Homo sapiens; identical to SEQ ID NO: 23002
  Payload ID: 4593
  Gene Symbol: DDX41
  Gene Name: DEAD (Asp-Glu-Ala-Asp) box polypeptide 41
  ENSP ID: ENSP00000486367

SEQ ID NO: 23005 - protein, 49 aa, Homo sapiens; identical to SEQ ID NO: 23003
  Payload ID: 4593
  Gene Symbol: DDX41
  Gene Name: DEAD (Asp-Glu-Ala-Asp) box polypeptide 41
  ENSP ID: ENSP00000487280

SEQ ID NO: 23006 - protein, 648 aa, Homo sapiens
  Payload ID: 4594
  Gene Symbol: DDX43
  Gene Name: DEAD (Asp-Glu-Ala-Asp) box polypeptide 43
  Uniprot ID: Q9NXZ2
  ENSP ID: ENSP00000359361
MSHHGGAPKASTWVVASRRSSTVSRAPERRPAEELNRTGPEGYSVGRGGRWRGTSRPPEAVAAGHEELPLCFALKSHFVGAVIGRGGSKIKNIQSTTNTTIQIIQEQPESLVKIFGSKAMQTKAKAVIDNFVKKLEENYNSECGIDTAFQPSVGKDGSTDNNVVAGDRPLIDWDQIREEGLKWQKTKWADLPPIKKNFYKESTATSAMSKVEADSWRKENFNITWDDLKDGEKRPIPNPTCTFDDAFQCYPEVMENIKKAGFQKPTPIQSQAWPIVLQGIDLIGVAQTGTGKTLCYLMPGFIHLVLQPSLKGQRNRPGMLVLTPTRELALQVEGECCKYSYKGLRSVCVYGGGNRDEQIEELKKGVDIIIATPGRLNDLQMSNFVNLKNITYLVLDEADKMLDMGFEPQIMKILLDVRPDRQTVMTSATWPHSVHRLAQSYLKEPMIVYVGTLDLVAVSSVKQNIIVTTEEEKWSHMQTFLQSMSSTDKVIVFVSRKAVADHLSSDLILGNISVESLHGDREQRDREKALENFKTGKVRILIATDLASRGLDVHDVTHVYNFDFPRNIEEYVHRIGRTGRAGRTGVSITTLTRNDWRVASELINILERANQSIPEELVSMAERFKAHQQKREMERKMERPQGRPKKFH

SEQ ID NO: 23007 - protein, 1031 aa, Homo sapiens
  Payload ID: 4595
  Gene Symbol: DDX46
  Gene Name: DEAD (Asp-Glu-Ala-Asp) box polypeptide 46
  Uniprot ID: Q7L014
  ENSP ID: ENSP00000346236
MGRESRHYRKRSASRGRSGSRSRSRSPSDKRSKRGDDRRSRSRDRDRRRERSRSRDKRRSRSRDRKRLRRSRSRERDRSRERRRSRSRDRRRSRSRSRGRRSRSSSPGNKSKKTENRSRSKEKTDGGESSKEKKKDKDDKEDEKEKDAGNFDQNKLEEEMRKRKERVEKWREEQRKKAMENIGELKKEIEEMKQGKKWSLEDDDDDEDDPAEAEKEGNEMEGEELDPLDAYMEEVKEEVKKFNMRSVKGGGGNEKKSGPTVTKVVTVVTTKKAVVDSDKKKGELMENDQDAMEYSSEEEEVDLQTALTGYQTKQRKLLEPVDHGKIEYEPFRKNFYVEVPELAKMSQEEVNVFRLEMEGITVKGKGCPKPIKSWVQCGISMKILNSLKKHGYEKPTPIQTQAIPAIMSGRDLIGIAKTGSGKTIAFLLPMFRHIMDQRSLEEGEGPIAVIMTPTRELALQITKECKKFSKTLGLRVVCVYGGTGISEQIAELKRGAEIIVCTPGRMIDMLAANSGRVTNLRRVTYVVLDEADRMFDMGFEPQVMRIVDNVRPDRQTVMFSATFPRAMEALARRILSKPIEVQVGGRSVVCSDVEQQVIVIEEEKKFLKLLELLGHYQESGSVIIFVDKQEHADGLLKDLMRASYPCMSLHGGIDQYDRDSIINDFKNGTCKLLVATSVAARGLDVKHLILVVNYSCPNHYEDYVHRAGRTGRAGNKGYAYTFITEDQARYAGDIIKALELSGTAVPPDLEKLWSDFKDQQKAEGKIIKKSSGFSGKGFKFDETEQALANERKKLQKAALGLQDSDDEDAAVDIDEQIESMFNSKKRVKDMAAPGTSSVPAPTAGNAEKLEIAKRLALRINAQKNLGIESQDVMQQATNAILRGGTILAPTVSAKTIAEQLAEKINAKLNYVPLEKQEEERQDGGQNESFKRYEEELEINDFPQTARWKVTSKEALQRISEYSEAAITIRGTYFPPGKEPKEGERKIYLAIESANELAVQKAKAEITRLIKEELIRLQNSYQPTNKGRYKVL

SEQ ID NO: 23008 - protein, 1032 aa, Homo sapiens
  Payload ID: 4595
  Gene Symbol: DDX46
  Gene Name: DEAD (Asp-Glu-Ala-Asp) box polypeptide 46
  ENSP ID: ENSP00000416534
MGRESRHYRKRSASRGRSGSRSRSRSPSDKRSKRGDDRRSRSRDRDRRRERSRSRDKRRSRSRDRKRLRRSRSRERDRSRERRRSRSRDRRRSRSRSRGRRSRSSSPGNKSKKTENRSRSKEKTDGGESSKEKKKDKDDKEDEKEKDAGNFDQNKLEEEMRKRKERVEKWREEQRKKAMENIGELKKEIEEMKQGKKWSLEDDDDDEDDPAEAEKEGNEMEGEELDPLDAYMEEVKEEVKKFNMRSVKGGGGNEKKSGPTVTKVVTVVTTKKAVVDSDKKKGELMENDQDAMEYSSEEEEVDLQTALTGYQTKQRKLLEPVDHGKIEYEPFRKNFYVEVPELAKMSQEEVNVFRLEMEGITVKGKGCPKPIKSWVQCGISMKILNSLKKHGYEKPTPIQTQAIPAIMSGRDLIGIAKTGSGKTIAFLLPMFRHIMDQRSLEEGEGPIAVIMTPTRELALQITKECKKFSKTLGLRVVCVYGGTGISEQIAELKRGAEIIVCTPGRMIDMLAANSGRVTNLRRVTYVVLDEADRMFDMGFEPQVMRIVDNVRPDRQTVMFSATFPRAMEALARRILSKPIEVQVGGRSVVCSDVEQQVIVIEEEKKFLKLLELLGHYQESGSVIIFVDKQEHADGLLKDLMRASYPCMSLHGGIDQYDRDSIINDFKNGTCKLLVATSVAARGLDVKHLILVVNYSCPNHYEDYVHRAGRTGRAGNKGYAYTFITEDQARYAGDIIKALELSGTAVPPDLEKLWSDFKDQQKAEGKIIKKSSGFSGKGFKFDETEQALANERKKLQKAALGLQDSDDEDAAVDIDEQIESMFNSKKRVKDMAAPGTSSVPAPTAGNAEKLEIAKRLALRINAQKNLGIESQVDVMQQATNAILRGGTILAPTVSAKTIAEQLAEKINAKLNYVPLEKQEEERQDGGQNESFKRYEEELEINDFPQTARWKVTSKEALQRISEYSEAAITIRGTYFPPGKEPKEGERKIYLAIESANELAVQKAKAEITRLIKEELIRLQNSYQPTNKGRYKVL

SEQ ID NO: 23009 - protein, 70 aa, Homo sapiens
  Payload ID: 4595
  Gene Symbol: DDX46
  Gene Name: DEAD (Asp-Glu-Ala-Asp) box polypeptide 46
  ENSP ID: ENSP00000425073
  MOD_RES (1)..(1): Any amino acid
XEAAITIRGTYFPPGKEPKEGERKIYLAIESANELAVQKAKAEITRLIKEELIRLQNSYQPTNKGRYKVL

SEQ ID NO: 23010 - protein, 29 aa, Homo sapiens
  Payload ID: 4595
  Gene Symbol: DDX46
  Gene Name: DEAD (Asp-Glu-Ala-Asp) box polypeptide 46
  ENSP ID: ENSP00000426767
  MOD_RES (1)..(1): Any amino acid
XEVPELAKMSQEGMAMKSPRPSKPKLFLL

SEQ ID NO: 23011 - protein, 471 aa, Homo sapiens
  Payload ID: 4595
  Gene Symbol: DDX46
  Gene Name: DEAD (Asp-Glu-Ala-Asp) box polypeptide 46
  ENSP ID: ENSP00000427290
MGRESRHYRKRSASRGRSGSRSRSRSPSDKRSKRGDDRRSRSRDRDRRRERSRSRDKRRSRSRDRKRLRSRSKEKTDGGESSKEKKKDKDDKEDEKEKDAGNFDQNKLEEEMRKRKERVEKWREEQRKKAMENIGELKKEIEEMKQGKKWSLEDDDDDEDDPAEAEKEGNEMEGEELDPLDAYMEEVKEEVKKFNMRSVKGGGGNEKKSGPTVTKVVTVVTTKKAVVDSDKKKGELMENDQDAMEYSSEEEEVDLQTALTGYQTKQRKLLEPVDHGKIEYEPFRKNFYVEVPELAKMSQEEVNVFRLEMEGITVKGKGCPKPIKSWVQCGISMKILNSLKKHGYEKPTPIQTQAIPAIMSGRDLIGIAKTGSGKTIAFLLPMFRHIMDQRSLEEGEGPIAVIMTPTRELALQITKECKKFSKTLGLRVVCVYGGTGISEQIAELKRGAEIIVCTPGRMIDMLAANSGDAVR

SEQ ID NO: 23012 - protein, 471 aa, Homo sapiens; identical to SEQ ID NO: 23011
  Payload ID: 4595
  Gene Symbol: DDX46
  Gene Name: DEAD (Asp-Glu-Ala-Asp) box polypeptide 46
  ENSP ID: ENSP00000487025

SEQ ID NO: 23013 - protein, 406 aa, Homo sapiens
  Payload ID: 4596
  Gene Symbol: DDX47
  Gene Name: DEAD (Asp-Glu-Ala-Asp) box polypeptide 47
  Uniprot ID: Q9H0S4
  ENSP ID: ENSP00000319578
MAAPEEHDSPTEASQPIVEEEETKTFKDLGVTDVLCEACDQLGWTKPTKIQIEAIPLALQGRDIIGLAETGSGKTGAFALPILNALLETPQRLFALVLTPTRELAFQISEQFEALGSSIGVQSAVIVGGIDSMSQSLALAKKPHIIIATPGRLIDHLENTKGFNLRALKYLVMDEADRILNMDFETEVDKILKVIPRDRKTFLFSATMTKKVQKLQRAALKNPVKCAVSSKYQTVEKLQQYYIFIPSKFKSKRLGSLNKFKAKARSILLATDVASRGLDIPHVDVVVNFDIPTHSKDYIHRVGRTARAGRSGKAITFVTQYDVELFQRIEHLIGKKLPGFPTQDDEVMMLTERVAEAQRFARMELREHGEKKKRSREDAGDNDDTEGAIGVRNKVAGGKMKKRKGR

SEQ ID NO: 23014 - protein, 455 aa, Homo sapiens
  Payload ID: 4596
  Gene Symbol: DDX47
  Gene Name: DEAD (Asp-Glu-Ala-Asp) box polypeptide 47
  Uniprot ID: Q9H0S4
  ENSP ID: ENSP00000350698
MAAPEEHDSPTEASQPIVEEEETKTFKDLGVTDVLCEACDQLGWTKPTKIQIEAIPLALQGRDIIGLAETGSGKTGAFALPILNALLETPQRLFALVLTPTRELAFQISEQFEALGSSIGVQSAVIVGGIDSMSQSLALAKKPHIIIATPGRLIDHLENTKGFNLRALKYLVMDEADRILNMDFETEVDKILKVIPRDRKTFLFSATMTKKVQKLQRAALKNPVKCAVSSKYQTVEKLQQYYIFIPSKFKDTYLVYILNELAGNSFMIFCSTCNNTQRTALLLRNLGFTAIPLHGQMSQSKRLGSLNKFKAKARSILLATDVASRGLDIPHVDVVVNFDIPTHSKDYIHRVGRTARAGRSGKAITFVTQYDVELFQRIEHLIGKKLPGFPTQDDEVMMLTERVAEAQRFARMELREHGEKKKRSREDAGDNDDTEGAIGVRNKVAGGKMKKRKGR

SEQ ID NO: 23015 - protein, 196 aa, Homo sapiens
  Payload ID: 4596
  Gene Symbol: DDX47
  Gene Name: DEAD (Asp-Glu-Ala-Asp) box polypeptide 47
  ENSP ID: ENSP00000444000
MAAPEEHDSPTEASQPIVEEEETKTFKDLGVTDVLCEACDQLGWTKPTKIQIEAIPLALQAVIVGGIDSMSQSLALAKKPHIIIATPGRLIDHLENTKGFNLRALKYLVMDEADRILNMDFETEVDKILKVIPRDRKTFLFSATMTKKVQKLQRAALKNPVKCAVSSKYQTVEKLQQYYIFIPSKFKSKRLGSLNK

SEQ ID NO: 23016 - protein, 483 aa, Homo sapiens
  Payload ID: 4597
  Gene Symbol: DDX49
  Gene Name: DEAD (Asp-Glu-Ala-Asp) box polypeptide 49
  Uniprot ID: Q9Y6V7
  ENSP ID: ENSP00000247003
MAGFAELGLSSWLVEQCRQLGLKQPTPVQLGCIPAILEGRDCLGCAKTGSGKTAAFVLPILQKLSEDPYGIFCLVLTPTRELAYQIAEQFRVLGKPLGLKDCIIVGGMDMVAQALELSRKPHVVIATPGRLADHLRSSNTFSIKKIRFLVMDEADRLLEQGCTDFTVDLEAILAAVPARRQTLLFSATLTDTLRELQGLATNQPFFWEAQAPVSTVEQLDQRYLLVPEKVKDAYLVHLIQRFQDEHEDWSIIIFTNTCKTCQILCMMLRKFSFPTVALHSMMKQKERFAALAKFKSSIYRILIATDVASRGLDIPTVQVVINHNTPGLPKIYIHRVGRTARAGRQGQAITLVTQYDIHLVHAIEEQIKKKLEEFSVEEAEVLQILTQVNVVRRECEIKLEAAHFDEKKEINKRKQLILEGKDPDLEAKRKAELAKIKQKNRRFKEKVEETLKRQKAGRAGHKGRPPRTPSGSHSGPVPSQGLV

SEQ ID NO: 23017 - protein, 41 aa, Homo sapiens
  Payload ID: 4597
  Gene Symbol: DDX49
  Gene Name: DEAD (Asp-Glu-Ala-Asp) box polypeptide 49
  ENSP ID: ENSP00000469086
MAGFAELGLSSWLVEQCRQLGLKQPTPVQLGCIPAILEEAV

SEQ ID NO: 23018 - protein, 118 aa, Homo sapiens
  Payload ID: 4597
  Gene Symbol: DDX49
  Gene Name: DEAD (Asp-Glu-Ala-Asp) box polypeptide 49
  ENSP ID: ENSP00000470440
MAGFAELGLSSWLVEQCRQLGLKQPTPVQLGCIPAILEGRDCLGCAKTGSGKTAAFVLPILQKLSEDPYGIFCLVLTPTRIKQDGPGAVAHTCNPSTLGAPGSWPTRSQSSSGSWGSL

SEQ ID NO: 23019 - protein, 166 aa, Homo sapiens
  Payload ID: 4597
  Gene Symbol: DDX49
  Gene Name: DEAD (Asp-Glu-Ala-Asp) box polypeptide 49
  ENSP ID: ENSP00000471292
MAGFAELGLSSWLVEQCRQLGLKQPTPVQLGCIPAILEGRDCLGCAKTGSGKTAAFVLPILQKLSEDPYGIFCLVLTPTRGPAELNKMAPVQWLTPVIPALWELQGAGLPDRRAVPGPGEASRAERLHHRRWHGHGGPGAGALSETTRGHRHAGAPGRSPAQLQHF

SEQ ID NO: 23020 - protein, 112 aa, Homo sapiens
  Payload ID: 4597
  Gene Symbol: DDX49
  Gene Name: DEAD (Asp-Glu-Ala-Asp) box polypeptide 49
  ENSP ID: ENSP00000472084
MAGFAELGLSSWLVEQCRQLGLKQPTPVQLGCIPAILEGRDCLGCAKTGSGKTAAFVLPILQKLSEDPYGIFCLVLTPTRHGGPGAGALSETTRGHRHAGAPGRSPAQLQHF

SEQ ID NO: 23021 - protein, 41 aa, Homo sapiens; identical to SEQ ID NO: 23017
  Payload ID: 4597
  Gene Symbol: DDX49
  Gene Name: DEAD (Asp-Glu-Ala-Asp) box polypeptide 49
  ENSP ID: ENSP00000472289

SEQ ID NO: 23022 - protein, 166 aa, Homo sapiens; identical to SEQ ID NO: 23019
  Payload ID: 4597
  Gene Symbol: DDX49
  Gene Name: DEAD (Asp-Glu-Ala-Asp) box polypeptide 49
  ENSP ID: ENSP00000487048

SEQ ID NO: 23023 - protein, 737 aa, Homo sapiens
  Payload ID: 4598
  Gene Symbol: DDX50
  Gene Name: DEAD (Asp-Glu-Ala-Asp) box polypeptide 50
  Uniprot ID: Q9BQ39
  ENSP ID: ENSP00000362687
MPGKLLWGDIMELEAPLEESESQKKERQKSDRRKSRHHYDSDEKSETRENGVTDDLDAPKAKKSKMKEKLNGDTEEGFNRLSDEFSKSHKSRRKDLPNGDIDEYEKKSKRVSSLDTSTHKSSDNKLEETLTREQKEGAFSNFPISEETIKLLKGRGVTYLFPIQVKTFGPVYEGKDLIAQARTGTGKTFSFAIPLIERLQRNQETIKKSRSPKVLVLAPTRELANQVAKDFKDITRKLSVACFYGGTSYQSQINHIRNGIDILVGTPGRIKDHLQSGRLDLSKLRHVVLDEVDQMLDLGFAEQVEDIIHESYKTDSEDNPQTLLFSATCPQWVYKVAKKYMKSRYEQVDLVGKMTQKAATTVEHLAIQCHWSQRPAVIGDVLQVYSGSEGRAIIFCETKKNVTEMAMNPHIKQNAQCLHGDIAQSQREITLKGFREGSFKVLVATNVAARGLDIPEVDLVIQSSPPQDVESYIHRSGRTGRAGRTGICICFYQPRERGQLRYVEQKAGITFKRVGVPSTMDLVKSKSMDAIRSLASVSYAAVDFFRPSAQRLIEEKGAVDALAAALAHISGASSFEPRSLITSDKGFVTMTLESLEEIQDVSCAWKELNRKLSSNAVSQITRMCLLKGNMGVCFDVPTTESERLQAEWHDSDWILSVPAKLPEIEEYYDGNTSSNSRQRSGWSSGRSGRSGRSGGRSGGRSGRQSRQGSRSGSRQDGRRRSGNRNRSRSGGHKRSFD

SEQ ID NO: 23024 - protein, 51 aa, Homo sapiens
  Payload ID: 4598
  Gene Symbol: DDX50
  Gene Name: DEAD (Asp-Glu-Ala-Asp) box polypeptide 50
  ENSP ID: ENSP00000474314
MPGKLLWGDIMELEAPLEESESQKKERQKSFMDIAISDKGLWTCTSLIGLL

SEQ ID NO: 23025 - protein, 39 aa, Homo sapiens
  Payload ID: 4598
  Gene Symbol: DDX50
  Gene Name: DEAD (Asp-Glu-Ala-Asp) box polypeptide 50
  ENSP ID: ENSP00000474785
MPGKLLWGDIMELEAPLEESESQKKERQKGCYEDLNKIS

SEQ ID NO: 23026 - protein, 730 aa, Homo sapiens [sequence omitted]

SEQ ID NO: 23027 - protein, 666 aa, Homo sapiens
  Payload ID: 4599
  Gene Symbol: DDX51
  Gene Name: DEAD (Asp-Glu-Ala-Asp) box polypeptide 51
  Uniprot ID: Q8N8A6
  ENSP ID: ENSP00000380495
MALFYVARYPGPDAAAAAGPEGAEAGAHGRARALLERLQSRARERQQQREPAQTEAAASTEPATRRRRRPRRRRRVNDAEPGSPEAPQGKRRKADGEDAGAESNEEAPGEPSAGSSEEAPGEPSAGSSEEAPGERSTSASAEAAPDGPALEEAAGPLVPGLVLGGFGKRKAPKVQPFLPRWLAEPNCVRRNVTEDLVPIEDIPDVHPDLQKQLRAHGISSYFPVQAAVIPALLESAACGFLVGRGGYRPSDLCVSAPTGSGKTLAFVIPVVQALLSRVVCHIRALVVLPTKELAQQVSKVFNIYTDATPLRVSLVTGQKSLAKEQESLVQKTADGYRCLADIVVATPGRLVDHIDQTPGFSLQQLRFLIIDEADRMIDSMHQSWLPRVVAAAFQSEDPADPCALLQRRQAQAVTAASTCCPQMPLQKLLFSATLTQNPEKLQQLGLHQPRLFSTGLAHRGLEDTDGDGDSGKYAFPVGLTHHYVPCSLSSKPLVVLHLVLEMGFSRVLCFTNSRENSHRLFLLVQAFGGVDVAEFSSRYGPGQRRMILKQFEQGKIQLLISTDATARGIDVQGVELVVNYDAPQYLRTYVHRVGRTARAGKTGQAFTLLLKVQERRFLRMLTEAGAPELQRHELSSKLLQPLVPRYEEALSQLEESVKEERKQRAA

SEQ ID NO: 23028 - protein, 101 aa, Homo sapiens
  Payload ID: 4600
  Gene Symbol: DDX52
  Gene Name: DEAD (Asp-Glu-Ala-Asp) box polypeptide 52
  ENSP ID: ENSP00000477779
MDVHDLFRRLGAGAKFDTRRFSADAARFQIGKRKYDFDSSEVLQGLDFFGNKKSVPGVCGASQTHQKPQNGEKKEESLTERKREQSKKKRKTMTSDKLLAE

SEQ ID NO: 23029 - protein, 599 aa, Homo sapiens
  Payload ID: 4600
  Gene Symbol: DDX52
  Gene Name: DEAD (Asp-Glu-Ala-Asp) box polypeptide 52
  Uniprot ID: Q9Y2R4
  ENSP ID: ENSP00000479504
MDVHDLFRRLGAGAKFDTRRFSADAARFQIGKRKYDFDSSEVLQGLDFFGNKKSVPGVCGASQTHQKPQNGEKKEESLTERKREQSKKKRKTMTSEIASQEEGATIQWMSSVEAKIEDKKVQRESKLTSGKLENLRKEKINFLRNKHKIHVQGTDLPDPIATFQQLDQEYKINSRLLQNILDAGFQMPTPIQMQAIPVMLHGRELLASAPTGSGKTLAFSIPILMQLKQPANKGFRALIISPTRELASQIHRELIKISEGTGFRIHMIHKAAVAAKKFGPKSSKKFDILVTTPNRLIYLLKQDPPGIDLASVEWLVVDESDKLFEDGKTGFRDQLASIFLACTSHKVRRAMFSATFAYDVEQWCKLNLDNVISVSIGARNSAVETVEQELLFVGSETGKLLAVRELVKKGFNPPVLVFVQSIERAKELFHELIYEGINVDVIHAERTQQQRDNTVHSFRAGKIWVLICTALLARGIDFKGVNLVINYDFPTSSVEYIHRIGRTGRAGNKGKAITFFTEDDKPLLRSVANVIQQAGCPVPEYIKGFQKLLSKQKKKMIKKPLERESISTTPKCFLEKAKDKQKKVTGQNSKKKVALEDKS

SEQ ID NO: 23030 - protein, 599 aa, Homo sapiens
  Payload ID: 4600
  Gene Symbol: DDX52
  Gene Name: DEAD (Asp-Glu-Ala-Asp) box polypeptide 52
  Uniprot ID: Q9Y2R4
  ENSP ID: ENSP00000480030
MDVHDLFRRLGAGAKFDTRRFSADAARFQIGKRKYDFDSSEVLQGLDFFGNKKSVPGVCGASQTHQKPQNGEKKEESLTERKREQSKKKRKTMTSEIASQEEGATIQWMSSVEAKIEDKKVQRESKLTSGKLENLRKEKINFLRNKHKIHVQGTDLPDPIATFQQLDQEYKINSRLLQNILDAGFQMPTPIQMQAIPVMLHGRELLASAPTGSGKTLAFSIPILMQLKQPANKGFRALIISPTRELASQIHRELIKISEGTGFRIHMIHKAAVAAKKFGPKSSKKFDILVTTPNRLIYLLKQDPPGIDLASVEWLVVDESDKLFEDGKTGFRDQLASIFLACTSHKVRRAMFSATFAYDVEQWCKLNLDNVISVSIGARNSAVETVEQELLFVGSETGKLLAMRELVKKGFNPPVLVFVQSIERAKELFHELIYEGINVDVIHAERTQQQRDNTVHSFRAGKIWVLICTALLARGIDFKGVNLVINYDFPTSSVEYIHRIGRTGRAGNKGKAITFFTEDDKPLLRSVANVIQQAGCPVPEYIKGFQKLLSKQKKKMIKKPLERESISTTPKCFLEKAKDKQKKVTGQNSKKKVALEDKS

SEQ ID NO: 23031 - protein, 112 aa, Homo sapiens
  Payload ID: 4600
  Gene Symbol: DDX52
  Gene Name: DEAD (Asp-Glu-Ala-Asp) box polypeptide 52
  ENSP ID: ENSP00000483141
MDVHDLFRRLGAGAKFDTRRFSADAARFQIGKRKYDFDSSEVLQGLDFFGNKKSVPGVCGASQTHQKPQNGEKKEESLTERKREQSKKKRKTMTSETGFHHVSQYGLDLLTS

SEQ ID NO: 23032 - protein, 115 aa, Homo sapiens
  Payload ID: 4600
  Gene Symbol: DDX52
  Gene Name: DEAD (Asp-Glu-Ala-Asp) box polypeptide 52
  ENSP ID: ENSP00000483836
  MOD_RES (1)..(1): Any amino acid
XNYDFPTSSVEYIHRIGRTGRAGNKGKAITFFTEDDKPLLRSVANVIQQAGCPVPEYIKGFQKLLSKQKKKMIKKPLERESISTTPKCFLEKAKDKQKKVTGQNSKKKVALEDKS

SEQ ID NO: 23033 - protein, 97 aa, Homo sapiens
  Payload ID: 4600
  Gene Symbol: DDX52
  Gene Name: DEAD (Asp-Glu-Ala-Asp) box polypeptide 52
  ENSP ID: ENSP00000484366
MDVHDLFRRLGAGAKFDTRRFSADAARFQIGKRKYDFDSSEVLQGLDFFGNKKSVPGVCGASQTHQKPQNGEKKEESLTERKREQSKKKRKTMTSGE

SEQ ID NO: 23034 - protein, 101 aa, Homo sapiens; identical to SEQ ID NO: 23028
  Payload ID: 4600
  Gene Symbol: DDX52
  Gene Name: DEAD (Asp-Glu-Ala-Asp) box polypeptide 52
  ENSP ID: ENSP00000487638

SEQ ID NO: 23035 - protein, 112 aa, Homo sapiens; identical to SEQ ID NO: 23031
  Payload ID: 4600
  Gene Symbol: DDX52
  Gene Name: DEAD (Asp-Glu-Ala-Asp) box polypeptide 52
  ENSP ID: ENSP00000487912

SEQ ID NO: 23036 - protein, 97 aa, Homo sapiens; identical to SEQ ID NO: 23033
  Payload ID: 4600
  Gene Symbol: DDX52
  Gene Name: DEAD (Asp-Glu-Ala-Asp) box polypeptide 52
  ENSP ID: ENSP00000488162

SEQ ID NO: 23037 - protein, 115 aa, Homo sapiens; identical to SEQ ID NO: 23032
  Payload ID: 4600
  Gene Symbol: DDX52
  Gene Name: DEAD (Asp-Glu-Ala-Asp) box polypeptide 52
  ENSP ID: ENSP00000488900
  MOD_RES (1)..(1): Any amino acid

SEQ ID NO: 23038 - protein, 631 aa, Homo sapiens
  Payload ID: 4601
  Gene Symbol: DDX53
  Gene Name: DEAD (Asp-Glu-Ala-Asp) box polypeptide 53
  Uniprot ID: Q86TM3
  ENSP ID: ENSP00000368667
MSHWAPEWKRAEANPRDLGASWDVRGSRGSGWSGPFGHQGPRAAGSREPPLCFKIKNNMVGVVIGYSGSKIKDLQHSTNTKIQIINGESEAKVRIFGNREMKAKAKAAIETLIRKQESYNSESSVDNAASQTPIGRNLGRNDIVGEAEPLSNWDRIRAAVVECEKRKWADLPPVKKNFYIESKATSCMSEMQVINWRKENFNITCDDLKSGEKRLIPKPTCRFKDAFQQYPDLLKSIIRVGIVKPTPIQSQAWPIILQGIDLIVVAQTGTGKTLSYLMPGFIHLDSQPISREQRNGPGMLVLTPTRELALHVEAECSKYSYKGLKSICIYGGRNRNGQIEDISKGVDIIIATPGRLNDLQMNNSVNLRSITYLVIDEADKMLDMEFEPQIRKILLDVRPDRQTVMTSATWPDTVRQLALSYLKDPMIVYVGNLNLVAVNTVKQNIIVTTEKEKRALTQEFVENMSPNDKVIMFVSQKHIADDLSSDFNIQGISAESLHGNSEQSDQERAVEDFKSGNIKILITTDIVSRGLDLNDVTHVYNYDFPRNIDVYVHRVGYIGRTGKTGTSVTLITQRDSKMAGELIKILDRANQSVPEDLVVMAEQYKLNQQKRHRETRSRKPGQRRKEFYFLS

SEQ ID NO: 23039 - protein, 881 aa, Homo sapiens
  Payload ID: 4602
  Gene Symbol: DDX54
  Gene Name: DEAD (Asp-Glu-Ala-Asp) box polypeptide 54
  Uniprot ID: Q8TDD1
  ENSP ID: ENSP00000304072
MAADKGPAAGPRSRAAMAQWRKKKGLRKRRGAASQARGSDSEDGEFEIQAEDDARARKLGPGRPLPTFPTSECTSDVEPDTREMVRAQNKKKKKSGGFQSMGLSYPVFKGIMKKGYKVPTPIQRKTIPVILDGKDVVAMARTGSGKTACFLLPMFERLKTHSAQTGARALILSPTRELALQTLKFTKELGKFTGLKTALILGGDRMEDQFAALHENPDIIIATPGRLVHVAVEMSLKLQSVEYVVFDEADRLFEMGFAEQLQEIIARLPGGHQTVLFSATLPKLLVEFARAGLTEPVLIRLDVDTKLNEQLKTSFFLVREDTKAAVLLHLLHNVVRPQDQTVVFVATKHHAEYLTELLTTQRVSCAHIYSALDPTARKINLAKFTLGKCSTLIVTDLAARGLDIPLLDNVINYSFPAKGKLFLHRVGRVARAGRSGTAYSLVAPDEIPYLLDLHLFLGRSLTLARPLKEPSGVAGVDGMLGRVPQSVVDEEDSGLQSTLEASLELRGLARVADNAQQQYVRSRPAPSPESIKRAKEMDLVGLGLHPLFSSRFEEEELQRLRLVDSIKNYRSRATIFEINASSRDLCSQVMRAKRQKDRKAIARFQQGQQGRQEQQEGPVGPAPSRPALQEKQPEKEEEEEAGESVEDIFSEVVGRKRQRSGPNRGAKRRREEARQRDQEFYIPYRPKDFDSERGLSISGEGGAFEQQAAGAVLDLMGDEAQNLTRGRQQLKWDRKKKRFVGQSGQEDKKKIKTESGRYISSSYKRDLYQKWKQKQKIDDRDSDEEGASDRRGPERRGGKRDRGQGASRPHAPGTPAGRVRPELKTKQQILKQRRRAQKLHFLQRGGLKQLSARNRRRVQELQQGAFGRGARSKKGKMRKRM

SEQ ID NO: 23040 - protein, 882 aa, Homo sapiens
  Payload ID: 4602
  Gene Symbol: DDX54
  Gene Name: DEAD (Asp-Glu-Ala-Asp) box polypeptide 54
  Uniprot ID: Q8TDD1
  ENSP ID: ENSP00000323858
MAADKGPAAGPRSRAAMAQWRKKKGLRKRRGAASQARGSDSEDGEFEIQAEDDARARKLGPGRPLPTFPTSECTSDVEPDTREMVRAQNKKKKKSGGFQSMGLSYPVFKGIMKKGYKVPTPIQRKTIPVILDGKDVVAMARTGSGKTACFLLPMFERLKTHSAQTGARALILSPTRELALQTLKFTKELGKFTGLKTALILGGDRMEDQFAALHENPDIIIATPGRLVHVAVEMSLKLQSVEYVVFDEADRLFEMGFAEQLQEIIARLPGGHQTVLFSATLPKLLVEFARAGLTEPVLIRLDVDTKLNEQLKTSFFLVREDTKAAVLLHLLHNVVRPQDQTVVFVATKHHAEYLTELLTTQRVSCAHIYSALDPTARKINLAKFTLGKCSTLIVTDLAARGLDIPLLDNVINYSFPAKGKLFLHRVGRVARAGRSGTAYSLVAPDEIPYLLDLHLFLGRSLTLARPLKEPSGVAGVDGMLGRVPQSVVDEEDSGLQSTLEASLELRGLARVADNAQQQYVRSRPAPSPESIKRAKEMDLVGLGLHPLFSSRFEEEELQRLRLVDSIKNYRSRATIFEINASSRDLCSQVMRAKRQKDRKAIARFQQGQQGRQEQQEGPVGPAPSRPALQEKQPEKEEEEEAGESVEDIFSEVVGRKRQRSGPNRGAKRRREEARQRDQEFYIPYRPKDFDSERGLSISGEGGAFEQQAAGAVLDLMGDEAQNLTRGRQQLKWDRKKKRFVGQSGQEDKKKIKTESGRYISSSYKRDLYQKWKQKQKIDDRDSDEEGASDRRGPERRGGKRDRGQAGASRPHAPGTPAGRVRPELKTKQQILKQRRRAQKLHFLQRGGLKQLSARNRRRVQELQQGAFGRGARSKKGKMRKRM

SEQ ID NO: 23041 - protein, 160 aa, Homo sapiens
  Payload ID: 4602
  Gene Symbol: DDX54
  Gene Name: DEAD (Asp-Glu-Ala-Asp) box polypeptide 54
  ENSP ID: ENSP00000447098
  MOD_RES (1)..(1): Any amino acid
XPSPESIKRAKEMDLVGLGLHPLFSSRFEEEELQRLRLVDSIKNYRSRADIFSEVVGRKRQRSGPNRGAKRRREEARQRDQEFYIPYRPKDFDSERGLSISGEGGAFEQQAAGAVLDLMGDEAQNLTRGRQQLKWDRKKKRFVGQSGQEDKKKIKTESGR

SEQ ID NO: 23042 - protein, 82 aa, Homo sapiens
  Payload ID: 4602
  Gene Symbol: DDX54
  Gene Name: DEAD (Asp-Glu-Ala-Asp) box polypeptide 54
  ENSP ID: ENSP00000448189
  MOD_RES (1)..(1): Any amino acid
XKGPAAGPRSRAAMAQWRKKKGLRKRRGAASQARGSDSEDGEFEIQAEDDARARKLGPGRPLPTFPTSECTSDVEPDTREMA

SEQ ID NO: 23043 - protein, 208 aa, Homo sapiens
  Payload ID: 4602
  Gene Symbol: DDX54
  Gene Name: DEAD (Asp-Glu-Ala-Asp) box polypeptide 54
  ENSP ID: ENSP00000448477
MVRAQNKKKKKSGGFQSMGLSYPVFKGIMKKGYKVPTPIQRKTIPVILDGKDVVAMARTGSGKTACFLLPMFERLKTHSAQTGARALILSPTRELALQTLKFTKELGKFTGLKTALILGGDRMEDQFAALHENPDIIIATPGRLVHVAVEMSLKLQSVEYVVFDEADRLFEMGFAEQLQEIIARLPGGHQTVLFSATLPKLLVEFARA

SEQ ID NO: 23044 - protein, 600 aa, Homo sapiens
  Payload ID: 4603
  Gene Symbol: DDX55
  Gene Name: DEAD (Asp-Glu-Ala-Asp) box polypeptide 55
  Uniprot ID: Q8NHQ9
  ENSP ID: ENSP00000238146
MEHVTEGSWESLPVPLHPQVLGALRELGFPYMTPVQSATIPLFMRNKDVAAEAVTGSGKTLAFVIPILEILLRREEKLKKSQVGAIIITPTRELAIQIDEVLSHFTKHFPEFSQILWIGGRNPGEDVERFKQQGGNIIVATPGRLEDMFRRKAEGLDLASCVRSLDVLVLDEADRLLDMGFEASINTILEFLPKQRRTGLFSATQTQEVENLVRAGLRNPVRVSVKEKGVAASSAQKTPSRLENYYMVCKADEKFNQLVHFLRNHKQEKHLVFFSTCACVEYYGKALEVLVKGVKIMCIHGKMKYKRNKIFMEFRKLQSGILVCTDVMARGIDIPEVNWVLQYDPPSNASAFVHRCGRTARIGHGGSALVFLLPMEESYINFLAINQKCPLQEMKPQRNTADLLPKLKSMALADRAVFEKGMKAFVSYVQAYAKHECNLIFRLKDLDFASLARGFALLRMPKMPELRGKQFPDFVPVDVNTDTIPFKDKIREKQRQKLLEQQRREKTENEGRRKFIKNKAWSKQKAKKEKKKKMNEKRKREEGSDIEDEDMEELLNDTRLLKKLKKGKITEEEFEKGLLTTGKRTIKTVDLGISDLEDDC

SEQ ID NO: 23045 - protein, 191 aa, Homo sapiens
  Payload ID: 4603
  Gene Symbol: DDX55
  Gene Name: DEAD (Asp-Glu-Ala-Asp) box polypeptide 55
  ENSP ID: ENSP00000346244
MEHVTEGSWESLPVPLHPQVLGALRELGFPYMTPVQSATIPLFMRNKDVAAEAVTGSGKTLAFVIPILEILLRREEKLKKSQVGAIIITPTRELAIQIDEVLSHFTKHFPEFSQILWIGGRNPGEDVERFKQQGGNIIVATPGRLEDMFRRKAEGLDLASCVRSLDVLVLDEADRLLDMGFEARRRKWRTW

SEQ ID NO: 23046 - protein, 207 aa, Homo sapiens
  Payload ID: 4603
  Gene Symbol: DDX55
  Gene Name: DEAD (Asp-Glu-Ala-Asp) box polypeptide 55
  Uniprot ID: Q8NHQ9
  ENSP ID: ENSP00000442332
MKPQRNTADLLPKLKSMALADRAVFEKGMKAFVSYVQAYAKHECNLIFRLKDLDFASLARGFALLRMPKMPELRGKQFPDFVPVDVNTDTIPFKDKIREKQRQKLLEQQRREKTENEGRRKFIKNKAWSKQKAKKEKKKKMNEKRKREEGSDIEDEDMEELLNDTRLLKKLKKGKITEEEFEKGLLTTGKRTIKTVDLGISDLEDDC

SEQ ID NO: 23047 - protein, 50 aa, Homo sapiens
  Payload ID: 4603
  Gene Symbol: DDX55
  Gene Name: DEAD (Asp-Glu-Ala-Asp) box polypeptide 55
  ENSP ID: ENSP00000442823
MEHVTEGSWESLPVPLHPQVLGALRELGFPYMTPVQPDSLDRRQESWRRC

SEQ ID NO: 23048 - protein, 569 aa, Homo sapiens
  Payload ID: 4603
  Gene Symbol: DDX55
  Gene Name: DEAD (Asp-Glu-Ala-Asp) box polypeptide 55
  ENSP ID: ENSP00000443114
MEHVTEGSWESLPVPLHPQVLGALRELGFPYMTPVQSATIPLFMRNKDVAAEAVTGSGKTLAFVIPILEILLRREEKLKKSQVGAIIITPTRELAIQIDEVLSHFTKHFPEFSQILWIGGRNPGEDVERFKQQGGNIIVATPGRLEDMFRRKAEGLDLASCVRSLDVLVLDEADRLLDMGFEASINTILEFLPKQRRTGLFSATQTQEVENLVRAGLRNPVRVSVKEKGVAASSAQKTPSRLENYYMVCKADEKFNQLVHFLRNHKQEKHLVFFSTCACVEYYGKALEVLVKGVKIMCIHGKMKYKRNKIFMEFRKLQSAFVHRCGRTARIGHGGSALVFLLPMEESYINFLAINQKCPLQEMKPQRNTADLLPKLKSMALADRAVFEKGMKAFVSYVQAYAKHECNLIFRLKDLDFASLARGFALLRMPKMPELRGKQFPDFVPVDVNTDTIPFKDKIREKQRQKLLEQQRREKTENEGRRKFIKNKAWSKQKAKKEKKKKMNEKRKREEGSDIEDEDMEELLNDTRLLKKLKKGKITEEEFEKGLLTTGKRTIKTVDLGISDLEDDC

SEQ ID NO: 23049 - protein, 42 aa, Homo sapiens
  Payload ID: 4603
  Gene Symbol: DDX55
  Gene Name: DEAD (Asp-Glu-Ala-Asp) box polypeptide 55
  ENSP ID: ENSP00000446255
MEHVTEGSWESLPVPLHPQVLGALRELGFPYMTPVQGFGSHL

SEQ ID NO: 23050 - protein, 722 aa, Homo sapiens
  Payload ID: 4604
  Gene Symbol: DDX58
  Gene Name: DEAD (Asp-Glu-Ala-Asp) box polypeptide 58
  ENSP ID: ENSP00000369197
METSDIQIFYQEDPECQNLSENSCPPSEVSDTNLYSPFKPRNYQLELALPAMKGKNTIICAPTGCGKTFVSLLICEHHLKKFPQGQKGKVVFFANQIPVYEQQKSVFSKYFERHGYRVTGISGATAENVPVEQIVENNDIIILTPQILVNNLKKGTIPSLSIFTLMIFDECHNTSKQHPYNMIMFNYLDQKLGGSSGPLPQVIGLTASVGVGDAKNTDEALDYICKLCASLDASVIATVKHNLEELEQVVYKPQKFFRKVESRISDKFKYIIAQLMRDTESLAKRICKDLENLSQIQNREFGTQKYEQWIVTVQKACMVFQMPDKDEESRICKALFLYTSHLRKYNDALIISEHARMKDALDYLKDFFSNVRAAGFDEIEQDLTQRFEEKLQELESVSRDPSNENPKLEDLCFILQEEYHLNPETITILFVKTRALVDALKNWIEGNPKLSFLKPGILTGRGKTNQNTGMTLPAQKCILDAFKASGDHNILIATSVADEGIDIAQCNLVILYEYVGNVIKMIQTRGRGRARGSKCFLLTSNAGVIEKEQINMYKEKMMNDSILRLQTWDEAVFREKILHIQTHEKFIRDSQEKPKPVPDKENKKLLCRKCKALACYTADVRVIEECHYTVLGDAFKECFVSRPHPKPKQFSSFEKRAKIFCARQNCSHDWGIHVKYKTFEIPVIKIESFVVEDIATGVQTLYSKWKDFHFEKIPFDPAEMSK

SEQ ID NO: 23051 - protein, 925 aa, Homo sapiens
  Payload ID: 4604
  Gene Symbol: DDX58
  Gene Name: DEAD (Asp-Glu-Ala-Asp) box polypeptide 58
  Uniprot ID: O95786
  ENSP ID: ENSP00000369213
MTTEQRRSLQAFQDYIRKTLDPTYILSYMAPWFREEEVQYIQAEKNNKGPMEAATLFLKFLLELQEEGWFRGFLDALDHAGYSGLYEAIESWDFKKIEKLEEYRLLLKRLQPEFKTRIIPTDIISDLSECLINQECEEILQICSTKGMMAGAEKLVECLLRSDKENWPKTLKLALEKERNKFSELWIVEKGIKDVETEDLEDKMETSDIQIFYQEDPECQNLSENSCPPSEVSDTNLYSPFKPRNYQLELALPAMKGKNTIICAPTGCGKTFVSLLICEHHLKKFPQGQKGKVVFFANQIPVYEQQKSVFSKYFERHGYRVTGISGATAENVPVEQIVENNDIIILTPQILVNNLKKGTIPSLSIFTLMIFDECHNTSKQHPYNMIMFNYLDQKLGGSSGPLPQVIGLTASVGVGDAKNTDEALDYICKLCASLDASVIATVKHNLEELEQVVYKPQKFFRKVESRISDKFKYIIAQLMRDTESLAKRICKDLENLSQIQNREFGTQKYEQWIVTVQKACMVFQMPDKDEESRICKALFLYTSHLRKYNDALIISEHARMKDALDYLKDFFSNVRAAGFDEIEQDLTQRFEEKLQELESVSRDPSNENPKLEDLCFILQEEYHLNPETITILFVKTRALVDALKNWIEGNPKLSFLKPGILTGRGKTNQNTGMTLPAQKCILDAFKASGDHNILIATSVADEGIDIAQCNLVILYEYVGNVIKMIQTRGRGRARGSKCFLLTSNAGVIEKEQINMYKEKMMNDSILRLQTWDEAVFREKILHIQTHEKFIRDSQEKPKPVPDKENKKLLCRKCKALACYTADVRVIEECHYTVLGDAFKECFVSRPHPKPKQFSSFEKRAKIFCARQNCSHDWGIHVKYKTFEIPVIKIESFVVEDIATGVQTLYSKWKDFHFEKIPFDPAEMSK

SEQ ID NO: 23052 - protein, 619 aa, Homo sapiens
  Payload ID: 4605
  Gene Symbol: DDX59
  Gene Name: DEAD (Asp-Glu-Ala-Asp) box polypeptide 59
  Uniprot ID: Q5T1V6
  ENSP ID: ENSP00000330460
MFVPRSLKIKRNANDDGKSCVAKIIKPDPEDLQLDKSRDVPVDAVATEAATIDRHISESCPFPSPGGQLAEVHSVSPEQGAKDSHPSEEPVKSFSKTQRWAEPGEPICVVCGRYGEYICDKTDEDVCSLECKAKHLLQVKEKEEKSKLSNPQKADSEPESPLNASYVYKEHPFILNLQEDQIENLKQQLGILVQGQEVTRPIIDFEHCSLPEVLNHNLKKSGYEVPTPIQMQMIPVGLLGRDILASADTGSGKTAAFLLPVIMRALFESKTPSALILTPTRELAIQIERQAKELMSGLPRMKTVLLVGGLPLPPQLYRLQQHVKVIIATPGRLLDIIKQSSVELCGVKIVVVDEADTMLKMGFQQQVLDILENIPNDCQTILVSATIPTSIEQLASQLLHNPVRIITGEKNLPCANVRQIILWVEDPAKKKKLFEILNDKKLFKPPVLVFVDCKLGADLLSEAVQKITGLKSISIHSEKSQIERKNILKGLLEGDYEVVVSTGVLGRGLDLISVRLVVNFDMPSSMDEYVHQIGRVGRLGQNGTAITFINNNSKRLFWDIAKRVKPTGSILPPQLLNSPYLHDQKRKEQQKDKQTQNDLVTGANLMDIIRKHDKSNSQK

SEQ ID NO: 23053 - protein, 160 aa, Homo sapiens
  Payload ID: 4605
  Gene Symbol: DDX59
  Gene Name: DEAD (Asp-Glu-Ala-Asp) box polypeptide 59
  ENSP ID: ENSP00000391312
MFVPRSLKIKRNANDDGKSCVAKIIKPDPEDLQLDKSRDVPVDAVATEAATIDRHISESCPFPSPGGQLAEVHSVSPEQGAKDSHPSEEPVKSFSKTQRWAEPGEPICVVCGRYGEYICDKTDEDVCSLECKAKHLLQVKEKEEKSKLSNPQKADSEPES

SEQ ID NO: 23054 - protein, 205 aa, Homo sapiens
  Payload ID: 4605
  Gene Symbol: DDX59
  Gene Name: DEAD (Asp-Glu-Ala-Asp) box polypeptide 59
  ENSP ID: ENSP00000394304
FQQQVLDILENIPNDCQTILVSATIPTSIEQLASQLLHNPVRIITGEKNLPCANVRQIILWVEDPAKKKKLFEILNDKKLFKPPVLVFVDCKLGADLLSEAVQKITGLKSISIHSEKSQIERKNILKGLLEGDYEVVVSTGVLGRGLDLISVRLVVNFDMPSSMDEYVHQLNIIWVVPFSGININASLIALLYSLLTTINMKFTP

SEQ ID NO: 23055 - protein, 580 aa, Homo sapiens
  Payload ID: 4605
  Gene Symbol: DDX59
  Gene Name: DEAD (Asp-Glu-Ala-Asp) box polypeptide 59
  Uniprot ID: Q5T1V6
  ENSP ID: ENSP00000394367
MFVPRSLKIKRNANDDGKSCVAKIIKPDPEDLQLDKSRDVPVDAVATEAATIDRHISESCPFPSPGGQLAEVHSVSPEQGAKDSHPSEEPVKSFSKTQRWAEPGEPICVVCGRYGEYICDKTDEDVCSLECKAKHLLQVKEKEEKSKLSNPQKADSEPESPLNASYVYKEHPFILNLQEDQIENLKQQLGILVQGQEVTRPIIDFEHCSLPEVLNHNLKKSGYEVPTPIQMQMIPVGLLGRDILASADTGSGKTAAFLLPVIMRALFESKTPSALILTPTRELAIQIERQAKELMSGLPRMKTVLLVGGLPLPPQLYRLQQHVKVIIATPGRLLDIIKQSSVELCGVKIVVVDEADTMLKMGFQQQVLDILENIPNDCQTILVSATIPTSIEQLASQLLHNPVRIITGEKNLPCANVRQIILWVEDPAKKKKLFEILNDKKLFKPPVLVFVDCKLGADLLSEAVQKITGLKSISIHSEKSQIERKNILKGLLEGDYEVVVSTGVLGRGLDLISVRLVVNFDMPSSMDEYVHQENTYKSTWRNPQHFQQDVRMTLGYVGKAQWEEDNQLKVKLGLKKNCSS

SEQ ID NO: 23056 - protein, 75 aa, Homo sapiens
  Payload ID: 4605
  Gene Symbol: DDX59
  Gene Name: DEAD (Asp-Glu-Ala-Asp) box polypeptide 59
  ENSP ID: ENSP00000398152
MLKMGFQQQVLDILENIPNDCQTILVSATIPTSIEQLASQLLHNPVRIITGEKNLPCANVRQIILWVEDPAKKKK

SEQ ID NO: 23057 - protein, 197 aa, Homo sapiens
  Payload ID: 4605
  Gene Symbol: DDX59
  Gene Name: DEAD (Asp-Glu-Ala-Asp) box polypeptide 59
  ENSP ID: ENSP00000408662
  MOD_RES (1)..(1): Any amino acid
XLPLPPQLYRLQQHVKDKKLFKPPVLVFVDCKLGADLLSEAVQKITGLKSISIHSEKSQIERKNILKGLLEGDYEVVVSTGVLGRGLDLISVRLVVNFDMPSSMDEYVHQIGRVGRLGQNGTAITFINNNSKRLFWDIAKRVKPTGSILPPQLLNSPYLHDQKRKEQQKDKQTQNDLVTGANLMDIIRKHDKSNSQK

SEQ ID NO: 23058 - protein, 224 aa, Homo sapiens
  Payload ID: 4605
  Gene Symbol: DDX59
  Gene Name: DEAD (Asp-Glu-Ala-Asp) box polypeptide 59
  ENSP ID: ENSP00000409954
MLKMGFQQQVLDILENIPNDCQTILVSATIPTSIEQLASQLLHNPVRIITGEKNLPCANVRQIILWVEDPAKKKKLFEILNDKKLFKPPVLVFVDCKLGADLLSEAVQKITGLKSISIHSEKSQIERKNILKGLLEGDYEVVVSTGVLGRGLDLISVRLVVNFDMPSSMDEYVHQIGRVGRLGQNGTAITFINNNSKRLFWDIAKRVKPTGSILPPQLLNSPYL

SEQ ID NO: 23059 - protein, 94 aa, Homo sapiens
  Payload ID: 4605
  Gene Symbol: DDX59
  Gene Name: DEAD (Asp-Glu-Ala-Asp) box polypeptide 59
  ENSP ID: ENSP00000416331
  MOD_RES (1)..(1): Any amino acid
XQKITGLKSISIHSEKSQIERKNILKGLLEGDYEVVVSTGVLGRGLDLISVRLVVNFDMPSSMDEYVHQSTHHNQYEVYSINRGMVQEVTCHPR

SEQ ID NO: 23060 - protein, 1712 aa, Homo sapiens
  Payload ID: 4606
  Gene Symbol: DDX60
  Gene Name: DEAD (Asp-Glu-Ala-Asp) box polypeptide 60
  Uniprot ID: Q8IY21
  ENSP ID: ENSP00000377344
MERNVLTTFSQEMSQLILNEMPKAEYSSLFNDFVESEFFLIDGDSLLITCICEISFKPGQNLHFFYLVERYLVDLISKGGQFTIVFFKDAEYAYFNFPELLSLRTALILHLQKNTTIDVRTTFSRCLSKEWGSFLEESYPYFLIVADEGLNDLQTQLFNFLIIHSWARKVNVVLSSGQESDVLCLYAYLLPSMYRHQIFSWKNKQNIKDAYTTLLNQLERFKLSALAPLFGSLKWNNITEEAHKTVSLLTQVWPEGSDIRRVFCVTSCSLSLRMYHRFLGNREPSSGQETEIQQVNSNCLTLQEMEDLCKLHCLTVVFLLHLPLSQRACARVITSHWAEDMKPLLQMKKWCEYFILRNIHTFEFWNLNLIHLSDLNDELLLKNIAFYYENENVKGLHLNLGDTIMKDYEYLWNTVSKLVRDFEVGQPFPLRTTKVCFLEKKPSPIKDSSNEMVPNLGFIPTSSFVVDKFAGDILKDLPFLKSDDPIVTSLVKQKEFDELVHWHSHKPLSDDYDRSRCQFDEKSRDPRVLRSVQKYHVFQRFYGNSLETVSSKIIVTQTIKSKKDFSGPKSKKAHETKAEIIARENKKRLFAREEQKEEQKWNALSFSIEEQLKENLHSGIKSLEDFLKSCKSSCVKLQVEMVGLTACLKAWKEHCRSEEGKTTKDLSIAVQVMKRIHSLMEKYSELLQEDDRQLIARCLKYLGFDELASSLHPAQDAENDVKVKKRNKYSVGIGPARFQLQYMGHYLIRDERKDPDPRVQDFIPDTWQRELLDVVDKNESAVIVAPTSSGKTYASYYCMEKVLKESDDGVVVYVAPTKALVNQVAATVQNRFTKNLPSGEVLCGVFTREYRHDALNCQVLITVPACFEILLLAPHRQNWVKKIRYVIFDEVHCLGGEIGAEIWEHLLVMIRCPFLALSATISNPEHLTEWLQSVKWYWKQEDKIIENNTASKRHVGRQAGFPKDYLQVKQSYKVRLVLYGERYNDLEKHVCSIKHGDIHFDHFHPCAALTTDHIERYGFPPDLTLSPRESIQLYDAMFQIWKSWPRAQELCPENFIHFNNKLVIKKMDARKYEESLKAELTSWIKNGNVEQARMVLQNLSPEADLSPENMITMFPLLVEKLRKMEKLPALFFLFKLGAVENAAESVSTFLKKKQETKRPPKADKEAHVMANKLRKVKKSIEKQKIIDEKSQKKTRNVDQSLIHEAEHDNLVKCLEKNLEIPQDCTYADQKAVDTETLQKVFGRVKFERKGEELKALAERGIGYHHSAMSFKEKQLVEILFRKGYLRVVTATGTLALGVNMPCKSVVFAQNSVYLDALNYRQMSGRAGRRGQDLMGDVYFFDIPFPKIGKLIKSNVPELRGHFPLSITLVLRLMLLASKGDDPEDAKAKVLSVLKHSLLSFKQPRVMDMLKLYFLFSLQFLVKEGYLDQEGNPMGFAGLVSHLHYHEPSNLVFVSFLVNGLFHDLCQPTRKGSKHFSQDVMEKLVLVLAHLFGRRYFPPKFQDAHFEFYQSKVFLDDLPEDFSDALDEYNMKIMEDFTTFLRIVSKLADMNQEYQLPLSKIKFTGKECEDSQLVSHLMSCKEGRVAISPFVCLSGNFDDDLLRLETPNHVTLGTIGVNRSQAPVLLSQKFDNRGRKMSLNAYALDFYKHGSLIGLVQDNRMNEGDAYYLLKDFALTIKSISVSLRELCENEDDNVVLAFEQLSTTFWEKLNKV

SEQ ID NO: 23061 - protein, 191 aa, Homo sapiens
  Payload ID: 4606
  Gene Symbol: DDX60
  Gene Name: DEAD (Asp-Glu-Ala-Asp) box polypeptide 60
  ENSP ID: ENSP00000422669
  MOD_RES (1)..(1): Any amino acid
XQSKVFLDDLPEDFSDALDEYNMKIMEDFTTFLRIVSKLADMNQEYQLPLSKIKFTGKECEDSQLVSHLMSCKEGRVAISPFVCLSGNFDDDLLRLETPNHVTLGTIGVNRSQAPVLLSQKFDNRGRKMSLNAYALDFYKHGSLIGLVQDNRMNEGDAYYLLKDFALTIKSIRCVIYLNIDFRFFNNLFII

SEQ ID NO: 23062 - protein, 119 aa, Homo sapiens
  Payload ID: 4606
  Gene Symbol: DDX60
  Gene Name: DEAD (Asp-Glu-Ala-Asp) box polypeptide 60
  ENSP ID: ENSP00000423647
MERNVLTTFSQEMSQLILNEMPKAEYSSLFNDFVESEFFLIDGDSLLITCICEISFKPGQNLHFFYLVERYLVDLISKGGQFTIVFFKDAEYAYFNFPELLSLRTALILHLQKNTTIDV

SEQ ID NO: 23063 - protein, 104 aa, Homo sapiens
  Payload ID: 4606
  Gene Symbol: DDX60
  Gene Name: DEAD (Asp-Glu-Ala-Asp) box polypeptide 60
  ENSP ID: ENSP00000423678
  MOD_RES (1)..(1): Any amino acid
XRCPFLALSATISNPEHLTEWLQSVKWYWKQEDKIIENNTASKRHVGRQAGFPKDYLQVKQSYKVRLVLYGERYNDLEKHVCSIKHGDIHFDHFHPCAALTTDH

SEQ ID NO: 23064 - protein, 1706 aa, Homo sapiens
  Payload ID: 4607
  Gene Symbol: DDX60L
  Gene Name: DEAD (Asp-Glu-Ala-Asp) box polypeptide 60-like
  Uniprot ID: Q5H9U9
  ENSP ID: ENSP00000260184
MGSKDHAVFFREMTQLILNEMPKAGYSSILNDFVESNFFVIDGDSLLVTCLGVKSFKWGQNLHFFYLVECYLVDLLSNGGQFTIVFFKDAEYAYFDFPELLSLRTALILHLQHNTNIDVQTEFSGCLSQDWKLFLEQHYPYFLIVSEEGLSDLQTYLFNFLIIHSWGMKVNVVLSSGHESDTLRFYAYTMESTDRNQTFSKENETVIQSAYKSLIQHLEEIRVLVLATHFEHLKWNDMMEEAYQTLFLLQHLWSEGSDIQRVLCVTSCSLSLRMYHRVLVHSNCLSLQEVEDFCRLRCLCVAFQLHLPLSQRACSRVITCSWIRNSDSFLKMNKWCEYFILSNLNVFGCWNLNLNHVSDLYDEQLLKNIAFYYEFESTQEPHLNLGDSIRRDYEDLWNVVSHLVKEFNVGKSFPLRTTRRHFLRQEKSVIQEISLEKMPSVGFIPMTSAVIDEFVGDMMKDLPILKSDDPVVPSLFKQKTSDELLHWHAQRLLSDDYDRIKCHVDEQSRDPHVLDFLKKIQDYQQFYGKSLESISTKVIVTQTTRPKEDSSGASGEILQNTKPHQITKKSKKKSFLKEDQNKAQQNDDLLFSIEEEMKNNLHSGIRKLEDYLTSCASNSVKFGVEMLGLIACFKAWKKHCRGEGKISKDLSIAVQMMKRIHSLLERYPEILEAEHHQYIAKCLKYLGFNDLANSLDPTLIGDDKNKKKYSIDIGPARFQLQYMGHYLIRDERKDRDPRVQDFIPNAWQQELLDVVDKNESAVIVAPTSSGKTYASYYCMEKVLRESDVGVVVYVAPAKSLVGQVAATVENRFTKTLPAGRTLCGAFTRDYCHNVLNCQVLITVPECFEILLLAPHRQKWVERIRYVIFDEVHYLGREVGAKFWELLLVIIRCPFLVLSATINNPNLLTKWLQSVKQYWKQADKIMEEKCISEKQADKCLNFLQDHSYKNQSYEVRLVLCGERYNDLEKHICSVKHDDVYFDHFHPCAALTTDIIEKYGFPPDLTLTPQESIQLYDTMAQVWETWPRAQELCPEEFILFKNKIVIKKLDARKYEENLKAELTNWIKNGQVKKVKRVLKNLSPDSLSSSKDMVKMFPLLVEKLRQMDKLPAIFFLFKNDDVGKRAGSVCTFLEKTETKSHPHTECHSYVFAIDEVLEKVRKTQKRITKKNPKKAEKLERKKVYRAEYINFLENLKILEISEDCTYADVKALHTEITRNKDSTLERVLPRVRFTRHGKELKALAQRGIGYHHSSMYFKEKEFVEILFVKGLIRVVTATETLALGIHMPCKSVVFAQDSVYLDALNYRQMSGRAGRRGQDLLGNVYFFDIPLPKIKRLLASSVPELRGQFPLSITLVLRLMLLASKGDDPEDAKAKVLSVLKHSLLSFKRRRAMETLKLYFLFSLQLLIKEDYLNKKGNPKKFAGLASYLHGHEPSNLVFVNFLKRGLFHNLCKPAWKGSQQFSQDVMEKLVLVLANLFGRKYIPAKFQNANLSFSQSKVILAELPEDFKAALYEYNLAVMKDFASFLLIASKSVNMKKEHQLPLSRIKFTGKECEDSQLVSHLMSCKKGRVAISPFVCLSGNTDNDLLRPETINQVILRTVGVSGTQAPLLWPWKLDNRGRRMPLNAYVLNFYKHNCLTRLDQKNGMRMGQLLKCLKDFAFNIQAISDSLSELCENKRDNVVLAFKQLSQTFYEKLQEMQIQMSQNHLE

SEQ ID NO: 23065 - protein, 868 aa, Homo sapiens
  Payload ID: 4607
  Gene Symbol: DDX60L
  Gene Name: DEAD (Asp-Glu-Ala-Asp) box polypeptide 60-like
  ENSP ID: ENSP00000421026
RMYHRVLVHSNCLSLQEVEDFCRLRCLCVAFQLHLPLSQRACSRVITCSWIRNSDSFLKMNKWCEYFILSNLNVFGCWNLNLNHVSDLYDEQLLKNIAFYYEFESTQEPHLNLGDSIRRDYEDLWNVVSHLVKEFNVGKSFPLRTTRRHFLRQEKSVIQEISLEKMPSVGFIPMTSAVIDEFVGDMMKDLPILKSDDPVVPSLFKQKTSDELLHWHAQRLLSDDYDRIKCHVDEQSRDPHVLDFLKKIQDYQQFYGKSLESISTKVIVTQTTRPKEDSSGASGEILQNTKPHQITKKSKKKSFLKEDQNKAQQNDDLLFSIEEEMKNNLHSGIRKLEDYLTSCASNSVKFGVEMLGLIACFKAWKKHCRGEGKISKDLSIAVQMMKRIHSLLERYPEILEAEHHQYIAKCLKYLGFNDLANSLDPTLIGDDKNKKKYSIDIGPARFQLQYMGHYLIRDERKDRDPRVQDFIPNAWQQELLDVVDKNESAVIVAPTSSGKTYASYYCMEKVLRESDVGVVVYVAPAKSLVGQVAATVENRFTKTLPAGRTLCGAFTRDYCHNVLNCQVHYLGREVGAKFWELLLVIIRCPFLVLSATINNPNLLTKWLQSVKQYWKQADKIMEEKCISEKQADKCLNFLQDHSYKNQSYEVRLVLCGERYNDLEKHICSVKHDDVYFDHFHPCAALTTDIIEKYGFPPDLTLTPQESIQLYDTMAQVWETWPRAQELCPEEFILFKNKIVIKKLDARKYEENLKAELTNWIKNGQVKKVKRVLKNLSPDSLSSSKDMVKMFPLLVEKLRQMDKLPAIFFLFKNDDVGKRAGSVCTFLEKTETKSHPHTECHSYVFAIDEVLEKVRKTQKRITKKNPKKA

SEQ ID NO: 23066 - protein, 1308 aa, Homo sapiens
  Payload ID: 4607
  Gene Symbol: DDX60L
  Gene Name: DEAD (Asp-Glu-Ala-Asp) box polypeptide 60-like
  Uniprot ID: Q5H9U9
  ENSP ID: ENSP00000422202
MGSKDHAVFFREMTQLILNEMPKAGYSSILNDFVESNFFVIDGDSLLVTCLGVKSFKWGQNLHFFYLVECYLVDLLSNGGQFTIVFFKDAEYAYFDFPELLSLRTALILHLQHNTNIDVQTEFSGCLSQDWKLFLEQHYPYFLIVSEEGLSDLQTYLFNFLIIHSWGMKVNVVLSSGHESDTLRFYAYTMESTDRNQTFSKENETVIQSAYKSLIQHLEEIRVLVLATHFEHLKWNDMMEEAYQTLFLLQHLWSEGSDIQRVLCVTSCSLSLRMYHRVLVHSNCLSLQEVEDFCRLRCLCVAFQLHLPLSQRACSRVITCSWIRNSDSFLKMNKWCEYFILSNLNVFGCWNLNLNHVSDLYDEQLLKNIAFYYEFESTQEPHLNLGDSIRRDYEDLWNVVSHLVKEFNVGKSFPLRTTRRHFLRQEKSVIQEISLEKMPSVGFIPMTSAVIDEFVGDMMKDLPILKSDDPVVPSLFKQKTSDELLHWHAQRLLSDDYDRIKCHVDEQSRDPHVLDFLKKIQDYQQFYGKSLESISTKVIVTQTTRPKEDSSGASGEILQNTKPHQITKKSKKKSFLKEDQNKAQQNDDLLFSIEEEMKNNLHSGIRKLEDYLTSCASNSVKFGVEMLGLIACFKAWKKHCRGEGKISKDLSIAVQMMKRIHSLLERYPEILEAEHHQYIAKCLKYLGFNDLANSLDPTLIGDDKNKKKYSIDIGPARFQLQYMGHYLIRDERKDRDPRVQDFIPNAWQQELLDVVDKNESAVIVAPTSSGKTYASYYCMEKVLRESDVGVVVYVAPAKSLVGQVAATVENRFTKTLPAGRTLCGAFTRDYCHNVLNCQVLITVPECFEILLLAPHRQKWVERIRYVIFDEVHYLGREVGAKFWELLLVIIRCPFLVLSATINNPNLLTKWLQSVKQYWKQADKIMEEKCISEKQADKCLNFLQDHSYKNQSYEVRLVLCGERYNDLEKHICSVKHDDVYFDHFHPCAALTTDIIEKYGFPPDLTLTPQESIQLYDTMAQVWETWPRAQELCPEEFILFKNKIVIKKLDARKYEENLKAELTNWIKNGQVKKVKRVLKNLSPDSLSSSKDMVKMFPLLVEKLRQMDKLPAIFFLFKNDDVGKRAGSVCTFLEKTETKSHPHTECHSYVFAIDEVLEKVRKTQKRISTKKNPKKAEKLERKKVYRAEYINFLENLKILEISEDCTYADVKALHTEITRNKDSTLERVLPRVRFTRHGKELKALAQRGIGYHHSSMYFKEKEFVEILFVKGLIRVVTATETLALGIHMPCKSVVFAQDSVYLDALNYRQIM

SEQ ID NO: 23067 - protein, 1706 aa, Homo sapiens; identical to SEQ ID NO: 23064
  Payload ID: 4607
  Gene Symbol: DDX60L
  Gene Name: DEAD (Asp-Glu-Ala-Asp) box polypeptide 60-like
  Uniprot ID: Q5H9U9
  ENSP ID: ENSP00000422423

SEQ ID NO: 23068 - protein, 195 aa, Homo sapiens
  Payload ID: 4607
  Gene Symbol: DDX60L
  Gene Name: DEAD (Asp-Glu-Ala-Asp) box polypeptide 60-like
  ENSP ID: ENSP00000422920
  MOD_RES (1)..(1): Any amino acid
XFKNDDVGKRAGSVCTFLEKTETKSHPHTECHSYVFAIDEVLEKVRKTQKRITKKNPKKAEKLERKKVYRAEYINFLENLKILEISEDCTYADVKALHTEITRNKDSTLERVLPRVRFTRHGKELKALAQRGIGYHHSSMYFKEKEFVEILFVKGLIRVVTATETLALGIHMPCKSVVFAQDSVYLDALNYRQIM

SEQ ID NO: 23069 - protein, 124 aa, Homo sapiens
  Payload ID: 4607
  Gene Symbol: DDX60L
  Gene Name: DEAD (Asp-Glu-Ala-Asp) box polypeptide 60-like
  ENSP ID: ENSP00000424310
MGSKDHAVFFREMTQLILNEMPKAGYSSILNDFVESNFFVIDGDSLLVTCLGVKSFKWGQNLHFFYLVECYLVDLLSNGGQFTIVFFKDAEYAYFDFPELLSLRTALILHLQHNTNIDVQTEFS

SEQ ID NO: 23070 - protein, 98 aa, Homo sapiens
  Payload ID: 4607
  Gene Symbol: DDX60L
  Gene Name: DEAD (Asp-Glu-Ala-Asp) box polypeptide 60-like
  ENSP ID: ENSP00000424396
MGSKDHAVFFREMTQLILNEMPKAGYSSILNDFVESNFFVIDGDSLLVTCLGVKSFKWGQNLHFFYLVECYLVDLLSNGGQFTIVFFKDAEYAYFDFP

SEQ ID NO: 23071 - protein, 77 aa, Homo sapiens
  Payload ID: 4607
  Gene Symbol: DDX60L
  Gene Name: DEAD (Asp-Glu-Ala-Asp) box polypeptide 60-like
  ENSP ID: ENSP00000427386
MGSKDHAVFFREMTQLILNEMPKAGYSSILNDFVESNFFVIDGDSLLVTCLGVKSFKWGQNLHFFYLVECYLVDLLS

SEQ ID NO: 23072 - protein, 880 aa, Homo sapiens
  Payload ID: 4608
  Gene Symbol: DDX11
  Gene Name: DEAD/H (Asp-Glu-Ala-Asp/His) box helicase 11
  Uniprot ID: Q96FC9
  ENSP ID: ENSP00000228264
MAELYRVLEAGKIGIFESPTGTGKSLSLICGALSWLRDFEQKKREEEARLLETGTGPLHDEKDESLCLSSSCEGAAGTPRPAGEPAWVTQFVQKKEERDLVDRLKAEQARRKQREERLQQLQHRVQLKYAAKRLRQEEEERENLLRLSREMLETGPEAERLEQLESGEEELVLAEYESDEEKKVASRVDEDEDDLEEEHITKIYYCSRTHSQLAQFVHEVKKSPFGKDVRLVSLGSRQNLCVNEDVKSLGSVQLINDRCVDMQRSRHEKKKGAEEEKPKRRRQEKQAACPFYNHEQMGLLRDEALAEVKDMEQLLALGKEARACPYYGSRLAIPAAQLVVLPYQMLLHAATRQAAGIRLQDQVVIIDEAHNLIDTITGMHSVEVSGSQLCQAHSQLLQYVERYGKRLKAKNLMYLKQILYLLEKFVAVLGGNIKQNPNTQSLSQTGTELKTINDFLFQSQIDNINLFKVQRYCEKSMISRKLFGFTERYGAVFSSREQPKLAGFQQFLQSLQPRTTEALAAPADESQASTLRPASPLMHIQGFLAALTTANQDGRVILSRQGSLSQSTLKFLLLNPAVHFAQVVKECRAVVIAGGTMQPVSDFRQQLLACAGVEAERVVEFSCGHVIPPDNILPLVICSGISNQPLEFTFQKRELPQMMDEVGRILCNLCGVVPGGVVCFFPSYEYLRQVHAHWEKGGLLGRLAARKKIFQEPKSAHQVEQVLLAYSRCIQACGQERGQVTGALLLSVVGGKMSEGINFSDNLGRCVVMVGMPFPNIRSAELQEKMAYLDQTLPRAPGQAPPGKALVENLCMKAVNQSIGRAIRHQKDFASVVLLDQRYARPPVLAKLPAWIRARVEVKATFGPAIAAVQKFHREKSASS

SEQ ID NO: 23073 - protein, 856 aa, Homo sapiens
  Payload ID: 4608
  Gene Symbol: DDX11
  Gene Name: DEAD/H (Asp-Glu-Ala-Asp/His) box helicase 11
  Uniprot ID: Q96FC9
  ENSP ID: ENSP00000309965
MANETQKVGAIHFPFPFTPYSIQEDFMAELYRVLEAGKIGIFESPTGTGKSLSLICGALSWLRDFEQKKREEEARLLETGTGPLHDEKDESLCLSSSCEGAAGTPRPAGEPAWVTQFVQKKEERDLVDRLKAEQARRKQREERLQQLQHRVQLKYAAKRLRQEEEERENLLRLSREMLETGPEAERLEQLESGEEELVLAEYESDEEKKVASRVDEDEDDLEEEHITKIYYCSRTHSQLAQFVHEVKKSPFGKDVRLVSLGSRQNLCVNEDVKSLGSVQLINDRCVDMQRSRHEKKKGAEEEKPKRRRQEKQAACPFYNHEQMGLLRDEALAEVKDMEQLLALGKEARACPYYGSRLAIPAAQLVVLPYQMLLHAATRQAAGIRLQDQVVIIDEAHNLIDTITGMHSVEVSGSQLCQAHSQLLQYVERYGKRLKAKNLMYLKQILYLLEKFVAVLGGNIKQNPNTQSLSQTGTELKTINDFLFQSQIDNINLFKVQRYCEKSMISRKLFGFTERYGAVFSSREQPKLAGFQQFLQSLQPRTTEALAAPADESQASTLRPASPLMHIQGFLAALTTANQDGRVILSRQGSLSQSTLKFLLLNPAVHFAQVVKECRAVVIAGGTMQPVSDFRQQLLACAGVEAERVVEFSCGHVIPPDNILPLVICSGISNQPLEFTFQKRELPQMIFQEPKSAHQVEQVLLAYSRCIQACGQERGQVTGALLLSVVGGKMSEGINFSDNLGRCVVMVGMPFPNIRSAELQEKMAYLDQTLPRAPGQAPPGKALVENLCMKAVNQSIGRAIRHQKDFASVVLLDQRYARPPVLAKLPAWIRARVEVKATFGPAIAAVQKFHREKSASS

SEQ ID NO: 23074 - protein, 224 aa, Homo sapiens
  Payload ID: 4608
  Gene Symbol: DDX11
  Gene Name: DEAD/H (Asp-Glu-Ala-Asp/His) box helicase 11
  ENSP ID: ENSP00000406457
MAELYRVLEAGKIGIFESPTGTGKSLSLICGALSWLRDFEQKKREEEARLLETGTGPLHDEKDESLCLSSSCEGAAGTPRPAGEPAWVTQFVQKKEERDLVDRLKAEQARRKQREERLQQLQHRVQLKYAAKRLRQEEEERENLLRLSREMLETGPEAERLEQLESGEEELVLAEYESDEEKKVASRVDEDEDDLEEEHITKIYYCSRTHSQLAQFVHEVKKSP

SEQ ID NO: 23075 - protein, 288 aa, Homo sapiens
  Payload ID: 4608
  Gene Symbol: DDX11
  Gene Name: DEAD/H (Asp-Glu-Ala-Asp/His) box helicase 11
  Uniprot ID: Q96FC9
  ENSP ID: ENSP00000406799
MANETQKVGAIHFPFPFTPYSIQEDFMAELYRVLEAGKIGIFESPTGTGKSLSLICGALSWLRDFEQKKREEEARLLETGTGPLHDEKDESLCLSSSCEGAAGTPRPAGEPAWVTQFVQKKEERDLVDRLKAEQARRKQREERLQQLQHRVQLKYAAKRLRQEEEERENLLRLSREMLETGPEAERLEQLESGEEELVLAEYESDEEKKVASRAPSDATSSRHPPDASFPAALNFLQRTRPSSVLSEDLLMQRAVAKHPALLPWQMSSSPLRPGSEWMRMRMTWRKNT

SEQ ID NO: 23076 - protein, 302 aa, Homo sapiens
  Payload ID: 4608
  Gene Symbol: DDX11
  Gene Name: DEAD/H (Asp-Glu-Ala-Asp/His) box helicase 11
  ENSP ID: ENSP00000407646
MANETQKVGAIHFPFPFTPYSIQEDFMAELYRVLEAGKIGIFESPTGTGKSLSLICGALSWLRDFEQKKREEEARLLETGTGPLHDEKDESLCLSSSCEGAAGTPRPAGEPAWVTQFVQKKEERDLVDRLKRQEEEERENLLRLSREMLETGPEAERLEQLESGEEELVLAEYESDEEKKVASRVDEDEDDLEEEHITKIYYCSRTHSQLAQFVHEVKKSPFGKDVRLVSLGSRQNLCVNEDVKSLGSVQLINDRCVDMQRSRHEKKKGAEEEKPKRRRQEKQAACPFYNHEQMGLLRDEAL

SEQ ID NO: 23077 - protein, 78 aa, Homo sapiens
  Payload ID: 4608
  Gene Symbol: DDX11
  Gene Name: DEAD/H (Asp-Glu-Ala-Asp/His) box helicase 11
  ENSP ID: ENSP00000439298
MANETQKVGAIHFPFPFTPYSIQEDFMAELYRVLEAGKIGIFESPTGTGLQAPRGLLENRPGLLSLCRRKKRGTWWTD

SEQ ID NO: 23078 - protein, 191 aa, Homo sapiens
  Payload ID: 4608
  Gene Symbol: DDX11
  Gene Name: DEAD/H (Asp-Glu-Ala-Asp/His) box helicase 11
  ENSP ID: ENSP00000440171
MPLDGVRDSGMASRGPAAKDGENMVSASQKKGEIWSMANETQKVGAIHFPFPFTPYSIQEDFMAELYRVLEAGKIGIFESPTGTGKSLSLICGALSWLRDFEQKKREEEARLLETGTGPLHDEKDESLCLSSSCEGAAGTPRPAGEPAWVTQFVQKKEERDLVDRLKAEQARRKQREERLQQLQHRVQLKY

SEQ ID NO: 23079 - protein, 970 aa, Homo sapiens
  Payload ID: 4608
  Gene Symbol: DDX11
  Gene Name: DEAD/H (Asp-Glu-Ala-Asp/His) box helicase 11
  Uniprot ID: Q96FC9
  ENSP ID: ENSP00000440402
MANETQKVGAIHFPFPFTPYSIQEDFMAELYRVLEAGKIGIFESPTGTGKSLSLICGALSWLRDFEQKKREEEARLLETGTGPLHDEKDESLCLSSSCEGAAGTPRPAGEPAWVTQFVQKKEERDLVDRLKAEQARRKQREERLQQLQHRVQLKYAAKRLRQEEEERENLLRLSREMLETGPEAERLEQLESGEEELVLAEYESDEEKKVASRVDEDEDDLEEEHITKIYYCSRTHSQLAQFVHEVKKSPFGKDVRLVSLGSRQNLCVNEDVKSLGSVQLINDRCVDMQRSRHEKKKGAEEEKPKRRRQEKQAACPFYNHEQMGLLRDEALAEVKDMEQLLALGKEARACPYYGSRLAIPAAQLVVLPYQMLLHAATRQAAGIRLQDQVVIIDEAHNLIDTITGMHSVEVSGSQLCQAHSQLLQYVERYGKRLKAKNLMYLKQILYLLEKFVAVLGGNIKQNPNTQSLSQTGTELKTINDFLFQSQIDNINLFKVQRYCEKSMISRKLFGFTERYGAVFSSREQPKLAGFQQFLQSLQPRTTEALAAPADESQASTLRPASPLMHIQGFLAALTTANQDGRVILSRQGSLSQSTLKFLLLNPAVHFAQVVKECRAVVIAGGTMQPVSDFRQQLLACAGVEAERVVEFSCGHVIPPDNILPLVICSGISNQPLEFTFQKRELPQMMDEVGRILCNLCGVVPGGVVCFFPSYEYLRQVHAHWEKGGLLGRLAARKKIFQEPKSAHQVEQVLLAYSRCIQACGQERGQVTGALLLSVVGGKMSEGINFSDNLGRCVVMVGMPFPNIRSAELQEKMAYLDQTLSPRPGTPREGSGGEPVHEGRQPVHRQGHQAPEGFCQRSAPGPAICPAPCPGQAAGLDPSPCGGQSYLWPRHCCCAEVSPGEVGLFLMGNHTTAWRRALPLSCPLETVFVVGVVCGDPVTKVKPRRRVWSPECCQDPGTGVSSRRRKWGNPE

SEQ ID NO: 23080 - protein, 172 aa, Homo sapiens
  Payload ID: 4608
  Gene Symbol: DDX11
  Gene Name: DEAD/H (Asp-Glu-Ala-Asp/His) box helicase 11
  ENSP ID: ENSP00000441015
  MOD_RES (1)..(1): Any amino acid
XQVEQVLLAYSRCIQVRASCWAWACGQERGQVTGALLLSVVGGKMSEGINFSDNLGRCVVMVGMPFPNIRSAELQEKMAYLDQTLPRAPGQAPPGKALVENLCMKAVNQSIGRAIRHQKDFASVVLLDQRYARPPVLAKLPAWIRARVEVKATFGPAIAAVQKFHREKSASS

SEQ ID NO: 23081 - protein, 171 aa, Homo sapiens
  Payload ID: 4608
  Gene Symbol: DDX11
  Gene Name: DEAD/H (Asp-Glu-Ala-Asp/His) box helicase 11
  ENSP ID: ENSP00000441425
MANETQKVGAIHFPFPFTPYSIQEDFMAELYRVLEAGKIGIFESPTGTGKSLSLICGALSWLRDFEQKKREEEARLLETGTGPLHDEKDESLCLSSSCEGAAGTPRPAGEPAWVTQFVQKKEERDLVDRLKAEQARRKQREERLQQLQHRVQLKYAAKRLKLGCEWLRRGS

SEQ ID NO: 23082 - protein, 304 aa, Homo sapiens
  Payload ID: 4608
  Gene Symbol: DDX11
  Gene Name: DEAD/H (Asp-Glu-Ala-Asp/His) box helicase 11
  ENSP ID: ENSP00000442466
MANETQKVGAIHFPFPFTPYSIQEDFMAELYRVLEAGKIGIFESPTGTGKSLSLICGALSWLRDFEQKKREEEARLLETGTGPLHDEKDESLCLSSSCEGAAGTPRPAGEPAWVTQFVQKKEERDLVDRLKAEQARRKQREERLQQLQHRVQLKYAAKRLRQEEEERENLLRLSREMLETGPEAERLEQLESGEEELVLAEYESDEEKKVASRVDEDEDDLEEEHITKIYYCSRTHSQLAQFVHEVKKSPFGKDVRLVSLGSRQRRRKELRRRSQRGGGRRSRQPAPSTTTSRWAFSGMRPWQR

SEQ ID NO: 23083 - protein, 906 aa, Homo sapiens
  Payload ID: 4608
  Gene Symbol: DDX11
  Gene Name: DEAD/H (Asp-Glu-Ala-Asp/His) box helicase 11
  Uniprot ID: Q96FC9
  ENSP ID: ENSP00000443426
MANETQKVGAIHFPFPFTPYSIQEDFMAELYRVLEAGKIGIFESPTGTGKSLSLICGALSWLRDFEQKKREEEARLLETGTGPLHDEKDESLCLSSSCEGAAGTPRPAGEPAWVTQFVQKKEERDLVDRLKAEQARRKQREERLQQLQHRVQLKYAAKRLRQEEEERENLLRLSREMLETGPEAERLEQLESGEEELVLAEYESDEEKKVASRVDEDEDDLEEEHITKIYYCSRTHSQLAQFVHEVKKSPFGKDVRLVSLGSRQNLCVNEDVKSLGSVQLINDRCVDMQRSRHEKKKGAEEEKPKRRRQEKQAACPFYNHEQMGLLRDEALAEVKDMEQLLALGKEARACPYYGSRLAIPAAQLVVLPYQMLLHAATRQAAGIRLQDQVVIIDEAHNLIDTITGMHSVEVSGSQLCQAHSQLLQYVERYGKRLKAKNLMYLKQILYLLEKFVAVLGGNIKQNPNTQSLSQTGTELKTINDFLFQSQIDNINLFKVQRYCEKSMISRKLFGFTERYGAVFSSREQPKLAGFQQFLQSLQPRTTEALAAPADESQASTLRPASPLMHIQGFLAALTTANQDGRVILSRQGSLSQSTLKFLLLNPAVHFAQVVKECRAVVIAGGTMQPVSDFRQQLLACAGVEAERVVEFSCGHVIPPDNILPLVICSGISNQPLEFTFQKRELPQMMDEVGRILCNLCGVVPGGVVCFFPSYEYLRQVHAHWEKGGLLGRLAARKKIFQEPKSAHQVEQVLLAYSRCIQACGQERGQVTGALLLSVVGGKMSEGINFSDNLGRCVVMVGMPFPNIRSAELQEKMAYLDQTLPRAPGQAPPGKALVENLCMKAVNQSIGRAIRHQKDFASVVLLDQRYARPPVLAKLPAWIRARVEVKATFGPAIAAVQKFHREKSASS

SEQ ID NO: 23084 - protein, 288 aa, Homo sapiens
  Payload ID: 4608
  Gene Symbol: DDX11
  Gene Name: DEAD/H (Asp-Glu-Ala-Asp/His) box helicase 11
  ENSP ID: ENSP00000443578
MAELYRVLEAGKIGIFESPTGTGKSLSLICGALSWLRDFEQKKREEEARLLETGTGPLHDEKDESLCLSSSCEGAAGTPRPAGEPAWVTQFVQKKEERDLVDRLKAEQARRKQREERLQQLQHRVQLKYAAKRLRQEEEERENLLRLSREMLETGPEAERLEQLESGEEELVLAEYESDEEKKVASRVDEDEDDLEEEHITKIYYCSRTHSQLAQFVHEVKKSPFGKDVRLVSLGSRQNLCVNEDVKSLGSVQLINDRCVDMQRSRHVAVLSVFSLCACATLREEERS

SEQ ID NO: 23085 - protein, 76 aa, Homo sapiens
  Payload ID: 4608
  Gene Symbol: DDX11
  Gene Name: DEAD/H (Asp-Glu-Ala-Asp/His) box helicase 11
  ENSP ID: ENSP00000443750
  MOD_RES (1)..(1): Any amino acid
XQVEQVLLAYSRCIQACGQERGQVTGALLLSVVGGKMSEGINFSDNLGRSAELQEKMAYLDQTLAGPSGTRRILPA

SEQ ID NO: 23086 - protein, 31 aa, Homo sapiens
  Payload ID: 4608
  Gene Symbol: DDX11
  Gene Name: DEAD/H (Asp-Glu-Ala-Asp/His) box helicase 11
  ENSP ID: ENSP00000445219
LICGALSWLRDFEQKKRDRGPAPLCGWRKDE

SEQ ID NO: 23087 - protein, 297 aa, Homo sapiens
  Payload ID: 4608
  Gene Symbol: DDX11
  Gene Name: DEAD/H (Asp-Glu-Ala-Asp/His) box helicase 11
  ENSP ID: ENSP00000445568
MANETQKVGAIHFPFPFTPYSIQEDFMAELYRVLEAGKIGIFESPTGTGKSLSLICGALSWLRDFEQKKREEEARLLETGTGPLHDEKDESLCLSSSCEGAAGTPRPAGEPAWVTQFVQKKEERDLVDRLKAEQARRKQREERLQQLQHRVQLKYAAKRLRQEEEERENLLRLSREMLETGPEAERLEQLESGEEELVLAEYESDEEKKVASRVDEDEDDLEEEHITKIYYCSRTHSQLAQFVHEVKKSPFGKDVRLVSLGSRQNLCVNEDVKSLGSVQLINDRCVDMQRSRHEERS

SEQ ID NO: 23088 - protein, 91 aa, Homo sapiens
  Payload ID: 4608
  Gene Symbol: DDX11
  Gene Name: DEAD/H (Asp-Glu-Ala-Asp/His) box helicase 11
  ENSP ID: ENSP00000473610
ESPTGTGKSLSLICGALSWLRDFEQKKREEEARLLETGTGPLHDEKDESLCLSSSCEGAAGTPRPAGEPAWVTQFVQKKEERDLVDRLKSG

SEQ ID NO: 23089 - protein, 861 aa, Homo sapiens
  Payload ID: 4609
  Gene Symbol: DDX26B
  Gene Name: DEAD/H (Asp-Glu-Ala-Asp/His) box polypeptide 26B
  Uniprot ID: Q5JSJ4
  ENSP ID: ENSP00000359788
MPILLFLIDTSASMNQRTDLGTSYLDIAKGAVELFLKLRARDPASRGDRYMLVTYDEPPYCIKAGWKENHATFMSELKNLQASGLTTLGQALRSSFDLLNLNRLISGIDNYGQGRNPFFLEPSILITITDGNKLTSTAGVQEELHLPLNSPLPGSELTKEPFRWDQRLFALVLRLPGVASTEPEQLGSVPTDESAITQMCEVTGGRSYCVRTQRMLNQCLESLVQKVQSGVVINFEKTGPDPLPIGEDGLMDSSRPSNSFAAQPWHSCHKLIYVRPNSKTGVPVGHWPIPESFWPDQNLPSLPPRTSHPVVRFSCVDCEPMVIDKLPFDKYELEPSPLTQYILERKSPHTCWQVFVTSSGKYNELGYPFGYLKASTTLTCVNLFVMPYNYPVLLPLLDDLFKVHKLKPNLKWRQAFDSYLKTLPPYYLLTKLESERILASVGKKPPQEIGIKVKNHSGGGMSLTHNKNFRKLLKEITGETALRLTELNTKEFAGFQIGLLNKDLKPQTYRNAYDIPRRGLLDQLTRMRSNLLKTHKFIVGQDEDSLHSVPVAQMGNYQEYLKTLASPLREIDPDQPKRLHTFGNPFKQDKKGMMIDEADEFVAGPQNKVKRPGEPNSPMSSKRRRSMSLLLRKPQTPPTVTNHVGGKGPPSASWFPSYPNLIKPTLVHTDATIIHDGHEEKMENGQITPDGFLSKSAPSELINMTGDLMPPNQVDSLSDDFTSLSKDGLIQKPGSNAFVGGAKNCSLSVDDQKDPVASTLGAMPNTLQITPAMAQGINADIKHQLMKEVRKFGRKYERIFILLEEVQGPLEMKKQFVEFTIKEAARFKRRVLIQYLEKVLEKINSHHLHNNISHINSRSSC

SEQ ID NO: 23090 - protein, 565 aa, Homo sapiens
  Payload ID: 4610
  Gene Symbol: DEAF1
  Gene Name: DEAF1 transcription factor
  Uniprot ID: O75398
  ENSP ID: ENSP00000371846
MEDSDSAAKQLGLAEAAAVAAAAAVAAAAAAAAGGEAEEPVLSRDEDSEEDADSEAERETPRVTAVAVMAAEPGHMDMGAEALPGPDEAAAAAAFAEVTTVTVANVGAAADNVFTTSVANAASISGHVLSGRTALQIGDSLNTEKATLIVVHTDGSIVETTGLKGPAAPLTPGPQSPPTPLAPGQEKGGTKYNWDPSVYDSELPVRCRNISGTLYKNRLGSGGRGRCIKQGENWYSPTEFEAMAGRASSKDWKRSIRYAGRPLQCLIQDGILNPHAASCTCAACCDDMTLSGPVRLFVPYKRRKKENELPTTPVKKDSPKNITLLPATAATTFTVTPSGQITTSGALTFDRASTVEATAVISESPAQGDVFAGATVQEASVQPPCRASHPEPHYPGYQDSCQIAPFPEAALPTSHPKIVLTSLPALAVPPPTPTKAAPPALVNGLELSEPRSWLYLEEMVNSLLNTAQQLKTLFEQAKHASTYREAATNQAKIHADAERKEQSCVNCGREAMSECTGCHKVNYCSTFCQRKDWKDHQHICGQSAAVTVQADEVHVAESVMEKVTV

SEQ ID NO: 23091 - protein, 349 aa, Homo sapiens
  Payload ID: 4610
  Gene Symbol: DEAF1
  Gene Name: DEAF1 transcription factor
  ENSP ID: ENSP00000431563
  MOD_RES (1)..(1): Any amino acid
XLYKNRLGSGGRGRCIKQGENWYSPTEFEAMAGRASSKDWKRSIRYAGRPLQCLIQDGILNPHAASCTCAACCDDMTLSGPVRLFVPYKRRKKENELPTTPVKKDSPKNITLLPATAATTFTVTPSGQITTSGALTFDRASTVEATAVISESPAQGDVFAGATVQEASVQPPCRASHPEPHYPGYQDSCQIAPFPEAALPTSHPKIVLTSLPALAVPPPTPTKAAPPALVNGLELSEPRSWLYLEEMVNSLLNTAQQLKTLFEQAKHASTYREAATNQAKIHADAERKEQSCVNCGREAMSECTGCHKVNYCSTFCQRKRWSLTMLTSLVSISWLRAILPCQPPKVLGL

SEQ ID NO: 23092 - protein, 86 aa, Homo sapiens
  Payload ID: 4610
  Gene Symbol: DEAF1
  Gene Name: DEAF1 transcription factor
  ENSP ID: ENSP00000432518
  MOD_RES (1)..(1): Any amino acid
XPVLSRDEDSEEDADSEAERETPRVTAVAVMAAEPGHMDMGAEALPGPDEAAAAAAFAGKCARRPLASSGSRAPTPRACPAQLSQR

SEQ ID NO: 23093 - protein, 161 aa, Homo sapiens
  Payload ID: 4610
  Gene Symbol: DEAF1
  Gene Name: DEAF1 transcription factor
  ENSP ID: ENSP00000487909
  MOD_RES (1)..(1): Any amino acid
XLTSLPALAVPPPTPTKTAPPALVNGLELSEPRSWLYLEEMVNSLLNTAQQLKTLFEQAKHASTYREAATNQAKIHADAERKEVIHPPRLPKVLGLQQSCVNCGREAMSECTGCHKVNYCSTFCQRKDWKDHQHICGQSAAVTVQADEVHVAESVMEKVTV

SEQ ID NO: 23094 - protein, 147 aa, Homo sapiens
  Payload ID: 4610
  Gene Symbol: DEAF1
  Gene Name: DEAF1 transcription factor
  ENSP ID: ENSP00000488285
  MOD_RES (1)..(1): Any amino acid
XLTSLPALAVPPPTPTKTAPPALVNGLELSEPRSWLYLEEMVNSLLNTAQQLKTLFEQAKHASTYREAATNQAKIHADAERKEQSCVNCGREAMSECTGCHKVNYCSTFCQRKDWKDHQHICGQSAAVTVQADEVHVAESVMEKVTV

SEQ ID NO: 23095 - protein, 143 aa, Homo sapiens
  Payload ID: 4610
  Gene Symbol: DEAF1
  Gene Name: DEAF1 transcription factor
  ENSP ID: ENSP00000488313
  MOD_RES (1)..(1): Any amino acid
XLTSLPALAVPPPTPTKTAPPALVNGLELSEPRSWLYLEEMVNSLLNTAQQLKTLFEQAKHASTYREAATNQAKIHADAERKEQSCVNCGREAMSECTGCHKVNYCSTFCQRKRWSLTMLTSLVSISWLRAILPCQPPKVLGL

SEQ ID NO: 23096 - protein, 496 aa, Homo sapiens
  Payload ID: 4611
  Gene Symbol: DFNA5
  Gene Name: deafness, autosomal dominant 5
  Uniprot ID: O60443
  ENSP ID: ENSP00000339587
MFAKATRNFLREVDADGDLIAVSNLNDSDKLQLLSLVTKKKRFWCWQRPKYQFLSLTLGDVLIEDQFPSPVVVESDFVKYEGKFANHVSGTLETALGKVKLNLGGSSRVESQSSFGTLRKQEVDLQQLIRDSAERTINLRNPVLQQVLEGRNEVLCVLTQKITTMQKCVISEHMQVEEKCGGIVGIQTKTVQVSATEDGNVTKDSNVVLEIPAATTIAYGVIELYVKLDGQFEFCLLRGKQGGFENKKRIDSVYLDPLVFREFAFIDMPDAAHGISSQDGPLSVLKQATLLLERNFHPFAELPEPQQTALSDIFQAVLFDDELLMVLEPVCDDLVSGLSPTVAVLGELKPRQQQDLVAFLQLVGCSLQGGCPGPEDAGSKQLFMTAYFLVSALAEMPDSAAALLGTCCKLQIIPTLCHLLRALSDDGVSDLEDPTLTPLKDTERFGIVQRLFASADISLERLKSSVKAVILKDSKVFPLLLCITLNGLCALGREHS

SEQ ID NO: 23097 - protein, 496 aa, Homo sapiens; identical to SEQ ID NO: 23096
  Payload ID: 4611
  Gene Symbol: DFNA5
  Gene Name: deafness, autosomal dominant 5
  Uniprot ID: O60443
  ENSP ID: ENSP00000386670

SEQ ID NO: 23098 - protein, 332 aa, Homo sapiens
  Payload ID: 4611
  Gene Symbol: DFNA5
  Gene Name: deafness, autosomal dominant 5
  Uniprot ID: O60443
  ENSP ID: ENSP00000387119
MQKCVISEHMQVEEKCGGIVGIQTKTVQVSATEDGNVTKDSNVVLEIPAATTIAYGVIELYVKLDGQFEFCLLRGKQGGFENKKRIDSVYLDPLVFREFAFIDMPDAAHGISSQDGPLSVLKQATLLLERNFHPFAELPEPQQTALSDIFQAVLFDDELLMVLEPVCDDLVSGLSPTVAVLGELKPRQQQDLVAFLQLVGCSLQGGCPGPEDAGSKQLFMTAYFLVSALAEMPDSAAALLGTCCKLQIIPTLCHLLRALSDDGVSDLEDPTLTPLKDTERFGIVQRLFASADISLERLKSSVKAVILKDSKVFPLLLCITLNGLCALGREHS

SEQ ID NO: 23099 - protein, 155 aa, Homo sapiens
  Payload ID: 4611
  Gene Symbol: DFNA5
  Gene Name: deafness, autosomal dominant 5
  ENSP ID: ENSP00000389874
  MOD_RES (1)..(1): Any amino acid
XAATTIAYGVIELYVKLDGQFEFCLLRGKQGGFENKKRIDSVYLDPLVFREFAFIDMPDAAHGISSQDGPLSVLKQATLLLERNFHPFAELPEPQQTALSDIFQAVLFDDELLMVLEPVKDILGRSSSLTLSCTNGESHTSCQPSSHPDSVSSLS

SEQ ID NO: 23100 - protein, 55 aa, Homo sapiens
  Payload ID: 4611
  Gene Symbol: DFNA5
  Gene Name: deafness, autosomal dominant 5
  ENSP ID: ENSP00000395540
QLFMTAYFLVSALAEMPDSAAALLGTCCKLQIIPTLCHLVSNLPGGTLEWIGMGK

SEQ ID NO: 23101 - protein, 192 aa, Homo sapiens
  Payload ID: 4611
  Gene Symbol: DFNA5
  Gene Name: deafness, autosomal dominant 5
  ENSP ID: ENSP00000398445
  MOD_RES (1)..(1): Any amino acid
XEEKCGGIVGIQTKTVQVSATEDGNVTKDSNVVLEIPAATTIAYGVIELYVKLDGQFEFCLLRGKQGGFENKKRIDSVYLDPLVFREFAFIDMPDAAHGISSQDGPLSVLKQATLLLERNFHPFAELPEPQQTALSDIFQAVLFDDELLMVLEPVQKDILGRSSSLTLSCTNGESHTSCQPSSHPDSVSSLS

SEQ ID NO: 23102 - protein, 332 aa, Homo sapiens; identical to SEQ ID NO: 23098
  Payload ID: 4611
  Gene Symbol: DFNA5
  Gene Name: deafness, autosomal dominant 5
  Uniprot ID: O60443
  ENSP ID: ENSP00000401332

SEQ ID NO: 23103 - protein, 18 aa, Homo sapiens
  Payload ID: 4611
  Gene Symbol: DFNA5
  Gene Name: deafness, autosomal dominant 5
  ENSP ID: ENSP00000413963
MQKCVISEHMQVEEKCGG

SEQ ID NO: 23104 - protein, 216 aa, Homo sapiens
  Payload ID: 4611
  Gene Symbol: DFNA5
  Gene Name: deafness, autosomal dominant 5
  ENSP ID: ENSP00000414090
VKYEGKFANHVSGTLETALGKVKLNLGGSSRVESQSSFGTLRKQEVDLQQLIRDSAERTINLRNPVLQQVLEGRNEVLCVLTQKITTMQKCVISEHMQVEEKCGGIVGIQTKTVQVSATEDGNVTKDSNVVLEIPAATTIAYGVIELYVKLDGQFAPLCLPWWSCPVLLMASGECVTPPQLTESSAFSEGSKVASRTRRELTLSTWTPWSFESLHS

SEQ ID NO: 23105 - protein, 524 aa, Homo sapiens
  Payload ID: 4612
  Gene Symbol: DFNB31
  Gene Name: deafness, autosomal recessive 31
  ENSP ID: ENSP00000265134
MANSAGFLGDLTTEGINKPGFYKGPAGSQVTLSSLGNQTRVLLEEQARHLLNEQEHATMAYYLDEYRGGSVSVEALVMALFKLLNTHAKFSLLSEVRGTISPQDLERFDHLVLRREIESMKARQPPGPGAGDTYSMVSYSDTGSSTGSHGTSTTVSSARNTLDLEETGEAVQGNINALPDVSVDDVRSTSQGLSSFKPLPRPPPLAQGNDLPLGQPRKLGREDLQPPSSMPSCSGTVFSAPQNRSPPAGTAPTPGTSSAQDLPSSPIYASVSPANPSSKRPLDAHLALVNQHPIGPFPRVQSPPHLKSPSAEATVAGGCLLPPSPSGHPDQTGTNQHFVMVEVHRPDSEPDVNEVRALPQTRTASTLSQLSDSGQTLSEDSGVDAGEAEASAPGRGRQSVSTKSRSSKELPRNERPTDGANKPPGLLEPTSTLVRVKKSAATLGIAIEGGANTRQPLPRIVTIQRGGSAHNCGQLKVGHVILEVNGLTLRGKEHREAARIIAEAFKTKDRDYIDFLVTEFNVML

SEQ ID NO: 23106 - protein, 907 aa, Homo sapiens
  Payload ID: 4612
  Gene Symbol: DFNB31
  Gene Name: deafness, autosomal recessive 31
  ENSP ID: ENSP00000354623
MNAPLDGLSVSSSSTGSLGSAAGAGGGGGAGLRLLSANVRQLHQALTALLSEAEREQFTHCLNAYHARRNVFDLVRTLRVLLDSPVKRRLLPMLRLVIPRSDQLLFDQYTAEGLYLPATTPYRQPAWGGPDSAGPGEVRLVSLRRAKAHEGLGFSIRGGSEHGVGIYVSLVEPGSLAEKEGLRVGDQILRVNDKSLARVTHAEAVKALKGSKKLVLSVYSAGRIPGGYVTNHIYTWVDPQGRSISPPSGLPQPHGGALRQQEGDRRSTLHLLQGGDEKKVNLVLGDGRSLGLTIRGGAEYGLGIYITGVDPGSEAEGSGLKVGDQILEVNGRSFLNILHDEAVRLLKSSRHLILTVKDVGRLPHARTTVDETKWIASSRIRETMANSAGFLGDLTTEGINKPGFYKGPAGSQVTLSSLGNQTRVLLEEQARHLLNEQEHATMAYYLDEYRGGSVSVEALVMALFKLLNTHAKFSLLSEVRGTISPQDLERFDHLVLRREIESMKARQPPGPGAGDTYSMVSYSDTGSSTGSHGTSTTVSSARNTLDLEETGEAVQGNINALPDVSVDDVRSTSQGLSSFKPLPRPPPLAQGNDLPLGQPRKLGREDLQPPSSMPSCSGTVFSAPQNRSPPAGTAPTPGTSSAQDLPSSPIYASVSPANPSSKRPLDAHLALVNQHPIGPFPRVQSPPHLKSPSAEATVAGGCLLPPSPSGHPDQTGTNQHFVMVEVHRPDSEPDVNEVRALPQTRTASTLSQLSDSGQTLSEDSGVDAGEAEASAPGRGRQSVSTKSRSSKELPRNERPTDGANKPPGLLEPTSTLVRVKKSAATLGIAIEGGANTRQPLPRIVTIQRGGSAHNCGQLKVGHVILEVNGLTLRGKEHREAARIIAEAFKTKDRDYIDFLVTEFNVML

SEQ ID NO: 23107 - protein, 345 aa, Homo sapiens
  Payload ID: 4612
  Gene Symbol: DFNB31
  Gene Name: deafness, autosomal recessive 31
  Uniprot ID: Q9P202
  ENSP ID: ENSP00000363170
MNAPLDGLSVSSSSTGSLGSAAGAGGGGGAGLRLLSANVRQLHQALTALLSEAEREQFTHCLNAYHARRNVFDLVRTLRVLLDSPVKRRLLPMLRLVIPRSDQLLFDQYTAEGLYLPATTPYRQPAWGGPDSAGPGEVRLVSLRRAKAHEGLGFSIRGGSEHGVGIYVSLVEPGSLAEKEGLRVGDQILRVNDKSLARVTHAEAVKALKGSKKLVLSVYSAGRIPGGYVTNHIYTWVDPQGRSISPPSGLPQPHGGALRQQEGDRRSTLHLLQGGDEKKVSGVGKGGQPLRHRILPPNPEQQSCLEAARRGWFCPGSVFPQVCTEGWCFFFAFLFDLCSVCYNTG

SEQ ID NO: 23108 - protein, 556 aa, Homo sapiens
  Payload ID: 4612
  Gene Symbol: DFNB31
  Gene Name: deafness, autosomal recessive 31
  ENSP ID: ENSP00000363172
MHGSLEALLFLPQVTLSLAHAHLICSNAQLEMCVFPHRFLGDLTTEGINKPGFYKGPAGSQVTLSSLGNQTRVLLEEQARHLLNEQEHATMAYYLDEYRGGSVSVEALVMALFKLLNTHAKFSLLSEVRGTISPQDLERFDHLVLRREIESMKARQPPGPGAGDTYSMVSYSDTGSSTGSHGTSTTVSSARNTLDLEETGEAVQGNINALPDVSVDDVRSTSQGLSSFKPLPRPPPLAQGNDLPLGQPRKLGREDLQPPSSMPSCSGTVFSAPQNRSPPAGTAPTPGTSSAQDLPSSPIYASVSPANPSSKRPLDAHLALVNQHPIGPFPRVQSPPHLKSPSAEATVAGGCLLPPSPSGHPDQTGTNQHFVMVEVHRPDSEPDVNEVRALPQTRTASTLSQLSDSGQTLSEDSGVDAGEAEASAPGRGRQSVSTKSRSSKELPRNERPTDGANKPPGLLEPTSTLVRVKKSAATLGIAIEGGANTRQPLPRIVTIQRGGSAHNCGQLKVGHVILEVNGLTLRGKEHREAARIIAEAFKTKDRDYIDFLVTEFNVML

SEQ ID NO: 23109 - protein, 352 aa, Homo sapiens
  Payload ID: 4613
  Gene Symbol: DFNB59
  Gene Name: deafness, autosomal recessive 59
  Uniprot ID: Q0ZLH3
  ENSP ID: ENSP00000364271
MFAAATKSFVKQVGDGGRLVPVPSLSEADKYQPLSLVVKKKRCFLFPRYKFTSTPFTLKDILLGDREISAGISSYQLLNYEDESDVSLYGRRGNHIVNDVGINVAGSDSIAVKASFGIVTKHEVEVSTLLKEITTRKINFDHSLIRQSRSSRKAVLCVVMESIRTTRQCSLSVHAGIRGEAMRFHFMDEQNPKGRDKAIVFPAHTTIAFSVFELFIYLDGAFDLCVTSVSKGGFEREETATFALLYRLRNILFERNRRVMDVISRSQLYLDDLFSDYYDKPLSMTDISLKEGTHIRVNLLNHNIPKGPCILCGMGNFKRETVYGCFQCSVDGQKYVRLHAVPCFDIWHKRMK

SEQ ID NO: 23110 - protein, 352 aa, Homo sapiens; identical to SEQ ID NO: 23109
  Payload ID: 4613
  Gene Symbol: DFNB59
  Gene Name: deafness, autosomal recessive 59
  Uniprot ID: Q0ZLH3
  ENSP ID: ENSP00000386647

SEQ ID NO: 23111 - protein, 105 aa, Homo sapiens
  Payload ID: 4613
  Gene Symbol: DFNB59
  Gene Name: deafness, autosomal recessive 59
  ENSP ID: ENSP00000399579
  MOD_RES (1)..(1): Any amino acid
XKHEVEVSTLLKEITTRKINFDHSLIRQSRSSRKAVLCVVMESIRTTRQCSLSVHAGIRGEAMRFHFMDEQNPKGRDKAIVFPAHTTIAFSVFELFIYLDGAFGL

SEQ ID NO: 23112 - protein, 156 aa, Homo sapiens
  Payload ID: 4613
  Gene Symbol: DFNB59
  Gene Name: deafness, autosomal recessive 59
  ENSP ID: ENSP00000410776
  MOD_RES (1)..(1): Any amino acid
XTPFTLKDILLGDREISAGISSYQLLNYEDESDVSLYGRRGNHIVNDVGINVAGSDSIAVKASFGIVTKHEVEVSTLLKEITTRKINFDHSLIRQSRSSRKAVLCVVMESIRTTRQCSLSVHAGIRGEAMRTFVSLQCQKEDLKGKKRQHLHCCTG

SEQ ID NO: 23113 - protein, 51 aa, Homo sapiens
  Payload ID: 4614
  Gene Symbol: DHX57
  Gene Name: DEAH (Asp-Glu-Ala-Asp/His) box polypeptide 57
  ENSP ID: ENSP00000387404
KKLEFAFANSDYLALLQAYKGWQLSTKEGVRASYNYCRQNFLSGRVLQEKR

SEQ ID NO: 23114 - protein, 665 aa, Homo sapiens
  Payload ID: 4614
  Gene Symbol: DHX57
  Gene Name: DEAH (Asp-Glu-Ala-Asp/His) box polypeptide 57
  ENSP ID: ENSP00000397841
  MOD_RES (1)..(1): Any amino acid
XDFLLLVLKDIVSQRPGLQVILMSATLNAELFSDYFNSCPVITIPGRTFPVDQFFLEDAIAVTRYVLQDGSPYMRSMKQISKEKLKARRNRTAFEEVEEDLRLSLHLQDQDSVKDAVPDQQLDFKQLLARYKGVSKSVIKTMSIMDFEKVNLELIEALLEWIVDGKHSYPPGAILVFLPGLAEIKMLYEQLQSNSLFNNRRSNRCVIHPLHSSLSSEEQQAVFVKPPAGVTKIIISTNIAETSITIDDVVYVIDSGKMKEKRYDASKGMESLEDTFVSQANALQRKGRAGRVASGVCFHLFTSHHYNHQLLKQQLPEIQRVPLEQLCLRIKILEMFSAHNLQSVFSRLIEPPHTDSLRASKIRLRDLGALTPDERLTPLGYHLASLPVDVRIGKLMLFGSIFRCLDPALTIAASLAFKSPFVSPWDKKEEANQKKLEFAFANSDYLALLQAYKGWQLSTKEGVRASYNYCRQNFLSGRVLQEMASLKRQFTELLSDIGFAREGLRAREIEKRAQGGDGVLDATGEEANSNAENPKLISAMLCAALYPNVVQVRHFDSPYLLYHEKIKTSRVFIRDCSMVSVYPLVLFGGGQVNVQLQRGEFVVSLDDGWIRFVAASHQVAELVKELRCELDQLLQDKIKNPSIDLCTCPRGSRIISTIVKLVTTQ

SEQ ID NO: 23115 - protein, 1386 aa, Homo sapiens
  Payload ID: 4614
  Gene Symbol: DHX57
  Gene Name: DEAH (Asp-Glu-Ala-Asp/His) box polypeptide 57
  Uniprot ID: Q6P158
  ENSP ID: ENSP00000405111
MSSSVRRKGKPGKGGGKGSSRGGRGGRSHASKSHGSGGGGGGGGGGGGGNRKASSRIWDDGDDFCIFSESRRPSRPSNSNISKGESRPKWKPKAKVPLQTLHMTSENQEKVKALLRDLQEQDADAGSERGLSGEEEDDEPDCCNDERYWPAGQEPSLVPDLDPLEYAGLASVEPYVPEFTVSPFAVQKLSRYGFNTERCQAVLRMCDGDVGASLEHLLTQCFSETFGERMKISEAVNQISLDECMEQRQEEAFALKSICGEKFIERIQNRVWTIGLELEYLTSRFRKSKPKESTKNVQENSLEICKFYLKGNCKFGSKCRFKHEVPPNQIVGRIERSVDDSHLNAIEDASFLYELEIRFSKDHKYPYQAPLVAFYSTNENLPLACRLHISEFLYDKALTFAETSEPVVYSLITLLEEESEIVKLLTNTHHKYSDPPVNFLPVPSRTRINNPACHKTVIPNNSFVSNQIPEVEKASESEESDEDDGPAPVIVENESYVNLKKKISKRYDWQAKSVHAENGKICKQFRMKQASRQFQSILQERQSLPAWEERETILNLLRKHQVVVISGMTGCGKTTQIPQFILDDSLNGPPEKVANIICTQPRRISAISVAERVAKERAERVGLTVGYQIRLESVKSSATRLLYCTTGVLLRRLEGDTALQGVSHIIVDEVHERTEESDFLLLVLKDIVSQRPGLQVILMSATLNAELFSDYFNSCPVITIPGRTFPVDQFFLEDAIAVTRYVLQDGSPYMRSMKQISKEKLKARRNRTAFEEVEEDLRLSLHLQDQDSVKDAVPDQQLDFKQLLARYKGVSKSVIKTMSIMDFEKVNLELIEALLEWIVDGKHSYPPGAILVFLPGLAEIKMLYEQLQSNSLFNNRRSNRCVIHPLHSSLSSEEQQAVFVKPPAGVTKIIISTNIAETSITIDDVVYVIDSGKMKEKRYDASKGMESLEDTFVSQANALQRKGRAGRVASGVCFHLFTSHHYNHQLLKQQLPEIQRVPLEQLCLRIKILEMFSAHNLQSVFSRLIEPPHTDSLRASKIRLRDLGALTPDERLTPLGYHLASLPVDVRIGKLMLFGSIFRCLDPALTIAASLAFKSPFVSPWDKKEEANQKKLEFAFANSDYLALLQAYKGWQLSTKEGVRASYNYCRQNFLSGRVLQEMASLKRQFTELLSDIGFAREGLRAREIEKRAQGGDGVLDATGEEANSNAENPKLISAMLCAALYPNVVQVKSPEGKFQKTSTGAVRMQPKSAELKFVTKNDGYVHIHPSSVNYQVRHFDSPYLLYHEKIKTSRVFIRDCSMVSVYPLVLFGGGQVNVQLQRGEFVVSLDDGWIRFVAASHQVAELVKELRCELDQLLQDKIKNPSIDLCTCPRGSRIISTIVKLVTTQ

SEQ ID NO: 23116 - protein, 106 aa, Homo sapiens
  Payload ID: 4614
  Gene Symbol: DHX57
  Gene Name: DEAH (Asp-Glu-Ala-Asp/His) box polypeptide 57
  ENSP ID: ENSP00000479840
MTSENQEKVKALLRDLQEQDADAGSERGLSGEEEDDEPDCCNDERYWPAGQEPSLVPDLDPLEYAGLASVEPYVPEFTVSPFAVQKLSRYGFNTERCQAVLRMCDG

SEQ ID NO: 23117 - protein, 472 aa, Homo sapiens
  Payload ID: 4614
  Gene Symbol: DHX57
  Gene Name: DEAH (Asp-Glu-Ala-Asp/His) box polypeptide 57
  ENSP ID: ENSP00000482275
MTSENQEKVKALLRDLQEQDADAGSERGLSGEEEDDEPDCCNDERYWPAGQEPSLVPDLDPLEYAGLASVEPYVPEFTVSPFAVQKLSRYGFNTERCQAVLRMCDGDVGASLEHLLTQCFSETFGERMKISEAVNQISLDECMEQRQEEAFALKSICGEKFIERIQNRVWTIGLELEYLTSRFRKSKPKESTKNVQENSLEICKFYLKGNCKFGSKCRFKHEVPPNQIVGRIERSVDDSHLNAIEDASFLYELEIRFSKDHKYPYQAPLVAFYSTNENLPLACRLHISEFLYDKALTFAETSEPVVYSLITLLEEESEIVKLLTNTHHKYSDPPVNFLPVPSRTRINNPACHKTVIPNNSFVSNQIPEVEKASESEESDEDDGPAPVIVENESYVNLKKKISKRYDWQAKSVHAENGKICKQFRMKQASRQFQSILQERQSLPAWEERETILNLLRKHQVVVISGMTGTYLF

SEQ ID NO: 23118 - protein, 795 aa, Homo sapiens
  Payload ID: 4615
  Gene Symbol: DHX15
  Gene Name: DEAH (Asp-Glu-Ala-His) box helicase 15
  Uniprot ID: O43143
  ENSP ID: ENSP00000336741
MSKRHRLDLGEDYPSGKKRAGTDGKDRDRDRDREDRSKDRDRERDRGDREREREKEKEKELRASTNAMLISAGLPPLKASHSAHSTHSAHSTHSTHSAHSTHAGHAGHTSLPQCINPFTNLPHTPRYYDILKKRLQLPVWEYKDRFTDILVRHQSFVLVGETGSGKTTQIPQWCVEYMRSLPGPKRGVACTQPRRVAAMSVAQRVADEMDVMLGQEVGYSIRFEDCSSAKTILKYMTDGMLLREAMNDPLLERYGVIILDEAHERTLATDILMGVLKEVVRQRSDLKVIVMSATLDAGKFQIYFDNCPLLTIPGRTHPVEIFYTPEPERDYLEAAIRTVIQIHMCEEEEGDLLLFLTGQEEIDEACKRIKREVDDLGPEVGDIKIIPLYSTLPPQQQQRIFEPPPPKKQNGAIGRKVVVSTNIAETSLTIDGVVFVIDPGFAKQKVYNPRIRVESLLVTAISKASAQQRAGRAGRTRPGKCFRLYTEKAYKTEMQDNTYPEILRSNLGSVVLQLKKLGIDDLVHFDFMDPPAPETLMRALELLNYLAALNDDGDLTELGSMMAEFPLDPQLAKMVIASCDYNCSNEVLSITAMLSVPQCFVRPTEAKKAADEAKMRFAHIDGDHLTLLNVYHAFKQNHESVQWCYDNFINYRSLMSADNVRQQLSRIMDRFNLPRRSTDFTSRDYYINIRKALVTGYFMQVAHLERTGHYLTVKDNQVVQLHPSTVLDHKPEWVLYNEFVLTTKNYIRTCTDIKPEWLVKIAPQYYDMSNFPQCEAKRQLDRIIAKLQSKEYSQY

SEQ ID NO: 23119 - protein, 1166 aa, Homo sapiens
  Payload ID: 4616
  Gene Symbol: DHX30
  Gene Name: DEAH (Asp-Glu-Ala-His) box helicase 30
  ENSP ID: ENSP00000343442
MCVNPTPGGTISRASRDLLKEFPQPKNLLNSVIGRALGISHAKDKLVYVHTNGPKKKKVTLHIKWPKSVEVEGYGSKKIDAERQAAAAACQLFKGWGLLGPRNELFDAAKYRVLADRFGSPADSWWRPEPTMPPTSWRQLNPESIRPGGPGGLSRSLGREEEEDEEEELEEGTIDVTDFLSMTQQDSHAPLRDSRGSSFEMTDDDSAIRALTQFPLPKNLLAKVIQIATSSSTAKNLMQFHTVGTKTKLSTLTLLWPCPMTFVAKGRRKAEAENKAAALACKKLKSLGLVDRNNEPLTHAMYNLASLRELGETQRRPCTIQVPEPILRKIETFLNHYPVESSWIAPELRLQSDDILPLGKDSGPLSDPITGKPYVPLLEAEEVRLSQSLLELWRRRGPVWQEAPQLPVDPHRDTILNAIEQHPVVVISGDTGCGKTTRIPQLLLERYVTEGRGARCNVIITQPRRISAVSVAQRVSHELGPSLRRNVGFQVRLESKPPSRGGALLFCTVGILLRKLQSNPSLEGVSHVIVDEVHERDVNTDFLLILLKGLQRLNPALRLVLMSATGDNERFSRYFGGCPVIKVPGFMYPVKEHYLEDILAKLGKHQYLHRHRHHESEDECALDLDLVTDLVLHIDARGEPGGILCFLPGWQEIKGVQQRLQEALGMHESKYLILPVHSNIPMMDQKAIFQQPPVGVRKIVLATNIAETSITINDIVHVVDSGLHKEERYDLKTKVSCLETVWVSRANVIQRRGRAGRCQSGFAYHLFPRSRLEKMVPFQVPEILRTPLENLVLQAKIHMPEKTAVEFLSKAVDSPNIKAVDEAVILLQEIGVLDQREYLTTLGQRLAHISTDPRLAKAIVLAAIFRCLHPLLVVVSCLTRDPFSSSLQNRAEVDKVKALLSHDSGSDHLAFVRAVAGWEEVLRWQDRSSRENYLEENLLYAPSLRFIHGLIKQFSENIYEAFLVGKPSDCTLASAQCNEYSEEEELVKGVLMAGLYPNLIQVRQGKVTRQGKFKPNSVTYRTKSGNILLHKSTINREATRLRSRWLTYFMAVKSNGSVFVRDSSQVHPLAVLLLTDGDVHIRDDGRRATISLSDSDLLRLEGDSRTVRLLKELRRALGRMVERSLRSELAALPPSVQEEHGQLLALLAELLRGPCGSFDVRKTADD

SEQ ID NO: 23120 - protein, 42 aa, Homo sapiens
  Payload ID: 4616
  Gene Symbol: DHX30
  Gene Name: DEAH (Asp-Glu-Ala-His) box helicase 30
  ENSP ID: ENSP00000379094
MFSLDSFRKDRAQHRQRQCKLPPPRLPPMCVNPTPGGTISRG

SEQ ID NO: 23121 - protein, 1194 aa, Homo sapiens
  Payload ID: 4616
  Gene Symbol: DHX30
  Gene Name: DEAH (Asp-Glu-Ala-His) box helicase 30
  Uniprot ID: Q7L2E3
  ENSP ID: ENSP00000392601
MFSLDSFRKDRAQHRQRQCKLPPPRLPPMCVNPTPGGTISRASRDLLKEFPQPKNLLNSVIGRALGISHAKDKLVYVHTNGPKKKKVTLHIKWPKSVEVEGYGSKKIDAERQAAAAACQLFKGWGLLGPRNELFDAAKYRVLADRFGSPADSWWRPEPTMPPTSWRQLNPESIRPGGPGGLSRSLGREEEEDEEEELEEGTIDVTDFLSMTQQDSHAPLRDSRGSSFEMTDDDSAIRALTQFPLPKNLLAKVIQIATSSSTAKNLMQFHTVGTKTKLSTLTLLWPCPMTFVAKGRRKAEAENKAAALACKKLKSLGLVDRNNEPLTHAMYNLASLRELGETQRRPCTIQVPEPILRKIETFLNHYPVESSWIAPELRLQSDDILPLGKDSGPLSDPITGKPYVPLLEAEEVRLSQSLLELWRRRGPVWQEAPQLPVDPHRDTILNAIEQHPVVVISGDTGCGKTTRIPQLLLERYVTEGRGARCNVIITQPRRISAVSVAQRVSHELGPSLRRNVGFQVRLESKPPSRGGALLFCTVGILLRKLQSNPSLEGVSHVIVDEVHERDVNTDFLLILLKGLQRLNPALRLVLMSATGDNERFSRYFGGCPVIKVPGFMYPVKEHYLEDILAKLGKHQYLHRHRHHESEDECALDLDLVTDLVLHIDARGEPGGILCFLPGWQEIKGVQQRLQEALGMHESKYLILPVHSNIPMMDQKAIFQQPPVGVRKIVLATNIAETSITINDIVHVVDSGLHKEERYDLKTKVSCLETVWVSRANVIQRRGRAGRCQSGFAYHLFPRSRLEKMVPFQVPEILRTPLENLVLQAKIHMPEKTAVEFLSKAVDSPNIKAVDEAVILLQEIGVLDQREYLTTLGQRLAHISTDPRLAKAIVLAAIFRCLHPLLVVVSCLTRDPFSSSLQNRAEVDKVKALLSHDSGSDHLAFVRAVAGWEEVLRWQDRSSRENYLEENLLYAPSLRFIHGLIKQFSENIYEAFLVGKPSDCTLASAQCNEYSEEEELVKGVLMAGLYPNLIQVRQGKVTRQGKFKPNSVTYRTKSGNILLHKSTINREATRLRSRWLTYFMAVKSNGSVFVRDSSQVHPLAVLLLTDGDVHIRDDGRRATISLSDSDLLRLEGDSRTVRLLKELRRALGRMVERSLRSELAALPPSVQEEHGQLLALLAELLRGPCGSFDVRKTADD

SEQ ID NO: 23122 - protein, 1222 aa, Homo sapiens
  Payload ID: 4616
  Gene Symbol: DHX30
  Gene Name: DEAH (Asp-Glu-Ala-His) box helicase 30
  Uniprot ID: Q7L2E3
  ENSP ID: ENSP00000394682
MAAARRLMALAAGISPRLQPLGPRAAGRQGRSRGFSSSCAHPDHTKEAAEAESGMAPGGPGEGDGSLVNASRDLLKEFPQPKNLLNSVIGRALGISHAKDKLVYVHTNGPKKKKVTLHIKWPKSVEVEGYGSKKIDAERQAAAAACQLFKGWGLLGPRNELFDAAKYRVLADRFGSPADSWWRPEPTMPPTSWRQLNPESIRPGGPGGLSRSLGREEEEDEEEELEEGTIDVTDFLSMTQQDSHAPLRDSRGSSFEMTDDDSAIRALTQFPLPKNLLAKVIQIATSSSTAKNLMQFHTVGTKTKLSTLTLLWPCPMTFVAKGRRKAEAENKAAALACKKLKSLGLVDRNNEPLTHAMYNLASLRELGETQRRPCTIQVPEPILRKIETFLNHYPVESSWIAPELRLQSDDILPLGKDSGPLSDPITGKPYVPLLEAEEVRLSQSLLELWRRRGPVWQEAPQLPVDPHRDTILNAIEQHPVVVISGDTGCGKTTRIPQLLLERYVTEGRGARCNVIITQPRRISAVSVAQRVSHELGPSLRRNVGFQVRLESKPPSRGGALLFCTVGILLRKLQSNPSLEGVSHVIVDEVHERDVNTDFLLILLKGLQRLNPALRLVLMSATGDNERFSRYFGGCPVIKVPGFMYPVKEHYLEDILAKLGKHQYLHRHRHHESEDECALDLDLVTDLVLHIDARGEPGGILCFLPGWQEIKGVQQRLQEALGMHESKYLILPVHSNIPMMDQKAIFQQPPVGVRKIVLATNIAETSITINDIVHVVDSGLHKEERYDLKTKVSCLETVWVSRANVIQRRGRAGRCQSGFAYHLFPRSRLEKMVPFQVPEILRTPLENLVLQAKIHMPEKTAVEFLSKAVDSPNIKAVDEAVILLQEIGVLDQREYLTTLGQRLAHISTDPRLAKAIVLAAIFRCLHPLLVVVSCLTRDPFSSSLQNRAEVDKVKALLSHDSGSDHLAFVRAVAGWEEVLRWQDRSSRENYLEENLLYAPSLRFIHGLIKQFSENIYEAFLVGKPSDCTLASAQCNEYSEEEELVKGVLMAGLYPNLIQVRQGKVTRQGKFKPNSVTYRTKSGNILLHKSTINREATRLRSRWLTYFMAVKSNGSVFVRDSSQVHPLAVLLLTDGDVHIRDDGRRATISLSDSDLLRLEGDSRTVRLLKELRRALGRMVERSLRSELAALPPSVQEEHGQLLALLAELLRGPCGSFDVRKTADD

SEQ ID NO: 23123 - protein, 42 aa, Homo sapiens; identical to SEQ ID NO: 23120
  Payload ID: 4616
  Gene Symbol: DHX30
  Gene Name: DEAH (Asp-Glu-Ala-His) box helicase 30
  ENSP ID: ENSP00000395166

SEQ ID NO: 23124 - protein, 1194 aa, Homo sapiens; identical to SEQ ID NO: 23121
  Payload ID: 4616
  Gene Symbol: DHX30
  Gene Name: DEAH (Asp-Glu-Ala-His) box helicase 30
  Uniprot ID: Q7L2E3
  ENSP ID: ENSP00000405620

SEQ ID NO: 23125 - protein, 42 aa, Homo sapiens; identical to SEQ ID NO: 23120
  Payload ID: 4616
  Gene Symbol: DHX30
  Gene Name: DEAH (Asp-Glu-Ala-His) box helicase 30
  ENSP ID: ENSP00000410571

SEQ ID NO: 23126 - protein, 1155 aa, Homo sapiens
  Payload ID: 4616
  Gene Symbol: DHX30
  Gene Name: DEAH (Asp-Glu-Ala-His) box helicase 30
  Uniprot ID: Q7L2E3
  ENSP ID: ENSP00000483160
MAASRDLLKEFPQPKNLLNSVIGRALGISHAKDKLVYVHTNGPKKKKVTLHIKWPKSVEVEGYGSKKIDAERQAAAAACQLFKGWGLLGPRNELFDAAKYRVLADRFGSPADSWWRPEPTMPPTSWRQLNPESIRPGGPGGLSRSLGREEEEDEEEELEEGTIDVTDFLSMTQQDSHAPLRDSRGSSFEMTDDDSAIRALTQFPLPKNLLAKVIQIATSSSTAKNLMQFHTVGTKTKLSTLTLLWPCPMTFVAKGRRKAEAENKAAALACKKLKSLGLVDRNNEPLTHAMYNLASLRELGETQRRPCTIQVPEPILRKIETFLNHYPVESSWIAPELRLQSDDILPLGKDSGPLSDPITGKPYVPLLEAEEVRLSQSLLELWRRRGPVWQEAPQLPVDPHRDTILNAIEQHPVVVISGDTGCGKTTRIPQLLLERYVTEGRGARCNVIITQPRRISAVSVAQRVSHELGPSLRRNVGFQVRLESKPPSRGGALLFCTVGILLRKLQSNPSLEGVSHVIVDEVHERDVNTDFLLILLKGLQRLNPALRLVLMSATGDNERFSRYFGGCPVIKVPGFMYPVKEHYLEDILAKLGKHQYLHRHRHHESEDECALDLDLVTDLVLHIDARGEPGGILCFLPGWQEIKGVQQRLQEALGMHESKYLILPVHSNIPMMDQKAIFQQPPVGVRKIVLATNIAETSITINDIVHVVDSGLHKEERYDLKTKVSCLETVWVSRANVIQRRGRAGRCQSGFAYHLFPRSRLEKMVPFQVPEILRTPLENLVLQAKIHMPEKTAVEFLSKAVDSPNIKAVDEAVILLQEIGVLDQREYLTTLGQRLAHISTDPRLAKAIVLAAIFRCLHPLLVVVSCLTRDPFSSSLQNRAEVDKVKALLSHDSGSDHLAFVRAVAGWEEVLRWQDRSSRENYLEENLLYAPSLRFIHGLIKQFSENIYEAFLVGKPSDCTLASAQCNEYSEEEELVKGVLMAGLYPNLIQVRQGKVTRQGKFKPNSVTYRTKSGNILLHKSTINREATRLRSRWLTYFMAVKSNGSVFVRDSSQVHPLAVLLLTDGDVHIRDDGRRATISLSDSDLLRLEGDSRTVRLLKELRRALGRMVERSLRSELAALPPSVQEEHGQLLALLAELLRGPCGSFDVRKTADD

SEQ ID NO: 23127 - protein, 1270 aa, Homo sapiens
  Payload ID: 4617
  Gene Symbol: DHX9
  Gene Name: DEAH (Asp-Glu-Ala-His) box helicase 9
  Uniprot ID: Q08211
  ENSP ID: ENSP00000356520
MGDVKNFLYAWCGKRKMTPSYEIRAVGNKNRQKFMCEVQVEGYNYTGMGNSTNKKDAQSNAARDFVNYLVRINEIKSEEVPAFGVASPPPLTDTPDTTANAEGDLPTTMGGPLPPHLALKAENNSEVGASGYGVPGPTWDRGANLKDYYSRKEEQEVQATLESEEVDLNAGLHGNWTLENAKARLNQYFQKEKIQGEYKYTQVGPDHNRSFIAEMTIYIKQLGRRIFAREHGSNKKLAAQSCALSLVRQLYHLGVVEAYSGLTKKKEGETVEPYKVNLSQDLEHQLQNIIQELNLEILPPPEDPSVPVALNIGKLAQFEPSQRQNQVGVVPWSPPQSNWNPWTSSNIDEGPLAFATPEQISMDLKNELMYQLEQDHDLQAILQERELLPVKKFESEILEAISQNSVVIIRGATGCGKTTQVPQFILDDFIQNDRAAECNIVVTQPRRISAVSVAERVAFERGEEPGKSCGYSVRFESILPRPHASIMFCTVGVLLRKLEAGIRGISHVIVDEIHERDINTDFLLVVLRDVVQAYPEVRIVLMSATIDTSMFCEYFFNCPIIEVYGRTYPVQEYFLEDCIQMTHFVPPPKDKKKKDKDDDGGEDDDANCNLICGDEYGPETRLSMSQLNEKETPFELIEALLKYIETLNVPGAVLVFLPGWNLIYTMQKHLEMNPHFGSHRYQILPLHSQIPREEQRKVFDPVPVGVTKVILSTNIAETSITINDVVYVIDSCKQKVKLFTAHNNMTNYATVWASKTNLEQRKGRAGRVRPGFCFHLCSRARFERLETHMTPEMFRTPLHEIALSIKLLRLGGIGQFLAKAIEPPPLDAVIEAEHTLRELDALDANDELTPLGRILAKLPIEPRFGKMMIMGCIFYVGDAICTIAAATCFPEPFINEGKRLGYIHRNFAGNRFSDHVALLSVFQAWDDARMGGEEAEIRFCEHKRLNMATLRMTWEAKVQLKEILINSGFPEDCLLTQVFTNTGPDNNLDVVISLLAFGVYPNVCYHKEKRKILTTEGRNALIHKSSVNCPFSSQDMKYPSPFFVFGEKIRTRAISAKGMTLVTPLQLLLFASKKVQSDGQIVLVDDWIKLQISHEAAACITGLRAAMEALVVEVTKQPAIISQLDPVNERMLNMIRQISRPSAAGINLMIGSTRYGDGPRPPKMARYDNGSGYRRGGSSYSGGGYGGGYSSGGYGSGGYGGSANSFRAGYGAGVGGGYRGVSRGGFRGNSGGDYRGPSGGYRGSGGFQRGGGRGAYGTGYFGQGRGGGGY

SEQ ID NO: 23128 - protein, 560 aa, Homo sapiens
  Payload ID: 4618
  Gene Symbol: DHX16
  Gene Name: DEAH (Asp-Glu-Ala-His) box polypeptide 16
  ENSP ID: ENSP00000365620
MESQPAQECLMQMFLPIEPACFVEWLGTSPSQLGVVMVDEAHERTLHTDILFGLIKDVARFRPELKVLVASATMDTARFSTFFDDAPVFRIPGRRFPVDIFYTKAPEADYLEACVVSVLQIHVTQPPGDILVFLTGQEEIEAACEMLQDRCRRLGSKIRELLVLPIYANLPSDMQARIFQPTPPGARKVVVATNIAETSLTIEGIIYVLDPGFCKQKSYNPRTGMESLTVTPCSKASANQRAGRAGRVAAGKCFRLYTAWAYQHELEETTVPEIQRTSLGNVVLLLKSLGIHDLMHFDFLDPPPYETLLLALEQLYALGALNHLGELTTSGRKMAELPVDPMLSKMILASEKYSCSEEILTVAAMLSVNNSIFYRPKDKVVHADNARVNFFLPGGDHLVLLNVYTQWAESGYSSQWCYENFVQFRSMRRARDVREQLEGLLERVEVGLSSCQGDYIRVRKAITAGYFYHTARLTRSGYRTVKQQQTVFIHPNSSLFEQQPRWLLYHELVLTTKEFMRQVLEIESSWLLEVAPHYYKAKELEDPHAKKMPKKIGKTREELG

SEQ ID NO: 23129 - protein, 1041 aa, Homo sapiens
  Payload ID: 4618
  Gene Symbol: DHX16
  Gene Name: DEAH (Asp-Glu-Ala-His) box polypeptide 16
  Uniprot ID: O60231
  ENSP ID: ENSP00000365625
MATPAGLERWVQDELHSVLGLSERHVAQFLIGTAQRCTSAEEFVQRLRDTDTLDLSGPARDFALRLWNKVPRKAVVEKPARAAEREARALLEKNRSYRLLEDSEESSEETVSRAGSSLQKKRKKRKHLRKKREEEEEEEASEKGKKKTGGSKQQTEKPESEDEWERTERERLQDLEERDAFAERVRQRDKDRTRNVLERSDKKAYEEAQKRLKMAEEDRKAMVPELRKKSRREYLAKREREKLEDLEAELADEEFLFGDVELSRHERQELKYKRRVRDLAREYRAAGEQEKLEATNRYHMPKETRGQPARAVDLVEEESGAPGEEQRRWEEARLGAASLKFGARDAASQEPKYQLVLEEEETIEFVRATQLQGDEEPSAPPTSTQAQQKESIQAVRRSLPVFPFREELLAAIANHQVLIIEGETGSGKTTQIPQYLFEEGYTNKGMKIACTQPRRVAAMSVAARVAREMGVKLGNEVGYSIRFEDCTSERTVLRYMTDGMLLREFLSEPDLASYSVVMVDEAHERTLHTDILFGLIKDVARFRPELKVLVASATMDTARFSTFFDDAPVFRIPGRRFPVDIFYTKAPEADYLEACVVSVLQIHVTQPPGDILVFLTGQEEIEAACEMLQDRCRRLGSKIRELLVLPIYANLPSDMQARIFQPTPPGARKVVVATNIAETSLTIEGIIYVLDPGFCKQKSYNPRTGMESLTVTPCSKASANQRAGRAGRVAAGKCFRLYTAWAYQHELEETTVPEIQRTSLGNVVLLLKSLGIHDLMHFDFLDPPPYETLLLALEQLYALGALNHLGELTTSGRKMAELPVDPMLSKMILASEKYSCSEEILTVAAMLSVNNSIFYRPKDKVVHADNARVNFFLPGGDHLVLLNVYTQWAESGYSSQWCYENFVQFRSMRRARDVREQLEGLLERVEVGLSSCQGDYIRVRKAITAGYFYHTARLTRSGYRTVKQQQTVFIHPNSSLFEQQPRWLLYHELVLTTKEFMRQVLEIESSWLLEVAPHYYKAKELEDPHAKKMPKKIGKTREELG

SEQ ID NO: 23130 - protein, 560 aa, Homo sapiens
  Payload ID: 4618
  Gene Symbol: DHX16
  Gene Name: DEAH (Asp-Glu-Ala-His) box polypeptide 16
  ENSP ID: ENSP00000373070
MESQPAQECLMQMFLPIEPACFVEWLGTSPSQLGVVMVDEAHERTLHTDILFGLIKDVARFRPELKVLVASATMDTARFSTFFDGAPVFRIPGRRFPVDIFYTKAPEADYLEACVVSVLQIHVTQPPGDILVFLTGQEEIEAACEMLQDRCRRLGSKIRELLVLPIYANLPSDMQARIFQPTPPGARKVVVATNIAETSLTIEGIIYVLDPGFCKQKSYNPRTGMESLTVTPCSKASANQRAGRAGRVAAGKCFRLYTAWAYQHELEETTVPEIQRTSLGNVVLLLKSLGIHDLMHFDFLDPPPYETLLLALEQLYALGALNHLGELTTSGRKMAELPVDPMLSKMILASEKYSCSEEILTVAAMLSVNNSIFYRPKDKVVHADNARVNFFLPGGDHLVLLNVYTQWAESGYSSQWCYENFVQFRSMRRARDVREQLEGLLERVEVGLSSCQGDYIRVRKAITAGYFYHTARLTRSGYRTVKQQQTVFIHPNSSLFEQQPRWLLYHELVLTTKEFMRQVLEIESSWLLEVAPHYYKAKELEDPHAKKMPKKIGKTREELG

SEQ ID NO: 23131 - protein, 1041 aa, Homo sapiens [sequence omitted]

SEQ ID NO: 23132 - protein, 1041 aa, Homo sapiens; identical to SEQ ID NO: 23129
  Payload ID: 4618
  Gene Symbol: DHX16
  Gene Name: DEAH (Asp-Glu-Ala-His) box polypeptide 16
  Uniprot ID: O60231
  ENSP ID: ENSP00000389862

SEQ ID NO: 23133 - protein, 295 aa, Homo sapiens
  Payload ID: 4618
  Gene Symbol: DHX16
  Gene Name: DEAH (Asp-Glu-Ala-His) box polypeptide 16
  ENSP ID: ENSP00000390319
MSEDPRGPKVPRKAVVEKPARAAEREARALLEKNRSYRLLEDSEESSEETVSRAGSSLQKKRKKRKHLRKKREEEEEEEASEKGKKKTGGSKQQTEKPESEDEWERTERERLQDLEERDAFAERVRQRDKDRTRNVLERSDKKAYEEAQKRLKMAEEDRKAMVPELRKKSRREYLAKREREKLEDLEAELADEEFLFGDVELSRHERQELKYKRRVRDLAREYRAAGEQEKLEATNRYHMPKETRGQPARAVDLVEEESGAPGEEQRRWEEARLGAASLKFGARDAASQEPKYQL

SEQ ID NO: 23134 - protein, 1041 aa, Homo sapiens; identical to SEQ ID NO: 23129
  Payload ID: 4618
  Gene Symbol: DHX16
  Gene Name: DEAH (Asp-Glu-Ala-His) box polypeptide 16
  Uniprot ID: O60231
  ENSP ID: ENSP00000390938

SEQ ID NO: 23135 - protein, 669 aa, Homo sapiens
  Payload ID: 4618
  Gene Symbol: DHX16
  Gene Name: DEAH (Asp-Glu-Ala-His) box polypeptide 16
  ENSP ID: ENSP00000391789
MATPAGLERWVQDELHSVLGLSERHVAQFLIGTAQRCTSAEEFVQRLRDTDTLDLSGPARDFALRLWNKVPRKAVVEKPARAAEREARALLEKNRSYRLLEDSEESSEETVSRAGSSLQKKRKKRKHLRKKREEEEEEEASEKGKKKTGGSKQQTEKPESEDEWERTERERLQDLEERDAFAERVRQRDKDRTRNVLERSDKKAYEEAQKRLKMAEEDRKAMVPELRKKSRREYLAKREREKLEDLEAELADEEFLFGDVELSRHERQELKYKRRVRDLAREYRAAGEQEKLEATNRYHMPKETRGQPARAVDLVEEESGAPGEEQRRWEEARLGAASLKFGARDAASQEPKYQLVLEEEETIEFVRATQLQGDEEPSAPPTSTQAQQKESIQAVRRSLPVFPFREELLAAIANHQVLIIEGETGSGKTTQIPQYLFEEGYTNKGMKIACTQPRRVAAMSVAARVAREMGVKLGNEVGYSIRFEDCTSERTVLRYMTDGMLLREFLSEPDLASYSVVMVDEAHERTLHTDILFGLIKDVARFRPELKVLVASATMDTARFSTFFDDAPVFRIPGRRFPVDIFYTKAPEADYLEACVVSVLQIHVTQPPGDILVFLTGQEEIEAACEMLQDRCRRLGSKIRELLVLPIYANLPSDMQARIFQPTPPGARK

SEQ ID NO: 23136 - protein, 295 aa, Homo sapiens; identical to SEQ ID NO: 23133
  Payload ID: 4618
  Gene Symbol: DHX16
  Gene Name: DEAH (Asp-Glu-Ala-His) box polypeptide 16
  ENSP ID: ENSP00000393356

SEQ ID NO: 23137 - protein, 1041 aa, Homo sapiens; identical to SEQ ID NO: 23129
  Payload ID: 4618
  Gene Symbol: DHX16
  Gene Name: DEAH (Asp-Glu-Ala-His) box polypeptide 16
  Uniprot ID: O60231
  ENSP ID: ENSP00000393958

SEQ ID NO: 23138 - protein, 1041 aa, Homo sapiens; identical to SEQ ID NO: 23129
  Payload ID: 4618
  Gene Symbol: DHX16
  Gene Name: DEAH (Asp-Glu-Ala-His) box polypeptide 16
  Uniprot ID: O60231
  ENSP ID: ENSP00000396193

SEQ ID NO: 23139 - protein, 295 aa, Homo sapiens; identical to SEQ ID NO: 23133
  Payload ID: 4618
  Gene Symbol: DHX16
  Gene Name: DEAH (Asp-Glu-Ala-His) box polypeptide 16
  ENSP ID: ENSP00000399101

SEQ ID NO: 23140 - protein, 295 aa, Homo sapiens; identical to SEQ ID NO: 23133
  Payload ID: 4618
  Gene Symbol: DHX16
  Gene Name: DEAH (Asp-Glu-Ala-His) box polypeptide 16
  ENSP ID: ENSP00000403116

SEQ ID NO: 23141 - protein, 560 aa, Homo sapiens; identical to SEQ ID NO: 23128
  Payload ID: 4618
  Gene Symbol: DHX16
  Gene Name: DEAH (Asp-Glu-Ala-His) box polypeptide 16
  ENSP ID: ENSP00000405391

SEQ ID NO: 23142 - protein, 560 aa, Homo sapiens; identical to SEQ ID NO: 23128
  Payload ID: 4618
  Gene Symbol: DHX16
  Gene Name: DEAH (Asp-Glu-Ala-His) box polypeptide 16
  ENSP ID: ENSP00000406462

SEQ ID NO: 23143 - protein, 1041 aa, Homo sapiens; identical to SEQ ID NO: 23129
  Payload ID: 4618
  Gene Symbol: DHX16
  Gene Name: DEAH (Asp-Glu-Ala-His) box polypeptide 16
  Uniprot ID: O60231
  ENSP ID: ENSP00000408956

SEQ ID NO: 23144 - protein, 560 aa, Homo sapiens; identical to SEQ ID NO: 23128
  Payload ID: 4618
  Gene Symbol: DHX16
  Gene Name: DEAH (Asp-Glu-Ala-His) box polypeptide 16
  ENSP ID: ENSP00000409038

SEQ ID NO: 23145 - protein, 560 aa, Homo sapiens; identical to SEQ ID NO: 23128
  Payload ID: 4618
  Gene Symbol: DHX16
  Gene Name: DEAH (Asp-Glu-Ala-His) box polypeptide 16
  ENSP ID: ENSP00000409091

SEQ ID NO: 23146 - protein, 560 aa, Homo sapiens; identical to SEQ ID NO: 23128
  Payload ID: 4618
  Gene Symbol: DHX16
  Gene Name: DEAH (Asp-Glu-Ala-His) box polypeptide 16
  ENSP ID: ENSP00000409558

SEQ ID NO: 23147 - protein, 295 aa, Homo sapiens; identical to SEQ ID NO: 23133
  Payload ID: 4618
  Gene Symbol: DHX16
  Gene Name: DEAH (Asp-Glu-Ala-His) box polypeptide 16
  ENSP ID: ENSP00000409812

SEQ ID NO: 23148 - protein, 295 aa, Homo sapiens; identical to SEQ ID NO: 23133
  Payload ID: 4618
  Gene Symbol: DHX16
  Gene Name: DEAH (Asp-Glu-Ala-His) box polypeptide 16
  ENSP ID: ENSP00000411743

SEQ ID NO: 23149 - protein, 188 aa, Homo sapiens
  Payload ID: 4618
  Gene Symbol: DHX16
  Gene Name: DEAH (Asp-Glu-Ala-His) box polypeptide 16
  ENSP ID: ENSP00000412716
MESQPAQECLMQMFLPIEPACFVEWLGTSPSQLGVVMVDEAHERTLHTDILFGLIKDVARFRPELKVLVASATMDTARFSTFFDDAPVFRIPGRRFPVDIFYTKAPEADYLEACVVSVLQIHVTQPPGDILVFLTGQEEIEAACEMLQDRCRRLGSKIRELLVLPIYANLPSDMQARIFQPTPPGARK

SEQ ID NO: 23150 - protein, 295 aa, Homo sapiens; identical to SEQ ID NO: 23133
  Payload ID: 4618
  Gene Symbol: DHX16
  Gene Name: DEAH (Asp-Glu-Ala-His) box polypeptide 16
  ENSP ID: ENSP00000413416

SEQ ID NO: 23151 - protein, 295 aa, Homo sapiens; identical to SEQ ID NO: 23133
  Payload ID: 4618
  Gene Symbol: DHX16
  Gene Name: DEAH (Asp-Glu-Ala-His) box polypeptide 16
  ENSP ID: ENSP00000414335

SEQ ID NO: 23152 - protein, 1369 aa, Homo sapiens
  Payload ID: 4619
  Gene Symbol: DHX29
  Gene Name: DEAH (Asp-Glu-Ala-His) box polypeptide 29
  Uniprot ID: Q7Z478
  ENSP ID: ENSP00000251636
MGGKNKKHKAPAAAVVRAAVSASRAKSAEAGIAGEAQSKKPVSRPATAAAAAAGSREPRVKQGPKIYSFNSTNDSSGPANLDKSILKVVINNKLEQRIIGVINEHKKQNNDKGMISGRLTAKKLQDLYMALQAFSFKTKDIEDAMTNTLLYGGDLHSALDWLCLNLSDDALPEGFSQEFEEQQPKSRPKFQSPQIQATISPPLQPKTKTYEEDPKSKPKKEEKNMEVNMKEWILRYAEQQNEEEKNENSKSLEEEEKFDPNERYLHLAAKLLDAKEQAATFKLEKNKQGQKEAQEKIRKFQREMETLEDHPVFNPAMKISHQQNERKKPPVATEGESALNFNLFEKSAAATEEEKDKKKEPHDVRNFDYTARSWTGKSPKQFLIDWVRKNLPKSPNPSFEKVPVGRYWKCRVRVIKSEDDVLVVCPTILTEDGMQAQHLGATLALYRLVKGQSVHQLLPPTYRDVWLEWSDAEKKREELNKMETNKPRDLFIAKLLNKLKQQQQQQQQHSENKRENSEDPEESWENLVSDEDFSALSLESANVEDLEPVRNLFRKLQSTPKYQKLLKERQQLPVFKHRDSIVETLKRHRVVVVAGETGSGKSTQVPHFLLEDLLLNEWEASKCNIVCTQPRRISAVSLANRVCDELGCENGPGGRNSLCGYQIRMESRACESTRLLYCTTGVLLRKLQEDGLLSNVSHVIVDEVHERSVQSDFLLIILKEILQKRSDLHLILMSATVDSEKFSTYFTHCPILRISGRSYPVEVFHLEDIIEETGFVLEKDSEYCQKFLEEEEEVTINVTSKAGGIKKYQEYIPVQTGAHADLNPFYQKYSSRTQHAILYMNPHKINLDLILELLAYLDKSPQFRNIEGAVLIFLPGLAHIQQLYDLLSNDRRFYSERYKVIALHSILSTQDQAAAFTLPPPGVRKIVLATNIAETGITIPDVVFVIDTGRTKENKYHESSQMSSLVETFVSKASALQRQGRAGRVRDGFCFRMYTRERFEGFMDYSVPEILRVPLEELCLHIMKCNLGSPEDFLSKALDPPQLQVISNAMNLLRKIGACELNEPKLTPLGQHLAALPVNVKIGKMLIFGAIFGCLDPVATLAAVMTEKSPFTTPIGRKDEADLAKSALAMADSDHLTIYNAYLGWKKARQEGGYRSEITYCRRNFLNRTSLLTLEDVKQELIKLVKAAGFSSSTTSTSWEGNRASQTLSFQEIALLKAVLVAGLYDNVGKIIYTKSVDVTEKLACIVETAQGKAQVHPSSVNRDLQTHGWLLYQEKIRYARVYLRETTLITPFPVLLFGGDIEVQHRERLLSIDGWIYFQAPVKIAVIFKQLRVLIDSVLRKKLENPKMSLENDKILQIITELIKTENN

SEQ ID NO: 23153 - protein, 160 aa, Homo sapiens
  Payload ID: 4619
  Gene Symbol: DHX29
  Gene Name: DEAH (Asp-Glu-Ala-His) box polypeptide 29
  ENSP ID: ENSP00000421435
  MOD_RES (1)..(1): Any amino acid
XRPRWSGPPCLLPEPNLPRLELPGRPKARSQCPGRPPLPLPLPAPGSPVSSKVVINNKLEQRIIGVINEHKKQNNDKGMISGRLTAKKLQDLYMALQAFSFKTKDIEDAMTNTLLYGGDLHSALDWLCLNLSDDALPEGFSQEFEEQQPKSRPKFQSPQI

SEQ ID NO: 23154 - protein, 1370 aa, Homo sapiens
  Payload ID: 4619
  Gene Symbol: DHX29
  Gene Name: DEAH (Asp-Glu-Ala-His) box polypeptide 29
  ENSP ID: ENSP00000481966
MGGKNKKHKAPAAAVVRAAVSASRAKSAEAGIAGEAQSKKPVSRPATAAAAAAGSREPRVKQGPKIYSFNSTNDSSGPANLDKSILKVVINNKLEQRIIGVINEHKKQNNDKGMISGRLTAKKLQDLYMALQAFSFKTKDIEDAMTNTLLYGGDLHSALDWLCLNLSDDALPEGFSQEFEEQQPKSRPKFQSPQIQATISPPLQPKTKTYEEDPKSKPKKEEKNMEVNMKEWILRYAEQQNEEEKNENSKSLEEEEKFDPNERYLHLAAKLLDAKEQAATFKLEKNKQGQKEAQEKIRKFQREMETLEDHPVFNPAMKISHQQNERKKPPVATEGESALNFNLFEKSAAATEEEKGKKKEPHDVRNFDYTARSWTGKSPKQFLIDWVRKNLPKSPNPSFEKVPVGRYWKCRVRVIKSEDDVLVVCPTILTEDGMQAQHLGATLALYRLVKGQSVHQLLPPTYRDVWLEWSDAEKKREELNKMETNKPRDLFIAKLLNKLKQQQQQQQQHSENKRENSEDPEESWENLVSDEDFSALSLESANVEDLEPVRNLFRKLQSTPKYQKLLKERQQLPVFKHRDSIVETLKRHRVVVVAGETGSGKSTQVPHFLLEDLLLNEWEASKCNIVCTQPRRISAVSLANRVCDELGCENGPGGRNSLCGYQIRMESRACESTRLLYCTTGVLLRKLQEDGLLSNVSHVIVDEVHERSVQSDFLLIILKEILQKRSDLHLILMSATVDSEKFSTYFTHCPILRISGRSYPVEVFHLEDIIEETGFVLEKDSEYCQKFLEEEEEVTINVTSKAGGIKKYQEYIPVQTGAHADLNPFYQKYSSRTQHAILYMNPHKINLDLILELLAYLDKSPQFRNIEGAVLIFLPGLAHIQQLYDLLSNDRRFYSERYKVIALHSILSTQDQAAAFTLPPPGVRKIVLATNIAETGITIPDVVFVIDTGRTKENKYHESSQMSSLVETFVSKASALQRQGRAGRVRDGFCFRMYTRERFEGFMDYSVPEILRVPLEELCLHIMKCNLGSPEDFLSKALDPPQLQVISNAMNLLRKIGACELNEPKLTPLGQHLAALPVNVKIGKMLIFGAIFGCLDPVATLAAVMTEKSPFTTPIGRKDEADLAKSALAMADSDHLTIYNAYLGWKKARQEGGYRSEITYCRRNFLNRTSLLTLEDVKQELIKLVKAAGFSSSTTSTSWEGNRASQTLSFQEIALLKAVLVAGLYDNVGKIIYTKSVDVTEKLACIVETAQGKAQVHPSSVNRDLQTHGWLLYQEKIRYARVYLRETTLITPFPVLLFGGDIEVQHRERLLSIDGWIYFQAPVKIAVIFKQLRVLIDSVLRKKLENPKMSLENDKILQIITELIKTENNN

SEQ ID NO: 23155 - protein, 743 aa, Homo sapiens
  Payload ID: 4620
  Gene Symbol: DHX32
  Gene Name: DEAH (Asp-Glu-Ala-His) box polypeptide 32
  Uniprot ID: Q7L7V1
  ENSP ID: ENSP00000284690
MEEEGLECPNSSSEKRYFPESLDSSDGDEEEVLACEDLELNPFDGLPYSSRYYKLLKEREDLPIWKEKYSFMENLLQNQIVIVSGDAKCGKSAQVPQWCAEYCLSIHYQHGGVICTQVHKQTVVQLALRVADEMDVNIGHEVGYVIPFENCCTNETILRYCTDDMLQREMMSNPFLGSYGVIILDDIHERSIATDVLLGLLKDVLLARPELKLIINSSPHLISKLNSYYGNVPVIEVKNKHPVEVVYLSEAQKDSFESILRLIFEIHHSGEKGDIVVFLACEQDIEKVCETVYQGSNLNPDLGELVVVPLYPKEKCSLFKPLDETEKRCQVYQRRVVLTTSSGEFLIWSNSVRFVIDVGVERRKVYNPRIRANSLVMQPISQSQAEIRKQILGSSSSGKFFCLYTEEFASKDMTPLKPAEMQEANLTSMVLFMKRIDIAGLGHCDFMNRPAPESLMQALEDLDYLAALDNDGNLSEFGIIMSEFPLDPQLSKSILASCEFDCVDEVLTIAAMVTAPNCFSHVPHGAEEAALTCWKTFLHPEGDHFTLISIYKAYQDTTLNSSSEYCVEKWCRDYFLNCSALRMADVIRAELLEIIKRIELPYAEPAFGSKENTLNIKKALLSGYFMQIARDVDGSGNYLMLTHKQVAQLHPLSGYSITKKMPEWVLFHKFSISENNYIRITSEISPELFMQLVPQYYFSNLPPSESKDILQQVVDHLSPVSTMNKEQQMCETCPETEQRCTLQ

SEQ ID NO: 23156 - protein, 367 aa, Homo sapiens
  Payload ID: 4620
  Gene Symbol: DHX32
  Gene Name: DEAH (Asp-Glu-Ala-His) box polypeptide 32
  ENSP ID: ENSP00000357710
MQPISQSQAEIRKQILGSSSSGKFFCLYTEEFASKDMTPLKPAEMQEANLTSMVLFMKRIDIAGLGHCDFMNRPAPESLMQALEDLDYLAALDNDGNLSEFGIIMSEFPLDPQLSKSILASCEFDCVDEVLTIAAMVTAPNCFSHVPHGAEEAALTCWKTFLHPEGDHFTLISIYKAYQDTTLNSSSEYCVEKWCRDYFLNCSALRMADVIRAELLEIIKRIELPYAEPAFGSKENTLNIKKALLSGYFMQIARDVDGSGNYLMLTHKQVAQLHPLSGYSITKKMPEWVLFHKFSISENNYIRITSEISPELFMQLVPQYYFSNLPPSESKDILQQVVDHLSPVSTMNKEQQMCETCPETEQRCTLQ

SEQ ID NO: 23157 - protein, 112 aa, Homo sapiens
  Payload ID: 4620
  Gene Symbol: DHX32
  Gene Name: DEAH (Asp-Glu-Ala-His) box polypeptide 32
  ENSP ID: ENSP00000406781
MEEEGLECPNSSSEKRYFPESLDSSDGDEEEVLACEDLELNPFDGLPYSSRYYKLLKEREDLPIWKEKYSFMENLLQNQIVIVSGDAKCGKSAQVPQWCAEYCLSIHYQHGG

SEQ ID NO: 23158 - protein, 707 aa, Homo sapiens
  Payload ID: 4621
  Gene Symbol: DHX33
  Gene Name: DEAH (Asp-Glu-Ala-His) box polypeptide 33
  Uniprot ID: Q9H6R0
  ENSP ID: ENSP00000225296
MPEEAGFPPAKRFRPGSGPPSRAGSFPPGRQVVMLLTAGSGGRGGGGGRRQQPPLAQPSASPYPEAVELQRRSLPIFQARGQLLAQLRNLDNAVLIGETGSGKTTQIPQYLYEGGISRQGIIAVTQPRRVAAISLATRVSDEKRTELGKLVGYTVRFDDVTSEDTRIKFLTDGMLLREAISDSLLRKYSCVILDEAHERTIHTDVLFGVVKAAQKRRKELGKLPLKVIVMSATMDVDLFSQYFNGAPVLYLEGRQHPIQVFYTKQPQNDYLHAALVSVFQIHQEAPSSQDILVFLTGQEEIEAMSKTCRDIAKHLPDGCPAMLVLPLYASLPYAQQLRVFQGAPKGYRKVIISTNIAETSITITGIKYVVDTGMVKAKKYNPDSGLEVLAVQRVSKTQAWQRTGRAGREDSGICYRLYTEDEFEKFDKMTVPEIQRCNLASVMLQLLAMKVPNVLTFDFMSKPSPDHIQAAIAQLDLLGALEHKDDQLTLTPMGRKMAAFPLEPKFAKTILMSPKFHCTEEILTIVSLLSVDSVLHNPPSRREEVQGVRKKFISSEGDHMTLLNIYRTFKNLGGNKDWCKENFVNSKNMTLVAEVRAQLRDICLKMSMPIASSRGDVESVRRCLAHSLFMSTAELQPDGTYATTDTHQPVAIHPSSVLFHCKPACVVYTELLYTNKCYMRDLCVIDAQWLYEAAPEYFRRKLRTARN

SEQ ID NO: 23159 - protein, 483 aa, Homo sapiens
  Payload ID: 4621
  Gene Symbol: DHX33
  Gene Name: DEAH (Asp-Glu-Ala-His) box polypeptide 33
  ENSP ID: ENSP00000413779
MPEEAGFPPAKRFRPGSGPPSRAGSFPPGRQVVMLLTAGSGGRGGGGGRRQQPPLAQPSASPYPEAVELQRRSLPIFQARGQLLAQLRNLDNAVLIGSPFFTGHPGVPHWAGGDRSHEQDVPRHCKAPPRRLPCDAGPSSVRLPALCTAAPSLPRGPKDSGLEVLAVQRVSKTQAWQRTGRAGREDSGICYRLYTEDEFEKFDKMTVPEIQRCNLASVMLQLLAMKVPNVLTFDFMSKPSPDHIQAAIAQLDLLGALEHKDDQLTLTPMGRKMAAFPLEPKFAKTILMSPKFHCTEEILTIVSLLSVDSVLHNPPSRREEVQGVRKKFISSEGDHMTLLNIYRTFKNLGGNKDWCKENFVNSKNMTLVAEVRAQLRDICLKMSMPIASSRGDVESVRRCLAHSLFMSTAELQPDGTYATTDTHQPVAIHPSSVLFHCKPACVVYTELLYTNKCYMRDLCVIDAQWLYEAAPEYFRRKLRTARN

SEQ ID NO: 23160 - protein, 93 aa, Homo sapiens
  Payload ID: 4621
  Gene Symbol: DHX33
  Gene Name: DEAH (Asp-Glu-Ala-His) box polypeptide 33
  ENSP ID: ENSP00000458203
KRFRPGSGPPSRAGSFPPGRQVVMLLTAGSGGRGGGGGRRQQPPLAQPSASPYPEAVELQRRSLPIFQARGQLLAQLRNLDNAVLIGWLYSAL

SEQ ID NO: 23161 - protein, 617 aa, Homo sapiens
  Payload ID: 4621
  Gene Symbol: DHX33
  Gene Name: DEAH (Asp-Glu-Ala-His) box polypeptide 33
  ENSP ID: ENSP00000458925
  MOD_RES (1)..(1): Any amino acid
XRAAAAEEEEEAGGSSRPWPSPRPVPTLKLWSCSAGVCPSSKRGGNCWPSSETWTTRSSSVGYTVRFDDVTSEDTRIKFLTDGMLLREAISDSLLRKYSCVILDEAHERTIHTDVLFGVVKAAQKRRKELGKLPLKVIVMSATMDVDLFSQYFNGAPVLYLEGRQHPIQVFYTKQPQNDYLHAALVSVFQIHQEAPSSQDILVFLTGQEEIEAMSKTCRDIAKHLPDGCPAMLVLPLYASLPYAQQLRVFQGAPKGYRKVIISTNIAETSITITGIKYVVDTGMVKAKKYNPDSGLEVLAVQRVSKTQAWQRTGRAGREDSGICYRLYTEDEFEKFDKMTVPEIQRCNLASVMLQLLAMKVPNVLTFDFMSKPSPDHIQAAIAQLDLLGALEHKDDQLTLTPMGRKMAAFPLEPKFAKTILMSPKFHCTEEILTIVSLLSVDSVLHNPPSRREEVQGVRKKFISSEGDHMTLLNIYRTFKNLGGNKDWCKENFVNSKNMTLVAEVRAQLRDICLKMSMPIASSRGDVESVRRCLAHSLFMSTAELQPDGTYATTDTHQPVAIHPSSVLFHCKPACVVYTELLYTNKCYMRDLCVIDAQWLYEAAPEYFRRKLRTARN

SEQ ID NO: 23162 - protein, 1143 aa, Homo sapiens
  Payload ID: 4622
  Gene Symbol: DHX34
  Gene Name: DEAH (Asp-Glu-Ala-His) box polypeptide 34
  Uniprot ID: Q14147
  ENSP ID: ENSP00000331907
MPPPRTREGRDRRDHHRAPSEEEALEKWDWNCPETRRLLEDAFFREEDYIRQGSEECQKFWTFFERLQRFQNLKTSRKEEKDPGQPKHSIPALADLPRTYDPRYRINLSVLGPATRGSQGLGRHLPAERVAEFRRALLHYLDFGQKQAFGRLAKLQRERAALPIAQYGNRILQTLKEHQVVVVAGDTGCGKSTQVPQYLLAAGFSHVACTQPRRIACISLAKRVGFESLSQYGSQVGYQIRFESTRSAATKIVFLTVGLLLRQIQREPSLPQYEVLIVDEVHERHLHNDFLLGVLQRLLPTRPDLKVILMSATINISLFSSYFSNAPVVQVPGRLFPITVVYQPQEAEPTTSKSEKLDPRPFLRVLESIDHKYPPEERGDLLVFLSGMAEISAVLEAAQTYASHTQRWVVLPLHSALSVADQDKVFDVAPPGVRKCILSTNIAETSVTIDGIRFVVDSGKVKEMSYDPQAKLQRLQEFWISQASAEQRKGRAGRTGPGVCFRLYAESDYDAFAPYPVPEIRRVALDSLVLQMKSMSVGDPRTFPFIEPPPPASLETAILYLRDQGALDSSEALTPIGSLLAQLPVDVVIGKMLILGSMFSLVEPVLTIAAALSVQSPFTRSAQSSPECAAARRPLESDQGDPFTLFNVFNAWVQVKSERSRNSRKWCRRRGIEEHRLYEMANLRRQFKELLEDHGLLAGAQAAQVGDSYSRLQQRRERRALHQLKRQHEEGAGRRRKVLRLQEEQDGGSSDEDRAGPAPPGASDGVDIQDVKFKLRHDLAQLQAAASSAQDLSREQLALLKLVLGRGLYPQLAVPDAFNSSRKDSDQIFHTQAKQGAVLHPTCVFAGSPEVLHAQELEASNCDGSRDDKDKMSSKHQLLSFVSLLETNKPYLVNCVRIPALQSLLLFSRSLDTNGDCSRLVADGWLELQLADSESAIRLLAASLRLRARWESALDRQLAHQAQQQLEEEEEDTPVSPKEVATLSKELLQFTASKIPYSLRRLTGLEVQNMYVGPQTIPATPHLPGLFGSSTLSPHPTKGGYAVTDFLTYNCLTNDTDLYSDCLRTFWTCPHCGLHAPLTPLERIAHENTCPQAPQDGPPGAEEAALETLQKTSVLQRPYHCEACGKDFLFTPTEVLRHRKQHV

SEQ ID NO: 23163 - protein, 272 aa, Homo sapiens
  Payload ID: 4622
  Gene Symbol: DHX34
  Gene Name: DEAH (Asp-Glu-Ala-His) box polypeptide 34
  ENSP ID: ENSP00000418656
  MOD_RES (1)..(1): Any amino acid
XSVQSPFTRSAQSSPECAAARRPLESDQGDPFTLFNVFNAWVQVKSERSRNSRKWCRRRGIEEHRLYEMANLRRQFKELLEDHGLLAGAQAAQVGDSYSRLQQRRERRALHQLKRQHEEGAGRRRKVLRLQEEQDGGSSDEDRAGPAPPGASDGVDIQDVKFKLRHDLAQLQAAASSAQDLSREQLALLKLVLGRGLYPQLAVPDAFNSSRKDSDQIFHTQAKQGAVLHPTCVFAGSPEVLHAQELEASNCDGSRGMAACWESHSDLADLLV

SEQ ID NO: 23164 - protein, 703 aa, Homo sapiens
  Payload ID: 4623
  Gene Symbol: DHX35
  Gene Name: DEAH (Asp-Glu-Ala-His) box polypeptide 35
  Uniprot ID: Q9H5Z1
  ENSP ID: ENSP00000252011
MAAPVGPVKFWRPGTEGPGVSISEERQSLAENSGTTVVYNPYAALSIEQQRQKLPVFKLRNHILYLIENYQTVVIVGETGCGKSTQIPQYLAEAGWTAEGRVVGVTQPRRVAAVTVAGRVAEERGAVLGHEVGYCIRFDDCTDQLATRIKFLTDGMLVREMMVDPLLTKYSVIMLDEAHERTLYTDIAIGLLKKIQKKRGDLRLIVASATLDADKFRDFFNQNETSDPARDTCVILTVEGRTFPVDIFYLQSPVPDYIKSTVETVVKIHQTEGDGDVLAFLTGQEEVETVVSMLIEQARALARTGMKRHLRVLPMYAGLPSFEQMKVFERVSRSVRKVIVATNVAETSITISGIVYVIDCGFVKLRAYNPRTAIECLVVVPVSQASANQRAGRGGRSRSGKCYRLYTEEAFDKLPQSTVPEMQRSNLAPVILQLKALGIDNVLRFHFMSPPPAQSMVQALELLYALGGLDKDCRLTEPLGMRIAEFPLNPMFAKMLLESGNFGCSQEILSIAAMMQIQNIFVVPPNQKSHAIRVHRKFAVEEGDHLTMLNIYEAFIKHNKDSKWCQEHFLNYKGLVRAATVREQLKKLLVKFQVPRKSSEGDPDLVLRCIVSGFFANAARFHSTGAYRTIRDDHELHIHPASVLYAEKPPRWVIYNEVIQTSKYYMRDVTAIESAWLLELAPHFYQQGTHLSLKAKRAKVQDP

SEQ ID NO: 23165 - protein, 672 aa, Homo sapiens
  Payload ID: 4623
  Gene Symbol: DHX35
  Gene Name: DEAH (Asp-Glu-Ala-His) box polypeptide 35
  Uniprot ID: Q9H5Z1
  ENSP ID: ENSP00000362420
MAAPVGPVKFWRPGTEGPGVSISEERQSLAENSGTTVVYNPYAALSIEQQRQKLPVFKYLAEAGWTAEGRVVGVTQPRRVAAVTVAGRVAEERGAVLGHEVGYCIRFDDCTDQLATRIKFLTDGMLVREMMVDPLLTKYSVIMLDEAHERTLYTDIAIGLLKKIQKKRGDLRLIVASATLDADKFRDFFNQNETSDPARDTCVILTVEGRTFPVDIFYLQSPVPDYIKSTVETVVKIHQTEGDGDVLAFLTGQEEVETVVSMLIEQARALARTGMKRHLRVLPMYAGLPSFEQMKVFERVSRSVRKVIVATNVAETSITISGIVYVIDCGFVKLRAYNPRTAIECLVVVPVSQASANQRAGRGGRSRSGKCYRLYTEEAFDKLPQSTVPEMQRSNLAPVILQLKALGIDNVLRFHFMSPPPAQSMVQALELLYALGGLDKDCRLTEPLGMRIAEFPLNPMFAKMLLESGNFGCSQEILSIAAMMQIQNIFVVPPNQKSHAIRVHRKFAVEEGDHLTMLNIYEAFIKHNKDSKWCQEHFLNYKGLVRAATVREQLKKLLVKFQVPRKSSEGDPDLVLRCIVSGFFANAARFHSTGAYRTIRDDHELHIHPASVLYAEKPPRWVIYNEVIQTSKYYMRDVTAIESAWLLELAPHFYQQGTHLSLKAKRAKVQDP

SEQ ID NO: 23166 - protein, 679 aa, Homo sapiens
  Payload ID: 4623
  Gene Symbol: DHX35
  Gene Name: DEAH (Asp-Glu-Ala-His) box polypeptide 35
  ENSP ID: ENSP00000362422
MAAPVGPVKFWRPGTEGPGVSISEERQSLAENSGTTVVYNPYAALSIEQQRQKLPVFKLRNHILYLIENYQTVVIVGETGCGKSTQIPQYLAEAGWTAEGRVVGVTQPRRVAAVTVAGRVAEERGAVLGHEVGYCIRFDDCTDQLATRIKFLTDGMLVREMMVDPLLTKYSVIMLDEAHERTLYTDIAIGLLKKIQKKRGDLRLIVASATLDADKFRDFFNQNETSDPARDTCVILTVEGRTFPVDIFYLQSPVPDYIKSTVETVVKIHQTEGDGDVLAFLTGQEEVETVVSMLIEQARALARTGMKRHLRVLPMYAGLPSFEQMKVFERVSRSVRKVIVATNVAETSITISGIVYVIDCGFVKLRAYNPRTAIECLVVVPVSQASANQRAGRGGRSRSGKCYRLYTEEAFDKLPQSTVPEMQRSNLAPVILQLKALGIDNVLRFHFMSPPPAQSMVQALELLYALGGLDKDCRLTEPLGMRIAEFPLNPMFAKMLLESGNFGCSQEILSIAAMMQIQNIFVVPPNQKSHAIRVHRKFAVEEGDHLTMLNIYEAFIKHNKDSKWCQEHFLNYKGLVRAATVREQLKKLLVKFQVPRKSSEGDPDLVLRCIVSGFFANAARFHSTGAYRVIYNEVIQTSKYYMRDVTAIESAWLLELAPHFYQQGTHLSLKAKRAKVQDP

SEQ ID NO: 23167 - protein, 167 aa, Homo sapiens
  Payload ID: 4623
  Gene Symbol: DHX35
  Gene Name: DEAH (Asp-Glu-Ala-His) box polypeptide 35
  ENSP ID: ENSP00000397997
IAAMMQIQNIFVVPPNQKSHAHNKDSKWCQEHFLNYKGLVRAATVREQLKKLLVKFQVPRKSSEGDPDLVLRCIVSGFFANAARFHSTGAYRTIRDDHELHIHPASVLYAEKPPRWVIYNEVIQTSKYYMRDVTAIESAWLLELAPHFYQQGTHLSLKAKRAKVQDP

SEQ ID NO: 23168 - protein, 126 aa, Homo sapiens
  Payload ID: 4623
  Gene Symbol: DHX35
  Gene Name: DEAH (Asp-Glu-Ala-His) box polypeptide 35
  ENSP ID: ENSP00000432603
MAAPVGPVKFWRPGTEGPGVSISEERQSLAENSGTTVVYNPYAALSIEQQRQKLPVFKLRNHILYLIENYQTVVIVGETGCGKSTQIPQYLAEAGWTAEGRVVGVTQPRRVAAVTHDLSSQRLQGE

SEQ ID NO: 23169 - protein, 979 aa, Homo sapiens
  Payload ID: 4624
  Gene Symbol: DHX36
  Gene Name: DEAH (Asp-Glu-Ala-His) box polypeptide 36
  Uniprot ID: Q9H2U1
  ENSP ID: ENSP00000309296
MSYDYHQNWGRDGGPRSSGGGYGGGPAGGHGGNRGSGGGGGGGGGGRGGRGRHPGHLKGREIGMWYAKKQGQKNKEAERQERAVVHMDERREEQIVQLLNSVQAKNDKESEAQISWFAPEDHGYGTEVSTKNTPCSENKLDIQEKKLINQEKKMFRIRNRSYIDRDSEYLLQENEPDGTLDQKLLEDLQKKKNDLRYIEMQHFREKLPSYGMQKELVNLIDNHQVTVISGETGCGKTTQVTQFILDNYIERGKGSACRIVCTQPRRISAISVAERVAAERAESCGSGNSTGYQIRLQSRLPRKQGSILYCTTGIILQWLQSDPYLSSVSHIVLDEIHERNLQSDVLMTVVKDLLNFRSDLKVILMSATLNAEKFSEYFGNCPMIHIPGFTFPVVEYLLEDVIEKIRYVPEQKEHRSQFKRGFMQGHVNRQEKEEKEAIYKERWPDYVRELRRRYSASTVDVIEMMEDDKVDLNLIVALIRYIVLEEEDGAILVFLPGWDNISTLHDLLMSQVMFKSDKFLIIPLHSLMPTVNQTQVFKRTPPGVRKIVIATNIAETSITIDDVVYVIDGGKIKETHFDTQNNISTMSAEWVSKANAKQRKGRAGRVQPGHCYHLYNGLRASLLDDYQLPEILRTPLEELCLQIKILRLGGIAYFLSRLMDPPSNEAVLLSIRHLMELNALDKQEELTPLGVHLARLPVEPHIGKMILFGALFCCLDPVLTIAASLSFKDPFVIPLGWEEARRRGFRYEKDYCWEYFLSSNTLQMLHNMKGQFAEHLLGAGFVSSRNPKDPESNINSDNEKIIKAVICAGLYPKVAKIRLNLGKKRKMVKVYTKTDGLVAVHPKSVNVEQTDFHYNWLIYHLKMRTSSIYLYDCTEVSPYCLLFFGGDISIQKDNDQETIAVDEWIVFQSPARIAHLVKELRKELDILLQEKIESPHPVDWNDTKSRDCAVLSAIIDLIKTQEKATPRNFPPRFQDGYYS

SEQ ID NO: 23170 - protein, 994 aa, Homo sapiens
  Payload ID: 4624
  Gene Symbol: DHX36
  Gene Name: DEAH (Asp-Glu-Ala-His) box polypeptide 36
  Uniprot ID: Q9H2U1
  ENSP ID: ENSP00000330113
MSYDYHQNWGRDGGPRSSGGGYGGGPAGGHGGNRGSGGGGGGGGGGRGGRGRHPGHLKGREIGMWYAKKQGQKNKEAERQERAVVHMDERREEQIVQLLNSVQAKNDKESEAQISWFAPEDHGYGTEVSTKNTPCSENKLDIQEKKLINQEKKMFRIRNRSYIDRDSEYLLQENEPDGTLDQKLLEDLQKKKNDLRYIEMQHFREKLPSYGMQKELVNLIDNHQVTVISGETGCGKTTQVTQFILDNYIERGKGSACRIVCTQPRRISAISVAERVAAERAESCGSGNSTGYQIRLQSRLPRKQGSILYCTTGIILQWLQSDPYLSSVSHIVLDEIHERNLQSDVLMTVVKDLLNFRSDLKVILMSATLNAEKFSEYFGNCPMIHIPGFTFPVVEYLLEDVIEKIRYVPEQKEHRSQFKRGFMQGHVNRQEKEEKEAIYKERWPDYVRELRRRYSASTVDVIEMMEDDKVDLNLIVALIRYIVLEEEDGAILVFLPGWDNISTLHDLLMSQVMFKSVNQTQVFKRTPPGVRKIVIATNIAETSITIDDVVYVIDGGKIKETHFDTQNNISTMSAEWVSKANAKQRKGRAGRVQPGHCYHLYNGLRASLLDDYQLPEILRTPLEELCLQIKILRLGGIAYFLSRLMDPPSNEAVLLSIRHLMELNALDKQEELTPLGVHLARLPVEPHIGKMILFGALFCCLDPVLTIAASLSFKDPFVIPLGKEKIADARRKELAKDTRSDHLTVVNAFEGWEEARRRGFRYEKDYCWEYFLSSNTLQMLHNMKGQFAEHLLGAGFVSSRNPKDPESNINSDNEKIIKAVICAGLYPKVAKIRLNLGKKRKMVKVYTKTDGLVAVHPKSVNVEQTDFHYNWLIYHLKMRTSSIYLYDCTEVSPYCLLFFGGDISIQKDNDQETIAVDEWIVFQSPARIAHLVKELRKELDILLQEKIESPHPVDWNDTKSRDCAVLSAIIDLIKTQEKATPRNFPPRFQDGYYS

SEQ ID NO: 23171 - protein, 1008 aa, Homo sapiens
  Payload ID: 4624
  Gene Symbol: DHX36
  Gene Name: DEAH (Asp-Glu-Ala-His) box polypeptide 36
  Uniprot ID: Q9H2U1
  ENSP ID: ENSP00000417078
MSYDYHQNWGRDGGPRSSGGGYGGGPAGGHGGNRGSGGGGGGGGGGRGGRGRHPGHLKGREIGMWYAKKQGQKNKEAERQERAVVHMDERREEQIVQLLNSVQAKNDKESEAQISWFAPEDHGYGTEVSTKNTPCSENKLDIQEKKLINQEKKMFRIRNRSYIDRDSEYLLQENEPDGTLDQKLLEDLQKKKNDLRYIEMQHFREKLPSYGMQKELVNLIDNHQVTVISGETGCGKTTQVTQFILDNYIERGKGSACRIVCTQPRRISAISVAERVAAERAESCGSGNSTGYQIRLQSRLPRKQGSILYCTTGIILQWLQSDPYLSSVSHIVLDEIHERNLQSDVLMTVVKDLLNFRSDLKVILMSATLNAEKFSEYFGNCPMIHIPGFTFPVVEYLLEDVIEKIRYVPEQKEHRSQFKRGFMQGHVNRQEKEEKEAIYKERWPDYVRELRRRYSASTVDVIEMMEDDKVDLNLIVALIRYIVLEEEDGAILVFLPGWDNISTLHDLLMSQVMFKSDKFLIIPLHSLMPTVNQTQVFKRTPPGVRKIVIATNIAETSITIDDVVYVIDGGKIKETHFDTQNNISTMSAEWVSKANAKQRKGRAGRVQPGHCYHLYNGLRASLLDDYQLPEILRTPLEELCLQIKILRLGGIAYFLSRLMDPPSNEAVLLSIRHLMELNALDKQEELTPLGVHLARLPVEPHIGKMILFGALFCCLDPVLTIAASLSFKDPFVIPLGKEKIADARRKELAKDTRSDHLTVVNAFEGWEEARRRGFRYEKDYCWEYFLSSNTLQMLHNMKGQFAEHLLGAGFVSSRNPKDPESNINSDNEKIIKAVICAGLYPKVAKIRLNLGKKRKMVKVYTKTDGLVAVHPKSVNVEQTDFHYNWLIYHLKMRTSSIYLYDCTEVSPYCLLFFGGDISIQKDNDQETIAVDEWIVFQSPARIAHLVKELRKELDILLQEKIESPHPVDWNDTKSRDCAVLSAIIDLIKTQEKATPRNFPPRFQDGYYS

SEQ ID NO: 23172 - protein, 119 aa, Homo sapiens
  Payload ID: 4624
  Gene Symbol: DHX36
  Gene Name: DEAH (Asp-Glu-Ala-His) box polypeptide 36
  ENSP ID: ENSP00000418756
NALDKQEELTPLGVHLARLPVEPHIGKMILFGALFCCLDPVLTIAASLSFKDPFVIPLGKEKIADARRKELAKDTRSDHLTVVNAFEGWEEARRRGFRYEKDYCWEYFLSSNTLQIMRR

SEQ ID NO: 23173 - protein, 187 aa, Homo sapiens
  Payload ID: 4624
  Gene Symbol: DHX36
  Gene Name: DEAH (Asp-Glu-Ala-His) box polypeptide 36
  ENSP ID: ENSP00000419761
  MOD_RES (1)..(1): Any amino acid
XIPLHSLMPTVNQTQVFKRTPPGVRKIVIATNIAETSITIDDVVYVIDGGKIKETHFDTQNNISTMSAEWVSKANAKQRKGRAGRVQPGHCYHLYNGLRASLLDDYQLPEILRTPLEELCLQIKNALDKQEELTPLGVHLARLPVEPHIGKMILFGALFCCLDPVLTIAASLSFKDPFVIPLGKEKI

SEQ ID NO: 23174 - protein, 797 aa, Homo sapiens
  Payload ID: 4624
  Gene Symbol: DHX36
  Gene Name: DEAH (Asp-Glu-Ala-His) box polypeptide 36
  ENSP ID: ENSP00000419862
MDERREEQIVQLLNSVQAKNDKESEAQISWFAPEDHGYGTEVSTKNTPCSENKLDIQEKKLINQEKKMFRIRNRSYIDRDSEYLLQENEPDGTLDQKLLEDLQKKKNDLRYIEMQHFREKLPSYGMQKELVNLIDNHQVTVISGETGCGKTTQVTQFILDNYIERGKGSACRIVCTQPRRISAISVAERVAAERAESCGSGNSTGYQIRLQSRLPRKQGSILYCTTGIILQWLQSDPYLSSVSHIVLDEIHERNLQSDVLMTVVKDLLNFRSDLKVILMSATLNAEKFSEYFGNCPMIHIPGFTFPVVEYLLEDVIEKIRYVPEQKEHRSQFKRGFMQGHVNRQEKEEKEAIYKERWPDYVRELRRRYSASTVDVIEMMEDDKVDLNLIVALIRYIVLEEEDGAILVFLPGWDNISTLHDLLMSQVMFKSDKFLIIPLHSLMPTVNQTQVFKRTPPGVRKIVIATNIAETSITIDDVVYVIDGGKIKETHFDTQNNISTMSAEWVSKANAKQRKGRAGRVQPGHCYHLYNGLRASLLDDYQLPEILRTPLEELCLQIKILRLGGIAYFLSRLMDPPSNEAVLLSIRHLMELNALDKQEELTPLGVHLARLPVEPHIGKMILFGALFCCLDPVLTIAASLSFKDPFVIPLGKEKIADARRKELAKDTRSDHLTVVNAFEGWEEARRRGFRYEKDYCWEYFLSSNTLQMLHNMKGQFAEHLLGAGFVSSRNPKDPESNINSDNEKIIKAVICAGLYPKVAKIRLNLGKKRKMVKVYTKTDGLVAVHPKSVNVEQTDFHY

SEQ ID NO: 23175 - protein, 4 aa, Homo sapiens
  Payload ID: 4624
  Gene Symbol: DHX36
  Gene Name: DEAH (Asp-Glu-Ala-His) box polypeptide 36
  ENSP ID: ENSP00000485828
IMRR

SEQ ID NO: 23176 - protein, 216 aa, Homo sapiens
  Payload ID: 4624
  Gene Symbol: DHX36
  Gene Name: DEAH (Asp-Glu-Ala-His) box polypeptide 36
  ENSP ID: ENSP00000486184
MLHNMKGQFAEHLLGAGFVSSRNPKDPESNINSDNEKIIKAVICAGLYPKVAKIRLNLGKKRKMVKVYTKTDGLVAVHPKSVNVEQTDFHYNWLIYHLKMRTSSIYLYDCTEVSPYCLLFFGGDISIQKDNDQETIAVDEWIVFQSPARIAHLVKELRKELDILLQEKIESPHPVDWNDTKSRDCAVLSAIIDLIKTQEKATPRNFPPRFQDGYYS

SEQ ID NO: 23177 - protein, 216 aa, Homo sapiens; identical to SEQ ID NO: 23176
  Payload ID: 4624
  Gene Symbol: DHX36
  Gene Name: DEAH (Asp-Glu-Ala-His) box polypeptide 36
  ENSP ID: ENSP00000486321

SEQ ID NO: 23178 - protein, 216 aa, Homo sapiens; identical to SEQ ID NO: 23176
  Payload ID: 4624
  Gene Symbol: DHX36
  Gene Name: DEAH (Asp-Glu-Ala-His) box polypeptide 36
  ENSP ID: ENSP00000486604

SEQ ID NO: 23179 - protein, 91 aa, Homo sapiens
  Payload ID: 4624
  Gene Symbol: DHX36
  Gene Name: DEAH (Asp-Glu-Ala-His) box polypeptide 36
  ENSP ID: ENSP00000486956
MLHNMKGQFAEHLLGAGFVSSRNPKDPESNINSDNEKIIKAVICAGLYPKVAKIRLNLGKKRKMVKVYTKTDGLVAVHPKSVNVEQTDFHY

SEQ ID NO: 23180 - protein, 1157 aa, Homo sapiens
  Payload ID: 4625
  Gene Symbol: DHX37
  Gene Name: DEAH (Asp-Glu-Ala-His) box polypeptide 37
  Uniprot ID: Q8IY37
  ENSP ID: ENSP00000311135
MGKLRRRYNIKGRQQAGPGPSKGPPEPPPVQLELEDKDTLKGVDASNALVLPGKKKKKTKAPPLSKKEKKPLTKKEKKVLQKILEQKEKKSQRAEMLQKLSEVQASEAEMRLFYTTSKLGTGNRMYHTKEKADEVVAPGQEKISSLSGAHRKRRRWPSAEEEEEEEEESESELEEESELDEDPAAEPAEAGVGTTVAPLPPAPAPSSQPVPAGMTVPPPPAAAPPLPRALAKPAVFIPVNRSPEMQEERLKLPILSEEQVIMEAVAEHPIVIVCGETGSGKTTQVPQFLYEAGFSSEDSIIGVTEPRRVAAVAMSQRVAKEMNLSQRVVSYQIRYEGNVTEETRIKFMTDGVLLKEIQKDFLLLRYKVVIIDEAHERSVYTDILIGLLSRIVTLRAKRNLPLKLLIMSATLRVEDFTQNPRLFAKPPPVIKVESRQFPVTVHFNKRTPLEDYSGECFRKVCKIHRMLPAGGILVFLTGQAEVHALCRRLRKAFPPSRARPQEKDDDQKDSVEEMRKFKKSRARAKKARAEVLPQINLDHYSVLPAGEGDEDREAEVDEEEGALDSDLDLDLGDGGQDGGEQPDASLPLHVLPLYSLLAPEKQAQVFKPPPEGTRLCVVATNVAETSLTIPGIKYVVDCGKVKKRYYDRVTGVSSFRVTWVSQASADQRAGRAGRTEPGHCYRLYSSAVFGDFEQFPPPEITRRPVEDLILQMKALNVEKVINFPFPTPPSVEALLAAEELLIALGALQPPQKAERVKQLQENRLSCPITALGRTMATFPVAPRYAKMLALSRQHGCLPYAITIVASMTVRELFEELDRPAASDEELTRLKSKRARVAQMKRTWAGQGASLKLGDLMVLLGAVGACEYASCTPQFCEANGLRYKAMMEIRRLRGQLTTAVNAVCPEAELFVDPKMQPPTESQVTYLRQIVTAGLGDHLARRVQSEEMLEDKWRNAYKTPLLDDPVFIHPSSVLFKELPEFVVYQEIVETTKMYMKGVSSVEVQWIPALLPSYCQFDKPLEEPAPTYCPERGRVLCHRASVFYRVGWPLPAIEVDFPEGIDRYKHFARFLLEGQVFRKLASYRSCLLSSPGTMLKTWARLQPRTESLLRALVAEKADCHEALLAAWKKNPKYLLAEYCEWLPQAMHPDIEKAWPPTTVH

SEQ ID NO: 23181 - protein, 962 aa, Homo sapiens
  Payload ID: 4625
  Gene Symbol: DHX37
  Gene Name: DEAH (Asp-Glu-Ala-His) box polypeptide 37
  ENSP ID: ENSP00000439009
MTVPPPPAAAPPLPRALAKPAVFIPVNRSPEMQEERLKLPILSEEQVIMEAVAEHPIVIVCGETGSGKTTQVPQFLYEAGFSSEDSIIGVTEPRRVAAVAMSQRVAKEMNLSQRVVSYQIRYEGNVTEETRIKFMTDGVLLKEIQKDFLLLRYKVVIIDEAHERSVYTDILIGLLSRIVTLRAKRNLPLKLLIMSATLRVEDFTQNPRLFAKPPPVIKVESRQFPVTVHFNKRTPLEDYSGECFRKVCKIHRMLPAGGILVFLTGQAEVHALCRRLRKAFPPSRARPQEKDDDQKDSVEEMRKFKKSRARAKKARAEVLPQINLDHYSVLPAGEGDEDREAEVDEEEGALDSDLDLDLGDGGQDGGEQPDASLPLHVLPLYSLLAPEKQAQVFKPPPEGTRLCVVATNVAETSLTIPGIKYVVDCGKVKKRYYDRVTGVSSFRVTWVSQASADQRAGRAGRTEPGHCYRLYSSAVFGDFEQFPPPEITRRPVEDLILQMKALNVEKVINFPFPTPPSVEALLAAEELLIALGALQPPQKAERVKQLQENRLSCPITALGRTMATFPVAPRYAKMLALSRQHGCLPYAITIVASMTVRELFEELDRPAASDEELTRLKSKRARVAQMKRTWAGQGASLKLGDLMVLLGAVGACEYASCTPQFCEANGLRYKAMMEIRRLRGQLTTAVNAVCPEAELFVDPKMQPPTESQVTYLRQIVTAGLGDHLARRVQSEEMLEDKWRNAYKTPLLDDPVFIHPSSVLFKELPEFVVYQEIVETTKMYMKGVSSVEVQWIPALLPSYCQFDKPLEEPAPTYCPERGRVLCHRASVFYRVGWPLPAIEVDFPEGIDRYKHFARFLLEGQVFRKLASYRSCLLSSPGTMLKTWARLQPRTESLLRALVAEKADCHEALLAAWKKNPKCEFDQGQGVGVDRMGSLRQGLCALCTVSPGLAEGSGPTAAGQLFAT

SEQ ID NO: 23182 - protein, 133 aa, Homo sapiens
  Payload ID: 4625
  Gene Symbol: DHX37
  Gene Name: DEAH (Asp-Glu-Ala-His) box polypeptide 37
  ENSP ID: ENSP00000443661
MRTGRQKWMRKRGPWTPTSIWTWGMAGKMEVSSRMPPSRSTCSRCTLCWPQRSKHRSLSLHRRGLGCVLWPPMWPRRRLPSLASSTWWTVGRSRNATTTASLAYPPSVSPGSPRHQLTSERAEQDGRSPATAT

SEQ ID NO: 23183 - protein, 1227 aa, Homo sapiens
  Payload ID: 4626
  Gene Symbol: DHX38
  Gene Name: DEAH (Asp-Glu-Ala-His) box polypeptide 38
  Uniprot ID: Q92620
  ENSP ID: ENSP00000268482
MGDTSEDASIHRLEGTDLDCQVGGLICKSKSAASEQHVFKAPAPRPSLLGLDLLASLKRREREEKDDGEDKKKSKVSSYKDWEESKDDQKDAEEEGGDQAGQNIRKDRHYRSARVETPSHPGGVSEEFWERSRQRERERREHGVYASSKEEKDWKKEKSRDRDYDRKRDRDERDRSRHSSRSERDGGSERSSRRNEPESPRHRPKDAATPSRSTWEEEDSGYGSSRRSQWESPSPTPSYRDSERSHRLSTRDRDRSVRGKYSDDTPLPTPSYKYNEWADDRRHLGSTPRLSRGRGRREEGEEGISFDTEEERQQWEDDQRQADRDWYMMDEGYDEFHNPLAYSSEDYVRRREQHLHKQKQKRISAQRRQINEDNERWETNRMLTSGVVHRLEVDEDFEEDNAAKVHLMVHNLVPPFLDGRIVFTKQPEPVIPVKDATSDLAIIARKGSQTVRKHREQKERKKAQHKHWELAGTKLGDIMGVKKEEEPDKAVTEDGKVDYRTEQKFADHMKRKSEASSEFAKKKSILEQRQYLPIFAVQQELLTIIRDNSIVIVVGETGSGKTTQLTQYLHEDGYTDYGMIGCTQPRRVAAMSVAKRVSEEMGGNLGEEVGYAIRFEDCTSENTLIKYMTDGILLRESLREADLDHYSAIIMDEAHERSLNTDVLFGLLREVVARRSDLKLIVTSATMDAEKFAAFFGNVPIFHIPGRTFPVDILFSKTPQEDYVEAAVKQSLQVHLSGAPGDILIFMPGQEDIEVTSDQIVEHLEELENAPALAVLPIYSQLPSDLQAKIFQKAPDGVRKCIVATNIAETSLTVDGIMFVIDSGYCKLKVFNPRIGMDALQIYPISQANANQRSGRAGRTGPGQCFRLYTQSAYKNELLTTTVPEIQRTNLANVVLLLKSLGVQDLLQFHFMDPPPEDNMLNSMYQLWILGALDNTGGLTSTGRLMVEFPLDPALSKMLIVSCDMGCSSEILLIVSMLSVPAIFYRPKGREEESDQIREKFAVPESDHLTYLNVYLQWKNNNYSTIWCNDHFIHAKAMRKVREVRAQLKDIMVQQRMSLASCGTDWDIVRKCICAAYFHQAAKLKGIGEYVNIRTGMPCHLHPTSSLFGMGYTPDYIVYHELVMTTKEYMQCVTAVDGEWLAELGPMFYSVKQAGKSRQENRRRAKEEASAMEEEMALAEEQLRARRQEQEKRSPLGSVRSTKIYTPGRKEQGEPMTPRRTPARFGL

SEQ ID NO: 23184 - protein, 191 aa, Homo sapiens
  Payload ID: 4626
  Gene Symbol: DHX38
  Gene Name: DEAH (Asp-Glu-Ala-His) box polypeptide 38
  ENSP ID: ENSP00000454521
  MOD_RES (1)..(1): Any amino acid
XMRKVREVRAQLKDIMVQQRMSLASCGTDWDIVRKCICAAYFHQAAKLKGIGEYVNIRTGMPCHLHPTSSLFGMGYTPDYIVYHELVMTTKEYMQCVTAVDGEWLAELGPMFYSVKQAGKSRQENRRRAKEEASAMEEEMALAEEQLRARRQEQEKRSPLGSVRSTKIYTPGRKEQGEPMTPRRTPARFGL

SEQ ID NO: 23185 - protein, 138 aa, Homo sapiens
  Payload ID: 4626
  Gene Symbol: DHX38
  Gene Name: DEAH (Asp-Glu-Ala-His) box polypeptide 38
  ENSP ID: ENSP00000455939
MGDTSEDASIHRLEGTDLDCQVGGLICKSKSAASEQHVFKAPAPRPSLLGLDLLASLKRREREEKDDGEDKKKSKVSSYKDWEESKDDQKDAEEEGGDQAGQNIRKDRHYRSARVETPSHPGGVSEEFWERSRQRERE

SEQ ID NO: 23186 - protein, 123 aa, Homo sapiens
  Payload ID: 4626
  Gene Symbol: DHX38
  Gene Name: DEAH (Asp-Glu-Ala-His) box polypeptide 38
  ENSP ID: ENSP00000457887
MGDTSEDASIHRLEGTDLDCQVGGLICKSKSAASEQHVFKAPAPRPSLLGLDLLASLKRREREEKDDGEDKKKSKVSSYKDWEESKDDQKDAEEEGGDQAGQNIRKDRHYRSARVETPSHPGG

SEQ ID NO: 23187 - protein, 142 aa, Homo sapiens
  Payload ID: 4626
  Gene Symbol: DHX38
  Gene Name: DEAH (Asp-Glu-Ala-His) box polypeptide 38
  ENSP ID: ENSP00000462149
MGDTSEDASIHRLEGTDLDCQVGGLICKSKSAASEQHVFKAPAPRPSLLGLDLLASLKRREREEKDDGEDKKKSKVSSYKDWEESKDDQKDAEEEGGDQAGQNIRKDRLQMAFGSASLPPILPRRLSLLTASCLLSILVIAN

SEQ ID NO: 23188 - protein, 187 aa, Homo sapiens
  Payload ID: 4626
  Gene Symbol: DHX38
  Gene Name: DEAH (Asp-Glu-Ala-His) box polypeptide 38
  ENSP ID: ENSP00000462397
LNVYLQWKNNNYSTIWCNDHFIHAKAMRKVREVRAQLKDIMVQQRMSLASCGTDWDIVRKCICAAYFHQAAKLKGIGEYVNIRTGMPCHLHPTSSLFGMGYTPDYIVYHELVMTTKEYMQCVTAVDGEWLAELGPMFYSVKQAGKSRQEQEKRSPLGSVRSTKIYTPGRKEQGEPMTPRRTPARFGL

SEQ ID NO: 23189 - protein, 128 aa, Homo sapiens
  Payload ID: 4626
  Gene Symbol: DHX38
  Gene Name: DEAH (Asp-Glu-Ala-His) box polypeptide 38
  ENSP ID: ENSP00000462965
VVARRSDLKLIVTSATMDAEKFAAFFGNVPIFHIPGRTFPVDILFSKTPQEDYVEAAVKQSLQVHLSGAPGDILIFMPGQEDIEVTSDQIVEHLEELENAPALAVLPGQREVAGPIASKTGPGHLVYA

SEQ ID NO: 23190 - protein, 779 aa, Homo sapiens
  Payload ID: 4627
  Gene Symbol: DHX40
  Gene Name: DEAH (Asp-Glu-Ala-His) box polypeptide 40
  Uniprot ID: Q8IX18
  ENSP ID: ENSP00000251241
MSRFPAVAGRAPRRQEEGERSRDLQEERLSAVCIADREEKGCTSQEGGTTPTFPIQKQRKKIIQAVRDNSFLIVTGNTGSGKTTQLPKYLYEAGFSQHGMIGVTQPRKVAAISVAQRVAEEMKCTLGSKVGYQVRFDDCSSKETAIKYMTDGCLLKHILGDPNLTKFSVIILDEAHERTLTTDILFGLLKKLFQEKSPNRKEHLKVVVMSATMELAKLSAFFGNCPIFDIPGRLYPVREKFCNLIGPRDRENTAYIQAIVKVTMDIHLNEMAGDILVFLTGQFEIEKSCELLFQMAESVDYDYDVQDTTLDGLLILPCYGSMTTDQQRRIFLPPPPGIRKCVISTNISATSLTIDGIRYVVDGGFVKQLNHNPRLGLDILEVVPISKSEALQRSGRAGRTSSGKCFRIYSKDFWNQCMPDHVIPEIKRTSLTSVVLTLKCLAIHDVIRFPYLDPPNERLILEALKQLYQCDAIDRSGHVTRLGLSMVEFPLPPHLTCAVIKAASLDCEDLLLPIAAMLSVENVFIRPVDPEYQKEAEQRHRELAAKAGGFNDFATLAVIFEQCKSSGAPASWCQKHWIHWRCLFSAFRVEAQLRELIRKLKQQSDFPKETFEGPKHEVLRRCLCAGYFKNVARRSVGRTFCTMDGRGSPVHIHPSSALHEQETKLEWIIFHEVLVTTKVYARIVCPIRYEWVRDLLPKLHEFNAHDLSSVARREVREDARRRWTNKENVKQLKDGISKDVLKKMQRRNDDKSISDARARFLERKQQRTQDHSDTRKETG

SEQ ID NO: 23191 - protein, 702 aa, Homo sapiens
  Payload ID: 4627
  Gene Symbol: DHX40
  Gene Name: DEAH (Asp-Glu-Ala-His) box polypeptide 40
  Uniprot ID: Q8IX18
  ENSP ID: ENSP00000388749
MSRFPAVAGRAPRRQEEGERSRDLQEERLSAVCIADREEKGCTSQEGGTTPTFPIQKQRKKIIQAETAIKYMTDGCLLKHILGDPNLTKFSVIILDEAHERTLTTDILFGLLKKLFQEKSPNRKEHLKVVVMSATMELAKLSAFFGNCPIFDIPGRLYPVREKFCNLIGPRDRENTAYIQAIVKVTMDIHLNEMAGDILVFLTGQFEIEKSCELLFQMAESVDYDYDVQDTTLDGLLILPCYGSMTTDQQRRIFLPPPPGIRKCVISTNISATSLTIDGIRYVVDGGFVKQLNHNPRLGLDILEVVPISKSEALQRSGRAGRTSSGKCFRIYSKDFWNQCMPDHVIPEIKRTSLTSVVLTLKCLAIHDVIRFPYLDPPNERLILEALKQLYQCDAIDRSGHVTRLGLSMVEFPLPPHLTCAVIKAASLDCEDLLLPIAAMLSVENVFIRPVDPEYQKEAEQRHRELAAKAGGFNDFATLAVIFEQCKSSGAPASWCQKHWIHWRCLFSAFRVEAQLRELIRKLKQQSDFPKETFEGPKHEVLRRCLCAGYFKNVARRSVGRTFCTMDGRGSPVHIHPSSALHEQETKLEWIIFHEVLVTTKVYARIVCPIRYEWVRDLLPKLHEFNAHDLSSVARREVREDARRRWTNKENVKQLKDGISKDVLKKMQRRNDDKSISDARARFLERKQQRTQDHSDTRKETG

SEQ ID NO: 23192 - protein, 250 aa, Homo sapiens
  Payload ID: 4627
  Gene Symbol: DHX40
  Gene Name: DEAH (Asp-Glu-Ala-His) box polypeptide 40
  ENSP ID: ENSP00000437958
  MOD_RES (1)..(1): Any amino acid
XQQRRIFLPPPPGIRKCVISTNISATSLTIDGIRYVVDGGFVKQLNHNPRLGLDILEVVPISKSEALQRSGRAGRTSSGKCFRIYSKDFWNQCMPDHVIPEIKRTSLTSVVLTLKCLAIHDVIRSGHVTRLGLSMVEFPLPPHLTCAVIKAASLDCEDLLLPIAAMLSVENVFIRPVDPEYQKEAEQRHRELAAKAGGFNDFATLAVIFEQCKSSGAPASWCQKHWIHWRCLFSAFRVEAQLRELIRKLK

SEQ ID NO: 23193 - protein, 71 aa, Homo sapiens
  Payload ID: 4627
  Gene Symbol: DHX40
  Gene Name: DEAH (Asp-Glu-Ala-His) box polypeptide 40
  ENSP ID: ENSP00000462246
MSRFPAVAGRAPRRQEEGERSRDLQEERLSAVCIADREEKGCTSQEGGTTPTFPIQKQRKKIIQAGFHNMV

SEQ ID NO: 23194 - protein, 268 aa, Homo sapiens
  Payload ID: 4627
  Gene Symbol: DHX40
  Gene Name: DEAH (Asp-Glu-Ala-His) box polypeptide 40
  ENSP ID: ENSP00000462686
MSRFPAVAGRAPRRQEEEEKGCTSQEGGTTPTFPIQKQRKKIIQAVRDNSFLIVTGNTGSGKTTQLPKYLYEAGFSQHGMIGVTQPRKVAAISVAQRVAEEMKCTLGSKVGYQVRFDDCSSKETAIKYMTDGCLLKHILGDPNLTKFSVIILDEAHERTLTTDILFGLLKKLFQEKSPNRKEHLKVVVMSATMELAKLSAFFGNCPIFDIPGRLYPVREKFCNLIGPRDRENTAYIQAIVKVTMDIHLNEMAGDILVFLTGQFEIEKS

SEQ ID NO: 23195 - protein, 101 aa, Homo sapiens
  Payload ID: 4627
  Gene Symbol: DHX40
  Gene Name: DEAH (Asp-Glu-Ala-His) box polypeptide 40
  ENSP ID: ENSP00000462702
MSRFPAVAGRAPRRQEEGERSRDLQEERLSAVCIADREEKGCTSQEGGTTPTFPIQKQRKKIIQAVRDNSFLIVTGNTGSGKTTQLPKYLYEAGDSNQIYD

SEQ ID NO: 23196 - protein, 173 aa, Homo sapiens
  Payload ID: 4627
  Gene Symbol: DHX40
  Gene Name: DEAH (Asp-Glu-Ala-His) box polypeptide 40
  ENSP ID: ENSP00000463025
MSRFPAVAGRAPRRQEEGERSRDLQEERLSAVCIADRGFSQHGMIGVTQPRKVAAISVAQRVAEEMKCTLGSKVGYQVRFDDCSSKETAIKYMTDGCLLKHILGDPNLTKFSVIILDEAHERTLTTDILFGLLKKLFQEKSPNRKEHLKVVVMSATMELAKLSAFFGNCPIFD

SEQ ID NO: 23197 - protein, 1220 aa, Homo sapiens [sequence omitted]

SEQ ID NO: 23198 - protein, 1181 aa, Homo sapiens
  Payload ID: 4628
  Gene Symbol: DHX8
  Gene Name: DEAH (Asp-Glu-Ala-His) box polypeptide 8
  ENSP ID: ENSP00000437886
MAVAVAMAGALIGSEPGPAEELAKLEYLSLVSKVCTELDNHLGINDKDLAEFVISLAEKNTTFDTFKASLVKNGAEFTDSLISNLLRLIQTMRPPAKPSTSKDPVVKPKTEKEKLKELFPVLCQPDNPSVRTMLDEDDVKVAVDVLKELEALMPSAAGQEKQRDAEHRDRTKKKKRSRSRDRNRDRDRDRERNRDRDHKRRHRSRSRSRSRTRERNKVKSRYRSRSRSQSPPKDRKDRDKYGERNLDRWRDKHVDRPPPEEPTIGDIYNGKVTSIMQFGCFVQLEGLRKRWEGLVHISELRREGRVANVADVVSKGQRVKVKVLSFTGTKTSLSMKDVDQETGEDLNPNRRRNLVGETNEETSMRNPDRPTHLSLVSAPEVEDDSLERKRLTRISDPEKWEIKQMIAANVLSKEEFPDFDEETGILPKVDDEEDEDLEIELVEEEPPFLRGHTKQSMDMSPIKIVKNPDGSLSQAAMMQSALAKERRELKQAQREAEMDSIPMGLNKHWVDPLPDAEGRQIAANMRGIGMMPNDIPEWKKHAFGGNKASYGKKTQMSILEQRESLPIYKLKEQLVQAVHDNQILIVIGETGSGKTTQITQYLAEAGYTSRGKIGCTQPRRVAAMSVAKRVSEEFGCCLGQEVGYTIRFEDCTSPETVIKYMTDGMLLRECLIDPDLTQYAIIMLDEAHERTIHTDVLFGLLKKTVQKRQDMKLIVTSATLDAVKFSQYFYEAPIFTIPGRTYPVEILYTKEPETDYLDASLITVMQIHLTEPPGDILVFLTGQEEIDTACEILYERMKSLGPDVPELIILPVYSALPSEMQTRIFDPAPPGSRKVVIATNIAETSLTIDGIYYVVDPGFVKQKVYNSKTGIDQLVVTPISQAQAKQRAGRAGRTGPGKCYRLYTERAYRDEMLTTNVPEIQRTNLASTVLSLKAMGINDLLSFDFMDAPPMETLITAMEQLYTLGALDDEGLLTRLGRRMAEFPLEPMLCKMLIMSVHLGCSEEMLTIVSMLSVQNVFYRPKDKQALADQKKAKFHQTEGDHLTLLAVYNSWKNNKFSNPWCYENFIQARSLRRAQDIRKQMLGIMDRHKLDVVSCGKSTVRVQKAICSGFFRNAAKKDPQEGYRTLIDQQVVYIHPSSALFNRQPECPKHFLPVVAVAVSLEQCLSKFEDLNKELGLVTC

SEQ ID NO: 23199 - protein, 33 aa, Homo sapiens
  Payload ID: 4628
  Gene Symbol: DHX8
  Gene Name: DEAH (Asp-Glu-Ala-His) box polypeptide 8
  ENSP ID: ENSP00000465178
  MOD_RES (1)..(1): Any amino acid
XYRTLIDQQVVYIHPSSALFNRQPEWTVPMGHV

SEQ ID NO: 23200 - protein, 138 aa, Homo sapiens
  Payload ID: 4628
  Gene Symbol: DHX8
  Gene Name: DEAH (Asp-Glu-Ala-His) box polypeptide 8
  ENSP ID: ENSP00000466900
KAKFHQTEGDHLTLLAVYNSWKNNKFSNPWCYENFIQARSLRRAQDIRKQMLGIMDRHKLDVVSCGKSTVRVQKAICSGFFRNAAKKDPQEGYRTLIDQQVVYIHPSSALFNRQPEWDLYSRFSEWKSGTNCSSLSGT

SEQ ID NO: 23201 - protein, 53 aa, Homo sapiens
  Payload ID: 4628
  Gene Symbol: DHX8
  Gene Name: DEAH (Asp-Glu-Ala-His) box polypeptide 8
  ENSP ID: ENSP00000467834
MAVAVAMAGALIGSEPGPAEELAKLEYLSLVSKVCTELDNHLGINDKDLGFSY

SEQ ID NO: 23202 - protein, 717 aa, Homo sapiens
  Payload ID: 4629
  Gene Symbol: DQX1
  Gene Name: DEAQ box RNA-dependent ATPase 1
  Uniprot ID: Q8TE96
  ENSP ID: ENSP00000377523
MTSQPLRLAEEYGPSPGESELAVNPFDGLPFSSRYYELLKQRQALPIWAARFTFLEQLESNPTGVVLVSGEPGSGKSTQIPQWCAEFALARGFQKGQVTVTQPYPLAARSLALRVADEMDLTLGHEVGYSIPQEDCTGPNTLLRFCWDRLLLQEVASTRGTGAWGVLVLDEAQERSVASDSLQGLLQDARLEKLPGDLRVVVVTDPALEPKLRAFWGNPPIVHIPREPGERPSPIYWDTIPPDRVEAACQAVLELCRKELPGDVLVFLPSEEEISLCCESLSREVESLLLQGLPPRVLPLHPDCGRAVQAVYEDMDARKVVVTHWLADFSFSLPSIQHVIDSGLELRSVYNPRIRAEFQVLRPISKCQAEARRLRARGFPPGSCLCLYPKSFLELEAPPLPQPRVCEENLSSLVLLLKRRQIAEPGECHFLDQPAPEALMQALEDLDYLAALDDDGDLSDLGVILSEFPLAPELAKALLASCEFDCVDEMLTLAAMLTAAPGFTRPPLSAEEAALRRALEHTDGDHSSLIQVYEAFIQSGADEAWCQARGLNWAALCQAHKLRGELLELMQRIELPLSLPAFGSEQNRRDLQKALVSGYFLKVARDTDGTGNYLLLTHKHVAQLSSYCCYRSRRAPARPPPWVLYHNFTISKDNCLSIVSEIQPQMLVELAPPYFLSNLPPSESRDLLNQLREGMADSTAGSKSSSAQEFRDPCVLQ

SEQ ID NO: 23203 - protein, 717 aa, Homo sapiens; identical to SEQ ID NO: 23202
  Payload ID: 4629
  Gene Symbol: DQX1
  Gene Name: DEAQ box RNA-dependent ATPase 1
  Uniprot ID: Q8TE96
  ENSP ID: ENSP00000384621

SEQ ID NO: 23204 - protein, 132 aa, Homo sapiens
  Payload ID: 4629
  Gene Symbol: DQX1
  Gene Name: DEAQ box RNA-dependent ATPase 1
  ENSP ID: ENSP00000389196
EEISLCCESLSREVESLLLQGLPPRVLPLHPDCGRAVQAVYEDMDARKVVVTHWLADFSFSLPSIQHVIDSGLELRSVYNPRIRAEFQVLRPISKCQAEARRLRARGFPPVVFFPRSFSPQDPASACILSPS

SEQ ID NO: 23205 - protein, 119 aa, Homo sapiens
  Payload ID: 4629
  Gene Symbol: DQX1
  Gene Name: DEAQ box RNA-dependent ATPase 1
  ENSP ID: ENSP00000392969
MDLTLGHEVGYSIPQEDCTGPNTLLRFCWDRLLLQEVASTRGTGAWGVLVLDEAQERSVASDSLQGLLQDARLEKLPGDLRVVVVTDPALEPKLRAFWGNPPIVHIPREPGERPSPIYW

SEQ ID NO: 23206 - protein, 398 aa, Homo sapiens
  Payload ID: 4630
  Gene Symbol: DAP3
  Gene Name: death associated protein 3
  Uniprot ID: P51398
  ENSP ID: ENSP00000341692
MMLKGITRLISRIHKLDPGRFLHMGTQARQSIAAHLDNQVPVESPRAISRTNENDPAKHGDQHEGQHYNISPQDLETVFPHGLPPRFVMQVKTFSEACLMVRKPALELLHYLKNTSFAYPAIRYLLYGEKGTGKTLSLCHVIHFCAKQDWLILHIPDAHLWVKNCRDLLQSSYNKQRFDQPLEASTWLKNFKTTNERFLNQIKVQEKYVWNKRESTEKGSPLGEVVEQGITRVRNATDAVGIVLKELKRQSSLGMFHLLVAVDGINALWGRTTLKREDKSPIAPEELALVHNLRKMMKNDWHGGAIVSALSQTGSLFKPRKAYLPQELLGKEGFDALDPFIPILVSNYNPKEFESCIQYYLENNWLQHEKAPTEEGKKELLFLSNANPSLLERHCAYL

SEQ ID NO: 23207 - protein, 398 aa, Homo sapiens; identical to SEQ ID NO: 23206
  Payload ID: 4630
  Gene Symbol: DAP3
  Gene Name: death associated protein 3
  Uniprot ID: P51398
  ENSP ID: ENSP00000357320

SEQ ID NO: 23208 - protein, 364 aa, Homo sapiens
  Payload ID: 4630
  Gene Symbol: DAP3
  Gene Name: death associated protein 3
  Uniprot ID: P51398
  ENSP ID: ENSP00000412605
MMLKGITRLISRIHKLDPGRFLHMGTQARQSIAAHLDNQVPVESPRAISRTNENDPVKTFSEACLMVRKPALELLHYLKNTSFAYPAIRYLLYGEKGTGKTLSLCHVIHFCAKQDWLILHIPDAHLWVKNCRDLLQSSYNKQRFDQPLEASTWLKNFKTTNERFLNQIKVQEKYVWNKRESTEKGSPLGEVVEQGITRVRNATDAVGIVLKELKRQSSLGMFHLLVAVDGINALWGRTTLKREDKSPIAPEELALVHNLRKMMKNDWHGGAIVSALSQTGSLFKPRKAYLPQELLGKEGFDALDPFIPILVSNYNPKEFESCIQYYLENNWLQHEKAPTEEGKKELLFLSNANPSLLERHCAYL

SEQ ID NO: 23209 - protein, 357 aa, Homo sapiens
  Payload ID: 4630
  Gene Symbol: DAP3
  Gene Name: death associated protein 3
  Uniprot ID: P51398
  ENSP ID: ENSP00000445003
MMLKGITRLISRIHKAKHGDQHEGQHYNISPQDLETVFPHGLPPRFVMQVKTFSEACLMVRKPALELLHYLKNTSFAYPAIRYLLYGEKGTGKTLSLCHVIHFCAKQDWLILHIPDAHLWVKNCRDLLQSSYNKQRFDQPLEASTWLKNFKTTNERFLNQIKVQEKYVWNKRESTEKGSPLGEVVEQGITRVRNATDAVGIVLKELKRQSSLGMFHLLVAVDGINALWGRTTLKREDKSPIAPEELALVHNLRKMMKNDWHGGAIVSALSQTGSLFKPRKAYLPQELLGKEGFDALDPFIPILVSNYNPKEFESCIQYYLENNWLQHEKAPTEEGKKELLFLSNANPSLLERHCAYL

SEQ ID NO: 23210 - protein, 181 aa, Homo sapiens
  Payload ID: 4630
  Gene Symbol: DAP3
  Gene Name: death associated protein 3
  ENSP ID: ENSP00000476291
MMLKGITRLISRIHKLDPGRFLHMGTQARQSIAAHLDNQVPVESPRAISRTNENDPAKHGDQHEGQHYNISPQDLETVFPHGLPPRFVMQVKTFSEACLMDWLILHIPDAHLWVKNCRDLLQSSYNKQRFDQPLEASTWLKNFKTTNERFLNQGITRVRNATDAVGIVLKELKRQSSLGMF

SEQ ID NO: 23211 - protein, 210 aa, Homo sapiens
  Payload ID: 4630
  Gene Symbol: DAP3
  Gene Name: death associated protein 3
  ENSP ID: ENSP00000476558
  MOD_RES (1)..(1): Any amino acid
XGSPLGEVVEQGITRVRNATDAVGIVLKELKRQSSLGMFHLLVAVDGINALWGRTTLKREDKSPIAPEELALVHNLRKMMKNDWHGGAIVSALSQTGSLFKPRKAYLPQELLGKGFTTWPRLVWNSWAQAICPSQPPKVLGLQEGFDALDPFIPILVSNYNPKEFESCIQYYLENNWLQHEKAPTEEGKKELLFLSNANPSLLERHCAYL

SEQ ID NO: 23212 - protein, 357 aa, Homo sapiens; identical to SEQ ID NO: 23209
  Payload ID: 4630
  Gene Symbol: DAP3
  Gene Name: death associated protein 3
  Uniprot ID: P51398
  ENSP ID: ENSP00000476592

SEQ ID NO: 23213 - protein, 115 aa, Homo sapiens
  Payload ID: 4630
  Gene Symbol: DAP3
  Gene Name: death associated protein 3
  ENSP ID: ENSP00000476624
GITRVRNATDAVGIVLKELKRQSSLGMFHLLVAVDGINALWGRTTLKREDKSPIAPEELALVHNLRKMMKNDWHGGAIVSALSQTGSLFKPRKAYLPQELLGKLLQKKGKKSCCS

SEQ ID NO: 23214 - protein, 45 aa, Homo sapiens
  Payload ID: 4630
  Gene Symbol: DAP3
  Gene Name: death associated protein 3
  ENSP ID: ENSP00000476706
ESCIQYYLENNWLQHEKAPTEEGKKELLFLSNANPSLLERHCAYL

SEQ ID NO: 23215 - protein, 119 aa, Homo sapiens
  Payload ID: 4630
  Gene Symbol: DAP3
  Gene Name: death associated protein 3
  ENSP ID: ENSP00000476816
MMLKGITRLISRIHKAKHGDQHEGQHYNISPQDLETVFPHGLPPRFVMQVKTFSEACLMDWLILHIPDAHLWVKNCRDLLQSSYNKQRFDQPLEASTWLKNFKTTNERFLNQIKVQEKY

SEQ ID NO: 23216 - protein, 266 aa, Homo sapiens
  Payload ID: 4630
  Gene Symbol: DAP3
  Gene Name: death associated protein 3
  ENSP ID: ENSP00000476840
MMLKGITRLISRIHKLDPGRFLHMGTQARQSIAAHLDNQVPVESPRAISRTNENDPAKHGDQHEGQHYNISPQDLETVFPHGLPPRFVMQDWLILHIPDAHLWVKNCRDLLQSSYNKQRFDQPLEASTWLKNFKTTNERFLNQIKVQEKYVWNKRESTEKGSPLGEVVEQGITRVRNATDAVGIVLKELKRQSSLGMFHLLVAVDGINALWGRTTLKREDKSPIAPEELALVHNLRKMMKNDWHGGAIVSALSQTGSLFKPRKAYL

SEQ ID NO: 23217 - protein, 113 aa, Homo sapiens
  Payload ID: 4630
  Gene Symbol: DAP3
  Gene Name: death associated protein 3
  ENSP ID: ENSP00000476889
MMLKGITRLISRIHKLDPGRFLHMGTQARQSIAAHLDNQVPVESPRAISRTNENDPAKHGDQHEGQHYNISPQDLETVFPHGLPPRFVMQVLKTGNGIGGSPEYKLLLAKGWG

SEQ ID NO: 23218 - protein, 299 aa, Homo sapiens
  Payload ID: 4630
  Gene Symbol: DAP3
  Gene Name: death associated protein 3
  ENSP ID: ENSP00000476899
MMLKGITRLISRIHKLDPGRFLHMGTQARQSIAAHLDNQVPVESPRAISRTNENDPAKHGDQHEGQHYNISPQDLETVFPHGLPPRFVMQVKTFSEACLMVRKPALELLHYLKNTSFAYPAIRYLLYGEKGTGKTLSLCHVIHFCAKQDWLILHIPDAHLWVKNCRDLLQSSYNKQRFDQPLEASTWLKNFKTTNERFLNQIKVQEKYVWNKRESTEKGSPLGEVVEQGITRVRNATDAVGIVLKELKRQSSLGMFHLLVAVDGINALWGRTTLKREDKSPIAPEELALVHNLRKMMKN

SEQ ID NO: 23219 - protein, 65 aa, Homo sapiens
  Payload ID: 4630
  Gene Symbol: DAP3
  Gene Name: death associated protein 3
  ENSP ID: ENSP00000477025
RLISRIHKAKHGDQHEGQHYNISPQDLETVFPHGLPPRFVMQVLKTGNGIGGSPEYKLLLAKGWG

SEQ ID NO: 23220 - protein, 140 aa, Homo sapiens
  Payload ID: 4630
  Gene Symbol: DAP3
  Gene Name: death associated protein 3
  ENSP ID: ENSP00000477139
GITRVRNATDAVGIVLKELKRQSSLGMFHLLVAVDGINALWGRTTLKREDKSPIAPEELALVHNLRKMMKNDWEGFDALDPFIPILVSNYNPKEFESCIQYYLENNWLQHEKAPTEEGKKELLFLSNANPSLLERHCAYL

SEQ ID NO: 23221 - protein, 242 aa, Homo sapiens
  Payload ID: 4630
  Gene Symbol: DAP3
  Gene Name: death associated protein 3
  ENSP ID: ENSP00000477265
  MOD_RES (1)..(1): Any amino acid
XEGQHYNISPQDLETVFPHGLPPRFVMQVKTFSEACLMVRKPALELLHYLKNTSFAYPAIRYLLYGEKGTGKTLSLCHVIHFCAKQDWLILHIPDAHLWVKNCRDLLQSSYNKQRFDQPLEASTWLKNFKTTNERFLNQGITRVRNATDAVGIVLKELKRQSSLGMFHLLVAVDGINALWGRTTLKREDKSPIAPEELALVHNLRKMMKNDWHGGAIVSALSQTGSLFKPRKAYLPQELLGK

SEQ ID NO: 23222 - protein, 106 aa, Homo sapiens
  Payload ID: 4630
  Gene Symbol: DAP3
  Gene Name: death associated protein 3
  ENSP ID: ENSP00000477453
  MOD_RES (1)..(1): Any amino acid
XLKREDKSPIAPEELALVHNLRKMMKNDWHGGAIVSALSQTGSLFKPRKAYLPQELLGKEFESCIQYYLENNWLQHEKAPTEEGKKELLFLSNANPSLLERHCAYL

SEQ ID NO: 23223 - protein, 107 aa, Homo sapiens
  Payload ID: 4631
  Gene Symbol: DAPL1
  Gene Name: death associated protein-like 1
  Uniprot ID: A0PJW8
  ENSP ID: ENSP00000309538
MANEVQDLLSPRKGGHPPAVKAGGMRISKKQEIGTLERHTKKTGFEKTSAIANVAKIQTLDALNDALEKLNYKFPATVHMAHQKPTPALEKVVPLKRIYIIQQPRKC

SEQ ID NO: 23224 - protein, 174 aa, Homo sapiens
  Payload ID: 4631
  Gene Symbol: DAPL1
  Gene Name: death associated protein-like 1
  ENSP ID: ENSP00000385306
  MOD_RES (1)..(1): Any amino acid
XRISKKQEIGTLERHTKKTGFEKTSAIANVAKIQTLDALNDALEKEQVQLGVRNERQVQPFHHGCSWKETSGFDTSSEDPERLFLSMCLVTVLGNLLIILAVTPDSHLHIPMYFFLSNLSLPDIGFTSTTVPKMIVDIQSHSRVISYAGCLTQMSLFAIFGGMEERHAPECDGL

SEQ ID NO: 23225 - protein, 113 aa, Homo sapiens
  Payload ID: 4631
  Gene Symbol: DAPL1
  Gene Name: death associated protein-like 1
  ENSP ID: ENSP00000386422
MANEVQDLLSPRKGGHPPAVKAGGMRISKKQEIGTLERHTKKTGFEKTSAIANVAKIQTLDALNDALEKEQVQLGVRNERQVQPFHHGCSWKETSGFDTRCPRHTEPRNLTGV

SEQ ID NO: 23226 - protein, 199 aa, Homo sapiens
  Payload ID: 4631
  Gene Symbol: DAPL1
  Gene Name: death associated protein-like 1
  ENSP ID: ENSP00000479225
MANEVQDLLSPRKGGHPPAVKAGGMRISKKQEIGTLERHTKKTGFEKTSAIANVAKIQTLDALNDALEKEQVQLGVRNERQVQPFHHGCSWKETSGFDTRSSEDPERLFLSMCLVTVLGNLLIILAVTPDSHLHIPMYFFLSNLSLPDIGFTSTTVPKMIVDIQSHSRVISYAGCLTQMSLFAIFGGMEERHAPECDGL

SEQ ID NO: 23227 - protein, 134 aa, Homo sapiens
  Payload ID: 4631
  Gene Symbol: DAPL1
  Gene Name: death associated protein-like 1
  ENSP ID: ENSP00000479872
MANEVQDLLSPRKGGHPPAVKAGGMRISKKQEIGTLERHTKKTGFEKTSAIANVAKIQTLDALNDALEKSFALFAQAGKQWSDLSSLQPPPPGFKWFSCLSLPSSWDYSSTINFQQQCTWRIKNPHLLWKRLFH

SEQ ID NO: 23228 - protein, 616 aa, Homo sapiens
  Payload ID: 4632
  Gene Symbol: DTHD1
  Gene Name: death domain containing 1
  Uniprot ID: Q6ZMT9
  ENSP ID: ENSP00000350103
MCLEKRYLDVLSDVTGPQVSCYITAPSYVLQQLECRIINHMSSLIVGDNEELVSNVITIECSDKEKRVPFPIGIAIPFTARYRGNYRDIMVKVCDINLQSSYLNPNSLEGMKGGYKGTCASVKVYKLGIFSVVSCLKKESFTVTKKGLALKSSMDSRISLNYPPGVFTSPVLVQLKIQPVDPALVAHLKAQQDTFYSVQSTSPLIHIQHPSTYPFQKPVTLFLPCSPYLDKNNLGSEIDHKRRASATINRITPSYFNRTKIASIRKPRKNASECLKLLGFRSQDSGWCGLDDVVKTIQSGLVSVELYEHLERFIVLHLSSTMDNSHLVTFVKSLEEAMLSTTACIVLSHQKDNPHRIAVLVVPSKDLSQVLKDLHLEGFGGPPEPSRHFQVREGEQLLLRFTGNIFASSNGKDYGKDYTLIFHLQRKPRLELQIKEVDEFGNYSCPHYKGTIVVYKVPKGKIVPNLNQSLVINENHSQLPICKLPLKLPKHKKLINRPQSTKRVSKDPVEALWDNLLHWLAEELSEENAESLSSTLPLRRSTIQLIKLKNPDDLTEQIHEFLCFWKKSLPTFTDKLRLLARHLRKIGRSDLAEELKFKWENKVFTEPQQCFDVAPE

SEQ ID NO: 23229 - protein, 781 aa, Homo sapiens
  Payload ID: 4632
  Gene Symbol: DTHD1
  Gene Name: death domain containing 1
  Uniprot ID: Q6ZMT9
  ENSP ID: ENSP00000401597
MHDECTPQQTMSSIQDTKAADIAARGELNVIETATVSPTNGEESHYTNQVQLEKNKTHMSSALVEKENNTSLNGRVLGQEESQNKMFPDNAENEDDKQIEHMTVENINGNREETHGIIQTTETEIQETSESPREEMTTSSIICDISKKYINSTLPNDSENIKHKNNIMEKEYLDVLSDVTGPQVSCYITAPSYVLQQLECRIINHMSSLIVGDNEELVSNVITIECSDKEKRVPFPIGIAIPFTARYRGNYRDIMVKVCDINLQSSYLNPNSLEGMKGGYKGTCASVKVYKLGIFSVVSCLKKESFTVTKKGLALKSSMDSRISLNYPPGVFTSPVLVQLKIQPVDPALVAHLKAQQDTFYSVQSTSPLIHIQHPSTYPFQKPVTLFLPCSPYLDKNNLGSEIDHKRRASATINRITPSYFNRTKIASIRKPRKNASECLKLLGFRSQDSGWCGLDDVVKTIQSGLVSVELYEHLERFIVLHLSSTMDNSHLVTFVKSLEEAMLSTTACIVLSHQKDNPHRIAVLVVPSKDLSQVLKDLHLEGFGGPPEPSRHFQVREGEQLLLRFTGNIFASSNGKDYGKDYTLIFHLQRKPRLELQIKEVDEFGNYSCPHYKGTIVVYKVPKGKIVPNLNQSLVINENHSQLPICKLPLKLPKHKKLINRPQSTKRVSKDPVEALWDNLLHWLAEELSEENAESLSSTLPLRRSTIQLIKLKNPDDLTEQIHEFLCFWKKSLPTFTDKLRLLARHLRKIGRSDLAEELKFKWENKVFTEPQQCFDVAPE

SEQ ID NO: 23230 - protein, 821 aa, Homo sapiens
  Payload ID: 4632
  Gene Symbol: DTHD1
  Gene Name: death domain containing 1
  ENSP ID: ENSP00000424426
MYVCVEIITFIDCLIKITEHLGSTAALLKKEEKEICNLCGMHDECTPQQTMSSIQDTKAADIAARGELNVIETATVSPTNGEESHYTNQVQLEKNKTHMSSALVEKENNTSLNGRVLGQEESQNKMFPDNAENEDDKQIEHMTVENINGNREETHGIIQTTETEIQETSESPREEMTTSSIICDISKKYINSTLPNDSENIKHKNNIMEKEYLDVLSDVTGPQVSCYITAPSYVLQQLECRIINHMSSLIVGDNEELVSNVITIECSDKEKRVPFPIGIAIPFTARYRGNYRDIMVKVCDINLQSSYLNPNSLEGMKGGYKGTCASVKVYKLGIFSVVSCLKKESFTVTKKGLALKSSMDSRISLNYPPGVFTSPVLVQLKIQPVDPALVAHLKAQQDTFYSVQSTSPLIHIQHPSTYPFQKPVTLFLPCSPYLDKNNLGSEIDHKRRASATINRITPSYFNRTKIASIRKPRKNASECLKLLGFRSQDSGWCGLDDVVKTIQSGLVSVELYEHLERFIVLHLSSTMDNSHLVTFVKSLEEAMLSTTACIVLSHQKDNPHRIAVLVVPSKDLSQVLKDLHLEGFGGPPEPSRHFQVREGEQLLLRFTGNIFASSNGKDYGKDYTLIFHLQRKPRLELQIKEVDEFGNYSCPHYKGTIVVYKVPKGKIVPNLNQSLVINENHSQLPICKLPLKLPKHKKLINRPQSTKRVSKDPVEALWDNLLHWLAEELSEENAESLSSTLPLRRSTIQLIKLKNPDDLTEQIHEFLCFWKKSLPTFTDKLRLLARHLRKIGRSDLAEELKFKWENKVFTEPQQCFDVAPE

SEQ ID NO: 23231 - protein, 348 aa, Homo sapiens
  Payload ID: 4633
  Gene Symbol: DEDD
  Gene Name: death effector domain containing
  ENSP ID: ENSP00000356984
MAGLKRRASQVWPEEHGEQEHGLYSLHRMFDIVGTHLTHRDVRVLSFLFVDVIDDHERGLIRNGRDFLLALERQGRCDESNFRQVLQLLRIITRHDLLPYVTLKRRRAVCPDLVDKYLEETSIRYVTPRALSDPEPRPPQPSKTVPPHYPVVCCPTSGPQMCSKRPARGRATLGSQRKRRKSVTPDPKEKQTCGEEVQGFQRWSRLEGEYKELLGHWAVYAIQYIRLRVRAEYCQHETALQGNVFSNKQDPLERQFERFNQANTILKSRDLGSIICDIKFSELTYLDAFWRDYINGSLLEALKGVFITDSLKQAVGHEAIKLLVNVDEEDYELGRQKLLRNLMLQALP

SEQ ID NO: 23232 - protein, 318 aa, Homo sapiens
  Payload ID: 4633
  Gene Symbol: DEDD
  Gene Name: death effector domain containing
  Uniprot ID: O75618
  ENSP ID: ENSP00000356985
MAGLKRRASQVWPEEHGEQEHGLYSLHRMFDIVGTHLTHRDVRVLSFLFVDVIDDHERGLIRNGRDFLLALERQGRCDESNFRQVLQLLRIITRHDLLPYVTLKRRRAVCPDLVDKYLEETSIRYVTPRALSDPEPRPPQPSKTVPPHYPVVCCPTSGPQMCSKRPARGRATLGSQRKRRKSVTPDPKEKQTCDIRLRVRAEYCQHETALQGNVFSNKQDPLERQFERFNQANTILKSRDLGSIICDIKFSELTYLDAFWRDYINGSLLEALKGVFITDSLKQAVGHEAIKLLVNVDEEDYELGRQKLLRNLMLQALP

SEQ ID NO: 23233 - protein, 318 aa, Homo sapiens; identical to SEQ ID NO: 23232
  Payload ID: 4633
  Gene Symbol: DEDD
  Gene Name: death effector domain containing
  Uniprot ID: O75618
  ENSP ID: ENSP00000414821

SEQ ID NO: 23234 - protein, 318 aa, Homo sapiens; identical to SEQ ID NO: 23232
  Payload ID: 4633
  Gene Symbol: DEDD
  Gene Name: death effector domain containing
  Uniprot ID: O75618
  ENSP ID: ENSP00000445835

SEQ ID NO: 23235 - protein, 287 aa, Homo sapiens
  Payload ID: 4633
  Gene Symbol: DEDD
  Gene Name: death effector domain containing
  ENSP ID: ENSP00000476316
MAGLKRRASQVWPEEHGEQEHGLYSLHRMFDIVGTHLTHRDVRVLSFLFVDVIDDHERGLIRNGRDFLLALERQGRCDESNFRQVLQLLRIITRHDLLPYVTLKRRRAVCPDLVDKYLEETSIRYVTPRALSDPEPRPPQPSKTVPPHYPVVCCPTSGPQMCSKRPARGRATLGSQRKRRKSVTPDPKEKQTCDIRLRVRAEYCQHETALQGNVFSNKQDPLERQFERFNQANTILKSRDLGSIICDIKFSELTYLDAFWRDYINGSLLEALKGVFITDSLKQAVGH

SEQ ID NO: 23236 - protein, 318 aa, Homo sapiens; identical to SEQ ID NO: 23232
  Payload ID: 4633
  Gene Symbol: DEDD
  Gene Name: death effector domain containing
  Uniprot ID: O75618
  ENSP ID: ENSP00000476946

SEQ ID NO: 23237 - protein, 321 aa, Homo sapiens
  Payload ID: 4634
  Gene Symbol: DEDD2
  Gene Name: death effector domain containing 2
  Uniprot ID: Q8WXF8
  ENSP ID: ENSP00000336972
MALSGSTPAPCWEEDECLDYYGMLSLHRMFEVVGGQLTECELELLAFLLDEAPGAAGGLARARSGLELLLELERRGQCDESNLRLLGQLLRVLARHDLLPHLARKRRRPVSPERYSYGTSSSSKRTEGSCRRRRQSSSSANSQQGSPPTKRQRRSRGRPSGGARRRRRGAPAAPQQQSEPARPSSEGKVTCDIRLRVRAEYCEHGPALEQGVASRRPQALARQLDVFGQATAVLRSRDLGSVVCDIKFSELSYLDAFWGDYLSGALLQALRGVFLTEALREAVGREAVRLLVSVDEADYEAGRRRLLLMEEEGGRRPTEAS

SEQ ID NO: 23238 - protein, 204 aa, Homo sapiens
  Payload ID: 4634
  Gene Symbol: DEDD2
  Gene Name: death effector domain containing 2
  ENSP ID: ENSP00000469233
MALSGSTPAPCWEEDECLDYYGMLSLHRMFEVVGGQLTECELELLAFLLDEAPGAAGGLARARSGLELLLELERRGQCDESNLRLLGQLLRVLARHDLLPHLARKRRRPVSPERYSYGTSSSSKRTEGSCRRRRQSSSSANSQQGQWETGSPPTKRQRRSRGRPSGGARRRRRGAPAAPQQQSEPARPSSEGKVTCDGETGSER

SEQ ID NO: 23239 - protein, 117 aa, Homo sapiens
  Payload ID: 4634
  Gene Symbol: DEDD2
  Gene Name: death effector domain containing 2
  ENSP ID: ENSP00000469898
MALSGSTPAPCWEEDECLDYYGMLSLHRMFEVVGGQLTECELELLAFLLDEAPGAAGGLARARSGLELLLELERRGQCDESNLRLLGQLLRVLARHDLLPHLARKRRRPVSPERYSY

SEQ ID NO: 23240 - protein, 326 aa, Homo sapiens
  Payload ID: 4634
  Gene Symbol: DEDD2
  Gene Name: death effector domain containing 2
  Uniprot ID: Q8WXF8
  ENSP ID: ENSP00000470082
MALSGSTPAPCWEEDECLDYYGMLSLHRMFEVVGGQLTECELELLAFLLDEAPGAAGGLARARSGLELLLELERRGQCDESNLRLLGQLLRVLARHDLLPHLARKRRRPVSPERYSYGTSSSSKRTEGSCRRRRQSSSSANSQQGQWETGSPPTKRQRRSRGRPSGGARRRRRGAPAAPQQQSEPARPSSEGKVTCDIRLRVRAEYCEHGPALEQGVASRRPQALARQLDVFGQATAVLRSRDLGSVVCDIKFSELSYLDAFWGDYLSGALLQALRGVFLTEALREAVGREAVRLLVSVDEADYEAGRRRLLLMEEEGGRRPTEAS

SEQ ID NO: 23241 - protein, 326 aa, Homo sapiens; identical to SEQ ID NO: 23240
  Payload ID: 4634
  Gene Symbol: DEDD2
  Gene Name: death effector domain containing 2
  Uniprot ID: Q8WXF8
  ENSP ID: ENSP00000471512

SEQ ID NO: 23242 - protein, 2240 aa, Homo sapiens
  Payload ID: 4635
  Gene Symbol: DIDO1
  Gene Name: death inducer-obliterator 1
  Uniprot ID: Q9BTC0
  ENSP ID: ENSP00000266070
MDDKGDPSNEEAPKAIKPTSKEFRKTWGFRRTTIAKREGAGDAEADPLEPPPPQQQLGLSLRRSGRQPKRTERVEQFLTIARRRGRRSMPVSLEDSGEPTSCPATDAETASEGSVESASETRSGPQSASTAVKERPASSEKVKGGDDHDDTSDSDSDGLTLKELQNRLRRKREQEPTERPLKGIQSRLRKKRREEGPAETVGSEASDTVEGVLPSKQEPENDQGVVSQAGKDDRESKLEGKAAQDIKDEEPGDLGRPKPECEGYDPNALYCICRQPHNNRFMICCDRCEEWFHGDCVGISEARGRLLERNGEDYICPNCTILQVQDETHSETADQQEAKWRPGDADGTDCTSIGTIEQKSSEDQGIKGRIEKAANPSGKKKLKIFQPVIEAPGASKCIGPGCCHVAQPDSVYCSNDCILKHAAATMKFLSSGKEQKPKPKEKMKMKPEKPSLPKCGAQAGIKISSVHKRPAPEKKETTVKKAVVVPARSEALGKEAACESSTPSWASDHNYNAVKPEKTAAPSPSLLYKSTKEDRRSEEKAAAMAASKKTAPPGSAVGKQPAPRNLVPKKSSFANVAAATPAIKKPPSGFKGTIPKRPWLSATPSSGASAARQAGPAPAAATAASKKFPGSAALVGAVRKPVVPSVPMASPAPGRLGAMSAAPSQPNSQIRQNIRRSLKEILWKRVNDSDDLIMTENEVGKIALHIEKEMFNLFQVTDNRYKSKYRSIMFNLKDPKNQGLFHRVLREEISLAKLVRLKPEELVSKELSTWKERPARSVMESRTKLHNESKKTAPRQEAIPDLEDSPPVSDSEEQQESARAVPEKSTAPLLDVFSSMLKDTTSQHRAHLFDLNCKICTGQVPSAEDEPAPKKQKLSASVKKEDLKSKHDSSAPDPAPDSADEVMPEAVPEVASEPGLESASHPNVDRTYFPGPPGDGHPEPSPLEDLSPCPASCGSGVVTTVTVSGRDPRTAPSSSCTAVASAASRPDSTHMVEARQDVPKPVLTSVMVPKSILAKPSSSPDPRYLSVPPSPNISTSESRSPPEGDTTLFLSRLSTIWKGFINMQSVAKFVTKAYPVSGCFDYLSEDLPDTIHIGGRIAPKTVWDYVGKLKSSVSKELCLIRFHPATEEEEVAYISLYSYFSSRGRFGVVANNNRHVKDLYLIPLSAQDPVPSKLLPFEGPGLESPRPNIILGLVICQKIKRPANSGELDKMDEKRTRLQPEEADVPAYPKVATVPQSEKKPSKYPLCSADAAVSTTPPGSPPPPPPLPEPPVLKVLSSLKPAAPSPATAATTAAAASTAASSTASSASKTASPLEHILQTLFGKKKSFDPSAREPPGSTAGLPQEPKTTAEDGVPAPPLLDPIVQQFGQFSKDKALEEEEDDRPYDPEEEYDPERAFDTQLVERGRRHEVERAPEAAAAEREEVAYDPEDETILEEAKVTVDDLPNRMCADVRRNSVERPAEPVAGAATPSLVEQQKMLEELNKQIEEQKRQLEEQEEALRQQRAAVGVSMAHFSVSDALMSPPPKSSLPKAELFQQEQQSADKPASLPPASQASNHRDPRQARRLATETGEGEGEPLSRLSARGAQGALPERDASRGGLVGQAPMPVPEEKEPASSPWASGEKPPAGSEQDGWKAEPGEGTRPATVGDSSARPARRVLLPTPPCGALQPGFPLQHDGERDPFTCPGFASQDKALGSAQYEDPRNLHSAGRSSSPAGETEGDREPQARPGEGTAPLPPPGQKVGGSQPPFQGQREPGPHALGMSGLHGPNFPGPRGPAPPFPEENIASNDGPRGPPPARFGAQKGPIPSLFSGQHGPPPYGDSRGPSPSYLGGPRGVAPSQFEERKDPHGEKREFQDAPYNEVTGAPAQFEGTEQAPFLGSRGGAPFQFGGQRRPLLSQLKGPRGGPPPSQFGGQRGPPPGHFVGPRGPHPSQFETARGPHPNQFEGPRGQAPNFMPGPRGIQPQQFEDQRVHSPPRFTNQRAPAPLQFGGLRGSAPFSEKNEQTPSRFHFQGQAPQVMKPGPRPLLELPSHPPQHRKDRWEEAGPPSALSSSAPGQGPEADGQWASADFREGKGHEYRNQTFEGRQRERFDVGPKEKPLEEPDAQGRASEDRRRERERGRNWSRERDWDRPREWDRHRDKDSSRDWDRNRERSANRDREREADRGKEWDRSRERSRNRERERDRRRDRDRSRSRERDRDKARDRERGRDRKDRSKSKESARDPKPEASRASDAGTASQA

SEQ ID NO: 23243 - protein, 562 aa, Homo sapiens
  Payload ID: 4635
  Gene Symbol: DIDO1
  Gene Name: death inducer-obliterator 1
  Uniprot ID: Q9BTC0
  ENSP ID: ENSP00000346692
MDDKGDPSNEEAPKAIKPTSKEFRKTWGFRRTTIAKREGAGDAEADPLEPPPPQQQLGLSLRRSGRQPKRTERVEQFLTIARRRGRRSMPVSLEDSGEPTSCPATDAETASEGSVESASETRSGPQSASTAVKERPASSEKVKGGDDHDDTSDSDSDGLTLKELQNRLRRKREQEPTERPLKGIQSRLRKKRREEGPAETVGSEASDTVEGVLPSKQEPENDQGVVSQAGKDDRESKLEGKAAQDIKDEEPGDLGRPKPECEGYDPNALYCICRQPHNNRFMICCDRCEEWFHGDCVGISEARGRLLERNGEDYICPNCTILQVQDETHSETADQQEAKWRPGDADGTDCTSIGTIEQKSSEDQGIKGRIEKAANPSGKKKLKIFQPVIEAPGASKCIGPGCCHVAQPDSVYCSNDCILKHAAATMKFLSSGKEQKPKPKEKMKMKPEKPSLPKCGAQAGIKISSVHKRPAPEKKETTVKKAVVVPARSEALGKEAACESSTPSWASDHNYNAVKPEKTAAPSPSLLYKCMYHLGVGLLDPSRSFWIAIPWACPGLGVAALC

SEQ ID NO: 23244 - protein, 544 aa, Homo sapiens
  Payload ID: 4635
  Gene Symbol: DIDO1
  Gene Name: death inducer-obliterator 1
  Uniprot ID: Q9BTC0
  ENSP ID: ENSP00000359391
MDDKGDPSNEEAPKAIKPTSKEFRKTWGFRRTTIAKREGAGDAEADPLEPPPPQQQLGLSLRRSGRQPKRTERVEQFLTIARRRGRRSMPVSLEDSGEPTSCPATDAETASEGSVESASETRSGPQSASTAVKERPASSEKVKGGDDHDDTSDSDSDGLTLKELQNRLRRKREQEPTERPLKGIQSRLRKKRREEGPAETVGSEASDTVEGVLPSKQEPENDQGVVSQAGKDDRESKLEGKAAQDIKDEEPGDLGRPKPECEGYDPNALYCICRQPHNNRFMICCDRCEEWFHGDCVGISEARGRLLERNGEDYICPNCTILQVQDETHSETADQQEAKWRPGDADGTDCTSIGTIEQKSSEDQGIKGRIEKAANPSGKKKLKIFQPVIEAPGASKCIGPGCCHVAQPDSVYCSNDCILKHAAATMKFLSSGKEQKPKPKEKMKMKPEKPSLPKCGAQAGIKISSVHKRPAPEKKETTVKKAVVVPARSEALGKEAACESSTPSWASDHNYNAVKPEKTAAPSPSLLYKCSGKYSYSLHPSLIA

SEQ ID NO: 23245 - protein, 562 aa, Homo sapiens; identical to SEQ ID NO: 23243
  Payload ID: 4635
  Gene Symbol: DIDO1
  Gene Name: death inducer-obliterator 1
  Uniprot ID: Q9BTC0
  ENSP ID: ENSP00000359394

SEQ ID NO: 23246 - protein, 562 aa, Homo sapiens; identical to SEQ ID NO: 23243
  Payload ID: 4635
  Gene Symbol: DIDO1
  Gene Name: death inducer-obliterator 1
  Uniprot ID: Q9BTC0
  ENSP ID: ENSP00000359397

SEQ ID NO: 23247 - protein, 1189 aa, Homo sapiens
  Payload ID: 4635
  Gene Symbol: DIDO1
  Gene Name: death inducer-obliterator 1
  Uniprot ID: Q9BTC0
  ENSP ID: ENSP00000378749
MDDKGDPSNEEAPKAIKPTSKEFRKTWGFRRTTIAKREGAGDAEADPLEPPPPQQQLGLSLRRSGRQPKRTERVEQFLTIARRRGRRSMPVSLEDSGEPTSCPATDAETASEGSVESASETRSGPQSASTAVKERPASSEKVKGGDDHDDTSDSDSDGLTLKELQNRLRRKREQEPTERPLKGIQSRLRKKRREEGPAETVGSEASDTVEGVLPSKQEPENDQGVVSQAGKDDRESKLEGKAAQDIKDEEPGDLGRPKPECEGYDPNALYCICRQPHNNRFMICCDRCEEWFHGDCVGISEARGRLLERNGEDYICPNCTILQVQDETHSETADQQEAKWRPGDADGTDCTSIGTIEQKSSEDQGIKGRIEKAANPSGKKKLKIFQPVIEAPGASKCIGPGCCHVAQPDSVYCSNDCILKHAAATMKFLSSGKEQKPKPKEKMKMKPEKPSLPKCGAQAGIKISSVHKRPAPEKKETTVKKAVVVPARSEALGKEAACESSTPSWASDHNYNAVKPEKTAAPSPSLLYKSTKEDRRSEEKAAAMAASKKTAPPGSAVGKQPAPRNLVPKKSSFANVAAATPAIKKPPSGFKGTIPKRPWLSATPSSGASAARQAGPAPAAATAASKKFPGSAALVGAVRKPVVPSVPMASPAPGRLGAMSAAPSQPNSQIRQNIRRSLKEILWKRVNDSDDLIMTENEVGKIALHIEKEMFNLFQVTDNRYKSKYRSIMFNLKDPKNQGLFHRVLREEISLAKLVRLKPEELVSKELSTWKERPARSVMESRTKLHNESKKTAPRQEAIPDLEDSPPVSDSEEQQESARAVPEKSTAPLLDVFSSMLKDTTSQHRAHLFDLNCKICTGQVPSAEDEPAPKKQKLSASVKKEDLKSKHDSSAPDPAPDSADEVMPEAVPEVASEPGLESASHPNVDRTYFPGPPGDGHPEPSPLEDLSPCPASCGSGVVTTVTVSGRDPRTAPSSSCTAVASAASRPDSTHMVEARQDVPKPVLTSVMVPKSILAKPSSSPDPRYLSVPPSPNISTSESRSPPEGDTTLFLSRLSTIWKGFINMQSVAKFVTKAYPVSGCFDYLSEDLPDTIHIGGRIAPKTVWDYVGKLKSSVSKELCLIRFHPATEEEEVAYISLYSYFSSRGRFGVVANNNRHVKDLYLIPLSAQDPVPSKLLPFEGPGKRRLSGWR

SEQ ID NO: 23248 - protein, 2240 aa, Homo sapiens; identical to SEQ ID NO: 23242
  Payload ID: 4635
  Gene Symbol: DIDO1
  Gene Name: death inducer-obliterator 1
  Uniprot ID: Q9BTC0
  ENSP ID: ENSP00000378752

SEQ ID NO: 23249 - protein, 102 aa, Homo sapiens
  Payload ID: 4636
  Gene Symbol: DAP
  Gene Name: death-associated protein
  Uniprot ID: P51397
  ENSP ID: ENSP00000230895
MSSPPEGKLETKAGHPPAVKAGGMRIVQKHPHTGDTKEEKDKDDQEWESPSPPKPTVFISGVIARGDKDFPPAAAQVAHQKPHASMDKHPSPRTQHIQQPRK

SEQ ID NO: 23250 - protein, 204 aa, Homo sapiens
  Payload ID: 4636
  Gene Symbol: DAP
  Gene Name: death-associated protein
  ENSP ID: ENSP00000394163
MSSPPEGKLETKAGHPPAVKAGGMRIVQKHPHTGDTKEEKDKDDQEWESPRVTKISPRRLRRWLTRSRMPPWTSILPQEPSTSSSHASEPGVHQPAPWPRLCCTWYFPDRENQQFRPNPTLLGNLRQNQVLCPLPYISIFKTRNSSSPNLVYGESGWMSFEDHCAPRGAISRICQDPRKILALVLFQQSPDVLVYGLKNKKAHI

SEQ ID NO: 23251 - protein, 1430 aa, Homo sapiens
  Payload ID: 4637
  Gene Symbol: DAPK1
  Gene Name: death-associated protein kinase 1
  Uniprot ID: P53355
  ENSP ID: ENSP00000350785
MTVFRQENVDDYYDTGEELGSGQFAVVKKCREKSTGLQYAAKFIKKRRTKSSRRGVSREDIEREVSILKEIQHPNVITLHEVYENKTDVILILELVAGGELFDFLAEKESLTEEEATEFLKQILNGVYYLHSLQIAHFDLKPENIMLLDRNVPKPRIKIIDFGLAHKIDFGNEFKNIFGTPEFVAPEIVNYEPLGLEADMWSIGVITYILLSGASPFLGDTKQETLANVSAVNYEFEDEYFSNTSALAKDFIRRLLVKDPKKRMTIQDSLQHPWIKPKDTQQALSRKASAVNMEKFKKFAARKKWKQSVRLISLCQRLSRSFLSRSNMSVARSDDTLDEEDSFVMKAIIHAINDDNVPGLQHLLGSLSNYDVNQPNKHGTPPLLIAAGCGNIQILQLLIKRGSRIDVQDKGGSNAVYWAARHGHVDTLKFLSENKCPLDVKDKSGEMALHVAARYGHADVAQLLCSFGSNPNIQDKEEETPLHCAAWHGYYSVAKALCEAGCNVNIKNREGETPLLTASARGYHDIVECLAEHGADLNACDKDGHIALHLAVRRCQMEVIKTLLSQGCFVDYQDRHGNTPLHVACKDGNMPIVVALCEANCNLDISNKYGRTPLHLAANNGILDVVRYLCLMGASVEALTTDGKTAEDLARSEQHEHVAGLLARLRKDTHRGLFIQQLRPTQNLQPRIKLKLFGHSGSGKTTLVESLKCGLLRSFFRRRRPRLSSTNSSRFPPSPLASKPTVSVSINNLYPGCENVSVRSRSMMFEPGLTKGMLEVFVAPTHHPHCSADDQSTKAIDIQNAYLNGVGDFSVWEFSGNPVYFCCYDYFAANDPTSIHVVVFSLEEPYEIQLNQVIFWLSFLKSLVPVEEPIAFGGKLKNPLQVVLVATHADIMNVPRPAGGEFGYDKDTSLLKEIRNRFGNDLHISNKLFVLDAGASGSKDMKVLRNHLQEIRSQIVSVCPPMTHLCEKIISTLPSWRKLNGPNQLMSLQQFVYDVQDQLNPLASEEDLRRIAQQLHSTGEINIMQSETVQDVLLLDPRWLCTNVLGKLLSVETPRALHHYRGRYTVEDIQRLVPDSDVEELLQILDAMDICARDLSSGTMVDVPALIKTDNLHRSWADEEDEVMVYGGVRIVPVEHLTPFPCGIFHKVQVNLCRWIHQQSTEGDADIRLWVNGCKLANRGAELLVLLVNHGQGIEVQVRGLETEKIKCCLLLDSVCSTIENVMATTLPGLLTVKHYLSPQQLREHHEPVMIYQPRDFFRAQTLKETSLTNTMGGYKESFSSIMCFGCHDVYSQASLGMDIHASDLNLLTRRKLSRLLDPPDPLGKDWCLLAMNLGLPDLVAKYNTSNGAPKDFLPSPLHALLREWTTYPESTVGTLMSKLRELGRRDAADFLLKASSVFKINLDGNGQEAYASSCNSGTSYNSISSVVSR

SEQ ID NO: 23252 - protein, 1430 aa, Homo sapiens; identical to SEQ ID NO: 23251
  Payload ID: 4637
  Gene Symbol: DAPK1
  Gene Name: death-associated protein kinase 1
  Uniprot ID: P53355
  ENSP ID: ENSP00000386135

SEQ ID NO: 23253 - protein, 1430 aa, Homo sapiens; identical to SEQ ID NO: 23251
  Payload ID: 4637
  Gene Symbol: DAPK1
  Gene Name: death-associated protein kinase 1
  Uniprot ID: P53355
  ENSP ID: ENSP00000417076

SEQ ID NO: 23254 - protein, 188 aa, Homo sapiens
  Payload ID: 4637
  Gene Symbol: DAPK1
  Gene Name: death-associated protein kinase 1
  ENSP ID: ENSP00000417746
MTVFRQENVDDYYDTGEELGSGQFAVVKKCREKSTGLQYAAKFIKKRRTKSSRRGVSREDIEREVSILKEIQHPNVITLHEVYENKTDVILILELVAGGELFDFLAEKESLTEEEATEFLKQILNGVYYLHSLQIAHFDLKPENIMLLDRNVPKPRIKIIDFGLAHKIDFGNEFKNIFGTPEFVGVSG

SEQ ID NO: 23255 - protein, 1364 aa, Homo sapiens
  Payload ID: 4637
  Gene Symbol: DAPK1
  Gene Name: death-associated protein kinase 1
  Uniprot ID: P53355
  ENSP ID: ENSP00000418885
MTVFRQENVDDYYDTGEELGSGQFAVVKKCREKSTGLQYAAKFIKKRRTKSSRRGVSREDIEREVSILKEIQHPNVITLHEVYENKTDVILILELVAGGELFDFLAEKESLTEEEATEFLKQILNGVYYLHSLQIAHFDLKPENIMLLDRNVPKPRIKIIDFGLAHKIDFGNEFKNIFGTPEFVAPEIVNYEPLGLEADMWSIGVITYILLSGASPFLGDTKQETLANVSAVNYEFEDEYFSNTSALAKDFIRRLLVKDPKKRMTIQDSLQHPWIKPKDTQQALSRKASAVNMEKFKKFAARKKWKQSVRLISLCQRLSRSFLSRSNMSVARSDDTLDEEDSFVMKAIIHAINDDNVPGLQHLLGSLSNYDVNQPNKHGTPPLLIAAGCGNIQILQLLIKRGSRIDVQDKGGSNAVYWAARHGHVDTLKFLSENKCPLDVKDKSGEMALHVAARYGHADVAQLLCSFGSNPNIQDKEEETPLHCAAWHGYYSVAKALCEAGCNVNIKNREGETPLLTASARGYHDIVECLAEHGADLNACDKDGHIALHLAVRRCQMEVIKTLLSQGCFVDYQDRHGNTPLHVACKDGNMPIVVALCEANCNLDISNKYGRTPLHLAANNGILDVVRYLCLMGASVEALTTDGKTAEDLARSEQHEHVAGLLARLRKDTHRGLFIQQLRPTQNLQPRIKLKLFGHSGSGKTTLVESLKCGLLRSFFRRRRPRLSSTNSSRFPPSPLASKPTVSVSINNLYPGCENVSVRSRSMMFEPGLTKGMLEVFVAPTHHPHCSADDQSTKAIDIQNAYLNAFGGKLKNPLQVVLVATHADIMNVPRPAGGEFGYDKDTSLLKEIRNRFGNDLHISNKLFVLDAGASGSKDMKVLRNHLQEIRSQIVSVCPPMTHLCEKIISTLPSWRKLNGPNQLMSLQQFVYDVQDQLNPLASEEDLRRIAQQLHSTGEINIMQSETVQDVLLLDPRWLCTNVLGKLLSVETPRALHHYRGRYTVEDIQRLVPDSDVEELLQILDAMDICARDLSSGTMVDVPALIKTDNLHRSWADEEDEVMVYGGVRIVPVEHLTPFPCGIFHKVQVNLCRWIHQQSTEGDADIRLWVNGCKLANRGAELLVLLVNHGQGIEVQVRGLETEKIKCCLLLDSVCSTIENVMATTLPGLLTVKHYLSPQQLREHHEPVMIYQPRDFFRAQTLKETSLTNTMGGYKESFSSIMCFGCHDVYSQASLGMDIHASDLNLLTRRKLSRLLDPPDPLGKDWCLLAMNLGLPDLVAKYNTSNGAPKDFLPSPLHALLREWTTYPESTVGTLMSKLRELGRRDAADFLLKASSVFKINLDGNGQEAYASSCNSGTSYNSISSVVSR

SEQ ID NO: 23256 - protein, 1364 aa, Homo sapiens; identical to SEQ ID NO: 23255
  Payload ID: 4637
  Gene Symbol: DAPK1
  Gene Name: death-associated protein kinase 1
  Uniprot ID: P53355
  ENSP ID: ENSP00000419026

SEQ ID NO: 23257 - protein, 1430 aa, Homo sapiens; identical to SEQ ID NO: 23251
  Payload ID: 4637
  Gene Symbol: DAPK1
  Gene Name: death-associated protein kinase 1
  Uniprot ID: P53355
  ENSP ID: ENSP00000484267

SEQ ID NO: 23258 - protein, 370 aa, Homo sapiens
  Payload ID: 4638
  Gene Symbol: DAPK2
  Gene Name: death-associated protein kinase 2
  Uniprot ID: Q9UIK4
  ENSP ID: ENSP00000261891
MFQASMRSPNMEPFKQQKVEDFYDIGEELGSGQFAIVKKCREKSTGLEYAAKFIKKRQSRASRRGVSREEIEREVSILRQVLHHNVITLHDVYENRTDVVLILELVSGGELFDFLAQKESLSEEEATSFIKQILDGVNYLHTKKIAHFDLKPENIMLLDKNIPIPHIKLIDFGLAHEIEDGVEFKNIFGTPEFVAPEIVNYEPLGLEADMWSIGVITYILLSGASPFLGDTKQETLANITAVSYDFDEEFFSQTSELAKDFIRKLLVKETRKRLTIQEALRHPWITPVDNQQAMVRRESVVNLENFRKQYVRRRWKLSFSIVSLCNHLTRSLMKKVHLRPDEDLRNCESDTEEDIARRKALHPRRRSSTS

SEQ ID NO: 23259 - protein, 370 aa, Homo sapiens; identical to SEQ ID NO: 23258
  Payload ID: 4638
  Gene Symbol: DAPK2
  Gene Name: death-associated protein kinase 2
  Uniprot ID: Q9UIK4
  ENSP ID: ENSP00000408277

SEQ ID NO: 23260 - protein, 80 aa, Homo sapiens
  Payload ID: 4638
  Gene Symbol: DAPK2
  Gene Name: death-associated protein kinase 2
  ENSP ID: ENSP00000452970
MFQASMRSPNMEPFKQQKVEDFYDIGEELGSGQFAIVKKCREKSTGLEYAAKFIKKRQSRASRRGVSREEIEREVSILRQ

SEQ ID NO: 23261 - protein, 48 aa, Homo sapiens
  Payload ID: 4638
  Gene Symbol: DAPK2
  Gene Name: death-associated protein kinase 2
  ENSP ID: ENSP00000453101
MKKVHLRPDEDLTEFHSYCLGWSAMARSRLTATSASWLQAILLRQPPE

SEQ ID NO: 23262 - protein, 488 aa, Homo sapiens
  Payload ID: 4638
  Gene Symbol: DAPK2
  Gene Name: death-associated protein kinase 2
  Uniprot ID: Q9UIK4
  ENSP ID: ENSP00000453235
MFQASMRSPNMEPFKQQKVEDFYDIGEELGSGQFAIVKKCREKSTGLEYAAKFIKKRQSRASRRGVSREEIEREVSILRQVLHHNVITLHDVYENRTDVVLILELVSGGELFDFLAQKESLSEEEATSFIKQILDGVNYLHTKKIAHFDLKPENIMLLDKNIPIPHIKLIDFGLAHEIEDGVEFKNIFGTPEFVAPEIVNYEPLGLEADMWSIGVITYILLSGASPFLGDTKQETLANITAVSYDFDEEFFSQTSELAKDFIRKLLVKETRKRLTIQEALRHPWITSKGEGRAPEQRKTEPTQLKTKHLREYTLKCHSSMPPNNSYVNFERFACVVEDVARVDLGCRALVEAHDTIQDDVEALVSIFNEKEAWYREENESARHDLSQLRYEFRKVESLKKLLREDIQATGCSLGSMARKLDHLQAQFEILRQELSADLQWIQELVGSFQLESGSSEGLGSTFYQDTSESLSELLSRSCTEEFLAGWKL

SEQ ID NO: 23263 - protein, 88 aa, Homo sapiens
  Payload ID: 4638
  Gene Symbol: DAPK2
  Gene Name: death-associated protein kinase 2
  ENSP ID: ENSP00000453284
MFQASMRSPNMEPFKQQKVEDFYDIGEELGRFLAGILLFQTLHLLLTLLLLPACFSLLSCPSSSQRTAHLALWPVCHREEVPGEEHGA

SEQ ID NO: 23264 - protein, 91 aa, Homo sapiens
  Payload ID: 4638
  Gene Symbol: DAPK2
  Gene Name: death-associated protein kinase 2
  ENSP ID: ENSP00000453639
MFQASMRSPNMEPFKQQKVEDFYDIGEELGSGQFAIVKKCREKSTGLEYAAKFIKKRQSRASRRGVSREEIERESVWRRALRFPGPEGVTE

SEQ ID NO: 23265 - protein, 488 aa, Homo sapiens; identical to SEQ ID NO: 23262
  Payload ID: 4638
  Gene Symbol: DAPK2
  Gene Name: death-associated protein kinase 2
  Uniprot ID: Q9UIK4
  ENSP ID: ENSP00000484390

SEQ ID NO: 23266 - protein, 454 aa, Homo sapiens
  Payload ID: 4639
  Gene Symbol: DAPK3
  Gene Name: death-associated protein kinase 3
  Uniprot ID: O43293
  ENSP ID: ENSP00000301264
MSTFRQEDVEDHYEMGEELGSGQFAIVRKCRQKGTGKEYAAKFIKKRRLSSSRRGVSREEIEREVNILREIRHPNIITLHDIFENKTDVVLILELVSGGELFDFLAEKESLTEDEATQFLKQILDGVHYLHSKRIAHFDLKPENIMLLDKNVPNPRIKLIDFGIAHKIEAGNEFKNIFGTPEFVAPEIVNYEPLGLEADMWSIGVITYILLSGASPFLGETKQETLTNISAVNYDFDEEYFSNTSELAKDFIRRLLVKDPKRRMTIAQSLEHSWIKAIRRRNVRGEDSGRKPERRRLKTTRLKEYTIKSHSSLPPNNSYADFERFSKVLEEAAAAEEGLRELQRSRRLCHEDVEALAAIYEEKEAWYREESDSLGQDLRRLRQELLKTEALKRQAQEEAKGALLGTSGLKRRFSRLENRYEALAKQVASEMRFVQDLVRALEQEKLQGVECGLR

SEQ ID NO: 23267 - protein, 454 aa, Homo sapiens; identical to SEQ ID NO: 23266
  Payload ID: 4639
  Gene Symbol: DAPK3
  Gene Name: death-associated protein kinase 3
  Uniprot ID: O43293
  ENSP ID: ENSP00000442973

SEQ ID NO: 23268 - protein, 141 aa, Homo sapiens
  Payload ID: 4639
  Gene Symbol: DAPK3
  Gene Name: death-associated protein kinase 3
  ENSP ID: ENSP00000470115
MSTFRQEDVEDHYEMGEELGSGQFAIVRKCRQKGTGKEYAAKFIKKRRLSSSRRGVSREEIEREVNILREIRHPNIITLHDIFENKTDVVLILELVSGGELFDFLAEKESLTEDEATQFLKQILDGVHYLHSKRIAHFDLK

SEQ ID NO: 23269 - protein, 92 aa, Homo sapiens
  Payload ID: 4639
  Gene Symbol: DAPK3
  Gene Name: death-associated protein kinase 3
  ENSP ID: ENSP00000470168
  MOD_RES (1)..(1): Any amino acid
XSGASPFLGETKQETLTNISAVNYDFDEEYFSNTSELAKDFIRRLLVKDPKRRMTIAQSLEHSWIKVSGEVGELPGLPALAFSLGSRGAFSI

SEQ ID NO: 23270 - protein, 158 aa, Homo sapiens
  Payload ID: 4639
  Gene Symbol: DAPK3
  Gene Name: death-associated protein kinase 3
  ENSP ID: ENSP00000471154
MSTFRQEDVEDHYEMGEELGSGQFAIVRKCRQKGTGKEYAAKFIKKRRLSSSRRGVSREEIEREVNILREIRHPNIITLHDIFENKTDVVLILELVSGGELFDFLAEKESLTEDEATQFLKQILDGVHYLHSKRIAHFDLKPENIMLLDKNVPNPRIK

SEQ ID NO: 23271 - protein, 158 aa, Homo sapiens; identical to SEQ ID NO: 23270
  Payload ID: 4639
  Gene Symbol: DAPK3
  Gene Name: death-associated protein kinase 3
  ENSP ID: ENSP00000472988

SEQ ID NO: 23272 - protein, 740 aa, Homo sapiens
  Payload ID: 4640
  Gene Symbol: DAXX
  Gene Name: death-domain associated protein
  Uniprot ID: Q9UER7
  ENSP ID: ENSP00000266000
MATANSIIVLDDDDEDEAAAQPGPSHPLPNAASPGAEAPSSSEPHGARGSSSSGGKKCYKLENEKLFEEFLELCKMQTADHPEVVPFLYNRQQRAHSLFLASAEFCNILSRVLSRARSRPAKLYVYINELCTVLKAHSAKKKLNLAPAATTSNEPSGNNPPTHLSLDPTNAENTASQSPRTRGSRRQIQRLEQLLALYVAEIRRLQEKELDLSELDDPDSAYLQEARLKRKLIRLFGRLCELKDCSSLTGRVIEQRIPYRGTRYPEVNRRIERLINKPGPDTFPDYGDVLRAVEKAAARHSLGLPRQQLQLMAQDAFRDVGIRLQERRHLDLIYNFGCHLTDDYRPGVDPALSDPVLARRLRENRSLAMSRLDEVISKYAMLQDKSEEGERKKRRARLQGTSSHSADTPEASLDSGEGPSGMASQGCPSASRAETDDEDDEESDEEEEEEEEEEEEEATDSEEEEDLEQMQEGQEDDEEEDEEEEAAAGKDGDKSPMSSLQISNEKNLEPGKQISRSSGEQQNKGRIVSPSLLSEEPLAPSSIDAESNGEQPEELTLEEESPVSQLFELEIEALPLDTPSSVETDISSSRKQSEEPFTTVLENGAGMVSSTSFNGGVSPHNWGDSGPPCKKSRKEKKQTGSGPLGNSYVERQRSVHEKNGKKICTLPSPPSPLASLAPVADSSTRVDSPSHGLVTSSLCIPSPARLSQTPHSQPPRPGTCKTSVATQCDPEEIIVLSDSD

SEQ ID NO: 23273 - protein, 740 aa, Homo sapiens; identical to SEQ ID NO: 23272
  Payload ID: 4640
  Gene Symbol: DAXX
  Gene Name: death-domain associated protein
  Uniprot ID: Q9UER7
  ENSP ID: ENSP00000363668

SEQ ID NO: 23274 - protein, 740 aa, Homo sapiens; identical to SEQ ID NO: 23272
  Payload ID: 4640
  Gene Symbol: DAXX
  Gene Name: death-domain associated protein
  Uniprot ID: Q9UER7
  ENSP ID: ENSP00000372539

SEQ ID NO: 23275 - protein, 740 aa, Homo sapiens; identical to SEQ ID NO: 23272
  Payload ID: 4640
  Gene Symbol: DAXX
  Gene Name: death-domain associated protein
  Uniprot ID: Q9UER7
  ENSP ID: ENSP00000372681

SEQ ID NO: 23276 - protein, 740 aa, Homo sapiens; identical to SEQ ID NO: 23272
  Payload ID: 4640
  Gene Symbol: DAXX
  Gene Name: death-domain associated protein
  Uniprot ID: Q9UER7
  ENSP ID: ENSP00000382014

SEQ ID NO: 23277 - protein, 740 aa, Homo sapiens; identical to SEQ ID NO: 23272
  Payload ID: 4640
  Gene Symbol: DAXX
  Gene Name: death-domain associated protein
  Uniprot ID: Q9UER7
  ENSP ID: ENSP00000382281

SEQ ID NO: 23278 - protein, 48 aa, Homo sapiens
  Payload ID: 4640
  Gene Symbol: DAXX
  Gene Name: death-domain associated protein
  ENSP ID: ENSP00000387575
MATANSIIVLDDDDEDEAAAQPGPSHPLPNAASPGAEAPSSSEPHGAR

SEQ ID NO: 23279 - protein, 48 aa, Homo sapiens; identical to SEQ ID NO: 23278
  Payload ID: 4640
  Gene Symbol: DAXX
  Gene Name: death-domain associated protein
  ENSP ID: ENSP00000390008

SEQ ID NO: 23280 - protein, 740 aa, Homo sapiens; identical to SEQ ID NO: 23272
  Payload ID: 4640
  Gene Symbol: DAXX
  Gene Name: death-domain associated protein
  Uniprot ID: Q9UER7
  ENSP ID: ENSP00000394108

SEQ ID NO: 23281 - protein, 665 aa, Homo sapiens
  Payload ID: 4640
  Gene Symbol: DAXX
  Gene Name: death-domain associated protein
  Uniprot ID: Q9UER7
  ENSP ID: ENSP00000396876
MQTADHPEVVPFLYNRQQRAHSLFLASAEFCNILSRVLSRARSRPAKLYVYINELCTVLKAHSAKKKLNLAPAATTSNEPSGNNPPTHLSLDPTNAENTASQSPRTRGSRRQIQRLEQLLALYVAEIRRLQEKELDLSELDDPDSAYLQEARLKRKLIRLFGRLCELKDCSSLTGRVIEQRIPYRGTRYPEVNRRIERLINKPGPDTFPDYGDVLRAVEKAAARHSLGLPRQQLQLMAQDAFRDVGIRLQERRHLDLIYNFGCHLTDDYRPGVDPALSDPVLARRLRENRSLAMSRLDEVISKYAMLQDKSEEGERKKRRARLQGTSSHSADTPEASLDSGEGPSGMASQGCPSASRAETDDEDDEESDEEEEEEEEEEEEEATDSEEEEDLEQMQEGQEDDEEEDEEEEAAAGKDGDKSPMSSLQISNEKNLEPGKQISRSSGEQQNKGRIVSPSLLSEEPLAPSSIDAESNGEQPEELTLEEESPVSQLFELEIEALPLDTPSSVETDISSSRKQSEEPFTTVLENGAGMVSSTSFNGGVSPHNWGDSGPPCKKSRKEKKQTGSGPLGNSYVERQRSVHEKNGKKICTLPSPPSPLASLAPVADSSTRVDSPSHGLVTSSLCIPSPARLSQTPHSQPPRPGTCKTSVATQCDPEEIIVLSDSD

SEQ ID NO: 23282 - protein, 129 aa, Homo sapiens
  Payload ID: 4640
  Gene Symbol: DAXX
  Gene Name: death-domain associated protein
  ENSP ID: ENSP00000397612
MATANSIIVLDDDDEDEAAAQPGPSHPLPNAASPGAEAPSSSEPHGARGSSSSGGKKCYKLENEKLFEEFLELCKMQTADHPEVVPFLYNRQQRAHSLFLASAEFCNILSRVLSRARSRPAKLYVYINE

SEQ ID NO: 23283 - protein, 178 aa, Homo sapiens
  Payload ID: 4640
  Gene Symbol: DAXX
  Gene Name: death-domain associated protein
  ENSP ID: ENSP00000403986
MATANSIIVLDDDDEDEAAAQPGPSHPLPNAASPGAEAPSSSEPHGARGSSSSGGKKCYKLENEKLFEEFLELCKMQTADHPEVVPFLYNRQQRAHSLFLASAEFCNILSRVLSRARSRPAKLYVYINELCTVLKAHSAKKKLNLAPAATTSNEPSGNNPPTHLSLDPTNAENTASQS

SEQ ID NO: 23284 - protein, 740 aa, Homo sapiens; identical to SEQ ID NO: 23272
  Payload ID: 4640
  Gene Symbol: DAXX
  Gene Name: death-domain associated protein
  Uniprot ID: Q9UER7
  ENSP ID: ENSP00000404376

SEQ ID NO: 23285 - protein, 740 aa, Homo sapiens; identical to SEQ ID NO: 23272
  Payload ID: 4640
  Gene Symbol: DAXX
  Gene Name: death-domain associated protein
  Uniprot ID: Q9UER7
  ENSP ID: ENSP00000404623

SEQ ID NO: 23286 - protein, 178 aa, Homo sapiens; identical to SEQ ID NO: 23283
  Payload ID: 4640
  Gene Symbol: DAXX
  Gene Name: death-domain associated protein
  ENSP ID: ENSP00000406008

SEQ ID NO: 23287 - protein, 48 aa, Homo sapiens; identical to SEQ ID NO: 23278
  Payload ID: 4640
  Gene Symbol: DAXX
  Gene Name: death-domain associated protein
  ENSP ID: ENSP00000406649

SEQ ID NO: 23288 - protein, 48 aa, Homo sapiens; identical to SEQ ID NO: 23278
  Payload ID: 4640
  Gene Symbol: DAXX
  Gene Name: death-domain associated protein
  ENSP ID: ENSP00000407623

SEQ ID NO: 23289 - protein, 178 aa, Homo sapiens; identical to SEQ ID NO: 23283
  Payload ID: 4640
  Gene Symbol: DAXX
  Gene Name: death-domain associated protein
  ENSP ID: ENSP00000408215

SEQ ID NO: 23290 - protein, 129 aa, Homo sapiens; identical to SEQ ID NO: 23282
  Payload ID: 4640
  Gene Symbol: DAXX
  Gene Name: death-domain associated protein
  ENSP ID: ENSP00000408499

SEQ ID NO: 23291 - protein, 129 aa, Homo sapiens; identical to SEQ ID NO: 23282
  Payload ID: 4640
  Gene Symbol: DAXX
  Gene Name: death-domain associated protein
  ENSP ID: ENSP00000409756

SEQ ID NO: 23292 - protein, 740 aa, Homo sapiens; identical to SEQ ID NO: 23272
  Payload ID: 4640
  Gene Symbol: DAXX
  Gene Name: death-domain associated protein
  Uniprot ID: Q9UER7
  ENSP ID: ENSP00000410772

SEQ ID NO: 23293 - protein, 48 aa, Homo sapiens; identical to SEQ ID NO: 23278
  Payload ID: 4640
  Gene Symbol: DAXX
  Gene Name: death-domain associated protein
  ENSP ID: ENSP00000411119

SEQ ID NO: 23294 - protein, 129 aa, Homo sapiens; identical to SEQ ID NO: 23282
  Payload ID: 4640
  Gene Symbol: DAXX
  Gene Name: death-domain associated protein
  ENSP ID: ENSP00000411700

SEQ ID NO: 23295 - protein, 178 aa, Homo sapiens; identical to SEQ ID NO: 23283
  Payload ID: 4640
  Gene Symbol: DAXX
  Gene Name: death-domain associated protein
  ENSP ID: ENSP00000412177

SEQ ID NO: 23296 - protein, 129 aa, Homo sapiens; identical to SEQ ID NO: 23282
  Payload ID: 4640
  Gene Symbol: DAXX
  Gene Name: death-domain associated protein
  ENSP ID: ENSP00000412433

SEQ ID NO: 23297 - protein, 178 aa, Homo sapiens; identical to SEQ ID NO: 23283
  Payload ID: 4640
  Gene Symbol: DAXX
  Gene Name: death-domain associated protein
  ENSP ID: ENSP00000415898

SEQ ID NO: 23298 - protein, 688 aa, Homo sapiens
  Payload ID: 4640
  Gene Symbol: DAXX
  Gene Name: death-domain associated protein
  Uniprot ID: Q9UER7
  ENSP ID: ENSP00000477633
MATANSIIVLDDDDEDEAAAQPGPSHPLPNAASPGAEAPSSSEPHGARGSSSSGGKKCYKLENEKLFEEFLELCKMQTADHPEVVPFLYNRQQRAHSLFLASAEFCNILSRVLSRARSRPAKLYVYINELCTVLKAHSAKKKLNLAPAATTSNEPSGNNPPTHLSLDPTNAENTASQSPRTRGSRRQIQRLEQLLALYVAEIRRLQEKELDLSELDDPDSAYLQEARLKRKLIRLFGRLCELKDCSSLTGRVIEQRIPYRGTRYPEVNRRIERLINKPGPDTFPDYGDVLRAVEKAAARHSLGLPRQQLQLMAQDAFRDVGIRLQERRHLDLIYNFGCHLTDDYRPGVDPALSDPVLARRLRENRSLAMSRLDEVISKYAMLQDKSEEGERKKRRARLQGTSSHSADTPEASLDSGEGPSGMASQGCPSASRAETDDEDDEESDEEEEEEEEEEEEEATDSEEEEDLEQMQEGQEDDEEEDEEEEAAAGKDGDKSPMSSLQISNEKNLEPGKQISRSSGEQQNKGRIVSPSLLSEEPLAPSSIDAESNGEQPEELTLEEESPVSQLFELEIEALPLDTPSSVETDISSSRKQSEEPFTTVLENGAGMVSSTSFNGGVSPHNWGDSGPPCKKSRKEKKQTGSGPLGNSYVERQSPAVPNPPFTASSAWYLQDKCGHTMRSRRDHRALRL

SEQ ID NO: 23299 - protein, 688 aa, Homo sapiens; identical to SEQ ID NO: 23298
  Payload ID: 4640
  Gene Symbol: DAXX
  Gene Name: death-domain associated protein
  Uniprot ID: Q9UER7
  ENSP ID: ENSP00000478810

SEQ ID NO: 23300 - protein, 665 aa, Homo sapiens; identical to SEQ ID NO: 23281
  Payload ID: 4640
  Gene Symbol: DAXX
  Gene Name: death-domain associated protein
  Uniprot ID: Q9UER7
  ENSP ID: ENSP00000479172

SEQ ID NO: 23301 - protein, 665 aa, Homo sapiens; identical to SEQ ID NO: 23281
  Payload ID: 4640
  Gene Symbol: DAXX
  Gene Name: death-domain associated protein
  Uniprot ID: Q9UER7
  ENSP ID: ENSP00000480448

SEQ ID NO: 23302 - protein, 688 aa, Homo sapiens; identical to SEQ ID NO: 23298
  Payload ID: 4640
  Gene Symbol: DAXX
  Gene Name: death-domain associated protein
  Uniprot ID: Q9UER7
  ENSP ID: ENSP00000482399

SEQ ID NO: 23303 - protein, 665 aa, Homo sapiens; identical to SEQ ID NO: 23281
  Payload ID: 4640
  Gene Symbol: DAXX
  Gene Name: death-domain associated protein
  Uniprot ID: Q9UER7
  ENSP ID: ENSP00000483394

SEQ ID NO: 23304 - protein, 688 aa, Homo sapiens; identical to SEQ ID NO: 23298
  Payload ID: 4640
  Gene Symbol: DAXX
  Gene Name: death-domain associated protein
  Uniprot ID: Q9UER7
  ENSP ID: ENSP00000483517

SEQ ID NO: 23305 - protein, 688 aa, Homo sapiens; identical to SEQ ID NO: 23298
  Payload ID: 4640
  Gene Symbol: DAXX
  Gene Name: death-domain associated protein
  Uniprot ID: Q9UER7
  ENSP ID: ENSP00000484830

SEQ ID NO: 23306 - protein, 544 aa, Homo sapiens
  Payload ID: 4641
  Gene Symbol: DBR1
  Gene Name: debranching RNA lariats 1
  Uniprot ID: Q9UK59
  ENSP ID: ENSP00000260803
MRVAVAGCCHGELDKIYETLALAERRGPGPVDLLLCCGDFQAVRNEADLRCMAVPPKYRHMQTFYRYYSGEKKAPVLTLFIGGNHEASNHLQELPYGGWVAPNIYYLGLAGVVKYRGVRIGGISGIFKSHDYRKGHFECPPYNSSTIRSIYHVRNIEVYKLKQLKQPIDIFLSHDWPRSIYHYGNKKQLLKTKSFFRQEVENNTLGSPAASELLEHLKPTYWFSAHLHVKFAALMQHQAKDKGQTARATKFLALDKCLPHRDFLQILEIEHDPSAPDYLEYDIEWLTILRATDDLINVTGRLWNMPENNGLHARWDYSATEEGMKEVLEKLNHDLKVPCNFSVTAACYDPSKPQTQMQLIHRINPQTTEFCAQLGIIDINVRLQKSKEEHHVCGEYEEQDDVESNDSGEDQSEYNTDTSALSSINPDEIMLDEEEDEDSIVSAHSGMNTPSVEPSDQASEFSASFSDVRILPGSMIVSSDDTVDSTIDREGKPGGTVESGNGEDLTKVPLKRLSDEHEPEQRKKIKRRNQAIYAAVDDDDDDAA

SEQ ID NO: 23307 - protein, 118 aa, Homo sapiens
  Payload ID: 4641
  Gene Symbol: DBR1
  Gene Name: debranching RNA lariats 1
  ENSP ID: ENSP00000417262
MRVAVAGCCHGELDKIYETLALAERRGPGPVDLLLCCGDFQAVRNEADLRCMAVPPKYRHMQTFYRYYSGEKKAPVLTLFIGGNHEASNHLQELPYGGWVAPNIYYLAEAAYRYILVS

SEQ ID NO: 23308 - protein, 337 aa, Homo sapiens
  Payload ID: 4642
  Gene Symbol: DCPS
  Gene Name: decapping enzyme, scavenger
  Uniprot ID: Q96C86
  ENSP ID: ENSP00000263579
MADAAPQLGKRKRELDVEEAHAASTEEKEAGVGNGTCAPVRLPFSGFRLQKVLRESARDKIIFLHGKVNEASGDGDGEDAVVILEKTPFQVEQVAQLLTGSPELQLQFSNDIYSTYHLFPPRQLNDVKTTVVYPATEKHLQKYLRQDLRLIRETGDDYRNITLPHLESQSLSIQWVYNILDKKAEADRIVFENPDPSDGFVLIPDLKWNQQQLDDLYLIAICHRRGIRSLRDLTPEHLPLLRNILHQGQEAILQRYRMKGDHLRVYLHYLPSYYHLHVHFTALGFEAPGSGVERAHLLAEVIENLECDPRHYQQRTLTFALRADDPLLKLLQEAQQS

SEQ ID NO: 23309 - protein, 396 aa, Homo sapiens
  Payload ID: 4643
  Gene Symbol: DXO
  Gene Name: decapping exoribonuclease
  Uniprot ID: O77932
  ENSP ID: ENSP00000337759
MDPRGTKRGAEKTEVAEPRNKLPRPAPSLPTDPALYSGPFPFYRRPSELGCFSLDAQRQYHGDARALRYYSPPPTNGPGPNFDLRDGYPDRYQPRDEEVQERLDHLLCWLLEHRGRLEGGPGWLAEAIVTWRGHLTKLLTTPYERQEGWQLAASRFQGTLYLSEVETPNARAQRLARPPLLRELMYMGYKFEQYMCADKPGSSPDPSGEVNTNVAFCSVLRSRLGSHPLLFSGEVDCTDPQAPSTQPPTCYVELKTSKEMHSPGQWRSFYRHKLLKWWAQSFLPGVPNVVAGFRNPDGFVSSLKTFPTMKMFEYVRNDRDGWNPSVCMNFCAAFLSFAQSTVVQDDPRLVHLFSWEPGGPVTVSVHQDAPYAFLPIWYVEAMTQDLPSPPKTPSPK

SEQ ID NO: 23310 - protein, 396 aa, Homo sapiens; identical to SEQ ID NO: 23309
  Payload ID: 4643
  Gene Symbol: DXO
  Gene Name: decapping exoribonuclease
  Uniprot ID: O77932
  ENSP ID: ENSP00000364498

SEQ ID NO: 23311 - protein, 396 aa, Homo sapiens; identical to SEQ ID NO: 23309
  Payload ID: 4643
  Gene Symbol: DXO
  Gene Name: decapping exoribonuclease
  Uniprot ID: O77932
  ENSP ID: ENSP00000364505

SEQ ID NO: 23312 - protein, 396 aa, Homo sapiens; identical to SEQ ID NO: 23309
  Payload ID: 4643
  Gene Symbol: DXO
  Gene Name: decapping exoribonuclease
  Uniprot ID: O77932
  ENSP ID: ENSP00000372820

SEQ ID NO: 23313 - protein, 396 aa, Homo sapiens; identical to SEQ ID NO: 23309
  Payload ID: 4643
  Gene Symbol: DXO
  Gene Name: decapping exoribonuclease
  Uniprot ID: O77932
  ENSP ID: ENSP00000382818

SEQ ID NO: 23314 - protein, 396 aa, Homo sapiens; identical to SEQ ID NO: 23309
  Payload ID: 4643
  Gene Symbol: DXO
  Gene Name: decapping exoribonuclease
  Uniprot ID: O77932
  ENSP ID: ENSP00000382819

SEQ ID NO: 23315 - protein, 396 aa, Homo sapiens
  Payload ID: 4643
  Gene Symbol: DXO
  Gene Name: decapping exoribonuclease
  Uniprot ID: O77932
  ENSP ID: ENSP00000391123
MDPRGTKRGAEKTEVAEPRNKLPRPAPSLPTDPALYSGPFPFYRRPSELGCFSLDAQRQYHGDARALRYYSPPPTNGPGPNFDLRDGYPDRYQPRDEEVQERLDHLLCWLLEHRGRLEGGPGWLAEAIVTWRGHLTKLLTTPYERQEGWQLAASRFQGTLYLSEVETPNARAQRLARPPLLRELMYMGYKFEQYMCADKPGSSPDPSGEVNTNVAFCSVLRSRLGSHPLLFSGEVDCTDPQAPSTQPPTCYVELKTSKEMQSPGQWRSFYRHKLLKWWAQSFLPGVPNVVAGFRNPDGFVSSLKTFPTMKMFEYVRNDRDGWNPSVCMNFCAAFLSFAQSTVVQDDPRLVHLFSWEPGGPVTVSVHQDAPYAFLPIWYVEAMTQDLPSPPKTPSPK

SEQ ID NO: 23316 - protein, 396 aa, Homo sapiens; identical to SEQ ID NO: 23309
  Payload ID: 4643
  Gene Symbol: DXO
  Gene Name: decapping exoribonuclease
  Uniprot ID: O77932
  ENSP ID: ENSP00000391349

SEQ ID NO: 23317 - protein, 396 aa, Homo sapiens; identical to SEQ ID NO: 23309
  Payload ID: 4643
  Gene Symbol: DXO
  Gene Name: decapping exoribonuclease
  Uniprot ID: O77932
  ENSP ID: ENSP00000391532

SEQ ID NO: 23318 - protein, 396 aa, Homo sapiens; identical to SEQ ID NO: 23309
  Payload ID: 4643
  Gene Symbol: DXO
  Gene Name: decapping exoribonuclease
  Uniprot ID: O77932
  ENSP ID: ENSP00000394167

SEQ ID NO: 23319 - protein, 396 aa, Homo sapiens; identical to SEQ ID NO: 23309
  Payload ID: 4643
  Gene Symbol: DXO
  Gene Name: decapping exoribonuclease
  Uniprot ID: O77932
  ENSP ID: ENSP00000395262

SEQ ID NO: 23320 - protein, 396 aa, Homo sapiens; identical to SEQ ID NO: 23315
  Payload ID: 4643
  Gene Symbol: DXO
  Gene Name: decapping exoribonuclease
  Uniprot ID: O77932
  ENSP ID: ENSP00000400173

SEQ ID NO: 23321 - protein, 396 aa, Homo sapiens; identical to SEQ ID NO: 23315
  Payload ID: 4643
  Gene Symbol: DXO
  Gene Name: decapping exoribonuclease
  Uniprot ID: O77932
  ENSP ID: ENSP00000401315

SEQ ID NO: 23322 - protein, 396 aa, Homo sapiens; identical to SEQ ID NO: 23309
  Payload ID: 4643
  Gene Symbol: DXO
  Gene Name: decapping exoribonuclease
  Uniprot ID: O77932
  ENSP ID: ENSP00000406143

SEQ ID NO: 23323 - protein, 396 aa, Homo sapiens; identical to SEQ ID NO: 23309
  Payload ID: 4643
  Gene Symbol: DXO
  Gene Name: decapping exoribonuclease
  Uniprot ID: O77932
  ENSP ID: ENSP00000410404

SEQ ID NO: 23324 - protein, 396 aa, Homo sapiens; identical to SEQ ID NO: 23309
  Payload ID: 4643
  Gene Symbol: DXO
  Gene Name: decapping exoribonuclease
  Uniprot ID: O77932
  ENSP ID: ENSP00000411380

SEQ ID NO: 23325 - protein, 396 aa, Homo sapiens; identical to SEQ ID NO: 23309
  Payload ID: 4643
  Gene Symbol: DXO
  Gene Name: decapping exoribonuclease
  Uniprot ID: O77932
  ENSP ID: ENSP00000413860

SEQ ID NO: 23326 - protein, 396 aa, Homo sapiens; identical to SEQ ID NO: 23309
  Payload ID: 4643
  Gene Symbol: DXO
  Gene Name: decapping exoribonuclease
  Uniprot ID: O77932
  ENSP ID: ENSP00000415675

SEQ ID NO: 23327 - protein, 210 aa, Homo sapiens
  Payload ID: 4643
  Gene Symbol: DXO
  Gene Name: decapping exoribonuclease
  ENSP ID: ENSP00000418632
MDPRGTKRGAEKTEVAEPRNKLPRPAPSLPTDPALYSGPFPFYRRPSELGCFSLDAQRQYHGDARALRYYSPPPTNGPGPNFDLRDGYPDRYQPRDEEVQERLDHLLCWLLEHRGRLEGGPGWLAEAIVTWRGHLTKLLTTPYERQEGWQLAASRFQGTLYLSEVETPNARAQRLARPPLLRELMYMGYKFEQYMCAAAWEATLCSSQGR

SEQ ID NO: 23328 - protein, 174 aa, Homo sapiens
  Payload ID: 4643
  Gene Symbol: DXO
  Gene Name: decapping exoribonuclease
  ENSP ID: ENSP00000419588
  MOD_RES (1)..(1): Any amino acid
XMCADKPGSSPDPSGEVNTNVAFCSVLRSRLGSHPLLFSGEVDCTDPQAPSTQPPTCYVELKTSKEMHSPGQWRSFYRFRIGTFPTMKMFEYVRNDRDGWNPSVCMNFCAAFLSFAQSTVVQDDPRLVHLFSWEPGGPVTVSVHQDAPYAFLPIWYVEAMTQDLPSPPKTPSPK

SEQ ID NO: 23329 - protein, 544 aa, Homo sapiens
  Payload ID: 4644
  Gene Symbol: DCP1A
  Gene Name: decapping mRNA 1A
  Uniprot ID: Q9NPI6
  ENSP ID: ENSP00000476046
MEALSRAGQEMSLAALKQHDPYITSIADLTGQVALYTFCPKANQWEKTDIEGTLFVYRRSASPYHGFTIVNRLNMHNLVEPVNKDLEFQLHEPFLLYRNASLSIYSIWFYDKNDCHRIAKLMADVVEEETRRSQQAARDKQSPSQANGCSDHRPIDILEMLSRAKDEYERSAPSGHKHLTVEELFGTSLPKEQPAVVGLDSEEMERLPGDASQKEPNSFLPFPFEQLGGAPQSETLGVPSAAHHSVQPEITTPVLITPASITQSNEKHAPTYTIPLSPVLSPTLPAEAPTAQVPPSLPRNSTMMQAVKTTPRQRSPLLNQPVPELSHASLIANQSPFRAPLNVTNTAGTSLPSVDLLQKLRLTPQHDQIQTQPLGKGAMVASFSPAAGQLATPESFIEPPSKTAAARVAASASLSNMVLAPLQSMQQNQDPEVFVQPKVLSSAIPVAGAPLVTATTTAVSSVLLAPSVFQQTVTRSSDLERKASSPSPLTIGTPESQRKPSIILSKSQLQDTLIHLIKNDSSFLSTLHEVYLQVLTKNKDNHNL

SEQ ID NO: 23330 - protein, 582 aa, Homo sapiens
  Payload ID: 4644
  Gene Symbol: DCP1A
  Gene Name: decapping mRNA 1A
  Uniprot ID: Q9NPI6
  ENSP ID: ENSP00000476386
MEALSRAGQEMSLAALKQHDPYITSIADLTGQVALYTFCPKANQWEKTDIEGTLFVYRRSASPYHGFTIVNRLNMHNLVEPVNKDLEFQLHEPFLLYRNASLSIYSIWFYDKNDCHRIAKLMADVVEEETRRSQQAARDKQSPSQANGCSDHRPIDILEMLSRAKDEYERNQMGDSNISSPGLQPSTQLSNLGSTETLEEMPSGSQDKSAPSGHKHLTVEELFGTSLPKEQPAVVGLDSEEMERLPGDASQKEPNSFLPFPFEQLGGAPQSETLGVPSAAHHSVQPEITTPVLITPASITQSNEKHAPTYTIPLSPVLSPTLPAEAPTAQVPPSLPRNSTMMQAVKTTPRQRSPLLNQPVPELSHASLIANQSPFRAPLNVTNTAGTSLPSVDLLQKLRLTPQHDQIQTQPLGKGAMVASFSPAAGQLATPESFIEPPSKTAAARVAASASLSNMVLAPLQSMQQNQDPEVFVQPKVLSSAIPVAGAPLVTATTTAVSSVLLAPSVFQQTVTRSSDLERKASSPSPLTIGTPESQRKPSIILSKSQLQDTLIHLIKNDSSFLSTLHEVYLQVLTKNKDNHNL

SEQ ID NO: 23331 - protein, 260 aa, Homo sapiens
  Payload ID: 4644
  Gene Symbol: DCP1A
  Gene Name: decapping mRNA 1A
  ENSP ID: ENSP00000477594
MEALSRAGQEMSLAALKQHDPYITSIADLTGQEKTDIEGTLFVYRRSASPYHGFTIVNRLNMHNLVEPVNKDLEFQLHEPFLLYRNASLSIYSIWFYDKNDCHRIAKLMADVVEEETRRSQQAARDKQSPSQANGCSDHRPIDILEMLSRAKDEYERNQMGDSNISSPGLQPSTQLSNLGSTETLEEMPSGSQDKSAPSGHKHLTVEELFGTSLPKEQPAVVGLDSEEMERLPGDASQKEPNSFLPFPFEQLGGAPQSET

SEQ ID NO: 23332 - protein, 191 aa, Homo sapiens
  Payload ID: 4644
  Gene Symbol: DCP1A
  Gene Name: decapping mRNA 1A
  ENSP ID: ENSP00000479387
MEALSRAGQEMSLAALKQHDPYITSIADLTGQVALYTFCPKANQWTDIEGTLFVYRRSASPYHGFTIVNRLNMHNLVEPVNKDLEFQLHEPFLLYRNASLSIYSIWFYDKNDCHRIAKLMADVVEEETRRSQQAARDKQSPSQANGCSDHRPIDILEMLSRAKDEYERNQMGDSNISSPGLQPSTQLSNLG

SEQ ID NO: 23333 - protein, 102 aa, Homo sapiens
  Payload ID: 4644
  Gene Symbol: DCP1A
  Gene Name: decapping mRNA 1A
  ENSP ID: ENSP00000480912
MEALSRAGQEMSLAALKQHDPYITSIADLTGQVALYTFCPKANQWEKTDIEGTLFVYRRSASPYHGFTIVNRLNMHNLVEPVNKDLEFQLHEPFLLYRNASC

SEQ ID NO: 23334 - protein, 617 aa, Homo sapiens
  Payload ID: 4645
  Gene Symbol: DCP1B
  Gene Name: decapping mRNA 1B
  Uniprot ID: Q8IZD4
  ENSP ID: ENSP00000280665
MAAVAAGGLVGKGRDISLAALQRHDPYINRIVDVASQVALYTFGHRANEWEKTDVEGTLFVYTRSASPKHGFTIMNRLSMENRTEPITKDLDFQLQDPFLLYRNARLSIYGIWFYDKEECQRIAELMKNLTQYEQLKAHQGTGAGISPVILNSGEGKEVDILRMLIKAKDEYTKCKTCSEPKKITSSSAIYDNPNLIKPIPVKPSENQQQRIPQPNQTLDPEPQHLSLTALFGKQDKATCQETVEPPQTLHQQQQQQQQQQEKLPIRQGVVRSLSYEEPRRHSPPIEKQLCPAIQKLMVRSADLHPLSELPENRPCENGSTHSAGEFFTGPVQPGSPHNIGTSRGVQNASRTQNLFEKLQSTPGAANKCDPSTPAPASSAALNRSRAPTSVTPVAPGKGLAQPPQAYFNGSLPPQTVGHQAHGREQSTLPRQTLPISGSQTGSSGVISPQELLKKLQIVQQEQQLHASNRPALAAKFPVLAQSSGTGKPLESWINKTPNTEQQTPLFQVISPQRIPATAAPSLLMSPMVFAQPTSVPPKERESGLLPVGGQEPPAAATSLLLPIQSPEPSVITSSPLTKLQLQEALLYLIQNDDNFLNIIYEAYLFSMTQAAMKKTM

SEQ ID NO: 23335 - protein, 390 aa, Homo sapiens
  Payload ID: 4645
  Gene Symbol: DCP1B
  Gene Name: decapping mRNA 1B
  ENSP ID: ENSP00000444374
MKNLTQYEQLKAHQGTGAGISPVILNSGEGKEVDILRMLIKAKDEYTKCKTCSEPKKITSSSAIYDNPNLIKPIPVKPSENQQQRIPQPNQTLDPEPQHLSLTALFGKQDKATCQETVEPPQTLHQQQQQQQQQQEKLPIRQGVVRSLSYEEPRRHSPPIEKQLCPAIQKLMVRSADLHPLSELPENRPCENGSTHSAGEFFTGPVQPGSPHNIGTSRGVQNASRTQNLFEKLQSTPGAANKCDPSTPAPASSAALNRSRAPTSVTPVAPGKGLAQPPQAYFNGSLPPQTVGHQAHGREQSTLPRQTLPISGSQTGSSGVISPQELLKKLQIVQQEQQLHASNRPALAAKFPVLAQSSGTGKPLESWINKTPNTEQQTPLFQYSQISRAE

SEQ ID NO: 23336 - protein, 119 aa, Homo sapiens
  Payload ID: 4645
  Gene Symbol: DCP1B
  Gene Name: decapping mRNA 1B
  ENSP ID: ENSP00000445011
MAAVAAGGLVGKGRDISLAALQRHDPYINRIVDVASQVALYTFGHRANEWEKTDVEGTLFVYTRSASPKHGFTIMNRLSMENRTEPITKDLDFQLQDPFLLYRNARYEETETPVRRQTV

SEQ ID NO: 23337 - protein, 153 aa, Homo sapiens
  Payload ID: 4645
  Gene Symbol: DCP1B
  Gene Name: decapping mRNA 1B
  ENSP ID: ENSP00000482714
MAAVAAGGLVGKGRDISLAALQRHDPYINRIVDVASQVALYTFGHRANEWEKTDVEGTLFVYTRSASPKHGFTIMNRLSMENRTEPITKDLDFQLQDPFLLYRNARCESFLLQWVVLLLKFGQVFKIVQCLPLCLHLVSVAMGGVSILTNVNV

SEQ ID NO: 23338 - protein, 420 aa, Homo sapiens
  Payload ID: 4646
  Gene Symbol: DCP2
  Gene Name: decapping mRNA 2
  Uniprot ID: Q8IU60
  ENSP ID: ENSP00000373715
METKRVEIPGSVLDDLCSRFILHIPSEERDNAIRVCFQIELAHWFYLDFYMQNTPGLPQCGIRDFAKAVFSHCPFLLPQGEDVEKVLDEWKEYKMGVPTYGAIILDETLENVLLVQGYLAKSGWGFPKGKVNKEEAPHDCAAREVFEETGFDIKDYICKDDYIELRINDQLARLYIIPGIPKDTKFNPKTRREIRNIEWFSIEKLPCHRNDMTPKSKLGLAPNKFFMAIPFIRPLRDWLSRRFGDSSDSDNGFSSTGSTPAKPTVEKLSRTKFRHSQQLFPDGSPGDQWVKHRQPLQQKPYNNHSEMSDLLKGKNQSMRGNGRKQYQDSPNQKKRTNGLQPAKQQNSLMKCEKKLHPRKLQDNFETDAVYDLPSSSEDQLLEHAEGQPVACNGHCKFPFSSRAFLSFKFDHNAIMKILDL

SEQ ID NO: 23339 - protein, 402 aa, Homo sapiens
  Payload ID: 4646
  Gene Symbol: DCP2
  Gene Name: decapping mRNA 2
  ENSP ID: ENSP00000424982
  MOD_RES (1)..(1): Any amino acid
XGAPPRALAQSWGPRLRERDGSERVPPLPLLVSVGVVSAAASSAASSPASRSPSAVPSVPGRAEPGCTVPAVGPHHGDQTGGDSRQRPGRSLQVLLVQGYLAKSGWGFPKGKVNKEEAPHDCAAREVFEETGFDIKDYICKDDYIELRINDQLARLYIIPGIPKDTKFNPKTRREIRNIEWFSIEKLPCHRNDMTPKSKLGLAPNKFFMAIPFIRPLRDWLSRRFGDSSDSDNGFSSTGSTPAKPTVEKLSRTKFRHSQQLFPDGSPGDQWVKHRQPLQQKPYNNHSEMSDLLKGKNQSMRGNGRKQYQDSPNQKKRTNGLQPAKQQNSLMKCEKKLHPRKLQDNFETDAVYDLPSSSEDQLLEHAEGQPVACNGHCKFPFSSRAFLSFKFDHNAIMKILDL

SEQ ID NO: 23340 - protein, 385 aa, Homo sapiens
  Payload ID: 4646
  Gene Symbol: DCP2
  Gene Name: decapping mRNA 2
  Uniprot ID: Q8IU60
  ENSP ID: ENSP00000425770
METKRVEIPGSVLDDLCSRFILHIPSEERDNAIRVCFQIELAHWFYLDFYMQNTPGLPQCGIRDFAKAVFSHCPFLLPQGEDVEKVLDEWKEYKMGVPTYGAIILDETLENVLLVQGYLAKSGWGFPKGKVNKEEAPHDCAAREVFEETGFDIKDYICKDDYIELRINDQLARLYIIPGIPKDTKFNPKTRREIRNIEWFSIEKLPCHRNDMTPKSKLGLAPNKFFMAIPFIRPLRDWLSRRFGDSSDSDNGFSSTGSTPAKPTVEKLSRTKFRHSQQLFPDGSPGDQWVKHRQPLQQKPYNNHSEMSDLLKGKKCEKKLHPRKLQDNFETDAVYDLPSSSEDQLLEHAEGQPVACNGHCKFPFSSRAFLSFKFDHNAIMKILDL

SEQ ID NO: 23341 - protein, 74 aa, Homo sapiens
  Payload ID: 4646
  Gene Symbol: DCP2
  Gene Name: decapping mRNA 2
  ENSP ID: ENSP00000427198
MIVLLERSLKKLVLISKTIFVRMITLNFESMTSLLVCTSFQEFQKTQNLTQKLEEKFGTLSGSLLRNCLVIEMI

SEQ ID NO: 23342 - protein, 359 aa, Homo sapiens
  Payload ID: 4647
  Gene Symbol: DCN
  Gene Name: decorin
  Uniprot ID: P07585
  ENSP ID: ENSP00000052754
MKATIILLLLAQVSWAGPFQQRGLFDFMLEDEASGIGPEVPDDRDFEPSLGPVCPFRCQCHLRVVQCSDLGLDKVPKDLPPDTTLLDLQNNKITEIKDGDFKNLKNLHALILVNNKISKVSPGAFTPLVKLERLYLSKNQLKELPEKMPKTLQELRAHENEITKVRKVTFNGLNQMIVIELGTNPLKSSGIENGAFQGMKKLSYIRIADTNITSIPQGLPPSLTELHLDGNKISRVDAASLKGLNNLAKLGLSFNSISAVDNGSLANTPHLRELHLDNNKLTRVPGGLAEHKYIQVVYLHNNNISVVGSSDFCPPGHNTKKASYSGVSLFSNPVQYWEIQPSTFRCVYVRSAIQLGNYK

SEQ ID NO: 23343 - protein, 359 aa, Homo sapiens; identical to SEQ ID NO: 23342
  Payload ID: 4647
  Gene Symbol: DCN
  Gene Name: decorin
  Uniprot ID: P07585
  ENSP ID: ENSP00000376862

SEQ ID NO: 23344 - protein, 75 aa, Homo sapiens
  Payload ID: 4647
  Gene Symbol: DCN
  Gene Name: decorin
  Uniprot ID: P07585
  ENSP ID: ENSP00000398514
MKATIILLLLAQVSWAGPFQQRGLFDFMLEDEASGIGPEVPDDRDFEPSLGPVCPFRCQCHLRVVQCSDLGCLPS

SEQ ID NO: 23345 - protein, 172 aa, Homo sapiens
  Payload ID: 4647
  Gene Symbol: DCN
  Gene Name: decorin
  Uniprot ID: P07585
  ENSP ID: ENSP00000399815
MKATIILLLLAQVSWAGPFQQRGLFDFMLEDEASGIGPEVPDDRDFEPSLGPVCPFRCQCHLRVVQCSDLGLDKVPKDLPPDTTLLDLQNNKITEIKDGDFKNLKNLHVVYLHNNNISVVGSSDFCPPGHNTKKASYSGVSLFSNPVQYWEIQPSTFRCVYVRSAIQLGNYK

SEQ ID NO: 23346 - protein, 212 aa, Homo sapiens
  Payload ID: 4647
  Gene Symbol: DCN
  Gene Name: decorin
  Uniprot ID: P07585
  ENSP ID: ENSP00000401021
MKATIILLLLAQVSWAGPFQQRGLFDFMLEDEASGIGPEVPDDRDFEPSLGPVCPFRCQCHLRVVQCSDLGLPPSLTELHLDGNKISRVDAASLKGLNNLAKLGLSFNSISAVDNGSLANTPHLRELHLDNNKLTRVPGGLAEHKYIQVVYLHNNNISVVGSSDFCPPGHNTKKASYSGVSLFSNPVQYWEIQPSTFRCVYVRSAIQLGNYK

SEQ ID NO: 23347 - protein, 250 aa, Homo sapiens
  Payload ID: 4647
  Gene Symbol: DCN
  Gene Name: decorin
  Uniprot ID: P07585
  ENSP ID: ENSP00000413723
MKATIILLLLAQVSWAGPFQQRGLFDFMLEDEASGIGPEVPDDRDFEPSLGPVCPFRCQCHLRVVQCSDLELGTNPLKSSGIENGAFQGMKKLSYIRIADTNITSIPQGLPPSLTELHLDGNKISRVDAASLKGLNNLAKLGLSFNSISAVDNGSLANTPHLRELHLDNNKLTRVPGGLAEHKYIQVVYLHNNNISVVGSSDFCPPGHNTKKASYSGVSLFSNPVQYWEIQPSTFRCVYVRSAIQLGNYK

SEQ ID NO: 23348 - protein, 88 aa, Homo sapiens
  Payload ID: 4647
  Gene Symbol: DCN
  Gene Name: decorin
  ENSP ID: ENSP00000446527
MKATIILLLLAQVSWAGPFQQRGLFDFMLEDEASGIGPEVPDDRDFEPSLGPVCPFRCQCHLRVVQCSDLVETGFHRVSQDGLDLLIS

SEQ ID NO: 23349 - protein, 177 aa, Homo sapiens
  Payload ID: 4647
  Gene Symbol: DCN
  Gene Name: decorin
  ENSP ID: ENSP00000446530
MKATIILLLLAQVSWAGPFQQRGLFDFMLEDEASGIGPEVPDDRDFEPSLGPVCPFRCQCHLRVVQCSDLGLPPSLTELHLDGNKISRVDAASLKGLNNLAKLGLSFNSISAVDNGSLANTPHLRELHLDNNKLTRVPGGLAEHKYIQVVYLHNNNISVVGSSDFCPPGHNTKKASY

SEQ ID NO: 23350 - protein, 359 aa, Homo sapiens; identical to SEQ ID NO: 23342
  Payload ID: 4647
  Gene Symbol: DCN
  Gene Name: decorin
  Uniprot ID: P07585
  ENSP ID: ENSP00000447654

SEQ ID NO: 23351 - protein, 212 aa, Homo sapiens; identical to SEQ ID NO: 23346
  Payload ID: 4647
  Gene Symbol: DCN
  Gene Name: decorin
  Uniprot ID: P07585
  ENSP ID: ENSP00000447674

SEQ ID NO: 23352 - protein, 178 aa, Homo sapiens
  Payload ID: 4647
  Gene Symbol: DCN
  Gene Name: decorin
  ENSP ID: ENSP00000447886
MKATIILLLLAQVSWAGPFQQRGLFDFMLEDEASGIGPEVPDDRDFEPSLGPVCPFRCQCHLRVVQCSDLGLDKVPKDLPPDTTLLDLQNNKITEIKDGDFKNLKNLHALILVNNKISKVSPGAFTPLVKLERLYLSKNQLKELPEKMPKTLQELRAHENEITKVRKVTFNGLNQMIV

SEQ ID NO: 23353 - protein, 98 aa, Homo sapiens
  Payload ID: 4647
  Gene Symbol: DCN
  Gene Name: decorin
  ENSP ID: ENSP00000448057
MKATIILLLLAQVSWAGPFQQRGLFDFMLEDEASGIGPEVPDDRDFEPSLGPVCPFRCQCHLRVVQCSDLEKKYCNNLSSYNLYTTNCLILCRLFTHH

SEQ ID NO: 23354 - protein, 100 aa, Homo sapiens
  Payload ID: 4647
  Gene Symbol: DCN
  Gene Name: decorin
  ENSP ID: ENSP00000448274
MKATIILLLLAQVSWAGPFQQRGLFDFMLEDEASGIGPEVPDDRDFEPSLGPVCPFRCQCHLRVVQCSDLEKFGLEIPRALHLEDKSPERLKLSGWAKGE

SEQ ID NO: 23355 - protein, 52 aa, Homo sapiens
  Payload ID: 4647
  Gene Symbol: DCN
  Gene Name: decorin
  ENSP ID: ENSP00000448853
  MOD_RES (1)..(1): Any amino acid
XDFCPPGHNTKKASYSGVSLFSNPVQYWEIQPSTFRCVYVRSAIQLGNYKKK

SEQ ID NO: 23356 - protein, 98 aa, Homo sapiens; identical to SEQ ID NO: 23353
  Payload ID: 4647
  Gene Symbol: DCN
  Gene Name: decorin
  ENSP ID: ENSP00000448857

SEQ ID NO: 23357 - protein, 174 aa, Homo sapiens
  Payload ID: 4647
  Gene Symbol: DCN
  Gene Name: decorin
  ENSP ID: ENSP00000449014
MKATIILLLLAQVSWAGPFQQRGLFDFMLEDEASGIGPEVPDDRDFEPSLGPVCPFRCQCHLRVVQCSDLGLDKVPKDLPPDTTLLDLQNNKITEIKDGDFKNLKNLHALILVNNKISKVSPGAFTPLVKLERLYLSKNQLKELPEKMPKTLQELRAHENEITKVRKVTFNGLN

SEQ ID NO: 23358 - protein, 95 aa, Homo sapiens
  Payload ID: 4647
  Gene Symbol: DCN
  Gene Name: decorin
  ENSP ID: ENSP00000449408
  MOD_RES (1)..(1): Any amino acid
XKISRVDAASLKGLNNLAKLGLSFNSISAVDNGSLANTPHLRELHLDNNKLTRVPGGLAEHKYIQVMQSHCLCEEYPKSKTPTLLMGCWEAGSSS

SEQ ID NO: 23359 - protein, 119 aa, Homo sapiens
  Payload ID: 4647
  Gene Symbol: DCN
  Gene Name: decorin
  ENSP ID: ENSP00000449438
MKATIILLLLAQVSWAGPFQQRGLFDFMLEDEASGIGPEVPDDRDFEPSLGPVCPFRCQCHLRVVQCSDLGLDKVPKDLPPDTTLLDLQNNKITEIKDGDFKNLKNLHALILVNNKISK

SEQ ID NO: 23360 - protein, 179 aa, Homo sapiens
  Payload ID: 4647
  Gene Symbol: DCN
  Gene Name: decorin
  ENSP ID: ENSP00000449782
MKATIILLLLAQVSWAGPFQQRGLFDFMLEDEASGIGPEVPDDRDFEPSLGPVCPFRCQCHLRVVQCSDLGLDKVPKDLPPDTTLLDLQNNKITEIKDGDFKNLKNLHALILVNNKISKVSPGAFTPLVKLERLYLSKNQLKELPEKMPKTLQELRAHENEITKVRKVTFNGLNQMIVI

SEQ ID NO: 23361 - protein, 1865 aa, Homo sapiens
  Payload ID: 4648
  Gene Symbol: DOCK1
  Gene Name: dedicator of cytokinesis 1
  Uniprot ID: Q14185
  ENSP ID: ENSP00000280333
MTRWVPTKREEKYGVAFYNYDARGADELSLQIGDTVHILETYEGWYRGYTLRKKSKKGIFPASYIHLKEAIVEGKGQHETVIPGDLPLIQEVTTTLREWSTIWRQLYVQDNREMFRSVRHMIYDLIEWRSQILSGTLPQDELKELKKKVTAKIDYGNRILDLDLVVRDEDGNILDPELTSTISLFRAHEIASKQVEERLQEEKSQKQNIDINRQAKFAATPSLALFVNLKNVVCKIGEDAEVLMSLYDPVESKFISENYLVRWSSSGLPKDIDRLHNLRAVFTDLGSKDLKREKISFVCQIVRVGRMELRDNNTRKLTSGLRRPFGVAVMDVTDIINGKVDDEDKQHFIPFQPVAGENDFLQTVINKVIAAKEVNHKGQGLWVTLKLLPGDIHQIRKEFPHLVDRTTAVARKTGFPEIIMPGDVRNDIYVTLVQGDFDKGSKTTAKNVEVTVSVYDEDGKRLEHVIFPGAGDEAISEYKSVIYYQVKQPRWFETVKVAIPIEDVNRSHLRFTFRHRSSQDSKDKSEKIFALAFVKLMRYDGTTLRDGEHDLIVYKAEAKKLEDAATYLSLPSTKAELEEKGHSATGKSMQSLGSCTISKDSFQISTLVCSTKLTQNVDLLGLLKWRSNTSLLQQNLRQLMKVDGGEVVKFLQDTLDALFNIMMENSESETFDTLVFDALVFIIGLIADRKFQHFNPVLETYIKKHFSATLAYTKLTKVLKNYVDGAEKPGVNEQLYKAMKALESIFKFIVRSRILFNQLYENKGEADFVESLLQLFRSINDMMSSMSDQTVRVKGAALKYLPTIVNDVKLVFDPKELSKMFTEFILNVPMGLLTIQKLYCLIEIVHSDLFTQHDCREILLPMMTDQLKYHLERQEDLEACCQLLSHILEVLYRKDVGPTQRHVQIIMEKLLRTVNRTVISMGRDSELIGNFVACMTAILRQMEDYHYAHLIKTFGKMRTDVVDFLMETFIMFKNLIGKNVYPFDWVIMNMVQNKVFLRAINQYADMLNKKFLDQANFELQLWNNYFHLAVAFLTQESLQLENFSSAKRAKILNKYGDMRRQIGFEIRDMWYNLGQHKIKFIPEMVGPILEMTLIPETELRKATIPIFFDMMQCEFHSTRSFQMFENEIITKLDHEVEGGRGDEQYKVLFDKILLEHCRKHKYLAKTGETFVKLVVRLMERLLDYRTIMHDENKENRMSCTVNVLNFYKEIEREEMYIRYLYKLCDLHKECDNYTEAAYTLLLHAKLLKWSEDVCVAHLTQRDGYQATTQGQLKEQLYQEIIHYFDKGKMWEEAIALGKELAEQYENEMFDYEQLSELLKKQAQFYENIVKVIRPKPDYFAVGYYGQGFPTFLRGKVFIYRGKEYERREDFEARLLTQFPNAEKMKTTSPPGDDIKNSPGQYIQCFTVKPKLDLPPKFHRPVSEQIVSFYRVNEVQRFEYSRPIRKGEKNPDNEFANMWIERTIYTTAYKLPGILRWFEVKSVFMVEISPLENAIETMQLTNDKINSMVQQHLDDPSLPINPLSMLLNGIVDPAVMGGFANYEKAFFTDRYLQEHPEAHEKIEKLKDLIAWQIPFLAEGIRIHGDKVTEALRPFHERMEACFKQLKEKVEKEYGVRIMPSSLDDRRGSRPRSMVRSFTMPSSSRPLSVASVSSLSSDSTPSRPGSDGFALEPLLPKKMHSRSQDKLDKDDLEKEKKDKKKEKRNSKHQEIFEKEFKPTDISLQQSEAVILSETISPLRPQRPKSQVMNVIGSERRFSVSPSSPSSQQTPPPVTPRAKLSFSMQSSLELNGMTGADVADVPPPLPLKGSVADYGNLMENQDLLGSPTPPPPPPHQRHLPPPLPSKTPPPPPPKTTRKQASVDSGIVQ

SEQ ID NO: 23362 - protein, 1886 aa, Homo sapiens
  Payload ID: 4648
  Gene Symbol: DOCK1
  Gene Name: dedicator of cytokinesis 1
  ENSP ID: ENSP00000485033
MTRWVPTKREEKYGVAFYNYDARGADELSLQIGDTVHILETYEGWYRGYTLRKKSKKGIFPASYIHLKEAIVEGKGQHETVIPGDLPLIQEVTTTLREWSTIWRQLYVQDNREMFRSVRHMIYDLIEWRSQILSGTLPQDELKELKKKVTAKIDYGNRILDLDLVVRDEDGNILDPELTSTISLFRAHEIASKQVEERLQEEKSQKQNIDINRQAKFAATPSLALFVNLKNVVCKIGEDAEVLMSLYDPVESKFISENYLVRWSSSGLPKDIDRLHNLRAVFTDLGSKDLKREKISFVCQIVRVGRMELRDNNTRKLTSGLRRPFGVAVMDVTDIINGKVDDEDKQHFIPFQPLALDDAIRHKPLNMSSRFSPRVAGENDFLQTVINKVIAAKEVNHKGQGLWVTLKLLPGDIHQIRKEFPHLVDRTTAVARKTGFPEIIMPGDVRNDIYVTLVQGDFDKGSKTTAKNVEVTVSVYDEDGKRLEHVIFPGAGDEAISEYKSVIYYQVKQPRWFETVKVAIPIEDVNRSHLRFTFRHRSSQDSKDKSEKIFALAFVKLMRYDGTTLRDGEHDLIVYKAEAKKLEDAATYLSLPSTKAELEEKGHSATGKSMQSLGSCTISKDSFQISTLVCSTKLTQNVDLLGLLKWRSNTSLLQQNLRQLMKVDGGEVVKFLQDTLDALFNIMMENSESETFDTLVFDALVFIIGLIADRKFQHFNPVLETYIKKHFSATLAYTKLTKVLKNYVDGAEKPGVNEQLYKAMKALESIFKFIVRSRILFNQLYENKGEADFVESLLQLFRSINDMMSSMSDQTVRVKGAALKYLPTIVNDVKLVFDPKELSKMFTEFILNVPMGLLTIQKLYCLIEIVHSDLFTQHDCREILLPMMTDQLKYHLERQEDLEACCQLLSHILEVLYRKDVGPTQRHVQIIMEKLLRTVNRTVISMGRDSELIGNFVACMTAILRQMEDYHYAHLIKTFGKMRTDVVDFLMETFIMFKNLIGKNVYPFDWVIMNMVQNKVFLRAINQYADMLNKKFLDQANFELQLWNNYFHLAVAFLTQESLQLENFSSAKRAKILNKYGDMRRQIGFEIRDMWYNLGQHKIKFIPEMVGPILEMTLIPETELRKATIPIFFDMMQCEFHSTRSFQMFENEIITKLDHEVEGGRGDEQYKVLFDKILLEHCRKHKYLAKTGETFVKLVVRLMERLLDYRTIMHDENKENRMSCTVNVLNFYKEIEREEMYIRYLYKLCDLHKECDNYTEAAYTLLLHAKLLKWSEDVCVAHLTQRDGYQATTQGQLKEQLYQEIIHYFDKGKMWEEAIALGKELAEQYENEMFDYEQLSELLKKQAQFYENIVKVIRPKPDYFAVGYYGQGFPTFLRGKVFIYRGKEYERREDFEARLLTQFPNAEKMKTTSPPGDDIKNSPGQYIQCFTVKPKLDLPPKFHRPVSEQIVSFYRVNEVQRFEYSRPIRKGEKNPDNEFANMWIERTIYTTAYKLPGILRWFEVKSVFMVEISPLENAIETMQLTNDKINSMVQQHLDDPSLPINPLSMLLNGIVDPAVMGGFANYEKAFFTDRYLQEHPEAHEKIEKLKDLIAWQIPFLAEGIRIHGDKVTEALRPFHERMEACFKQLKEKVEKEYGVRIMPSSLDDRRGSRPRSMVRSFTMPSSSRPLSVASVSSLSSDSTPSRPGSDGFALEPLLPKKMHSRSQDKLDKDDLEKEKKDKKKEKRNSKHQEIFEKEFKPTDISLQQSEAVILSETISPLRPQRPKSQVMNVIGSERRFSVSPSSPSSQQTPPPVTPRAKLSFSMQSSLELNGMTGADVADVPPPLPLKGSVADYGNLMENQDLLGSPTPPPPPPHQRHLPPPLPSKTPPPPPPKTTRKQASVDSGIVQ

SEQ ID NO: 23363 - protein, 2186 aa, Homo sapiens
  Payload ID: 4649
  Gene Symbol: DOCK10
  Gene Name: dedicator of cytokinesis 10
  Uniprot ID: Q96BY6
  ENSP ID: ENSP00000258390
MAGERTRRFTRSLLRPGQAAELRHSAASAAAVAVSSRQQQRQEKPRLLEPLDYETVIEELEKTYRNDPLQDLLFFPSDDFSAATVSWDIRTLYSTVPEDAEHKAENLLVKEACKFYSSQWHVVNYKYEQYSGDIRQLPRAEYKPEKLPSHSFEIDHEDADKDEDTTSHSSSKGGGGAGGTGVFKSGWLYKGNFNSTVNNTVTVRSFKKRYFQLTQLPDNSYIMNFYKDEKISKEPKGCIFLDSCTGVVQNNRLRKYAFELKMNDLTYFVLAAETESDMDEWIHTLNRILQISPEGPLQGRRSTELTDLGLDSLDNSVTCECTPEETDSSENNLHADFAKYLTETEDTVKTTRNMERLNLFSLDPDIDTLKLQKKDLLEPESVIKPFEEKAAKRIMIICKALNSNLQGCVTENENDPITNIEPFFVSVALYDLRDSRKISADFHVDLNHAAVRQMLLGASVALENGNIDTITPRQSEEPHIKGLPEEWLKFPKQAVFSVSNPHSEIVLVAKIEKVLMGNIASGAEPYIKNPDSNKYAQKILKSNRQFCSKLGKYRMPFAWAVRSVFKDNQGNVDRDSRFSPLFRQESSKISTEDLVKLVSDYRRADRISKMQTIPGSLDIAVDNVPLEHPNCVTSSFIPVKPFNMMAQTEPTVEVEEFVYDSTKYCRPYRVYKNQIYIYPKHLKYDSQKCFNKARNITVCIEFKNSDEESAKPLKCIYGKPGGPLFTSAAYTAVLHHSQNPDFSDEVKIELPTQLHEKHHILFSFYHVTCDINAKANAKKKEALETSVGYAWLPLMKHDQIASQEYNIPIATSLPPNYLSFQDSASGKHGGSDIKWVDGGKPLFKVSTFVVSTVNTQDPHVNAFFQECQKREKDMSQSPTSNFIRSCKNLLNVEKIHAIMSFLPIILNQLFKVLVQNEEDEITTTVTRVLTDIVAKCHEEQLDHSVQSYIKFVFKTRACKERTVHEELAKNVTGLLKSNDSTTVKHVLKHSWFFFAIILKSMAQHLIDTNKIQLPRPQRFPESYQNELDNLVMVLSDHVIWKYKDALEETRRANHSVARFLKRCFTFMDRGYVFKMVNNYISMFSSGDLKTLCQYKFDFLQEVCQHEHFIPLCLPIRSANIPDPLTPSESTQELHASDMPEYSVTNEFCRKHFLIGILLREVGFALQEDQDVRHLALAVLKNLMAKHSFDDRYREPRKQAQIASLYMPLYGMLLDNMPRIYLKDLYPFTVNTSNQGSRDDLSTNGGFQSQTAIKHANSVDTSFSKDVLNSIAAFSSIAISTVNHADSRASLASLDSNPSTNEKSSEKTDNCEKIPRPLSLIGSTLRFDKLDQAETRSLLMCFLHIMKTISYETLIAYWQRAPSPEVSDFFSILDVCLQNFRYLGKRNIIRKIAAAFKFVQSTQNNGTLKGSNPSCQTSGLLSQWMHSTSSHEGHKQHRSQTLPIIRGKNALSNPKLLQMLDNTMTSNSNEIDIVHHVDTEANIATEVCLTILDLLSLFTQTHQRQLQQCDCQNSLMKRVFDTYMLFFQVNQSATALKHVFASLRLFVCKFPSAFFQGPADLCGSFCYEVLKCCNHRSRSTQTEASALLYFFMRKNFEFNKQKSIVRSHLQLIKAVSQLIADAGIGGSRFQHSLAITNNFANGDKQMKNSNFPAEVKDLTKRIRTVLMATAQMKEHEKDPEMLVDLQYSLANSYASTPELRRTWLESMAKIHARNGDLSEAAMCYIHIAALIAEYLKRKGYWKVEKICTASLLSEDTHPCDSNSLLTTPSGGSMFSMGWPAFLSITPNIKEEGAMKEDSGMQDTPYNENILVEQLYMCVEFLWKSERYELIADVNKPIIAVFEKQRDFKKLSDLYYDIHRSYLKVAEVVNSEKRLFGRYYRVAFYGQGFFEEEEGKEYIYKEPKLTGLSEISQRLLKLYADKFGADNVKIIQDSNKVNPKDLDPKYAYIQVTYVTPFFEEKEIEDRKTDFEMHHNINRFVFETPFTLSGKKHGGVAEQCKRRTILTTSHLFPYVKKRIQVISQSSTELNPIEVAIDEMSKKVSELNQLCTMEEVDMIRLQLKLQGSVSVKVNAGPMAYARAFLEETNAKKYPDNQVKLLKEIFRQFADACGQALDVNERLIKEDQLEYQEELRSHYKDMLSELSTVMNEQITGRDDLSKRGVDQTCTRVISKATPALPTVSISSSAEV

SEQ ID NO: 23364 - protein, 2180 aa, Homo sapiens
  Payload ID: 4649
  Gene Symbol: DOCK10
  Gene Name: dedicator of cytokinesis 10
  Uniprot ID: Q96BY6
  ENSP ID: ENSP00000386694
MSFRGKVFKREPSEFWKKRRTVRRVNQEEIHRFSSQEKPRLLEPLDYETVIEELEKTYRNDPLQDLLFFPSDDFSAATVSWDIRTLYSTVPEDAEHKAENLLVKEACKFYSSQWHVVNYKYEQYSGDIRQLPRAEYKPEKLPSHSFEIDHEDADKDEDTTSHSSSKGGGGAGGTGVFKSGWLYKGNFNSTVNNTVTVRSFKKRYFQLTQLPDNSYIMNFYKDEKISKEPKGCIFLDSCTGVVQNNRLRKYAFELKMNDLTYFVLAAETESDMDEWIHTLNRILQISPEGPLQGRRSTELTDLGLDSLDNSVTCECTPEETDSSENNLHADFAKYLTETEDTVKTTRNMERLNLFSLDPDIDTLKLQKKDLLEPESVIKPFEEKAAKRIMIICKALNSNLQGCVTENENDPITNIEPFFVSVALYDLRDSRKISADFHVDLNHAAVRQMLLGASVALENGNIDTITPRQSEEPHIKGLPEEWLKFPKQAVFSVSNPHSEIVLVAKIEKVLMGNIASGAEPYIKNPDSNKYAQKILKSNRQFCSKLGKYRMPFAWAVRSVFKDNQGNVDRDSRFSPLFRQESSKISTEDLVKLVSDYRRADRISKMQTIPGSLDIAVDNVPLEHPNCVTSSFIPVKPFNMMAQTEPTVEVEEFVYDSTKYCRPYRVYKNQIYIYPKHLKYDSQKCFNKARNITVCIEFKNSDEESAKPLKCIYGKPGGPLFTSAAYTAVLHHSQNPDFSDEVKIELPTQLHEKHHILFSFYHVTCDINAKANAKKKEALETSVGYAWLPLMKHDQIASQEYNIPIATSLPPNYLSFQDSASGKHGGSDIKWVDGGKPLFKVSTFVVSTVNTQDPHVNAFFQECQKREKDMSQSPTSNFIRSCKNLLNVEKIHAIMSFLPIILNQLFKVLVQNEEDEITTTVTRVLTDIVAKCHEEQLDHSVQSYIKFVFKTRACKERTVHEELAKNVTGLLKSNDSTTVKHVLKHSWFFFAIILKSMAQHLIDTNKIQLPRPQRFPESYQNELDNLVMVLSDHVIWKYKDALEETRRANHSVARFLKRCFTFMDRGYVFKMVNNYISMFSSGDLKTLCQYKFDFLQEVCQHEHFIPLCLPIRSANIPDPLTPSESTQELHASDMPEYSVTNEFCRKHFLIGILLREVGFALQEDQDVRHLALAVLKNLMAKHSFDDRYREPRKQAQIASLYMPLYGMLLDNMPRIYLKDLYPFTVNTSNQGSRDDLSTNGGFQSQTAIKHANSVDTSFSKDVLNSIAAFSSIAISTVNHADSRASLASLDSNPSTNEKSSEKTDNCEKIPRPLSLIGSTLRFDKLDQAETRSLLMCFLHIMKTISYETLIAYWQRAPSPEVSDFFSILDVCLQNFRYLGKRNIIRKIAAAFKFVQSTQNNGTLKGSNPSCQTSGLLSQWMHSTSSHEGHKQHRSQTLPIIRGKNALSNPKLLQMLDNTMTSNSNEIDIVHHVDTEANIATEVCLTILDLLSLFTQTHQRQLQQCDCQNSLMKRVFDTYMLFFQVNQSATALKHVFASLRLFVCKFPSAFFQGPADLCGSFCYEVLKCCNHRSRSTQTEASALLYFFMRKNFEFNKQKSIVRSHLQLIKAVSQLIADAGIGGSRFQHSLAITNNFANGDKQMKNSNFPAEVKDLTKRIRTVLMATAQMKEHEKDPEMLVDLQYSLANSYASTPELRRTWLESMAKIHARNGDLSEAAMCYIHIAALIAEYLKRKGYWKVEKICTASLLSEDTHPCDSNSLLTTPSGGSMFSMGWPAFLSITPNIKEEGAMKEDSGMQDTPYNENILVEQLYMCVEFLWKSERYELIADVNKPIIAVFEKQRDFKKLSDLYYDIHRSYLKVAEVVNSEKRLFGRYYRVAFYGQGFFEEEEGKEYIYKEPKLTGLSEISQRLLKLYADKFGADNVKIIQDSNKVNPKDLDPKYAYIQVTYVTPFFEEKEIEDRKTDFEMHHNINRFVFETPFTLSGKKHGGVAEQCKRRTILTTSHLFPYVKKRIQVISQSSTELNPIEVAIDEMSKKVSELNQLCTMEEVDMIRLQLKLQGSVSVKVNAGPMAYARAFLEETNAKKYPDNQVKLLKEIFRQFADACGQALDVNERLIKEDQLEYQEELRSHYKDMLSELSTVMNEQITGRDDLSKRGVDQTCTRVISKATPALPTVSISSSAEV

SEQ ID NO: 23365 - protein, 142 aa, Homo sapiens [sequence omitted]

SEQ ID NO: 23366 - protein, 380 aa, Homo sapiens
  Payload ID: 4649
  Gene Symbol: DOCK10
  Gene Name: dedicator of cytokinesis 10
  ENSP ID: ENSP00000395178
  MOD_RES (1)..(1): Any amino acid
XLCLPIRSANIPDPLTPSESTQELHASDMPEYSVTNEFCRKHFLIGILLREVGFALQEDQDVRHLALAVLKNLMAKHSFDDRYREPRKQAQIASLYMPLYGMLLDNMPRIYLKDLYPFTVNTSNQGSRDDLSTNGGFQSQTAIKHANSVDTSFSKDVLNSIAVNHADSRASLASLDSNPSTNEKSSEKTDNCEKIPRPLSLIGSTLRFDKLDQAETRSLLMCFLHIMKTISYETLIAYWQRAPSPEVSDFFSILDVCLQNFRYLGKRNIIRKIAAAFKFVQSTQNNGTLKGSNPSCQTSGLLSQWMHSTSSHEGHKQHRSQTLPIIRGKNALSNPKLLQMLDNTMTSNSNEIDIVHHVDTEANIATEVCLTILDLLSLFT

SEQ ID NO: 23367 - protein, 42 aa, Homo sapiens
  Payload ID: 4649
  Gene Symbol: DOCK10
  Gene Name: dedicator of cytokinesis 10
  ENSP ID: ENSP00000397389
MAGERTRRFTRSLLRPGQAAELRHSAASAAAVAVSSRQQQRH

SEQ ID NO: 23368 - protein, 190 aa, Homo sapiens
  Payload ID: 4649
  Gene Symbol: DOCK10
  Gene Name: dedicator of cytokinesis 10
  ENSP ID: ENSP00000437947
  MOD_RES (1)..(1): Any amino acid
XYDIHRSYLKVAEVVNSEKRLFGRYYRVAFYGQAVGFFEEEEGKEYIYKEPKLTGLSEISQRLLKLYADKFGADNVKIIQDSNKVNPKDLDPKYAYIQVTYVTPFFEEKEIEDRKTDFEMHHNINRFVFETPFTLSGKKHGGVAEQCKRRTILTTSHLFPYVKKRIQVISQSSTELNPIEVAIDEMSKKV

SEQ ID NO: 23369 - protein, 2073 aa, Homo sapiens
  Payload ID: 4650
  Gene Symbol: DOCK11
  Gene Name: dedicator of cytokinesis 11
  Uniprot ID: Q5JSL3
  ENSP ID: ENSP00000276202
MAEVRKFTKRLSKPGTAAELRQSVSEAVRGSVVLEKAKVVEPLDYENVIAQRKTQIYSDPLRDLLMFPMEDISISVIGRQRRTVQSTVPEDAEKRAQSLFVKECIKTYSTDWHVVNYKYEDFSGDFRMLPCKSLRPEKIPNHVFEIDEDCEKDEDSSSLCSQKGGVIKQGWLHKANVNSTITVTMKVFKRRYFYLTQLPDGSYILNSYKDEKNSKESKGCIYLDACIDVVQCPKMRRHAFELKMLDKYSHYLAAETEQEMEEWLITLKKIIQINTDSLVQEKKETVETAQDDETSSQGKAENIMASLERSMHPELMKYGRETEQLNKLSRGDGRQNLFSFDSEVQRLDFSGIEPDIKPFEEKCNKRFLVNCHDLTFNILGQIGDNAKGPPTNVEPFFINLALFDVKNNCKISADFHVDLNPPSVREMLWGSSTQLASDGSPKGSSPESYIHGIAESQLRYIQQGIFSVTNPHPEIFLVARIEKVLQGNITHCAEPYIKNSDPVKTAQKVHRTAKQVCSRLGQYRMPFAWAARPIFKDTQGSLDLDGRFSPLYKQDSSKLSSEDILKLLSEYKKPEKTKLQIIPGQLNITVECVPVDLSNCITSSYVPLKPFEKNCQNITVEVEEFVPEMTKYCYPFTIYKNHLYVYPLQLKYDSQKTFAKARNIAVCVEFRDSDESDASALKCIYGKPAGSVFTTNAYAVVSHHNQNPEFYDEIKIELPIHLHQKHHLLFTFYHVSCEINTKGTTKKQDTVETPVGFAWVPLLKDGRIITFEQQLPVSANLPPGYLNLNDAESRRQCNVDIKWVDGAKPLLKIKSHLESTIYTQDLHVHKFFHHCQLIQSGSKEVPGELIKYLKCLHAMEIQVMIQFLPVILMQLFRVLTNMTHEDDVPINCTMVLLHIVSKCHEEGLDSYLRSFIKYSFRPEKPSAPQAQLIHETLATTMIAILKQSADFLSINKLLKYSWFFFEIIAKSMATYLLEENKIKLPRGQRFPETYHHVLHSLLLAIIPHVTIRYAEIPDESRNVNYSLASFLKRCLTLMDRGFIFNLINDYISGFSPKDPKVLAEYKFEFLQTICNHEHYIPLNLPMAFAKPKLQRVQDSNLEYSLSDEYCKHHFLVGLLLRETSIALQDNYEIRYTAISVIKNLLIKHAFDTRYQHKNQQAKIAQLYLPFVGLLLENIQRLAGRDTLYSCAAMPNSASRDEFPCGFTSPANRGSLSTDKDTAYGSFQNGHGIKREDSRGSLIPEGATGFPDQGNTGENTRQSSTRSSVSQYNRLDQYEIRSLLMCYLYIVKMISEDTLLTYWNKVSPQELINILILLEVCLFHFRYMGKRNIARVHDAWLSKHFGIDRKSQTMPALRNRSGVMQARLQHLSSLESSFTLNHSSTTTEADIFHQALLEGNTATEVSLTVLDTISFFTQCFKTQLLNNDGHNPLMKKVFDIHLAFLKNGQSEVSLKHVFASLRAFISKFPSAFFKGRVNMCAAFCYEVLKCCTSKISSTRNEASALLYLLMRNNFEYTKRKTFLRTHLQIIIAVSQLIADVALSGGSRFQESLFIINNFANSDRPMKATAFPAEVKDLTKRIRTVLMATAQMKEHEKDPEMLIDLQYSLAKSYASTPELRKTWLDSMAKIHVKNGDFSEAAMCYVHVAALVAEFLHRKKLFPNGCSAFKKITPNIDEEGAMKEDAGMMDVHYSEEVLLELLEQCVDGLWKAERYEIISEISKLIVPIYEKRREFEKLTQVYRTLHGAYTKILEVMHTKKRLLGTFFRVAFYGQSFFEEEDGKEYIYKEPKLTGLSEISLRLVKLYGEKFGTENVKIIQDSDKVNAKELDPKYAHIQVTYVKPYFDDKELTERKTEFERNHNISRFVFEAPYTLSGKKQGCIEEQCKRRTILTTSNSFPYVKKRIPINCEQQINLKPIDVATDEIKDKTAELQKLCSSTDVDMIQLQLKLQGCVSVQVNAGPLAYARAFLNDSQASKYPPKKVSELKDMFRKFIQACSIALELNERLIKEDQVEYHEGLKSNFRDMVKELSDIIHEQILQEDTMHSPWMSNTLHVFCAISGTSSDRGYGSPRYAEV

SEQ ID NO: 23370 - protein, 2077 aa, Homo sapiens
  Payload ID: 4650
  Gene Symbol: DOCK11
  Gene Name: dedicator of cytokinesis 11
  ENSP ID: ENSP00000276204
MAEVRKFTKRLSKPGTAAELRQSVSEAVRGSVVLEKAKVVEPLDYENVIAQRKTQIYSDPLRDLLMFPMEDISISVIGRQRRTVQSTVPEDAEKRAQSLFVKECIKTYSTDWHVVNYKYEDFSGDFRMLPCKSLRPEKIPNHVFEIDEDCEKDEDSSSLCSQKGGVIKQGWLHKANVNSTITVTMKVFKRRYFYLTQLPDGSYILNSYKDEKNSKESKGCIYLDACIDVVQCPKMRRHAFELKMLDKYSHYLAAETEQEMEEWLITLKKIIQINTDSLVQEKKETVETAQDDETSSQGKAENIMASLERSMHPELMKYGRETEQLNKLSRGDGRQNLFSFDSEVQRLDFSGIEPDIKPFEEKCNKRFLVNCHDLTFNILGQIGDNAKGPPTNVEPFFINLALFDVKNNCKISADFHVDLNPPSVREMLWGSSTQLASDGSPKGSSPESYIHGIAESQLRYIQQGIFSVTNPHPEIFLVARIEKVLQGNITHCAEPYIKNSDPVKTAQKVHRTAKQVCSRLGQYRMPFAWAARPIFKDTQGSLDLDGRFSPLYKQDSSKLSSEDILKLLSEYKKPEKTKLQIIPGQLNITVECVPVDLSNCITSSYVPLKPFEKNCQNITVEVEEFVPEMTKYCYPFTIYKNHLYVYPLQLKYDSQKTFAKARNIAVCVEFRDSDESDASALKCIYGKPAGSVFTTNAYAVVSHHNQNPEFYDEIKIELPIHLHQKHHLLFTFYHVSCEINTKGTTKKQDTVETPVGFAWVPLLKDGRIITFEQQLPVSANLPPGYLNLNDAESRRQCNVDIKWVDGAKPLLKIKSHLESTIYTQDLHVHKFFHHCQLIQSGSKEVPGELIKYLKCLHAMEIQVMIQFLPVILMQLFRVLTNMTHEDDVPINCTMVLLHIVSKCHEEGLDSYLRSFIKYSFRPEKPSAPQAQLIHETLATTMIAILKQSADFLSINKLLKYSWFFFEIIAKSMATYLLEENKIKLPRGQRFPETYHHVLHSLLLAIIPHVTIRYAEIPDESRNVNYSLASFLKRCLTLMDRGFIFNLINDYISGFSPKDPKVLAEYKFEFLQTICNHEHYIPLNLPMAFAKPKLQRVQDSNLEYSLSDEYCKHHFLVGLLLRETSIALQDNYEIRYTAISVIKNLLIKHAFDTRYQHKNQQAKIAQLYLPFVGLLLENIQRLAGRDTLYSCAAMPNSASRDEFPCGFTSPANRGSLSTDKDTAYGSFQNGHGIKREDSRGSLIPEGATGFPDQGNTGENTRQSSTRSSVSQYNRLDQYEIRSLLMCYLYIVKMISEDTLLTYWNKVSPQELINILILLEVCLFHFRYMGKRNIARVHDAWLSKHFGIDRKSQTMPALRNRSGVMQARLQHLSSLESSFTLNHSSTTTEADIFHQALLEGNTATEVSLTVLDTISFFTQCFKTQLLNNDGHNPLMKKVFDIHLAFLKNGQSEVSLKHVFASLRAFISKFPSAFFKGRVNMCAAFCYEVLKCCTSKISSTRNEASALLYLLMRNNFEYTKRKTFLRTHLQIIIAVSQLIADVALSGGSRFQESLFIINNFANSDRPMKATAFPAEVKDLTKRIRTVLMATAQMKEHEKDPEMLIDLQYSLAKSYASTPELRKTWLDSMAKIHVKNGDFSEAAMCYVHVAALVAEFLHRKKLFPNGCSAFKKITPNIDEEGAMKEDAGMMDVHYSEEVLLELLEQCVDGLWKAERYEIISEISKLIVPIYEKRREFEKLTQVYRTLHGAYTKILEVMHTKKRLLGTFFRVAFYGQSFFEEEDGKEYIYKEPKLTGLSEISLRLVKLYGEKFGTENVKIIQDSDKVNAKELDPKYAHIQVTYVKPYFDDKELTERKTEFERNHNISRFVFEAPYTLSGKKQGCIEEQCKRRTILTTSNSFPYVKKRIPINCEQQINLKPIDVATDEIKDKTAELQKLCSSTDVDMIQLQLKLQGCVSVQVNAGPLAYARAFLNDSQASKYPPKKVSELKDMFRKFIQACSIALELNERLIKEDQVEYHEGLKSNFRDMVKELSDIIHEQASIRILQEDTMHSPWMSNTLHVFCAISGTSSDRGYGSPRYAEV

SEQ ID NO: 23371 - protein, 1902 aa, Homo sapiens
  Payload ID: 4650
  Gene Symbol: DOCK11
  Gene Name: dedicator of cytokinesis 11
  ENSP ID: ENSP00000487829
MKVFKRRYFYLTQLPDGSYILNSYKDEKNSKESKGCIYLDACIDVVQCPKMRRHAFELKMLDKYSHYLAAETEQEMEEWLITLKKIIQINTDSLVQEKKETVETAQDDETSSQGKAENIMASLERSMHPELMKYGRETEQLNKLSRGDGRQNLFSFDSEVQRLDFSGIEPDIKPFEEKCNKRFLVNCHDLTFNILGQIGDNAKGPPTNVEPFFINLALFDVKNNCKISADFHVDLNPPSVREMLWGSSTQLASDGSPKGSSPESYIHGIAESQLRYIQQGIFSVTNPHPEIFLVARIEKVLQGNITHCAEPYIKNSDPVKTAQKVHRTAKQVCSRLGQYRMPFAWAARPIFKDTQGSLDLDGRFSPLYKQDSSKLSSEDILKLLSEYKKPEKTKLQIIPGQLNITVECVPVDLSNCITSSYVPLKPFEKNCQNITVEVEEFVPEMTKYCYPFTIYKNHLYVYPLQLKYDSQKTFAKARNIAVCVEFRDSDESDASALKCIYGKPAGSVFTTNAYAVVSHHNQNPEFYDEIKIELPIHLHQKHHLLFTFYHVSCEINTKGTTKKQDTVETPVGFAWVPLLKDGRIITFEQQLPVSANLPPGYLNLNDAESRRQCNVDIKWVDGAKPLLKIKSHLESTIYTQDLHVHKFFHHCQLIQSGSKEVPGELIKYLKCLHAMEIQVMIQFLPVILMQLFRVLTNMTHEDDVPINCTMVLLHIVSKCHEEGLDSYLRSFIKYSFRPEKPSAPQAQLIHETLATTMIAILKQSADFLSINKLLKYSWFFFEIIAKSMATYLLEENKIKLPRGQRFPETYHHVLHSLLLAIIPHVTIRYAEIPDESRNVNYSLASFLKRCLTLMDRGFIFNLINDYISGFSPKDPKVLAEYKFEFLQTICNHEHYIPLNLPMAFAKPKLQRVQDFFSFAVDRLTSVDSNLEYSLSDEYCKHHFLVGLLLRETSIALQDNYEIRYTAISVIKNLLIKHAFDTRYQHKNQQAKIAQLYLPFVGLLLENIQRLAGRDTLYSCAAMPNSASRDEFPCGFTSPANRGSLSTDKDTAYGSFQNGHGIKREDSRGSLIPEGATGFPDQGNTGENTRQSSTRSSVSQYNRLDQYEIRSLLMCYLYIVKMISEDTLLTYWNKVSPQELINILILLEVCLFHFRYMGKRNIARVHDAWLSKHFGIDRKSQTMPALRNRSGVMQARLQHLSSLESSFTLNHSSTTTEADIFHQALLEGNTATEVSLTVLDTISFFTQCFKTQLLNNDGHNPLMKKVFDIHLAFLKNGQSEVSLKHVFASLRAFISKFPSAFFKGRVNMCAAFCYEVLKCCTSKISSTRNEASALLYLLMRNNFEYTKRKTFLRTHLQIIIAVSQLIADVALSGGSRFQESLFIINNFANSDRPMKATAFPAEVKDLTKRIRTVLMATAQMKEHEKDPEMLIDLQYSLAKSYASTPELRKTWLDSMAKIHVKNGDFSEAAMCYVHVAALVAEFLHRKKLFPNGCSAFKKITPNIDEEGAMKEDAGMMDVHYSEEVLLELLEQCVDGLWKAERYEIISEISKLIVPIYEKRREFEKLTQVYRTLHGAYTKILEVMHTKKRLLGTFFRVAFYGQSFFEEEDGKEYIYKEPKLTGLSEISLRLVKLYGEKFGTENVKIIQDSDKVNAKELDPKYAHIQVTYVKPYFDDKELTERKTEFERNHNISRFVFEAPYTLSGKKQGCIEEQCKRRTILTTSNSFPYVKKRIPINCEQQINLKPIDVATDEIKDKTAELQKLCSSTDVDMIQLQLKLQGCVSVQVNAGPLAYARAFLNDSQASKYPPKKVSELKDMFRKFIQACSIALELNERLIKEDQVEYHEGLKSNFRDMVKELSDIIHEQILQEDTMHSPWMSNTLHVFCAISGTSSDRGYGSPRYAEV

SEQ ID NO: 23372 - protein, 40 aa, Homo sapiens
  Payload ID: 4650
  Gene Symbol: DOCK11
  Gene Name: dedicator of cytokinesis 11
  ENSP ID: ENSP00000488503
  MOD_RES (1)..(1): Any amino acid
XALELNERLIKEDQVEYHEGLKSNFRDMVKELSDIIHEQL

SEQ ID NO: 23373 - protein, 1830 aa, Homo sapiens
  Payload ID: 4651
  Gene Symbol: DOCK2
  Gene Name: dedicator of cytokinesis 2
  Uniprot ID: Q92608
  ENSP ID: ENSP00000256935
MAPWRKADKERHGVAIYNFQGSGAPQLSLQIGDVVRIQETCGDWYRGYLIKHKMLQGIFPKSFIHIKEVTVEKRRNTENIIPAEIPLAQEVTTTLWEWGSIWKQLYVASKKERFLQVQSMMYDLMEWRSQLLSGTLPKDELKELKQKVTSKIDYGNKILELDLIVRDEDGNILDPDNTSVISLFHAHEEATDKITERIKEEMSKDQPDYAMYSRISSSPTHSLYVFVRNFVCRIGEDAELFMSLYDPNKQTVISENYLVRWGSRGFPKEIEMLNNLKVVFTDLGNKDLNRDKIYLICQIVRVGKMDLKDTGAKKCTQGLRRPFGVAVMDITDIIKGKAESDEEKQHFIPFHPVTAENDFLHSLLGKVIASKGDSGGQGLWVTMKMLVGDIIQIRKDYPHLVDRTTVVARKLGFPEIIMPGDVRNDIYITLLQGDFDKYNKTTQRNVEVIMCVCAEDGKTLPNAICVGAGDKPMNEYRSVVYYQVKQPRWMETVKVAVPIEDMQRIHLRFMFRHRSSLESKDKGEKNFAMSYVKLMKEDGTTLHDGFHDLVVLKGDSKKMEDASAYLTLPSYRHHVENKGATLSRSSSSVGGLSVSSRDVFSISTLVCSTKLTQNVGLLGLLKWRMKPQLLQENLEKLKIVDGEEVVKFLQDTLDALFNIMMEHSQSDEYDILVFDALIYIIGLIADRKFQHFNTVLEAYIQQHFSATLAYKKLMTVLKTYLDTSSRGEQCEPILRTLKALEYVFKFIVRSRTLFSQLYEGKEQMEFEESMRRLFESINNLMKSQYKTTILLQVAALKYIPSVLHDVEMVFDAKLLSQLLYEFYTCIPPVKLQKQKVQSMNEIVQSNLFKKQECRDILLPVITKELKELLEQKDDMQHQVLERKYCVELLNSILEVLSYQDAAFTYHHIQEIMVQLLRTVNRTVITMGRDHILISHFVACMTAILNQMGDQHYSFYIETFQTSSELVDFLMETFIMFKDLIGKNVYPGDWMAMSMVQNRVFLRAINKFAETMNQKFLEHTNFEFQLWNNYFHLAVAFITQDSLQLEQFSHAKYNKILNKYGDMRRLIGFSIRDMWYKLGQNKICFIPGMVGPILEMTLIPEAELRKATIPIFFDMMLCEYQRSGDFKKFENEIILKLDHEVEGGRGDEQYMQLLESILMECAAEHPTIAKSVENFVNLVKGLLEKLLDYRGVMTDESKDNRMSCTVNLLNFYKDNNREEMYIRYLYKLRDLHLDCDNYTEAAYTLLLHTWLLKWSDEQCASQVMQTGQQHPQTHRQLKETLYETIIGYFDKGKMWEEAISLCKELAEQYEMEIFDYELLSQNLIQQAKFYESIMKILRPKPDYFAVGYYGQGFPSFLRNKVFIYRGKEYERREDFQMQLMTQFPNAEKMNTTSAPGDDVKNAPGQYIQCFTVQPVLDEHPRFKNKPVPDQIINFYKSNYVQRFHYSRPVRRGTVDPENEFASMWIERTSFVTAYKLPGILRWFEVVHMSQTTISPLENAIETMSTANEKILMMINQYQSDETLPINPLSMLLNGIVDPAVMGGFAKYEKAFFTEEYVRDHPEDQDKLTHLKDLIAWQIPFLGAGIKIHEKRVSDNLRPFHDRMEECFKNLKMKVEKEYGVREMPDFDDRRVGRPRSMLRSYRQMSIISLASMNSDCSTPSKPTSESFDLELASPKTPRVEQEEPISPGSTLPEVKLRRSKKRTKRSSVVFADEKAAAESDLKRLSRKHEFMSDTNLSEHAAIPLKASVLSQMSFASQSMPTIPALALSVAGIPGLDEANTSPRLSQTFLQLSDGDKKTLTRKKVNQFFKTMLASKSAEEGKQIPDSLSTDL

SEQ ID NO: 23374 - protein, 55 aa, Homo sapiens
  Payload ID: 4651
  Gene Symbol: DOCK2
  Gene Name: dedicator of cytokinesis 2
  ENSP ID: ENSP00000393451
LWNNYFHLAVAFITQDSLQLEQFSHAKYNKILNKSEQNLLHPRHGRTYIRDDTYP

SEQ ID NO: 23375 - protein, 161 aa, Homo sapiens
  Payload ID: 4651
  Gene Symbol: DOCK2
  Gene Name: dedicator of cytokinesis 2
  ENSP ID: ENSP00000428841
KYIPSVLHDVEMVFDAKLLSQLLYEFYTCIPPVKLQKQKVQSMNEIVQSNLFKKQECRDILLPVITKELKELLEQKDDMQHQVLERKYCVELLNSILEVLSYQDAAFTYHHIQEIMVQLLRTVNRTVITMGRDHILIDAADDRTEPIGCYGVLNVIVSAKG

SEQ ID NO: 23376 - protein, 1031 aa, Homo sapiens
  Payload ID: 4651
  Gene Symbol: DOCK2
  Gene Name: dedicator of cytokinesis 2
  ENSP ID: ENSP00000428850
MAPWRKADKERHGVAIYNFQGSGAPQLSLQIGDVVRIQETCGDWYRGYLIKHKMLQGIFPKSFIHIKEVTVEKRRNTENIIPAEIPLAQEVTTTLWEWGSIWKQLYVASKKERFLQVQSMMYDLMEWRSQLLSGTLPKDELKELKQKVTSKIDYGNKILELDLIVRDEDGNILDPDNTSVISLFHAHEEATDKITERIKEEMSKDQPDYAMYSRISSSPTHSLYVFVRNFVCRIGEDAELFMSLYDPNKQTVISENYLVRWGSRGFPKEIEMLNNLKVVFTDLGNKDLNRDKIYLICQIVRVGKMDLKDTGAKKCTQGLRRPFGVAVMDITDIIKGKAESDEEKQHFIPFHPVTAENDFLHSLLGKVIASKGDSGGQGLWVTMKMLVGDIIQIRKDYPHLVDRTTVVARKLGFPEIIMPGDVRNDIYITLLQGDFDKYNKTTQRNVEVIMCVCAEDGKTLPNAICVGAGDKPMNEYRSVVYYQVKQPRWMETVKVAVPIEDMQRIHLRFMFRHRSSLESKDKGEKNFAMSYVKLMKEDGTTLHDGFHDLVVLKGDSKKMEDASAYLTLPSYRHHVENKGATLSRSSSSVGGLSVSSRDVFSISTLVCSTKLTQNVGLLGLLKWRMKPQLLQENLEKLKIVDGEEVVKFLQDTLDALFNIMMEHSQSDEYDILVFDALIYIIGLIADRKFQHFNTVLEAYIQQHFSATLAYKKLMTVLKTYLDTSSRGEQCEPILRTLKALEYVFKFIVRSRTLFSQLYEGKEQMEFEESMRRLFESINNLMKSQYKTTILLQVAALKYIPSVLHDVEMVFDAKLLSQLLYEFYTCIPPVKLQKQKVQSMNEIVQSNLFKKQECRDILLPVITKELKELLEQKDDMQHQVLERKYCVELLNSILEVLSYQDAAFTYHHIQEIMVQLLRTVNRTVITMGRDHILISHFVACMTAILNQMGDQHYSFYIETFQTSSELVDFLMETFIMFKDLIGKNVYPGDWMAMSMVQNRVFLRAINKFAETMNQKFLEHTNFEFQGFSRTGM

SEQ ID NO: 23377 - protein, 1322 aa, Homo sapiens
  Payload ID: 4651
  Gene Symbol: DOCK2
  Gene Name: dedicator of cytokinesis 2
  ENSP ID: ENSP00000429283
MSIAPLCTIKSNSHAGWKQSRWLSLLKTCRGSICDSCFDIGHLWNGDSKKMEDASAYLTLPSYRHHVENKGATLSRSSSSVGGLSVSSRDVFSISTLVCSTKLTQNVGLLGLLKWRMKPQLLQENLEKLKIVDGEEVVKFLQDTLDALFNIMMEHSQSDEYDILVFDALIYIIGLIADRKFQHFNTVLEAYIQQHFSATLAYKKLMTVLKTYLDTSSRGEQCEPILRTLKALEYVFKFIVRSRTLFSQLYEGKEQMEFEESMRRLFESINNLMKSQYKTTILLQVAALKYIPSVLHDVEMVFDAKLLSQLLYEFYTCIPPVKLQKQKVQSMNEIVQSNLFKKQECRDILLPVITKELKELLEQKDDMQHQVLERKYCVELLNSILEVLSYQDAAFTYHHIQEIMVQLLRTVNRTVITMGRDHILISHFVACMTAILNQMGDQHYSFYIETFQTSSELVDFLMETFIMFKDLIGKNVYPGDWMAMSMVQNRVFLRAINKFAETMNQKFLEHTNFEFQLWNNYFHLAVAFITQDSLQLEQFSHAKYNKILNKYGDMRRLIGFSIRDMWYKLGQNKICFIPGMVGPILEMTLIPEAELRKATIPIFFDMMLCEYQRSGDFKKFENEIILKLDHEVEGGRGDEQYMQLLESILMECAAEHPTIAKSVENFVNLVKGLLEKLLDYRGVMTDESKDNRMSCTVNLLNFYKDNNREEMYIRYLYKLRDLHLDCDNYTEAAYTLLLHTWLLKWSDEQCASQVMQTGQQHPQTHRQLKETLYETIIGYFDKGKMWEEAISLCKELAEQYEMEIFDYELLSQNLIQQAKFYESIMKILRPKPDYFAVGYYGQGFPSFLRNKVFIYRGKEYERREDFQMQLMTQFPNAEKMNTTSAPGDDVKNAPGQYIQCFTVQPVLDEHPRFKNKPVPDQIINFYKSNYVQRFHYSRPVRRGTVDPENEFASMWIERTSFVTAYKLPGILRWFEVVHMSQTTISPLENAIETMSTANEKILMMINQYQSDETLPINPLSMLLNGIVDPAVMGGFAKYEKAFFTEEYVRDHPEDQDKLTHLKDLIAWQIPFLGAGIKIHEKRVSDNLRPFHDRMEECFKNLKMKVEKEYGVREMPDFDDRRVGRPRSMLRSYRQMSIISLASMNSDCSTPSKPTSESFDLELASPKTPRVEQEEPISPGSTLPEVKLRRSKKRTKRSSVVFADEKAAAESDLKRLSRKHEFMSDTNLSEHAAIPLKASVLSQMSFASQSMPTIPALALSVAGIPGLDEANTSPRLSQTFLQLSDGDKKTLTRKKVNQFFKTMLASKSAEEGKQIPDSLSTDL

SEQ ID NO: 23378 - protein, 335 aa, Homo sapiens
  Payload ID: 4651
  Gene Symbol: DOCK2
  Gene Name: dedicator of cytokinesis 2
  ENSP ID: ENSP00000438827
MCVCAEDGKTLPVAVPIEDMQRIHLRFMFRHRSSLESKDKGEKNFAMSYVKLMKEDGTTLHDGFHDLVVLKGDSKKMEDASAYLTLPSYRHHVENKGATLSRSSSSVGGLSVSSRDVFSISTLVCSTKLTQNVGLLGLLKWRMKPQLESMRRLFESINNLMKSQYKTTILLQVAALKYIPSVLHDVEMVFDAKLLSQLLYEFYTCIPPVKLQKQKVQSMNEIVQSNLFKKQECRDILLPVITKELKELLEQKDDMQHQVLERKYCVELLNSILEVLSYQDAAFTYHHIQEIMVQLLRTVNRTVITMGRDHILIGACCNCGFPSSTPHSLIQWLWG

SEQ ID NO: 23379 - protein, 2030 aa, Homo sapiens
  Payload ID: 4652
  Gene Symbol: DOCK3
  Gene Name: dedicator of cytokinesis 3
  Uniprot ID: Q8IZD9
  ENSP ID: ENSP00000266037
MWTPTEEEKYGVVICSFRGSVPQGLVLEIGETVQILEKCEGWYRGVSTKKPNVKGIFPANYIHLKKAIVSNRGQYETVVPLEDSIVTEVTATLQEWASLWKQLYVKHKVDLFYKLRHVMNELIDLRRQLLSGHLTQDQVREVKRHITVRLDWGNEHLGLDLVPRKDFEVVDSDQISVSDLYKMHLSSRQSVQQSTSQVDTMRPRHGETCRMPVPHHFFLSLKSFTYNTIGEDTDVFFSLYDMREGKQISERFLVRLNKNGGPRNPEKIERMCALFTDLSSKDMKRDLYIVAHVIRIGRMLLNDSKKGPPHLHYRRPYGCAVLSILDVLQSLTEVKEEKDFVLKVYTCNNESEWSQIHENIIRKSSAKYSAPSASHGLIISLQLLRGDMEQIRRENPMIFNRGLAITRKLGFPDVIMPGDIRNDLYLTLEKGDFERGGKSVQKNIEVTMYVLYADGEILKDCISLGSGEPNRSSYHSFVLYHSNSPRWGEIIKLPIPIDRFRGSHLRFEFRHCSTKDKGEKKLFGFAFSTLMRDDGTTLSDDIHELYVYKCDENSTFNNHALYLGLPCCKEDYNGCPNIPSSLIFQRSTKESFFISTQLSSTKLTQNVDLLALLKWKAFPDRIMDVLGRLRHVSGEEIVKFLQDILDTLFVILDDNTEKYGLLVFQSLVFIINLLRDIKYFHFRPVMDTYIQKHFAGALAYKELIRCLKWYMDCSAELIRQDHIQEAMRALEYLFKFIVQSRILYSRATCGMEEEQFRSSIQELFQSIRFVLSLDSRNSETLLFTQAALLNSFPTIFDELLQMFTVQEVAEFVRGTLGSMPSTVHIGQSMDVVKLQSIARTVDSRLFSFSESRRILLPVVLHHIHLHLRQQKELLICSGILGSIFSIVKTSSLEADVMEEVEMMVESLLDVLLQTLLTIMSKSHAQEAVRGQRCPQCTAEITGEYVSCLLSLLRQMCDTHFQHLLDNFQSKDELKEFLLKIFCVFRNLMKMSVFPRDWMVMRLLTSNIIVTTVQYLSSALHKNFTETDFDFKVWNSYFSLAVLFINQPSLQLEIITSAKRKKILDKYGDMRVMMAYELFSMWQNLGEHKIHFIPGMIGPFLGVTLVPQPEVRNIMIPIFHDMMDWEQRKNGNFKQVEAELIDKLDSMVSEGKGDESYRELFSLLTQLFGPYPSLLEKVEQETWRETGISFVTSVTRLMERLLDYRDCMKGEETENKKIGCTVNLMNFYKSEINKEEMYIRYIHKLCDMHLQAENYTEAAFTLLLYCELLQWEDRPLREFLHYPSQTEWQRKEGLCRKIIHYFNKGKSWEFGIPLCRELACQYESLYDYQSLSWIRKMEASYYDNIMEQQRLEPEFFRVGFYGRKFPFFLRNKEYVCRGHDYERLEAFQQRMLSEFPQAVAMQHPNHPDDAILQCDAQYLQIYAVTPIPDYVDVLQMDRVPDRVKSFYRVNNVRKFRYDRPFHKGPKDKENEFKSLWIERTTLTLTHSLPGISRWFEVERRELVEVSPLENAIQVVENKNQELRSLISQYQHKQVHGNINLLSMCLNGVIDAAVNGGIARYQEAFFDKDYINKHPGDAEKITQLKELMQEQVHVLGVGLAVHEKFVHPEMRPLHKKLIDQFQMMRASLYHEFPGLDKLSPACSGTSTPRGNVLASHSPMSPESIKMTHRHSPMNLMGTGRHSSSSLSSHASSEAGNMVMLGDGSMGDAPEDLYHHMQLAYPNPRYQGSVTNVSVLSSSQASPSSSSLSSTHSAPSQMITSAPSSARGSPSLPDKYRHAREMMLLLPTYRDRPSSAMYPAAILENGQPPNFQRALFQQVVGACKPCSDPNLSVAEKGHYSLHFDAFHHPLGDTPPALPARTLRKSPLHPIPASPTSPQSGLDGSNSTLSGSASSGVSSLSESNFGHSSEAPPRTDTMDSMPSQAWNADEDLEPPYLPVHYSLSESAVLDSIKAQPCRSHSAPGCVIPQDPMDPPALPPKPYHPRLPALEHDEGVLLREETERPRGLHRKAPLPPGSAKEEQARMAWEHGRGEQ

SEQ ID NO: 23380 - protein, 46 aa, Homo sapiens
  Payload ID: 4653
  Gene Symbol: DOCK4
  Gene Name: dedicator of cytokinesis 4
  ENSP ID: ENSP00000393486
MKMHSTESLLKKIERETWRESGVSLIATVTRLMERLLDYRTSIRLN

SEQ ID NO: 23381 - protein, 1999 aa, Homo sapiens
  Payload ID: 4653
  Gene Symbol: DOCK4
  Gene Name: dedicator of cytokinesis 4
  ENSP ID: ENSP00000397412
  MOD_RES (1)..(1): Any amino acid
XIASFRGTVPYGLSLEIGDTVQILEKCDGWYRGFALKNPNIKGIFPSSYVHLKNACVKNKGQFEMVIPTEDSVITEMTSTLRDWGTMWKQLYVRNEGDLFHRLWHIMNEILDLRRQVLVGHLTHDRMKDVKRHITARLDWGNEQLGLDLVPRKEYAMVDPEDISITELYRLMEHRHRKKDTPVQASSHHLFVQMKSLMCSNLGEELEVIFSLFDSKENRPISERFFLRLNRNGLPKAPDKPERHCSLFVDLGSSELRKDIYITVHIIRIGRMGAGEKKNACSVQYRRPFGCAVLSIADLLTGETKDDLILKVYMCNTESEWYQIHENIIKKLNARYNLTGSNAGLAVSLQLLHGDIEQIRREYSSVFSHGVSITRKLGFSNIIMPGEMRNDLYITIERGEFEKGGKSVARNVEVTMFIVDSSGQTLKDFISFGSGEPPASEYHSFVLYHNNSPRWSELLKLPIPVDKFRGAHIRFEFRHCSTKEKGEKKLFGFSFVPLMQEDGRTLPDGTHELIVHKCEENTNLQDTTRYLKLPFSKGIFLGNNNQAMKATKESFCITSFLCSTKLTQNGDMLDLLKWRTHPDKITGCLSKLKEIDGSEIVKFLQDTLDTLFGILDENSQKYGSKVFDSLVHIINLLQDSKFHHFKPVMDTYIESHFAGALAYRDLIKVLKWYVDRITEAERQEHIQEVLKAQEYIFKYIVQSRRLFSLATGGQNEEEFRCCIQELLMSVRFFLSQESKGSGALSQSQAVFLSSFPAVYSELLKLFDVREVANLVQDTLGSLPTILHVDDSLQAIKLQCIGKTVESQLYTNPDSRYILLPVVLHHLHIHLQEQKDLIMCARILSNVFCLIKKNSSEKSVLEEIDVIVASLLDILLRTILEITSRPQPSSSAMRFQFQDVTRTGFLNRESSHGSTTLSTFSVCADTYGKVPMTSRHTGEFVACLLSLLRQMTDRHYQQLLDSFNTKEELRDFLLQIFTVFRILIRPEMFPKDWTVMRLVANNVIITTVLYLSDALRKNFLNENFDYKIWDSYFYLAVIFINQLCLQLEMFTPSKKKKVLEKYGDMRVTMGCEIFSMWQNLGEHKLHFIPALIGPFLEVTLIPQPDLRNVMIPIFHDMMDWEQRRSGNFKQVEAKLIDKLDSLMSEGKGDETYRELFNSIIPLFGPYPSLLKKIERETWRESGVSLIATVTRLMERLLDYRDCMKMGEVDGKKIGCTVSLLNFYKTELNKEEMYIRYIHKLYDLHLKAQNFTEAAYTLLLYDELLEWSDRPLREFLTYPMQTEWQRKEHLHLTIIQNFDRGKCWENGIILCRKIAEQYESYYDYRNLSKMRMMEASLYDKIMDQQRLEPEFFRVGFYGKKFPFFLRNKEFVCRGHDYERLEAFQQRMLNEFPHAIAMQHANQPDETIFQAEAQYLQIYAVTPIPESQEVLQREGVPDNIKSFYKVNHIWKFRYDRPFHKGTKDKENEFKSLWVERTSLYLVQSLPGISRWFEVEKREVVEMSPLENAIEVLENKNQQLKTLISQCQTRQMQNINPLTMCLNGVIDAAVNGGVSRYQEAFFVKEYILSHPEDGEKIARLRELMLEQAQILEFGLAVHEKFVPQDMRPLHKKLVDQFFVMKSSLGIQEFSACMQASPVHFPNGSPRVCRNSAPASVSPDGTRVIPRRSPLSYPAVNRYSSSSLSSQASAEVSNITGQSESSDEVFNMQPSPSTSSLSSTHSASPNVTSSAPSSARASPLLSDKHKHSRENSCLSPRERPCSAIYPTPVEPSQRMLFNHIGDGALPRSDPNLSAPEKAVNPTPSSWSLDSGKEAKNMSDSGKLISPPVPPRPTQTASPARHTTSVSPSPAGRSPLKGSVQSFTPSPVEYHSPGLISNSPVLSGSYSSGISSLSRCSTSETSGFENQVNEQSAPLPVPVPVPVPSYGGEEPVRKESKTPPPYSVYERTLRRPVPLPHSLSIPVTSEPPALPPKPLAARSSHLENGARRTDPGPRPRPLPRKVSQL

SEQ ID NO: 23382 - protein, 131 aa, Homo sapiens
  Payload ID: 4653
  Gene Symbol: DOCK4
  Gene Name: dedicator of cytokinesis 4
  ENSP ID: ENSP00000403504
MFQVEAKLIDKLDSLMSEGKGDETYRELFNSIIPLFGPYPSLLKKIERETWRESGVSLIATVTRLMERLLDYRDCMKMGEVDGKKIGCTVSLLNFYKTELNKEEMYIRYIHKLYDLHLKAQNFTEAAYTLL

SEQ ID NO: 23383 - protein, 1966 aa, Homo sapiens
  Payload ID: 4653
  Gene Symbol: DOCK4
  Gene Name: dedicator of cytokinesis 4
  Uniprot ID: Q8N1I0
  ENSP ID: ENSP00000404179
MWIPTEHEKYGVVIASFRGTVPYGLSLEIGDTVQILEKCDGWYRGFALKNPNIKGIFPSSYVHLKNACVKNKGQFEMVIPTEDSVITEMTSTLRDWGTMWKQLYVRNEGDLFHRLWHIMNEILDLRRQVLVGHLTHDRMKDVKRHITARLDWGNEQLGLDLVPRKEYAMVDPEDISITELYRLMEHRHRKKDTPVQASSHHLFVQMKSLMCSNLGEELEVIFSLFDSKENRPISERFFLRLNRNGLPKAPDKPERHCSLFVDLGSSELRKDIYITVHIIRIGRMGAGEKKNACSVQYRRPFGCAVLSIADLLTGETKDDLILKVYMCNTESEWYQIHENIIKKLNARYNLTGSNAGLAVSLQLLHGDIEQIRREYSSVFSHGVSITRKLGFSNIIMPGEMRNDLYITIERGEFEKGGKSVARNVEVTMFIVDSSGQTLKDFISFGSGEPPASEYHSFVLYHNNSPRWSELLKLPIPVDKFRGAHIRFEFRHCSTKEKGEKKLFGFSFVPLMQEDGRTLPDGTHELIVHKCEENTNLQDTTRYLKLPFSKGIFLGNNNQAMKATKESFCITSFLCSTKLTQNGDMLDLLKWRTHPDKITGCLSKLKEIDGSEIVKFLQDTLDTLFGILDENSQKYGSKVFDSLVHIINLLQDSKFHHFKPVMDTYIESHFAGALAYRDLIKVLKWYVDRITEAERQEHIQEVLKAQEYIFKYIVQSRRLFSLATGGQNEEEFRCCIQELLMSVRFFLSQESKGSGALSQSQAVFLSSFPAVYSELLKLFDVREVANLVQDTLGSLPTILHVDDSLQAIKLQCIGKTVESQLYTNPDSRYILLPVVLHHLHIHLQEQKDLIMCARILSNVFCLIKKNSSEKSVLEEIDVIVASLLDILLRTILEITSRPQPSSSAMRFQFQDVTGEFVACLLSLLRQMTDRHYQQLLDSFNTKEELRDFLLQIFTVFRILIRPEMFPKDWTVMRLVANNVIITTVLYLSDALRKNFLNENFDYKIWDSYFYLAVIFINQLCLQLEMFTPSKKKKVLEKYGDMRVTMGCEIFSMWQNLGEHKLHFIPALIGPFLEVTLIPQPDLRNVMIPIFHDMMDWEQRRSGNFKQVEAKLIDKLDSLMSEGKGDETYRELFNSILLKKIERETWRESGVSLIATVTRLMERLLDYRDCMKMGEVDGKKIGCTVSLLNFYKTELNKEEMYIRYIHKLYDLHLKAQNFTEAAYTLLLYDELLEWSDRPLREFLTYPMQTEWQRKEHLHLTIIQNFDRGKCWENGIILCRKIAEQYESYYDYRNLSKMRMMEASLYDKIMDQQRLEPEFFRVGFYGKKFPFFLRNKEFVCRGHDYERLEAFQQRMLNEFPHAIAMQHANQPDETIFQAEAQYLQIYAVTPIPESQEVLQREGVPDNIKSFYKVNHIWKFRYDRPFHKGTKDKENEFKSLWVERTSLYLVQSLPGISRWFEVEKREVVEMSPLENAIEVLENKNQQLKTLISQCQTRQMQNINPLTMCLNGVIDAAVNGGVSRYQEAFFVKEYILSHPEDGEKIARLRELMLEQAQILEFGLAVHEKFVPQDMRPLHKKLVDQFFVMKSSLGIQEFSACMQASPVHFPNGSPRVCRNSAPASVSPDGTRVIPRRSPLSYPAVNRYSSSSLSSQASAEVSNITGQSESSDEVFNMQPSPSTSSLSSTHSASPNVTSSAPSSARASPLLSDKHKHSRENSCLSPRERPCSAIYPTPVEPSQRMLFNHIGDGALPRSDPNLSAPEKAVNPTPSSWSLDSGKEAKNMSDSGKLISPPVPPRPTQTASPARHTTSVSPSPAGRSPLKGSVQSFTPSPVEYHSPGLISNSPVLSGSYSSGISSLSRCSTSETSGFENQVNEQSAPLPVPVPVPVPSYGGEEPVRKESKTPPPYSVYERTLRRPVPLPHSLSIPVTSEPPALPPKPLAARSSHLENGARRTDPGPRPRPLPRKVSQL

SEQ ID NO: 23384 - protein, 192 aa, Homo sapiens
  Payload ID: 4653
  Gene Symbol: DOCK4
  Gene Name: dedicator of cytokinesis 4
  ENSP ID: ENSP00000406298
MKMHSTESLLKKIERETWRESGVSLIATVTRLMERLLDYRDCMKMGEVDGKKIGCTVSLLNFYKTELNKEEMYIRYIHKLYDLHLKAQNFTEAAYTLLLYDELLEWSDRPLREFLTYPMQTEWQRKEHLHLTIIQNFDRGKCWENGIILCRKIAEQYESYYDYRNLSKMRMMEASLYDKIMDQQRLEPEFFR

SEQ ID NO: 23385 - protein, 188 aa, Homo sapiens
  Payload ID: 4653
  Gene Symbol: DOCK4
  Gene Name: dedicator of cytokinesis 4
  ENSP ID: ENSP00000406468
MKMHSTERIPLFGPYPSLLKKIERETWRESGVSLIATVTRLMERLLDYRDCMKMGEVDGKKIGCTVSLLNFYKTELNKEEMYIRYIHKLYDLHLKAQNFTEAAYTLLLYDELLEWSDRPLREFLTYPMQTEWQRKEHLHLTIIQNFDRGKCWENGIILCRKIAEQYESYYDYRNLSKMRMMEASLYDK

SEQ ID NO: 23386 - protein, 1975 aa, Homo sapiens
  Payload ID: 4653
  Gene Symbol: DOCK4
  Gene Name: dedicator of cytokinesis 4
  Uniprot ID: Q8N1I0
  ENSP ID: ENSP00000410746
MWIPTEHEKYGVVIASFRGTVPYGLSLEIGDTVQILEKCDGWYRGFALKNPNIKGIFPSSYVHLKNACVKNKGQFEMVIPTEDSVITEMTSTLRDWGTMWKQLYVRNEGDLFHRLWHIMNEILDLRRQVLVGHLTHDRMKDVKRHITARLDWGNEQLGLDLVPRKEYAMVDPEDISITELYRLMEHRHRKKDTPVQASSHHLFVQMKSLMCSNLGEELEVIFSLFDSKENRPISERFFLRLNRNGLPKAPDKPERHCSLFVDLGSSELRKDIYITVHIIRIGRMGAGEKKNACSVQYRRPFGCAVLSIADLLTGETKDDLILKVYMCNTESEWYQIHENIIKKLNARYNLTGSNAGLAVSLQLLHGDIEQIRREYSSVFSHGVSITRKLGFSNIIMPGEMRNDLYITIERGEFEKGGKSVARNVEVTMFIVDSSGQTLKDFISFGSGEPPASEYHSFVLYHNNSPRWSELLKLPIPVDKFRGAHIRFEFRHCSTKEKGEKKLFGFSFVPLMQEDGRTLPDGTHELIVHKCEENTNLQDTTRYLKLPFSKGIFLGNNNQAMKATKESFCITSFLCSTKLTQNGDMLDLLKWRTHPDKITGCLSKLKEIDGSEIVKFLQDTLDTLFGILDENSQKYGSKVFDSLVHIINLLQDSKFHHFKPVMDTYIESHFAGALAYRDLIKVLKWYVDRITEAERQEHIQEVLKAQEYIFKYIVQSRRLFSLATGGQNEEEFRCCIQELLMSVRFFLSQESKGSGALSQSQAVFLSSFPAVYSELLKLFDVREVANLVQDTLGSLPTILHVDDSLQAIKLQCIGKTVESQLYTNPDSRYILLPVVLHHLHIHLQEQKDLIMCARILSNVFCLIKKNSSEKSVLEEIDVIVASLLDILLRTILEITSRPQPSSSAMRFQFQDVTGEFVACLLSLLRQMTDRHYQQLLDSFNTKEELRDFLLQIFTVFRILIRPEMFPKDWTVMRLVANNVIITTVLYLSDALRKNFLNENFDYKIWDSYFYLAVIFINQLCLQLEMFTPSKKKKVLEKYGDMRVTMGCEIFSMWQNLGEHKLHFIPALIGPFLEVTLIPQPDLRNVMIPIFHDMMDWEQRRSGNFKQVEAKLIDKLDSLMSEGKGDETYRELFNSIIPLFGPYPSLLKKIERETWRESGVSLIATVTRLMERLLDYRDCMKMGEVDGKKIGCTVSLLNFYKTELNKEEMYIRYIHKLYDLHLKAQNFTEAAYTLLLYDELLEWSDRPLREFLTYPMQTEWQRKEHLHLTIIQNFDRGKCWENGIILCRKIAEQYESYYDYRNLSKMRMMEASLYDKIMDQQRLEPEFFRVGFYGKKFPFFLRNKEFVCRGHDYERLEAFQQRMLNEFPHAIAMQHANQPDETIFQAEAQYLQIYAVTPIPESQEVLQREGVPDNIKSFYKVNHIWKFRYDRPFHKGTKDKENEFKSLWVERTSLYLVQSLPGISRWFEVEKREVVEMSPLENAIEVLENKNQQLKTLISQCQTRQMQNINPLTMCLNGVIDAAVNGGVSRYQEAFFVKEYILSHPEDGEKIARLRELMLEQAQILEFGLAVHEKFVPQDMRPLHKKLVDQFFVMKSSLGIQEFSACMQASPVHFPNGSPRVCRNSAPASVSPDGTRVIPRRSPLSYPAVNRYSSSSLSSQASAEVSNITGQSESSDEVFNMQPSPSTSSLSSTHSASPNVTSSAPSSARASPLLSDKHKHSRENSCLSPRERPCSAIYPTPVEPSQRMLFNHIGDGALPRSDPNLSAPEKAVNPTPSSWSLDSGKEAKNMSDSGKLISPPVPPRPTQTASPARHTTSVSPSPAGRSPLKGSVQSFTPSPVEYHSPGLISNSPVLSGSYSSGISSLSRCSTSETSGFENQVNEQSAPLPVPVPVPVPSYGGEEPVRKESKTPPPYSVYERTLRRPVPLPHSLSIPVTSEPPALPPKPLAARSSHLENGARRTDPGPRPRPLPRKVSQL

SEQ ID NO: 23387 - protein, 1389 aa, Homo sapiens
  Payload ID: 4653
  Gene Symbol: DOCK4
  Gene Name: dedicator of cytokinesis 4
  ENSP ID: ENSP00000412834
  MOD_RES (1)..(1): Any amino acid
XGIFLGNNNQAMKATKESFCITSFLCSTKLTQNGDMLDLLKWRTHPDKITGCLSKLKEIDGSEIVKFLQDTLDTLFGILDENSQKYGSKVFDSLVHIINLLQDSKFHHFKPVMDTYIESHFAGALAYRDLIKVLKWYVDRITEAERQEHIQEVLKAQEYIFKYIVQSRRLFSLATGGQNEEEFRCCIQELLMSVRFFLSQESKGSGALSQSQAVFLSSFPAVYSELLKLFDVREVANLVQDTLGSLPTILHVDDSLQAIKLQCIGKTVESQLYTNPDSRYILLPVVLHHLHIHLQEQKDLIMCARILSNVFCLIKKNSSEKSVLEEIDVIVASLLDILLRTILEITSRPQPSSSAMRFQFQDVTGEFVACLLSLLRQMTDRHYQQLLDSFNTKEELRDFLLQIFTVFRILIRPEMFPKDWTVMRLVANNVIITTVLYLSDALRKNFLNENFDYKIWDSYFYLAVIFINQLCLQLEMFTPSKKKKVLEKYGDMRVTMGCEIFSMWQNLGEHKLHFIPALIGPFLEVTLIPQPDLRNVMIPIFHDMMDWEQRRSGNFKQVEAKLIDKLDSLMSEGKGDETYRELFNSIIPLFGPYPSLLKKIERETWRESGVSLIATVTRLMERLLDYRDCMKMGEVDGKKIGCTVSLLNFYKTELNKEEMYIRYIHKLYDLHLKAQNFTEAAYTLLLYDELLEWSDRPLREFLTYPMQTEWQRKEHLHLTIIQNFDRGKCWENGIILCRKIAEQYESYYDYRNLSKMRMMEASLYDKIMDQQRLEPEFFRVGFYGKKFPFFLRNKEFVCRGHDYERLEAFQQRMLNEFPHAIAMQHANQPDETIFQAEAQYLQIYAVTPIPESQEVLQREGVPDNIKSFYKVNHIWKFRYDRPFHKGTKDKENEFKSLWVERTSLYLVQSLPGISRWFEVEKREVVEMSPLENAIEVLENKNQQLKTLISQCQTRQMQNINPLTMCLNGVIDAAVNGGVSRYQEAFFVKEYILSHPEDGEKIARLRELMLEQAQILEFGLAVHEKFVPQDMRPLHKKLVDQFFVMKSSLGIQEFSACMQASPVHFPNGSPRVCRNSAPASVSPDGTRVIPRRSPLSYPAVNRYSSSSLSSQASAEVSNITGQSESSDEVFNMQPSPSTSSLSSTHSASPNVTSSAPSSARASPLLSDKHKHSRENSCLSPRERPCSAIYPTPVEPSQRMLFNHIGDGALPRSDPNLSAPEKASPARHTTSVSPSPAGRSPLKGSVQSFTPSPVEYHSPGLISNSPVLSGSYSSGISSLSRCSTSETSGFENQVNEQSAPLPVPVPVPVPSYGGEEPVRKESKTPPPYSVYERTLRRPVPLPHSLSIPVTSEPPALPPKPLAARSSHLENGARRTDPGPRPRPLPRKVSQL

SEQ ID NO: 23388 - protein, 1094 aa, Homo sapiens
  Payload ID: 4653
  Gene Symbol: DOCK4
  Gene Name: dedicator of cytokinesis 4
  ENSP ID: ENSP00000440944
VIASFRGTVPYGLSLEIGDTVQILEKCDGWYRGFALKNPNIKGIFPSSYVHLKNACVKNKGQFEMVIPTEDSVITEMTSTLRDWGTMWKQLYVRNEGDLFHRLWHIMNEILDLRRQVLVGHLTHDRMKDVKRHITARLDWGNEQLGLDLVPRKEYAMVDPEDISITELYRLMEHRHRKKDTPVQASSHHLFVQMKSLMCSNLGEELEVIFSLFDSKENRPISERFFLRLNRNGLPKAPDKPERHCSLFVDLGSSELRKDIYITVHIIRIGRMGAGEKKNACSVQYRRPFGCAVLSIADLLTGETKDDLILKVYMCNTESEWYQIHENIIKKLNARYNLTGSNAGLAVSLQLLHGDIEQIRREYSSVFSHGVSITRKLGFSNIIMPGEMRNDLYITIERGEFEKGGKSVARNVEVTMFIVDSSGQTLKDFISFGSGEPPASEYHSFVLYHNNSPRWSELLKLPIPVDKFRGAHIRFEFRHCSTKEKGEKKLFGFSFVPLMQEDGRTLPDGTHELIVHKCEENTNLQDTTRYLKLPFSKGIFLGNNNQAMKATKESFCITSFLCSTKLTQNGDMLDLLKWRTHPDKITGCLSKLKEIDGSEIVKFLQDTLDTLFGILDENSQKYGSKVFDSLVHIINLLQDSKFHHFKPVMDTYIESHFAGALAYRDLIKVLKWYVDRITEAERQEHIQEVLKAQEYIFKYIVQSRRLFSLATGGQNEEEFRCCIQELLMSVRFFLSQESKGSGALSQSQAVFLSSFPAVYSELLKLFDVREVANLVQDTLGSLPTILHVDDSLQAIKLQCIGKTVESQLYTNPDSRYILLPVVLHHLHIHLQEQKDLIMCARILSNVFCLIKKNSSEKSVLEEIDVIVASLLDILLRTILEITSRPQPSSSAMRFQFQDVTGEFVACLLSLLRQMTDRHYQQLLDSFNTKEELRDFLLQIFTVFRILIRPEMFPKDWTVMRLVANNVIITTVLYLSDALRKNFLNENFDYKIWDSYFYLAVIFINQLCLQLEMFTPSKKKKVLEKYGDMRVTMGCEIFSMWQNLGEHKLHFIPALRQENRLNLGGGGCSEPRACHCTPAWATKRDCVSKKKEKKT

SEQ ID NO: 23389 - protein, 1870 aa, Homo sapiens
  Payload ID: 4654
  Gene Symbol: DOCK5
  Gene Name: dedicator of cytokinesis 5
  Uniprot ID: Q9H7D0
  ENSP ID: ENSP00000276440
MARWIPTKRQKYGVAIYNYNASQDVELSLQIGDTVHILEMYEGWYRGYTLQNKSKKGIFPETYIHLKEATVEDLGQHETVIPGELPLVQELTSTLREWAVIWRKLYVNNKLTLFRQLQQMTYSLIEWRSQILSGTLPKDELAELKKKVTAKIDHGNRMLGLDLVVRDDNGNILDPDETSTIALFKAHEVASKRIEEKIQEEKSILQNLDLRGQSIFSTIHTYGLYVNFKNFVCNIGEDAELFMALYDPDQSTFISENYLIRWGSNGMPKEIEKLNNLQAVFTDLSSMDLIRPRVSLVCQIVRVGHMELKEGKKHTCGLRRPFGVAVMDITDIIHGKVDDEEKQHFIPFQQIAMETYIRQRQLIMSPLITSHVIGENEPLTSVLNKVIAAKEVNHKGQGLWVSLKLLPGDLTQVQKNFSHLVDRSTAIARKMGFPEIILPGDVRNDIYVTLIHGEFDKGKKKTPKNVEVTMSVHDEEGKLLEKAIHPGAGYEGISEYKSVVYYQVKQPCWYETVKVSIAIEEVTRCHIRFTFRHRSSQETRDKSERAFGVAFVKLMNPDGTTLQDGRHDLVVYKGDNKKMEDAKFYLTLPGTKMEMEEKELQASKNLVTFTPSKDSTKDSFQIATLICSTKLTQNVDLLGLLNWRSNSQNIKHNLKKLMEVDGGEIVKFLQDTLDALFNIMMEMSDSETYDFLVFDALVFIISLIGDIKFQHFNPVLETYIYKHFSATLAYVKLSKVLNFYVANADDSSKTELLFAALKALKYLFRFIIQSRVLYLRFYGQSKDGDEFNNSIRQLFLAFNMLMDRPLEEAVKIKGAALKYLPSIINDVKLVFDPVELSVLFCKFIQSIPDNQLVRQKLNCMTKIVESTLFRQSECREVLLPLLTDQLSGQLDDNSNKPDHEASSQLLSNILEVLDRKDVGATAVHIQLIMERLLRRINRTVIGMNRQSPHIGSFVACMIALLQQMDDSHYSHYISTFKTRQDIIDFLMETFIMFKDLIGKNVYAKDWMVMNMTQNRVFLRAINQFAEVLTRFFMDQASFELQLWNNYFHLAVAFLTHESLQLETFSQAKRNKIVKKYGDMRKEIGFRIRDMWYNLGPHKIKFIPSMVGPILEVTLTPEVELRKATIPIFFDMMQCEFNFSGNGNFHMFENELITKLDQEVEGGRGDEQYKVLLEKLLLEHCRKHKYLSSSGEVFALLVSSLLENLLDYRTIIMQDESKENRMSCTVNVLNFYKEKKREDIYIRYLYKLRDLHRDCENYTEAAYTLLLHAELLQWSDKPCVPHLLQKDSYYVYTQQELKEKLYQEIISYFDKGKMWEKAIKLSKELAETYESKVFDYEGLGNLLKKRASFYENIIKAMRPQPEYFAVGYYGQGFPSFLRNKIFIYRGKEYERREDFSLRLLTQFPNAEKMTSTTPPGEDIKSSPKQYMQCFTVKPVMSLPPSYKDKPVPEQILNYYRANEVQQFRYSRPFRKGEKDPDNEFATMWIERTTYTTAYTFPGILKWFEVKQISTEEISPLENAIETMELTNERISNCVQQHAWDRSLSVHPLSMLLSGIVDPAVMGGFSNYEKAFFTEKYLQEHPEDQEKVELLKRLIALQMPLLTEGIRIHGEKLTEQLKPLHERLSSCFRELKEKVEKHYGVITLPPNLTERKQSRTGSIVLPYIMSSTLRRLSITSVTSSVVSTSSNSSDNAPSRPGSDGSILEPLLERRASSGARVEDLSLREENSENRISKFKRKDWSLSKSQVIAEKAPEPDLMSPTRKAQRPKSLQLMDNRLSPFHGSSPPQSTPLSPPPLTPKATRTLSSPSLQTDGIAATPVPPPPPPKSKPYEGSQRNSTELAPPLPVRREAKAPPPPPPKARKSGIPTSEPGSQ

SEQ ID NO: 23390 - protein, 83 aa, Homo sapiens
  Payload ID: 4654
  Gene Symbol: DOCK5
  Gene Name: dedicator of cytokinesis 5
  ENSP ID: ENSP00000387036
MARWIPTKRQKYGVAIYNYNASQDVELSLQIGDTVHILEMYEGWYRGYTLQNKSKKAIGSRTPTIPKSMDAQVSDIKWHSICI

SEQ ID NO: 23391 - protein, 1090 aa, Homo sapiens
  Payload ID: 4654
  Gene Symbol: DOCK5
  Gene Name: dedicator of cytokinesis 5
  ENSP ID: ENSP00000414125
  MOD_RES (1)..(1): Any amino acid
XVNPAEPRFAGPVHLQYHPHLWPLCELQELCLQHRGRCRVVYGPLRPRPVHFYQDLSSMDLIRPRVSLVCQIVRVGHMELKEGKKHTCGLRRPFGVAVMDITDIIHGKVDDEEKQHFIPFQQIAMETYIRQRQLIMSPLITSHVIGENEPLTSVLNKVIAAKEVNHKGQGLWVSLKLLPGDLTQVQKNFSHLVDRSTAIARKMGFPEIILPGDVRNDIYVTLIHGEFDKGKKKTPKNVEVTMSVHDEEGKLLEKAIHPGAGYEGISEYKSVVYYQVKQPCWYETVKVSIAIEEVTRCHIRFTFRHRSSQETRDKSERAFGVAFVKLMNPDGTTLQDGRHDLVVYKGDNKKMEDAKFYLTLPGTKMEMEEKELQASKNLVTFTPSKDSTKDSFQIATLICSTKLTQNVDLLGLLNWRSNSQNIKHNLKKLMEVDGGEIVKFLQDTLDALFNIMMEMSDSETYDFLVFDALVFIISLIGDIKFQHFNPVLETYIYKHFSATLAYVKLSKVLNFYVANADDSSKTELLFAALKALKYLFRFIIQSRVLYLRFYGQSKDGDEFNNSIRQLFLAFNMLMDRPLEEAVKIKGAALKYLPSIINDVKLVFDPVELSVLFCKFIQSIPDNQLVRQKLNCMTKIVESTLFRQSECREVLLPLLTDQLSGQLDDNSNKPDHEASSQLLSNILEVLDRKDVGATAVHIQLIMERLLRRINRTVIGMNRQSPHIGSFVACMIALLQQMDDSHYSHYISTFKTRQDIIDFLMETFIMFKDLIGKNVYAKDWMVMNMTQNRVFLRAINQFAEVLTRFFMDQASFELQLWNNYFHLAVAFLTHESLQLETFSQAKRNKIVKKYGDMRKEIGFRIRDMWYNLGPHKIKFIPSMVGPILEVTLTPEVELRKATIPIFFDMMQCEFNFSGNGNFHMFENELITKLDQEVEGGRGDEQYKVLLEKLLLEHCRKHKYLSSSGEVFALLVSSLLENLLDYRTIIMQDESKENRMSCTVNVLNFYKEKKREDIYIRYLYKLRDLHRDCENYTEAAYTLLLHAELLQVNGSESLFQQGGVQCPFRLNSIHFMILMGKNFIPGISFYTSFFSSF

SEQ ID NO: 23392 - protein, 138 aa, Homo sapiens
  Payload ID: 4654
  Gene Symbol: DOCK5
  Gene Name: dedicator of cytokinesis 5
  ENSP ID: ENSP00000428479
  MOD_RES (1)..(1): Any amino acid
XMEEKELQASKNLVTFTPSKDSTKDSFQIATLICSTKLTQNVDLLGLLNWRSNSQNIKHNLKKLMEVDGGEIVKFLQDTLDALFNIMMEMSDSETYDFLVFDALVFIISLIGDIKFQHFNPVLETYIYKHFSATLAYV

SEQ ID NO: 23393 - protein, 350 aa, Homo sapiens
  Payload ID: 4654
  Gene Symbol: DOCK5
  Gene Name: dedicator of cytokinesis 5
  Uniprot ID: Q9H7D0
  ENSP ID: ENSP00000429737
MARWIPTKRQKYGVAIYNYNASQDVELSLQIGDTVHILEMYEGWYRGYTLQNKSKKGIFPETYIHLKEATVEDLGQHETVIPGELPLVQELTSTLREWAVIWRKLYVNNKLTLFRQLQQMTYSLIEWRSQILSGTLPKDELAELKKKVTAKIDHGNRMLGLDLVVRDDNGNILDPDETSTIALFKAHEVASKRIEEKIQEEKSILQNLDLRGQSIFSTIHTYGLYVNFKNFVCNIGEDAELFMALYDPDQSTFISENYLIRWGSNGMPKEIEKLNNLQAVFTDLSSMDLIRPRVSLVCQIVRVGHMELKEGKKHTCGLRRPFGVAVMDITDIIHGKVDDEEKQHFIPFQQ

SEQ ID NO: 23394 - protein, 2047 aa, Homo sapiens
  Payload ID: 4655
  Gene Symbol: DOCK6
  Gene Name: dedicator of cytokinesis 6
  Uniprot ID: Q96HP0
  ENSP ID: ENSP00000294618
MAASERRAFAHKINRTVAAEVRKQVSRERSGSPHSSRRCSSSLGVPLTEVVEPLDFEDVLLSRPPDAEPGPLRDLVEFPADDLELLLQPRECRTTEPGIPKDEKLDAQVRAAVEMYIEDWVIVHRRYQYLSAAYSPVTTDTQRERQKGLPRQVFEQDASGDERSGPEDSNDSRRGSGSPEDTPRSSGASSIFDLRNLAADSLLPSLLERAAPEDVDRRNETLRRQHRPPALLTLYPAPDEDEAVERCSRPEPPREHFGQRILVKCLSLKFEIEIEPIFGILALYDVREKKKISENFYFDLNSDSMKGLLRAHGTHPAISTLARSAIFSVTYPSPDIFLVIKLEKVLQQGDISECCEPYMVLKEVDTAKNKEKLEKLRLAAEQFCTRLGRYRMPFAWTAVHLANIVSSAGQLDRDSDSEGERRPAWTDRRRRGPQDRASSGDDACSFSGFRPATLTVTNFFKQEAERLSDEDLFKFLADMRRPSSLLRRLRPVTAQLKIDISPAPENPHFCLSPELLHIKPYPDPRGRPTKEILEFPAREVYAPHTSYRNLLYVYPHSLNFSSRQGSVRNLAVRVQYMTGEDPSQALPVIFGKSSCSEFTREAFTPVVYHNKSPEFYEEFKLHLPACVTENHHLLFTFYHVSCQPRPGTALETPVGFTWIPLLQHGRLRTGPFCLPVSVDQPPPSYSVLTPDVALPGMRWVDGHKGVFSVELTAVSSVHPQDPYLDKFFTLVHVLEEGAFPFRLKDTVLSEGNVEQELRASLAALRLASPEPLVAFSHHVLDKLVRLVIRPPIISGQIVNLGRGAFEAMAHVVSLVHRSLEAAQDARGHCPQLAAYVHYAFRLPGTEPSLPDGAPPVTVQAATLARGSGRPASLYLARSKSISSSNPDLAVAPGSVDDEVSRILASKLLHEELALQWVVSSSAVREAILQHAWFFFQLMVKSMALHLLLGQRLDTPRKLRFPGRFLDDITALVGSVGLEVITRVHKDVELAEHLNASLAFFLSDLLSLVDRGFVFSLVRAHYKQVATRLQSSPNPAALLTLRMEFTRILCSHEHYVTLNLPCCPLSPPASPSPSVSSTTSQSSTFSSQAPDPKVTSMFELSGPFRQQHFLAGLLLTELALALEPEAEGAFLLHKKAISAVHSLLCGHDTDPRYAEATVKARVAELYLPLLSIARDTLPRLHDFAEGPGQRSRLASMLDSDTEGEGDIAGTINPSVAMAIAGGPLAPGSRASISQGPPTASRAGCALSAESSRTLLACVLWVLKNTEPALLQRWATDLTLPQLGRLLDLLYLCLAAFEYKGKKAFERINSLTFKKSLDMKARLEEAILGTIGARQEMVRRSRERSPFGNPENVRWRKSVTHWKQTSDRVDKTKDEMEHEALVEGNLATEASLVVLDTLEIIVQTVMLSEARESVLGAVLKVVLYSLGSAQSALFLQHGLATQRALVSKFPELLFEEDTELCADLCLRLLRHCGSRISTIRTHASASLYLLMRQNFEIGHNFARVKMQVTMSLSSLVGTTQNFSEEHLRRSLKTILTYAEEDMGLRDSTFAEQVQDLMFNLHMILTDTVKMKEHQEDPEMLIDLMYRIARGYQGSPDLRLTWLQNMAGKHAELGNHAEAAQCMVHAAALVAEYLALLEDHRHLPVGCVSFQNISSNVLEESAISDDILSPDEEGFCSGKHFTELGLVGLLEQAAGYFTMGGLYEAVNEVYKNLIPILEAHRDYKKLAAVHGKLQEAFTKIMHQSSGWERVFGTYFRVGFYGAHFGDLDEQEFVYKEPSITKLAEISHRLEEFYTERFGDDVVEIIKDSNPVDKSKLDSQKAYIQITYVEPYFDTYELKDRVTYFDRNYGLRTFLFCTPFTPDGRAHGELPEQHKRKTLLSTDHAFPYIKTRIRVCHREETVLTPVEVAIEDMQKKTRELAFATEQDPPDAKMLQMVLQGSVGPTVNQGPLEVAQVFLAEIPEDPKLFRHHNKLRLCFKDFCKKCEDALRKNKALIGPDQKEYHRELERNYCRLREALQPLLTQRLPQLMAPTPPGLRNSLNRASFRKADL

SEQ ID NO: 23395 - protein, 184 aa, Homo sapiens
  Payload ID: 4655
  Gene Symbol: DOCK6
  Gene Name: dedicator of cytokinesis 6
  ENSP ID: ENSP00000465767
LGRGAFEAMAHVVSLVHRSLEAAQDARGHCPQLAAYVHYAFRLPGTEPSLPDGAPPVTVQAATLARGSGRPASLYLARSKSISSSNPDLAVAPGSVDDEVSRILASKGIDRSHSWVNSAYAPGGSKAVLRRAPPYCGADPRQAIDCNSSRASSYLEGSSSAPPATQLRPTVQKLLHEELALQWV

SEQ ID NO: 23396 - protein, 464 aa, Homo sapiens
  Payload ID: 4655
  Gene Symbol: DOCK6
  Gene Name: dedicator of cytokinesis 6
  ENSP ID: ENSP00000467191
  MOD_RES (1)..(1): Any amino acid
XYPHSLNFSSRQGSVRNLAVRVQYMTGEDPSQALPVIFGKSSCSEFTREAFTPVVYHNKSPEFYEEFKLHLPACVTENHHLLFTFYHVSCQPRPGTALETPVGFTWIPLLQHGRLRTGPFCLPVSVDQPPPSYSVLTPDVALPGMRWVDGHKGVFSVELTAVSSVHPQDPYLDKFFTLVHVLEEGAFPFRLKDTVLSEGNVEQELRASLAALRLASPEPLVAFSHHVLDKLVRLVIRPPIISGQIVNLGRGAFEAMAHVVSLVHRSLEAAQDARGHCPQLAAYVHYAFRLPGTEPSLPDGAPPVTVQAATLARGSGRPASLYLARSKSISSSNPDLAVAPGSVDDEVSRILASKAIDCNSSRASSYLEGSSSAPPATQLRPTVQKLLHEELALQWVVSSSAVREAILQHAWFFFQLMVKSMALHLLLGQRLDTPRKLRFPGRFLDDITALVGSVGLEVITRVHK

SEQ ID NO: 23397 - protein, 148 aa, Homo sapiens
  Payload ID: 4655
  Gene Symbol: DOCK6
  Gene Name: dedicator of cytokinesis 6
  ENSP ID: ENSP00000467231
  MOD_RES (1)..(1): Any amino acid
XRHLPVGCVSFQNISSNVLEESAISDDILSPDEEGFCSGKHFTELGLVGLLEQAAGYFTMPQRVFGTYFRVGFYGAHFGDLDEQEFVYKEPSITKLAEISHRLEEFYTERFGDDVVEIIKDSNPVDKSKLDSQKAYIQITYVEPYFDT

SEQ ID NO: 23398 - protein, 98 aa, Homo sapiens
  Payload ID: 4655
  Gene Symbol: DOCK6
  Gene Name: dedicator of cytokinesis 6
  ENSP ID: ENSP00000468291
RKTLLSTDHAFPYIKTRIRVCHREEELLEQSKFPKGRPLSPQGPKLYLEEPAPGPQLSVLRGESALVPTGLWGDHTVLGAGPSAPVSPSVCTDASSLF

SEQ ID NO: 23399 - protein, 1336 aa, Homo sapiens
  Payload ID: 4655
  Gene Symbol: DOCK6
  Gene Name: dedicator of cytokinesis 6
  ENSP ID: ENSP00000468638
  MOD_RES (1)..(1): Any amino acid
XLSEGNVEQELRASLAALRLASPEPLVAFSHHVLDKLVRLVIRPPIISGQIVNLGRGAFEAMAHVVSLVHRSLEAAQDARGHCPQLAAYVHYAFRLPGTEPSLPDGAPPVTVQAATLARGSGRPASLYLARSKSISSSNPDLAVAPGSVDDEVSRILASKGIDRSHSWVNSAYAPGGSKAVLRRAPPYCGADPRQLLHEELALQWVVSSSAVREAILQHAWFFFQLMVKSMALHLLLGQRLDTPRKLRFPGRFLDDITALVGSVGLEVITRVHKDVELAEHLNASLAFFLSDLLSLVDRGFVFSLVRAHYKQVATRLQSSPNPAALLTLRMEFTRILCSHEHYVTLNLPCCPLSPPASPSPSVSSTTSQSSTFSSQAPDPKVTSMFELSGPFRQQHFLAGLLLTELALALEPEAEGAFLLHKKAISAVHSLLCGHDTDPRYAEATVKARVAELYLPLLSIARDTLPRLHDFAEGPGQRSRLASMLDSDTEGEGDIAGTINPSVAMAIAGGPLAPGSRASISQGPPTASRAGCALSAESSRTLLACVLWVLKNTEPALLQRWATDLTLPQLGRLLDLLYLCLAAFEYKGKKAFERINSLTFKKSLDMKARLEEAILGTIGARQEMVRRSRERSPFGNPENVRWRKSVTHWKQTSDRVDKTKDEMEHEALVEGNLATEASLVVLDTLEIIVQTVMLSEARESVLGAVLKVVLYSLGSAQSALFLQHGLATQRALVSKFPELLFEEDTELCADLCLRLLRHCGSRISTIRTHASASLYLLMRQNFEIGHNFARVKMQVTMSLSSLVGTTQNFSEEHLRRSLKTILTYAEEDMGLRDSTFAEQVQDLMFNLHMILTDTVKMKEHQEDPEMLIDLMYRIARGYQGSPDLRLTWLQNMAGKHAELGNHAEAAQCMVHAAALVAEYLALLEDHRHLPVGCVSFQNISSNVLEESAISDDILSPDEEGFCSGKHFTELGLVGLLEQAAGYFTMGGLYEAVNEVYKNLIPILEAHRDYKKLAAVHGKLQEAFTKIMHQSSGWERVFGTYFRVGFYGAHFGDLDEQEFVYKEPSITKLAEISHRLEEFYTERFGDDVVEIIKDSNPVDKSKLDSQKAYIQITYVEPYFDTYELKDRVTYFDRNYGLRTFLFCTPFTPDGRAHGELPEQHKRKTLLSTDHAFPYIKTRIRVCHREETVLTPVEVAIEDMQKKTRELAFATEQDPPDAKMLQMVLQGSVGPTVNQGPLEVAQVFLAEIPEDPKLFRHHNKLRLCFKDFCKKCEDALRKNKALIGPDQKEYHRELERNYCRLREALQPLLTQRLPQLMAPTPPGLRNSLNRASFRKADL

SEQ ID NO: 23400 - protein, 2131 aa, Homo sapiens
  Payload ID: 4656
  Gene Symbol: DOCK7
  Gene Name: dedicator of cytokinesis 7
  Uniprot ID: Q96N67
  ENSP ID: ENSP00000251157
MAERRAFAQKISRTVAAEVRKQISGQYSGSPQLLKNLNIVGNISHHTTVPLTEAVDPVDLEDYLITHPLAVDSGPLRDLIEFPPDDIEVVYSPRDCRTLVSAVPEESEMDPHVRDCIRSYTEDWAIVIRKYHKLGTGFNPNTLDKQKERQKGLPKQVFESDEAPDGNSYQDDQDDLKRRSMSIDDTPRGSWACSIFDLKNSLPDALLPNLLDRTPNEEIDRQNDDQRKSNRHKELFALHPSPDEEEPIERLSVPDIPKEHFGQRLLVKCLSLKFEIEIEPIFASLALYDVKEKKKISENFYFDLNSEQMKGLLRPHVPPAAITTLARSAIFSITYPSQDVFLVIKLEKVLQQGDIGECAEPYMIFKEADATKNKEKLEKLKSQADQFCQRLGKYRMPFAWTAIHLMNIVSSAGSLERDSTEVEISTGERKGSWSERRNSSIVGRRSLERTTSGDDACNLTSFRPATLTVTNFFKQEGDRLSDEDLYKFLADMRRPSSVLRRLRPITAQLKIDISPAPENPHYCLTPELLQVKLYPDSRVRPTREILEFPARDVYVPNTTYRNLLYIYPQSLNFANRQGSARNITVKVQFMYGEDPSNAMPVIFGKSSCSEFSKEAYTAVVYHNRSPDFHEEIKVKLPATLTDHHHLLFTFYHVSCQQKQNTPLETPVGYTWIPMLQNGRLKTGQFCLPVSLEKPPQAYSVLSPEVPLPGMKWVDNHKGVFNVEVVAVSSIHTQDPYLDKFFALVNALDEHLFPVRIGDMRIMENNLENELKSSISALNSSQLEPVVRFLHLLLDKLILLVIRPPVIAGQIVNLGQASFEAMASIINRLHKNLEGNHDQHGRNSLLASYIHYVFRLPNTYPNSSSPGPGGLGGSVHYATMARSAVRPASLNLNRSRSLSNSNPDISGTPTSPDDEVRSIIGSKGLDRSNSWVNTGGPKAAPWGSNPSPSAESTQAMDRSCNRMSSHTETSSFLQTLTGRLPTKKLFHEELALQWVVCSGSVRESALQQAWFFFELMVKSMVHHLYFNDKLEAPRKSRFPERFMDDIAALVSTIASDIVSRFQKDTEMVERLNTSLAFFLNDLLSVMDRGFVFSLIKSCYKQVSSKLYSLPNPSVLVSLRLDFLRIICSHEHYVTLNLPCSLLTPPASPSPSVSSATSQSSGFSTNVQDQKIANMFELSVPFRQQHYLAGLVLTELAVILDPDAEGLFGLHKKVINMVHNLLSSHDSDPRYSDPQIKARVAMLYLPLIGIIMETVPQLYDFTETHNQRGRPICIATDDYESESGSMISQTVAMAIAGTSVPQLTRPGSFLLTSTSGRQHTTFSAESSRSLLICLLWVLKNADETVLQKWFTDLSVLQLNRLLDLLYLCVSCFEYKGKKVFERMNSLTFKKSKDMRAKLEEAILGSIGARQEMVRRSRGQLERSPSGSAFGSQENLRWRKDMTHWRQNTEKLDKSRAEIEHEALIDGNLATEANLIILDTLEIVVQTVSVTESKESILGGVLKVLLHSMACNQSAVYLQHCFATQRALVSKFPELLFEEETEQCADLCLRLLRHCSSSIGTIRSHASASLYLLMRQNFEIGNNFARVKMQVTMSLSSLVGTSQNFNEEFLRRSLKTILTYAEEDLELRETTFPDQVQDLVFNLHMILSDTVKMKEHQEDPEMLIDLMYRIAKGYQTSPDLRLTWLQNMAGKHSERSNHAEAAQCLVHSAALVAEYLSMLEDRKYLPVGCVTFQNISSNVLEESAVSDDVVSPDEEGICSGKYFTESGLVGLLEQAAASFSMAGMYEAVNEVYKVLIPIHEANRDAKKLSTIHGKLQEAFSKIVHQSTGWERMFGTYFRVGFYGTKFGDLDEQEFVYKEPAITKLAEISHRLEGFYGERFGEDVVEVIKDSNPVDKCKLDPNKAYIQITYVEPYFDTYEMKDRITYFDKNYNLRRFMYCTPFTLDGRAHGELHEQFKRKTILTTSHAFPYIKTRVNVTHKEEIILTPIEVAIEDMQKKTQELAFATHQDPADPKMLQMVLQGSVGTTVNQGPLEVAQVFLSEIPSDPKLFRHHNKLRLCFKDFTKRCEDALRKNKSLIGPDQKEYQRELERNYHRLKEALQPLINRKIPQLYKAVLPVTCHRDSFSRMSLRKMDL

SEQ ID NO: 23401 - protein, 2109 aa, Homo sapiens
  Payload ID: 4656
  Gene Symbol: DOCK7
  Gene Name: dedicator of cytokinesis 7
  Uniprot ID: Q96N67
  ENSP ID: ENSP00000340742
MAERRAFAQKISRTVAAEVRKQISGQYSGSPQLLKNLNIVGNISHHTTVPLTEAVDPVDLEDYLITHPLAVDSGPLRDLIEFPPDDIEVVYSPRDCRTLVSAVPEESEMDPHVRDCIRSYTEDWAIVIRKYHKLGTGFNPNTLDKQKERQKGLPKQVFESDEAPDGNSYQDDQDDLKRRSMSIDDTPRGSWACSIFDLKNSLPDALLPNLLDRTPNEEIDRQNDDQRKSNRHKELFALHPSPDEEEPIERLSVPDIPKEHFGQRLLVKCLSLKFEIEIEPIFASLALYDVKEKKKISENFYFDLNSEQMKGLLRPHVPPAAITTLARSAIFSITYPSQDVFLVIKLEKVLQQGDIGECAEPYMIFKEADATKNKEKLEKLKSQADQFCQRLGKYRMPFAWTAIHLMNIVSSAGSLERDSTEVEISTGERKGSWSERRNSSIVGRRSLERTTSGDDACNLTSFRPATLTVTNFFKQEGDRLSDEDLYKFLADMRRPSSVLRRLRPITAQLKIDISPAPENPHYCLTPELLQVKLYPDSRVRPTREILEFPARDVYVPNTTYRNLLYIYPQSLNFANRQGSARNITVKVQFMYGEDPSNAMPVIFGKSSCSEFSKEAYTAVVYHNRSPDFHEEIKVKLPATLTDHHHLLFTFYHVSCQQKQNTPLETPVGYTWIPMLQNGRLKTGQFCLPVSLEKPPQAYSVLSPEVPLPGMKWVDNHKGVFNVEVVAVSSIHTQDPYLDKFFALVNALDEHLFPVRIGDMRIMENNLENELKSSISALNSSQLEPVVRFLHLLLDKLILLVIRPPVIAGQIVNLGQASFEAMASIINRLHKNLEGNHDQHGRNSLLASYIHYVFRLPNTYPNSSSPGPGGLGGSVHYATMARSAVRPASLNLNRSRSLSNSNPDISGTPTSPDDEVRSIIGSKAMDRSCNRMSSHTETSSFLQTLTGRLPTKKLFHEELALQWVVCSGSVRESALQQAWFFFELMVKSMVHHLYFNDKLEAPRKSRFPERFMDDIAALVSTIASDIVSRFQKDTEMVERLNTSLAFFLNDLLSVMDRGFVFSLIKSCYKQVSSKLYSLPNPSVLVSLRLDFLRIICSHEHYVTLNLPCSLLTPPASPSPSVSSATSQSSGFSTNVQDQKIANMFELSVPFRQQHYLAGLVLTELAVILDPDAEGLFGLHKKVINMVHNLLSSHDSDPRYSDPQIKARVAMLYLPLIGIIMETVPQLYDFTETHNQRGRPICIATDDYESESGSMISQTVAMAIAGTSVPQLTRPGSFLLTSTSGRQHTTFSAESSRSLLICLLWVLKNADETVLQKWFTDLSVLQLNRLLDLLYLCVSCFEYKGKKVFERMNSLTFKKSKDMRAKLEEAILGSIGARQEMVRRSRGQLGTYTIASPPERSPSGSAFGSQENLRWRKDMTHWRQNTEKLDKSRAEIEHEALIDGNLATEANLIILDTLEIVVQTVSVTESKESILGGVLKVLLHSMACNQSAVYLQHCFATQRALVSKFPELLFEEETEQCADLCLRLLRHCSSSIGTIRSHASASLYLLMRQNFEIGNNFARVKMQVTMSLSSLVGTSQNFNEEFLRRSLKTILTYAEEDLELRETTFPDQVQDLVFNLHMILSDTVKMKEHQEDPEMLIDLMYRIAKGYQTSPDLRLTWLQNMAGKHSERSNHAEAAQCLVHSAALVAEYLSMLEDRKYLPVGCVTFQNISSNVLEESAVSDDVVSPDEEGICSGKYFTESGLVGLLEQAAASFSMAGMYEAVNEVYKVLIPIHEANRDAKKLSTIHGKLQEAFSKIVHQSTGWERMFGTYFRVGFYGTKFGDLDEQEFVYKEPAITKLAEISHRLEGFYGERFGEDVVEVIKDSNPVDKCKLDPNKAYIQITYVEPYFDTYEMKDRITYFDKNYNLRRFMYCTPFTLDGRAHGELHEQFKRKTILTTSHAFPYIKTRVNVTHKEEIILTPIEVAIEDMQKKTQELAFATHQDPADPKMLQMVLQGSVGTTVNQGPLEVAQVFLSEIPSDPKLFRHHNKLRLCFKDFTKRCEDALRKNKSLIGPDQKEYQRELERNYHRLKEALQPLINRKIPQLYKAVLPVTCHRDSFSRMSLRKMDL

SEQ ID NO: 23402 - protein, 632 aa, Homo sapiens
  Payload ID: 4656
  Gene Symbol: DOCK7
  Gene Name: dedicator of cytokinesis 7
  Uniprot ID: Q96N67
  ENSP ID: ENSP00000384446
MAERRAFAQKISRTVAAEVRKQISGQYSGSPQLLKNLNIVGNISHHTTVPLTEAVDPVDLEDYLITHPLAVDSGPLRDLIEFPPDDIEVVYSPRDCRTLVSAVPEESEMDPHVRDCIRSYTEDWAIVIRKYHKLGTGFNPNTLDKQKERQKGLPKQVFESDEAPDGNSYQDDQDDLKRRSMSIDDTPRGSWACSIFDLKNSLPDALLPNLLDRTPNEEIDRQNDDQRKSNRHKELFALHPSPDEEEPIERLSVPDIPKEHFGQRLLVKCLSLKFEIEIEPIFASLALYDVKEKKKISENFYFDLNSEQMKGLLRPHVPPAAITTLARSAIFSITYPSQDVFLVIKLEKVLQQGDIGECAEPYMIFKEADATKNKEKLEKLKSQADQFCQRLGKYRMPFAWTAIHLMNIVSSAGSLERDSTEVEISTGERKGSWSERRNSSIVGRRSLERTTSGDDACNLTSFRPATLTVTNFFKQEGDRLSDEDLYKFLADMRRPSSVLRRLRPITAQLKIDISPAPENPHYCLTPELLQVKLYPDSRVRPTREILEFPARDVYVPNTTYRNLLYIYPQSLNFANRQGSARNITVKVQFMYGEDPSNAMPSPSCTHPIPTVRPLPLWCYHSIFSLLSWDFIT

SEQ ID NO: 23403 - protein, 2129 aa, Homo sapiens
  Payload ID: 4656
  Gene Symbol: DOCK7
  Gene Name: dedicator of cytokinesis 7
  ENSP ID: ENSP00000413583
MAERRAFAQKISRTVAAEVRKQISGQYSGSPQLLKNLNIVGNISHHTTVPLTEAVDPVDLEDYLITHPLAVDSGPLRDLIEFPPDDIEVVYSPRDCRTLVSAVPEESEMDPHVRDCIRSYTEDWAIVIRKYHKLGTGFNPNTLDKQKERQKGLPKQVFESDEAPDGNSYQDDQDDLKRRSMSIDDTPRGSWACSIFDLKNSLPDALLPNLLDRTPNEEIDRQNDDQRKSNRHKELFALHPSPDEEEPIERLSVPDIPKEHFGQRLLVKCLSLKFEIEIEPIFASLALYDVKEKKKISENFYFDLNSEQMKGLLRPHVPPAAITTLARSAIFSITYPSQDVFLVIKLEKVLQQGDIGECAEPYMIFKEADATKNKEKLEKLKSQADQFCQRLGKYRMPFAWTAIHLMNIVSSAGSLERDSTEVEISTGERKGSWSERRNSSIVGRRSLERTTSGDDACNLTSFRPATLTVTNFFKQEGDRLSDEDLYKFLADMRRPSSVLRRLRPITAQLKIDISPAPENPHYCLTPELLQVKLYPDSRVRPTREILEFPARDVYVPNTTYRNLLYIYPQSLNFANRQGSARNITVKVQFMYGEDPSNAMPVIFGKSSCSEFSKEAYTAVVYHNRSPDFHEEIKVKLPATLTDHHHLLFTFYHVSCQQKQNTPLETPVGYTWIPMLQNGRLKTGQFCLPVSLEKPPQAYSVLSPEVPLPGMKWVDNHKGVFNVEVVAVSSIHTQDPYLDKFFALVNALDEHLFPVRIGDMRIMENNLENELKSSISALNSSQLEPVVRFLHLLLDKLILLVIRPPVIAGQIVNLGQASFEAMASIINRLHKNLEGNHDQHGRNSLLASYIHYVFRLPNTYPNSSSPGPGGLGGSVHYATMARSAVRPASLNLNRSRSLSNSNPDISGTPTSPDDEVRSIIGSKGLDRSNSWVNTGGPKAAPWGSNPSPSAESTQAMDRSCNRMSSHTETSSFLQTLTGRLPTKKLFHEELALQWVVCSGSVRESALQQAWFFFELMVKSMVHHLYFNDKLEAPRKSRFPERFMDDIAALVSTIASDIVSRFQKDTEMVERLNTSLAFFLNDLLSVMDRGFVFSLIKSCYKQVSSKLYSLPNPSVLVSLRLDFLRIICSHEHYVTLNLPCSLLTPPASPSPSVSSATSQSSGFSTNVQDQKIANMFELSVPFRQQHYLAGLVLTELAVILDPDAEGLFGLHKKVINMVHNLLSSHDSDPRYSDPQIKARVAMLYLPLIGIIMETVPQLYDFTETHNQRGRPICIATDDYESESGSMISQTVAMAIAGTSVPQLTRPGSFLLTSTSGRQHTTFSAESSRSLLICLLWVLKNADETVLQKWFTDLSVLQLNRLLDLLYLCVSCFEYKGKKVFERMNSLTFKKSKDMRAKLEEAILGSIGARQEMVRRSRGQLERSPSGSAFGSQENLRWRKDMTHWRQNTEKLDKSRAEIEHEALIDGNLATEANLIILDTLEIVVQTVSVTESKESILGGVLKVLLHSMACNQSAVYLQHCFATQRALVSKFPELLFEEETEQCADLCLRLLRHCSSSIGTIRSHASASLYLLMRQNFEIGNNFARVKMQVTMSLSSLVGTSQNFNEEFLRRSLKTILTYAEEDLELRETTFPDQVQDLVFNLHMILSDTVKMKEHQEDPEMLIDLMYRIAKGYQTSPDLRLTWLQNMAGKHSERSNHAEAAQCLVHSAALVAEYLSMLEDRKYLPVGCVTFQNISSNVLEESAVSDDVVSPDEEGICSGKYFTESGLVGLLEQAAASFSMAGMYEAVNEVYKVLIPIHEANRDAKKLSTIHGKLQEAFSKIVHQDGKRMFGTYFRVGFYGTKFGDLDEQEFVYKEPAITKLAEISHRLEGFYGERFGEDVVEVIKDSNPVDKCKLDPNKAYIQITYVEPYFDTYEMKDRITYFDKNYNLRRFMYCTPFTLDGRAHGELHEQFKRKTILTTSHAFPYIKTRVNVTHKEEIILTPIEVAIEDMQKKTQELAFATHQDPADPKMLQMVLQGSVGTTVNQGPLEVAQVFLSEIPSDPKLFRHHNKLRLCFKDFTKRCEDALRKNKSLIGPDQKEYQRELERNYHRLKEALQPLINRKIPQLYKAVLPVTCHRDSFSRMSLRKMDL

SEQ ID NO: 23404 - protein, 803 aa, Homo sapiens
  Payload ID: 4656
  Gene Symbol: DOCK7
  Gene Name: dedicator of cytokinesis 7
  ENSP ID: ENSP00000483062
MDPHVRDCIRSYTEDWAIVIRKYHKLGTGFNPNTLDKQKERQKGLPKQVFESDEAPDGNSYQDDQDDLKRRSMSIDDTPRGSWACSIFDLKNSLPDALLPNLLDRTPNEEIDRQNDDQRKSNRHKELFALHPSPDEEEPIERLSVPDIPKEHFGQRLLVKCLSLKFEIEIEPIFASLALYDVKEKKKISENFYFDLNSEQMKGLLRPHVPPAAITTLARSAIFSITYPSQDVFLVIKLEKVLQQGDIGECAEPYMIFKEADATKNKEKLEKLKSQADQFCQRLGKYRMPFAWTAIHLMNIVSSAGSLERDSTEVEISTGERKGSWSERRNSSIVGRRSLERTTSGDDACNLTSFRPATLTVTNFFKQEGDRLSDEDLYKFLADMRRPSSVLRRLRPITAQLKIDISPAPENPHYCLTPELLQVKLYPDSRVRPTREILEFPARDVYVPNTTYRNLLYIYPQSLNFANRQGSARNITVKVQFMYGEDPSNAMPVIFGKSSCSEFSKEAYTAVVYHNRSPDFHEEIKVKLPATLTDHHHLLFTFYHVSCQQKQNTPLETPVGYTWIPMLQNGRLKTGQFCLPVSLEKPPQAYSVLSPEVPLPGMKWVDNHKGVFNVEVVAVSSIHTQDPYLDKFFALVNALDEHLFPVRIGDMRIMENNLENELKSSISALNSSQLEPVVRFLHLLLDKLILLVIRPPVIAGQIVNLGQASFEAMASIINRLHKNLEGNHDQHGRNSLLASYIHYVFRLPNTYPNSSSPGPGGLGGSVHYATMARSAVRPASLNLNRSRSLSNSNPDISGTPTSP

SEQ ID NO: 23405 - protein, 46 aa, Homo sapiens
  Payload ID: 4656
  Gene Symbol: DOCK7
  Gene Name: dedicator of cytokinesis 7
  ENSP ID: ENSP00000488988
  MOD_RES (1)..(1): Any amino acid
XTTYRNLLYIYPQSLNFANRQGSARNITVKVQFMYGEDPSNAMPVS

SEQ ID NO: 23406 - protein, 255 aa, Homo sapiens
  Payload ID: 4656
  Gene Symbol: DOCK7
  Gene Name: dedicator of cytokinesis 7
  ENSP ID: ENSP00000489037
  MOD_RES (1)..(1): Any amino acid
XKGVFNVEVVAVSSIHTQDPYLDKFFALVNALDEHLFPVRIGDMRIMENNLENELKSSISALNSSQLEPVVRFLHLLLDKLILLVIRPPVIAGQIVNLGQASFEAMASIINRLHKNLEGNHDQHGRNSLLASYIHYVFRLPNTYPNSSSPGPGGLGGSVHYATMARSAVRPASLNLNRSRSLSNSNPDISGTPTSPDDEVRSIIGSKLFHEELALQWVVCSGSVRESALQQAWFFFELMVKSMVHHLYFNDKLEA

SEQ ID NO: 23407 - protein, 2140 aa, Homo sapiens
  Payload ID: 4656
  Gene Symbol: DOCK7
  Gene Name: dedicator of cytokinesis 7
  ENSP ID: ENSP00000489124
MAERRAFAQKISRTVAAEVRKQISGQYSGSPQLLKNLNIVGNISHHTTVPLTEAVDPVDLEDYLITHPLAVDSGPLRDLIEFPPDDIEVVYSPRDCRTLVSAVPEESEMDPHVRDCIRSYTEDWAIVIRKYHKLGTGFNPNTLDKQKERQKGLPKQVFESDEAPDGNSYQDDQDDLKRRSMSIDDTPRGSWACSIFDLKNSLPDALLPNLLDRTPNEEIDRQNDDQRKSNRHKELFALHPSPDEEEPIERLSVPDIPKEHFGQRLLVKCLSLKFEIEIEPIFASLALYDVKEKKKISENFYFDLNSEQMKGLLRPHVPPAAITTLARSAIFSITYPSQDVFLVIKLEKVLQQGDIGECAEPYMIFKEADATKNKEKLEKLKSQADQFCQRLGKYRMPFAWTAIHLMNIVSSAGSLERDSTEVEISTGERKGSWSERRNSSIVGRRSLERTTSGDDACNLTSFRPATLTVTNFFKQEGDRLSDEDLYKFLADMRRPSSVLRRLRPITAQLKIDISPAPENPHYCLTPELLQVKLYPDSRVRPTREILEFPARDVYVPNTTYRNLLYIYPQSLNFANRQGSARNITVKVQFMYGEDPSNAMPVIFGKSSCSEFSKEAYTAVVYHNRSPDFHEEIKVKLPATLTDHHHLLFTFYHVSCQQKQNTPLETPVGYTWIPMLQNGRLKTGQFCLPVSLEKPPQAYSVLSPEVPLPGMKWVDNHKGVFNVEVVAVSSIHTQDPYLDKFFALVNALDEHLFPVRIGDMRIMENNLENELKSSISALNSSQLEPVVRFLHLLLDKLILLVIRPPVIAGQIVNLGQASFEAMASIINRLHKNLEGNHDQHGRNSLLASYIHYVFRLPNTYPNSSSPGPGGLGGSVHYATMARSAVRPASLNLNRSRSLSNSNPDISGTPTSPDDEVRSIIGSKGLDRSNSWVNTGGPKAAPWGSNPSPSAESTQAMDRSCNRMSSHTETSSFLQTLTGRLPTKKLFHEELALQWVVCSGSVRESALQQAWFFFELMVKSMVHHLYFNDKLEAPRKSRFPERFMDDIAALVSTIASDIVSRFQKDTEMVERLNTSLAFFLNDLLSVMDRGFVFSLIKSCYKQVSSKLYSLPNPSVLVSLRLDFLRIICSHEHYVTLNLPCSLLTPPASPSPSVSSATSQSSGFSTNVQDQKIANMFELSVPFRQQHYLAGLVLTELAVILDPDAEGLFGLHKKVINMVHNLLSSHDSDPRYSDPQIKARVAMLYLPLIGIIMETVPQLYDFTETHNQRGRPICIATDDYESESGSMISQTVAMAIAGTSVPQLTRPGSFLLTSTSGRQHTTFSAESSRSLLICLLWVLKNADETVLQKWFTDLSVLQLNRLLDLLYLCVSCFEYKGKKVFERMNSLTFKKSKDMRAKLEEAILGSIGARQEMVRRSRGQLGTYTIASPPERSPSGSAFGSQENLRWRKDMTHWRQNTEKLDKSRAEIEHEALIDGNLATEANLIILDTLEIVVQTVSVTESKESILGGVLKVLLHSMACNQSAVYLQHCFATQRALVSKFPELLFEEETEQCADLCLRLLRHCSSSIGTIRSHASASLYLLMRQNFEIGNNFARVKMQVTMSLSSLVGTSQNFNEEFLRRSLKTILTYAEEDLELRETTFPDQVQDLVFNLHMILSDTVKMKEHQEDPEMLIDLMYRIAKGYQTSPDLRLTWLQNMAGKHSERSNHAEAAQCLVHSAALVAEYLSMLEDRKYLPVGCVTFQNISSNVLEESAVSDDVVSPDEEGICSGKYFTESGLVGLLEQAAASFSMAGMYEAVNEVYKVLIPIHEANRDAKKLSTIHGKLQEAFSKIVHQSTGWERMFGTYFRVGFYGTKFGDLDEQEFVYKEPAITKLAEISHRLEGFYGERFGEDVVEVIKDSNPVDKCKLDPNKAYIQITYVEPYFDTYEMKDRITYFDKNYNLRRFMYCTPFTLDGRAHGELHEQFKRKTILTTSHAFPYIKTRVNVTHKEEIILTPIEVAIEDMQKKTQELAFATHQDPADPKMLQMVLQGSVGTTVNQGPLEVAQVFLSEIPSDPKLFRHHNKLRLCFKDFTKRCEDALRKNKSLIGPDQKEYQRELERNYHRLKEALQPLINRKIPQLYKAVLPVTCHRDSFSRMSLRKMDL

SEQ ID NO: 23408 - protein, 173 aa, Homo sapiens
  Payload ID: 4656
  Gene Symbol: DOCK7
  Gene Name: dedicator of cytokinesis 7
  ENSP ID: ENSP00000489164
  MOD_RES (1)..(1): Any amino acid
XECAEPYMIFKEADATKNKEKLEKLKSQADQFCQRLGKYRMPFAWTAIHLMNIVSSAGSLERDSTEVEISTGERKGSWSERRNSSIVGRRSLERTTSGDDACNLTSFRPATLTVTNFFKQVLFCHVGILGRCLCINFFNFRKVVIVLYMYGRVIPRNLKTLRIKIIKATIRMR

SEQ ID NO: 23409 - protein, 2100 aa, Homo sapiens
  Payload ID: 4656
  Gene Symbol: DOCK7
  Gene Name: dedicator of cytokinesis 7
  ENSP ID: ENSP00000489284
MAERRAFAQKISRTVAAEVRKQISGQYSGSPQLLKNLNIVGNISHHTTVPLTEAVDPVDLEDYLITHPLAVDSGPLRDLIEFPPDDIEVVYSPRDCRTLVSAVPEESEMDPHVRDCIRSYTEDWAIVIRKYHKLGTGFNPNTLDKQKERQKGLPKQVFESDEAPDGNSYQDDQDDLKRRSMSIDDTPRGSWACSIFDLKNSLPDALLPNLLDRTPNEEIDRQNDDQRKSNRHKELFALHPSPDEEEPIERLSVPDIPKEHFGQRLLVKCLSLKFEIEIEPIFASLALYDVKEKKKISENFYFDLNSEQMKGLLRPHVPPAAITTLARSAIFSITYPSQDVFLVIKLEKVLQQGDIGECAEPYMIFKEADATKNKEKLEKLKSQADQFCQRLGKYRMPFAWTAIHLMNIVSSAGSLERDSTEVEISTGERKGSWSERRNSSIVGRRSLERTTSGDDACNLTSFRPATLTVTNFFKQEGDRLSDEDLYKFLADMRRPSSVLRRLRPITAQLKIDISPAPENPHYCLTPELLQVKLYPDSRVRPTREILEFPARDVYVPNTTYRNLLYIYPQSLNFANRQGSARNITVKVQFMYGEDPSNAMPVIFGKSSCSEFSKEAYTAVVYHNRSPDFHEEIKVKLPATLTDHHHLLFTFYHVSCQQKQNTPLETPVGYTWIPMLQNGRLKTGQFCLPVSLEKPPQAYSVLSPEVPLPGMKWVDNHKGVFNVEVVAVSSIHTQDPYLDKFFALVNALDEHLFPVRIGDMRIMENNLENELKSSISALNSSQLEPVVRFLHLLLDKLILLVIRPPVIAGQIVNLGQASFEAMASIINRLHKNLEGNHDQHGRNSLLASYIHYVFRLPNTYPNSSSPGPGGLGGSVHYATMARSAVRPASLNLNRSRSLSNSNPDISGTPTSPDDEVRSIIGSKAMDRSCNRMSSHTETSSFLQTLTGRLPTKKLFHEELALQWVVCSGSVRESALQQAWFFFELMVKSMVHHLYFNDKLEAPRKSRFPERFMDDIAALVSTIASDIVSRFQKDTEMVERLNTSLAFFLNDLLSVMDRGFVFSLIKSCYKQVSSKLYSLPNPSVLVSLRLDFLRIICSHEHYVTLNLPCSLLTPPASPSPSVSSATSQSSGFSTNVQDQKIANMFELSVPFRQQHYLAGLVLTELAVILDPDAEGLFGLHKKVINMVHNLLSSHDSDPRYSDPQIKARVAMLYLPLIGIIMETVPQLYDFTETHNQRGRPICIATDDYESESGSMISQTVAMAIAGTSVPQLTRPGSFLLTSTSGRQHTTFSAESSRSLLICLLWVLKNADETVLQKWFTDLSVLQLNRLLDLLYLCVSCFEYKGKKVFERMNSLTFKKSKDMRAKLEEAILGSIGARQEMVRRSRGQLERSPSGSAFGSQENLRWRKDMTHWRQNTEKLDKSRAEIEHEALIDGNLATEANLIILDTLEIVVQTVSVTESKESILGGVLKVLLHSMACNQSAVYLQHCFATQRALVSKFPELLFEEETEQCADLCLRLLRHCSSSIGTIRSHASASLYLLMRQNFEIGNNFARVKMQVTMSLSSLVGTSQNFNEEFLRRSLKTILTYAEEDLELRETTFPDQVQDLVFNLHMILSDTVKMKEHQEDPEMLIDLMYRIAKGYQTSPDLRLTWLQNMAGKHSERSNHAEAAQCLVHSAALVAEYLSMLEDRKYLPVGCVTFQNISSNVLEESAVSDDVVSPDEEGICSGKYFTESGLVGLLEQAAASFSMAGMYEAVNEVYKVLIPIHEANRDAKKLSTIHGKLQEAFSKIVHQSTGWERMFGTYFRVGFYGTKFGDLDEQEFVYKEPAITKLAEISHRLEGFYGERFGEDVVEVIKDSNPVDKCKLDPNKAYIQITYVEPYFDTYEMKDRITYFDKNYNLRRFMYCTPFTLDGRAHGELHEQFKRKTILTTSHAFPYIKTRVNVTHKEEIILTPIEVAIEDMQKKTQELAFATHQDPADPKMLQMVLQGSVGTTVNQGPLEVAQVFLSEIPSDPKLFRHHNKLRLCFKDFTKRCEDALRKNKSLIGPDQKEYQRELERNYHRLKEALQPLINRKIPQLYKAVLPVTCHRDSFSRMSLRKMDL

SEQ ID NO: 23410 - protein, 101 aa, Homo sapiens
  Payload ID: 4656
  Gene Symbol: DOCK7
  Gene Name: dedicator of cytokinesis 7
  ENSP ID: ENSP00000489412
FTESGLVGLLEQAAASFSMAGMYEAVNEVYKVLIPIHEANRDAKKLSTIHGKLQEAFSKIVHQFFYDLPFFTFYYTEYWLGADVWHLFSCWFLWNQVRGFG

SEQ ID NO: 23411 - protein, 248 aa, Homo sapiens
  Payload ID: 4656
  Gene Symbol: DOCK7
  Gene Name: dedicator of cytokinesis 7
  ENSP ID: ENSP00000489450
SSIHTQDPYLDKFFALVNALDEHLFPVRIGDMRIMENNLENELKSSISALNSSQLEPVVRFLHLLLDKLILLVIRPPVIAGQIVNLGQASFEAMASIINRLHKNLEGNHDQHGRNSLLASYIHYVFRLPNTYPNSSSPGPGGLGGSVHYATMARSAVRPASLNLNRSRSLSNSNPDISGTPTSPDDEVRSIIGSKGLDRSNSWVNTGGPKAAPWGSNPSPSAESTQLFHEELALQWVVCSGSVRESAL

SEQ ID NO: 23412 - protein, 2098 aa, Homo sapiens
  Payload ID: 4656
  Gene Symbol: DOCK7
  Gene Name: dedicator of cytokinesis 7
  ENSP ID: ENSP00000489499
MAERRAFAQKISRTVAAEVRKQISGQYSGSPQLLKNLNIVGNISHHTTVPLTEAVDPVDLEDYLITHPLAVDSGPLRDLIEFPPDDIEVVYSPRDCRTLVSAVPEESEMDPHVRDCIRSYTEDWAIVIRKYHKLGTGFNPNTLDKQKERQKGLPKQVFESDEAPDGNSYQDDQDDLKRRSMSIDDTPRGSWACSIFDLKNSLPDALLPNLLDRTPNEEIDRQNDDQRKSNRHKELFALHPSPDEEEPIERLSVPDIPKEHFGQRLLVKCLSLKFEIEIEPIFASLALYDVKEKKKISENFYFDLNSEQMKGLLRPHVPPAAITTLARSAIFSITYPSQDVFLVIKLEKVLQQGDIGECAEPYMIFKEADATKNKEKLEKLKSQADQFCQRLGKYRMPFAWTAIHLMNIVSSAGSLERDSTEVEISTGERKGSWSERRNSSIVGRRSLERTTSGDDACNLTSFRPATLTVTNFFKQEGDRLSDEDLYKFLADMRRPSSVLRRLRPITAQLKIDISPAPENPHYCLTPELLQVKLYPDSRVRPTREILEFPARDVYVPNTTYRNLLYIYPQSLNFANRQGSARNITVKVQFMYGEDPSNAMPVIFGKSSCSEFSKEAYTAVVYHNRSPDFHEEIKVKLPATLTDHHHLLFTFYHVSCQQKQNTPLETPVGYTWIPMLQNGRLKTGQFCLPVSLEKPPQAYSVLSPEVPLPGMKWVDNHKGVFNVEVVAVSSIHTQDPYLDKFFALVNALDEHLFPVRIGDMRIMENNLENELKSSISALNSSQLEPVVRFLHLLLDKLILLVIRPPVIAGQIVNLGQASFEAMASIINRLHKNLEGNHDQHGRNSLLASYIHYVFRLPNTYPNSSSPGPGGLGGSVHYATMARSAVRPASLNLNRSRSLSNSNPDISGTPTSPDDEVRSIIGSKAMDRSCNRMSSHTETSSFLQTLTGRLPTKKLFHEELALQWVVCSGSVRESALQQAWFFFELMVKSMVHHLYFNDKLEAPRKSRFPERFMDDIAALVSTIASDIVSRFQKDTEMVERLNTSLAFFLNDLLSVMDRGFVFSLIKSCYKQVSSKLYSLPNPSVLVSLRLDFLRIICSHEHYVTLNLPCSLLTPPASPSPSVSSATSQSSGFSTNVQDQKIANMFELSVPFRQQHYLAGLVLTELAVILDPDAEGLFGLHKKVINMVHNLLSSHDSDPRYSDPQIKARVAMLYLPLIGIIMETVPQLYDFTETHNQRGRPICIATDDYESESGSMISQTVAMAIAGTSVPQLTRPGSFLLTSTSGRQHTTFSAESSRSLLICLLWVLKNADETVLQKWFTDLSVLQLNRLLDLLYLCVSCFEYKGKKVFERMNSLTFKKSKDMRAKLEEAILGSIGARQEMVRRSRGQLERSPSGSAFGSQENLRWRKDMTHWRQNTEKLDKSRAEIEHEALIDGNLATEANLIILDTLEIVVQTVSVTESKESILGGVLKVLLHSMACNQSAVYLQHCFATQRALVSKFPELLFEEETEQCADLCLRLLRHCSSSIGTIRSHASASLYLLMRQNFEIGNNFARVKMQVTMSLSSLVGTSQNFNEEFLRRSLKTILTYAEEDLELRETTFPDQVQDLVFNLHMILSDTVKMKEHQEDPEMLIDLMYRIAKGYQTSPDLRLTWLQNMAGKHSERSNHAEAAQCLVHSAALVAEYLSMLEDRKYLPVGCVTFQNISSNVLEESAVSDDVVSPDEEGICSGKYFTESGLVGLLEQAAASFSMAGMYEAVNEVYKVLIPIHEANRDAKKLSTIHGKLQEAFSKIVHQDGKRMFGTYFRVGFYGTKFGDLDEQEFVYKEPAITKLAEISHRLEGFYGERFGEDVVEVIKDSNPVDKCKLDPNKAYIQITYVEPYFDTYEMKDRITYFDKNYNLRRFMYCTPFTLDGRAHGELHEQFKRKTILTTSHAFPYIKTRVNVTHKEEIILTPIEVAIEDMQKKTQELAFATHQDPADPKMLQMVLQGSVGTTVNQGPLEVAQVFLSEIPSDPKLFRHHNKLRLCFKDFTKRCEDALRKNKSLIGPDQKEYQRELERNYHRLKEALQPLINRKIPQLYKAVLPVTCHRDSFSRMSLRKMDL

SEQ ID NO: 23413 - protein, 1566 aa, Homo sapiens
  Payload ID: 4657
  Gene Symbol: DOCK8
  Gene Name: dedicator of cytokinesis 8
  ENSP ID: ENSP00000371766
MCGEDASNAMPVRRETNICLKSGWAAHPCHFTQVRDSSVYKVRLFQANTAQHVQGLLCPGYQWGNRVIFGKSSGPEFLQEVYTAVTYHNKSPDFYEEVKIKLPAKLTVNHHLLFTFYHISCQQKQGASVETLLGYSWLPILLNERLQTGSYCLPVALEKLPPNYSMHSAEKVPLQNPPIKWAEGHKGVFNIEVQAVSSVHTQDNHLEKFFTLCHSLESQVTFPIRVLDQKISEMALEHELKLSIICLNSSRLEPLVLFLHLVLDKLFQLSVQPMVIAGQTANFSQFAFESVVAIANSLHNSKDLSKDQHGRNCLLASYVHYVFRLPEVQRDVPKSGAPTALLDPRSYHTYGRTSAAAVSSKLLQARVMSSSNPDLAGTHSAADEEVKNIMSSKIADRNCSRMSYYCSGSSDAPSSPAAPRPASKKHFHEELALQMVVSTGMVRETVFKYAWFFFELLVKSMAQHVHNMDKRDSFRRTRFSDRFMDDITTIVNVVTSEIAALLVKPQKENEQAEKMNISLAFFLYDLLSLMDRGFVFNLIRHYCSQLSAKLSNLPTLISMRLEFLRILCSHEHYLNLNLFFMNADTAPTSPCPSISSQNSSSCSSFQDQKIASMFDLTSEYRQQHFLTGLLFTELAAALDAEGEGISKVQRKAVSAIHSLLSSHDLDPRCVKPEVKVKIAALYLPLVGIILDALPQLCDFTVADTRRYRTSGSDEEQEGAGAINQNVALAIAGNNFNLKTSGIVLSSLPYKQYNMLNADTTRNLMICFLWIMKNADQSLIRKWIADLPSTQLNRILDLLFICVLCFEYKGKQSSDKVSTQVLQKSRDVKARLEEALLRGEGARGEMMRRRAPGNDRFPGLNENLRWKKEQTHWRQANEKLDKTKAELDQEALISGNLATEAHLIILDMQENIIQASSALDCKDSLLGGVLRVLVNSLNCDQSTTYLTHCFATLRALIAKFGDLLFEEEVEQCFDLCHQVLHHCSSSMDVTRSQACATLYLLMRFSFGATSNFARVKMQVTMSLASLVGRAPDFNEEHLRRSLRTILAYSEEDTAMQMTPFPTQVEELLCNLNSILYDTVKMREFQEDPEMLMDLMYRIAKSYQASPDLRLTWLQNMAEKHTKKKCYTEAAMCLVHAAALVAEYLSMLEDHSYLPVGSVSFQNISSNVLEESVVSEDTLSPDEDGVCAGQYFTESGLVGLLEQAAELFSTGGLYETVNEVYKLVIPILEAHREFRKLTLTHSKLQRAFDSIVNKDHKRMFGTYFRVGFFGSKFGDLDEQEFVYKEPAITKLPEISHRLEAFYGQCFGAEFVEVIKDSTPVDKTKLDPNKAYIQITFVEPYFDEYEMKDRVTYFEKNFNLRRFMYTTPFTLEGRPRGELHEQYRRNTVLTTMHAFPYIKTRISVIQKEEFVLTPIEVAIEDMKKKTLQLAVAINQEPPDAKMLQMVLQGSVGATVNQGPLEVAQVFLAEIPADPKLYRHHNKLRLCFKEFIMRCGEAVEKNKRLITADQREYQQELKKNYNKLKENLRPMIERKIPELYKPIFRVESQKRDSFHRSSFRKCETQLSQGS

SEQ ID NO: 23414 - protein, 439 aa, Homo sapiens
  Payload ID: 4657
  Gene Symbol: DOCK8
  Gene Name: dedicator of cytokinesis 8
  ENSP ID: ENSP00000371768
MHSAEKVPLQNPPIKWAEGHKGVFNIEVQAVSSVHTQDNHLEKFFTLCHSLESQVTFPIRVLDQKISEMALEHELKLSIICLNSSRLEPLVLFLHLVLDKLFQLSVQPMVIAGQTANFSQFAFESVVAIANSLHNSKDLSKDQHGRNCLLASYVHYVFRLPEVQRDVPKSGAPTALLDPRSYHTYGRTSAAAVSSKLLQARVMSSSNPDLAGTHSAADEEVKNIMSSKIADRNCSRMSYYCSGSSDAPSSPAAPRPASKKHFHEELALQMVVSTGMVRETVFKYAWFFFELLVKSMAQHVHNMDKRDSFRRTRFSDRFMDDITTIVNVVTSEIAALLVKPQKENEQAEKMNISLAFFLYDLLSLMDRGFVFNLIRHYCSQLSAKLSNLPTLISMRLEFLRILCSHEHYLNLNLFFMNADTAPTSPCPSISSQVIKELFN

SEQ ID NO: 23415 - protein, 2099 aa, Homo sapiens
  Payload ID: 4657
  Gene Symbol: DOCK8
  Gene Name: dedicator of cytokinesis 8
  Uniprot ID: Q8NF50
  ENSP ID: ENSP00000394888
MATLPSAERRAFALKINRYSSAEIRKQFTLPPNLGQYHRQSISTSGFPSLQLPQFYDPVEPVDFEGLLMTHLNSLDVQLAQELGDFTDDDLDVVFTPKECRTLQPSLPEEGVELDPHVRDCVQTYIREWLIVNRKNQGSPEICGFKKTGSRKDFHKTLPKQTFESETLECSEPAAQAGPRHLNVLCDVSGKGPVTACDFDLRSLQPDKRLENLLQQVSAEDFEKQNEEARRTNRQAELFALYPSVDEEDAVEIRPVPECPKEHLGNRILVKLLTLKFEIEIEPLFASIALYDVKERKKISENFHCDLNSDQFKGFLRAHTPSVAASSQARSAVFSVTYPSSDIYLVVKIEKVLQQGEIGDCAEPYTVIKESDGGKSKEKIEKLKLQAESFCQRLGKYRMPFAWAPISLSSFFNVSTLEREVTDVDSVVGRSSVGERRTLAQSRRLSERALSLEENGVGSNFKTSTLSVSSFFKQEGDRLSDEDLFKFLADYKRSSSLQRRVKSIPGLLRLEISTAPEIINCCLTPEMLPVKPFPENRTRPHKEILEFPTREVYVPHTVYRNLLYVYPQRLNFVNKLASARNITIKIQFMCGEDASNAMPVIFGKSSGPEFLQEVYTAVTYHNKSPDFYEEVKIKLPAKLTVNHHLLFTFYHISCQQKQGASVETLLGYSWLPILLNERLQTGSYCLPVALEKLPPNYSMHSAEKVPLQNPPIKWAEGHKGVFNIEVQAVSSVHTQDNHLEKFFTLCHSLESQVTFPIRVLDQKISEMALEHELKLSIICLNSSRLEPLVLFLHLVLDKLFQLSVQPMVIAGQTANFSQFAFESVVAIANSLHNSKDLSKDQHGRNCLLASYVHYVFRLPEVQRDVPKSGAPTALLDPRSYHTYGRTSAAAVSSKLLQARVMSSSNPDLAGTHSAADEEVKNIMSSKIADRNCSRMSYYCSGSSDAPSSPAAPRPASKKHFHEELALQMVVSTGMVRETVFKYAWFFFELLVKSMAQHVHNMDKRDSFRRTRFSDRFMDDITTIVNVVTSEIAALLVKPQKENEQAEKMNISLAFFLYDLLSLMDRGFVFNLIRHYCSQLSAKLSNLPTLISMRLEFLRILCSHEHYLNLNLFFMNADTAPTSPCPSISSQNSSSCSSFQDQKIASMFDLTSEYRQQHFLTGLLFTELAAALDAEGEGISKVQRKAVSAIHSLLSSHDLDPRCVKPEVKVKIAALYLPLVGIILDALPQLCDFTVADTRRYRTSGSDEEQEGAGAINQNVALAIAGNNFNLKTSGIVLSSLPYKQYNMLNADTTRNLMICFLWIMKNADQSLIRKWIADLPSTQLNRILDLLFICVLCFEYKGKQSSDKVSTQVLQKSRDVKARLEEALLRGEGARGEMMRRRAPGNDRFPGLNENLRWKKEQTHWRQANEKLDKTKAELDQEALISGNLATEAHLIILDMQENIIQASSALDCKDSLLGGVLRVLVNSLNCDQSTTYLTHCFATLRALIAKFGDLLFEEEVEQCFDLCHQVLHHCSSSMDVTRSQACATLYLLMRFSFGATSNFARVKMQVTMSLASLVGRAPDFNEEHLRRSLRTILAYSEEDTAMQMTPFPTQVEELLCNLNSILYDTVKMREFQEDPEMLMDLMYRIAKSYQASPDLRLTWLQNMAEKHTKKKCYTEAAMCLVHAAALVAEYLSMLEDHSYLPVGSVSFQNISSNVLEESVVSEDTLSPDEDGVCAGQYFTESGLVGLLEQAAELFSTGGLYETVNEVYKLVIPILEAHREFRKLTLTHSKLQRAFDSIVNKDHKRMFGTYFRVGFFGSKFGDLDEQEFVYKEPAITKLPEISHRLEAFYGQCFGAEFVEVIKDSTPVDKTKLDPNKAYIQITFVEPYFDEYEMKDRVTYFEKNFNLRRFMYTTPFTLEGRPRGELHEQYRRNTVLTTMHAFPYIKTRISVIQKEEFVLTPIEVAIEDMKKKTLQLAVAINQEPPDAKMLQMVLQGSVGATVNQGPLEVAQVFLAEIPADPKLYRHHNKLRLCFKEFIMRCGEAVEKNKRLITADQREYQQELKKNYNKLKENLRPMIERKIPELYKPIFRVESQKRDSFHRSSFRKCETQLSQGS

SEQ ID NO: 23416 - protein, 2031 aa, Homo sapiens
  Payload ID: 4657
  Gene Symbol: DOCK8
  Gene Name: dedicator of cytokinesis 8
  Uniprot ID: Q8NF50
  ENSP ID: ENSP00000408464
MTHLNSLDVQLAQELGDFTDDDLDVVFTPKECRTLQPSLPEEGVELDPHVRDCVQTYIREWLIVNRKNQGSPEICGFKKTGSRKDFHKTLPKQTFESETLECSEPAAQAGPRHLNVLCDVSGKGPVTACDFDLRSLQPDKRLENLLQQVSAEDFEKQNEEARRTNRQAELFALYPSVDEEDAVEIRPVPECPKEHLGNRILVKLLTLKFEIEIEPLFASIALYDVKERKKISENFHCDLNSDQFKGFLRAHTPSVAASSQARSAVFSVTYPSSDIYLVVKIEKVLQQGEIGDCAEPYTVIKESDGGKSKEKIEKLKLQAESFCQRLGKYRMPFAWAPISLSSFFNVSTLEREVTDVDSVVGRSSVGERRTLAQSRRLSERALSLEENGVGSNFKTSTLSVSSFFKQEGDRLSDEDLFKFLADYKRSSSLQRRVKSIPGLLRLEISTAPEIINCCLTPEMLPVKPFPENRTRPHKEILEFPTREVYVPHTVYRNLLYVYPQRLNFVNKLASARNITIKIQFMCGEDASNAMPVIFGKSSGPEFLQEVYTAVTYHNKSPDFYEEVKIKLPAKLTVNHHLLFTFYHISCQQKQGASVETLLGYSWLPILLNERLQTGSYCLPVALEKLPPNYSMHSAEKVPLQNPPIKWAEGHKGVFNIEVQAVSSVHTQDNHLEKFFTLCHSLESQVTFPIRVLDQKISEMALEHELKLSIICLNSSRLEPLVLFLHLVLDKLFQLSVQPMVIAGQTANFSQFAFESVVAIANSLHNSKDLSKDQHGRNCLLASYVHYVFRLPEVQRDVPKSGAPTALLDPRSYHTYGRTSAAAVSSKLLQARVMSSSNPDLAGTHSAADEEVKNIMSSKIADRNCSRMSYYCSGSSDAPSSPAAPRPASKKHFHEELALQMVVSTGMVRETVFKYAWFFFELLVKSMAQHVHNMDKRDSFRRTRFSDRFMDDITTIVNVVTSEIAALLVKPQKENEQAEKMNISLAFFLYDLLSLMDRGFVFNLIRHYCSQLSAKLSNLPTLISMRLEFLRILCSHEHYLNLNLFFMNADTAPTSPCPSISSQNSSSCSSFQDQKIASMFDLTSEYRQQHFLTGLLFTELAAALDAEGEGISKVQRKAVSAIHSLLSSHDLDPRCVKPEVKVKIAALYLPLVGIILDALPQLCDFTVADTRRYRTSGSDEEQEGAGAINQNVALAIAGNNFNLKTSGIVLSSLPYKQYNMLNADTTRNLMICFLWIMKNADQSLIRKWIADLPSTQLNRILDLLFICVLCFEYKGKQSSDKVSTQVLQKSRDVKARLEEALLRGEGARGEMMRRRAPGNDRFPGLNENLRWKKEQTHWRQANEKLDKTKAELDQEALISGNLATEAHLIILDMQENIIQASSALDCKDSLLGGVLRVLVNSLNCDQSTTYLTHCFATLRALIAKFGDLLFEEEVEQCFDLCHQVLHHCSSSMDVTRSQACATLYLLMRFSFGATSNFARVKMQVTMSLASLVGRAPDFNEEHLRRSLRTILAYSEEDTAMQMTPFPTQVEELLCNLNSILYDTVKMREFQEDPEMLMDLMYRIAKSYQASPDLRLTWLQNMAEKHTKKKCYTEAAMCLVHAAALVAEYLSMLEDHSYLPVGSVSFQNISSNVLEESVVSEDTLSPDEDGVCAGQYFTESGLVGLLEQAAELFSTGGLYETVNEVYKLVIPILEAHREFRKLTLTHSKLQRAFDSIVNKDHKRMFGTYFRVGFFGSKFGDLDEQEFVYKEPAITKLPEISHRLEAFYGQCFGAEFVEVIKDSTPVDKTKLDPNKAYIQITFVEPYFDEYEMKDRVTYFEKNFNLRRFMYTTPFTLEGRPRGELHEQYRRNTVLTTMHAFPYIKTRISVIQKEEFVLTPIEVAIEDMKKKTLQLAVAINQEPPDAKMLQMVLQGSVGATVNQGPLEVAQVFLAEIPADPKLYRHHNKLRLCFKEFIMRCGEAVEKNKRLITADQREYQQELKKNYNKLKENLRPMIERKIPELYKPIFRVESQKRDSFHRSSFRKCETQLSQGS

SEQ ID NO: 23417 - protein, 66 aa, Homo sapiens
  Payload ID: 4657
  Gene Symbol: DOCK8
  Gene Name: dedicator of cytokinesis 8
  ENSP ID: ENSP00000417082
MTHLNSLDVQLAQELGDFTDDDLDVVFTPKECRTLQPSLPEEGVELDPHVRDCVQTYIREWLIVNR

SEQ ID NO: 23418 - protein, 502 aa, Homo sapiens
  Payload ID: 4657
  Gene Symbol: DOCK8
  Gene Name: dedicator of cytokinesis 8
  ENSP ID: ENSP00000417691
MTHLNSLDVQLAQELGDFTDDDLDVVFTPKECRTLQPSLPEEGVELDPHVRDCVQTYIREWLIVNRKNQGSPEICGFKKTGSRKDFHKTLPKQTFESETLECSEPAAQAGPRHLNVLCDVSGKGPVTACDFDLRSLQPDKRLENLLQQVSAEDFEKQNEEARRTNRQAELFALYPSVDEEDAVEIRPVPECPKEHLGNRILVKLLTLKFEIEIEPLFASIALYDVKERKKISENFHCDLNSDQFKGFLRAHTPSVAASSQARSAVFSVTYPSSDIYLVVKIEKVLQQGEIGDCAEPYTVIKESDGGKSKEKIEKLKLQAESFCQRLGKYRMPFAWAPISLSSFFNVSTLEREVTDVDSVVGRSSVGERRTLAQSRRLSERALSLEENGVGSNFKTSTLSVSSFFKQEGDRLSDEDLFKFLADYKRSSSLQRRVKSIPGLLRLEISTAPEIINCCLTPEMLPVKPFPENRTRPHKEILEFPTREVYVPHTVYREVFQVSAVAH

SEQ ID NO: 23419 - protein, 107 aa, Homo sapiens
  Payload ID: 4657
  Gene Symbol: DOCK8
  Gene Name: dedicator of cytokinesis 8
  ENSP ID: ENSP00000418318
MTHLNSLDVQLAQELGDFTDDDLDVVFTPKECRTLQPSLPEEGVELDPHVRDCVQTYIREWLIVNRKNQGSPEICGFKKTGSRKDFHKTLPKQTFESETLECSEPAA

SEQ ID NO: 23420 - protein, 66 aa, Homo sapiens
  Payload ID: 4657
  Gene Symbol: DOCK8
  Gene Name: dedicator of cytokinesis 8
  ENSP ID: ENSP00000418587
MATLPSAERRAFALKINRYSSAEIRKQFTLPPNLGQYHRQSISTSGFPSLQLRRSFSMLSRLVLNS

SEQ ID NO: 23421 - protein, 1999 aa, Homo sapiens
  Payload ID: 4657
  Gene Symbol: DOCK8
  Gene Name: dedicator of cytokinesis 8
  Uniprot ID: Q8NF50
  ENSP ID: ENSP00000419438
MTHLNSLDVQLAQELGDFTDDDLDVVFTPKECRTLQPSLPEEGVELDPHVRDCVQTYIREWLIVNRKNQGSPEICGFKKTGSRKDFHKTLPKQTFESETLECSEPAAQAGPRHLNVLCDVSGKGPVTACDFDLRSLQPDKRLENLLQQVSAEDFEKQNEEARRTNRQAELFALYPSVDEEDAVEIRPVPECPKEHLGNRILVKLLTLKFEIEIEPLFASIALYDVKERKKISENFHCDLNSDQFKGFLRAHTPSVAASSQARSAVFSVTYPSSDIYLVVKIEKVLQQGEIGDCAEPYTVIKESDGGKSKEKIEKLKLQAESFCQRLGKYRMPFAWAPISLSSFFNVSTLEREVTDVDSVVGRSSVGERRTLAQSRRLSERALSLEENGVGSNFKTSTLSVSSFFKQEGDRLSDEDLFKFLADYKRSSSLQRRVKSIPGLLRLEISTAPEIINCCLTPEMLPVKPFPENRTRPHKEILEFPTREVYVPHTVYRNLLYVYPQRLNFVNKLASARNITIKIQFMCGEDASNAMPVIFGKSSGPEFLQEVYTAVTYHNKSPDFYEEVKIKLPAKLTVNHHLLFTFYHISCQQKQGASVETLLGYSWLPILLNERLQTGSYCLPVALEKLPPNYSMHSAEKVPLQNPPIKWAEGHKGVFNIEVQAVSSVHTQDNHLEKFFTLCHSLESQVTFPIRVLDQKISEMALEHELKLSIICLNSSRLEPLVLFLHLVLDKLFQLSVQPMVIAGQTANFSQFAFESVVAIANSLHNSKDLSKDQHGRNCLLASYVHYVFRLPEVQRDVPKSGAPTALLDPRSYHTYGRTSAAAVSSKLLQARVMSSSNPDLAGTHSAADEEVKNIMSSKHFHEELALQMVVSTGMVRETVFKYAWFFFELLVKSMAQHVHNMDKRDSFRRTRFSDRFMDDITTIVNVVTSEIAALLVKPQKENEQAEKMNISLAFFLYDLLSLMDRGFVFNLIRHYCSQLSAKLSNLPTLISMRLEFLRILCSHEHYLNLNLFFMNADTAPTSPCPSISSQNSSSCSSFQDQKIASMFDLTSEYRQQHFLTGLLFTELAAALDAEGEGISKVQRKAVSAIHSLLSSHDLDPRCVKPEVKVKIAALYLPLVGIILDALPQLCDFTVADTRRYRTSGSDEEQEGAGAINQNVALAIAGNNFNLKTSGIVLSSLPYKQYNMLNADTTRNLMICFLWIMKNADQSLIRKWIADLPSTQLNRILDLLFICVLCFEYKGKQSSDKVSTQVLQKSRDVKARLEEALLRGEGARGEMMRRRAPGNDRFPGLNENLRWKKEQTHWRQANEKLDKTKAELDQEALISGNLATEAHLIILDMQENIIQASSALDCKDSLLGGVLRVLVNSLNCDQSTTYLTHCFATLRALIAKFGDLLFEEEVEQCFDLCHQVLHHCSSSMDVTRSQACATLYLLMRFSFGATSNFARVKMQVTMSLASLVGRAPDFNEEHLRRSLRTILAYSEEDTAMQMTPFPTQVEELLCNLNSILYDTVKMREFQEDPEMLMDLMYRIAKSYQASPDLRLTWLQNMAEKHTKKKCYTEAAMCLVHAAALVAEYLSMLEDHSYLPVGSVSFQNISSNVLEESVVSEDTLSPDEDGVCAGQYFTESGLVGLLEQAAELFSTGGLYETVNEVYKLVIPILEAHREFRKLTLTHSKLQRAFDSIVNKDHKRMFGTYFRVGFFGSKFGDLDEQEFVYKEPAITKLPEISHRLEAFYGQCFGAEFVEVIKDSTPVDKTKLDPNKAYIQITFVEPYFDEYEMKDRVTYFEKNFNLRRFMYTTPFTLEGRPRGELHEQYRRNTVLTTMHAFPYIKTRISVIQKEEFVLTPIEVAIEDMKKKTLQLAVAINQEPPDAKMLQMVLQGSVGATVNQGPLEVAQVFLAEIPADPKLYRHHNKLRLCFKEFIMRCGEAVEKNKRLITADQREYQQELKKNYNKLKENLRPMIERKIPELYKPIFRVESQKRDSFHRSSFRKCETQLSQGS

SEQ ID NO: 23422 - protein, 50 aa, Homo sapiens
  Payload ID: 4657
  Gene Symbol: DOCK8
  Gene Name: dedicator of cytokinesis 8
  ENSP ID: ENSP00000436628
MATLPSAERRAFALKINSHALSPRLEYSGAISAHCNLCLPDSSDSPASAS

SEQ ID NO: 23423 - protein, 2102 aa, Homo sapiens
  Payload ID: 4658
  Gene Symbol: DOCK9
  Gene Name: dedicator of cytokinesis 9
  ENSP ID: ENSP00000341086
MSQPPLLPASAETRKFTRALSKPGTAAELRQSVSEVVRGSVLLAKPKLIEPLDYENVIVQKKTQILNDCLREMLLFPYDDFQTAILRRQGRYICSTVPAKAEEEAQSLFVTECIKTYNSDWHLVNYKYEDYSGEFRQLPNKVVKLDKLPVHVYEVDEEVDKDEDAASLGSQKGGITKHGWLYKGNMNSAISVTMRSFKRRFFHLIQLGDGSYNLNFYKDEKISKEPKGSIFLDSCMGVVQNNKVRRFAFELKMQDKSSYLLAADSEVEMEEWITILNKILQLNFEAAMQEKRNGDSHEDDEQSKLEGSGSGLDSYLPELAKSAREAEIKLKSESRVKLFYLDPDAQKLDFSSAEPEVKSFEEKFGKRILVKCNDLSFNLQCCVAENEEGPTTNVEPFFVTLSLFDIKYNRKISADFHVDLNHFSVRQMLATTSPALMNGSGQSPSVLKGILHEAAMQYPKQGIFSVTCPHPDIFLVARIEKVLQGSITHCAEPYMKSSDSSKVAQKVLKNAKQACQRLGQYRMPFAWAARTLFKDASGNLDKNARFSAIYRQDSNKLSNDDMLKLLADFRKPEKMAKLPVILGNLDITIDNVSSDFPNYVNSSYIPTKQFETCSKTPITFEVEEFVPCIPKHTQPYTIYTNHLYVYPKYLKYDSQKSFAKARNIAICIEFKDSDEEDSQPLKCIYGRPGGPVFTRSAFAAVLHHHQNPEFYDEIKIELPTQLHEKHHLLLTFFHVSCDNSSKGSTKKRDVVETQVGYSWLPLLKDGRVVTSEQHIPVSANLPSGYLGYQELGMGRHYGPEIKWVDGGKPLLKISTHLVSTVYTQDQHLHNFFQYCQKTESGAQALGNELVKYLKSLHAMEGHVMIAFLPTILNQLFRVLTRATQEEVAVNVTRVIIHVVAQCHEEGLESHLRSYVKYAYKAEPYVASEYKTVHEELTKSMTTILKPSADFLTSNKLLKYSWFFFDVLIKSMAQHLIENSKVKLLRNQRFPASYHHAVETVVNMLMPHITQKFRDNPEASKNANHSLAVFIKRCFTFMDRGFVFKQINNYISCFAPGDPKTLFEYKFEFLRVVCNHEHYIPLNLPMPFGKGRIQRYQDLQLDYSLTDEFCRNHFLVGLLLREVGTALQEFREVRLIAISVLKNLLIKHSFDDRYASRSHQARIATLYLPLFGLLIENVQRINVRDVSPFPVNAGMTVKDESLALPAVNPLVTPQKGSTLDNSLHKDLLGAISGIASPYTTSTPNINSVRNADSRGSLISTDSGNSLPERNSEKSNSLDKHQQSSTLGNSVVRCDKLDQSEIKSLLMCFLYILKSMSDDALFTYWNKASTSELMDFFTISEVCLHQFQYMGKRYIARTGMMHARLQQLGSLDNSLTFNHSYGHSDADVLHQSLLEANIATEVCLTALDTLSLFTLAFKNQLLADHGHNPLMKKVFDVYLCFLQKHQSETALKNVFTALRSLIYKFPSTFYEGRADMCAALCYEILKCCNSKLSSIRTEASQLLYFLMRNNFDYTGKKSFVRTHLQVIISVSQLIADVVGIGGTRFQQSLSIINNCANSDRLIKHTSFSSDVKDLTKRIRTVLMATAQMKEHENDPEMLVDLQYSLAKSYASTPELRKTWLDSMARIHVKNGDLSEAAMCYVHVTALVAEYLTRKEAVQWEPPLLPHSHSACLRRSRGGVFRQGCTAFRVITPNIDEEASMMEDVGMQDVHFNEDVLMELLEQCADGLWKAERYELIADIYKLIIPIYEKRRDFERLAHLYDTLHRAYSKVTEVMHSGRRLLGTYFRVAFFGQVSQYQFTDSETDVEGFFEDEDGKEYIYKEPKLTPLSEISQRLLKLYSDKFGSENVKMIQDSGKVNPKDLDSKYAYIQVTHVIPFFDEKELQERKTEFERSHNIRRFMFEMPFTQTGKRQGGVEEQCKRRTILTAIHCFPYVKKRIPVMYQHHTDLNPIEVAIDEMSKKVAELRQLCSSAEVDMIKLQLKLQGSVSVQVNAGPLAYARAFLDDTNTKRYPDNKVKLLKEVFRQFVEACGQALAVNERLIKEDQLEYQEEMKANYREMAKELSEIMHEQVRRSAPWRRRRASYRIPFTSSTPSVGLQQAQWFTG

SEQ ID NO: 23424 - protein, 424 aa, Homo sapiens
  Payload ID: 4658
  Gene Symbol: DOCK9
  Gene Name: dedicator of cytokinesis 9
  ENSP ID: ENSP00000344702
MMHARLQQLGSLDNSLTFNHSYGHSDADVLHQSLLEANIATEVCLTALDTLSLFTLAFKNQLLADHGHNPLMKKVFDVYLCFLQKHQSETALKNVFTALRSLIYKFPSTFYEGRADMCAALCYEILKCCNSKLSSIRTEASQLLYFLMRNNFDYTGKKSFVRTHLQVIISVSQLIADVVGIGGTRFQQSLSIINNCANSDRLIKHTSFSSDVKDLTKRIRTVLMATAQMKEHENDPEMLVDLQYSLAKSYASTPELRKTWLDSMARIHVKNGDLSEAAMCYVHVTALVAEYLTRKGVFRQGCTAFRVITPNIDEEASMMEDVGMQDVHFNEDVLMELLEQCADGLWKAERYELIADIYKLIIPIYEKRRDFERLAHLYDTLHRAYSKVTEVMHSGRRLLGTYFRVAFFGQVSLLSILQTVLSPL

SEQ ID NO: 23425 - protein, 2068 aa, Homo sapiens
  Payload ID: 4658
  Gene Symbol: DOCK9
  Gene Name: dedicator of cytokinesis 9
  Uniprot ID: Q9BZ29
  ENSP ID: ENSP00000365643
MQADKCRTSSRSVKKELVIESPLQYKDAAQGEVEAESPGPVPAKPKLIEPLDYENVIVQKKTQILNDCLREMLLFPYDDFQTAILRRQGRYICSTVPAKAEEEAQSLFVTECIKTYNSDWHLVNYKYEDYSGEFRQLPNKVVKLDKLPVHVYEVDEEVDKDEDAASLGSQKGGITKHGWLYKGNMNSAISVTMRSFKRRFFHLIQLGDGSYNLNFYKDEKISKEPKGSIFLDSCMGVVQNNKVRRFAFELKMQDKSSYLLAADSEVEMEEWITILNKILQLNFEAAMQEKRNGDSHEDDEQSKLEGSGSGLDSYLPELAKSAREAEIKLKSESRVKLFYLDPDAQKLDFSSAEPEVKSFEEKFGKRILVKCNDLSFNLQCCVAENEEGPTTNVEPFFVTLSLFDIKYNRKISADFHVDLNHFSVRQMLATTSPALMNGSGQSPSVLKGILHEAAMQYPKQGIFSVTCPHPDIFLVARIEKVLQGSITHCAEPYMKSSDSSKVAQKVLKNAKQACQRLGQYRMPFAWAARTLFKDASGNLDKNARFSAIYRQDSNKLSNDDMLKLLADFRKPEKMAKLPVILGNLDITIDNVSSDFPNYVNSSYIPTKQFETCSKTPITFEVEEFVPCIPKHTQPYTIYTNHLYVYPKYLKYDSQKSFAKARNIAICIEFKDSDEEDSQPLKCIYGRPGGPVFTRSAFAAVLHHHQNPEFYDEIKIELPTQLHEKHHLLLTFFHVSCDNSSKGSTKKRDVVETQVGYSWLPLLKDGRVVTSEQHIPVSANLPSGYLGYQELGMGRHYGPEIKWVDGGKPLLKISTHLVSTVYTQDQHLHNFFQYCQKTESGAQALGNELVKYLKSLHAMEGHVMIAFLPTILNQLFRVLTRATQEEVAVNVTRVIIHVVAQCHEEGLESHLRSYVKYAYKAEPYVASEYKTVHEELTKSMTTILKPSADFLTSNKLLKYSWFFFDVLIKSMAQHLIENSKVKLLRNQRFPASYHHAVETVVNMLMPHITQKFRDNPEASKNANHSLAVFIKRCFTFMDRGFVFKQINNYISCFAPGDPKTLFEYKFEFLRVVCNHEHYIPLNLPMPFGKGRIQRYQDLQLDYSLTDEFCRNHFLVGLLLREVGTALQEFREVRLIAISVLKNLLIKHSFDDRYASRSHQARIATLYLPLFGLLIENVQRINVRDVSPFPVNAGMTVKDESLALPAVNPLVTPQKGSTLDNSLHKDLLGAISGIASPYTTSTPNINSVRNADSRGSLISTDSGNSLPERNSEKSNSLDKHQQSSTLGNSVVRCDKLDQSEIKSLLMCFLYILKSMSDDALFTYWNKASTSELMDFFTISEVCLHQFQYMGKRYIARTGMMHARLQQLGSLDNSLTFNHSYGHSDADVLHQSLLEANIATEVCLTALDTLSLFTLAFKNQLLADHGHNPLMKKVFDVYLCFLQKHQSETALKNVFTALRSLIYKFPSTFYEGRADMCAALCYEILKCCNSKLSSIRTEASQLLYFLMRNNFDYTGKKSFVRTHLQVIISVSQLIADVVGIGGTRFQQSLSIINNCANSDRLIKHTSFSSDVKDLTKRIRTVLMATAQMKEHENDPEMLVDLQYSLAKSYASTPELRKTWLDSMARIHVKNGDLSEAAMCYVHVTALVAEYLTRKEAVQWEPPLLPHSHSACLRRSRGGVFRQGCTAFRVITPNIDEEASMMEDVGMQDVHFNEDVLMELLEQCADGLWKAERYELIADIYKLIIPIYEKRRDFERLAHLYDTLHRAYSKVTEVMHSGRRLLGTYFRVAFFGQAAQYQFTDSETDVEGFFEDEDGKEYIYKEPKLTPLSEISQRLLKLYSDKFGSENVKMIQDSGKVNPKDLDSKYAYIQVTHVIPFFDEKELQERKTEFERSHNIRRFMFEMPFTQTGKRQGGVEEQCKRRTILTAIHCFPYVKKRIPVMYQHHTDLNPIEVAIDEMSKKVAELRQLCSSAEVDMIKLQLKLQGSVSVQVNAGPLAYARAFLDDTNTKRYPDNKVKLLKEVFRQFVEACGQALAVNERLIKEDQLEYQEEMKANYREMAKELSEIMHEQLG

SEQ ID NO: 23426 - protein, 669 aa, Homo sapiens
  Payload ID: 4658
  Gene Symbol: DOCK9
  Gene Name: dedicator of cytokinesis 9
  ENSP ID: ENSP00000383087
  MOD_RES (1)..(1): Any amino acid
XFKNQLLADHGHNPLMKKVFDVYLCFLQKHQSETALKNVFTALRSLIYKFPSTFYEGRADMCAALCYEILKCCNSKLSSIRTEASQLLYFLMRNNFDYTGKKSFVRTHLQVIISVSQLIADVVGIGGTRFQQSLSIINNCANSDRLIKHTSFSSDVKDLTKRIRTVLMATAQMKEHENDPEMLVDLQYSLAKSYASTPELRKTWLDSMARIHVKNGDLSEAAMCYVHVTALVAEYLTRKGVFRQGCTAFRVITPNIDEEASMMEDVGMQDVHFNEDVLMELLEQCADGLWKAERYELIADIYKLIIPIYEKRRDFERLAHLYDTLHRAYSKVTEVMHSGRRLLGTYFRVAFFGQQYQFTDSETDVEGFFEDEDGKEYIYKEPKLTPLSEISQRLLKLYSDKFGSENVKMIQDSGKVNPKDLDSKYAYIQVTHVIPFFDEKELQERKTEFERSHNIRRFMFEMPFTQTGKRQGGVEEQCKRRTILTAIHCFPYVKKRIPVMYQHHTDLNPIEVAIDEMSKKVAELRQLCSSAEVDMIKLQLKLQGSVSVQVNAGPLAYARAFLDDTNTKRYPDNKVKLLKEVFRQFVEACGQALAVNERLIKEDQLEYQEEMKANYREMAKELSEIMHEQICPLEEKTSVLPNSLHIFNAISGTPTSTMVHGMTSSSSVV

SEQ ID NO: 23427 - protein, 390 aa, Homo sapiens
  Payload ID: 4658
  Gene Symbol: DOCK9
  Gene Name: dedicator of cytokinesis 9
  ENSP ID: ENSP00000388193
  MOD_RES (1)..(1): Any amino acid
XQMKEHENDPEMLVDLQYSLAKSYASTPELRKTWLDSMARIHVKNGDLSEAAMCYVHVTALVAEYLTRKEAVQWEPPLLPHSHSACLRRSRGGVFRQGCTAFRVITPNIDEEASMMEDVGMQDVHFNEDVLMELLEQCADGLWKAERYELIADIYKLIIPIYEKRRDFERLAHLYDTLHRAYSKVTEVMHSGRRLLGTYFRVAFFGQGFFEDEDGKEYIYKEPKLTPLSEISQRLLKLYSDKFGSENVKMIQDSGKVNPKDLDSKYAYIQVTHVIPFFDEKELQERKTEFERSHNIRRFMFEMPFTQTGKRQGGVEEQCKRRTILTAIHCFPYVKKRIPVMYQHHTDLNPIEVAIDEMSKKVAELRQLCSSAEVDMIKLQLKLQGSVSVQ

SEQ ID NO: 23428 - protein, 116 aa, Homo sapiens
  Payload ID: 4658
  Gene Symbol: DOCK9
  Gene Name: dedicator of cytokinesis 9
  ENSP ID: ENSP00000396897
  MOD_RES (1)..(1): Any amino acid
XSELMDFFTISEVCLHQFQYMGKRYIARNQEGLGPIVHDRKSQTLPVSRNRTGMMHARLQQLGSLDNSLTFNHSYGHSDADVLHQSLLEANIATEVCLTALDTLSLFTLAFKNQLL

SEQ ID NO: 23429 - protein, 2079 aa, Homo sapiens
  Payload ID: 4658
  Gene Symbol: DOCK9
  Gene Name: dedicator of cytokinesis 9
  ENSP ID: ENSP00000401958
MSQPPLLPASAETRKFTRALSKPGTAAELRQSVSEVVRGSVLLAKPKLIEPLDYENVIVQKKTQILNDCLREMLLFPYDDFQTAILRRQGRYICSTVPAKAEEEAQSLFVTECIKTYNSDWHLVNYKYEDYSGEFRQLPNKVVKLDKLPVHVYEVDEEVDKDEDAASLGSQKGGITKHGWLYKGNMNSAISVTMRSFKRRFFHLIQLGDGSYNLNFYKDEKISKEPKGSIFLDSCMGVVQNNKVRRFAFELKMQDKSSYLLAADSEVEMEEWITILNKILQLNFEAAMQEKRNGDSHEDDEQSKLEGSGSGLDSYLPELAKSAREAEIKLKSESRVKLFYLDPDAQKLDFSSAEPEVKSFEEKFGKRILVKCNDLSFNLQCCVAENEEGPTTNVEPFFVTLSLFDIKYNRKISADFHVDLNHFSVRQMLATTSPALMNGSGQSPSVLKGILHEAAMQYPKQGIFSVTCPHPDIFLVARIEKVLQGSITHCAEPYMKSSDSSKVAQKVLKNAKQACQRLGQYRMPFAWAARTLFKDASGNLDKNARFSAIYRQDSNKLSNDDMLKLLADFRKPEKMAKLPVILGNLDITIDNVSSDFPNYVNSSYIPTKQFETCSKTPITFEVEEFVPCIPKHTQPYTIYTNHLYVYPKYLKYDSQKSFAKARNIAICIEFKDSDEEDSQPLKCIYGRPGGPVFTRSAFAAVLHHHQNPEFYDEIKIELPTQLHEKHHLLLTFFHVSCDNSSKGSTKKRDVVETQVGYSWLPLLKDGRVVTSEQHIPVSANLPSGYLGYQELGMGRHYGPEIKWVDGGKPLLKISTHLVSTVYTQDQHLHNFFQYCQKTESGAQALGNELVKYLKSLHAMEGHVMIAFLPTILNQLFRVLTRATQEEVAVNVTRVIIHVVAQCHEEGLESHLRSYVKYAYKAEPYVASEYKTVHEELTKSMTTILKPSADFLTSNKLLKYSWFFFDVLIKSMAQHLIENSKVKLLRNQRFPASYHHAVETVVNMLMPHITQKFRDNPEASKNANHSLAVFIKRCFTFMDRGFVFKQINNYISCFAPGDPKTLFEYKFEFLRVVCNHEHYIPLNLPMPFGKGRIQRYQDLQLDYSLTDEFCRNHFLVGLLLREVGTALQEFREVRLIAISVLKNLLIKHSFDDRYASRSHQARIATLYLPLFGLLIENVQRINVRDVSPFPVNAGMTVKDESLALPAVNPLVTPQKGSTLDNSLHKDLLGAISGIASPYTTSTPNINSVRNADSRGSLISTDSGNSLPERNSEKSNSLDKHQQSSTLGNSVVRCDKLDQSEIKSLLMCFLYILKSMSDDALFTYWNKASTSELMDFFTISEVCLHQFQYMGKRYIARTGMMHARLQQLGSLDNSLTFNHSYGHSDADVLHQSLLEANIATEVCLTALDTLSLFTLAFKNQLLADHGHNPLMKKVFDVYLCFLQKHQSETALKNVFTALRSLIYKFPSTFYEGRADMCAALCYEILKCCNSKLSSIRTEASQLLYFLMRNNFDYTGKKSFVRTHLQVIISVSQLIADVVGIGGTRFQQSLSIINNCANSDRLIKHTSFSSDVKDLTKRIRTVLMATAQMKEHENDPEMLVDLQYSLAKSYASTPELRKTWLDSMARIHVKNGDLSEAAMCYVHVTALVAEYLTRKGVFRQGCTAFRVITPNIDEEASMMEDVGMQDVHFNEDVLMELLEQCADGLWKAERYELIADIYKLIIPIYEKRRDFERLAHLYDTLHRAYSKVTEVMHSGRRLLGTYFRVAFFGQAAQYQFTDSETDVEGFFEDEDGKEYIYKEPKLTPLSEISQRLLKLYSDKFGSENVKMIQDSGKVNPKDLDSKYAYIQVTHVIPFFDEKELQERKTEFERSHNIRRFMFEMPFTQTGKRQGGVEEQCKRRTILTAIHCFPYVKKRIPVMYQHHTDLNPIEVAIDEMSKKVAELRQLCSSAEVDMIKLQLKLQGSVSVQVNAGPLAYARAFLDDTNTKRYPDNKVKLLKEVFRQFVEACGQALAVNERLIKEDQLEYQEEMKANYREMAKELSEIMHEQVRRSAPWRRRRASYRIPFTSSTPSVGLQQAQWFTG

SEQ ID NO: 23430 - protein, 250 aa, Homo sapiens
  Payload ID: 4658
  Gene Symbol: DOCK9
  Gene Name: dedicator of cytokinesis 9
  ENSP ID: ENSP00000403528
ADSRGSLISTDSGNSLPERNSEKSNSLDKHQQSSTLGNSVVRCDKLDQSEIKSLLMCFLYILKSMSDDALFTYWNKASTSELMDFFTISEVCLHQFQYMGKRYIASVRKISSVLGISVDNGYGHSDADVLHQSLLEANIATEVCLTALDTLSLFTLAFKNQLLADHGHNPLMKKVFDVYLCFLQKHQSETALKNVFTALRSLIYKFPSTFYEGRADMCAALCYEILKCCNSKLSSIRTEASQLLYFLMRN

SEQ ID NO: 23431 - protein, 2101 aa, Homo sapiens [sequence omitted]

SEQ ID NO: 23432 - protein, 203 aa, Homo sapiens
  Payload ID: 4658
  Gene Symbol: DOCK9
  Gene Name: dedicator of cytokinesis 9
  ENSP ID: ENSP00000407610
RKTWLDSMARIHVKNGDLSEAAMCYVHVTALVAEYLTRKGVFRQGCTAFRVITPNIDEEASMMEDVGMQDVHFNEDVLMELLEQCADGLWKAERYELIADIYKLIIPIYEKRRDFERLAHLYDTLHRAYSKVTEVMHSGRRLLGTYFRVAFFGQGFFEDEDGKEYIYKEPKLTPLSEISQRLLKLYSDKFGSENVKMIQDSGK

SEQ ID NO: 23433 - protein, 1254 aa, Homo sapiens
  Payload ID: 4658
  Gene Symbol: DOCK9
  Gene Name: dedicator of cytokinesis 9
  ENSP ID: ENSP00000413781
MSQPPLLPASAETRKFTRALSKPGTAAELRQSVSEVVRGSVLLAKPKLIEPLDYENVIVQKKTQILNDCLREMLLFPYDDFQTAILRRQGRYICSTVPAKAEEEAQSLFVTECIKTYNSDWHLVNYKYEDYSGEFRQLPNKVVKLDKLPVHVYEVDEEVDKDEDAASLGSQKGGITKHGWLYKGNMNSAISVTMRSFKRRFFHLIQLGDGSYNLNFYKDEKISKEPKGSIFLDSCMGVVQNNKVRRFAFELKMQDKSSYLLAADSEVEMEEWITILNKILQLNFEAAMQEKRNGDSHEDDEQSKLEGSGSGLDSYLPELAKSAREAEIKLKSESRVKLFYLDPDAQKLDFSSAEPEVKSFEEKFGKRILVKCNDLSFNLQCCVAENEEGPTTNVEPFFVTLSLFDIKYNRKISADFHVDLNHFSVRQMLATTSPALMNGSGQSPSVLKGILHEAAMQYPKQGIFSVTCPHPDIFLVARIEKVLQGSITHCAEPYMKSSDSSKVAQKVLKNAKQACQRLGQYRMPFAWAARTLFKDASGNLDKNARFSAIYRQDSNKLSNDDMLKLLADFRKPEKMAKLPVILGNLDITIDNVSSDFPNYVNSSYIPTKQFETCSKTPITFEVEEFVPCIPKHTQPYTIYTNHLYVYPKYLKYDSQKSFAKARNIAICIEFKDSDEEDSQPLKCIYGRPGGPVFTRSAFAAVLHHHQNPEFYDEIKIELPTQLHEKHHLLLTFFHVSCDNSSKGSTKKRDVVETQVGYSWLPLLKDGRVVTSEQHIPVSANLPSGYLGYQELGMGRHYGPEIKWVDGGKPLLKISTHLVSTVYTQDQHLHNFFQYCQKTESGAQALGNELVKYLKSLHAMEGHVMIAFLPTILNQLFRVLTRATQEEVAVNVTRVIIHVVAQCHEEGLESHLRSYVKYAYKAEPYVASEYKTVHEELTKSMTTILKPSADFLTSNKLLKYSWFFFDVLIKSMAQHLIENSKVKLLRNQRFPASYHHAVETVVNMLMPHITQKFRDNPEASKNANHSLAVFIKRCFTFMDRGFVFKQINNYISCFAPGDPKTLFEYKFEFLRVVCNHEHYIPLNLPMPFGKGRIQRYQDLQLDYSLTDEFCRNHFLVGLLLREVGTALQEFREVRLIAISVLKNLLIKHSFDDRYASRSHQARIATLYLPLFGLLIENVQRINVRDVSPFPVNAGMTVKDESLALPAVNPLVTPQKGSTLDNSLHKDLLGAISGIGNAPCSCGLLSTITLKVSWSQ

SEQ ID NO: 23434 - protein, 69 aa, Homo sapiens
  Payload ID: 4658
  Gene Symbol: DOCK9
  Gene Name: dedicator of cytokinesis 9
  ENSP ID: ENSP00000486269
MSQPPLLPASAETRKFTRALSKPGTAAELRQSVSEVVRGSVLLAAGEPLPVDPFSLESVMCPGSASSSC

SEQ ID NO: 23435 - protein, 705 aa, Homo sapiens
  Payload ID: 4658
  Gene Symbol: DOCK9
  Gene Name: dedicator of cytokinesis 9
  ENSP ID: ENSP00000486606
MQADKCRTSSRSVKKELVIESPLQYKDAAQGEVEAESPGPVPAKPKLIEPLDYENVIVQKKTQILNDCLREMLLFPYDDFQTAILRRQGRYICSTVPAKAEEEAQSLFVTECIKTYNSDWHLVNYKYEDYSGEFRQLPNKVVKLDKLPVHVYEVDEEVDKDEDAASLGSQKGGITKHGWLYKGNMNSAISVTMRSFKRRFFHLIQLGDGSYNLNFYKDEKISKEPKGSIFLDSCMGVVQNNKVRRFAFELKMQDKSSYLLAADSEVEMEEWITILNKILQLNFEAAMQEKRNGDSHEDDEQSKLEGSGSGLDSYLPELAKSAREAEIKLKSESRVKLFYLDPDAQKLDFSSAEPEVKSFEEKFGKRILVKCNDLSFNLQCCVAENEEGPTTNVEPFFVTLSLFDIKYNRKISADFHVDLNHFSVRQMLATTSPALMNGSGQSPSVLKGILHEAAMQYPKQGIFSVTCPHPDIFLVARIEKVLQGSITHCAEPYMKSSDSSKVAQKVLKNAKQACQRLGQYRMPFAWAARTLFKDASGNLDKNARFSAIYRQDSNKLSNDDMLKLLADFRKPEKMAKLPVILGNLDITIDNVSSDFPNYVNSSYIPTKQFETCSKTPITFEVEEFVPCIPKHTQPYTIYTNHLYVYPKYLKYDSQKSFAKARNIAICIEFKDSDEEDSQPLKTWWASFHKKRLCCSFTPSPKPRIL

SEQ ID NO: 23436 - protein, 1253 aa, Homo sapiens
  Payload ID: 4658
  Gene Symbol: DOCK9
  Gene Name: dedicator of cytokinesis 9
  Uniprot ID: Q9BZ29
  ENSP ID: ENSP00000487551
MQADKCRTSSRSVKKELVIESPLQYKDAAQGEVEAESPGPVPAKPKLIEPLDYENVIVQKKTQILNDCLREMLLFPYDDFQTAILRRQGRYICSTVPAKAEEEAQSLFVTECIKTYNSDWHLVNYKYEDYSGEFRQLPNKVVKLDKLPVHVYEVDEEVDKDEDAASLGSQKGGITKHGWLYKGNMNSAISVTMRSFKRRFFHLIQLGDGSYNLNFYKDEKISKEPKGSIFLDSCMGVVQNNKVRRFAFELKMQDKSSYLLAADSEVEMEEWITILNKILQLNFEAAMQEKRNGDSHEDDEQSKLEGSGSGLDSYLPELAKSAREAEIKLKSESRVKLFYLDPDAQKLDFSSAEPEVKSFEEKFGKRILVKCNDLSFNLQCCVAENEEGPTTNVEPFFVTLSLFDIKYNRKISADFHVDLNHFSVRQMLATTSPALMNGSGQSPSVLKGILHEAAMQYPKQGIFSVTCPHPDIFLVARIEKVLQGSITHCAEPYMKSSDSSKVAQKVLKNAKQACQRLGQYRMPFAWAARTLFKDASGNLDKNARFSAIYRQDSNKLSNDDMLKLLADFRKPEKMAKLPVILGNLDITIDNVSSDFPNYVNSSYIPTKQFETCSKTPITFEVEEFVPCIPKHTQPYTIYTNHLYVYPKYLKYDSQKSFAKARNIAICIEFKDSDEEDSQPLKCIYGRPGGPVFTRSAFAAVLHHHQNPEFYDEIKIELPTQLHEKHHLLLTFFHVSCDNSSKGSTKKRDVVETQVGYSWLPLLKDGRVVTSEQHIPVSANLPSGYLGYQELGMGRHYGPEIKWVDGGKPLLKISTHLVSTVYTQDQHLHNFFQYCQKTESGAQALGNELVKYLKSLHAMEGHVMIAFLPTILNQLFRVLTRATQEEVAVNVTRVIIHVVAQCHEEGLESHLRSYVKYAYKAEPYVASEYKTVHEELTKSMTTILKPSADFLTSNKLLKYSWFFFDVLIKSMAQHLIENSKVKLLRNQRFPASYHHAVETVVNMLMPHITQKFRDNPEASKNANHSLAVFIKRCFTFMDRGFVFKQINNYISCFAPGDPKTLFEYKFEFLRVVCNHEHYIPLNLPMPFGKGRIQRYQDLQLDYSLTDEFCRNHFLVGLLLREVGTALQEFREVRLIAISVLKNLLIKHSFDDRYASRSHQARIATLYLPLFGLLIENVQRINVRDVSPFPVNAGMTVKDESLALPAVNPLVTPQKGSTLDNSLHKDLLGAISGIGNAPCSCGLLSTITLKVSWSQ

SEQ ID NO: 23437 - protein, 550 aa, Homo sapiens
  Payload ID: 4659
  Gene Symbol: DET1
  Gene Name: de-etiolated homolog 1 (Arabidopsis)
  Uniprot ID: Q7L5Y6
  ENSP ID: ENSP00000268148
MDHHVSTIKPRRIQNQNVIHRLERRRISSGKAGTHWHQVRVFHQNVFPNFTVVNVEKPPCFLRKFSPDGRYFIAFSSDQTSLEIYEYQGCQAAEDLLQGYEGEILSNGNDQRSVNIRGRLFERFFVLLHITNVAANGEHLNRECSLFTDDCRCVIVGSAAYLPDEPHPPFFEVYRNSESVTPNPRSPLEDYSLHIIDLHTGRLCDTRTFKCDKVVLSHNQGLYLYKNILAILSVQQQTIHVFQVTPEGTFIDVRTIGRFCYEDDLLTVSAVFPEVQRDSQTGMANPFRDPFINSLKHRLLVYLWRRAEQDGSAMAKRRFFQYFDQLRQLRMWKMQLLDENHLFIKYTSEDVVTLRVTDPSQASFFVVYNMVTTEVIAVFENTSDELLELFENFCDLFRNATLHSEVQFPCSASSNNFARQIQRRFKDTIINAKYGGHTEAVRRLLGQLPISAQSYSGSPYLDLSLFSYDDKWVSVMERPKTCGDHPIRFYARDSGLLKFEIQAGLLGRPINHTVRRLVAFTFHPFEPFAISVQRTNAEYVVNFHMRHCCT

SEQ ID NO: 23438 - protein, 561 aa, Homo sapiens
  Payload ID: 4659
  Gene Symbol: DET1
  Gene Name: de-etiolated homolog 1 (Arabidopsis)
  Uniprot ID: Q7L5Y6
  ENSP ID: ENSP00000408994
MVGQILKRDVIMDHHVSTIKPRRIQNQNVIHRLERRRISSGKAGTHWHQVRVFHQNVFPNFTVVNVEKPPCFLRKFSPDGRYFIAFSSDQTSLEIYEYQGCQAAEDLLQGYEGEILSNGNDQRSVNIRGRLFERFFVLLHITNVAANGEHLNRECSLFTDDCRCVIVGSAAYLPDEPHPPFFEVYRNSESVTPNPRSPLEDYSLHIIDLHTGRLCDTRTFKCDKVVLSHNQGLYLYKNILAILSVQQQTIHVFQVTPEGTFIDVRTIGRFCYEDDLLTVSAVFPEVQRDSQTGMANPFRDPFINSLKHRLLVYLWRRAEQDGSAMAKRRFFQYFDQLRQLRMWKMQLLDENHLFIKYTSEDVVTLRVTDPSQASFFVVYNMVTTEVIAVFENTSDELLELFENFCDLFRNATLHSEVQFPCSASSNNFARQIQRRFKDTIINAKYGGHTEAVRRLLGQLPISAQSYSGSPYLDLSLFSYDDKWVSVMERPKTCGDHPIRFYARDSGLLKFEIQAGLLGRPINHTVRRLVAFTFHPFEPFAISVQRTNAEYVVNFHMRHCCT

SEQ ID NO: 23439 - protein, 67 aa, Homo sapiens
  Payload ID: 4659
  Gene Symbol: DET1
  Gene Name: de-etiolated homolog 1 (Arabidopsis)
  ENSP ID: ENSP00000452613
MDHHVSTIKPRRIQNQNVIHRLERRRISSGKTRHLLKSMSTRAARQQRTYCRDTKEKSCPMAMTSGQ

SEQ ID NO: 23440 - protein, 67 aa, Homo sapiens; identical to SEQ ID NO: 23439
  Payload ID: 4659
  Gene Symbol: DET1
  Gene Name: de-etiolated homolog 1 (Arabidopsis)
  ENSP ID: ENSP00000452856

SEQ ID NO: 23441 - protein, 94 aa, Homo sapiens
  Payload ID: 4659
  Gene Symbol: DET1
  Gene Name: de-etiolated homolog 1 (Arabidopsis)
  ENSP ID: ENSP00000453900
MDHHVSTIKPRRIQNQNVIHRLERRRISSGKADQTSLEIYEYQGCQAAEDLLQGYEGEILSNGNDQRSVNIRGRLFERFFVLLHITNVAANGDS

SEQ ID NO: 23442 - protein, 561 aa, Homo sapiens; identical to SEQ ID NO: 23438
  Payload ID: 4659
  Gene Symbol: DET1
  Gene Name: de-etiolated homolog 1 (Arabidopsis)
  Uniprot ID: Q7L5Y6
  ENSP ID: ENSP00000456340

SEQ ID NO: 23443 - protein, 631 aa, Homo sapiens
  Payload ID: 4660
  Gene Symbol: DEF6
  Gene Name: DEF6 guanine nucleotide exchange factor
  Uniprot ID: Q9H4E7
  ENSP ID: ENSP00000319831
MALRKELLKSIWYAFTALDVEKSGKVSKSQLKVLSHNLYTVLHIPHDPVALEEHFRDDDDGPVSSQGYMPYLNKYILDKVEEGAFVKEHFDELCWTLTAKKNYRADSNGNSMLSNQDAFRLWCLFNFLSEDKYPLIMVPDEVEYLLKKVLSSMSLEVSLGELEELLAQEAQVAQTTGGLSVWQFLELFNSGRCLRGVGRDTLSMAIHEVYQELIQDVLKQGYLWKRGHLRRNWAERWFQLQPSCLCYFGSEECKEKRGIIPLDAHCCVEVLPDRDGKRCMFCVKTANRTYEMSASDTRQRQEWTAAIQMAIRLQAEGKTSLHKDLKQKRREQREQRERRRAAKEEELLRLQQLQEEKERKLQELELLQEAQRQAERLLQEEEERRRSQHRELQQALEGQLREAEQARASMQAEMELKEEEAARQRQRIKELEEMQQRLQEALQLEVKARRDEESVRIAQTRLLEEEEEKLKQLMQLKEEQERYIERAQQEKEELQQEMAQQSRSLQQAQQQLEEVRQNRQRADEDVEAAQRKLRQASTNVKHWNVQMNRLMHPIEPGDKRPVTSSSFSGFQPPLLAHRDSSLKRLTRWGSQGNRTPSPNSNEQQKSLNGGDEAPAPASTPQEDKLDPAPEN

SEQ ID NO: 23444 - protein, 129 aa, Homo sapiens
  Payload ID: 4660
  Gene Symbol: DEF6
  Gene Name: DEF6 guanine nucleotide exchange factor
  ENSP ID: ENSP00000415357
  MOD_RES (1)..(1): Any amino acid
XRDDDDGPVSSQGYMPYLNKYILDKDAFRLWCLFNFLSEDKYPLIMVPDEVEYLLKKVLSSMSLEVSLGELEELLAQEAQVAQTTGGLSVWQFLELFNSGRCLRGVGRDTLSMAIHEVYQELIQDVLKQ

SEQ ID NO: 23445 - protein, 113 aa, Homo sapiens
  Payload ID: 4661
  Gene Symbol: DAD1
  Gene Name: defender against cell death 1
  Uniprot ID: P61803
  ENSP ID: ENSP00000250498
MSASVVSVISRFLEEYLSSTPQRLKLLDAYLLYILLTGALQFGYCLLVGTFPFNSFLSGFISCVGSFILAVCLRIQINPQNKADFQGISPERAFADFLFASTILHLVVMNFVG

SEQ ID NO: 23446 - protein, 78 aa, Homo sapiens
  Payload ID: 4661
  Gene Symbol: DAD1
  Gene Name: defender against cell death 1
  ENSP ID: ENSP00000440242
MSASVVSVISRFLEEYLSSTPQRLKLLDAYLLYILLTGALQFGYCLLVGTFPFNSFLSGFISCVGSFILAGSLFEFPG

SEQ ID NO: 23447 - protein, 85 aa, Homo sapiens
  Payload ID: 4661
  Gene Symbol: DAD1
  Gene Name: defender against cell death 1
  ENSP ID: ENSP00000440821
MSASVVSVISRFLEEYLSSTPQRLKLLDAYLLYILLTGALQFVCLRIQINPQNKADFQGISPERAFADFLFASTILHLVVMNFVG

SEQ ID NO: 23448 - protein, 65 aa, Homo sapiens
  Payload ID: 4661
  Gene Symbol: DAD1
  Gene Name: defender against cell death 1
  ENSP ID: ENSP00000442074
MSASVVSVISRFLEEYLSSTPQRLKLLDAYLLYILLTGALHLPENTDQPTEQSGFPRHLPRASLC

SEQ ID NO: 23449 - protein, 94 aa, Homo sapiens
  Payload ID: 4662
  Gene Symbol: DEFA1
  Gene Name: defensin, alpha 1
  Uniprot ID: P59665
  ENSP ID: ENSP00000372126
MRTLAILAAILLVALQAQAEPLQARADEVAAAPEQIAADIPEVVVSLAWDESLAPKHPGSRKNMACYCRIPACIAGERRYGTCIYQGRLWAFCC

SEQ ID NO: 23450 - protein, 94 aa, Homo sapiens; identical to SEQ ID NO: 23449
  Payload ID: 4662
  Gene Symbol: DEFA1
  Gene Name: defensin, alpha 1
  Uniprot ID: P59665
  ENSP ID: ENSP00000372139

SEQ ID NO: 23451 - protein, 94 aa, Homo sapiens; identical to SEQ ID NO: 23449
  Payload ID: 4663
  Gene Symbol: DEFA1B
  Gene Name: defensin, alpha 1B
  Uniprot ID: P59665
  ENSP ID: ENSP00000372136

SEQ ID NO: 23452 - protein, 94 aa, Homo sapiens; identical to SEQ ID NO: 23449
  Payload ID: 4663
  Gene Symbol: DEFA1B
  Gene Name: defensin, alpha 1B
  Uniprot ID: P59665
  ENSP ID: ENSP00000443526

SEQ ID NO: 23453 - protein, 94 aa, Homo sapiens
  Payload ID: 4664
  Gene Symbol: DEFA3
  Gene Name: defensin, alpha 3, neutrophil-specific
  Uniprot ID: P59666
  ENSP ID: ENSP00000328359
MRTLAILAAILLVALQAQAEPLQARADEVAAAPEQIAADIPEVVVSLAWDESLAPKHPGSRKNMDCYCRIPACIAGERRYGTCIYQGRLWAFCC

SEQ ID NO: 23454 - protein, 94 aa, Homo sapiens; identical to SEQ ID NO: 23449
  Payload ID: 4664
  Gene Symbol: DEFA3
  Gene Name: defensin, alpha 3, neutrophil-specific
  ENSP ID: ENSP00000484218

SEQ ID NO: 23455 - protein, 97 aa, Homo sapiens
  Payload ID: 4665
  Gene Symbol: DEFA4
  Gene Name: defensin, alpha 4, corticostatin
  Uniprot ID: P12838
  ENSP ID: ENSP00000297435
MRIIALLAAILLVALQVRAGPLQARGDEAPGQEQRGPEDQDISISFAWDKSSALQVSGSTRGMVCSCRLVFCRRTELRVGNCLIGGVSFTYCCTRVD

SEQ ID NO: 23456 - protein, 94 aa, Homo sapiens
  Payload ID: 4666
  Gene Symbol: DEFA5
  Gene Name: defensin, alpha 5, Paneth cell-specific
  Uniprot ID: Q01523
  ENSP ID: ENSP00000329890
MRTIAILAAILLVALQAQAESLQERADEATTQKQSGEDNQDLAISFAGNGLSALRTSGSQARATCYCRTGRCATRESLSGVCEISGRLYRLCCR

SEQ ID NO: 23457 - protein, 100 aa, Homo sapiens
  Payload ID: 4667
  Gene Symbol: DEFA6
  Gene Name: defensin, alpha 6, Paneth cell-specific
  Uniprot ID: Q01524
  ENSP ID: ENSP00000297436
MRTLTILTAVLLVALQAKAEPLQAEDDPLQAKAYEADAQEQRGANDQDFAVSFAEDASSSLRALGSTRAFTCHCRRSCYSTEYSYGTCTVMGINHRFCCL

SEQ ID NO: 23458 - protein, 68 aa, Homo sapiens
  Payload ID: 4668
  Gene Symbol: DEFB1
  Gene Name: defensin, beta 1
  Uniprot ID: P60022
  ENSP ID: ENSP00000297439
MRTSYLLLFTLCLLLSEMASGGNFLTGLGHRSDHYNCVSSGGQCLYSACPIFTKIQGTCYRGKAKCCK

SEQ ID NO: 23459 - protein, 67 aa, Homo sapiens
  Payload ID: 4669
  Gene Symbol: DEFB103A
  Gene Name: defensin, beta 103A
  Uniprot ID: P81534
  ENSP ID: ENSP00000320951
MRIHYLLFALLFLFLVPVPGHGGIINTLQKYYCRVRGGRCAVLSCLPKEEQIGKCSTRGRKCCRRKK

SEQ ID NO: 23460 - protein, 67 aa, Homo sapiens; identical to SEQ ID NO: 23459
  Payload ID: 4670
  Gene Symbol: DEFB103B
  Gene Name: defensin, beta 103B
  Uniprot ID: P81534
  ENSP ID: ENSP00000324633

SEQ ID NO: 23461 - protein, 67 aa, Homo sapiens; identical to SEQ ID NO: 23459
  Payload ID: 4670
  Gene Symbol: DEFB103B
  Gene Name: defensin, beta 103B
  Uniprot ID: P81534
  ENSP ID: ENSP00000480773

SEQ ID NO: 23462 - protein, 72 aa, Homo sapiens
  Payload ID: 4671
  Gene Symbol: DEFB104A
  Gene Name: defensin, beta 104A
  Uniprot ID: Q8WTQ1
  ENSP ID: ENSP00000320813
MQRLVLLLAISLLLYQDLPVRSEFELDRICGYGTARCRKKCRSQEYRIGRCPNTYACCLRKWDESLLNRTKP

SEQ ID NO: 23463 - protein, 72 aa, Homo sapiens; identical to SEQ ID NO: 23462
  Payload ID: 4672
  Gene Symbol: DEFB104B
  Gene Name: defensin, beta 104B
  Uniprot ID: Q8WTQ1
  ENSP ID: ENSP00000322191

SEQ ID NO: 23464 - protein, 72 aa, Homo sapiens; identical to SEQ ID NO: 23462
  Payload ID: 4672
  Gene Symbol: DEFB104B
  Gene Name: defensin, beta 104B
  Uniprot ID: Q8WTQ1
  ENSP ID: ENSP00000481976

SEQ ID NO: 23465 - protein, 78 aa, Homo sapiens
  Payload ID: 4673
  Gene Symbol: DEFB105A
  Gene Name: defensin, beta 105A
  Uniprot ID: Q8NG35
  ENSP ID: ENSP00000334330
MALIRKTFYFLFAMFFILVQLPSGCQAGLDFSQPFPSGEFAVCESCKLGRGKCRKECLENEKPDGNCRLNFLCCRQRI

SEQ ID NO: 23466 - protein, 78 aa, Homo sapiens; identical to SEQ ID NO: 23465
  Payload ID: 4674
  Gene Symbol: DEFB105B
  Gene Name: defensin, beta 105B
  Uniprot ID: Q8NG35
  ENSP ID: ENSP00000335281

SEQ ID NO: 23467 - protein, 78 aa, Homo sapiens; identical to SEQ ID NO: 23465
  Payload ID: 4674
  Gene Symbol: DEFB105B
  Gene Name: defensin, beta 105B
  Uniprot ID: Q8NG35
  ENSP ID: ENSP00000482176

SEQ ID NO: 23468 - protein, 65 aa, Homo sapiens
  Payload ID: 4675
  Gene Symbol: DEFB106A
  Gene Name: defensin, beta 106A
  Uniprot ID: Q8N104
  ENSP ID: ENSP00000335307
MRTFLFLFAVLFFLTPAKNAFFDEKCNKLKGTCKNNCGKNEELIALCQKSLKCCRTIQPCGSIID

SEQ ID NO: 23469 - protein, 65 aa, Homo sapiens; identical to SEQ ID NO: 23468
  Payload ID: 4676
  Gene Symbol: DEFB106B
  Gene Name: defensin, beta 106B
  Uniprot ID: Q8N104
  ENSP ID: ENSP00000334364

SEQ ID NO: 23470 - protein, 65 aa, Homo sapiens; identical to SEQ ID NO: 23468
  Payload ID: 4676
  Gene Symbol: DEFB106B
  Gene Name: defensin, beta 106B
  Uniprot ID: Q8N104
  ENSP ID: ENSP00000477883

SEQ ID NO: 23471 - protein, 70 aa, Homo sapiens
  Payload ID: 4677
  Gene Symbol: DEFB107A
  Gene Name: defensin, beta 107A
  Uniprot ID: Q8IZN7
  ENSP ID: ENSP00000334681
MPGAMKIFVFILAALILLAQIFQARTAIHRALISKRMEGHCEAECLTFEVKIGGCRAELAPFCCKNRKKH

SEQ ID NO: 23472 - protein, 70 aa, Homo sapiens; identical to SEQ ID NO: 23471
  Payload ID: 4678
  Gene Symbol: DEFB107B
  Gene Name: defensin, beta 107B
  Uniprot ID: Q8IZN7
  ENSP ID: ENSP00000347810

SEQ ID NO: 23473 - protein, 70 aa, Homo sapiens; identical to SEQ ID NO: 23471
  Payload ID: 4678
  Gene Symbol: DEFB107B
  Gene Name: defensin, beta 107B
  Uniprot ID: Q8IZN7
  ENSP ID: ENSP00000478422

SEQ ID NO: 23474 - protein, 73 aa, Homo sapiens
  Payload ID: 4679
  Gene Symbol: DEFB108B
  Gene Name: defensin, beta 108B
  Uniprot ID: Q8NET1
  ENSP ID: ENSP00000333234
MRIAVLLFAIFFFMSQVLPARGKFKEICERPNGSCRDFCLETEIHVGRCLNSQPCCLPLGHQPRIESTTPKKD

SEQ ID NO: 23475 - protein, 67 aa, Homo sapiens
  Payload ID: 4680
  Gene Symbol: DEFB110
  Gene Name: defensin, beta 110
  Uniprot ID: Q30KQ9
  ENSP ID: ENSP00000360190
MKIQLFFFILHFWVTILPAKKKYPEYGSLDLRRECRIGNGQCKNQCHENEIRIAYCIRPGTHCCLQQ

SEQ ID NO: 23476 - protein, 62 aa, Homo sapiens
  Payload ID: 4680
  Gene Symbol: DEFB110
  Gene Name: defensin, beta 110
  Uniprot ID: Q30KQ9
  ENSP ID: ENSP00000377270
MKIQLFFFILHFWVTILPARSNFEPKYRFERCEKVRGICKTFCDDVEYDYGYCIKWRSQCCV

SEQ ID NO: 23477 - protein, 113 aa, Homo sapiens
  Payload ID: 4681
  Gene Symbol: DEFB112
  Gene Name: defensin, beta 112
  Uniprot ID: Q30KQ8
  ENSP ID: ENSP00000319126
MKLLTTICRLKLEKMYSKTNTSSTIFEKARHGTEKISTARSEGHHITFSRWKSCTAIGGRCKNQCDDSEFRISYCARPTTHCCVTECDPTDPNNWIPKDSVGTQEWYPKDSRH

SEQ ID NO: 23478 - protein, 82 aa, Homo sapiens
  Payload ID: 4682
  Gene Symbol: DEFB113
  Gene Name: defensin, beta 113
  Uniprot ID: Q30KQ7
  ENSP ID: ENSP00000381703
MKILCIFLTFVFTVSCGPSVPQKKTREVAERKRECQLVRGACKPECNSWEYVYYYCNVNPCCAVWEYQKPIINKITSKLHQK

SEQ ID NO: 23479 - protein, 69 aa, Homo sapiens
  Payload ID: 4683
  Gene Symbol: DEFB114
  Gene Name: defensin, beta 114
  Uniprot ID: Q30KQ6
  ENSP ID: ENSP00000312702
MRIFYYLHFLCYVTFILPATCTLVNADRCTKRYGRCKRDCLESEKQIDICSLPRKICCTEKLYEEDDMF

SEQ ID NO: 23480 - protein, 88 aa, Homo sapiens
  Payload ID: 4684
  Gene Symbol: DEFB115
  Gene Name: defensin, beta 115
  Uniprot ID: Q30KQ5
  ENSP ID: ENSP00000383398
MLPDHFSPLSGDIKLSVLALVVLVVLAQTAPDGWIRRCYYGTGRCRKSCKEIERKKEKCGEKHICCVPKEKDKLSHIHDQKETSELYI

SEQ ID NO: 23481 - protein, 102 aa, Homo sapiens
  Payload ID: 4685
  Gene Symbol: DEFB116
  Gene Name: defensin, beta 116
  Uniprot ID: Q30KQ4
  ENSP ID: ENSP00000383396
MSVMKPCLMTIAILMILAQKTPGGLFRSHNGKSREPWNPCELYQGMCRNACREYEIQYLTCPNDQKCCLKLSVKITSSKNVKEDYDSNSNLSVTNSSSYSHI

SEQ ID NO: 23482 - protein, 123 aa, Homo sapiens
  Payload ID: 4686
  Gene Symbol: DEFB118
  Gene Name: defensin, beta 118
  Uniprot ID: Q96PH6
  ENSP ID: ENSP00000253381
MKLLLLALPMLVLLPQVIPAYSGEKKCWNRSGHCRKQCKDGEAVKDTCKNLRACCIPSNEDHRRVPATSPTPLSDSTPGIIDDILTVRFTTDYFEVSSKKDMVEESEAGRGTETSLPNVHHSS

SEQ ID NO: 23483 - protein, 43 aa, Homo sapiens
  Payload ID: 4687
  Gene Symbol: DEFB119
  Gene Name: defensin, beta 119
  Uniprot ID: Q8N690
  ENSP ID: ENSP00000345768
MKLLYLFLAILLAIEEPVISALVRTVGCCLDTARQTPHPSMHG

SEQ ID NO: 23484 - protein, 88 aa, Homo sapiens
  Payload ID: 4687
  Gene Symbol: DEFB119
  Gene Name: defensin, beta 119
  Uniprot ID: Q8N690
  ENSP ID: ENSP00000365492
MKLLYLFLAILLAIEEPVISVECWMDGHCRLLCKDGEDSIIRCRNRKRCCVPSRYLTIQPVTIHGILGWTTPQMSTTAPKMKTNITNR

SEQ ID NO: 23485 - protein, 84 aa, Homo sapiens
  Payload ID: 4687
  Gene Symbol: DEFB119
  Gene Name: defensin, beta 119
  Uniprot ID: Q8N690
  ENSP ID: ENSP00000365499
MKLLYLFLAILLAIEEPVISGKRHILRCMGNSGICRASCKKNEQPYLYCRNCQSCCLQSYMRISISGKEENTDWSYEKQWPRLP

SEQ ID NO: 23486 - protein, 76 aa, Homo sapiens
  Payload ID: 4688
  Gene Symbol: DEFB121
  Gene Name: defensin, beta 121
  Uniprot ID: Q5J5C9
  ENSP ID: ENSP00000417128
MKLLLLLLTVTLLLAQVTPVMKCWGKSGRCRTTCKESEVYYILCKTEAKCCVDPKYVPVKPKLTDTNTSLESTSAV

SEQ ID NO: 23487 - protein, 67 aa, Homo sapiens
  Payload ID: 4689
  Gene Symbol: DEFB123
  Gene Name: defensin, beta 123
  Uniprot ID: Q8N688
  ENSP ID: ENSP00000365486
MKLLLLTLTVLLLLSQLTPGGTQRCWNLYGKCRYRCSKKERVYVYCINNKMCCVKPKYQPKERWWPF

SEQ ID NO: 23488 - protein, 71 aa, Homo sapiens
  Payload ID: 4690
  Gene Symbol: DEFB124
  Gene Name: defensin, beta 124
  Uniprot ID: Q8NES8
  ENSP ID: ENSP00000326309
MTQLLLFLVALLVLGHVPSGRSEFKRCWKGQGACQTYCTRQETYMHLCPDASLCCLSYALKPPPVPKHEYE

SEQ ID NO: 23489 - protein, 156 aa, Homo sapiens
  Payload ID: 4691
  Gene Symbol: DEFB125
  Gene Name: defensin, beta 125
  Uniprot ID: Q8N687
  ENSP ID: ENSP00000371847
MNILMLTFIICGLLTRVTKGSFEPQKCWKNNVGHCRRRCLDTERYILLCRNKLSCCISIISHEYTRRPAFPVIHLEDITLDYSDVDSFTGSPVSMLNDLITFDTTKFGETMTPETNTPETTMPPSEATTPETTMPPSETATSETMPPPSQTALTHN

SEQ ID NO: 23490 - protein, 111 aa, Homo sapiens
  Payload ID: 4692
  Gene Symbol: DEFB126
  Gene Name: defensin, beta 126
  Uniprot ID: Q9BYW3
  ENSP ID: ENSP00000371835
MKSLLFTLAVFMLLAQLVSGNWYVKKCLNDVGICKKKCKPEEMHVKNGWAMCGKQRDCCVPADRRANYPVFCVQTKTTRISTVTATTATTTLMMTTASMSSMAPTPVSPTG

SEQ ID NO: 23491 - protein, 99 aa, Homo sapiens
  Payload ID: 4693
  Gene Symbol: DEFB127
  Gene Name: defensin, beta 127
  Uniprot ID: Q9H1M4
  ENSP ID: ENSP00000371825
MGLFMIIAILLFQKPTVTEQLKKCWNNYVQGHCRKICRVNEVPEALCENGRYCCLNIKELEACKKITKPPRPKPATLALTLQDYVTIIENFPSLKTQST

SEQ ID NO: 23492 - protein, 93 aa, Homo sapiens
  Payload ID: 4694
  Gene Symbol: DEFB128
  Gene Name: defensin, beta 128
  Uniprot ID: Q7Z7B8
  ENSP ID: ENSP00000335382
MKLFLVLIILLFEVLTDGARLKKCFNKVTGYCRKKCKVGERYEIGCLSGKLCCANDEEEKKHVSFKKPHQHSGEKLSVLQDYIILPTITIFTV

SEQ ID NO: 23493 - protein, 183 aa, Homo sapiens
  Payload ID: 4695
  Gene Symbol: DEFB129
  Gene Name: defensin, beta 129
  Uniprot ID: Q9H1M3
  ENSP ID: ENSP00000246105
MKLLFPIFASLMLQYQVNTEFIGLRRCLMGLGRCRDHCNVDEKEIQKCKMKKCCVGPKVVKLIKNYLQYGTPNVLNEDVQEMLKPAKNSSAVIQRKHILSVLPQIKSTSFFANTNFVIIPNATPMNSATISTMTPGQITYTATSTKSNTKESRDSATASPPPAPPPPNILPTPSLELEEAEEQ

SEQ ID NO: 23494 - protein, 79 aa, Homo sapiens
  Payload ID: 4696
  Gene Symbol: DEFB130
  Gene Name: defensin, beta 130
  Uniprot ID: Q30KQ2
  ENSP ID: ENSP00000382951
MKLHSLISVLLLFVTLIPKGKTGVIPGQKQCIALKGVCRDKLCSTLDDTIGICNEGKKCCRRWWILEPYPTPVPKGKSP

SEQ ID NO: 23495 - protein, 70 aa, Homo sapiens
  Payload ID: 4697
  Gene Symbol: DEFB131
  Gene Name: defensin, beta 131
  Uniprot ID: P59861
  ENSP ID: ENSP00000335538
MRVLFFVFGVLSLMFTVPPARSFISNDECPSEYYHCRLKCNADEHAIRYCADFSICCKLKIIEIDGQKKW

SEQ ID NO: 23496 - protein, 95 aa, Homo sapiens
  Payload ID: 4698
  Gene Symbol: DEFB132
  Gene Name: defensin, beta 132
  Uniprot ID: Q7Z7B7
  ENSP ID: ENSP00000371813
MKFLLLVLAALGFLTQVIPASAGGSKCVSNTPGYCRTCCHWGETALFMCNASRKCCISYSFLPKPDLPQLIGNHWQSRRRNTQRKDKKQQTTVTS

SEQ ID NO: 23497 - protein, 61 aa, Homo sapiens
  Payload ID: 4699
  Gene Symbol: DEFB133
  Gene Name: defensin, beta 133
  Uniprot ID: Q30KQ1
  ENSP ID: ENSP00000485031
MKIHVFLFVLFFFLVPIATRVKCAVKDTYSCFIMRGKCRHECHDFEKPIGFCTKLNANCYM

SEQ ID NO: 23498 - protein, 66 aa, Homo sapiens
  Payload ID: 4700
  Gene Symbol: DEFB134
  Gene Name: defensin, beta 134
  Uniprot ID: Q4QY38
  ENSP ID: ENSP00000371640
MKPLLVVFVFLFLWDPVLAGINSLSSEMHKKCYKNGICRLECYESEMLVAYCMFQLECCVKGNPAP

SEQ ID NO: 23499 - protein, 66 aa, Homo sapiens; identical to SEQ ID NO: 23498
  Payload ID: 4700
  Gene Symbol: DEFB134
  Gene Name: defensin, beta 134
  Uniprot ID: Q4QY38
  ENSP ID: ENSP00000435010

SEQ ID NO: 23500 - protein, 77 aa, Homo sapiens
  Payload ID: 4701
  Gene Symbol: DEFB135
  Gene Name: defensin, beta 135
  Uniprot ID: Q30KP9
  ENSP ID: ENSP00000371643
MATRSVLLALVVLNLLFYVPPGRSGPNVYIQKIFASCWRLQGTCRPKCLKNEQYRILCDTIHLCCVNPKYLPILTGK

SEQ ID NO: 23501 - protein, 78 aa, Homo sapiens
  Payload ID: 4702
  Gene Symbol: DEFB136
  Gene Name: defensin, beta 136
  Uniprot ID: Q30KP8
  ENSP ID: ENSP00000371644
MNLCLSALLFFLVILLPSGKGMFGNDGVKVRTCTSQKAVCFFGCPPGYRWIAFCHNILSCCKNMTRFQPPQAKDPWVH

SEQ ID NO: 23502 - protein, 64 aa, Homo sapiens
  Payload ID: 4703
  Gene Symbol: DEFB4A
  Gene Name: defensin, beta 4A
  Uniprot ID: O15263
  ENSP ID: ENSP00000303532
MRVLYLLFSFLFIFLMPLPGVFGGIGDPVTCLKSGAICHPVFCPRRYKQIGTCGLPGTKCCKKP

SEQ ID NO: 23503 - protein, 64 aa, Homo sapiens; identical to SEQ ID NO: 23502
  Payload ID: 4704
  Gene Symbol: DEFB4B
  Gene Name: defensin, beta 4B
  Uniprot ID: O15263
  ENSP ID: ENSP00000424598

SEQ ID NO: 23504 - protein, 64 aa, Homo sapiens; identical to SEQ ID NO: 23502
  Payload ID: 4704
  Gene Symbol: DEFB4B
  Gene Name: defensin, beta 4B
  Uniprot ID: O15263
  ENSP ID: ENSP00000479138

SEQ ID NO: 23505 - protein, 333 aa, Homo sapiens
  Payload ID: 4705
  Gene Symbol: DHDDS
  Gene Name: dehydrodolichyl diphosphate synthase subunit
  Uniprot ID: Q86SQ9
  ENSP ID: ENSP00000236342
MSWIKEGELSLWERFCANIIKAGPMPKHIAFIMDGNRRYAKKCQVERQEGHSQGFNKLAETLRWCLNLGILEVTVYAFSIENFKRSKSEVDGLMDLARQKFSRLMEEKEKLQKHGVCIRVLGDLHLLPLDLQELIAQAVQATKNYNKCFLNVCFAYTSRHEISNAVREMAWGVEQGLLDPSDISESLLDKCLYTNRSPHPDILIRTSGEVRLSDFLLWQTSHSCLVFQPVLWPEYTFWNLFEAILQFQMNHSVLQKARDMYAEERKRQQLERDQATVTEQLLREGLQASGDAQLRRTRLHKLSARREERVQGFLQALELKRADWLARLGTASA

SEQ ID NO: 23506 - protein, 334 aa, Homo sapiens
  Payload ID: 4705
  Gene Symbol: DHDDS
  Gene Name: dehydrodolichyl diphosphate synthase subunit
  Uniprot ID: Q86SQ9
  ENSP ID: ENSP00000353104
MSWIKEGELSLWERFCANIIKAGPMPKHIAFIMDGNRRYAKKCQVERQEGHSQGFNKLAETLRWCLNLGILEVTVYAFSIENFKRSKSEVDGLMDLARQKFSRLMEEKEKLQKHGVCIRVLGDLHLLPLDLQELIAQAVQATKNYNKCFLNVCFAYTSRHEISNAVREMAWGVEQGLLDPSDISESLLDKCLYTNRSPHPDILIRTSGEVRLSDFLLWQTSHSCLVFQPVLWPEYTFWNLFEAILQFQMNHSVLQQKARDMYAEERKRQQLERDQATVTEQLLREGLQASGDAQLRRTRLHKLSARREERVQGFLQALELKRADWLARLGTASA

SEQ ID NO: 23507 - protein, 209 aa, Homo sapiens
  Payload ID: 4705
  Gene Symbol: DHDDS
  Gene Name: dehydrodolichyl diphosphate synthase subunit
  ENSP ID: ENSP00000363300
MSWIKEGELSLWERFCANIIKAGPMPKHIAFIMDGNRRYAKKCQVERQEGHSQGFNKLAETLRWCLNLGILEVTVYAFSIENFKRSKSEVDGLMDLARQKFSRLMEEKEKLQKHGVCIRVLGDLHLLPLDLQELIAQAVQATKNYNKCFLNVCFAYTSRHEISNAVREMAWGVEQGLLDPRYPELFCMVIVKENRPGPAWQLTPVILAH

SEQ ID NO: 23508 - protein, 162 aa, Homo sapiens
  Payload ID: 4705
  Gene Symbol: DHDDS
  Gene Name: dehydrodolichyl diphosphate synthase subunit
  ENSP ID: ENSP00000393961
  MOD_RES (1)..(1): Any amino acid
XHLLPLDLQELIAQAVQATKNYNKCFLNVCFAYTSRHEISNAVREMAWGVEQGLLDPSDISESLLDKCLYTNRSPHPDILIRTSGEVRLSDFLLWQTSHSCLVFQPVLWPEYTFWNLFEAILQFQMNHSVLQHPGSLLTKAWKKPFQQDGELYGNCSSPKSS

SEQ ID NO: 23509 - protein, 216 aa, Homo sapiens
  Payload ID: 4705
  Gene Symbol: DHDDS
  Gene Name: dehydrodolichyl diphosphate synthase subunit
  ENSP ID: ENSP00000397584
MSWIKEGELSLWERFCANIIKAGPMPKHIAFIMDGNRRYAKKCQVERQEGHSQGFNKLAETLRWCLNLGILEVTVYAFSIENFKRSKSEVDGLMDLARQKFSRLMEEKCFLNVCFAYTSRHEISNAVREMAWGVEQGLLDPSDISESLLDKCLYTNRSPHPDILIRTSGEVRLSDFLLWQTSHSCLVFQPVLWPEYTFWNLFEAILQFQMNHSVLQ

SEQ ID NO: 23510 - protein, 198 aa, Homo sapiens
  Payload ID: 4705
  Gene Symbol: DHDDS
  Gene Name: dehydrodolichyl diphosphate synthase subunit
  ENSP ID: ENSP00000399177
MSWIKEGELSLWERFCANIIKAGPMPKHIAFIMDGNRRYAKKCQVERQEGHSQGFNKLAETLRWCLNLGILEVTVYAFSIENFKRSKSEVDGLMDLARQKFSRLMEEKEKLQKHGVCIRVLGDLHLLPLDLQELIAQAVQATKNYNKCFLNVCFAYTSRHEISNAVREMAWGVEQGLLDPSRDRFHHIGQASLELLTS

SEQ ID NO: 23511 - protein, 169 aa, Homo sapiens
  Payload ID: 4705
  Gene Symbol: DHDDS
  Gene Name: dehydrodolichyl diphosphate synthase subunit
  ENSP ID: ENSP00000399781
LARQKFSRLMEEKEKLQKHGVCIRVLGDLHLLPLDLQELIAQAVQATKNYNNDISESLLDKCLYTNRSPHPDILIRTSGEVRLSDFLLWQQKARDMYAEERKRQQLERDQATVTEQLLREGLQASGDAQLRRTRLHKLSARREERVQGFLQALELKRADWLARLGTASA

SEQ ID NO: 23512 - protein, 73 aa, Homo sapiens
  Payload ID: 4705
  Gene Symbol: DHDDS
  Gene Name: dehydrodolichyl diphosphate synthase subunit
  ENSP ID: ENSP00000403529
MSWIKEGELSLWERFCANIIKAGPMPKHIAFIMDGNRRYAKKCQVERQEGHSQGFNKLAELLAFSPLRLCGGV

SEQ ID NO: 23513 - protein, 173 aa, Homo sapiens
  Payload ID: 4705
  Gene Symbol: DHDDS
  Gene Name: dehydrodolichyl diphosphate synthase subunit
  ENSP ID: ENSP00000405604
MSWIKEGELSLWERFCANIIKAGPMPKHIAFIMDGNRRYAKKCQVERQEGHSQGFNKLAETLRWCLNLGILEVTVYAFSIENFKRSKSEVDGLMDLARQKFSRLMEEKEKLQKHGVCIRVLGDLHLLPLDLQELIAQAVQATKNYNKCFLNVCFAYTSRHEISNAVREMAWGV

SEQ ID NO: 23514 - protein, 71 aa, Homo sapiens
  Payload ID: 4705
  Gene Symbol: DHDDS
  Gene Name: dehydrodolichyl diphosphate synthase subunit
  ENSP ID: ENSP00000431407
MSWIKEGELSLWERFCANIIKAGPMPKHIAFIMDGNRRYAKKCQVERQEGHSQGFNKLAETLRWCLNLGIL

SEQ ID NO: 23515 - protein, 60 aa, Homo sapiens
  Payload ID: 4705
  Gene Symbol: DHDDS
  Gene Name: dehydrodolichyl diphosphate synthase subunit
  ENSP ID: ENSP00000433491
MSWIKEGELSLWERFCANIIKAGPMPKHIAFIMDGNRRYAKKCQVERQEGHSQGFNKLAE

SEQ ID NO: 23516 - protein, 85 aa, Homo sapiens
  Payload ID: 4705
  Gene Symbol: DHDDS
  Gene Name: dehydrodolichyl diphosphate synthase subunit
  ENSP ID: ENSP00000433976
MSWIKEGELSLWERFCANIIKAGPMPKHIAFIMDGNRRYAKKCQVERQEGHSQGFNKLAETLRWCLNLGILEVTVYAFSIENFKR

SEQ ID NO: 23517 - protein, 122 aa, Homo sapiens
  Payload ID: 4705
  Gene Symbol: DHDDS
  Gene Name: dehydrodolichyl diphosphate synthase subunit
  ENSP ID: ENSP00000434185
MSWIKEGELSLWERFCANIIKAGPMPKHIAFIMDGNRRYAKKCQVERQEGHSQGFNKLAETLRWCLNLGILEVTVYAFSIENFKRSKSEVDGLMDLARQKFSRLMEEKEKLQKHGVCIRVLG

SEQ ID NO: 23518 - protein, 294 aa, Homo sapiens
  Payload ID: 4705
  Gene Symbol: DHDDS
  Gene Name: dehydrodolichyl diphosphate synthase subunit
  Uniprot ID: Q86SQ9
  ENSP ID: ENSP00000434219
MSWIKEGELSLWERFCANIIKAGPMPKHIAFIMDGNRRYAKKCQVERQEGHSQGFNKLAETLRWCLNLGILEVTVYAFSIENFKRSKSEVDGLMDLARQKFSRLMEEKCFLNVCFAYTSRHEISNAVREMAWGVEQGLLDPSDISESLLDKCLYTNRSPHPDILIRTSGEVRLSDFLLWQTSHSCLVFQPVLWPEYTFWNLFEAILQFQMNHSVLQKARDMYAEERKRQQLERDQATVTEQLLREGLQASGDAQLRRTRLHKLSARREERVQGFLQALELKRADWLARLGTASA

SEQ ID NO: 23519 - protein, 299 aa, Homo sapiens
  Payload ID: 4705
  Gene Symbol: DHDDS
  Gene Name: dehydrodolichyl diphosphate synthase subunit
  Uniprot ID: Q86SQ9
  ENSP ID: ENSP00000434984
MSWIKEGELSLWERFCANIIKAGPMPKHIAFIMDGNRRYAKKCQVERQEGHSQGFNKLAETLRWCLNLGILEVTVYAFSIENFKRSKSEVDGLMDLARQKFSRLMEEKEKLQKHGVCIRVLGDLHLLPLDLQELIAQAVQATKNYNNDISESLLDKCLYTNRSPHPDILIRTSGEVRLSDFLLWQTSHSCLVFQPVLWPEYTFWNLFEAILQFQMNHSVLQKARDMYAEERKRQQLERDQATVTEQLLREGLQASGDAQLRRTRLHKLSARREERVQGFLQALELKRADWLARLGTASA

SEQ ID NO: 23520 - protein, 165 aa, Homo sapiens
  Payload ID: 4705
  Gene Symbol: DHDDS
  Gene Name: dehydrodolichyl diphosphate synthase subunit
  ENSP ID: ENSP00000436119
MSWIKEGELSLWERFCANIIKAGPMPKHIAFIMDGNRRYAKKCQVERQEGHSQGFNKLAETLRWCLNLGILEVTVYAFSIENFKRSKSEVDGLMDLARQKFSRLMEEKEKLQKHGVCIRVLGDLHLLPLDLQELIAQAVQATKNYNKCFLNVCFAYTSRHEISNA

SEQ ID NO: 23521 - protein, 130 aa, Homo sapiens
  Payload ID: 4705
  Gene Symbol: DHDDS
  Gene Name: dehydrodolichyl diphosphate synthase subunit
  ENSP ID: ENSP00000436764
MSWIKEGELSLWERFCANIIKAGPMPKHIAFIMDGNRRYAKKCQVERQEGHSQGFNKLAETLRWCLNLGILEVTVYAFSIENFKRSKSEVDGLMDLARQKFSRLMEEKEKLQKHGVCIRVLGDLHLLPLD

SEQ ID NO: 23522 - protein, 919 aa, Homo sapiens
  Payload ID: 4706
  Gene Symbol: DHTKD1
  Gene Name: dehydrogenase E1 and transketolase domain containing 1
  Uniprot ID: Q96HY7
  ENSP ID: ENSP00000263035
MASATAAAARRGLGRALPLFWRGYQTERGVYGYRPRKPESREPQGALERPPVDHGLARLVTVYCEHGHKAAKINPLFTGQALLENVPEIQALVQTLQGPFHTAGLLNMGKEEASLEEVLVYLNQIYCGQISIETSQLQSQDEKDWFAKRFEELQKETFTTEERKHLSKLMLESQEFDHFLATKFSTVKRYGGEGAESMMGFFHELLKMSAYSGITDVIIGMPHRGRLNLLTGLLQFPPELMFRKMRGLSEFPENFSATGDVLSHLTSSVDLYFGAHHPLHVTMLPNPSHLEAVNPVAVGKTRGRQQSRQDGDYSPDNSAQPGDRVICLQVHGDASFCGQGIVPETFTLSNLPHFRIGGSVHLIVNNQLGYTTPAERGRSSLYCSDIGKLVGCAIIHVNGDSPEEVVRATRLAFEYQRQFRKDVIIDLLCYRQWGHNELDEPFYTNPIMYKIIRARKSIPDTYAEHLIAGGLMTQEEVSEIKSSYYAKLNDHLNNMAHYRPPALNLQAHWQGLAQPEAQITTWSTGVPLDLLRFVGMKSVEVPRELQMHSHLLKTHVQSRMEKMMDGIKLDWATAEALALGSLLAQGFNVRLSGQDVGRGTFSQRHAIVVCQETDDTYIPLNHMDPNQKGFLEVSNSPLSEEAVLGFEYGMSIESPKLLPLWEAQFGDFFNGAQIIFDTFISGGEAKWLLQSGIVILLPHGYDGAGPDHSSCRIERFLQMCDSAEEGVDGDTVNMFVVHPTTPAQYFHLLRRQMVRNFRKPLIVASPKMLLRLPAAVSTLQEMAPGTTFNPVIGDSSVDPKKVKTLVFCSGKHFYSLVKQRESLGAKKHDFAIIRVEELCPFPLDSLQQEMSKYKHVKDHIWSQEEPQNMGPWSFVSPRFEKQLACKLRLVGRPPLPVPAVGIGTVHLHQHEDILAKTFA

SEQ ID NO: 23523 - protein, 307 aa, Homo sapiens
  Payload ID: 4706
  Gene Symbol: DHTKD1
  Gene Name: dehydrogenase E1 and transketolase domain containing 1
  ENSP ID: ENSP00000388163
MASATAAAARRGLGRALPLFWRGYQTERGVYGYRPRKPESREPQGALERPPVDHGLARLVTVYCEHGHKAAKINPLFTGQALLENVPEIQALVQTLQGPFHTAGLLNMGKEEASLEEVLVYLNQIYCGQISIETSQLQSQDEKDWFAKRFEELQKETFTTEERKHLSKLMLESQLMFRKMRGLSEFPENFSATGDVLSHLTSSVDLYFGAHHPLHVTMLPNPSHLEAVNPVAVGKTRGRQQSRQDGDYSPDNSAQPGDRVICLQVHGDASFCGQGIVPETFTLSNLPHFRIGGSVHLIVNNQLGYTT

SEQ ID NO: 23524 - protein, 214 aa, Homo sapiens
  Payload ID: 4706
  Gene Symbol: DHTKD1
  Gene Name: dehydrogenase E1 and transketolase domain containing 1
  ENSP ID: ENSP00000398482
  MOD_RES (1)..(1): Any amino acid
XKIIRARKSIPDTYAEHLIAGGLMTQEEVSEIKSSYYAKLNDHLNNMAHYRPPALNLQAHWQGLAQPEAQITTWSTGVPLDLLRFVGMKSVEVPRELQMHSHLLKTHVQSRMEKMMDGIKLDWATAEALALGSLLAQGFNVRLSGQDVGRGTFSQRHAIVVCQETDDTYIPLNHMDPNQKGFLEERPSGSYKAASSSSFHMATMGLGQTTHPVE

SEQ ID NO: 23525 - protein, 160 aa, Homo sapiens
  Payload ID: 4706
  Gene Symbol: DHTKD1
  Gene Name: dehydrogenase E1 and transketolase domain containing 1
  ENSP ID: ENSP00000400625
GRQQSRQDGDYSPDNSAQPGDRVICLQVHGDASFCGQGIVPETFTLSNLPHFRIGGSVHLIVNNQLGYTTPAERGRSSLYCSDIGKLVGCAIIHVNGDSPEEVVRATRLAFEYQRQFRKDVIIDLLCYRQWGHNELDEPFYTNPIMYKIIRYNYKPLCDM

SEQ ID NO: 23526 - protein, 313 aa, Homo sapiens
  Payload ID: 4707
  Gene Symbol: DHRS1
  Gene Name: dehydrogenase/reductase (SDR family) member 1
  Uniprot ID: Q96LJ7
  ENSP ID: ENSP00000288111
MAAPMNGQVCVVTGASRGIGRGIALQLCKAGATVYITGRHLDTLRVVAQEAQSLGGQCVPVVCDSSQESEVRSLFEQVDREQQGRLDVLVNNAYAGVQTILNTRNKAFWETPASMWDDINNVGLRGHYFCSVYGARLMVPAGQGLIVVISSPGSLQYMFNVPYGVGKAACDKLAADCAHELRRHGVSCVSLWPGIVQTELLKEHMAKEEVLQDPVLKQFKSAFSSAETTELSGKCVVALATDPNILSLSGKVLPSCDLARRYGLRDVDGRPVQDYLSLSSVLSHVSGLGWLASYLPSFLRVPKWIIALYTSKF

SEQ ID NO: 23527 - protein, 313 aa, Homo sapiens; identical to SEQ ID NO: 23526
  Payload ID: 4707
  Gene Symbol: DHRS1
  Gene Name: dehydrogenase/reductase (SDR family) member 1
  Uniprot ID: Q96LJ7
  ENSP ID: ENSP00000380027

SEQ ID NO: 23528 - protein, 147 aa, Homo sapiens
  Payload ID: 4707
  Gene Symbol: DHRS1
  Gene Name: dehydrogenase/reductase (SDR family) member 1
  ENSP ID: ENSP00000453949
MAAPMNGQVCVVTGASRGIGRGIALQLCKAGATVYITGRHLDTLRVVAQEAQSLGGQCVPVVCDSSQESEVRSLFEQVDREQQGRLDVLVNNAYAGVQTILNTRNKAFWETPASMWDDINNVGLRKPAVYVQCPLWCGQSCGEDPVA

SEQ ID NO: 23529 - protein, 181 aa, Homo sapiens
  Payload ID: 4708
  Gene Symbol: DHRS11
  Gene Name: dehydrogenase/reductase (SDR family) member 11
  Uniprot ID: Q6UWP2
  ENSP ID: ENSP00000477603
MFSAIRSQHSGVDICINNAGLARPDTLLSGSTSGWKDMFNVNVLALSICTREAYQSMKERNVDDGHIININSMSGHRVLPLSVTHFYSATKYAVTALTEGLRQELREAQTHIRATCISPGVVETQFAFKLHDKDPEKAAATYEQMKCLKPEDVAEAVIYVLSTPAHIQIGDIQMRPTEQVT

SEQ ID NO: 23530 - protein, 50 aa, Homo sapiens
  Payload ID: 4708
  Gene Symbol: DHRS11
  Gene Name: dehydrogenase/reductase (SDR family) member 11
  ENSP ID: ENSP00000482124
MARPGMERWRDRLALVTGASGGIGAAVARALVQQGLKVVGCARTVGNIEM

SEQ ID NO: 23531 - protein, 260 aa, Homo sapiens
  Payload ID: 4708
  Gene Symbol: DHRS11
  Gene Name: dehydrogenase/reductase (SDR family) member 11
  Uniprot ID: Q6UWP2
  ENSP ID: ENSP00000482704
MARPGMERWRDRLALVTGASGGIGAAVARALVQQGLKVVGCARTVGNIEELAAECKSAGYPGTLIPYRCDLSNEEDILSMFSAIRSQHSGVDICINNAGLARPDTLLSGSTSGWKDMFNVNVLALSICTREAYQSMKERNVDDGHIININSMSGHRVLPLSVTHFYSATKYAVTALTEGLRQELREAQTHIRATCISPGVVETQFAFKLHDKDPEKAAATYEQMKCLKPEDVAEAVIYVLSTPAHIQIGDIQMRPTEQVT

SEQ ID NO: 23532 - protein, 150 aa, Homo sapiens
  Payload ID: 4708
  Gene Symbol: DHRS11
  Gene Name: dehydrogenase/reductase (SDR family) member 11
  ENSP ID: ENSP00000482777
MFSAIRSQHSGVDICINNAGLARPDTLLSGSTSGWKDMFNVNVLALSICTREAYQSMKERNVDDGHIININSMSGHRVLPLSVTHFYSATKYAVTALTEGLRQELREAQTHIRATCISPGVVETQFAFKLHDKDPEKAAATYEQMKCLKP

SEQ ID NO: 23533 - protein, 109 aa, Homo sapiens
  Payload ID: 4708
  Gene Symbol: DHRS11
  Gene Name: dehydrogenase/reductase (SDR family) member 11
  ENSP ID: ENSP00000483596
NVLALSICTREAYQSMKERNVDDGHIININSMSGHRVLPLSVTHFYSATKYAVTALTEGLRQELREAQTHIRATCLKPEDVAEAVIYVLSTPAHIQIGDIQMRPTEQVT

SEQ ID NO: 23534 - protein, 260 aa, Homo sapiens; identical to SEQ ID NO: 23531
  Payload ID: 4708
  Gene Symbol: DHRS11
  Gene Name: dehydrogenase/reductase (SDR family) member 11
  Uniprot ID: Q6UWP2
  ENSP ID: ENSP00000483747

SEQ ID NO: 23535 - protein, 109 aa, Homo sapiens; identical to SEQ ID NO: 23533
  Payload ID: 4708
  Gene Symbol: DHRS11
  Gene Name: dehydrogenase/reductase (SDR family) member 11
  ENSP ID: ENSP00000487681

SEQ ID NO: 23536 - protein, 50 aa, Homo sapiens; identical to SEQ ID NO: 23530
  Payload ID: 4708
  Gene Symbol: DHRS11
  Gene Name: dehydrogenase/reductase (SDR family) member 11
  ENSP ID: ENSP00000487966

SEQ ID NO: 23537 - protein, 150 aa, Homo sapiens; identical to SEQ ID NO: 23532
  Payload ID: 4708
  Gene Symbol: DHRS11
  Gene Name: dehydrogenase/reductase (SDR family) member 11
  ENSP ID: ENSP00000488451

SEQ ID NO: 23538 - protein, 181 aa, Homo sapiens; identical to SEQ ID NO: 23529
  Payload ID: 4708
  Gene Symbol: DHRS11
  Gene Name: dehydrogenase/reductase (SDR family) member 11
  Uniprot ID: Q6UWP2
  ENSP ID: ENSP00000488610

SEQ ID NO: 23539 - protein, 242 aa, Homo sapiens
  Payload ID: 4709
  Gene Symbol: DHRS12
  Gene Name: dehydrogenase/reductase (SDR family) member 12
  Uniprot ID: A0PJE2
  ENSP ID: ENSP00000218981
MNLHVKTLSLMTWRSRFLEESFWSLEETAALAKQLPLKSPSENIFLHIVDLSDPKQIWKFVENFKQEHKLHVLINNAGCMVNKRELTEDGLEKNFAANTLGVYILTTGLIPVLEKEHDPRVITVSSGGMLVQKLNTNDLQSERTPFDGTMVYAQNKRQQVVLTERWAQGHPAIHFSSMHPGWADTPGVRQAMPGFHARFGDRLRSEAQGADTMLWLALSSAAAAQPSGRFFQGDFLPGCEGS

SEQ ID NO: 23540 - protein, 271 aa, Homo sapiens
  Payload ID: 4709
  Gene Symbol: DHRS12
  Gene Name: dehydrogenase/reductase (SDR family) member 12
  Uniprot ID: A0PJE2
  ENSP ID: ENSP00000280056
MNLHVKTLSLMTWRSRFLEESFWSLEETAALAKQLPLKSPSENIFLHIVDLSDPKQIWKFVENFKQEHKLHVLINNAGCMVNKRELTEDGLEKNFAANTLGVYILTTGLIPVLEKEHDPRVITVSSGGMLVQKLNTNDLQSERTPFDGTMVYAQNKRQQVVLTERWAQGHPAIHFSSMHPGWADTPDRNEQELRKVVGEAQTASPLPRFLEIMMHEGKCQPQGHSSNDLEACWSSGGGEQNSLPDWPHQLHDLRQLTWALCSSFLLYKQGN

SEQ ID NO: 23541 - protein, 317 aa, Homo sapiens
  Payload ID: 4709
  Gene Symbol: DHRS12
  Gene Name: dehydrogenase/reductase (SDR family) member 12
  Uniprot ID: A0PJE2
  ENSP ID: ENSP00000411565
MSLYRSVVWFAKGLREYTKSGYESACKDFVPHDLEVQIPGRVFLVTGGNSGIGKATALEIAKRGGTVHLVCRDQAPAEDARGEIIRESGNQNIFLHIVDLSDPKQIWKFVENFKQEHKLHVLINNAGCMVNKRELTEDGLEKNFAANTLGVYILTTGLIPVLEKEHDPRVITVSSGGMLVQKLNTNDLQSERTPFDGTMVYAQNKRQQVVLTERWAQGHPAIHFSSMHPGWADTPGVRQAMPGFHARFGDRLRSEAQGADTMLWLALSSAAAAQPSGRFFQDRKPVSTHLPLATASSSPAEEEKLIEILEQLAQTFK

SEQ ID NO: 23542 - protein, 100 aa, Homo sapiens
  Payload ID: 4709
  Gene Symbol: DHRS12
  Gene Name: dehydrogenase/reductase (SDR family) member 12
  ENSP ID: ENSP00000478573
RELTEDGLEKNFAANTLGVYILTTGLIPVLEKEHDPRVITVSSGGMLVQKLNTNDLQSERTPFDGTMVYAQNKGAHIVCKAASTLRLPCRCCVPSEGGPV

SEQ ID NO: 23543 - protein, 377 aa, Homo sapiens
  Payload ID: 4710
  Gene Symbol: DHRS13
  Gene Name: dehydrogenase/reductase (SDR family) member 13
  Uniprot ID: Q6UX07
  ENSP ID: ENSP00000368173
MEALLLGAGLLLGAYVLVYYNLVKAPPCGGMGNLRGRTAVVTGANSGIGKMTALELARRGARVVLACRSQERGEAAAFDLRQESGNNEVIFMALDLASLASVRAFATAFLSSEPRLDILIHNAGISSCGRTREAFNLLLRVNHIGPFLLTHLLLPCLKACAPSRVVVVASAAHCRGRLDFKRLDRPVVGWRQELRAYADTKLANVLFARELANQLEATGVTCYAAHPGPVNSELFLRHVPGWLRPLLRPLAWLVLRAPRGGAQTPLYCALQEGIEPLSGRYFANCHVEEVPPAARDDRAAHRLWEASKRLAGLGPGEDAEPDEDPQSEDSEAPSSLSTPHPEEPTVSQPYPSPQSSPDLSKMTHRIQAKVEPEIQLS

SEQ ID NO: 23544 - protein, 327 aa, Homo sapiens
  Payload ID: 4710
  Gene Symbol: DHRS13
  Gene Name: dehydrogenase/reductase (SDR family) member 13
  Uniprot ID: Q6UX07
  ENSP ID: ENSP00000378361
MTALELARRGARVVLACRSQERGEAAAFDLRQESGNNEVIFMALDLASLASVRAFATAFLSSEPRLDILIHNAGISSCGRTREAFNLLLRVNHIGPFLLTHLLLPCLKACAPSRVVVVASAAHCRGRLDFKRLDRPVVGWRQELRAYADTKLANVLFARELANQLEATGVTCYAAHPGPVNSELFLRHVPGWLRPLLRPLAWLVLRAPRGGAQTPLYCALQEGIEPLSGRYFANCHVEEVPPAARDDRAAHRLWEASKRLAGLGPGEDAEPDEDPQSEDSEAPSSLSTPHPEEPTVSQPYPSPQSSPDLSKMTHRIQAKVEPEIQLS

SEQ ID NO: 23545 - protein, 296 aa, Homo sapiens
  Payload ID: 4710
  Gene Symbol: DHRS13
  Gene Name: dehydrogenase/reductase (SDR family) member 13
  Uniprot ID: Q6UX07
  ENSP ID: ENSP00000412826
MEALLLGAGLLLGAYVLVYYNLVKAPPCGGMGNLRGRTAVVTGISSCGRTREAFNLLLRVNHIGPFLLTHLLLPCLKACAPSRVVVVASAAHCRGRLDFKRLDRPVVGWRQELRAYADTKLANVLFARELANQLEATGVTCYAAHPGPVNSELFLRHVPGWLRPLLRPLAWLVLRAPRGGAQTPLYCALQEGIEPLSGRYFANCHVEEVPPAARDDRAAHRLWEASKRLAGLGPGEDAEPDEDPQSEDSEAPSSLSTPHPEEPTVSQPYPSPQSSPDLSKMTHRIQAKVEPEIQLS

SEQ ID NO: 23546 - protein, 280 aa, Homo sapiens
  Payload ID: 4711
  Gene Symbol: DHRS2
  Gene Name: dehydrogenase/reductase (SDR family) member 2
  Uniprot ID: Q13268
  ENSP ID: ENSP00000250383
MLSAVARGYQGWFHPCARLSVRMSSTGIDRKGVLANRVAVVTGSTSGIGFAIARRLARDGAHVVISSRKQQNVDRAMAKLQGEGLSVAGIVCHVGKAEDREQLVAKALEHCGGVDFLVCSAGVNPLVGSTLGTSEQIWDKILSVNVKSPALLLSQLLPYMENRRGAVILVSSIAAYNPVVALGVYNVSKTALLGLTRTLALELAPKDIRVNCVVPGIIKTDFSKVFHGNESLWKNFKEHHQLQRIGESEDCAGIVSFLCSPDASYVNGENIAVAGYSTRL

SEQ ID NO: 23547 - protein, 300 aa, Homo sapiens
  Payload ID: 4711
  Gene Symbol: DHRS2
  Gene Name: dehydrogenase/reductase (SDR family) member 2
  Uniprot ID: Q13268
  ENSP ID: ENSP00000344674
MLSAVARGYQGWFHPCARLSVRMSSTGIDRKGVLANRVAVVTGSTSGIGFAIARRLARDGAHVVISSRKQQNVDRAMAKLQGEGLSVAGIVCHVGKAEDREQLVAKALEHCGGVDFLVCSAGVNPLVGSTLGTSEQIWDKILSVNVKSPALLLSQLLPYMENRRGAVILVSSIAAYNPVVALGVYNVSKTALLGLTRTLALELAPKDIRVNCVVPGIIKTDFSKVVRIGFMGMSLSGRTSRNIISCRGLGSQRTVQESCPSCALQMPATSTGRTLRWQATPLGSERSGGGCVAVVPGPGA

SEQ ID NO: 23548 - protein, 225 aa, Homo sapiens
  Payload ID: 4711
  Gene Symbol: DHRS2
  Gene Name: dehydrogenase/reductase (SDR family) member 2
  ENSP ID: ENSP00000401213
MLSAVARGYQGWFHPCARLSVRMSSTGIDRKGVLANRVAVVTGSTSGIGFAIARRLARDGAHVVISSRKQQNVDRAMAKLQGEGLSVAGIVCHVGKAEDREQLVAKALEHCGGVDFLVCSAGVNPLVGSTLGTSEQIWDKILSVNVKSPALLLSQLLPYMENRRGAVILVSSIAAYNPVVALGVYNVSKTALLGLTRTLALELAPKDIRVNCVVPGIIKTDFSKV

SEQ ID NO: 23549 - protein, 161 aa, Homo sapiens
  Payload ID: 4711
  Gene Symbol: DHRS2
  Gene Name: dehydrogenase/reductase (SDR family) member 2
  ENSP ID: ENSP00000451485
EQLVAKALEHCGGVDFLVCSAGVNPLVGSTLGTSEQIWDKILSVNVKSPALLLSQLLPYMENRRGAVILVSSIAAYNPVVALGVYNVSKTALLGLTRTLALELAPKDIRVNCVVPGIIKTDFSKVFHGNESLWKNFKEHHQLQRQVGFGDLVVHVWLGRGS

SEQ ID NO: 23550 - protein, 180 aa, Homo sapiens
  Payload ID: 4711
  Gene Symbol: DHRS2
  Gene Name: dehydrogenase/reductase (SDR family) member 2
  ENSP ID: ENSP00000451895
  MOD_RES (1)..(1): Any amino acid
XSVAGIVCHVGKAEDREQLVAKALEHCGGVDFLVCSAGVNPLVGSTLGTSEQIWDKILSVNVKSPALLLSQLLPYMENRRGAVILVSSIAAYNPVVALGVYNVSKTALLGLTRTLALELAPKDIRFHGNESLWKNFKEHHQLQRIGESEDCAGIVSFLCSPDASYVNGENIAVAGYSTRL

SEQ ID NO: 23551 - protein, 300 aa, Homo sapiens; identical to SEQ ID NO: 23547
  Payload ID: 4711
  Gene Symbol: DHRS2
  Gene Name: dehydrogenase/reductase (SDR family) member 2
  Uniprot ID: Q13268
  ENSP ID: ENSP00000481607

SEQ ID NO: 23552 - protein, 147 aa, Homo sapiens
  Payload ID: 4712
  Gene Symbol: DHRS3
  Gene Name: dehydrogenase/reductase (SDR family) member 3
  ENSP ID: ENSP00000387903
MGTECHYFICDVGNREEVYQTAKAVREKVGDITILVNNAAVVHGKSLMDSDDDALLKSQHINTLGQFWTTKAFLPRMLELQNGHIVCLNSVLALSAIPGAIDYCTSKASAFAFMESLTLGLLDCPGVSATTVLPFHTSTEMFQGMRV

SEQ ID NO: 23553 - protein, 81 aa, Homo sapiens
  Payload ID: 4712
  Gene Symbol: DHRS3
  Gene Name: dehydrogenase/reductase (SDR family) member 3
  ENSP ID: ENSP00000478218
MGTECHYFICDVGNREEVYQTAKAVREKVSQPLSPTEAGDGGPEDSGSCAAQPGPPPPPMDNACPRYLEKHTSTGCTRGDP

SEQ ID NO: 23554 - protein, 302 aa, Homo sapiens
  Payload ID: 4712
  Gene Symbol: DHRS3
  Gene Name: dehydrogenase/reductase (SDR family) member 3
  Uniprot ID: O75911
  ENSP ID: ENSP00000480439
MVWKRLGALVMFPLQMIYLVVKAAVGLVLPAKLRDLSRENVLITGGGRGIGRQLAREFAERGARKIVLWGRTEKCLKETTEEIRQMGTECHYFICDVGNREEVYQTAKAVREKVGDITILVNNAAVVHGKSLMDSDDDALLKSQHINTLGQFWTTKAFLPRMLELQNGHIVCLNSVLALSAIPGAIDYCTSKASAFAFMESLTLGLLDCPGVSATTVLPFHTSTEMFQGMRVRFPNLFPPLKPETVARRTVEAVQLNQALLLLPWTMHALVILKSILPQAALEEIHKFSGTYTCMNTFKGRT

SEQ ID NO: 23555 - protein, 278 aa, Homo sapiens
  Payload ID: 4713
  Gene Symbol: DHRS4
  Gene Name: dehydrogenase/reductase (SDR family) member 4
  Uniprot ID: Q9BTZ2
  ENSP ID: ENSP00000326219
MHKAGLLGLCARAWNSVRMASSGMTRRDPLANKVALVTASTDGIGFAIARRLAQDGAHVVVSSRKQQNVDQAVATLQGEGLSVTGTVCHVGKAEDRERLVATAVKLHGGIDILVSNAAVNPFFGSIMDVTEEVWDKTLDINVKAPALMTKAVVPEMEKRGGGSVVIVSSIAAFSPSPGFSPYNVSKTALLGLTKTLAIELAPRNIRVNCLAPGLIKTSFSRMLWMDKEKEESMKETLRIRRLGEPEDCAGIVSFLCSEDASYITGETVVVGGGTPSRL

SEQ ID NO: 23556 - protein, 158 aa, Homo sapiens
  Payload ID: 4713
  Gene Symbol: DHRS4
  Gene Name: dehydrogenase/reductase (SDR family) member 4
  Uniprot ID: Q9BTZ2
  ENSP ID: ENSP00000380264
MHKAGLLGLCARAWNSVRMASSGMTRRDPLANKVALVTASTDGIGFAIARRLAQDGAHVVVSSRKQQNVDQAVATLQGEGLSVTGTVCHVGKAEDRERLVATLWMDKEKEESMKETLRIRRLGEPEDCAGIVSFLCSEDASYITGETVVVGGGTPSRL

SEQ ID NO: 23557 - protein, 192 aa, Homo sapiens
  Payload ID: 4713
  Gene Symbol: DHRS4
  Gene Name: dehydrogenase/reductase (SDR family) member 4
  Uniprot ID: Q9BTZ2
  ENSP ID: ENSP00000380265
MHKAGLLGLCARAWNSVRMASSGMTRRDPLANKVALVTASTDGIGFAIARRLAQDGAHVVVSSRKQQNVDQAVATLQGEGLSVTGTVCHVGKAEDRERLVATAVKLHGGIDILVSNAAVNPFFGSIMDVTEEVWDKLWMDKEKEESMKETLRIRRLGEPEDCAGIVSFLCSEDASYITGETVVVGGGTPSRL

SEQ ID NO: 23558 - protein, 155 aa, Homo sapiens
  Payload ID: 4713
  Gene Symbol: DHRS4
  Gene Name: dehydrogenase/reductase (SDR family) member 4
  ENSP ID: ENSP00000440508
MHKAGLLGLCARAWNSVRMASSGMTRRDPLANKVALVTASTDGIGFAIARRLAQDGAHVVVSSRKQQNVDQAVATLQGEGLSVTGTVCHVGKAEDRERLVATAVKLHGGIDILVSNAAVNPFFGSIMDVTEEVWDKLWMDKEKEESMKETLRIRR

SEQ ID NO: 23559 - protein, 244 aa, Homo sapiens
  Payload ID: 4713
  Gene Symbol: DHRS4
  Gene Name: dehydrogenase/reductase (SDR family) member 4
  Uniprot ID: Q9BTZ2
  ENSP ID: ENSP00000452645
MHKAGLLGLCARAWNSVRMASSGMTRRDPLANKVALVTASTDGIGFAIARRLAQDGAHVVVSSRKQQNVDQAVATLQGEGLSVTGTVCHVGKAEDRERLVATTLDINVKAPALMTKAVVPEMEKRGGGSVVIVSSIAAFSPSPGFSPYNVSKTALLGLTKTLAIELAPRNIRVNCLAPGLIKTSFSRMLWMDKEKEESMKETLRIRRLGEPEDCAGIVSFLCSEDASYITGETVVVGGGTPSRL

SEQ ID NO: 23560 - protein, 188 aa, Homo sapiens
  Payload ID: 4713
  Gene Symbol: DHRS4
  Gene Name: dehydrogenase/reductase (SDR family) member 4
  Uniprot ID: Q9BTZ2
  ENSP ID: ENSP00000453367
MHKAGLLGLCARAWNSVRMASSGMTRRDPLANKVALVTASTDGIGFAIARRLAQDGAHVVVSSRKQQNVDQAVATLQGEGLSVTGTVCHVGKAEDRERLVATAVKLHGGIDILVSNAAVNPFFGSIMDVTEEVWDKRRLSGDRVFHSSLQSISSLDGQGKRGKHERNPADKKVRRARGLCWHRVFPVL

SEQ ID NO: 23561 - protein, 199 aa, Homo sapiens
  Payload ID: 4713
  Gene Symbol: DHRS4
  Gene Name: dehydrogenase/reductase (SDR family) member 4
  Uniprot ID: Q9BTZ2
  ENSP ID: ENSP00000453983
MHKAGLLGLCARAWNSVRMASSGMTRRDPLANKVALVTASTDGIGFAIARRLAQDGAHVVVSSRKQQNVDQAVATLQGEGLSVTGTVCHVGKAEDRERLVATTLDINVKAPALMTKAVVPEMEKRGGGSVVIVSSIAAFSPSPLWMDKEKEESMKETLRIRRLGEPEDCAGIVSFLCSEDASYITGETVVVGGGTPSRL

SEQ ID NO: 23562 - protein, 61 aa, Homo sapiens
  Payload ID: 4713
  Gene Symbol: DHRS4
  Gene Name: dehydrogenase/reductase (SDR family) member 4
  ENSP ID: ENSP00000454099
RNIRVNCLAPGLIKTSFSRMLWMDKEKEESMKETLRIRRPRIHKHYHYSDLSKKSASLSKG

SEQ ID NO: 23563 - protein, 232 aa, Homo sapiens
  Payload ID: 4714
  Gene Symbol: DHRS4L2
  Gene Name: dehydrogenase/reductase (SDR family) member 4 like 2
  Uniprot ID: Q6PKH6
  ENSP ID: ENSP00000334801
MQMARLLGLCAWARKSVRMASSRMTRRDPLTNKVALVTASTDGIGFAIARRLAQDRAHVVVSSRKQQNVDQAVATLQGEGLSVTGTVCHVGKAEDRERLVAMAVKLHGGIDILVSNAAVNPFFGSLMDVTEEVWDKTLDINVKAPALMTKAVVPEMEKRGGGSVVIVSSIAAFSPSPGFSPYNVSKTALLGLNNTLAIELAPRNIRVNCLHLDLSRLASAGCSGWTRKKRKA

SEQ ID NO: 23564 - protein, 276 aa, Homo sapiens
  Payload ID: 4714
  Gene Symbol: DHRS4L2
  Gene Name: dehydrogenase/reductase (SDR family) member 4 like 2
  ENSP ID: ENSP00000372203
MQMARLLGLCAWARKSVRMASSRMTRRDPLTNKVALVTASTDGIGFAIARRLAQDRAHVVVSSRKQQNVDQAVATLQGEGLSVTGTVCHVGKAEDRERLVAMAVKLHGGIDILVSNAAVNPFFGSLMDVTEEVWDKTLDINVKAPALMTKAVVPEMEKRGGGSVVIVSSIAAFSPSPGFSPYNVSKTALLGLNNTLAIELAPRNIRVNCLGLIKTSFSRMLWMDKEKEESMKETLRIRRLGEPEDCAGIVSFLCSEDASYITGETVVVGGGTPSRL

SEQ ID NO: 23565 - protein, 192 aa, Homo sapiens
  Payload ID: 4714
  Gene Symbol: DHRS4L2
  Gene Name: dehydrogenase/reductase (SDR family) member 4 like 2
  ENSP ID: ENSP00000380261
MQMARLLGLCAWARKSVRMASSRMTRRDPLTNKVALVTASTDGIGFAIARRLAQDRAHVVVSSRKQQNVDQAVATLQGEGLSVTGTVCHVGKAEDRERLVAMAVKLHGGIDILVSNAAVNPFFGSLMDVTEEVWDKLWMDKEKEESMKETLRIRRLGEPEDCAGIVSFLCSEDASYITGETVVVGGGTPSRL

SEQ ID NO: 23566 - protein, 157 aa, Homo sapiens
  Payload ID: 4714
  Gene Symbol: DHRS4L2
  Gene Name: dehydrogenase/reductase (SDR family) member 4 like 2
  ENSP ID: ENSP00000439942
MQMARLLGLCAWARKSVRMASSRMTRRDPLTNKVALVTASTDGIGFAIARRLAQDRAHVVVSSRKQQNVDQAVATLQGEGLSVTGTVCHVGKAEDRERLVAMGFSPYNVSKTALLGLNNTLAIELAPRNIRVNCLHLDLSRLASAGCSGWTRKKRKA

SEQ ID NO: 23567 - protein, 90 aa, Homo sapiens
  Payload ID: 4714
  Gene Symbol: DHRS4L2
  Gene Name: dehydrogenase/reductase (SDR family) member 4 like 2
  ENSP ID: ENSP00000441095
MAVKLHGGIDILVSNAAVNPFFGSLMDVTEEVWDKGFSPYNVSKTALLGLNNTLAIELAPRNIRVNCLHLDLSRLASAGCSGWTRKKRKA

SEQ ID NO: 23568 - protein, 138 aa, Homo sapiens
  Payload ID: 4714
  Gene Symbol: DHRS4L2
  Gene Name: dehydrogenase/reductase (SDR family) member 4 like 2
  ENSP ID: ENSP00000441433
MAVKLHGGIDILVSNAAVNPFFGSLMDVTEEVWDKTLDINVKAPALMTKAVVPEMEKRGGGSVVIVSSIAAFSPSPGFSPYNVSKTALLGLNNTLAIELAPRNIRVNCLGLIKTSFSRMLWMDKEKEESMKETLRIEG

SEQ ID NO: 23569 - protein, 109 aa, Homo sapiens
  Payload ID: 4714
  Gene Symbol: DHRS4L2
  Gene Name: dehydrogenase/reductase (SDR family) member 4 like 2
  ENSP ID: ENSP00000452875
  MOD_RES (1)..(1): Any amino acid
XSLMDVTEEVWDKTLDINVKAPALMTKAVVPEMEKRGGGSVVIVSSIAAFSPSPGFSPYNVSKTALLGLNNTLAIELAPRNIRVNCLHLDLSRLASAGCSGWTRKKRKA

SEQ ID NO: 23570 - protein, 48 aa, Homo sapiens
  Payload ID: 4714
  Gene Symbol: DHRS4L2
  Gene Name: dehydrogenase/reductase (SDR family) member 4 like 2
  ENSP ID: ENSP00000453173
MDVTEEVWDKTLDINVKAPALMTKAVVPEMEKRGGGSVVIVSSIAAFS

SEQ ID NO: 23571 - protein, 157 aa, Homo sapiens; identical to SEQ ID NO: 23566
  Payload ID: 4714
  Gene Symbol: DHRS4L2
  Gene Name: dehydrogenase/reductase (SDR family) member 4 like 2
  ENSP ID: ENSP00000453845

SEQ ID NO: 23572 - protein, 242 aa, Homo sapiens
  Payload ID: 4714
  Gene Symbol: DHRS4L2
  Gene Name: dehydrogenase/reductase (SDR family) member 4 like 2
  ENSP ID: ENSP00000453889
MQMARLLGLCAWARKSVRMASSRMTRRDPLTNKVALVTASTDGIGFAIARRLAQDRAHVVVSSRKQQNVDQAVATLQGEGLSVTGTVCHVGKAEDRERLVAMAVKLHGGIDILVSNAAVNPFFGSLMDVTEEVWDKTLDINVKAPALMTKAVVPEMEKRGGGSVVIVSSIAAFSPSPGFSPYNVSKTALLGLNNTLAIELAPRNIRVNCLHLDLSRLASAGWLGEPEDCAGIVSFLCSEDAS

SEQ ID NO: 23573 - protein, 215 aa, Homo sapiens
  Payload ID: 4714
  Gene Symbol: DHRS4L2
  Gene Name: dehydrogenase/reductase (SDR family) member 4 like 2
  ENSP ID: ENSP00000481066
MPFPCLSLPSSWDYRIGFAIARRLAQDRAHVVVSSRKQQNVDQAVATLQGEGLSVTGTVCHVGKAEDRERLVAMTLDINVKAPALMTKAVVPEMEKRGGGSVVIVSSIAAFSPSPGFSPYNVSKTALLGLNNTLAIELAPRNIRVNCLPGLIKTSFSRMLWMDKEKEESMKETLRIRRLGEPEDCAGIVSFLCSEDASYITGETVVVGGGTPSRL

SEQ ID NO: 23574 - protein, 339 aa, Homo sapiens
  Payload ID: 4715
  Gene Symbol: DHRS7
  Gene Name: dehydrogenase/reductase (SDR family) member 7
  Uniprot ID: Q9Y394
  ENSP ID: ENSP00000216500
MNWELLLWLLVLCALLLLLVQLLRFLRADGDLTLLWAEWQGRRPEWELTDMVVWVTGASSGIGEELAYQLSKLGVSLVLSARRVHELERVKRRCLENGNLKEKDILVLPLDLTDTGSHEAATKAVLQEFGRIDILVNNGGMSQRSLCMDTSLDVYRKLIELNYLGTVSLTKCVLPHMIERKQGKIVTVNSILGIISVPLSIGYCASKHALRGFFNGLRTELATYPGIIVSNICPGPVQSNIVENSLAGEVTKTIGNNGDQSHKMTTSRCVRLMLISMANDLKEVWISEQPFLLVTYLWQYMPTWAWWITNKMGKKRIENFKSGVDADSSYFKIFKTKHD

SEQ ID NO: 23575 - protein, 289 aa, Homo sapiens
  Payload ID: 4715
  Gene Symbol: DHRS7
  Gene Name: dehydrogenase/reductase (SDR family) member 7
  Uniprot ID: Q9Y394
  ENSP ID: ENSP00000442993
MVVWVTGASSGIGEELAYQLSKLGVSLVLSARRVHELERVKRRCLENGNLKEKDILVLPLDLTDTGSHEAATKAVLQEFGRIDILVNNGGMSQRSLCMDTSLDVYRKLIELNYLGTVSLTKCVLPHMIERKQGKIVTVNSILGIISVPLSIGYCASKHALRGFFNGLRTELATYPGIIVSNICPGPVQSNIVENSLAGEVTKTIGNNGDQSHKMTTSRCVRLMLISMANDLKEVWISEQPFLLVTYLWQYMPTWAWWITNKMGKKRIENFKSGVDADSSYFKIFKTKHD

SEQ ID NO: 23576 - protein, 399 aa, Homo sapiens
  Payload ID: 4715
  Gene Symbol: DHRS7
  Gene Name: dehydrogenase/reductase (SDR family) member 7
  ENSP ID: ENSP00000450899
  MOD_RES (1)..(1): Any amino acid
XLWLLVLCALLLLLVQLLRFLRADGDLTLLWAEWQGRRPEWELTDMVVWVTGASSGIGEELAYQLSKLGVSLVLSARRVHELERVKRRCLENGNLKEKDILVLPLDLTDTGSHEAATKAVLQEFGRIDILVNNGGMSQRSLCMDTSLDVYRKLIELNYLGTVSLTKCVLPHMIERKQGKIVTVNSILGIISVPLSIGYCASKHALRGFFNGLRTELATYPGIIVSNICPGPVQSNIVENSLAGEVTKTIGNNGDQSHKMTTSRCVRLMLISMANDLKEVWISEQPFLLVTYLWQYMPTWAWWITNKMGKKRIENFKSGVVRPISKFLNSMYQSCRKVQNFPVFKKLSGWVQWLMSVIPALWEAKADHLRPGVQDQPGQHSETPSLLKIQKVAGHGGACL

SEQ ID NO: 23577 - protein, 160 aa, Homo sapiens
  Payload ID: 4715
  Gene Symbol: DHRS7
  Gene Name: dehydrogenase/reductase (SDR family) member 7
  ENSP ID: ENSP00000451321
  MOD_RES (1)..(1): Any amino acid
XNWELLLWLLVLCALLLLLVQLLRFLRADGDLTLLWAEWQGRRPEWELTDMVVWVTGASSGIGEELAYQLSKLGVSLVLSARRVHELERVKRRCLENGNLKEKDILVLPLDLTDTGSHEAATKAVLQEFGRGFFNGLRTELATYPGIIVSNICPGPVQSN

SEQ ID NO: 23578 - protein, 339 aa, Homo sapiens; identical to SEQ ID NO: 23574
  Payload ID: 4715
  Gene Symbol: DHRS7
  Gene Name: dehydrogenase/reductase (SDR family) member 7
  Uniprot ID: Q9Y394
  ENSP ID: ENSP00000451882

SEQ ID NO: 23579 - protein, 212 aa, Homo sapiens
  Payload ID: 4715
  Gene Symbol: DHRS7
  Gene Name: dehydrogenase/reductase (SDR family) member 7
  ENSP ID: ENSP00000452026
  MOD_RES (1)..(1): Any amino acid
XILVNNGGMSQRSLCMDTSLDVYRKLIELNYLGTVSLTKCVLPHMIERKQGKIVTVNSILGIISVPLSIGYCASKHALRGFFNGLRTELATYPGIIVSNICPGPVQSNIVENSLAGEVTKTIGNNGDQSHKMTTSRCVRLMLISMANDLKEVWISEQPFLMQTLLILKSLRQNMTEKSTCTFQATGGRNGKHENSNLLMLLNNQRLICDFTF

SEQ ID NO: 23580 - protein, 61 aa, Homo sapiens
  Payload ID: 4715
  Gene Symbol: DHRS7
  Gene Name: dehydrogenase/reductase (SDR family) member 7
  ENSP ID: ENSP00000452375
MNWELLLWLLVLCALLLLLVQLLRFLRADGDLTLLWAEWQGRRPEWELTDMVVWVTGASSG

SEQ ID NO: 23581 - protein, 376 aa, Homo sapiens
  Payload ID: 4715
  Gene Symbol: DHRS7
  Gene Name: dehydrogenase/reductase (SDR family) member 7
  ENSP ID: ENSP00000483770
MNWELLLWLLVLCALLLLLVQLLRFLRADGDLTLLWAEWQGRRPEWELTDMVVWVTGASSGIGEELAYQLSKLGVSLVLSARRVHELERVKRRCLENGNLKEKDILVLPLDLTDTGSHEAATKAVLQEFGRIDILVNNGGMSQRSLCMDTSLDVYRKLIELNYLGTVSLTKCVLPHMIERKQGKIVTVNSILGIISVPLSIGYCASKHALRGFFNGLRTELATYPGIIVSNICPGPVQSNIVENSLAGEVTKTIGNNGDQSHKMTTSRCVRLMLISMANDLKEVWISEQPFLLVTYLWQYMPTWAWWITTRWGRKGLRTLRVVWMQTLLILKSLRQNMTEKSTCTFQATGGRNGKHENSNLLMLLNNQRLICDFTF

SEQ ID NO: 23582 - protein, 325 aa, Homo sapiens
  Payload ID: 4716
  Gene Symbol: DHRS7B
  Gene Name: dehydrogenase/reductase (SDR family) member 7B
  Uniprot ID: Q6IAN0
  ENSP ID: ENSP00000378887
MVSPATRKSLPKVKAMDFITSTAILPLLFGCLGVFGLFRLLQWVRGKAYLRNAVVVITGATSGLGKECAKVFYAAGAKLVLCGRNGGALEELIRELTASHATKVQTHKPYLVTFDLTDSGAIVAAAAEILQCFGYVDILVNNAGISYRGTIMDTTVDVDKRVMETNYFGPVALTKALLPSMIKRRQGHIVAISSIQGKMSIPFRSAYAASKHATQAFFDCLRAEMEQYEIEVTVISPGYIHTNLSVNAITADGSRYGVMDTTTAQGRSPVEVAQDVLAAVGKKKKDVILADLLPSLAVYLRTLAPGLFFSLMASRARKERKSKNS

SEQ ID NO: 23583 - protein, 125 aa, Homo sapiens
  Payload ID: 4716
  Gene Symbol: DHRS7B
  Gene Name: dehydrogenase/reductase (SDR family) member 7B
  ENSP ID: ENSP00000462139
  MOD_RES (1)..(1): Any amino acid
XIMDTTVDVDKRVMETNYFGPVALTKALLPSMIKRRQGHIVAISSIQGKMSIPFRSAFMDTTTAQGRSPVEVAQDVLAAVGKKKKDVILADLLPSLAVYLRTLAPGLFFSLMASRARKERKSKNS

SEQ ID NO: 23584 - protein, 126 aa, Homo sapiens
  Payload ID: 4716
  Gene Symbol: DHRS7B
  Gene Name: dehydrogenase/reductase (SDR family) member 7B
  ENSP ID: ENSP00000463221
MVSPATRKSLPKVKAMDFITSTAILPLLFGCLGVFGLFRLLQWVRGKAYLRNAVVVITGATSGLGKECAKVFYAAGAKLVLCGRNGGALEELIRELTASHATKVQTHKPYLVTFDLTDSGAIVAAA

SEQ ID NO: 23585 - protein, 107 aa, Homo sapiens
  Payload ID: 4716
  Gene Symbol: DHRS7B
  Gene Name: dehydrogenase/reductase (SDR family) member 7B
  ENSP ID: ENSP00000463588
MIKRRQGHIVAISSIQGKMSIPFRSAYAASKHATQAFFDCLRAEMEQYEIEVTVISPGYIHTNLSVNAITADGSRYGGKLSTSLLTWKRRVSLVFTLETVDPGKSWN

SEQ ID NO: 23586 - protein, 90 aa, Homo sapiens
  Payload ID: 4716
  Gene Symbol: DHRS7B
  Gene Name: dehydrogenase/reductase (SDR family) member 7B
  ENSP ID: ENSP00000463591
MVSPATRKSLPKVKAMDFITSTAILPLLFGCLGVFGLFRLLQWVRGKAYLRNAVVVITGATSGLGKGADTQALLGDLRPHRLWGHSCSSS

SEQ ID NO: 23587 - protein, 310 aa, Homo sapiens
  Payload ID: 4716
  Gene Symbol: DHRS7B
  Gene Name: dehydrogenase/reductase (SDR family) member 7B
  ENSP ID: ENSP00000468585
MDFITSTAILPLLFGCLGVFGLFRLLQWVRGKAYLRNAVVVITGATSGLGKECAKVFYAAGAKLVLCGRNGGALEELIRELTASHATKVQTHKPYLVTFDLTDSGAIVAAAAEILQCFGYVDILVNNAGISYRGTIMDTTVDVDKRVMETNYFGPVALTKALLPSMIKRRQGHIVAISSIQGKMSIPFRSAYAASKHATQAFFDCLRAEMEQYEIEVTVISPGYIHTNLSVNAITADGSRYGVMDTTTAQGRSPVEVAQDVLAAVGKKKKDVILADLLPSLAVYLRTLAPGLFFSLMASRARKERKSKNS

SEQ ID NO: 23588 - protein, 312 aa, Homo sapiens
  Payload ID: 4717
  Gene Symbol: DHRS7C
  Gene Name: dehydrogenase/reductase (SDR family) member 7C
  Uniprot ID: A6NNS2
  ENSP ID: ENSP00000327975
MGVMAMLMLPLLLLGISGLLFIYQEVSRLWSKSAVQNKVVVITDAISGLGKECARVFHTGGARLVLCGKNWERLENLYDALISVADPSKQTFTPKLVLLDLSDISCVPDVAKEVLDCYGCVDILINNASVKVKGPAHKISLELDKKIMDANYFGPITLTKALLPNMISRRTGQIVLVNNIQGKFGIPFRTTYAASKHAALGFFDCLRAEVEEYDVVISTVSPTFIRSYHVYPEQGNWEASIWKFFFRKLTYGVHPVEVAEEVMRTVRRKKQEVFMANPIPKAAVYVRTFFPEFFFAVVACGVKEKLNVPEEG

SEQ ID NO: 23589 - protein, 311 aa, Homo sapiens
  Payload ID: 4717
  Gene Symbol: DHRS7C
  Gene Name: dehydrogenase/reductase (SDR family) member 7C
  Uniprot ID: A6NNS2
  ENSP ID: ENSP00000459579
MGVMAMLMLPLLLLGISGLLFIYQEVSRLWSKSAVQNKVVVITDAISGLGKECARVFHTGGARLVLCGKNWERLENLYDALISVADPSKTFTPKLVLLDLSDISCVPDVAKEVLDCYGCVDILINNASVKVKGPAHKISLELDKKIMDANYFGPITLTKALLPNMISRRTGQIVLVNNIQGKFGIPFRTTYAASKHAALGFFDCLRAEVEEYDVVISTVSPTFIRSYHVYPEQGNWEASIWKFFFRKLTYGVHPVEVAEEVMRTVRRKKQEVFMANPIPKAAVYVRTFFPEFFFAVVACGVKEKLNVPEEG

SEQ ID NO: 23590 - protein, 132 aa, Homo sapiens
  Payload ID: 4717
  Gene Symbol: DHRS7C
  Gene Name: dehydrogenase/reductase (SDR family) member 7C
  ENSP ID: ENSP00000461902
SVKVKGPAHKISLELDKKIMDANYFGPITLTKALLPNMISRRTGQIVLVNNIQGKFGIPFRTTFFFRKLTYGVHPVEVAEEVMRTVRRKKQEVFMANPIPKAAVYVRTFFPEFFFAVVACGVKEKLNVPEEG

SEQ ID NO: 23591 - protein, 319 aa, Homo sapiens
  Payload ID: 4718
  Gene Symbol: DHRS9
  Gene Name: dehydrogenase/reductase (SDR family) member 9
  Uniprot ID: Q9BPW9
  ENSP ID: ENSP00000350154
MLFWVLGLLILCGFLWTRKGKLKIEDITDKYIFITGCDSGFGNLAARTFDKKGFHVIAACLTESGSTALKAETSERLRTVLLDVTDPENVKRTAQWVKNQVGEKGLWGLINNAGVPGVLAPTDWLTLEDYREPIEVNLFGLISVTLNMLPLVKKAQGRVINVSSVGGRLAIVGGGYTPSKYAVEGFNDSLRRDMKAFGVHVSCIEPGLFKTNLADPVKVIEKKLAIWEQLSPDIKQQYGEGYIEKSLDKLKGNKSYVNMDLSPVVECMDHALTSLFPKTHYAAGKDAKIFWIPLSHMPAALQDFLLLKQKAELANPKAV

SEQ ID NO: 23592 - protein, 172 aa, Homo sapiens
  Payload ID: 4718
  Gene Symbol: DHRS9
  Gene Name: dehydrogenase/reductase (SDR family) member 9
  Uniprot ID: Q9BPW9
  ENSP ID: ENSP00000388066
MLPLVKKAQGRVINVSSVGGRLAIVGGGYTPSKYAVEGFNDSLRRDMKAFGVHVSCIEPGLFKTNLADPVKVIEKKLAIWEQLSPDIKQQYGEGYIEKSLDKLKGNKSYVNMDLSPVVECMDHALTSLFPKTHYAAGKDAKIFWIPLSHMPAALQDFLLLKQKAELANPKAV

SEQ ID NO: 23593 - protein, 319 aa, Homo sapiens; identical to SEQ ID NO: 23591
  Payload ID: 4718
  Gene Symbol: DHRS9
  Gene Name: dehydrogenase/reductase (SDR family) member 9
  Uniprot ID: Q9BPW9
  ENSP ID: ENSP00000388564

SEQ ID NO: 23594 - protein, 379 aa, Homo sapiens
  Payload ID: 4718
  Gene Symbol: DHRS9
  Gene Name: dehydrogenase/reductase (SDR family) member 9
  Uniprot ID: Q9BPW9
  ENSP ID: ENSP00000389241
MPEGRSHCACSITSLTLLVSLTRVTLDILQKLDPPQPAHWRHHLLVLYKKGVYLSHTGGKMLFWVLGLLILCGFLWTRKGKLKIEDITDKYIFITGCDSGFGNLAARTFDKKGFHVIAACLTESGSTALKAETSERLRTVLLDVTDPENVKRTAQWVKNQVGEKGLWGLINNAGVPGVLAPTDWLTLEDYREPIEVNLFGLISVTLNMLPLVKKAQGRVINVSSVGGRLAIVGGGYTPSKYAVEGFNDSLRRDMKAFGVHVSCIEPGLFKTNLADPVKVIEKKLAIWEQLSPDIKQQYGEGYIEKSLDKLKGNKSYVNMDLSPVVECMDHALTSLFPKTHYAAGKDAKIFWIPLSHMPAALQDFLLLKQKAELANPKAV

SEQ ID NO: 23595 - protein, 66 aa, Homo sapiens
  Payload ID: 4718
  Gene Symbol: DHRS9
  Gene Name: dehydrogenase/reductase (SDR family) member 9
  ENSP ID: ENSP00000391214
MLFWVLGLLILCGFLWTRKGKLKIEDITDKYIFITGCDSGFGNLAARTFDKKGFHVIAACLTESGS

SEQ ID NO: 23596 - protein, 319 aa, Homo sapiens; identical to SEQ ID NO: 23591
  Payload ID: 4718
  Gene Symbol: DHRS9
  Gene Name: dehydrogenase/reductase (SDR family) member 9
  Uniprot ID: Q9BPW9
  ENSP ID: ENSP00000407167

SEQ ID NO: 23597 - protein, 319 aa, Homo sapiens; identical to SEQ ID NO: 23591
  Payload ID: 4718
  Gene Symbol: DHRS9
  Gene Name: dehydrogenase/reductase (SDR family) member 9
  Uniprot ID: Q9BPW9
  ENSP ID: ENSP00000407747

SEQ ID NO: 23598 - protein, 319 aa, Homo sapiens; identical to SEQ ID NO: 23591
  Payload ID: 4718
  Gene Symbol: DHRS9
  Gene Name: dehydrogenase/reductase (SDR family) member 9
  Uniprot ID: Q9BPW9
  ENSP ID: ENSP00000473337

SEQ ID NO: 23599 - protein, 330 aa, Homo sapiens
  Payload ID: 4719
  Gene Symbol: DHRSX
  Gene Name: dehydrogenase/reductase (SDR family) X-linked
  Uniprot ID: Q8N5I4
  ENSP ID: ENSP00000334113
MSPLSAARAALRVYAVGAAVILAQLLRRCRGGFLEPVFPPRPDRVAIVTGGTDGIGYSTAKHLARLGMHVIIAGNNDSKAKQVVSKIKEETLNDKVEFLYCDLASMTSIRQFVQKFKMKKIPLHVLINNAGVMMVPQRKTRDGFEEHFGLNYLGHFLLTNLLLDTLKESGSPGHSARVVTVSSATHYVAELNMDDLQSSACYSPHAAYAQSKLALVLFTYHLQRLLAAEGSHVTANVVDPGVVNTDVYKHVFWATRLAKKLLGWLLFKTPDEGAWTSIYAAVTPELEGVGGHYLYNEKETKSLHVTYNQKLQQQLWSKSCEMTGVLDVTL

SEQ ID NO: 23600 - protein, 232 aa, Homo sapiens
  Payload ID: 4719
  Gene Symbol: DHRSX
  Gene Name: dehydrogenase/reductase (SDR family) X-linked
  ENSP ID: ENSP00000391778
MSPLSAARAALRVYAVGAAVILAQLLRRCRGGFLEPVFPPRPDRVAIVTGGTDGIGYSTAKHLARLGMHVIIVEFLYCDLASMTSIRQFVQKFKMKKIPLHVLINNAGVMMVPQRKTRDGFEEHFGLNYLGHFLLTNLLLDTLKESGSPGHSARVVTVSSATHYVAELNMDDLQSSACYSPHAAYAQSKLALVLFTYHLQRLLAAEGSHVTANVVDPGVVNTDVYKHVFWAT

SEQ ID NO: 23601 - protein, 121 aa, Homo sapiens
  Payload ID: 4719
  Gene Symbol: DHRSX
  Gene Name: dehydrogenase/reductase (SDR family) X-linked
  ENSP ID: ENSP00000402741
MHVIIAGNNDSKAKQVVSKIKEETLNDKVEFLYCDLASMTSIRQFVQKFKMKKIPLHVLINNAGVMMVPQRKTRDGFEEHFGLNYLGHFLLTNLLLDTLKESGSPGHSARVVTVSSATHYV

SEQ ID NO: 23602 - protein, 63 aa, Homo sapiens
  Payload ID: 4719
  Gene Symbol: DHRSX
  Gene Name: dehydrogenase/reductase (SDR family) X-linked
  ENSP ID: ENSP00000403045
MPVFPPRPDRVAIVTGGTDGIGYSTAKHLARLGMHVIIAGNNDSKAKQVVSKIKEETLNDKET

SEQ ID NO: 23603 - protein, 154 aa, Homo sapiens
  Payload ID: 4719
  Gene Symbol: DHRSX
  Gene Name: dehydrogenase/reductase (SDR family) X-linked
  ENSP ID: ENSP00000420788
  MOD_RES (1)..(1): Any amino acid
XPARPGPTLPSPRVWPPRLSRVGLQPSSPRAAAPPRTLTPPGHGRGPGGSHAPRPRHQAALPAACGRPVTARPRQAPEGRSGRPRDLDPYPPQVFPPRPDRVAIVTGGTDGIGYSTAKHLARLGMHVIIAGNNDSKAKQVVSKIKEETLNDKET

SEQ ID NO: 23604 - protein, 161 aa, Homo sapiens
  Payload ID: 4720
  Gene Symbol: DIO1
  Gene Name: deiodinase, iodothyronine, type I
  Uniprot ID: P49895
  ENSP ID: ENSP00000323198
  MOD_RES (126)..(126): Selenocysteine
MGLPQPGLWLKRLWVLLEVAVHVVVGKVLLILFPDRVKRNILAMGEKTGMTRNPHFSHDNWIPTFFSTQYFWFVLKVRWQRLEDTTELGGLAPNCPVVRLSGQRCNIWEFMQGNRPLVLNFGSCTXPSFMFKFDQFKRLIEDFSSIADFLVIYIEEAHASG

SEQ ID NO: 23605 - protein, 249 aa, Homo sapiens
  Payload ID: 4720
  Gene Symbol: DIO1
  Gene Name: deiodinase, iodothyronine, type I
  Uniprot ID: P49895
  ENSP ID: ENSP00000354643
  MOD_RES (126)..(126): Selenocysteine
MGLPQPGLWLKRLWVLLEVAVHVVVGKVLLILFPDRVKRNILAMGEKTGMTRNPHFSHDNWIPTFFSTQYFWFVLKVRWQRLEDTTELGGLAPNCPVVRLSGQRCNIWEFMQGNRPLVLNFGSCTXPSFMFKFDQFKRLIEDFSSIADFLVIYIEEAHASDGWAFKNNMDIRNHQNLQDRLQAAHLLLARSPQCPVVVDTMQNQSSQLYAALPERLYIIQEGRILYKGKSGPWNYNPEEVRAVLEKLHS

SEQ ID NO: 23606 - protein, 201 aa, Homo sapiens
  Payload ID: 4720
  Gene Symbol: DIO1
  Gene Name: deiodinase, iodothyronine, type I
  Uniprot ID: P49895
  ENSP ID: ENSP00000373528
MGLPQPGLWLKRLWVLLEVAVHVVVGKVLLILFPDRVKRNILAMGEKTGMTRNPHFSHDNWIPTFFSTQYFWFVLKVRWQRLEDTTELGGLAPNCPVVRLSGQRCNIWEFMQDGWAFKNNMDIRNHQNLQDRLQAAHLLLARSPQCPVVVDTMQNQSSQLYAALPERLYIIQEGRILYKGKSGPWNYNPEEVRAVLEKLHS

SEQ ID NO: 23607 - protein, 82 aa, Homo sapiens
  Payload ID: 4720
  Gene Symbol: DIO1
  Gene Name: deiodinase, iodothyronine, type I
  ENSP ID: ENSP00000431999
MGLPQPGLWLKRLWVLLEVAVHVVVGKVLLILFPDRVKRNILAMGEKTGMTRNPHFSHDNWIPTFFSTQYFWFVLKVIGHWC

SEQ ID NO: 23608 - protein, 58 aa, Homo sapiens
  Payload ID: 4720
  Gene Symbol: DIO1
  Gene Name: deiodinase, iodothyronine, type I
  ENSP ID: ENSP00000432700
MGLPQPGLWLKRLWVLLEVAVHVVVGKVLLILFPDRVKRNILAMGEKTGPLAATRGHD

SEQ ID NO: 23609 - protein, 184 aa, Homo sapiens
  Payload ID: 4720
  Gene Symbol: DIO1
  Gene Name: deiodinase, iodothyronine, type I
  ENSP ID: ENSP00000432797
  MOD_RES (83)..(83): Selenocysteine
MGEKTGMTRNPHFSHDNWIPTFFSTQYFWFVLKVRWQRLEDTTELGGLAPNCPVVRLSGQRCNIWEFMQGNRPLVLNFGSCTXPSFMFKFDQFKRLIEDFSSIADFLVIYIEEAHASDGWAFKNNMDIRNHQNLQDRLQAAHLLLARSPQCPVVVDTMQNQSSQLYAALPERLYIIQEGRILYK

SEQ ID NO: 23610 - protein, 117 aa, Homo sapiens
  Payload ID: 4720
  Gene Symbol: DIO1
  Gene Name: deiodinase, iodothyronine, type I
  ENSP ID: ENSP00000433891
MGLPQPGLWLKRLWVLLEVAVHVVVGKVLLILFPDRVKRNILAMGEKTGMTRNPHFSHDNWIPTFFSTQYFWFVLKVRWQRLEDTTELGGLAPNCPVVRLSGQRCNIWEFMQVQEAY

SEQ ID NO: 23611 - protein, 120 aa, Homo sapiens
  Payload ID: 4720
  Gene Symbol: DIO1
  Gene Name: deiodinase, iodothyronine, type I
  ENSP ID: ENSP00000434152
MFKFDQFKRLIEDFSSIADFLVIYIEEAHASDGWAFKNNMDIRNHQNLQDRLQAAHLLLARSPQCPVVVDTMQNQSSQLYAALPERLYIIQEGRILYKGKSGPWNYNPEEVRAVLEKLHS

SEQ ID NO: 23612 - protein, 113 aa, Homo sapiens
  Payload ID: 4720
  Gene Symbol: DIO1
  Gene Name: deiodinase, iodothyronine, type I
  Uniprot ID: P49895
  ENSP ID: ENSP00000434758
MGLPQPGLWLKRLWVLLEVAVHVVVGKVLLILFPDRVKRNILAMGEKTGMTRNPHFSHDNWIPTFFSTQYFWFVLKVRWQRLEDTTELGGLAPNCPVVRLSGQRCNIWEFMQG

SEQ ID NO: 23613 - protein, 58 aa, Homo sapiens; identical to SEQ ID NO: 23608
  Payload ID: 4720
  Gene Symbol: DIO1
  Gene Name: deiodinase, iodothyronine, type I
  ENSP ID: ENSP00000435030

SEQ ID NO: 23614 - protein, 185 aa, Homo sapiens
  Payload ID: 4720
  Gene Symbol: DIO1
  Gene Name: deiodinase, iodothyronine, type I
  Uniprot ID: P49895
  ENSP ID: ENSP00000435725
  MOD_RES (62)..(62): Selenocysteine
MGLPQPGLWLKRLWVLLEVAVHVVVGKVLLILFPDRVKRNILAMGEKTGNRPLVLNFGSCTXPSFMFKFDQFKRLIEDFSSIADFLVIYIEEAHASDGWAFKNNMDIRNHQNLQDRLQAAHLLLARSPQCPVVVDTMQNQSSQLYAALPERLYIIQEGRILYKGKSGPWNYNPEEVRAVLEKLHS

SEQ ID NO: 23615 - protein, 82 aa, Homo sapiens; identical to SEQ ID NO: 23607
  Payload ID: 4720
  Gene Symbol: DIO1
  Gene Name: deiodinase, iodothyronine, type I
  ENSP ID: ENSP00000436550

SEQ ID NO: 23616 - protein, 248 aa, Homo sapiens
  Payload ID: 4720
  Gene Symbol: DIO1
  Gene Name: deiodinase, iodothyronine, type I
  ENSP ID: ENSP00000479755
MGLPQPGLWLKRLWVLLEVAVHVVVGKVLLILFPDRVKRNILAMGEKTGMTRNPHFSHDNWIPTFFSTQYFWFVLKVRWQRLEDTTELGGLAPNCPVVRLSGQRCNIWEFMQGNRPLVLNFGSCTPSFMFKFDQFKRLIEDFSSIADFLVIYIEEAHASDGWAFKNNMDIRNHQNLQDRLQAAHLLLARSPQCPVVVDTMQNQSSQLYAALPERLYIIQEGRILYKGKSGPWNYNPEEVRAVLEKLHS

SEQ ID NO: 23617 - protein, 160 aa, Homo sapiens
  Payload ID: 4720
  Gene Symbol: DIO1
  Gene Name: deiodinase, iodothyronine, type I
  ENSP ID: ENSP00000481665
MGLPQPGLWLKRLWVLLEVAVHVVVGKVLLILFPDRVKRNILAMGEKTGMTRNPHFSHDNWIPTFFSTQYFWFVLKVRWQRLEDTTELGGLAPNCPVVRLSGQRCNIWEFMQGNRPLVLNFGSCTPSFMFKFDQFKRLIEDFSSIADFLVIYIEEAHASG

SEQ ID NO: 23618 - protein, 84 aa, Homo sapiens
  Payload ID: 4720
  Gene Symbol: DIO1
  Gene Name: deiodinase, iodothyronine, type I
  ENSP ID: ENSP00000483367
MGLPQPGLWLKRLWVLLEVAVHVVVGKVLLILFPDRVKRNILAMGEKTGPLAATRGHDARGSGPKLPGGPPLRTEVQHLGVYAR

SEQ ID NO: 23619 - protein, 273 aa, Homo sapiens
  Payload ID: 4721
  Gene Symbol: DIO2
  Gene Name: deiodinase, iodothyronine, type II
  Uniprot ID: Q92813
  ENSP ID: ENSP00000405854
  MOD_RES (133)..(133): Selenocysteine
  MOD_RES (266)..(266): Selenocysteine
MGILSVDLLITLQILPVFFSNCLFLALYDSVILLKHVVLLLSRSKSTRGEWRRMLTSEGLRCVWKSFLLDAYKQVKLGEDAPNSSVVHVSSTEGGDNSGNGTQEKIAEGATCHLLDFASPERPLVVNFGSATXPPFTSQLPAFRKLVEEFSSVADFLLVYIDEAHPSDGWAIPGDSSLSFEVKKHQNQEDRCAAAQQLLERFSLPPQCRVVADRMDNNANIAYGVAFERVCIVQRQKIAYLGGKGPFSYNLQEVRHWLEKNFSKRXKKTRLAG

SEQ ID NO: 23620 - protein, 145 aa, Homo sapiens
  Payload ID: 4721
  Gene Symbol: DIO2
  Gene Name: deiodinase, iodothyronine, type II
  ENSP ID: ENSP00000411438
MGILSVDLLITLQILPVFFSNCLFLALYDSVILLKHVVLLLSRSKSTRGEWRRMLTSEGLRCVWKSFLLDAYKQLNCPPSGFSKDGHILLVYEAYKSRLLVYSHLDLWMTDSVVLTLNFPRQISLCFGKNSAAELYIVSKKEKVP

SEQ ID NO: 23621 - protein, 56 aa, Homo sapiens
  Payload ID: 4721
  Gene Symbol: DIO2
  Gene Name: deiodinase, iodothyronine, type II
  ENSP ID: ENSP00000450547
MGILSVDLLITLQILPPSANWWKSSPQWLTSCWSTLMRLIHQMAGRYRGTPLCLLR

SEQ ID NO: 23622 - protein, 37 aa, Homo sapiens
  Payload ID: 4721
  Gene Symbol: DIO2
  Gene Name: deiodinase, iodothyronine, type II
  ENSP ID: ENSP00000450781
  MOD_RES (1)..(1): Any amino acid
XMLTSEGLRCVWKSFLLDAYKQLNCPPSGFSKDGHIL

SEQ ID NO: 23623 - protein, 309 aa, Homo sapiens
  Payload ID: 4721
  Gene Symbol: DIO2
  Gene Name: deiodinase, iodothyronine, type II
  ENSP ID: ENSP00000450980
  MOD_RES (90)..(90): Selenocysteine
  MOD_RES (169)..(169): Selenocysteine
  MOD_RES (302)..(302): Selenocysteine
MGILSVDLLITLQILPVFFSNCLFLALYDSVILLKHVVLLLSRSKSTRGEWRRMLTSEGLRCVWKSFLLDAYKQLNCPPSGFSKDGHILXLVYEAYKSRLLVYSHLDLWMVKLGEDAPNSSVVHVSSTEGGDNSGNGTQEKIAEGATCHLLDFASPERPLVVNFGSATXPPFTSQLPAFRKLVEEFSSVADFLLVYIDEAHPSDGWAIPGDSSLSFEVKKHQNQEDRCAAAQQLLERFSLPPQCRVVADRMDNNANIAYGVAFERVCIVQRQKIAYLGGKGPFSYNLQEVRHWLEKNFSKRXKKTRLAG

SEQ ID NO: 23624 - protein, 54 aa, Homo sapiens
  Payload ID: 4721
  Gene Symbol: DIO2
  Gene Name: deiodinase, iodothyronine, type II
  ENSP ID: ENSP00000451136
MGILSVDLLITLQILPVFFSNCLFLALYDSVILLKHVVLLLSRSKSTRGEWRRM

SEQ ID NO: 23625 - protein, 6 aa, Homo sapiens
  Payload ID: 4721
  Gene Symbol: DIO2
  Gene Name: deiodinase, iodothyronine, type II
  ENSP ID: ENSP00000451265
MGILSV

SEQ ID NO: 23626 - protein, 6 aa, Homo sapiens
  Payload ID: 4721
  Gene Symbol: DIO2
  Gene Name: deiodinase, iodothyronine, type II
  ENSP ID: ENSP00000451339
MGILSV

SEQ ID NO: 23627 - protein, 273 aa, Homo sapiens; identical to SEQ ID NO: 23619
  Payload ID: 4721
  Gene Symbol: DIO2
  Gene Name: deiodinase, iodothyronine, type II
  Uniprot ID: Q92813
  ENSP ID: ENSP00000451419
  MOD_RES (133)..(133): Selenocysteine
  MOD_RES (266)..(266): Selenocysteine

SEQ ID NO: 23628 - protein, 58 aa, Homo sapiens
  Payload ID: 4721
  Gene Symbol: DIO2
  Gene Name: deiodinase, iodothyronine, type II
  ENSP ID: ENSP00000451971
  MOD_RES (1)..(1): Any amino acid
XMLTSEGLRCVWKSFLLDAYKQTDSVVLTLNFPRQISLCFGKNSAAELYIVSKKEKVP

SEQ ID NO: 23629 - protein, 304 aa, Homo sapiens
  Payload ID: 4722
  Gene Symbol: DIO3
  Gene Name: deiodinase, iodothyronine, type III
  Uniprot ID: P55073
  ENSP ID: ENSP00000427336
  MOD_RES (170)..(170): Selenocysteine
MPRQATSRLVVGEGEGSQGASGPAATMLRSLLLHSLRLCAQTASCLVLFPRFLGTAFMLWLLDFLCIRKHFLGRRRRGQPEPEVELNSEGEEVPPDDPPICVSDDNRLCTLASLKAVWHGQKLDFFKQAHEGGPAPNSEVVLPDGFQSQHILDYAQGNRPLVLNFGSCTXPPFMARMSAFQRLVTKYQRDVDFLIIYIEEAHPSDGWVTTDSPYIIPQHRSLEDRVSAARVLQQGAPGCALVLDTMANSSSSAYGAYFERLYVIQSGTIMYQGGRGPDGYQVSELRTWLERYDEQLHGARPRRV

SEQ ID NO: 23630 - protein, 341 aa, Homo sapiens
  Payload ID: 4723
  Gene Symbol: DEK
  Gene Name: DEK proto-oncogene
  Uniprot ID: P35659
  ENSP ID: ENSP00000244776
MSASAPAAEGEGTPTQPASEKEPEMPGPREESEEEEDEDDEEEEEEEKGKGQKLCEIERIHFFLSKKKTDELRNLHKLLYNRPGTVSSLKKNVGQFSGFPFEKGSVQYKKKEEMLKKFRNAMLKSICEVLDLERSGVNSELVKRILNFLMHPKPSGKPLPKSKKTCSKGSKKERNSSGMARKAKRTKCPEILSDESSSDEDEKKNKEESSDDEDKESEEEPPKKTAKREKPKQKATSKSKKSVKSANVKKADSSTTKKNQNSSKKESESEDSSDDEPLIKKLKKPPTDEELKETIKKLLASANLEEVTMKQICKKVYENYPTYDLTERKDFIKTTVKELIS

SEQ ID NO: 23631 - protein, 375 aa, Homo sapiens
  Payload ID: 4723
  Gene Symbol: DEK
  Gene Name: DEK proto-oncogene
  Uniprot ID: P35659
  ENSP ID: ENSP00000380414
MSASAPAAEGEGTPTQPASEKEPEMPGPREESEEEEDEDDEEEEEEEKEKSLIVEGKREKKKVERLTMQVSSLQREPFTIAQGKGQKLCEIERIHFFLSKKKTDELRNLHKLLYNRPGTVSSLKKNVGQFSGFPFEKGSVQYKKKEEMLKKFRNAMLKSICEVLDLERSGVNSELVKRILNFLMHPKPSGKPLPKSKKTCSKGSKKERNSSGMARKAKRTKCPEILSDESSSDEDEKKNKEESSDDEDKESEEEPPKKTAKREKPKQKATSKSKKSVKSANVKKADSSTTKKNQNSSKKESESEDSSDDEPLIKKLKKPPTDEELKETIKKLLASANLEEVTMKQICKKVYENYPTYDLTERKDFIKTTVKELIS

SEQ ID NO: 23632 - protein, 347 aa, Homo sapiens
  Payload ID: 4723
  Gene Symbol: DEK
  Gene Name: DEK proto-oncogene
  ENSP ID: ENSP00000421165
MSASAPAAEGEGTPTQPASEKEPEMPGPREESEEEEDEDDEEEEEEEKEKSLIVEGKREKKKVERIHFFLSKKKTDELRNLHKLLYNRPGTVSSLKKNVGQFSGFPFEKGSVQYKKKEEMLKKFRNAMLKSICEVLDLERSGVNSELVKRILNFLMHPKPSGKPLPKSKKTCSKGSKKERNSSGMARKAKRTKCPEILSDESSSDEDEKKNKEESSDDEDKESEEEPPKKTAKREKPKQKATSKSKKSVKSANVKKADSSTTKKNQNSSKKESESEDSSDDEPLIKKLKKPPTDEELKETIKKLLASANLEEVTMKQICKKVYENYPTYDLTERKDFIKTTVKELIS

SEQ ID NO: 23633 - protein, 161 aa, Homo sapiens
  Payload ID: 4723
  Gene Symbol: DEK
  Gene Name: DEK proto-oncogene
  ENSP ID: ENSP00000422380
  MOD_RES (1)..(1): Any amino acid
XNVGQFSGFPFEKGSVQYKKKEEMLKKFRNAMLKSICEVLDLERSGVNSELVKRILNFLMHPKPSGKPLPKSKKTCSKGSKKERNSSGMARKAKRTKCPEILSDESSSDEDEKKNKEESSDDEDKESEEEYNLSAVRTEFWLCDRRLFWRPSFKSPAAYKS

SEQ ID NO: 23634 - protein, 156 aa, Homo sapiens
  Payload ID: 4723
  Gene Symbol: DEK
  Gene Name: DEK proto-oncogene
  ENSP ID: ENSP00000423427
ILSDESSSDEDEKKNKEESSDDEDKESEEEPPKKTAKREKPKQKATSKSKKSVKSANVKKADSSTTKKNQNSSKKESESEDSSDDEPLIKKLKKPPTDEELKETIKKLLASANLEEVTMKQICKKVYENYPTYDLTERKDFIKTTVKEVNISVFQV

SEQ ID NO: 23635 - protein, 151 aa, Homo sapiens
  Payload ID: 4723
  Gene Symbol: DEK
  Gene Name: DEK proto-oncogene
  ENSP ID: ENSP00000423553
MQVHSMSASAPAAEGEGTPTQPASEKEPEMPGPREESEEEEDEDDEEEEEEEKEKSLIVEGKREKKKVERLTMQVSSLQREPFTIAQGKGQKLCEIERIHFFLSKKKTDELRNLHKLLYNRPGTVSSLKKNVGQFSGFPFEKGSVQYKKKE

SEQ ID NO: 23636 - protein, 122 aa, Homo sapiens
  Payload ID: 4723
  Gene Symbol: DEK
  Gene Name: DEK proto-oncogene
  ENSP ID: ENSP00000425399
MQVSSLQREPFTIAQGKGQKLCEIERIHFFLSKKKTDELRNLHKLLYNRPGTVSSLKKNVGQFSGFPFEKGSVQYKKKEEMLKKFRNAMLKSICEVLDLERSGVNSELVKRILNFLMHPKPS

SEQ ID NO: 23637 - protein, 613 aa, Homo sapiens
  Payload ID: 4724
  Gene Symbol: DAZ1
  Gene Name: deleted in azoospermia 1
  Uniprot ID: Q9NQZ3
  ENSP ID: ENSP00000371950
MSAANPETPNSTISREASTQSSSAAASQGWVLPEGKIVPNTVFVGGIDARMDETEIGSCFGRYGSVKEVKIITNRTGVSKGYGFVSFVNDVDVQKIVGSQIHFHGKKLKLGPAIRKQKLCARHVQPRPLVVNPPPPPQFQNVWRNPNTETYLQPQITPNPVTQHVQSAANPETPNSTISREASTQSSSAAASQGWVLPEGKIVPNTVFVGGIDARMDETEIGSCFGRYGSVKEVKIITNRTGVSKGYGFVSFVNDVDVQKIVGSQIHFHGKKLKLGPAIRKQKLCARHVQPRPLVVNPPPPPQFQNVWRNPNTETYLQPQITPNPVTQHVQSAANPETPNSTISREASTQSSSAAASQGWVLPEGKIVPNTVFVGGIDARMDETEIGSCFGRYGSVKEVKIITNRTGVSKGYGFVSFVNDVDVQKIVGSQIHFHGKKLKLGPAIRKQKLCARHVQPRPLVVNPPPPPQFQNVWRNPNTETYLQPQITPNPVTQHVQAYSAYPHSPGQVITGCQLLVYNYQEYPTYPDSAFQVTTGYQLPVYNYQPFPAYPRSPFQVTAGYQLPVYNYQAFPAYPNSPFQVATGYQFPVCEICKILVLKNAAAFLCHSKVNRSI

SEQ ID NO: 23638 - protein, 744 aa, Homo sapiens
  Payload ID: 4724
  Gene Symbol: DAZ1
  Gene Name: deleted in azoospermia 1
  Uniprot ID: Q9NQZ3
  ENSP ID: ENSP00000384573
MSAANPETPNSTISREASTQSSSAAASQGWVLPEGKIVPNTVFVGGIDARMDETEIGSCFGRYGSVKEVKIITNRTGVSKGYGFVSFVNDVDVQKIVGSQIHFHGKKLKLGPAIRKQKLCARHVQPRPLVVNPPPPPQFQNVWRNPNTETYLQPQITPNPVTQHVQSAANPETPNSTISREASTQSSSAAASQGWVLPEGKIVPNTVFVGGIDARMDETEIGSCFGRYGSVKEVKIITNRTGVSKGYGFVSFVNDVDVQKIVGSQIHFHGKKLKLGPAIRKQKLCARHVQPRPLVVNPPPPPQFQNVWRNPNTETYLQPQITPNPVTQHVQSAANPETPNSTISREASTQSSSAAASQGWVLPEGKIVPNTVFVGGIDARMDETEIGSCFGRYGSVKEVKIITNRTGVSKGYGFVSFVNDVDVQKIVGSQIHFHGKKLKLGPAIRKQKLCARHVQPRPLVVNPPPPPQFQNVWRNPNTETYLQPQITPNPVTQHVQAYSAYPHSPGQVITGCQLLVYNYQEYPTYPDSAFQVTTGYQLPVYNYQPFPAYPRSPFQVTAGYQLPVYNYQAFPAYPNSPFQVATGYQFPVYNYQPFPAYPSSPFQVTAGYQLPVYNYQAFPAYPNSPFQVATGYQFPVYNYQAFPAYPNSPVQVTTGYQLPVYNYQAFPAYPSSPFQVTTGYQLPVYNYQAFPAYPNSAVQVTTGYQFHVYNYQMPPQCPVGEQRRNLWTEAYKWWYLVCLIQRRD

SEQ ID NO: 23639 - protein, 366 aa, Homo sapiens
  Payload ID: 4724
  Gene Symbol: DAZ1
  Gene Name: deleted in azoospermia 1
  ENSP ID: ENSP00000400716
MSAANPETPNSTISREASTQSSSAAASQGWVLPEGKIVPNTVFVGGIDARMDETEIGSCFGRYGSVKEVKIITNRTGVSKGYGFVSFVNDVDVQKIVGSQIHFHGKKLKLGPAIRKQKLCARHVQPRPLVVNPPPPPQFQNVWRNPNTETYLQPQITPNPVTQHVQAYSAYPHSPGQVITGCQLLVYNYQEYPTYPDSAFQVTTGYQLPVYNYQPFPAYPRSPFQVTAGYQLPVYNYQPFPAYPSSPFQVTAGYQLPVYNYQAFPAYPNSPVQVTTGYQLPVYNYQAFPAYPSSPFQVTTGYQLPVYNYQAFPAYPNSAVQVTTGYQFHVYNYQMPPQCPVGEQRRNLWTEAYKWWYLVCLIQRRD

SEQ ID NO: 23640 - protein, 390 aa, Homo sapiens
  Payload ID: 4724
  Gene Symbol: DAZ1
  Gene Name: deleted in azoospermia 1
  ENSP ID: ENSP00000444407
MSAANPETPNSTISREASTQSSSAAASQGWVLPEGKIVPNTVFVGGIDARMDETEIGSCFGRYGSVKEVKIITNRTGVSKGYGFVSFVNDVDVQKIVGSQIHFHGKKLKLGPAIRKQKLCARHVQPRPLVVNPPPPPQFQNVWRNPNTETYLQPQITPNPVTQHVQAYSAYPHSPGQVITGCQLLVYNYQEYPTYPDSAFQVTTGYQLPVYNYQPFPAYPRSPFQVTAGYQLPVYNYQAFPAYPNSPFQVATGYQFPVYNYQPFPAYPSSPFQVTAGYQLPVYNYQAFPAYPNSPFQVATGYQFPVYNYQAFPAYPNSPVQVTTGYQLPVYNYQAFPAYPNSAVQVTTGYQFHVYNYQMPPQCPVGEQRRNLWTEAYKWWYLVCLIQRRD

SEQ ID NO: 23641 - protein, 486 aa, Homo sapiens [sequence omitted]

SEQ ID NO: 23642 - protein, 366 aa, Homo sapiens
  Payload ID: 4725
  Gene Symbol: DAZ2
  Gene Name: deleted in azoospermia 2
  ENSP ID: ENSP00000371731
MSAANPETPNSTISREASTQSSSAAASQGWVLPEGKIVPNTVFVGGIDARMDETEIGSCFGRYGSVKEVKIITNRTGVSKGYGFVSFVNDVDVQKIVGSQIHFHGKKLKLGPAIRKQKLCARHVQPRPLVVNPPPPPQFQNVWRNPNTETYLQPQITPNPVTQHVQAYSAYPHSPGQVITGCQLLVYNYQEYPTYPDSAFQVTTGYQLPVYNYQPFPAYPSSPFQVTAGYQLPVYNYQAFPAYPSSPFQVTTGYQLPVYNYQAFPAYPSSPFQVTTGYQLPVYNYQAFPAYPSSPFQVTTGYQLPVYNYQAFPAYPNSAVQVTTGYQFHVYNYQMPPQCPVGEQRRNLWTEAYKWWYLVCLIQRRD

SEQ ID NO: 23643 - protein, 534 aa, Homo sapiens
  Payload ID: 4725
  Gene Symbol: DAZ2
  Gene Name: deleted in azoospermia 2
  Uniprot ID: Q13117
  ENSP ID: ENSP00000371743
MSAANPETPNSTISREASTQSSSAAASQGWVLPEGKIVPNTVFVGGIDARMDETEIGSCFGRYGSVKEVKIITNRTGVSKGYGFVSFVNDVDVQKIVGSQIHFHGKKLKLGPAIRKQKLCARHVQPRPLVVNPPPPPQFQNVWRNPNTETYLQPQITPNPVTQHVQAYSAYPHSPGQVITGCQLLVYNYQEYPTYPDSAFQVTTGYQLPVYNYQPFPAYPRSPFQVTAGYQLPVYNYQAFPAYPNSPFQVATGYQFPVYNYQPFPAYPSSPFQVTAGYQLPVYNYQAFPAYPNSPFQVATGYQFPVYNYQAFPAYPNSPVQVTTGYQLPVYNYQAFPAYPSSPFQVTTGYQLPVYNYQAFPAYPSSPFQVTTGYQLPVYNYQAFPAYPSSPFQVTTGYQLPVYNYQAFPAYPSSPFQVTTGYQLPVYNYQAFPAYPSSPFQVTTGYQLPVYNYQAFPAYPSSPFQVTTGYQLPVYNYQAFPAYPNSAVQVTTGYQFHVYNYQMPPQCPVGEQRRNLWTEAYKWWYLVCLIQRRD

SEQ ID NO: 23644 - protein, 558 aa, Homo sapiens
  Payload ID: 4725
  Gene Symbol: DAZ2
  Gene Name: deleted in azoospermia 2
  Uniprot ID: Q13117
  ENSP ID: ENSP00000371861
MSAANPETPNSTISREASTQSSSAAASQGWVLPEGKIVPNTVFVGGIDARMDETEIGSCFGRYGSVKEVKIITNRTGVSKGYGFVSFVNDVDVQKIVGSQIHFHGKKLKLGPAIRKQKLCARHVQPRPLVVNPPPPPQFQNVWRNPNTETYLQPQITPNPVTQHVQAYSAYPHSPGQVITGCQLLVYNYQEYPTYPDSAFQVTTGYQLPVYNYQPFPAYPRSPFQVTAGYQLPVYNYQAFPAYPNSPFQVATGYQFPVYNYQPFPAYPSSPFQVTAGYQLPVYNYQAFPAYPNSPFQVATGYQFPVYNYQAFPAYPNSPVQVTTGYQLPVYNYQAFPAYPNSPVQVTTGYQLPVYNYQAFPAYPSSPFQVTTGYQLPVYNYQAFPAYPSSPFQVTTGYQLPVYNYQAFPAYPSSPFQVTTGYQLPVYNYQAFPAYPSSPFQVTTGYQLPVYNYQAFPAYPSSPFQVTTGYQLPVYNYQAFPAYPSSPFQVTTGYQLPVYNYQAFPAYPNSAVQVTTGYQFHVYNYQMPPQCPVGEQRRNLWTEAYKWWYLVCLIQRRD

SEQ ID NO: 23645 - protein, 486 aa, Homo sapiens
  Payload ID: 4725
  Gene Symbol: DAZ2
  Gene Name: deleted in azoospermia 2
  ENSP ID: ENSP00000371868
MSAANPETPNSTISREASTQSSSAAASQGWVLPEGKIVPNTVFVGGIDARMDETEIGSCFGRYGSVKEVKIITNRTGVSKGYGFVSFVNDVDVQKIVGSQIHFHGKKLKLGPAIRKQKLCARHVQPRPLVVNPPPPPQFQNVWRNPNTETYLQPQITPNPVTQHVQAYSAYPHSPGQVITGCQLLVYNYQEYPTYPDSAFQVTTGYQLPVYNYQPFPAYPRSPFQVTAGYQLPVYNYQAFPAYPNSPFQVATGYQFPVYNYQPFPAYPSSPFQVTAGYQLPVYNYQAFPAYPNSPFQVATGYQFPVYNYQPFPAYPSSPFQVTAGYQLPVYNYQAFPAYPNSPFQVATGYQFPVYNYQAFPAYPNSPVQVTTGYQLPVYNYQAFPAYPNSPFQVATGYQFPVYNYQAFPAYPNSPVQVTTGYQLPVYNYQAFPAYPNSAVQVTTGYQFHVYNYQMPPQCPVGEQRRNLWTEAYKWWYLVCLIQRRD

SEQ ID NO: 23646 - protein, 558 aa, Homo sapiens; identical to SEQ ID NO: 23644
  Payload ID: 4725
  Gene Symbol: DAZ2
  Gene Name: deleted in azoospermia 2
  Uniprot ID: Q13117
  ENSP ID: ENSP00000371870

SEQ ID NO: 23647 - protein, 654 aa, Homo sapiens
  Payload ID: 4725
  Gene Symbol: DAZ2
  Gene Name: deleted in azoospermia 2
  ENSP ID: ENSP00000371877
MSAANPETPNSTISREASTQSSSAAASQGWVLPEGKIVPNTVFVGGIDARMDETEIGSCFGRYGSVKEVKIITNRTGVSKGYGFVSFVNDVDVQKIVGSQIHFHGKKLKLGPAIRKQKLCARHVQPRPLVVNPPPPPQFQNVWRNPNTETYLQPQITPNPVTQHVQAYSAYPHSPGQVITGCQLLVYNYQEYPTYPDSAFQVTTGYQLPVYNYQPFPAYPRSPFQVTAGYQLPVYNYQAFPAYPNSPFQVATGYQFPVYNYQPFPAYPSSPFQVTAGYQLPVYNYQAFPAYPNSPFQVATGYQFPVYNYQPFPAYPSSPFQVTAGYQLPVYNYQAFPAYPNSPFQVATGYQFPVYNYQAFPAYPNSPVQVTTGYQLPVYNYQPFPAYPRSPFQVTAGYQLPVYNYQAFPAYPNSPFQVATGYQFPVYNYQAFPAYPNSPVQVTTGYQLPVYNYQAFPAYPSSPFQVTTGYQLPVYNYQAFPAYPSSPFQVTTGYQLPVYNYQAFPAYPSSPFQVTTGYQLPVYNYQAFPAYPSSPFQVTTGYQLPVYNYQAFPAYPSSPFQVTTGYQLPVYNYQAFPAYPSSPFQVTTGYQLPVYNYQAFPAYPNSAVQVTTGYQFHVYNYQMPPQCPVGEQRRNLWTEAYKWWYLVCLIQRRD

SEQ ID NO: 23648 - protein, 534 aa, Homo sapiens; identical to SEQ ID NO: 23643
  Payload ID: 4725
  Gene Symbol: DAZ2
  Gene Name: deleted in azoospermia 2
  Uniprot ID: Q13117
  ENSP ID: ENSP00000371887

SEQ ID NO: 23649 - protein, 438 aa, Homo sapiens
  Payload ID: 4725
  Gene Symbol: DAZ2
  Gene Name: deleted in azoospermia 2
  ENSP ID: ENSP00000383340
MSAANPETPNSTISREASTQSSSAAASQGWVLPEGKIVPNTVFVGGIDARMDETEIGSCFGRYGSVKEVKIITNRTGVSKGYGFVSFVNDVDVQKIVGSQIHFHGKKLKLGPAIRKQKLCARHVQPRPLVVNPPPPPQFQNVWRNPNTETYLQPQITPNPVTQHVQAYSAYPHSPGQVITGCQLLVYNYQEYPTYPDSAFQVTTGYQLPVYNYQPFPAYPRSPFQVTAGYQLPVYNYQAFPAYPNSPFQVATGYQFPVYNYQAFPAYPNSPFQVATGYQFPVYNYQAFPAYPNSPFQVATGYQFPVYNYQAFPAYPNSPVQVTTGYQLPVYNYQAFPAYPNSPFQVATGYQFPVYNYQAFPAYPNSPVQVTTGYQLPVYNYQAFPAYPNSAVQVTTGYQFHVYNYQMPPQCPVGEQRRNLWTEAYKWWYLVCLIQRRD

SEQ ID NO: 23650 - protein, 390 aa, Homo sapiens; identical to SEQ ID NO: 23640
  Payload ID: 4725
  Gene Symbol: DAZ2
  Gene Name: deleted in azoospermia 2
  ENSP ID: ENSP00000414113

SEQ ID NO: 23651 - protein, 366 aa, Homo sapiens
  Payload ID: 4726
  Gene Symbol: DAZ3
  Gene Name: deleted in azoospermia 3
  ENSP ID: ENSP00000324965
MSAANPETPNSTISREASTQSSSAAASQGWVLPEGKIVPNTVFVGGIDARMDETEIGSCFGRYGSVKEVKIITNRTGVSKGYGFVSFVNDVDVQKIVGSQIHFHGKKLKLGPAIRKQKLCARHVQPRPLVVNPPPPPQFQNVWRNPNTETYLQPQITPNPVTQHVQAYSAYPHSPGQVITGCQLLVYNYQEYPTYPDSAFQVTTGYQLPVYNYQPFPAYPRSPFQVTAGYQLPVYNYQAFPAYPNSPVQVTTGYQLPVYNYQAFPAYPNSPVQVTTGYQLPVYNYQAFPAYPNSPVQVTTGYQLPVYNYQAFPAYPNSAVQVTTGYQFHVYNYQMPPQCPVGEQRRNLWTEAYKWWYLVCLIQRRD

SEQ ID NO: 23652 - protein, 438 aa, Homo sapiens
  Payload ID: 4726
  Gene Symbol: DAZ3
  Gene Name: deleted in azoospermia 3
  Uniprot ID: Q9NR90
  ENSP ID: ENSP00000371802
MSAANPETPNSTISREASTQSSSAAASQGWVLPEGKIVPNTVFVGGIDARMDETEIGSCFGRYGSVKEVKIITNRTGVSKGYGFVSFVNDVDVQKIVGSQIHFHGKKLKLGPAIRKQKLCARHVQPRPLVVNPPPPPQFQNVWRNPNTETYLQPQITPNPVTQHVQAYSAYPHSPGQVITGCQLLVYNYQEYPTYPDSAFQVTTGYQLPVYNYQPFPAYPRSPFQVTAGYQLPVYNYQAFPAYPNSPFQVATGYQFPVYNYQAFPAYPNSPVQVTTGYQLPVYNYQAFPAYPNSPFQVATGYQFPVYNYQAFPAYPNSPVQVTTGYQLPVYNYQAFPAYPNSPFQVATGYQFPVYNYQAFPAYPNSPVQVTTGYQLPVYNYQAFPAYPNSAVQVTTGYQFHVYNYQMPPQCPVGEQRRNLWTEAYKWWYLVCLIQRRD

SEQ ID NO: 23653 - protein, 390 aa, Homo sapiens
  Payload ID: 4726
  Gene Symbol: DAZ3
  Gene Name: deleted in azoospermia 3
  ENSP ID: ENSP00000401049
MSAANPETPNSTISREASTQSSSAAASQGWVLPEGKIVPNTVFVGGIDARMDETEIGSCFGRYGSVKEVKIITNRTGVSKGYGFVSFVNDVDVQKIVGSQIHFHGKKLKLGPAIRKQKLCARHVQPRPLVVNPPPPPQFQNVWRNPNTETYLQPQITPNPVTQHVQAYSAYPHSPGQVITGCQLLVYNYQEYPTYPDSAFQVTTGYQLPVYNYQPFPAYPRSPFQVTAGYQLPVYNYQAFPAYPNSPFQVATGYQFPVYNYQAFPAYPNSPVQVTTGYQLPVYNYQAFPAYPNSPFQVATGYQFPVYNYQAFPAYPNSPVQVTTGYQLPVYNYQAFPAYPNSAVQVTTGYQFHVYNYQMPPQCPVGEQRRNLWTEAYKWWYLVCLIQRRD

SEQ ID NO: 23654 - protein, 651 aa, Homo sapiens
  Payload ID: 4727
  Gene Symbol: DAZ4
  Gene Name: deleted in azoospermia 4
  ENSP ID: ENSP00000371733
MSAANPETPNSTISREASTQSSSAAASQGWVLPEGKIVPNTVFVGGIDARMDETEIGSCFGRYGSVKEVKIITNRTGVSKGYGFVSFVNDVDVQKIVGSQIHFHGKKLKLGPAIRKQKLCARHVQPRPLVVNPPPPPQFQNVWRNPNTETYLQPQITPNPVTQHVQSAANPETPNSTISREASTQSSSAAASQGWVLPEGKIVPNTVFVGGIDARMDETEIGSCFGRYGSVKEVKIITNRTGVSKGYGFVSFVNDVDVQKIVGSQIHFHGKKLKLGPAIRKQKLCARHVQPRPLVVNPPPPPQFQNVWRNPNTETYLQPQITPNPVTQHVQAYSAYPHSPGQVITGCQLLVYNYQEYPTYPDSAFQVTTGYQLPVYNYQPFPAYPRSPFQVTAGYQLPVYNYQAFPAYPNSPFQVATGYQFPVYNYQPFPAYPSSPFQVTAGYQLPVYNYQAFPAYPNSPFQVATGYQFPVYNYQAFPAYPNSPVQVTTGYQLPVYNYQAFPAYPNSPFQVATGYQFPVYNYQAFPAYPNSPVQVTTGYQLPVYNYQAFPAYPSSPFQVTTGYQLPVYNYQAFPAYPSSPFQVTTGYQLPVYNYQAFPAYPNSAVQVTTGYQFHVYNYQMPPQCPVGEQRRNLWTEAYKWWYLVCLIQRRD

SEQ ID NO: 23655 - protein, 603 aa, Homo sapiens
  Payload ID: 4727
  Gene Symbol: DAZ4
  Gene Name: deleted in azoospermia 4
  ENSP ID: ENSP00000371751
MSAANPETPNSTISREASTQSSSAAASQGWVLPEGKIVPNTVFVGGIDARMDETEIGSCFGRYGSVKEVKIITNRTGVSKGYGFVSFVNDVDVQKIVGSQIHFHGKKLKLGPAIRKQKLCARHVQPRPLVVNPPPPPQFQNVWRNPNTETYLQPQITPNPVTQHVQSAANPETPNSTISREASTQSSSAAASQGWVLPEGKIVPNTVFVGGIDARMDETEIGSCFGRYGSVKEVKIITNRTGVSKGYGFVSFVNDVDVQKIVGSQIHFHGKKLKLGPAIRKQKLCARHVQPRPLVVNPPPPPQFQNVWRNPNTETYLQPQITPNPVTQHVQAYSAYPHSPGQVITGCQLLVYNYQEYPTYPDSAFQVTTGYQLPVYNYQPFPAYPRSPFQVTAGYQLPVYNYQAFPAYPNSPFQVATGYQFPVYNYQPFPAYPSSPFQVTAGYQLPVYNYQAFPAYPNSPFQVATGYQFPVYNYQAFPAYPNSPVQVTTGYQLPVYNYQAFPAYPNSPFQVATGYQFPVYNYQAFPAYPNSPVQVTTGYQLPVYNYQAFPAYPNSAVQVTTGYQFHVYNYQMPPQCPVGEQRRNLWTEAYKWWYLVCLIQRRD

SEQ ID NO: 23656 - protein, 558 aa, Homo sapiens
  Payload ID: 4727
  Gene Symbol: DAZ4
  Gene Name: deleted in azoospermia 4
  ENSP ID: ENSP00000371869
MSAANPETPNSTISREASTQSSSAAASQGWVLPEGKIVPNTVFVGGIDARMDETEIGSCFGRYGSVKEVKIITNRTGVSKGYGFVSFVNDVDVQKIVGSQIHFHGKKLKLGPAIRKQKLCARHVQPRPLVVNPPPPPQFQNVWRNPNTETYLQPQITPNPVTQHVQAYSAYPHSPGQVITGCQLLVYNYQEYPTYPDSAFQVTTGYQLPVYNYQPFPAYPRSPFQVTAGYQLPVYNYQAFPAYPNSPFQVATGYQFPVYNYQPFPAYPSSPFQVTAGYQLPVYNYQAFPAYPNSPFQVATGYQFPVYNYQAFPAYPNSPVQVTTGYQLPVYNYQAFPAYPNSPFQVATGYQFPVYNYQAFPAYPNSPVQVTTGYQLPVYNYQAFPAYPSSPFQVTTGYQLPVYNYQAFPAYPSSPFQVTTGYQLPVYNYQAFPAYPSSPFQVTTGYQLPVYNYQAFPAYPSSPFQVTTGYQLPVYNYQAFPAYPSSPFQVTTGYQLPVYNYQAFPAYPNSAVQVTTGYQFHVYNYQMPPQCPVGEQRRNLWTEAYKWWYLVCLIQRRD

SEQ ID NO: 23657 - protein, 390 aa, Homo sapiens; identical to SEQ ID NO: 23640
  Payload ID: 4727
  Gene Symbol: DAZ4
  Gene Name: deleted in azoospermia 4
  Uniprot ID: Q86SG3
  ENSP ID: ENSP00000389300

SEQ ID NO: 23658 - protein, 366 aa, Homo sapiens; identical to SEQ ID NO: 23642
  Payload ID: 4727
  Gene Symbol: DAZ4
  Gene Name: deleted in azoospermia 4
  ENSP ID: ENSP00000397895

SEQ ID NO: 23659 - protein, 486 aa, Homo sapiens
  Payload ID: 4727
  Gene Symbol: DAZ4
  Gene Name: deleted in azoospermia 4
  ENSP ID: ENSP00000401363
MSAANPETPNSTISREASTQSSSAAASQGWVLPEGKIVPNTVFVGGIDARMDETEIGSCFGRYGSVKEVKIITNRTGVSKGYGFVSFVNDVDVQKIVGSQIHFHGKKLKLGPAIRKQKLCARHVQPRPLVVNPPPPPQFQNVWRNPNTETYLQPQITPNPVTQHVQAYSAYPHSPGQVITGCQLLVYNYQEYPTYPDSAFQVTTGYQLPVYNYQPFPAYPRSPFQVTAGYQLPVYNYQAFPAYPNSPFQVATGYQFPVYNYQPFPAYPSSPFQVTAGYQLPVYNYQAFPAYPNSPFQVATGYQFPVYNYQAFPAYPNSPVQVTTGYQLPVYNYQAFPAYPNSPFQVATGYQFPVYNYQAFPAYPNSPVQVTTGYQLPVYNYQAFPAYPSSPFQVTTGYQLPVYNYQAFPAYPSSPFQVTTGYQLPVYNYQAFPAYPNSAVQVTTGYQFHVYNYQMPPQCPVGEQRRNLWTEAYKWWYLVCLIQRRD

SEQ ID NO: 23660 - protein, 579 aa, Homo sapiens
  Payload ID: 4727
  Gene Symbol: DAZ4
  Gene Name: deleted in azoospermia 4
  ENSP ID: ENSP00000489430
MSAANPETPNSTISREASTQSSSAAASQGWVLPEGKIVPNTVFVGGIDARMDETEIGSCFGRYGSVKEVKIITNRTGVSKGYGFVSFVNDVDVQKIVGSQIHFHGKKLKLGPAIRKQKLCARHVQPRPLVVNPPPPPQFQNVWRNPNTETYLQPQITPNPVTQHVQSAANPETPNSTISREASTQSSSAAASQGWVLPEGKIVPNTVFVGGIDARMDETEIGSCFGRYGSVKEVKIITNRTGVSKGYGFVSFVNDVDVQKIVGSQIHFHGKKLKLGPAIRKQKLCARHVQPRPLVVNPPPPPQFQNVWRNPNTETYLQPQITPNPVTQHVQAYSAYPHSPGQVITGCQLLVYNYQEYPTYPDSAFQVTTGYQLPVYNYQPFPAYPRSPFQVTAGYQLPVYNYQAFPAYPNSPFQVATGYQFPVYNYQPFPAYPSSPFQVTAGYQLPVYNYQAFPAYPNSPFQVATGYQFPVYNYQAFPAYPNSPVQVTTGYQLPVYNYQAFPAYPSSPFQVTTGYQLPVYNYQAFPAYPNSAVQVTTGYQFHVYNYQMPPQCPVGEQRRNLWTEAYKWWYLVCLIQRRD

SEQ ID NO: 23661 - protein, 315 aa, Homo sapiens
  Payload ID: 4728
  Gene Symbol: DAZL
  Gene Name: deleted in azoospermia-like
  Uniprot ID: Q92904
  ENSP ID: ENSP00000250863
MAAPSCGGDRKARLTPSLPHESTANPETPNSTISREASTQSSSAATSQGYILPEGKIMPNTVFVGGIDVRMDETEIRSFFARYGSVKEVKIITDRTGVSKGYGFVSFFNDVDVQKIVESQINFHGKKLKLGPAIRKQNLCAYHVQPRPLVFNHPPPPQFQNVWTNPNTETYMQPTTTMNPITQYVQAYPTYPNSPVQVITGYQLPVYNYQMPPQWPVGEQRSYVVPPAYSAVNYHCNEVDPGAEVVPNECSVHEATPPSGNGPQKKSVDRSIQTVVSCLFNPENRLRNSVVTQDDYFKDKRVHHFRRSRAMLKSV

SEQ ID NO: 23662 - protein, 295 aa, Homo sapiens
  Payload ID: 4728
  Gene Symbol: DAZL
  Gene Name: deleted in azoospermia-like
  Uniprot ID: Q92904
  ENSP ID: ENSP00000382373
MSTANPETPNSTISREASTQSSSAATSQGYILPEGKIMPNTVFVGGIDVRMDETEIRSFFARYGSVKEVKIITDRTGVSKGYGFVSFFNDVDVQKIVESQINFHGKKLKLGPAIRKQNLCAYHVQPRPLVFNHPPPPQFQNVWTNPNTETYMQPTTTMNPITQYVQAYPTYPNSPVQVITGYQLPVYNYQMPPQWPVGEQRSYVVPPAYSAVNYHCNEVDPGAEVVPNECSVHEATPPSGNGPQKKSVDRSIQTVVSCLFNPENRLRNSVVTQDDYFKDKRVHHFRRSRAMLKSV

SEQ ID NO: 23663 - protein, 204 aa, Homo sapiens
  Payload ID: 4728
  Gene Symbol: DAZL
  Gene Name: deleted in azoospermia-like
  ENSP ID: ENSP00000398109
MGADPYHSSAQCLSILFSLSLHSPGLPVLMSSSLLLLPKSTANPETPNSTISREASTQSSSAATSQGYILPEGKIMPNTVFVGGIDVRMDETEIRSFFARYGSVKEVKIITDRTGVSKGYGFVSFFNDVDVQKIVESQINFHGKKLKLGPAIRKQNLCAYHVQPRPLVFNHPPPPQFQNVWTNPNTETYMQPTTTMNPITQYVQ

SEQ ID NO: 23664 - protein, 70 aa, Homo sapiens
  Payload ID: 4729
  Gene Symbol: DEC1
  Gene Name: deleted in esophageal cancer 1
  Uniprot ID: Q9P2X7
  ENSP ID: ENSP00000363128
MTMNVLEAGKWKSIVPAPGEGLLAVLHMMVFTDALHRERSVKWQAGVCYNGGKDFAVSLARPKAAEGIAD

SEQ ID NO: 23665 - protein, 70 aa, Homo sapiens
  Payload ID: 4729
  Gene Symbol: DEC1
  Gene Name: deleted in esophageal cancer 1
  ENSP ID: ENSP00000477682
LFLPVLEAGKWKSIVPAPGEGLLAVLHMMVFTDALHRERSVKWQAGVCYNGGKDFAVSLARPKAAEGIGN

SEQ ID NO: 23666 - protein, 1755 aa, Homo sapiens
  Payload ID: 4730
  Gene Symbol: DLEC1
  Gene Name: deleted in lung and esophageal cancer 1
  Uniprot ID: Q9Y238
  ENSP ID: ENSP00000308597
METRSSKTRRSLASRTNECQGTMWAPTSPPAGSSSPSQPTWKSSLYSSLAYSEAFHYSFAARPRRLTQLALAQRPEPQLLRLRPSSLRTQDISHLLTGVFRNLYSAEVIGDEVSASLIKARGSENERHEEFVDQLQQIRELYKQRLDEFEMLERHITQAQARAIAENERVMSQAGVQDLESLVRLPPVKSVSRWCIDSELLRKHHLISPEDYYTDTVPFHSAPKGISLPGCSKLTFSCEKRSVQKKELNKKLEDSCRKKLAEFEDELDHTVDSLTWNLTPKAKERTREPLKKASQPRNKNWMNHLRVPQRELDRLLLARMESRNHFLKNPRFFPPNTRYGGKSLVFPPKKPAPIGEFQSTEPEQSCADTPVFLAKPPIGFFTDYEIGPVYEMVIALQNTTTTSRYLRVLPPSTPYFALGLGMFPGKGGMVAPGMTCQYIVQFFPDCLGDFDDFILVETQSAHTLLIPLQARRPPPVLTLSPVLDCGYCLIGGVKMTRFICKNVGFSVGRFCIMPKTSWPPLSFKAIATVGFVEQPPFGILPSVFELAPGHAILVEVLFSPKSLGKAEQTFIIMCDNCQIKELVTIGIGQLIALDLIYISGEKSQPDPGELTDLTAQHFIRFEPENLRSTARKQLIIRNATHVELAFYWQIMKPNLQPLMPGETFSMDSIKCYPDKETAFSIMPRKGVLSPHTDHEFILSFSPHELRDFHSVLQMVLEEVPEPVSSEAESLGHSSYSVDDVIVLEIEVKGSVEPFQVLLEPYALIIPGENYIGINVKKAFKMWNNSKSPIRYLWGKISDCHIIEVEPGTGVIEPSEVGDFELNFTGGVPGPTSQDLLCEIEDSPSPVVLHIEAVFKGPALIINVSALQFGLLRLGQKATNSIQIRNVSQLPATWRMKESPVSLQERPEDVSPFDIEPSSGQLHSLGECRVDITLEALHCQHLETVLELEVENGAWSYLPVYAEVQKPHVYLQSSQVEVRNLYLGVPTKTTITLINGTLLPTQFHWGKLLGHQAEFCMVTVSPKHGLLGPSEECQLKLELTAHTQEELTHLALPCHVSGMKKPLVLGISGKPQGLQVAITISKESSDCSTEQWPGHPKELRLDFGSAVPLRTRVTRQLILTNRSPIRTRFSLKFEYFGSPQNSLSKKTSLPNMPPALLKTVRMQEHLAKREQLDFMESMLSHGKGAAFFPHFSQGMLGPYQQLCIDITGCANMWGEYWDNLICTVGDLLPEVIPVHMAAVGCPISSLRTTSYTIDQAQKEPAMRFGTQVSGGDTVTRTLRLNNSSPCDIRLDWETYVPEDKEDRLVELLVFYGPPFPLRDQAGNELVCPDTPEGGCLLWSPGPSSSSEFSHETDSSVEGSSSASNRVAQKLISVILQAHEGVPSGHLYCISPKQVVVPAGGSSTIYISFTPMVLSPEILHKVECTGYALGFMSLDSKVEREIPGKRHRLQDFAVGPLKLDLHSYVRPAQLSVELDYGGSMEFQCQASDLIPEQPCSGVLSELVTTHHLKLTNTTEIPHYFRLMVSRPFSVSQDGASQDHRAPGPGQKQECEEETASADKQLVLQAQENMLVNVSFSLSLELLSYQKLPADQTLPGVDIQQSASGEREMVFTQNLLLEYTNQTTQVVPLRAVVAVPELQLSTSWVDFGTCFVSQQRVREVYLMNLSGCRSYWTMLMGQQEPAKAAVAFRVSPNSGLLEARSANAPPTSIALQVFFTARSSELYESTMVVEGVLGEKSCTLRLRGQGSYDERYMLPHQP

SEQ ID NO: 23667 - protein, 1778 aa, Homo sapiens
  Payload ID: 4730
  Gene Symbol: DLEC1
  Gene Name: deleted in lung and esophageal cancer 1
  Uniprot ID: Q9Y238
  ENSP ID: ENSP00000315914
METRSSKTRRSLASRTNECQGTMWAPTSPPAGSSSPSQPTWKSSLYSSLAYSEAFHYSFAARPRRLTQLALAQRPEPQLLRLRPSSLRTQDISHLLTGVFRNLYSAEVIGDEVSASLIKARGSENERHEEFVDQLQQIRELYKQRLDEFEMLERHITQAQARAIAENERVMSQAGVQDLESLVRLPPVKSVSRWCIDSELLRKHHLISPEDYYTDTVPFHSAPKGISLPGCSKLTFSCEKRSVQKKELNKKLEDSCRKKLAEFEDELDHTVDSLTWNLTPKAKERTREPLKKASQPRNKNWMNHLRVPQRELDRLLLARMESRNHFLKNPRFFPPNTRYGGKSLVFPPKKPAPIGEFQSTEPEQSCADTPVFLAKPPIGFFTDYEIGPVYEMVIALQNTTTTSRYLRVLPPSTPYFALGLGMFPGKGGMVAPGMTCQYIVQFFPDCLGDFDDFILVETQSAHTLLIPLQARRPPPVLTLSPVLDCGYCLIGGVKMTRFICKNVGFSVGRFCIMPKTSWPPLSFKAIATVGFVEQPPFGILPSVFELAPGHAILVEVLFSPKSLGKAEQTFIIMCDNCQIKELVTIGIGQLIALDLIYISGEKSQPDPGELTDLTAQHFIRFEPENLRSTARKQLIIRNATHVELAFYWQIMKPNLQPLMPGETFSMDSIKCYPDKETAFSIMPRKGVLSPHTDHEFILSFSPHELRDFHSVLQMVLEEVPEPVSSEAESLGHSSYSVDDVIVLEIEVKGSVEPFQVLLEPYALIIPGENYIGINVKKAFKMWNNSKSPIRYLWGKISDCHIIEVEPGTGVIEPSEVGDFELNFTGGVPGPTSQDLLCEIEDSPSPVVLHIEAVFKGPALIINVSALQFGLLRLGQKATNSIQIRNVSQLPATWRMKESPVSLQERPEDVSPFDIEPSSGQLHSLGECRVDITLEALHCQHLETVLELEVENGAWSYLPVYAEVQKPHVYLQSSQVEVRNLYLGVPTKTTITLINGTLLPTQFHWGKLLGHQAEFCMVTVSPKHGLLGPSEECQLKLELTAHTQEELTHLALPCHVSGMKKPLVLGISGKPQGLQVAITISKESSDCSTEQWPGHPKELRLDFGSAVPLRTRVTRQLILTNRSPIRTRFSLKFEYFGSPQNSLSKKTSLPNMPPALLKTVRMQEHLAKREQLDFMESMLSHGKGAAFFPHFSQGMLGPYQQLCIDITGCANMWGEYWDNLICTVGDLLPEVIPVHMAAVGCPISSLRTTSYTIDQAQKEPAMRFGTQVSGGDTVTRTLRLNNSSPCDIRLDWETYVPEDKEDRLVELLVFYGPPFPLRDQAGNELVCPDTPEGGCLLWSPGPSSSSEFSHETDSSVEGSSSASNRVAQKLISVILQAHEGVPSGHLYCISPKQVVVPAGGSSTIYISFTPMVLSPEILHKVECTGYALGFMSLDSKVEREIPGKRHRLQDFAVGPLKLDLHSYVRPAQLSVELDYGGSMEFQCQASDLIPEQPCSGVLSELVTTHHLKLTNTTEIPHYFRLMVSRPFSVSQDGASQDHRAPGPGQKQECEEETASADKQLVLQAQENMLVNVSFSLSLELLSYQKLPADQTLPGVDIQQSASGEREMVFTQNLLLEYTNQTTQVVPLRAVVAVPELQLSTSWVDFGTCFVSQQRVREVYLMNLSGCRSYWTMLMGVVSCTSPRWWWKVCSVRSPAPCGSGAKAPMMRDTCCLTSPEAPPQPSAPGPSWRKNIAQGLGAALQHKDTDLGTWGPLGSSWNGRTPFHNGLSLGPHDMSSELT

SEQ ID NO: 23668 - protein, 82 aa, Homo sapiens
  Payload ID: 4730
  Gene Symbol: DLEC1
  Gene Name: deleted in lung and esophageal cancer 1
  ENSP ID: ENSP00000404261
PPKKPAPIGEFQSTEPEQSCADTPVFLAKPPIGFFTDYEIGPVYEMVIALQNTTTTSRYLRVLPPSTPYFALGLGHCNRRLC

SEQ ID NO: 23669 - protein, 78 aa, Homo sapiens
  Payload ID: 4731
  Gene Symbol: DLEU1
  Gene Name: deleted in lymphocytic leukemia 1 (non-protein coding)
  Uniprot ID: O43261
  ENSP ID: ENSP00000367422
MRPCIWIHVHLKPPCRLVELLPFSSALQGLSHLSLGTTLPVILPERNEEQNLQELSHNADKYQMGDCCKEEIDDSIFY

SEQ ID NO: 23670 - protein, 44 aa, Homo sapiens
  Payload ID: 4731
  Gene Symbol: DLEU1
  Gene Name: deleted in lymphocytic leukemia 1 (non-protein coding)
  ENSP ID: ENSP00000483301
MRPCIWIHVHLKPPCRLVELLPFSSALQGLSHLSLGTTLPDEDT

SEQ ID NO: 23671 - protein, 160 aa, Homo sapiens
  Payload ID: 4732
  Gene Symbol: DLEU7
  Gene Name: deleted in lymphocytic leukemia, 7
  Uniprot ID: Q6UYE1
  ENSP ID: ENSP00000420976
MASPAPLVASISHQMVALQTLQLLQQEWGWGDGPVAPGNPRDPDHVSTAPARRSGPPRARPGPGREERGGGVGTRSRRTAARANSPEEEVVRGAEGGAELLPFPRDRGPCTLAQMAMRSALARVVDSTSELVSVEQTLLGPLQQERSFPIHLKLQLLANE

SEQ ID NO: 23672 - protein, 221 aa, Homo sapiens
  Payload ID: 4732
  Gene Symbol: DLEU7
  Gene Name: deleted in lymphocytic leukemia, 7
  Uniprot ID: Q6UYE1
  ENSP ID: ENSP00000427177
MASPAPLVASISHQMVALQTLQLLQQEWGWGDGPVAPGNPRDPDHVSTAPARRSGPPRARPGPGREERGGGVGTRSRRTAARANSPEEEVVRGAEGGAELLPFPRDRGPCTLAQMAMRSALARVVDSTSELVSVEQTLLGPLQQERSFPIHLKDSVEFRNICSHLALQIEGQQFDRDLNAAHQCLKTIVKKLIQSLANFPSDAHMVACASLRQILQNLPDI

SEQ ID NO: 23673 - protein, 1785 aa, Homo sapiens
  Payload ID: 4733
  Gene Symbol: DMBT1
  Gene Name: deleted in malignant brain tumors 1
  Uniprot ID: Q9UGM3
  ENSP ID: ENSP00000327747
MGISTVILEMCLLWGQVLSTGGWIPRTTDYASLIPSEVPLDPTVAEGSPFPSESTLESTVAEGSPISLESTLESTVAEGSLIPSESTLESTVAEGSDSGLALRLVNGDGRCQGRVEILYRGSWGTVCDDSWDTNDANVVCRQLGCGWAMSAPGNAWFGQGSGPIALDDVRCSGHESYLWSCPHNGWLSHNCGHGEDAGVICSAAQPQSTLRPESWPVRISPPVPTEGSESSLALRLVNGGDRCRGRVEVLYRGSWGTVCDDYWDTNDANVVCRQLGCGWAMSAPGNAQFGQGSGPIVLDDVRCSGHESYLWSCPHNGWLTHNCGHSEDAGVICSAPQSRPTPSPDTWPTSHASTAGPESSLALRLVNGGDRCQGRVEVLYRGSWGTVCDDSWDTSDANVVCRQLGCGWATSAPGNARFGQGSGPIVLDDVRCSGYESYLWSCPHNGWLSHNCQHSEDAGVICSAAHSWSTPSPDTLPTITLPASTVGSESSLALRLVNGGDRCQGRVEVLYQGSWGTVCDDSWDTNDANVVCRQLGCGWAMSAPGNARFGQGSGPIVLDDVRCSGHESYLWSCPHNGWLSHNCGHSEDAGVICSASQSRPTPSPDTWPTSHASTAGSESSLALRLVNGGDRCQGRVEVLYRGSWGTVCDDYWDTNDANVVCRQLGCGWAMSAPGNARFGQGSGPIVLDDVRCSGHESYLWSCPHNGWLSHNCGHHEDAGVICSASQSQPTPSPDTWPTSHASTAGSESSLALRLVNGGDRCQGRVEVLYRGSWGTVCDDYWDTNDANVVCRQLGCGWATSAPGNARFGQGSGPIVLDDVRCSGHESYLWSCPHNGWLSHNCGHHEDAGVICSASQSQPTPSPDTWPTSRASTAGSESTLALRLVNGGDRCRGRVEVLYQGSWGTVCDDYWDTNDANVVCRQLGCGWAMSAPGNAQFGQGSGPIVLDDVRCSGHESYLWSCPHNGWLSHNCGHHEDAGVICSAAQSQSTPRPDTWLTTNLPALTVGSESSLALRLVNGGDRCRGRVEVLYRGSWGTVCDDSWDTNDANVVCRQLGCGWAMSAPGNARFGQGSGPIVLDDVRCSGNESYLWSCPHKGWLTHNCGHHEDAGVICSATQINSTTTDWWHPTTTTTARPSSNCGGFLFYASGTFSSPSYPAYYPNNAKCVWEIEVNSGYRINLGFSNLKLEAHHNCSFDYVEIFDGSLNSSLLLGKICNDTRQIFTSSYNRMTIHFRSDISFQNTGFLAWYNSFPSDATLRLVNLNSSYGLCAGRVEIYHGGTWGTVCDDSWTIQEAEVVCRQLGCGRAVSALGNAYFGSGSGPITLDDVECSGTESTLWQCRNRGWFSHNCNHREDAGVICSGNHLSTPAPFLNITRPNTDYSCGGFLSQPSGDFSSPFYPGNYPNNAKCVWDIEVQNNYRVTVIFRDVQLEGGCNYDYIEVFDGPYRSSPLIARVCDGARGSFTSSSNFMSIRFISDHSITRRGFRAEYYSSPSNDSTNLLCLPNHMQASVSRSYLQSLGFSASDLVISTWNGYYECRPQITPNLVIFTIPYSGCGTFKQADNDTIDYSNFLTAAVSGGIIKRRTDLRIHVSCRMLQNTWVDTMYIANDTIHVANNTIQVEEVQYGNFDVNISFYTSSSFLYPVTSRPYYVDLNQDLYVQAEILHSDAVLTLFVDTCVASPYSNDFTSLTYDLIRSGCVRDDTYGPYSSPSLRIARFRFRAFHFLNRFPSVYLRCKMVVCRAYDPSSRCYRGCVLRSKRDVGSYQEKVDVVLGPIQLQTPPRREEEPR

SEQ ID NO: 23674 - protein, 2413 aa, Homo sapiens
  Payload ID: 4733
  Gene Symbol: DMBT1
  Gene Name: deleted in malignant brain tumors 1
  Uniprot ID: Q9UGM3
  ENSP ID: ENSP00000342210
MGISTVILEMCLLWGQVLSTGGWIPRTTDYASLIPSEVPLDPTVAEGSPFPSESTLESTVAEGSPISLESTLESTVAEGSLIPSESTLESTVAEGSDSGLALRLVNGDGRCQGRVEILYRGSWGTVCDDSWDTNDANVVCRQLGCGWAMSAPGNAWFGQGSGPIALDDVRCSGHESYLWSCPHNGWLSHNCGHGEDAGVICSAAQPQSTLRPESWPVRISPPVPTEGSESSLALRLVNGGDRCRGRVEVLYRGSWGTVCDDYWDTNDANVVCRQLGCGWAMSAPGNAQFGQGSGPIVLDDVRCSGHESYLWSCPHNGWLTHNCGHSEDAGVICSAPQSRPTPSPDTWPTSHASTAGPESSLALRLVNGGDRCQGRVEVLYRGSWGTVCDDSWDTSDANVVCRQLGCGWATSAPGNARFGQGSGPIVLDDVRCSGYESYLWSCPHNGWLSHNCQHSEDAGVICSAAHSWSTPSPDTLPTITLPASTVGSESSLALRLVNGGDRCQGRVEVLYRGSWGTVCDDSWDTNDANVVCRQLGCGWAMLAPGNARFGQGSGPIVLDDVRCSGNESYLWSCPHNGWLSHNCGHSEDAGVICSGPESSLALRLVNGGDRCQGRVEVLYRGSWGTVCDDSWDTNDANVVCRQLGCGWATSAPGNARFGQGSGPIVLDDVRCSGHESYLWSCPNNGWLSHNCGHHEDAGVICSAAQSRSTPRPDTLSTITLPPSTVGSESSLTLRLVNGSDRCQGRVEVLYRGSWGTVCDDSWDTNDANVVCRQLGCGWATSAPGNARFGQGSGPIVLDDVRCSGHESYLWSCPHNGWLSHNCGHHEDAGVICSVSQSRPTPSPDTWPTSHASTAGPESSLALRLVNGGDRCQGRVEVLYRGSWGTVCDDSWDTSDANVVCRQLGCGWATSAPGNARFGQGSGPIVLDDVRCSGYESYLWSCPHNGWLSHNCQHSEDAGVICSAAHSWSTPSPDTLPTITLPASTVGSESSLALRLVNGGDRCQGRVEVLYQGSWGTVCDDSWDTNDANVVCRQLGCGWAMSAPGNARFGQGSGPIVLDDVRCSGHESYLWSCPHNGWLSHNCGHSEDAGVICSASQSRPTPSPDTWPTSHASTAGSESSLALRLVNGGDRCQGRVEVLYRGSWGTVCDDYWDTNDANVVCRQLGCGWAMSAPGNARFGQGSGPIVLDDVRCSGHESYLWSCPHNGWLSHNCGHHEDAGVICSASQSQPTPSPDTWPTSHASTAGSESSLALRLVNGGDRCQGRVEVLYRGSWGTVCDDYWDTNDANVVCRQLGCGWATSAPGNARFGQGSGPIVLDDVRCSGHESYLWSCPHNGWLSHNCGHHEDAGVICSASQSQPTPSPDTWPTSHASTAGSESSLALRLVNGGDRCQGRVEVLYRGSWGTVCDDYWDTNDANVVCRQLGCGWATSAPGNARFGQGSGPIVLDDVRCSGHESYLWSCPHNGWLSHNCGHHEDAGVICSASQSQPTPSPDTWPTSRASTAGSESTLALRLVNGGDRCRGRVEVLYQGSWGTVCDDYWDTNDANVVCRQLGCGWAMSAPGNAQFGQGSGPIVLDDVRCSGHESYLWSCPHNGWLSHNCGHHEDAGVICSAAQSQSTPRPDTWLTTNLPALTVGSESSLALRLVNGGDRCRGRVEVLYRGSWGTVCDDSWDTNDANVVCRQLGCGWAMSAPGNARFGQGSGPIVLDDVRCSGNESYLWSCPHKGWLTHNCGHHEDAGVICSATQINSTTTDWWHPTTTTTARPSSNCGGFLFYASGTFSSPSYPAYYPNNAKCVWEIEVNSGYRINLGFSNLKLEAHHNCSFDYVEIFDGSLNSSLLLGKICNDTRQIFTSSYNRMTIHFRSDISFQNTGFLAWYNSFPSDATLRLVNLNSSYGLCAGRVEIYHGGTWGTVCDDSWTIQEAEVVCRQLGCGRAVSALGNAYFGSGSGPITLDDVECSGTESTLWQCRNRGWFSHNCNHREDAGVICSGNHLSTPAPFLNITRPNTDYSCGGFLSQPSGDFSSPFYPGNYPNNAKCVWDIEVQNNYRVTVIFRDVQLEGGCNYDYIEVFDGPYRSSPLIARVCDGARGSFTSSSNFMSIRFISDHSITRRGFRAEYYSSPSNDSTNLLCLPNHMQASVSRSYLQSLGFSASDLVISTWNGYYECRPQITPNLVIFTIPYSGCGTFKQADNDTIDYSNFLTAAVSGGIIKRRTDLRIHVSCRMLQNTWVDTMYIANDTIHVANNTIQVEEVQYGNFDVNISFYTSSSFLYPVTSRPYYVDLNQDLYVQAEILHSDAVLTLFVDTCVASPYSNDFTSLTYDLIRSGCVRDDTYGPYSSPSLRIARFRFRAFHFLNRFPSVYLRCKMVVCRAYDPSSRCYRGCVLRSKRDVGSYQEKVDVVLGPIQLQTPPRREEEPR

SEQ ID NO: 23675 - protein, 2403 aa, Homo sapiens
  Payload ID: 4733
  Gene Symbol: DMBT1
  Gene Name: deleted in malignant brain tumors 1
  Uniprot ID: Q9UGM3
  ENSP ID: ENSP00000343175
MGISTVILEMCLLWGQVLSTGGWIPRTTDYASLIPSEVPLDPTVAEGSPFPSESTLESTVAEGSPISLESTLESTVAEGSLIPSESTLESTVAEGSDSGLALRLVNGDGRCQGRVEILYRGSWGTVCDDSWDTNDANVVCRQLGCGWAMSAPGNAWFGQGSGPIALDDVRCSGHESYLWSCPHNGWLSHNCGHGEDAGVICSAAQPQSTLRPESWPVRISPPVPTEGSESSLALRLVNGGDRCRGRVEVLYRGSWGTVCDDYWDTNDANVVCRQLGCGWAMSAPGNAQFGQGSGPIVLDDVRCSGHESYLWSCPHNGWLTHNCGHSEDAGVICSAPQSRPTPSPDTWPTSHASTAGPESSLALRLVNGGDRCQGRVEVLYRGSWGTVCDDSWDTSDANVVCRQLGCGWATSAPGNARFGQGSGPIVLDDVRCSGYESYLWSCPHNGWLSHNCQHSEDAGVICSDTLPTITLPASTVGSESSLALRLVNGGDRCQGRVEVLYRGSWGTVCDDSWDTNDANVVCRQLGCGWAMLAPGNARFGQGSGPIVLDDVRCSGNESYLWSCPHNGWLSHNCGHSEDAGVICSGPESSLALRLVNGGDRCQGRVEVLYRGSWGTVCDDSWDTNDANVVCRQLGCGWATSAPGNARFGQGSGPIVLDDVRCSGHESYLWSCPNNGWLSHNCGHHEDAGVICSAAQSRSTPRPDTLSTITLPPSTVGSESSLTLRLVNGSDRCQGRVEVLYRGSWGTVCDDSWDTNDANVVCRQLGCGWATSAPGNARFGQGSGPIVLDDVRCSGHESYLWSCPHNGWLSHNCGHHEDAGVICSVSQSRPTPSPDTWPTSHASTAGPESSLALRLVNGGDRCQGRVEVLYRGSWGTVCDDSWDTSDANVVCRQLGCGWATSAPGNARFGQGSGPIVLDDVRCSGYESYLWSCPHNGWLSHNCQHSEDAGVICSAAHSWSTPSPDTLPTITLPASTVGSESSLALRLVNGGDRCQGRVEVLYQGSWGTVCDDSWDTNDANVVCRQLGCGWAMSAPGNARFGQGSGPIVLDDVRCSGHESYLWSCPHNGWLSHNCGHSEDAGVICSASQSRPTPSPDTWPTSHASTAGSESSLALRLVNGGDRCQGRVEVLYRGSWGTVCDDYWDTNDANVVCRQLGCGWAMSAPGNARFGQGSGPIVLDDVRCSGHESYLWSCPHNGWLSHNCGHHEDAGVICSASQSQPTPSPDTWPTSHASTAGSESSLALRLVNGGDRCQGRVEVLYRGSWGTVCDDYWDTNDANVVCRQLGCGWATSAPGNARFGQGSGPIVLDDVRCSGHESYLWSCPHNGWLSHNCGHHEDAGVICSASQSQPTPSPDTWPTSHASTAGSESSLALRLVNGGDRCQGRVEVLYRGSWGTVCDDYWDTNDANVVCRQLGCGWATSAPGNARFGQGSGPIVLDDVRCSGHESYLWSCPHNGWLSHNCGHHEDAGVICSASQSQPTPSPDTWPTSRASTAGSESTLALRLVNGGDRCRGRVEVLYQGSWGTVCDDYWDTNDANVVCRQLGCGWAMSAPGNAQFGQGSGPIVLDDVRCSGHESYLWSCPHNGWLSHNCGHHEDAGVICSAAQSQSTPRPDTWLTTNLPALTVGSESSLALRLVNGGDRCRGRVEVLYRGSWGTVCDDSWDTNDANVVCRQLGCGWAMSAPGNARFGQGSGPIVLDDVRCSGNESYLWSCPHKGWLTHNCGHHEDAGVICSATQINSTTTDWWHPTTTTTARPSSNCGGFLFYASGTFSSPSYPAYYPNNAKCVWEIEVNSGYRINLGFSNLKLEAHHNCSFDYVEIFDGSLNSSLLLGKICNDTRQIFTSSYNRMTIHFRSDISFQNTGFLAWYNSFPSDATLRLVNLNSSYGLCAGRVEIYHGGTWGTVCDDSWTIQEAEVVCRQLGCGRAVSALGNAYFGSGSGPITLDDVECSGTESTLWQCRNRGWFSHNCNHREDAGVICSGNHLSTPAPFLNITRPNTDYSCGGFLSQPSGDFSSPFYPGNYPNNAKCVWDIEVQNNYRVTVIFRDVQLEGGCNYDYIEVFDGPYRSSPLIARVCDGARGSFTSSSNFMSIRFISDHSITRRGFRAEYYSSPSNDSTNLLCLPNHMQASVSRSYLQSLGFSASDLVISTWNGYYECRPQITPNLVIFTIPYSGCGTFKQADNDTIDYSNFLTAAVSGGIIKRRTDLRIHVSCRMLQNTWVDTMYIANDTIHVANNTIQVEEVQYGNFDVNISFYTSSSFLYPVTSRPYYVDLNQDLYVQAEILHSDAVLTLFVDTCVASPYSNDFTSLTYDLIRSGCVRDDTYGPYSSPSLRIARFRFRAFHFLNRFPSVYLRCKMVVCRAYDPSSRCYRGCVLRSKRDVGSYQEKVDVVLGPIQLQTPPRREEEPR

SEQ ID NO: 23676 - protein, 1133 aa, Homo sapiens
  Payload ID: 4733
  Gene Symbol: DMBT1
  Gene Name: deleted in malignant brain tumors 1
  Uniprot ID: Q9UGM3
  ENSP ID: ENSP00000352593
MGISTVILEMCLLWGQVLSTGGWIPRTTDYASLIPSEVPLDPTVAEGSPFPSESTLESTVAEGSPISLESTLESTVAEGSLIPSESTLESTVAEGSDSGLALRLVNGDGRCQGRVEILYRGSWGTVCDDSWDTNDANVVCRQLGCGWAMSAPGNAWFGQGSGPIALDDVRCSGHESYLWSCPHNGWLSHNCGHGEDAGVICSAPQSRPTPSPDTWPTSHASTAGSESSLALRLVNGGDRCQGRVEVLYRGSWGTVCDDYWDTNDANVVCRQLGCGWATSAPGNARFGQGSGPIVLDDVRCSGHESYLWSCPHNGWLSHNCGHHEDAGVICSASQSQPTPSPDTWPTSRASTAGSESTLALRLVNGGDRCRGRVEVLYQGSWGTVCDDYWDTNDANVVCRQLGCGWAMSAPGNAQFGQGSGPIVLDDVRCSGHESYLWSCPHNGWLSHNCGHHEDAGVICSATQINSTTTDWWHPTTTTTARPSSNCGGFLFYASGTFSSPSYPAYYPNNAKCVWEIEVNSGYRINLGFSNLKLEAHHNCSFDYVEIFDGSLNSSLLLGKICNDTRQIFTSSYNRMTIHFRSDISFQNTGFLAWYNSFPSDATLRLVNLNSSYGLCAGRVEIYHGGTWGTVCDDSWTIQEAEVVCRQLGCGRAVSALGNAYFGSGSGPITLDDVECSGTESTLWQCRNRGWFSHNCNHREDAGVICSGNHLSTPAPFLNITRPNTDYSCGGFLSQPSGDFSSPFYPGNYPNNAKCVWDIEVQNNYRVTVIFRDVQLEGGCNYDYIEVFDGPYRSSPLIARVCDGARGSFTSSSNFMSIRFISDHSITRRGFRAEYYSSPSNDSTNLLCLPNHMQASVSRSYLQSLGFSASDLVISTWNGYYECRPQITPNLVIFTIPYSGCGTFKQADNDTIDYSNFLTAAVSGGIIKRRTDLRIHVSCRMLQNTWVDTMYIANDTIHVANNTIQVEEVQYGNFDVNISFYTSSSFLYPVTSRPYYVDLNQDLYVQAEILHSDAVLTLFVDTCVASPYSNDFTSLTYDLIRSGCVRDDTYGPYSSPSLRIARFRFRAFHFLNRFPSVYLRCKMVVCRAYDPSSRCYRGCVLRSKRDVGSYQEKVDVVLGPIQLQTPPRREEEPR

SEQ ID NO: 23677 - protein, 2413 aa, Homo sapiens; identical to SEQ ID NO: 23674
  Payload ID: 4733
  Gene Symbol: DMBT1
  Gene Name: deleted in malignant brain tumors 1
  Uniprot ID: Q9UGM3
  ENSP ID: ENSP00000357905

SEQ ID NO: 23678 - protein, 2403 aa, Homo sapiens; identical to SEQ ID NO: 23675
  Payload ID: 4733
  Gene Symbol: DMBT1
  Gene Name: deleted in malignant brain tumors 1
  Uniprot ID: Q9UGM3
  ENSP ID: ENSP00000357951

SEQ ID NO: 23679 - protein, 1785 aa, Homo sapiens; identical to SEQ ID NO: 23673
  Payload ID: 4733
  Gene Symbol: DMBT1
  Gene Name: deleted in malignant brain tumors 1
  Uniprot ID: Q9UGM3
  ENSP ID: ENSP00000357952

SEQ ID NO: 23680 - protein, 2413 aa, Homo sapiens; identical to SEQ ID NO: 23674
  Payload ID: 4733
  Gene Symbol: DMBT1
  Gene Name: deleted in malignant brain tumors 1
  Uniprot ID: Q9UGM3
  ENSP ID: ENSP00000484603

SEQ ID NO: 23681 - protein, 170 aa, Homo sapiens
  Payload ID: 4734
  Gene Symbol: DPCD
  Gene Name: deleted in primary ciliary dyskinesia homolog (mouse)
  ENSP ID: ENSP00000359166
MAVTGWLESLRTAQKTALLQDGRRKVHYLFPDGKEMAEEYDEKTSELLVRKWRVKSALGAMGQWQLEVGDPAPLGAGNLGPELIKESNANPIFMRKDTKMSFQWRIRNLPYPKDVYSVSVDQKERCIIVRTTNKKRTGWRLLWTPLAMRCAGVHGTPSEIDTSYLWMTPC

SEQ ID NO: 23682 - protein, 203 aa, Homo sapiens
  Payload ID: 4734
  Gene Symbol: DPCD
  Gene Name: deleted in primary ciliary dyskinesia homolog (mouse)
  Uniprot ID: Q9BVM2
  ENSP ID: ENSP00000359170
MAVTGWLESLRTAQKTALLQDGRRKVHYLFPDGKEMAEEYDEKTSELLVRKWRVKSALGAMGQWQLEVGDPAPLGAGNLGPELIKESNANPIFMRKDTKMSFQWRIRNLPYPKDVYSVSVDQKERCIIVRTTNKKYYKKFSIPDLDRHQLPLDDALLSFAHANCTLIISYQKPKEVVVAESELQKELKKVKTAHSNDGDCKTQ

SEQ ID NO: 23683 - protein, 116 aa, Homo sapiens
  Payload ID: 4734
  Gene Symbol: DPCD
  Gene Name: deleted in primary ciliary dyskinesia homolog (mouse)
  ENSP ID: ENSP00000403505
AEEYDEKTSELLVRKWRVKSALGAMGQWQLEVGDPAPLGAGNLGPELIKESNANPIFMRKDTKMSFQWRIRNLPYPKDVYSVSVDQKERCIIVRTTNKNTRSQRRLWWPSLSYRRN

SEQ ID NO: 23684 - protein, 170 aa, Homo sapiens; identical to SEQ ID NO: 23681
  Payload ID: 4734
  Gene Symbol: DPCD
  Gene Name: deleted in primary ciliary dyskinesia homolog (mouse)
  ENSP ID: ENSP00000486078

SEQ ID NO: 23685 - protein, 323 aa, Homo sapiens
  Payload ID: 4735
  Gene Symbol: DEGS1
  Gene Name: delta(4)-desaturase, sphingolipid 1
  Uniprot ID: O15121
  ENSP ID: ENSP00000316476
MGSRVSREDFEWVYTDQPHADRRREILAKYPEIKSLMKPDPNLIWIIIMMVLTQLGAFYIVKDLDWKWVIFGAYAFGSCINHSMTLAIHEIAHNAAFGNCKAMWNRWFGMFANLPIGIPYSISFKRYHMDHHRYLGADGVDVDIPTDFEGWFFCTAFRKFIWVILQPLFYAFRPLFINPKPITYLEVINTVAQVTFDILIYYFLGIKSLVYMLAASLLGLGLHPISGHFIAEHYMFLKGHETYSYYGPLNLLTFNVGYHNEHHDFPNIPGKSLPLVRKIAAEYYDNLPHYNSWIKVLYDFVMDDTISPYSRMKRHQKGEMVLE

SEQ ID NO: 23686 - protein, 323 aa, Homo sapiens; identical to SEQ ID NO: 23685
  Payload ID: 4735
  Gene Symbol: DEGS1
  Gene Name: delta(4)-desaturase, sphingolipid 1
  Uniprot ID: O15121
  ENSP ID: ENSP00000375749

SEQ ID NO: 23687 - protein, 261 aa, Homo sapiens
  Payload ID: 4735
  Gene Symbol: DEGS1
  Gene Name: delta(4)-desaturase, sphingolipid 1
  ENSP ID: ENSP00000400545
MVSPQLAKYPEIKSLMKPDPNLIWIIIMMVLTQLGAFYIVKDLDWKWVIFGAYAFGSCINHSMTLAIHEIAHNAAFGNCKAMWNRWFGMFANLPIGIPYSISFKRYHMDHHRYLGADGVDVDIPTDFEGWFFCTAFRKFIWVILQPLFYAFRPLFINPKPITYLEVINTVAQVTFDILIYYFLGIKSLVYMLAASLLGLGLHPISGHFIAEHYMFLKGHETYSYYGPLNLLTFNVGYHNEHHDFPNIPGKSLPLVRKIAAE

SEQ ID NO: 23688 - protein, 323 aa, Homo sapiens
  Payload ID: 4736
  Gene Symbol: DEGS2
  Gene Name: delta(4)-desaturase, sphingolipid 2
  Uniprot ID: Q6QHC5
  ENSP ID: ENSP00000307126
MGNSASRSDFEWVYTDQPHTQRRKEILAKYPAIKALMRPDPRLKWAVLVLVLVQMLACWLVRGLAWRWLLFWAYAFGGCVNHSLTLAIHDISHNAAFGTGRAARNRWLAVFANLPVGVPYAASFKKYHVDHHRYLGGDGLDVDVPTRLEGWFFCTPARKLLWLVLQPFFYSLRPLCVHPKAVTRMEVLNTLVQLAADLAIFALWGLKPVVYLLASSFLGLGLHPISGHFVAEHYMFLKGHETYSYYGPLNWITFNVGYHVEHHDFPSIPGYNLPLVRKIAPEYYDHLPQHHSWVKVLWDFVFEDSLGPYARVKRVYRLAKDGL

SEQ ID NO: 23689 - protein, 54 aa, Homo sapiens
  Payload ID: 4736
  Gene Symbol: DEGS2
  Gene Name: delta(4)-desaturase, sphingolipid 2
  ENSP ID: ENSP00000450637
MGNSASRSDFEWVYTDQPHTQRRKEILGAEDRARVLRPPAAAPLLGEGALGFCV

SEQ ID NO: 23690 - protein, 737 aa, Homo sapiens
  Payload ID: 4737
  Gene Symbol: DNER
  Gene Name: delta/notch-like EGF repeat containing
  Uniprot ID: Q8NFT8
  ENSP ID: ENSP00000345229
MQPRRAQAPGAQLLPALALLLLLLGAGPRGSSLANPVPAAPLSAPGPCAAQPCRNGGVCTSRPEPDPQHPAPAGEPGYSCTCPAGISGANCQLVADPCASNPCHHGNCSSSSSSSSDGYLCICNEGYEGPNCEQALPSLPATGWTESMAPRQLQPVPATQEPDKILPRSQATVTLPTWQPKTGQKVVEMKWDQVEVIPDIACGNASSNSSAGGRLVSFEVPQNTSVKIRQDATASLILLWKVTATGFQQCSLIDGRSVTPLQASGGLVLLEEMLALGNNHFIGFVNDSVTKSIVALRLTLVVKVSTCVPGESHANDLECSGKGKCTTKPSEATFSCTCEEQYVGTFCEEYDACQRKPCQNNASCIDANEKQDGSNFTCVCLPGYTGELCQSKIDYCILDPCRNGATCISSLSGFTCQCPEGYFGSACEEKVDPCASSPCQNNGTCYVDGVHFTCNCSPGFTGPTCAQLIDFCALSPCAHGTCRSVGTSYKCLCDPGYHGLYCEEEYNECLSAPCLNAATCRDLVNGYECVCLAEYKGTHCELYKDPCANVSCLNGATCDSDGLNGTCICAPGFTGEECDIDINECDSNPCHHGGSCLDQPNGYNCHCPHGWVGANCEIHLQWKSGHMAESLTNMPRHSLYIIIGALCVAFILMLIILIVGICRISRIEYQGSSRPAYEEFYNCRSIDSEFSNAIASIRHARFGKKSRPAMYDVSPIAYEDYSPDDKPLVTLIKTKDL

SEQ ID NO: 23691 - protein, 723 aa, Homo sapiens
  Payload ID: 4738
  Gene Symbol: DLL1
  Gene Name: delta-like 1 (Drosophila)
  Uniprot ID: O00548
  ENSP ID: ENSP00000355718
MGSRCALALAVLSALLCQVWSSGVFELKLQEFVNKKGLLGNRNCCRGGAGPPPCACRTFFRVCLKHYQASVSPEPPCTYGSAVTPVLGVDSFSLPDGGGADSAFSNPIRFPFGFTWPGTFSLIIEALHTDSPDDLATENPERLISRLATQRHLTVGEEWSQDLHSSGRTDLKYSYRFVCDEHYYGEGCSVFCRPRDDAFGHFTCGERGEKVCNPGWKGPYCTEPICLPGCDEQHGFCDKPGECKCRVGWQGRYCDECIRYPGCLHGTCQQPWQCNCQEGWGGLFCNQDLNYCTHHKPCKNGATCTNTGQGSYTCSCRPGYTGATCELGIDECDPSPCKNGGSCTDLENSYSCTCPPGFYGKICELSAMTCADGPCFNGGRCSDSPDGGYSCRCPVGYSGFNCEKKIDYCSSSPCSNGAKCVDLGDAYLCRCQAGFSGRHCDDNVDDCASSPCANGGTCRDGVNDFSCTCPPGYTGRNCSAPVSRCEHAPCHNGATCHERGHRYVCECARGYGGPNCQFLLPELPPGPAVVDLTEKLEGQGGPFPWVAVCAGVILVLMLLLGCAAVVVCVRLRLQKHRPPADPCRGETETMNNLANCQREKDISVSIIGATQIKNTNKKADFHGDHSADKNGFKARYPAVDYNLVQDLKGDDTAVRDAHSKRDTKCQPQGSSGEEKGTPTTLRGGEASERKRPDSGCSTSKDTKYQSVYVISEEKDECVIATEV

SEQ ID NO: 23692 - protein, 723 aa, Homo sapiens; identical to SEQ ID NO: 23691
  Payload ID: 4738
  Gene Symbol: DLL1
  Gene Name: delta-like 1 (Drosophila)
  Uniprot ID: O00548
  ENSP ID: ENSP00000480905

SEQ ID NO: 23693 - protein, 54 aa, Homo sapiens
  Payload ID: 4738
  Gene Symbol: DLL1
  Gene Name: delta-like 1 (Drosophila)
  ENSP ID: ENSP00000486351
MGSRCALALAVLSALLCQVWSSGVFELKLQEFVNKKGLLGNRNCCRGGAGPPPC

SEQ ID NO: 23694 - protein, 54 aa, Homo sapiens; identical to SEQ ID NO: 23693
  Payload ID: 4738
  Gene Symbol: DLL1
  Gene Name: delta-like 1 (Drosophila)
  ENSP ID: ENSP00000487173

SEQ ID NO: 23695 - protein, 310 aa, Homo sapiens
  Payload ID: 4739
  Gene Symbol: DLK1
  Gene Name: delta-like 1 homolog (Drosophila)
  Uniprot ID: P80370
  ENSP ID: ENSP00000331081
MTATEALLRVLLLLLAFGHSTYGAECFPACNPQNGFCEDDNVCRCQPGWQGPLCDQCVTSPGCLHGLCGEPGQCICTDGWDGELCDRDVRACSSAPCANNRTCVSLDDGLYECSCAPGYSGKDCQKKDGPCVINGSPCQHGGTCVDDEGRASHASCLCPPGFSGNFCEIVANSCTPNPCENDGVCTDIGGDFRCRCPAGFIDKTCSRPVTNCASSPCQNGGTCLQHTQGQAICFTILGVLTSLVVLGTVGIVFLNKCETWVSNLRYNHMLRKKKNLLLQYNSGEDLAVNIIFPEKIDMTTFSKEAGDEEI

SEQ ID NO: 23696 - protein, 383 aa, Homo sapiens
  Payload ID: 4739
  Gene Symbol: DLK1
  Gene Name: delta-like 1 homolog (Drosophila)
  Uniprot ID: P80370
  ENSP ID: ENSP00000340292
MTATEALLRVLLLLLAFGHSTYGAECFPACNPQNGFCEDDNVCRCQPGWQGPLCDQCVTSPGCLHGLCGEPGQCICTDGWDGELCDRDVRACSSAPCANNRTCVSLDDGLYECSCAPGYSGKDCQKKDGPCVINGSPCQHGGTCVDDEGRASHASCLCPPGFSGNFCEIVANSCTPNPCENDGVCTDIGGDFRCRCPAGFIDKTCSRPVTNCASSPCQNGGTCLQHTQVSYECLCKPEFTGLTCVKKRALSPQQVTRLPSGYGLAYRLTPGVHELPVQQPEHRILKVSMKELNKKTPLLTEGQAICFTILGVLTSLVVLGTVGIVFLNKCETWVSNLRYNHMLRKKKNLLLQYNSGEDLAVNIIFPEKIDMTTFSKEAGDEEI

SEQ ID NO: 23697 - protein, 97 aa, Homo sapiens
  Payload ID: 4739
  Gene Symbol: DLK1
  Gene Name: delta-like 1 homolog (Drosophila)
  ENSP ID: ENSP00000376589
MTATEALLRVLLLLLAFGHSTYGAECFPACNPQNGFCEDDNVCRCQPGWQGPLCDQCVTSPGCLHGLCGEPGQCICTDGWDGELCDRDVRACSSAPC

SEQ ID NO: 23698 - protein, 136 aa, Homo sapiens
  Payload ID: 4739
  Gene Symbol: DLK1
  Gene Name: delta-like 1 homolog (Drosophila)
  ENSP ID: ENSP00000450821
MTATEALLRVLLLLLAFGHSTYGAECFPACNPQNGFCEDDNVCRCQPGWQGPLCDQCVTSPGCLHGLCGEPGQCICTDGWDGELCDRGWHSPLFTSALRPYLPALAPTTSSQSPVAGVPHFLIPAHSVPCILKICL

SEQ ID NO: 23699 - protein, 383 aa, Homo sapiens
  Payload ID: 4740
  Gene Symbol: DLK2
  Gene Name: delta-like 2 homolog (Drosophila)
  Uniprot ID: Q6UY11
  ENSP ID: ENSP00000349893
MPSGCRCLHLVCLLCILGAPGQPVRADDCSSHCDLAHGCCAPDGSCRCDPGWEGLHCERCVRMPGCQHGTCHQPWQCICHSGWAGKFCDKDEHICTTQSPCQNGGQCMYDGGGEYHCVCLPGFHGRDCERKAGPCEQAGSPCRNGGQCQDDQGFALNFTCRCLVGFVGARCEVNVDDCLMRPCANGATCLDGINRFSCLCPEGFAGRFCTINLDDCASRPCQRGARCRDRVHDFDCLCPSGYGGKTCELVLPVPDPPTTVDTPLGPTSAVVVPATGPAPHSAGAGLLRISVKEVVRRQEAGLGEPSLVALVVFGALTAALVLATVLLTLRAWRRGVCPPGPCCYPAPHYAPACQDQECQVSMLPAGLPLPRDLPPEPGKTTAL

SEQ ID NO: 23700 - protein, 377 aa, Homo sapiens
  Payload ID: 4740
  Gene Symbol: DLK2
  Gene Name: delta-like 2 homolog (Drosophila)
  ENSP ID: ENSP00000361563
MPSGCRCLHLVCLLCILGAPGQPVRADDCSSHCDLAHGCCAPDGSCRCDPGWEGLHCERCVRMPGCQHGTCHQPWQCICHSGWADEHICTTQSPCQNGGQCMYDGGGEYHCVCLPGFHGRDCERKAGPCEQAGSPCRNGGQCQDDQGFALNFTCRCLVGFVGARCEVNVDDCLMRPCANGATCLDGINRFSCLCPEGFAGRFCTINLDDCASRPCQRGARCRDRVHDFDCLCPSGYGGKTCELVLPVPDPPTTVDTPLGPTSAVVVPATGPAPHSAGAGLLRISVKEVVRRQEAGLGEPSLVALVVFGALTAALVLATVLLTLRAWRRGVCPPGPCCYPAPHYAPACQDQECQVSMLPAGLPLPRDLPPEPGKTTAL

SEQ ID NO: 23701 - protein, 383 aa, Homo sapiens; identical to SEQ ID NO: 23699
  Payload ID: 4740
  Gene Symbol: DLK2
  Gene Name: delta-like 2 homolog (Drosophila)
  Uniprot ID: Q6UY11
  ENSP ID: ENSP00000361566

SEQ ID NO: 23702 - protein, 289 aa, Homo sapiens
  Payload ID: 4740
  Gene Symbol: DLK2
  Gene Name: delta-like 2 homolog (Drosophila)
  ENSP ID: ENSP00000399829
  MOD_RES (1)..(1): Any amino acid
XGCQHGTCHQPWQCICHSGWAGKFCDKGFHGRDCERKAGPCEQAGSPCRNGGQCQDDQGFALNFTCRCLVGFVGARCEVNVDDCLMRPCANGATCLDGINRFSCLCPEGFAGRFCTINLDDCASRPCQRGARCRDRVHDFDCLCPSGYGGKTCELVLPVPDPPTTVDTPLGPTSAVVVPATGPAPHSAGAGLLRISVKEVVRRQEAGLGEPSLVALVVFGALTAALVLATVLLTLRAWRRGVCPPGPCCYPAPHYAPACQDQECQVSMLPAGLPLPRDLPPEPGKTTAL

SEQ ID NO: 23703 - protein, 618 aa, Homo sapiens
  Payload ID: 4741
  Gene Symbol: DLL3
  Gene Name: delta-like 3 (Drosophila)
  Uniprot ID: Q9NYJ7
  ENSP ID: ENSP00000205143
MVSPRMSGLLSQTVILALIFLPQTRPAGVFELQIHSFGPGPGPGAPRSPCSARLPCRLFFRVCLKPGLSEEAAESPCALGAALSARGPVYTEQPGAPAPDLPLPDGLLQVPFRDAWPGTFSFIIETWREELGDQIGGPAWSLLARVAGRRRLAAGGPWARDIQRAGAWELRFSYRARCEPPAVGTACTRLCRPRSAPSRCGPGLRPCAPLEDECEAPLVCRAGCSPEHGFCEQPGECRCLEGWTGPLCTVPVSTSSCLSPRGPSSATTGCLVPGPGPCDGNPCANGGSCSETPRSFECTCPRGFYGLRCEVSGVTCADGPCFNGGLCVGGADPDSAYICHCPPGFQGSNCEKRVDRCSLQPCRNGGLCLDLGHALRCRCRAGFAGPRCEHDLDDCAGRACANGGTCVEGGGAHRCSCALGFGGRDCRERADPCAARPCAHGGRCYAHFSGLVCACAPGYMGARCEFPVHPDGASALPAAPPGLRPGDPQRYLLPPALGLLVAAGVAGAALLLVHVRRRGHSQDAGSRLLAGTPEPSVHALPDALNNLRTQEGSGDGPSSSVDWNRPEDVDPQGIYVISAPSIYAREVATPLFPPLHTGRAGQRQHLLFPYPSSILSVK

SEQ ID NO: 23704 - protein, 587 aa, Homo sapiens
  Payload ID: 4741
  Gene Symbol: DLL3
  Gene Name: delta-like 3 (Drosophila)
  Uniprot ID: Q9NYJ7
  ENSP ID: ENSP00000348810
MVSPRMSGLLSQTVILALIFLPQTRPAGVFELQIHSFGPGPGPGAPRSPCSARLPCRLFFRVCLKPGLSEEAAESPCALGAALSARGPVYTEQPGAPAPDLPLPDGLLQVPFRDAWPGTFSFIIETWREELGDQIGGPAWSLLARVAGRRRLAAGGPWARDIQRAGAWELRFSYRARCEPPAVGTACTRLCRPRSAPSRCGPGLRPCAPLEDECEAPLVCRAGCSPEHGFCEQPGECRCLEGWTGPLCTVPVSTSSCLSPRGPSSATTGCLVPGPGPCDGNPCANGGSCSETPRSFECTCPRGFYGLRCEVSGVTCADGPCFNGGLCVGGADPDSAYICHCPPGFQGSNCEKRVDRCSLQPCRNGGLCLDLGHALRCRCRAGFAGPRCEHDLDDCAGRACANGGTCVEGGGAHRCSCALGFGGRDCRERADPCAARPCAHGGRCYAHFSGLVCACAPGYMGARCEFPVHPDGASALPAAPPGLRPGDPQRYLLPPALGLLVAAGVAGAALLLVHVRRRGHSQDAGSRLLAGTPEPSVHALPDALNNLRTQEGSGDGPSSSVDWNRPEDVDPQGIYVISAPSIYAREA

SEQ ID NO: 23705 - protein, 220 aa, Homo sapiens
  Payload ID: 4741
  Gene Symbol: DLL3
  Gene Name: delta-like 3 (Drosophila)
  ENSP ID: ENSP00000471688
MVSPRMSGLLSQTVILALIFLPQTRPAGVFELQIHSFGPGPGPGAPRSPCSARLPCRLFFRVCLKPGLSEEAAESPCALGAALSARGPVYTEQPGAPAPDLPLPDGLLQVPFRDAWPGTFSFIIETWREELGDQIGGGLCLDLGHALRCRCRAGFAGPRCEHDLDDCAGRACANGGTCVEGGGAHRCSCALGFGGRDCRERADPCAARPCAHGGRCYAHF

SEQ ID NO: 23706 - protein, 685 aa, Homo sapiens
  Payload ID: 4742
  Gene Symbol: DLL4
  Gene Name: delta-like 4 (Drosophila)
  Uniprot ID: Q9NR61
  ENSP ID: ENSP00000249749
MAAASRSASGWALLLLVALWQQRAAGSGVFQLQLQEFINERGVLASGRPCEPGCRTFFRVCLKHFQAVVSPGPCTFGTVSTPVLGTNSFAVRDDSSGGGRNPLQLPFNFTWPGTFSLIIEAWHAPGDDLRPEALPPDALISKIAIQGSLAVGQNWLLDEQTSTLTRLRYSYRVICSDNYYGDNCSRLCKKRNDHFGHYVCQPDGNLSCLPGWTGEYCQQPICLSGCHEQNGYCSKPAECLCRPGWQGRLCNECIPHNGCRHGTCSTPWQCTCDEGWGGLFCDQDLNYCTHHSPCKNGATCSNSGQRSYTCTCRPGYTGVDCELELSECDSNPCRNGGSCKDQEDGYHCLCPPGYYGLHCEHSTLSCADSPCFNGGSCRERNQGANYACECPPNFTGSNCEKKVDRCTSNPCANGGQCLNRGPSRMCRCRPGFTGTYCELHVSDCARNPCAHGGTCHDLENGLMCTCPAGFSGRRCEVRTSIDACASSPCFNRATCYTDLSTDTFVCNCPYGFVGSRCEFPVGLPPSFPWVAVSLGVGLAVLLVLLGMVAVAVRQLRLRRPDDGSREAMNNLSDFQKDNLIPAAQLKNTNQKKELEVDCGLDKSNCGKQQNHTLDYNLAPGPLGRGTMPGKFPHSDKSLGEKAPLRLHSEKPECRISAICSPRDSMYQSVCLISEERNECVIATEV

SEQ ID NO: 23707 - protein, 620 aa, Homo sapiens
  Payload ID: 4743
  Gene Symbol: DTX1
  Gene Name: deltex 1, E3 ubiquitin ligase
  Uniprot ID: Q86Y01
  ENSP ID: ENSP00000257600
MSRPGHGGLMPVNGLGFPPQNVARVVVWEWLNEHSRWRPYTATVCHHIENVLKEDARGSVVLGQVDAQLVPYIIDLQSMHQFRQDTGTMRPVRRNFYDPSSAPGKGIVWEWENDGGAWTAYDMDICITIQNAYEKQHPWLDLSSLGFCYLIYFNSMSQMNRQTRRRRRLRRRLDLAYPLTVGSIPKSQSWPVGASSGQPCSCQQCLLVNSTRAASNAILASQRRKAPPAPPLPPPPPPGGPPGALAVRPSATFTGAALWAAPAAGPAEPAPPPGAPPRSPGAPGGARTPGQNNLNRPGPQRTTSVSARASIPPGVPALPVKNLNGTGPVHPALAGMTGILLCAAGLPVCLTRAPKPILHPPPVSKSDVKPVPGVPGVCRKTKKKHLKKSKNPEDVVRRYMQKVKNPPDEDCTICMERLVTASGYEGVLRHKGVRPELVGRLGRCGHMYHLLCLVAMYSNGNKDGSLQCPTCKAIYGEKTGTQPPGKMEFHLIPHSLPGFPDTQTIRIVYDIPTGIQGPEHPNPGKKFTARGFPRHCYLPNNEKGRKVLRLLITAWERRLIFTIGTSNTTGESDTVVWNEIHHKTEFGSNLTGHGYPDASYLDNVLAELTAQGVSEAAAKA

SEQ ID NO: 23708 - protein, 622 aa, Homo sapiens
  Payload ID: 4744
  Gene Symbol: DTX2
  Gene Name: deltex 2, E3 ubiquitin ligase
  Uniprot ID: Q86UW9
  ENSP ID: ENSP00000322885
MAMAPSPSLVQVYTSPAAVAVWEWQDGLGTWHPYSATVCSFIEQQFVQQKGQRFGLGSLAHSIPLGQADPSLAPYIIDLPSWTQFRQDTGTMRAVRRHLFPQHSAPGRGVVWEWLSDDGSWTAYEASVCDYLEQQVARGNQLVDLAPLGYNYTVNYTTHTQTNKTSSFCRSVRRQAGPPYPVTTIIAPPGHTGVACSCHQCLSGSRTGPVSGRYRHSMTNLPAYPVPQHPPHRTASVFGTHQAFAPYNKPSLSGARSAPRLNTTNAWGAAPPSLGSQPLYRSSLSHLGPQHLPPGSSTSGAVSASLPSGPSSSPGSVPATVPMQMPKPSRVQQALAGMTSVLMSAIGLPVCLSRAPQPTSPPASRLASKSHGSVKRLRKMSVKGATPKPEPEPEQVIKNYTEELKVPPDEDCIICMEKLSTASGYSDVTDSKAIGSLAVGHLTKCSHAFHLLCLLAMYCNGNKDGSLQCPSCKTIYGEKTGTQPQGKMEVLRFQMSLPGHEDCGTILIVYSIPHGIQGPEHPNPGKPFTARGFPRQCYLPDNAQGRKVLELLKVAWKRRLIFTVGTSSTTGETDTVVWNEIHHKTEMDRNITGHGYPDPNYLQNVLAELAAQGVTEDCLEQQ

SEQ ID NO: 23709 - protein, 89 aa, Homo sapiens
  Payload ID: 4744
  Gene Symbol: DTX2
  Gene Name: deltex 2, E3 ubiquitin ligase
  ENSP ID: ENSP00000387894
MAMAPSPSLVQVYTSPAAVAVWEWQDGLGTWHPYSATVCSFIEQQFVQQKGQRFGLGSLAHSIPLGQADPSLAPYIIDLPSWTQFRQDT

SEQ ID NO: 23710 - protein, 28 aa, Homo sapiens
  Payload ID: 4744
  Gene Symbol: DTX2
  Gene Name: deltex 2, E3 ubiquitin ligase
  ENSP ID: ENSP00000389231
MAMAPSPSLVQVYTSPAAVAVWEWQDGL

SEQ ID NO: 23711 - protein, 622 aa, Homo sapiens; identical to SEQ ID NO: 23708
  Payload ID: 4744
  Gene Symbol: DTX2
  Gene Name: deltex 2, E3 ubiquitin ligase
  Uniprot ID: Q86UW9
  ENSP ID: ENSP00000390218

SEQ ID NO: 23712 - protein, 62 aa, Homo sapiens
  Payload ID: 4744
  Gene Symbol: DTX2
  Gene Name: deltex 2, E3 ubiquitin ligase
  ENSP ID: ENSP00000390881
MAMAPSPSLVQVYTSPAAVAVWEWQDGLGTWHPYSATVCSFIEQQFVQQKGQRFGLGSLAHS

SEQ ID NO: 23713 - protein, 14 aa, Homo sapiens
  Payload ID: 4744
  Gene Symbol: DTX2
  Gene Name: deltex 2, E3 ubiquitin ligase
  ENSP ID: ENSP00000392114
MAMAPSPSLVQVYT

SEQ ID NO: 23714 - protein, 575 aa, Homo sapiens
  Payload ID: 4744
  Gene Symbol: DTX2
  Gene Name: deltex 2, E3 ubiquitin ligase
  Uniprot ID: Q86UW9
  ENSP ID: ENSP00000392545
MAMAPSPSLVQVYTSPAAVAVWEWQDGLGTWHPYSATVCSFIEQQFVQQKGQRFGLGSLAHSIPLGQADPSLAPYIIDLPSWTQFRQDTGTMRAVRRHLFPQHSAPGRGVVWEWLSDDGSWTAYEASVCDYLEQQVARGNQLVDLAPLGYNYTVNYTTHTQTNKTSSFCRSVRRQAGPPYPVTTIIAPPGHTGVACSCHQCLSGSRTGPVSGRYRHSMTNLPAYPVPQHPPHRTASVFGTHQAFAPYNKPSLSGARSAPRLNTTNAWGAAPPSLGSQPLYRSSLSHLGPQHLPPGSSTSGAVSASLPSGPSSSPGSVPATVPMQMPKPSRVQQALAGATPKPEPEPEQVIKNYTEELKVPPDEDCIICMEKLSTASGYSDVTDSKAIGSLAVGHLTKCSHAFHLLCLLAMYCNGNKDGSLQCPSCKTIYGEKTGTQPQGKMEVLRFQMSLPGHEDCGTILIVYSIPHGIQGPEHPNPGKPFTARGFPRQCYLPDNAQGRKVLELLKVAWKRRLIFTVGTSSTTGETDTVVWNEIHHKTEMDRNITGHGYPDPNYLQNVLAELAAQGVTEDCLEQQ

SEQ ID NO: 23715 - protein, 531 aa, Homo sapiens
  Payload ID: 4744
  Gene Symbol: DTX2
  Gene Name: deltex 2, E3 ubiquitin ligase
  ENSP ID: ENSP00000397648
MRAVRRHLFPQHSAPGRGVVWEWLSDDGSWTAYEASVCDYLEQQVARGNQLVDLAPLGYNYTVNYTTHTQTNKTSSFCRSVRRQAGPPYPVTTIIAPPGHTGVACSCHQCLSGSRTGPVSGRYRHSMTNLPAYPVPQHPPHRTASVFGTHQAFAPYNKPSLSGARSAPRLNTTNAWGAAPPSLGSQPLYRSSLSHLGPQHLPPGSSTSGAVSASLPSGPSSSPGSVPATVPMQMPKPSRVQQALAGMTSVLMSAIGLPVCLSRAPQPTSPPASRLASKSHGSVKRLRKMSVKGATPKPEPEPEQVIKNYTEELKVPPDEDCIICMEKLSTASGYSDVTDSKAIGSLAVGHLTKCSHAFHLLCLLAMYCNGNKDGSLQCPSCKTIYGEKTGTQPQGKMEVLRFQMSLPGHEDCGTILIVYSIPHGIQGPEHPNPGKPFTARGFPRQCYLPDNAQGRKVLELLKVAWKRRLIFTVGTSSTTGETDTVVWNEIHHKTEMDRNITGHGYPDPNYLQNVLAELAAQGVTEDCLEQQ

SEQ ID NO: 23716 - protein, 89 aa, Homo sapiens; identical to SEQ ID NO: 23709
  Payload ID: 4744
  Gene Symbol: DTX2
  Gene Name: deltex 2, E3 ubiquitin ligase
  ENSP ID: ENSP00000399639

SEQ ID NO: 23717 - protein, 108 aa, Homo sapiens
  Payload ID: 4744
  Gene Symbol: DTX2
  Gene Name: deltex 2, E3 ubiquitin ligase
  ENSP ID: ENSP00000403342
MAMAPSPSLVQVYTSPAAVAVWEWQDGLGTWHPYSATVCSFIEQQFVQQKGQRFGLGSLAHSIPLGQADPSLAPYIIDLPSWTQFRQDTGTMRAVRRHLFPQHSAPGR

SEQ ID NO: 23718 - protein, 65 aa, Homo sapiens
  Payload ID: 4744
  Gene Symbol: DTX2
  Gene Name: deltex 2, E3 ubiquitin ligase
  ENSP ID: ENSP00000407398
MAMAPSPSLVQVYTSPAAVAVWEWQDGLGTWHPYSATVCSFIEQQFVQQKGQRFGLGSLAHSIPL

SEQ ID NO: 23719 - protein, 25 aa, Homo sapiens
  Payload ID: 4744
  Gene Symbol: DTX2
  Gene Name: deltex 2, E3 ubiquitin ligase
  ENSP ID: ENSP00000409040
MAMAPSPSLVQVYTSPAAVAVWEWQ

SEQ ID NO: 23720 - protein, 87 aa, Homo sapiens
  Payload ID: 4744
  Gene Symbol: DTX2
  Gene Name: deltex 2, E3 ubiquitin ligase
  ENSP ID: ENSP00000410892
  MOD_RES (1)..(1): Any amino acid
XASLPSGPSSSPGSVPATVPMQMPKPSRVQQALAGATPKPEPEPEQVIKNYTEELKVPPDESVESMRKIWTASSAWRSCPQRLDTAM

SEQ ID NO: 23721 - protein, 622 aa, Homo sapiens; identical to SEQ ID NO: 23708
  Payload ID: 4744
  Gene Symbol: DTX2
  Gene Name: deltex 2, E3 ubiquitin ligase
  Uniprot ID: Q86UW9
  ENSP ID: ENSP00000411986

SEQ ID NO: 23722 - protein, 140 aa, Homo sapiens
  Payload ID: 4744
  Gene Symbol: DTX2
  Gene Name: deltex 2, E3 ubiquitin ligase
  ENSP ID: ENSP00000415838
MAMAPSPSLVQVYTSPAAVAVWEWQDGLGTWHPYSATVCSFIEQQFVQQKGQRFGLGSLAHSIPLGQADPSLAPYIIDLPSWTQFRQDTGTMRAVRRHLFPQHSAPGRGVVWEWLSDDGSWTAYEASVCDYLEQQVARGN

SEQ ID NO: 23723 - protein, 212 aa, Homo sapiens
  Payload ID: 4744
  Gene Symbol: DTX2
  Gene Name: deltex 2, E3 ubiquitin ligase
  ENSP ID: ENSP00000487729
DCIICMEKLSTASGYSDVTDSKAIGSLAVGHLTKCSHAFHLLCLLAMYCNGNKDGSLQCPSCKTIYGEKTGTQPQGKMEVLRFQMSLPGHEDCGTILIVYSIPHGIQGPEHPNPGKPFTARGFPRQCYLPDNAQGRKVLELLKVAWKRRLIFTVGTSSTTGETDTVVWNEIHHKTEMDRNITGHGYPDPNYLQNVLAELAAQGVTEDCLEQQ

SEQ ID NO: 23724 - protein, 212 aa, Homo sapiens; identical to SEQ ID NO: 23723
  Payload ID: 4744
  Gene Symbol: DTX2
  Gene Name: deltex 2, E3 ubiquitin ligase
  ENSP ID: ENSP00000487782

SEQ ID NO: 23725 - protein, 212 aa, Homo sapiens; identical to SEQ ID NO: 23723
  Payload ID: 4744
  Gene Symbol: DTX2
  Gene Name: deltex 2, E3 ubiquitin ligase
  ENSP ID: ENSP00000488350

SEQ ID NO: 23726 - protein, 26 aa, Homo sapiens
  Payload ID: 4744
  Gene Symbol: DTX2
  Gene Name: deltex 2, E3 ubiquitin ligase
  ENSP ID: ENSP00000488433
SVESMRKIWTASSAWRSCPQRLDTAM

SEQ ID NO: 23727 - protein, 212 aa, Homo sapiens; identical to SEQ ID NO: 23723
  Payload ID: 4744
  Gene Symbol: DTX2
  Gene Name: deltex 2, E3 ubiquitin ligase
  ENSP ID: ENSP00000488533

SEQ ID NO: 23728 - protein, 212 aa, Homo sapiens; identical to SEQ ID NO: 23723
  Payload ID: 4744
  Gene Symbol: DTX2
  Gene Name: deltex 2, E3 ubiquitin ligase
  ENSP ID: ENSP00000488660

SEQ ID NO: 23729 - protein, 740 aa, Homo sapiens
  Payload ID: 4745
  Gene Symbol: DTX3L
  Gene Name: deltex 3 like, E3 ubiquitin ligase
  Uniprot ID: Q8TDB6
  ENSP ID: ENSP00000296161
MASHLRPPSPLLVRVYKSGPRVRRKLESYFQSSKSSGGGECTVSTQEHEAPGTFRVEFSERAAKERVLKKGEHQILVDEKPVPIFLVPTENSIKKNTRPQISSLTQSQAETPSGDMHQHEGHIPNAVDSCLQKIFLTVTADLNCNLFSKEQRAYITTLCPSIRKMEGHDGIEKVCGDFQDIERIHQFLSEQFLESEQKQQFSPSMTERKPLSQQERDSCISPSEPETKAEQKSNYFEVPLPYFEYFKYICPDKINSIEKRFGVNIEIQESSPNMVCLDFTSSRSGDLEAARESFASEFQKNTEPLKQECVSLADSKQANKFKQELNHQFTKLLIKEKGGELTLLGTQDDISAAKQKISEAFVKIPVKLFAANYMMNVIEVDSAHYKLLETELLQEISEIEKRYDICSKVSEKGQKTCILFESKDRQVDLSVHAYASFIDAFQHASCQLMREVLLLKSLGKERKHLHQTKFADDFRKRHPNVHFVLNQESMTLTGLPNHLAKAKQYVLKGGGMSSLAGKKLKEGHETPMDIDSDDSKAASPPLKGSVSSEASELDKKEKGICVICMDTISNKKVLPKCKHEFCAPCINKAMSYKPICPTCQTSYGIQKGNQPEGSMVFTVSRDSLPGYESFGTIVITYSMKAGIQTEEHPNPGKRYPGIQRTAYLPDNKEGRKVLKLLYRAFDQKLIFTVGYSRVLGVSDVITWNDIHHKTSRFGGPEMYGYPDPSYLKRVKEELKAKGIE

SEQ ID NO: 23730 - protein, 228 aa, Homo sapiens
  Payload ID: 4745
  Gene Symbol: DTX3L
  Gene Name: deltex 3 like, E3 ubiquitin ligase
  Uniprot ID: Q8TDB6
  ENSP ID: ENSP00000373157
MASHLRPPSPLLVRVYKSGPRVRRKLESYFQSSKSSGGGECTVSTQEHEAPGTFRVEFSERAAKERVLKKGEHQILVDEKPVPIFLVPTENSIKKNTRPQISSLTQSQAETPSGDMHQHEGHIPNAVDSCLQKEEHPNPGKRYPGIQRTAYLPDNKEGRKVLKLLYRAFDQKLIFTVGYSRVLGVSDVITWNDIHHKTSRFGGPEMYGYPDPSYLKRVKEELKAKGIE

SEQ ID NO: 23731 - protein, 347 aa, Homo sapiens
  Payload ID: 4746
  Gene Symbol: DTX3
  Gene Name: deltex 3, E3 ubiquitin ligase
  Uniprot ID: Q8N9I9
  ENSP ID: ENSP00000338050
MSFVLSRMAACGGTCKNKVTVSKPVWDFLSKETPARLARLREEHRVSILIDGETSDIYVLQLSPQGPPPAPPNGLYLARKALKGLLKEAEKELKKAQRQGELMGCLALGGGGEHPEMHRAGPPPLRAAPLLPPGARGLPPPPPPLPPPLPPRLREEAEEQESTCPICLGEIQNAKTLEKCRHSFCEGCITRALQVKKACPMCGRFYGQLVGNQPQNGRMLVSKDATLLLPSYEKYGTIVIQYVFPPGVQGAEHPNPGVRYPGTTRVAYLPDCPEGNKVLTLFRKAFDQRLTFTIGTSMTTGRPNVITWNDIHHKTSCTGGPQLFGYPDPTYLTRVQEELRAKGITDD

SEQ ID NO: 23732 - protein, 172 aa, Homo sapiens
  Payload ID: 4746
  Gene Symbol: DTX3
  Gene Name: deltex 3, E3 ubiquitin ligase
  ENSP ID: ENSP00000446996
QPQNGRMLVSKDATLLLPSYEKYGTIVIQYVFPPGVQGAEHPNPGVRYPGTTRVAYLPDCPEGNKVLTLFRKAFDQRLTFTIGTSMTTGRPNVITWNDIHHKTSCTGGPQLCDPSSFPFPWLLPFVPFPLRDPPTPRSRSLLTGENHFQTVQPSQFLLHSTWSWCAQLSLQK

SEQ ID NO: 23733 - protein, 347 aa, Homo sapiens; identical to SEQ ID NO: 23731
  Payload ID: 4746
  Gene Symbol: DTX3
  Gene Name: deltex 3, E3 ubiquitin ligase
  Uniprot ID: Q8N9I9
  ENSP ID: ENSP00000447873

SEQ ID NO: 23734 - protein, 194 aa, Homo sapiens
  Payload ID: 4746
  Gene Symbol: DTX3
  Gene Name: deltex 3, E3 ubiquitin ligase
  ENSP ID: ENSP00000448224
MAACGGTCKNKVTVSKPVWDFLSKETPARLARLREEHRVSILIDGETSDIYVLQLSPQGPPPAPPNGLYLARKALKGLLKEAEKELKKAQRQGELMGCLALGGGGEHPEMHRAGPPPLRAAPLLPPGARGLPPPPPPLPPPLPPRLREEAEEQESTCPICLGEIQNAKTLEKCRHSFCEGCITRALQVKKACPM

SEQ ID NO: 23735 - protein, 350 aa, Homo sapiens
  Payload ID: 4746
  Gene Symbol: DTX3
  Gene Name: deltex 3, E3 ubiquitin ligase
  Uniprot ID: Q8N9I9
  ENSP ID: ENSP00000448696
MPILSSSGSKMAACGGTCKNKVTVSKPVWDFLSKETPARLARLREEHRVSILIDGETSDIYVLQLSPQGPPPAPPNGLYLARKALKGLLKEAEKELKKAQRQGELMGCLALGGGGEHPEMHRAGPPPLRAAPLLPPGARGLPPPPPPLPPPLPPRLREEAEEQESTCPICLGEIQNAKTLEKCRHSFCEGCITRALQVKKACPMCGRFYGQLVGNQPQNGRMLVSKDATLLLPSYEKYGTIVIQYVFPPGVQGAEHPNPGVRYPGTTRVAYLPDCPEGNKVLTLFRKAFDQRLTFTIGTSMTTGRPNVITWNDIHHKTSCTGGPQLFGYPDPTYLTRVQEELRAKGITDD

SEQ ID NO: 23736 - protein, 7 aa, Homo sapiens
  Payload ID: 4746
  Gene Symbol: DTX3
  Gene Name: deltex 3, E3 ubiquitin ligase
  ENSP ID: ENSP00000449118
MPILSSS

SEQ ID NO: 23737 - protein, 347 aa, Homo sapiens; identical to SEQ ID NO: 23731
  Payload ID: 4746
  Gene Symbol: DTX3
  Gene Name: deltex 3, E3 ubiquitin ligase
  Uniprot ID: Q8N9I9
  ENSP ID: ENSP00000449294

SEQ ID NO: 23738 - protein, 204 aa, Homo sapiens
  Payload ID: 4746
  Gene Symbol: DTX3
  Gene Name: deltex 3, E3 ubiquitin ligase
  ENSP ID: ENSP00000449688
MPILSSSGSKMAACGGTCKNKVTVSKPVWDFLSKETPARLARLREEHRVSILIDGETSDIYVLQLSPQGPPPAPPNGLYLARKALKGLLKEAEKELKKAQRQGELMGCLALGGGGEHPEMHRAGPPPLRAAPLLPPGARGLPPPPPPLPPPLPPRLREEAEEQESTCPICLGEIQNAKTLEKCRHSFCEGCITRALQVKKACPM

SEQ ID NO: 23739 - protein, 48 aa, Homo sapiens
  Payload ID: 4746
  Gene Symbol: DTX3
  Gene Name: deltex 3, E3 ubiquitin ligase
  ENSP ID: ENSP00000449950
MSFVLSRMAACGGTCKNKVTVSKPVWDFLSKETPARLARLREEHRVSI

SEQ ID NO: 23740 - protein, 619 aa, Homo sapiens
  Payload ID: 4747
  Gene Symbol: DTX4
  Gene Name: deltex 4, E3 ubiquitin ligase
  Uniprot ID: Q9Y2E6
  ENSP ID: ENSP00000227451
MLLASAVVVWEWLNEHGRWRPYSPAVSHHIEAVVRAGPRAGGSVVLGQVDSRLAPYIIDLQSMNQFRQDTGTLRPVRRNYYDPSSAPGKGVVWEWENDNGSWTPYDMEVGITIQHAYEKQHPWIDLTSIGFSYVIDFNTMGQINRQTQRQRRVRRRLDLIYPMVTGTLPKAQSWPVSPGPATSPPMSPCSCPQCVLVMSVKAAVVNGSTGPLQLPVTRKNMPPPGVVKLPPLPGSGAKPLDSTGTIRGPLKTAPSQVIRRQASSMPTGTTMGSPASPPGPNSKTGRVALATLNRTNLQRLAIAQSRVLIASGVPTVPVKNLNGSSPVNPALAGITGILMSAAGLPVCLTRPPKLVLHPPPVSKSEIKSIPGVSNTSRKTTKKQAKKGKTPEEVLKKYLQKVRHPPDEDCTICMERLTAPSGYKGPQPTVKPDLVGKLSRCGHVYHIYCLVAMYNNGNKDGSLQCPTCKTIYGVKTGTQPPGKMEYHLIPHSLPGHPDCKTIRIIYSIPPGIQGPEHPNPGKSFSARGFPRHCYLPDSEKGRKVLKLLLVAWDRRLIFAIGTSSTTGESDTVIWNEVHHKTEFGSNLTGHGYPDANYLDNVLAELAAQGISEDSTAQEKD

SEQ ID NO: 23741 - protein, 513 aa, Homo sapiens
  Payload ID: 4747
  Gene Symbol: DTX4
  Gene Name: deltex 4, E3 ubiquitin ligase
  Uniprot ID: Q9Y2E6
  ENSP ID: ENSP00000434055
MEVGITIQHAYEKQHPWIDLTSIGFSYVIDFNTMGQINRQTQRQRRVRRRLDLIYPMVTGTLPKAQSWPVSPGPATSPPMSPCSCPQCVLVMSVKAAVVNGSTGPLQLPVTRKNMPPPGVVKLPPLPGSGAKPLDSTGTIRGPLKTAPSQVIRRQASSMPTGTTMGSPASPPGPNSKTGRVALATLNRTNLQRLAIAQSRVLIASGVPTVPVKNLNGSSPVNPALAGITGILMSAAGLPVCLTRPPKLVLHPPPVSKSEIKSIPGVSNTSRKTTKKQAKKGKTPEEVLKKYLQKVRHPPDEDCTICMERLTAPSGYKGPQPTVKPDLVGKLSRCGHVYHIYCLVAMYNNGNKDGSLQCPTCKTIYGVKTGTQPPGKMEYHLIPHSLPGHPDCKTIRIIYSIPPGIQGPEHPNPGKSFSARGFPRHCYLPDSEKGRKVLKLLLVAWDRRLIFAIGTSSTTGESDTVIWNEVHHKTEFGSNLTGHGYPDANYLDNVLAELAAQGISEDSTAQEKD

SEQ ID NO: 23742 - protein, 405 aa, Homo sapiens
  Payload ID: 4748
  Gene Symbol: DMTN
  Gene Name: dematin actin binding protein
  Uniprot ID: Q08495
  ENSP ID: ENSP00000265800
MERLQKQPLTSPGSVSPSRDSSVPGSPSSIVAKMDNQVLGYKDLAAIPKDKAILDIERPDLMIYEPHFTYSLLEHVELPRSRERSLSPKSTSPPPSPEVWADSRSPGIISQASAPRTTGTPRTSLPHFHHPETSRPDSNIYKKPPIYKQRESVGGSPQTKHLIEDLIIESSKFPAAQPPDPNQPAKIETDYWPCPPSLAVVETEWRKRKASRRGAEEEEEEEDDDSGEEMKALRERQREELSKVTSNLGKMILKEEMEKSLPIRRKTRSLPDRTPFHTSLHQGTSKSSSLPAYGRTTLSRLQSTEFSPSGSETGSPGLQNGEGQRGRMDRGNSLPCVLEQKIYPYEMLVVTNKGRTKLPPGVDRMRLERHLSAEDFSRVFAMSPEEFGKLALWKRNELKKKASLF

SEQ ID NO: 23743 - protein, 405 aa, Homo sapiens; identical to SEQ ID NO: 23742
  Payload ID: 4748
  Gene Symbol: DMTN
  Gene Name: dematin actin binding protein
  Uniprot ID: Q08495
  ENSP ID: ENSP00000350977

SEQ ID NO: 23744 - protein, 383 aa, Homo sapiens
  Payload ID: 4748
  Gene Symbol: DMTN
  Gene Name: dematin actin binding protein
  Uniprot ID: Q08495
  ENSP ID: ENSP00000370879
MERLQKQPLTSPGSVSPSRDSSVPGSPSSIVAKMDNQVLGYKDLAAIPKDKAILDIERPDLMIYEPHFTYSLLEHVELPRSRERSLSPKSTSPPPSPEVWADSRSPGIISQASAPRTTGTPRTSLPHFHHPETSRPDSNIYKKPPIYKQRESVGGSPQTKHLIEDLIIESSKFPAAQPPDPNQPAKIETDYWPCPPSLAVVETEWRKRKASRRGAEEEEEEEDDDSGEEMKALRERQREELSKVTSNLGKMILKEEMEKSLPIRRKTRSLPDRTPFHTSLHQGTSKSSSLPAYGRTTLSRLQSTEFSPSGSETGSPGLQIYPYEMLVVTNKGRTKLPPGVDRMRLERHLSAEDFSRVFAMSPEEFGKLALWKRNELKKKASLF

SEQ ID NO: 23745 - protein, 358 aa, Homo sapiens
  Payload ID: 4748
  Gene Symbol: DMTN
  Gene Name: dematin actin binding protein
  Uniprot ID: Q08495
  ENSP ID: ENSP00000397904
MERLQKAKMDNQVLGYKDLAAIPKDKAILDIERPDLMIYEPHFTYSLLEHVELPRSRERSLSPKSTSPPPSPEVWADSRSPGIISQASAPRTTGTPRTSLPHFHHPETSRPDSNIYKKPPIYKQRESVGGSPQTKHLIEDLIIESSKFPAAQPPDPNQPAKIETDYWPCPPSLAVVETEWRKRKASRRGAEEEEEEEDDDSGEEMKALRERQREELSKVTSNLGKMILKEEMEKSLPIRRKTRSLPDRTPFHTSLHQGTSKSSSLPAYGRTTLSRLQSTEFSPSGSETGSPGLQIYPYEMLVVTNKGRTKLPPGVDRMRLERHLSAEDFSRVFAMSPEEFGKLALWKRNELKKKASLF

SEQ ID NO: 23746 - protein, 383 aa, Homo sapiens; identical to SEQ ID NO: 23744
  Payload ID: 4748
  Gene Symbol: DMTN
  Gene Name: dematin actin binding protein
  Uniprot ID: Q08495
  ENSP ID: ENSP00000401291

SEQ ID NO: 23747 - protein, 405 aa, Homo sapiens; identical to SEQ ID NO: 23742
  Payload ID: 4748
  Gene Symbol: DMTN
  Gene Name: dematin actin binding protein
  Uniprot ID: Q08495
  ENSP ID: ENSP00000416111

SEQ ID NO: 23748 - protein, 405 aa, Homo sapiens; identical to SEQ ID NO: 23742
  Payload ID: 4748
  Gene Symbol: DMTN
  Gene Name: dematin actin binding protein
  Uniprot ID: Q08495
  ENSP ID: ENSP00000427866

SEQ ID NO: 23749 - protein, 71 aa, Homo sapiens
  Payload ID: 4748
  Gene Symbol: DMTN
  Gene Name: dematin actin binding protein
  ENSP ID: ENSP00000428063
MERLQKAKMDNQVLGYKDLAAIPKDKAILDIERPDLMIYEPHFTYSLLEHVELPRSRERSLSPKSTSPPPS

SEQ ID NO: 23750 - protein, 201 aa, Homo sapiens
  Payload ID: 4748
  Gene Symbol: DMTN
  Gene Name: dematin actin binding protein
  ENSP ID: ENSP00000428415
MERLQKQPLTSPGSVSPSRDSSVPGSPSSIVAKMDNQVLGYKDLAAIPKDKAILDIERPDLMIYEPHFTYSLLEHVELPRSRERSLSPKSTSPPPSPEVWADSRSPGIISQASAPRTTGTPRTSLPHFHHPETSRPDSNIYKKPPIYKQRESVGGSPQTKHLIEDLIIESSKFPAAQPPDPNQPAKIETDYWPCPPSLAVV

SEQ ID NO: 23751 - protein, 148 aa, Homo sapiens
  Payload ID: 4748
  Gene Symbol: DMTN
  Gene Name: dematin actin binding protein
  ENSP ID: ENSP00000428733
MERLQKAKMDNQVLGYKDLAAIPKDKAILDIERPDLMIYEPHFTYSLLEHVELPRSRERSLSPKSTSPPPSPEVWADSRSPGIISQASAPRTTGTPRTSLPHFHHPETSRPDSNIYKKPPIYKQRESVGGSPQTKHLIEDLIIESSKF

SEQ ID NO: 23752 - protein, 162 aa, Homo sapiens
  Payload ID: 4748
  Gene Symbol: DMTN
  Gene Name: dematin actin binding protein
  ENSP ID: ENSP00000429116
MERLQKAKMDNQVLGYKDLAAIPKDKAILDIERPDLMIYEPHFTYSLLEHVELPRSRERSLSPKSTSPPPSPEVWADSRSPGIISQASAPRTTGTPRTSLPHFHHPETSRPDSNIYKKPPIYKQRESVGGSPQTKHLIEDLIIESSKFPAAQPPDPNQPAKI

SEQ ID NO: 23753 - protein, 358 aa, Homo sapiens; identical to SEQ ID NO: 23745
  Payload ID: 4748
  Gene Symbol: DMTN
  Gene Name: dematin actin binding protein
  Uniprot ID: Q08495
  ENSP ID: ENSP00000429234

SEQ ID NO: 23754 - protein, 383 aa, Homo sapiens; identical to SEQ ID NO: 23744
  Payload ID: 4748
  Gene Symbol: DMTN
  Gene Name: dematin actin binding protein
  Uniprot ID: Q08495
  ENSP ID: ENSP00000429377

SEQ ID NO: 23755 - protein, 201 aa, Homo sapiens; identical to SEQ ID NO: 23750
  Payload ID: 4748
  Gene Symbol: DMTN
  Gene Name: dematin actin binding protein
  ENSP ID: ENSP00000429948

SEQ ID NO: 23756 - protein, 218 aa, Homo sapiens
  Payload ID: 4748
  Gene Symbol: DMTN
  Gene Name: dematin actin binding protein
  ENSP ID: ENSP00000430382
MERLQKAKMDNQVLGYKDLAAIPKDKAILDIERPDLMIYEPHFTYSLLEHVELPRSRERSLSPKSTSPPPSPEVWADSRSPGIISQASAPRTTGTPRTSLPHFHHPETSRPDSNIYKKPPIYKQRESVGGSPQTKHLIEDLIIESSKFPAAQPPDPNQPAKIETDYWPCPPSLAVVETEWRKRKASRRGAEEEEEEEDDDSGEEMKALRERQREELSK

SEQ ID NO: 23757 - protein, 110 aa, Homo sapiens
  Payload ID: 4748
  Gene Symbol: DMTN
  Gene Name: dematin actin binding protein
  ENSP ID: ENSP00000430600
MERLQKQPLTSPGSVSPSRDSSVPGSPSSIVAKMDNQVLGYKDLAAIPKDKAILDIERPDLMIYEPHFTYSLLEHVELPRSRERSLSPKSTSPPPSPEVWADSRSPGIIS

SEQ ID NO: 23758 - protein, 405 aa, Homo sapiens; identical to SEQ ID NO: 23742
  Payload ID: 4748
  Gene Symbol: DMTN
  Gene Name: dematin actin binding protein
  Uniprot ID: Q08495
  ENSP ID: ENSP00000430609

SEQ ID NO: 23759 - protein, 365 aa, Homo sapiens
  Payload ID: 4748
  Gene Symbol: DMTN
  Gene Name: dematin actin binding protein
  Uniprot ID: Q08495
  ENSP ID: ENSP00000430618
MERLQKAKMDNQVLGYKDLAAIPKDKAILDIERPDLMIYEPHFTYSLLEHVELPRSREVWADSRSPGIISQASAPRTTGTPRTSLPHFHHPETSRPDSNIYKKPPIYKQRESVGGSPQTKHLIEDLIIESSKFPAAQPPDPNQPAKIETDYWPCPPSLAVVETEWRKRKASRRGAEEEEEEEDDDSGEEMKALRERQREELSKVTSNLGKMILKEEMEKSLPIRRKTRSLPDRTPFHTSLHQGTSKSSSLPAYGRTTLSRLQSTEFSPSGSETGSPGLQNGEGQRGRMDRGNSLPCVLEQKIYPYEMLVVTNKGRTKLPPGVDRMRLERHLSAEDFSRVFAMSPEEFGKLALWKRNELKKKASLF

SEQ ID NO: 23760 - protein, 71 aa, Homo sapiens
  Payload ID: 4748
  Gene Symbol: DMTN
  Gene Name: dematin actin binding protein
  ENSP ID: ENSP00000477684
MERLQKQPLTSPGSVSPSRDSSVPGSPSSIVAKMDNQVLGYKDLAAIPKDKAILDIERPDLMIYEPHFTYS

SEQ ID NO: 23761 - protein, 74 aa, Homo sapiens
  Payload ID: 4748
  Gene Symbol: DMTN
  Gene Name: dematin actin binding protein
  ENSP ID: ENSP00000478536
MERLQKAKMDNQVLGYKDLAAIPKDKAILDIERPDLMIYEPHFTYSLLEHVELPRSRERSLSPKSTSPPPSPEV

SEQ ID NO: 23762 - protein, 711 aa, Homo sapiens
  Payload ID: 4749
  Gene Symbol: DDN
  Gene Name: dendrin
  Uniprot ID: O94850
  ENSP ID: ENSP00000390590
MLDGPLFSEGPDSPRELQDEESGSCLWVQKSKLLVIEVKTISCHYSRRAPSRQPMDFQASHWARGFQNRTCGPRPGSPQPPPRRPWASRVLQEATNWRAGPLAEVRAREQEKRKAASQEREAKETERKRRKAGGARRSPPGRPRPEPRNAPRVAQLAGLPAPLRPERLAPVGRAPRPSAQPQSDPGSAWAGPWGGRRPGPPSYEAHLLLRGSAGTAPRRRWDRPPPYVAPPSYEGPHRTLGTKRGPGNSQVPTSSAPAATPARTDGGRTKKRLDPRIYRDVLGAWGLRQGQGLLGGSPGCGAARARPEPGKGVVEKSLGLAAADLNSGSDSHPQAKATGSAGTEIAPAGSATAAPCAPHPAPRSRHHLKGSREGKEGEQIWFPKCWIPSPKKQPPRHSQTLPRPWAPGGTGWRESLGLGEGAGPETLEGWKATRRAHTLPRSSQGLSRGEGVFVIDATCVVIRSQYVPTPRTQQVQLLPSGVTRVVGDSPSQSKPGKEEGEGATVFPSPCQKRLSSSRLLHQPGGGRGGEAEGGRPGDSTLEERTFRILGLPAPEVNLRDAPTQPGSPEHQALGPAASGAQGRAEGSEVAVVQRRAGRGWARTPGPYAGALREAVSRIRRHTAPDSDTDEAEELSVHSGSSDGSDTEAPGASWRNERTLPEVGNSSPEEDGKTAELSDSVGEILDVISQTEEVLFGVRDIRGTQQGNRKRQ

SEQ ID NO: 23763 - protein, 244 aa, Homo sapiens
  Payload ID: 4750
  Gene Symbol: DCANP1
  Gene Name: dendritic cell-associated nuclear protein
  Uniprot ID: Q8TF63
  ENSP ID: ENSP00000421871
MHYGAATHIQNSRSHGLETVPGHQRLERGAGGETPEFPGCHSPAPPENFGNELLPLSAPLQGLSEGLYPPGRNKTLPAGVLREGAVQFLHRGLCNSNLSSEASARPSGTQDELHSSRRKTGQTRREGARKHLVCSFRLYPFTVHTVSPGNSHLALYQVFKAVKLCPSETSFFLSRKSLKSSDPWHPPSLSPNSWNRQAGFRAWSSHLISLSLTCSDSQSRRVSSSQQPPLHSLSSHRRAAHVPE

SEQ ID NO: 23764 - protein, 470 aa, Homo sapiens
  Payload ID: 4751
  Gene Symbol: DCSTAMP
  Gene Name: dendrocyte expressed seven transmembrane protein
  Uniprot ID: Q9H295
  ENSP ID: ENSP00000297581
MGIWTSGTDIFLSLWEIYVSPRSPGWMDFIQHLGVCCLVALISVGLLSVAACWFLPSIIAAAASWIITCVLLCCSKHARCFILLVFLSCGLREGRNALIAAGTGIVILGHVENIFHNFKGLLDGMTCNLRAKSFSIHFPLLKKYIEAIQWIYGLATPLSVFDDLVSWNQTLAVSLFSPSHVLEAQLNDSKGEVLSVLYQMATTTEVLSSLGQKLLAFAGLSLVLLGTGLFMKRFLGPCGWKYENIYITRQFVQFDERERHQQRPCVLPLNKEERRKYVIIPTFWPTPKERKNLGLFFLPILIHLCIWVLFAAVDYLLYRLIFSVSKQFQSLPGFEVHLKLHGEKQGTQDIIHDSSFNISVFEPNCIPKPKFLLSETWVPLSVILLILVMLGLLSSILMQLKILVSASFYPSVERKRIQYLHAKLLKKRSKQPLGEVKRRLSLYLTKIHFWLPVLKMIRKKQMDMASADKS

SEQ ID NO: 23765 - protein, 283 aa, Homo sapiens
  Payload ID: 4751
  Gene Symbol: DCSTAMP
  Gene Name: dendrocyte expressed seven transmembrane protein
  Uniprot ID: Q9H295
  ENSP ID: ENSP00000428869
MGIWTSGTDIFLSLWEIYVSPRSPGWMDFIQHLGVCCLVALISVGLLSVAACWFLPSIIAAAASWIITCVLLCCSKHARCFILLVFLSCGLREGRNALIAAGTGIVILGHVENIFHNFKGLLDGMTCNLRAKSFSIHFPLLKKYIEAIQWIYGLATPLSVFDDLVSWNQTLAVSLFSPSHVLEAQLNDSKGEVLSVLYQMATTTEVLSSLGQKLLAFAGLSLVLLGTGLFMKRFLGPCGWKYENIYITRQFVQFDERERHQQRPCVLPLNKEERRKFISGFQS

SEQ ID NO: 23766 - protein, 283 aa, Homo sapiens; identical to SEQ ID NO: 23765
  Payload ID: 4751
  Gene Symbol: DCSTAMP
  Gene Name: dendrocyte expressed seven transmembrane protein
  Uniprot ID: Q9H295
  ENSP ID: ENSP00000480546

SEQ ID NO: 23767 - protein, 466 aa, Homo sapiens
  Payload ID: 4752
  Gene Symbol: DENND1A
  Gene Name: DENN/MADD domain containing 1A
  Uniprot ID: Q8TEH3
  ENSP ID: ENSP00000362720
MLKWPIPGQVALFQILRCRGNSRRTTVTSLTVSQVGQNFTFVLTDIDSKQRFGFCRLSSGAKSCFCILSYLPWFEVFYKLLNILADYTTKRQENQWNELLETLHKLPIPDPGVSVHLSVHSYFTVPDTRELPSIPENRNLTEYFVAVDVNNMLHLYASMLYERRILIICSKLSTLTACIHGSAAMLYPMYWQHVYIPVLPPHLLDYCCAPMPYLIGIHLSLMEKVRNMALDDVVILNVDTNTLETPFDDLQSLPNDVISSLKNRLKKVSTTTGDGVARAFLKAQAAFFGSYRNALKIEPEEPITFCEEAFVSHYRSGAMRQFLQNATQLQLFKQFIDGRLDLLNSGEGFSDVFEEEINMGEYAGSDKLYHQWLSTVRKGSGAILNTVKTKANPAMKTVYKFAKDHAKMGIKEVKNRLKQKDIAENGCAPTPEEQLPKTAPSPLVEAKDPKLREDRRPITVHFGQAL

SEQ ID NO: 23768 - protein, 559 aa, Homo sapiens
  Payload ID: 4752
  Gene Symbol: DENND1A
  Gene Name: DENN/MADD domain containing 1A
  Uniprot ID: Q8TEH3
  ENSP ID: ENSP00000362722
MGSRIKQNPETTFEVYVEVAYPRTGGTLSDPEVQRQFPEDYSDQEVLQTLTKFCFPFYVDSLTVSQVGQNFTFVLTDIDSKQRFGFCRLSSGAKSCFCILSYLPWFEVFYKLLNILADYTTKRQENQWNELLETLHKLPIPDPGVSVHLSVHSYFTVPDTRELPSIPENRNLTEYFVAVDVNNMLHLYASMLYERRILIICSKLSTLTACIHGSAAMLYPMYWQHVYIPVLPPHLLDYCCAPMPYLIGIHLSLMEKVRNMALDDVVILNVDTNTLETPFDDLQSLPNDVISSLKNRLKKVSTTTGDGVARAFLKAQAAFFGSYRNALKIEPEEPITFCEEAFVSHYRSGAMRQFLQNATQLQLFKQFIDGRLDLLNSGEGFSDVFEEEINMGEYAGSDKLYHQWLSTVRKGSGAILNTVKTKANPAMKTVYKFAKDHAKMGIKEVKNRLKQKDIAENGCAPTPEEQLPKTAPSPLVEAKDPKLREDRRPITVHFGQVRPPRPHVVKRPKSNIAVEGRRTSVPSPEQNTIATPATLHILQKSITHFAAKFPTRGWTSSSH

SEQ ID NO: 23769 - protein, 1009 aa, Homo sapiens
  Payload ID: 4752
  Gene Symbol: DENND1A
  Gene Name: DENN/MADD domain containing 1A
  Uniprot ID: Q8TEH3
  ENSP ID: ENSP00000362727
MGSRIKQNPETTFEVYVEVAYPRTGGTLSDPEVQRQFPEDYSDQEVLQTLTKFCFPFYVDSLTVSQVGQNFTFVLTDIDSKQRFGFCRLSSGAKSCFCILSYLPWFEVFYKLLNILADYTTKRQENQWNELLETLHKLPIPDPGVSVHLSVHSYFTVPDTRELPSIPENRNLTEYFVAVDVNNMLHLYASMLYERRILIICSKLSTLTACIHGSAAMLYPMYWQHVYIPVLPPHLLDYCCAPMPYLIGIHLSLMEKVRNMALDDVVILNVDTNTLETPFDDLQSLPNDVISSLKNRLKKVSTTTGDGVARAFLKAQAAFFGSYRNALKIEPEEPITFCEEAFVSHYRSGAMRQFLQNATQLQLFKQFIDGRLDLLNSGEGFSDVFEEEINMGEYAGSDKLYHQWLSTVRKGSGAILNTVKTKANPAMKTVYKFAKDHAKMGIKEVKNRLKQKDIAENGCAPTPEEQLPKTAPSPLVEAKDPKLREDRRPITVHFGQVRPPRPHVVKRPKSNIAVEGRRTSVPSPEQPQPYRTLRESDSAEGDEAESPEQQVRKSTGPVPAPPDRAASIDLLEDVFSNLDMEAALQPLGQAKSLEDLRAPKDLREQPGTFDYQRLDLGGSERSRGVTVALKLTHPYNKLWSLGQDDMAIPSKPPAASPEKPSALLGNSLALPRRPQNRDSILNPSDKEEVPTPTLGSITIPRPQGRKTPELGIVPPPPIPRPAKLQAAGAALGDVSERLQTDRDRRAALSPGLLPGVVPQGPTELLQPLSPGPGAAGTSSDALLALLDPLSTAWSGSTLPSRPATPNVATPFTPQFSFPPAGTPTPFPQPPLNPFVPSMPAAPPTLPLVSTPAGPFGAPPASLGPAFASGLLLSSAGFCAPHRSQPNLSALSMPNLFGQMPMGTHTSPLQPLGPPAVAPSRIRTLPLARSSARAAETKQGLALRPGDPPLLPPRPPQGLEPTLQPSAPQQARDPFEDLLQKTKQDVSPSPALAPAPDSVEQLRKQWETFE

SEQ ID NO: 23770 - protein, 459 aa, Homo sapiens
  Payload ID: 4752
  Gene Symbol: DENND1A
  Gene Name: DENN/MADD domain containing 1A
  ENSP ID: ENSP00000377763
SYLPWFEVFYKLLNILADYTTKRQENQWNELLETLHKLPIPDPGVSVHLSVHSYFTVPDTRELPSIPENRNLTEYFVAVDVNNMLHLYASMLYERRILIICSKLSTLTACIHGSAAMLYPMYWQHVYIPVLPPHLLDYCCAPMPYLIGIHLSLMEKVRNMALDDVVILNVDTNTLETPFDDLQSLPNDVISSLKNRLKKVSTTTGDGVARAFLKAQAAFFGSYRNALKIEPEEPITFCEEAFVSHYRSGAMRQFLQNATQLQLFKQFIDGRLDLLNSGEGFSDVFEEEINMGEYAGSDKLYHQWLSTVRKGSGAILNTVKTKANPAMKTVYKFAKDHAKMGIKEVKNRLKQKDIAENGCAPTPEEQLPKTAPSPLVEAKDPKLREDRRPITVHFGQVRPPRPHVVKRPKSNIAVEGRRTSVPSPEQNTIATPATLHILQKSITHFAAKFPTRGWTSSSH

SEQ ID NO: 23771 - protein, 909 aa, Homo sapiens
  Payload ID: 4752
  Gene Symbol: DENND1A
  Gene Name: DENN/MADD domain containing 1A
  ENSP ID: ENSP00000377766
SYLPWFEVFYKLLNILADYTTKRQENQWNELLETLHKLPIPDPGVSVHLSVHSYFTVPDTRELPSIPENRNLTEYFVAVDVNNMLHLYASMLYERRILIICSKLSTLTACIHGSAAMLYPMYWQHVYIPVLPPHLLDYCCAPMPYLIGIHLSLMEKVRNMALDDVVILNVDTNTLETPFDDLQSLPNDVISSLKNRLKKVSTTTGDGVARAFLKAQAAFFGSYRNALKIEPEEPITFCEEAFVSHYRSGAMRQFLQNATQLQLFKQFIDGRLDLLNSGEGFSDVFEEEINMGEYAGSDKLYHQWLSTVRKGSGAILNTVKTKANPAMKTVYKFAKDHAKMGIKEVKNRLKQKDIAENGCAPTPEEQLPKTAPSPLVEAKDPKLREDRRPITVHFGQVRPPRPHVVKRPKSNIAVEGRRTSVPSPEQPQPYRTLRESDSAEGDEAESPEQQVRKSTGPVPAPPDRAASIDLLEDVFSNLDMEAALQPLGQAKSLEDLRAPKDLREQPGTFDYQRLDLGGSERSRGVTVALKLTHPYNKLWSLGQDDMAIPSKPPAASPEKPSALLGNSLALPRRPQNRDSILNPSDKEEVPTPTLGSITIPRPQGRKTPELGIVPPPPIPRPAKLQAAGAALGDVSERLQTDRDRRAALSPGLLPGVVPQGPTELLQPLSPGPGAAGTSSDALLALLDPLSTAWSGSTLPSRPATPNVATPFTPQFSFPPAGTPTPFPQPPLNPFVPSMPAAPPTLPLVSTPAGPFGAPPASLGPAFASGLLLSSAGFCAPHRSQPNLSALSMPNLFGQMPMGTHTSPLQPLGPPAVAPSRIRTLPLARSSARAAETKQGLALRPGDPPLLPPRPPQGLEPTLQPSAPQQARDPFEDLLQKTKQDVSPSPALAPAPDSVEQLRKQWETFE

SEQ ID NO: 23772 - protein, 396 aa, Homo sapiens
  Payload ID: 4753
  Gene Symbol: DENND1B
  Gene Name: DENN/MADD domain containing 1B
  Uniprot ID: Q6P3S1
  ENSP ID: ENSP00000235453
MAAAPREEKRWPQPVFSNPVVLWKFPEDFGDQEILQSVPKFCFPFDVERVSQNQVGQHFTFVLTDIESKQRFGFCRLTSGGTICLCILSYLPWFEVYYKLLNTLADYLAKELENDLNETLRSLYNHPVPKANTPVNLSVHSYFIAPDVTGLPTIPESRNLTEYFVAVDVNNMLQLYASMLHERRIVIISSKLSTLTACIHGSAALLYPMYWQHIYIPVLPPHLLDYCCAPMPYLIGIHSSLIERVKNKSLEDVVMLNVDTNTLESPFSDLNNLPSDVVSALKNKLKKQSTATGDGVARAFLRAQAALFGSYRDALRYKPGEPITFCEESFVKHRSSVMKQFLETAINLQLFKQFIDGRLAKLNAGRGFSDVFEEEITSGGFCGGKDKLQYDYPFSQ

SEQ ID NO: 23773 - protein, 352 aa, Homo sapiens
  Payload ID: 4753
  Gene Symbol: DENND1B
  Gene Name: DENN/MADD domain containing 1B
  ENSP ID: ENSP00000294737
MDCRTKANPDRTFDLVLKVKCHASENEDPVVLWKFPEDFGDQEILQSVPKFCFPFDVERVSQNQVGQHFTFVLTDIESKQRFGFCRLTSGGTICLCILSYLPWFEVYYKLLNTLADYLAKELENDLNETLRSLYNHPVPKANTPVNLSVHSYFIAPDVTGLPTIPESRNLTEYFVAVDVNNMLQLYASMLHERRIVIISSKLSTLTACIHGSAALLYPMYWQHIYIPVLPPHLLDYCCAPMPYLIGIHSSLIERVKNKSLEDVVMLNVDTNTLESPFSDLNNLPSDVVSALKNKLKKQSTATGDGVARAFLRAQAALFGSYRDALRYKPGTRGHINNGCIQSRKEVHCSTQQ

SEQ ID NO: 23774 - protein, 426 aa, Homo sapiens
  Payload ID: 4753
  Gene Symbol: DENND1B
  Gene Name: DENN/MADD domain containing 1B
  Uniprot ID: Q6P3S1
  ENSP ID: ENSP00000356366
MDCRTKANPDRTFDLVLKVKCHASENEDPVVLWKFPEDFGDQEILQSVPKFCFPFDVERVSQNQVGQHFTFVLTDIESKQRFGFCRLTSGGTICLCILSYLPWFEVYYKLLNTLADYLAKELENDLNETLRSLYNHPVPKANTPVNLSVNQEIFIACEQVLKDQPALVPHSYFIAPDVTGLPTIPESRNLTEYFVAVDVNNMLQLYASMLHERRIVIISSKLSTLTACIHGSAALLYPMYWQHIYIPVLPPHLLDYCCAPMPYLIGIHSSLIERVKNKSLEDVVMLNVDTNTLESPFSDLNNLPSDVVSALKNKLKKQSTATGDGVARAFLRAQAALFGSYRDALRYKPGEPITFCEESFVKHRSSVMKQFLETAINLQLFKQFIDGRLAKLNAGRGFSDVFEEEITSGGFCGGKDKLQYDYPFSQ

SEQ ID NO: 23775 - protein, 415 aa, Homo sapiens
  Payload ID: 4753
  Gene Symbol: DENND1B
  Gene Name: DENN/MADD domain containing 1B
  ENSP ID: ENSP00000375839
VKHRSSVMKQFLETAINLQLFKQFIDGRLAKLNAGRGFSDVFEEEITSGGFCGGNPRSYQQWVHTVKKGGALFNTAMTKATPAVRTAYKFAKNHAKLGLKEVKSKLKHKENEEDYGTCSSSVQYTPVYKLHNEKGGNSEKRKLAQARLKRPLKSLDGALYDDEDDDDIERASKLSSEDGEEASAYLYESDDSVETRVKTPYSGEMDLLGEILDTLSTHSSDQGKLAAAKSLDFFRSMDDIDYKPTNKSNAPSENNLAFLCGGSGDQAEWNLGQDDSALHGKHLPPSPRKRVSSSGLTDSLFILKEENSNKHLGADNVSDPTSGLDFQLTSPEVSQTDKGKTEKRETLSQISDDLLIPGLGRHSSTFVPWEKEGKEAKETSEDIGLLHEVVSLCHMTSDFQQSLNISDKNTNGNQT

SEQ ID NO: 23776 - protein, 147 aa, Homo sapiens
  Payload ID: 4753
  Gene Symbol: DENND1B
  Gene Name: DENN/MADD domain containing 1B
  ENSP ID: ENSP00000410025
MPLKMKEILQSVPKFCFPFDVERVSQNQVGQHFTFVLTDIESKQRFGFCRLTSGGTICLCILSYLPWFEVYYKLLNTLADYLAKELENDLNETLRSLYNHPVPKANTPVNLSVHSYFIAPDVTGLPTIPESRNLTEYFVAVDVNNML

SEQ ID NO: 23777 - protein, 775 aa, Homo sapiens
  Payload ID: 4753
  Gene Symbol: DENND1B
  Gene Name: DENN/MADD domain containing 1B
  Uniprot ID: Q6P3S1
  ENSP ID: ENSP00000479816
MDCRTKANPDRTFDLVLKVKCHASENEDPVVLWKFPEDFGDQEILQSVPKFCFPFDVERVSQNQVGQHFTFVLTDIESKQRFGFCRLTSGGTICLCILSYLPWFEVYYKLLNTLADYLAKELENDLNETLRSLYNHPVPKANTPVNLSVNQEIFIACEQVLKDQPALVPHSYFIAPDVTGLPTIPESRNLTEYFVAVDVNNMLQLYASMLHERRIVIISSKLSTLTACIHGSAALLYPMYWQHIYIPVLPPHLLDYCCAPMPYLIGIHSSLIERVKNKSLEDVVMLNVDTNTLESPFSDLNNLPSDVVSALKNKLKKQSTATGDGVARAFLRAQAALFGSYRDALRYKPGEPITFCEESFVKHRSSVMKQFLETAINLQLFKQFIDGRLAKLNAGRGFSDVFEEEITSGGFCGGNPRSYQQWVHTVKKGGALFNTAMTKATPAVRTAYKFAKNHAKLGLKEVKSKLKHKENEEDYGTCSSSVQYTPVYKLHNEKGGNSEKRKLAQARLKRPLKSLDGALYDDEDDDDIERASKLSSEDGEEASAYLYESDDSVETRVKTPYSGEMDLLGEILDTLSTHSSDQGKLAAAKSLDFFRSMDDIDYKPTNKSNAPSENNLAFLCGGSGDQAEWNLGQDDSALHGKHLPPSPRKRVSSSGLTDSLFILKEENSNKHLGADNVSDPTSGLDFQLTSPEVSQTDKGKTEKRETLSQISDDLLIPGLGRHSSTFVPWEKEGKEAKETSEDIGLLHEVVSLCHMTSDFQQSLNISDKNTNGNQT

SEQ ID NO: 23778 - protein, 801 aa, Homo sapiens
  Payload ID: 4754
  Gene Symbol: DENND1C
  Gene Name: DENN/MADD domain containing 1C
  Uniprot ID: Q8IV53
  ENSP ID: ENSP00000370889
MESRAEGGSPAVFDWFFEAACPASLQEDPPILRQFPPDFRDQEAMQMVPKFCFPFDVEREPPSPAVQHFTFALTDLAGNRRFGFCRLRAGTQSCLCILSHLPWFEVFYKLLNTVGDLLAQDQVTEAEELLQNLFQQSLSGPQASVGLELGSGVTVSSGQGIPPPTRGNSKPLSCFVAPDSGRLPSIPENRNLTELVVAVTDENIVGLFAALLAERRVLLTASKLSTLTSCVHASCALLYPMRWEHVLIPTLPPHLLDYCCAPMPYLIGVHASLAERVREKALEDVVVLNVDANTLETTFNDVQALPPDVVSLLRLRLRKVALAPGEGVSRLFLKAQALLFGGYRDALVCSPGQPVTFSEEVFLAQKPGAPLQAFHRRAVHLQLFKQFIEARLEKLNKGEGFSDQFEQEITGCGASSGALRSYQLWADNLKKGGGALLHSVKAKTQPAVKNMYRSAKSGLKGVQSLLMYKDGDSVLQRGGSLRAPALPSRSDRLQQRLPITQHFGKNRPLRPSRRRQLEEGTSEPPGAGTPPLSPEDEGCPWAEEALDSSFLGSGEELDLLSEILDSLSMGAKSAGSLRPSQSLDCCHRGDLDSCFSLPNIPRWQPDDKKLPEPEPQPLSLPSLQNASSLDATSSSKDSRSQLIPSESDQEVTSPSQSSTASADPSIWGDPKPSPLTEPLILHLTPSHKAAEDSTAQENPTPWLSTAPTEPSPPESPQILAPTKPNFDIAWTSQPLDPSSDPSSLEDPRARPPKALLAERAHLQPREEPGALNSPATPTSNCQKSQPSSRPRVADLKKCFEG

SEQ ID NO: 23779 - protein, 757 aa, Homo sapiens
  Payload ID: 4754
  Gene Symbol: DENND1C
  Gene Name: DENN/MADD domain containing 1C
  Uniprot ID: Q8IV53
  ENSP ID: ENSP00000437805
MQMVPKFCFPFDVEREPPSPAVQHFTFALTDLAGNRRFGFCRLRAGTQSCLCILSHLPWFEVFYKLLNTVGDLLAQDQVTEAEELLQNLFQQSLSGPQASVGLELGSGVTVSSGQGIPPPTRGNSKPLSCFVAPDSGRLPSIPENRNLTELVVAVTDENIVGLFAALLAERRVLLTASKLSTLTSCVHASCALLYPMRWEHVLIPTLPPHLLDYCCAPMPYLIGVHASLAERVREKALEDVVVLNVDANTLETTFNDVQALPPDVVSLLRLRLRKVALAPGEGVSRLFLKAQALLFGGYRDALVCSPGQPVTFSEEVFLAQKPGAPLQAFHRRAVHLQLFKQFIEARLEKLNKGEGFSDQFEQEITGCGASSGALRSYQLWADNLKKGGGALLHSVKAKTQPAVKNMYRSAKSGLKGVQSLLMYKDGDSVLQRGGSLRAPALPSRSDRLQQRLPITQHFGKNRPLRPSRRRQLEEGTSEPPGAGTPPLSPEDEGCPWAEEALDSSFLGSGEELDLLSEILDSLSMGAKSAGSLRPSQSLDCCHRGDLDSCFSLPNIPRWQPDDKKLPEPEPQPLSLPSLQNASSLDATSSSKDSRSQLIPSESDQEVTSPSQSSTASADPSIWGDPKPSPLTEPLILHLTPSHKAAEDSTAQENPTPWLSTAPTEPSPPESPQILAPTKPNFDIAWTSQPLDPSSDPSSLEDPRARPPKALLAERAHLQPREEPGALNSPATPTSNCQKSQPSSRPRVADLKKCFEG

SEQ ID NO: 23780 - protein, 215 aa, Homo sapiens
  Payload ID: 4754
  Gene Symbol: DENND1C
  Gene Name: DENN/MADD domain containing 1C
  ENSP ID: ENSP00000465675
MQMVPKFCFPFDVEREPPSPAVQHFTFALTDLAGNRRFGFCRLRAGTQSCLCILSHLPWFEVFYKLLNTVGDLLAQDQVTEAEELLQNLFQQSLSGPQASVGLELGSGVTVSSGQGIPPPTRGNSKPLSCFVAPDSGRLPSIPENRNLTELVVAVTDENIVGLFAALLAERRVLLTASKLSTLTSCVHASCALLYPMRWEHVLIPTLPPHLLDYC

SEQ ID NO: 23781 - protein, 90 aa, Homo sapiens
  Payload ID: 4754
  Gene Symbol: DENND1C
  Gene Name: DENN/MADD domain containing 1C
  ENSP ID: ENSP00000466334
MESRAERIPPSCGSSLQTSGTRKLCRWCLNSASLLMWKGSPPAPPCSISPSPSQTLPATADLVSAACGRVPRAVSASSATCLGSRCFTSY

SEQ ID NO: 23782 - protein, 88 aa, Homo sapiens
  Payload ID: 4754
  Gene Symbol: DENND1C
  Gene Name: DENN/MADD domain containing 1C
  ENSP ID: ENSP00000466394
MQMVPKFCFPFDVEREPPSPAVQHFTFALTDLAGNRRFGFCRLRAGTQSCLCILSHLPWFEVFYKLLNTVGDLLAQDQVTEAEELLQN

SEQ ID NO: 23783 - protein, 127 aa, Homo sapiens
  Payload ID: 4754
  Gene Symbol: DENND1C
  Gene Name: DENN/MADD domain containing 1C
  ENSP ID: ENSP00000466583
MQMVPKFCFPFDVEREPPSPAVQHFTFALTDLAGNRRFGFCRLRAGTQSCLCILSHLPWFEVFYKLLNTVGDLLAQDQVTEAEELLQNLFQQSLSGPQASVGLELGSGVTVSSGQGIPPPTRGNSKP

SEQ ID NO: 23784 - protein, 141 aa, Homo sapiens
  Payload ID: 4754
  Gene Symbol: DENND1C
  Gene Name: DENN/MADD domain containing 1C
  ENSP ID: ENSP00000467008
MQMVPKFCFPFDVEREPPSPAVQHFTFALTDLAGNRRFGFCRLRAGTQSCLCILSHLPWFEVFYKLLNTVGDLLAQDQVTEAEELLQNLFQQSLSGPQASVGLELGSGVTVSSGQGIPPPTRGNSKPLSCFVAPDSGRLPS

SEQ ID NO: 23785 - protein, 1009 aa, Homo sapiens
  Payload ID: 4755
  Gene Symbol: DENND2A
  Gene Name: DENN/MADD domain containing 2A
  Uniprot ID: Q9ULE3
  ENSP ID: ENSP00000275884
MDMFSLDMIISDPAAEASRAGKKQLRGVQNPCPSARARPRHKSLNIKDKISEWEGKKEVPTPAPSRRADGQEDYLPSSTVERRSSDGVRTQVTEAKNGMRPGTESTEKERNKGAVNVGGQDPEPGQDLSQPEREVDPSWGRGREPRLGKLRFQNDPLSVLKQVKKLEQALKDGSAGLDPQLPGTCYSPHCPPDKAEAGSTLPENLGGGSGSEVSQRVHPSDLEGREPTPELVEDRKGSCRRPWDRSLENVYRGSEGSPTKPFINPLPKPRRTFKHAGEGDKDGKPGIGFRKEKRNLPPLPSLPPPPLPSSPPPSSVNRRLWTGRQKSSADHRKSYEFEDLLQSSSESSRVDWYAQTKLGLTRTLSEENVYEDILDPPMKENPYEDIELHGRCLGKKCVLNFPASPTSSIPDTLTKQSLSKPAFFRQNSERRNFKLLDTRKLSRDGTGSPSKISPPSTPSSPDDIFFNLGDPQNGRKKRKIPKLVLRINAIYEVRRGKKRVKRLSQSMESNSGKVTDENSESDSDTEEKLKAHSQRLVNVKSRLKQAPRYPSLARELIEYQERQLFEYFVVVSLHKKQAGAAYVPELTQQFPLKLERSFKFMREAEDQLKAIPQFCFPDAKDWVPVQQFTSETFSFVLTGEDGSRRFGYCRRLLPGGKGKRLPEVYCIVSRLGCFSLFSRILDEVEKRRGISPALVQPLMRSVMEAPFPALGKTILVKNFLPGSGTEVIELCRPLDSRLEHVDFESLFSSLSVRHLVCVFASLLLERRVIFIADKLSILSKCCHAMVALIYPFAWQHTYIPVLPPAMVDIVCSPTPFLIGLLSSSLPLLRELPLEEVLVVDLVNSRFLRQMDDEDSILPRKLQVALEHILEQRNELACEQDEGPLDGRHGPESSPLNEVVSEAFVRFFVEIVGHYSLFLTSGEREERTLQREAFRKAVSSKSLRHFLEVFMETQMFRGFIQERELRRQDAKGLFEVRAQEYLETLPSGEHSGVNKFLKGLGNKMKFLHKK

SEQ ID NO: 23786 - protein, 864 aa, Homo sapiens
  Payload ID: 4755
  Gene Symbol: DENND2A
  Gene Name: DENN/MADD domain containing 2A
  ENSP ID: ENSP00000417673
MDMFSLDMIISDPAAEASRAGKKQLRGVQNPCPSARARPRHKSLNIKDKISEWEGKKEVPTPAPSRRADGQEDYLPSSTVERRSSDGVRTQVTEAKNGMRPGTESTEKERNKGAVNVGGQDPEPGQDLSQPEREVDPSWGRGREPRLGKLRFQNDPLSVLKQVKKLEQALKDGSAGLDPQLPGTCYSPHCPPDKAEAGSTLPENLGGGSGSEVSQRVHPSDLEGREPTPELVEDRKGSCRRPWDRSLENVYRGSEGSPTKPFINPLPKPRRTFKHAGEGDKDGKPGIGFRKEKRNLPPLPSLPPPPLPSSPPPSSVNRRLWTGRQKSSADHRKSYEFEDLLQSSSESSRVDWYAQTKLGLTRTLSEENVYEDILDPPMKENPYEDIELHGRCLGKKCVLNFPASPTSSIPDTLTKQSLSKPAFFRQNSERRNFKLLDTRKLSRDGTGSPSKISPPSTPSSPDDIFFNLGDPQNGRKKRKIPKLVLRINAIYEVRRGKKRVKRLSQSMESNSGKVTDENSESDSDTEEKLKAHSQRLVNVKSRLKQAPRYPSLARELIEYQERQLFEYFVVVSLHKKQAGAAYVPELTQQFPLKLERSFKFMREAEDQLKAIPQFCFPDAKDWVPVQQFTSETFSFVLTGEDGSRRFGYCRRLLPGGKGKRLPEVYCIVSRLGCFSLFSRILDEVEKRRGISPALVQPLMRSVMEAPFPALGKTILVKNFLPGSGTEVIELCRPLDSRLEHVDFESLFSSLSVRHLVCVFASLLLERRVIFIADKLSTPTSRCCHPPWSTSCARRRPSSSGCSPARCHCSGSCRWKRSLWLTSSTAGSSDRWTMRTPSCPGSFRWPWNTFWNRGTSWLVSRTKGP

SEQ ID NO: 23787 - protein, 90 aa, Homo sapiens
  Payload ID: 4755
  Gene Symbol: DENND2A
  Gene Name: DENN/MADD domain containing 2A
  ENSP ID: ENSP00000418088
MDMFSLDMIISDPAAEASRAGKKQLRGVQNPCPSARARPRHKSLNIKDKISEWEGKKEVPTPAPSRRADGQEDYLPSSTVERRSSDGVRT

SEQ ID NO: 23788 - protein, 78 aa, Homo sapiens
  Payload ID: 4755
  Gene Symbol: DENND2A
  Gene Name: DENN/MADD domain containing 2A
  ENSP ID: ENSP00000418760
MDMFSLDMIISDPAAEASRAGKKQLRGVQNPCPSARARPRHKSLNIKDKISEWEGKKEVPTPAPSRRADGQEDYLPSS

SEQ ID NO: 23789 - protein, 157 aa, Homo sapiens
  Payload ID: 4755
  Gene Symbol: DENND2A
  Gene Name: DENN/MADD domain containing 2A
  ENSP ID: ENSP00000418844
MDMFSLDMIISDPAAEASRAGKKQLRGVQNPCPSARARPRHKSLNIKDKISEWEGKKEVPTPAPSRRADGQEDYLPSSTVERRSSDGVRTQVTEAKNGMRPGTESTEKERNKGAVNVGGQDPEPGQDLSQPEREVDPSWGRGREPRLGKLRFQNDPL

SEQ ID NO: 23790 - protein, 795 aa, Homo sapiens
  Payload ID: 4755
  Gene Symbol: DENND2A
  Gene Name: DENN/MADD domain containing 2A
  Uniprot ID: Q9ULE3
  ENSP ID: ENSP00000419464
MDMFSLDMIISDPAAEASRAGKKQLRGVQNPCPSARARPRHKSLNIKDKISEWEGKKEVPTPAPSRRADGQEDYLPSSTVERRSSDGVRTQVTEAKNGMRPGTESTEKERNKGAVNVGGQDPEPGQDLSQPEREVDPSWGRGREPRLGKLRFQNDPLSVLKQVKKLEQALKDGSAGLDPQLPGTCYSPHCPPDKAEAGSTLPENLGGGSGSEVSQRVHPSDLEGREPTPELVEDRKGSCRRPWDRSLENVYRGSEGSPTKPFINPLPKPRRTFKHAGEGDKDGKPGIGFRKEKRNLPPLPSLPPPPLPSSPPPSSVNRRLWTGRQKSSADHRKSYEFEDLLQSSSESSRVDWYAQTKLGLTRTLSEENVYEDILDPPMKENPYEDIELHGRCLGKKCVLNFPASPTSSIPDTLTKQSLSKPAFFRQNSERRNFKLLDTRKLSRDGTGSPSKISPPSTPSSPDDIFFNLGDPQNGRKKRKIPKLVLRINAIYEVRRGKKRVKRLSQSMESNSGKVTDENSESDSDTEEKLKAHSQRLVNVKSRLKQAPRYPSLARELIEYQERQLFEYFVVVSLHKKQAGAAYVPELTQQFPLKLERSFKFMREAEDQLKAIPQFCFPDAKDWVPVQQFTSETFSFVLTGEDGSRRFGYCRRLLPGGKGKRLPEVYCIVSRLGCFSLFSRILDEVEKRRGISPALVQPLMRSVMEAPFPALGKTILVKNFLPGSGTEVIELCRPLDSRLEHVDFESLFSSLSVRHLVCVFASLLLERRVIFIADKLRYPPWLLLLKRLNDSRSWTL

SEQ ID NO: 23791 - protein, 1009 aa, Homo sapiens; identical to SEQ ID NO: 23785
  Payload ID: 4755
  Gene Symbol: DENND2A
  Gene Name: DENN/MADD domain containing 2A
  Uniprot ID: Q9ULE3
  ENSP ID: ENSP00000419654

SEQ ID NO: 23792 - protein, 163 aa, Homo sapiens
  Payload ID: 4755
  Gene Symbol: DENND2A
  Gene Name: DENN/MADD domain containing 2A
  ENSP ID: ENSP00000420145
PGGKGKRLPEVYCIVSRLGCFSLFSRILDEVEKRRGISPALVQPLMRSVMEAPFPALGKTILVKNFLPGSGTEVIELCRPLDSRLEHVDFESLFSSLSVRHLVCVFASLLLERRVIFIADKLSTPTSRCCHPPWSTSCARRRPSSSGCSPARCHCSGSCRWKR

SEQ ID NO: 23793 - protein, 105 aa, Homo sapiens
  Payload ID: 4755
  Gene Symbol: DENND2A
  Gene Name: DENN/MADD domain containing 2A
  ENSP ID: ENSP00000420605
MKENPYEDIELHGRCLGKKCVLNFPASPTSSIPDTLTKQSLSKPAFFRQNSERRNFKLLDTRKLSRDGTGSPSKISPPSTPSSPDDIFFNLGDPQNGRKKRKIPK

SEQ ID NO: 23794 - protein, 1009 aa, Homo sapiens; identical to SEQ ID NO: 23785
  Payload ID: 4755
  Gene Symbol: DENND2A
  Gene Name: DENN/MADD domain containing 2A
  Uniprot ID: Q9ULE3
  ENSP ID: ENSP00000442245

SEQ ID NO: 23795 - protein, 928 aa, Homo sapiens
  Payload ID: 4756
  Gene Symbol: DENND2C
  Gene Name: DENN/MADD domain containing 2C
  Uniprot ID: Q68D51
  ENSP ID: ENSP00000376955
MDVGFSRTTVQTLSRSHCKNIKQKISQWEGRANGISNPEKWCPKDFGVRYNCHQEIRLKKNPIAERKSKNLDVTSRENVGLDINENTKSHDQSENENKKHEYDDTHFFKNESESNWVCSRVKEIESCKEDVLDPETSLPPGNFYTSQILWKKIEALPPDKLLNLALEHCDSSEKELNFRVLDSSYGITKSLENIYSEPEGQECGPSINPLPKPRRTFRYLSESGVTPYKERNCDKKYCENNSCAQSSLASSQEPEPKKYGGKIRGRSKRKSFEFEDIQHFRNRNSQTIREELGRNSGSALYYTQSEDNIYEDIIYPTKENPYEDIPVQPLPMWRSPSAWKLPPAKSAFKAPKLPPKPQFLHRKTMEVKNSQAYLRSKLTKDTTLPVTLTEWKLFRAGEVANTKRKNLPRLVLKIDDIFESKRGKKKVKLHSYTGKELPPTKGETSGNESDAEYLPKNRHKRLAQLQPSSKRNPHYQTLERDLIELQEQQLFELFVVVSLQKKPSGISYIPQVIQQFPGKDDHGYKQSKDMEERLKVIPKFCFPDSKDWMPTSELKSETFSFVLTGEDGSRWFGYCKKLLPVGKGKRLPEVYCMVSRLGCFNLFSKILDEVEKRREMSPALVYPFMRSVMEAPFPAPGRTITVKSYLPGAGDESIELCRPLDSRLEHVDFKCLFKCLSVCHLIRVCASLLLERRVIFVANSLSTLSKCGHAVVATLYPFTWQHTYIPVLPASMIDIVCSPTPFLIGILSCSLPQLQDLPIEEVLIVDLCADKFLQEVSDEDEILPPKLQAALMQILEERNEILTQEQNFSQDVTLNSLVSEAFVRFFVELVGHYSLNMTVTERGERVFQREPFRKSHTSRSVRHFLDLFMETQMFAGFIQDRELRKSGVKGLFEIRAIQYLETIPESEPSGMNRILRSLGSKMKFLQKK

SEQ ID NO: 23796 - protein, 871 aa, Homo sapiens
  Payload ID: 4756
  Gene Symbol: DENND2C
  Gene Name: DENN/MADD domain containing 2C
  Uniprot ID: Q68D51
  ENSP ID: ENSP00000376957
MDVGFSRTTVQTLSRSHCKNIKQKISQWEGRANGISNPEKWCPKDFGVRYNCHQEIRLKKNPIAERKSKNLDVTSRENVGLDINENTKSHDQSENENKKHEYDDTHFFKNESESNWVCSRVKEIESCKEDVLDPETSLPPGNFYTSQILWKKIEALPPDKLLNLALEHCDSSEKELNFRVLDSSYGITKSLENIYSEPEGQECGPSINPLPKPRRTFRYLSESGVTPYKERNCDKKYCENNSCAQSSLASSQEPEPKKYGGKIRGRSKRKSFEFEDIQHFRNRNSQTIREELGRNSGSALYYTQSEDNIYEDIIYPTKENPYEDIPVQPLPMWRSPSAWKLPPAKSAFKAPKLVLKIDDIFESKRGKKKVKLHSYTGKELPPTKGETSGNESDAEYLPKNRHKRLAQLQPSSKRNPHYQTLERDLIELQEQQLFELFVVVSLQKKPSGISYIPQVIQQFPGKDDHGYKQSKDMEERLKVIPKFCFPDSKDWMPTSELKSETFSFVLTGEDGSRWFGYCKKLLPVGKGKRLPEVYCMVSRLGCFNLFSKILDEVEKRREMSPALVYPFMRSVMEAPFPAPGRTITVKSYLPGAGDESIELCRPLDSRLEHVDFKCLFKCLSVCHLIRVCASLLLERRVIFVANSLSTLSKCGHAVVATLYPFTWQHTYIPVLPASMIDIVCSPTPFLIGILSCSLPQLQDLPIEEVLIVDLCADKFLQEVSDEDEILPPKLQAALMQILEERNEILTQEQNFSQDVTLNSLVSEAFVRFFVELVGHYSLNMTVTERGERVFQREPFRKSHTSRSVRHFLDLFMETQMFAGFIQDRELRKSGVKGLFEIRAIQYLETIPESEPSGMNRILRSLGSKMKFLQKK

SEQ ID NO: 23797 - protein, 928 aa, Homo sapiens; identical to SEQ ID NO: 23795
  Payload ID: 4756
  Gene Symbol: DENND2C
  Gene Name: DENN/MADD domain containing 2C
  Uniprot ID: Q68D51
  ENSP ID: ENSP00000376958

SEQ ID NO: 23798 - protein, 471 aa, Homo sapiens
  Payload ID: 4757
  Gene Symbol: DENND2D
  Gene Name: DENN/MADD domain containing 2D
  Uniprot ID: Q9H6A0
  ENSP ID: ENSP00000350266
MEGQVVGRVFRLFQRRLLQLRAGPPQDNSGEALKEPERAQEHSLPNFAGGQHFFEYLLVVSLKKKRSEDDYEPIITYQFPKRENLLRGQQEEEERLLKAIPLFCFPDGNEWASLTEYPRETFSFVLTNVDGSRKIGYCRRLLPAGPGPRLPKVYCIISCIGCFGLFSKILDEVEKRHQISMAVIYPFMQGLREAAFPAPGKTVTLKSFIPDSGTEFISLTRPLDSHLEHVDFSSLLHCLSFEQILQIFASAVLERKIIFLAEGLSTLSQCIHAAAALLYPFSWAHTYIPVVPESLLATVCCPTPFMVGVQMRFQQEVMDSPMEEVLLVNLCEGTFLMSVGDEKDILPPKLQDDILDSLGQGINELKTAEQINEHVSGPFVQFFVKIVGHYASYIKREANGQGHFQERSFCKALTSKTNRRFVKKFVKTQLFSLFIQEAEKSKNPPAGYFQQKILEYEEQKKQKKPREKTVK

SEQ ID NO: 23799 - protein, 468 aa, Homo sapiens
  Payload ID: 4757
  Gene Symbol: DENND2D
  Gene Name: DENN/MADD domain containing 2D
  Uniprot ID: Q9H6A0
  ENSP ID: ENSP00000358767
MDGLGRRLRASLRLKRGHGGPPQDNSGEALKEPERAQEHSLPNFAGGQHFFEYLLVVSLKKKRSEDDYEPIITYQFPKRENLLRGQQEEEERLLKAIPLFCFPDGNEWASLTEYPRETFSFVLTNVDGSRKIGYCRRLLPAGPGPRLPKVYCIISCIGCFGLFSKILDEVEKRHQISMAVIYPFMQGLREAAFPAPGKTVTLKSFIPDSGTEFISLTRPLDSHLEHVDFSSLLHCLSFEQILQIFASAVLERKIIFLAEGLSTLSQCIHAAAALLYPFSWAHTYIPVVPESLLATVCCPTPFMVGVQMRFQQEVMDSPMEEVLLVNLCEGTFLMSVGDEKDILPPKLQDDILDSLGQGINELKTAEQINEHVSGPFVQFFVKIVGHYASYIKREANGQGHFQERSFCKALTSKTNRRFVKKFVKTQLFSLFIQEAEKSKNPPAGYFQQKILEYEEQKKQKKPREKTVK

SEQ ID NO: 23800 - protein, 1198 aa, Homo sapiens
  Payload ID: 4758
  Gene Symbol: DENND3
  Gene Name: DENN/MADD domain containing 3
  Uniprot ID: A2RUS2
  ENSP ID: ENSP00000262585
MRSLRKKREKPRPEQWKGLPGPPRAPEPEDVAVPGGVDLLTLPQLCFPGGVCVATEPKEDCVHFLVLTDVCGNRTYGVVAQYYRPLHDEYCFYNGKTHRECPGCFVPFAVCVVSRFPYYNSLKDCLSCLLALLKPCKDFEVDSHIKDFAAKLSLIPSPPPGPLHLVFNMKSLQIVLPARADPESPILDLDLHLPLLCFRPEKVLQILTCILTEQRIVFFSSDWALLTLVTECFMAYLYPLQWQHPFVPILSDQMLDFVMAPTSFLMGCHLDHFEEVSKEADGLVLINIDHGSITYSKSTDDNVDIPDVPLLAAQTFIQRVQSLQLHHELHAAHLLSSTDLKEGRAHRRSWQQKLNCQIQQTTLQLLVSIFRDVKNHLNYEHRVFNSEEFLKTRAPGDHQFYKQVLDTYMFHSFLKARLNRRMDAFAQMDLDTQSEEDRINGMLLSPRRPTVEKRASRKSSHLHVTHRRMVVSMPNLQDIAMPELAPRNSSLRLTDTAGCRGSSAVLNVTPKSPYTFKIPEIHFPLESKCVQAYHAHFVSMLSEAMCFLAPDNSLLLARYLYLRGLVYLMQGQLLNALLDFQNLYKTDIRIFPTDLVKRTVESMSAPEWEGAEQAPELMRLISEILDKPHEASKLDDHVKKFKLPKKHMQLGDFMKRVQESGIVKDASIIHRLFEALTVGQEKQIDPETFKDFYNCWKETEAEAQEVSLPWLVMEHLDKNECVCKLSSSVKTNLGVGKIAMTQKRLFLLTEGRPGYLEISTFRNIEEVRRTTTTFLLRRIPTLKIRVASKKEVFEANLKTECDLWHLMVKEMWAGKKLADDHKDPHYVQQALTNVLLMDAVVGTLQSPGAIYAASKLSYFDKMSNEMPMTLPETTLETLKHKINPSAGEAFPQAVDVLLYTPGHLDPAEKVEDAHPKLWCALSEGKVTVFNASSWTIHQHSFKVGTAKVNCMVMADQNQVWVGSEDSVIYIINVHSMSCNKQLTAHCSSVTDLIVQDGQEAPSNVYSCSMDGMVLVWNVSTLQVTSRFQLPRGGLTSIRLHGGRLWCCTGNSIMVMKMNGSLHQELKIEENFKDTSTSFLAFQLLPEEEQLWAACAGRSEVYIWSLKDLAQPPQRVPLEDCSEINCMIRVKKQVWVGSRGLGQGTPKGKIYVIDAERKTVEKELVAHMDTVRTLCSAEDRYVLSGSGREEGKVAIWKGE

SEQ ID NO: 23801 - protein, 1146 aa, Homo sapiens
  Payload ID: 4758
  Gene Symbol: DENND3
  Gene Name: DENN/MADD domain containing 3
  Uniprot ID: A2RUS2
  ENSP ID: ENSP00000410594
MRSLRKKREKPRPEQWKGLPGPPRAPEPEDVAVPGGVDLLTLPQLCFPGGVCVATEPKEDCVHFLVLTDVCGNRTYGVVAQYYRPLHDEYCFYNGKTHRECPGCFVPFAVCVVSRFPYYNSLKDCLSCLLALLKPCKDFEVDSHIKDFAAKLSLIPSPPPGPLHLVFNMKSLQIVLPARADPESPILDLDLHLPLLCFRPEKVLQILTCILTEQRIVFFSSDWALLTLVTECFMAYLYPLQWQHPFVPILSDQMLDFVMAPTSFLMGCHLDHFEEVSKEADGLVLINIDHGSITYSKSTDDNVDIPDVPLLAAQTFIQRDVKNHLNYEHRVFNSEEFLKTRAPGDHQFYKQVLDTYMFHSFLKARLNRRMDAFAQMDLDTQSEEDRINGMLLSPRRPTVEKRASRKSSHLHVTHRRMVVSMPNLQDIAMPELAPRNSSLRLTDTAGCRGSSAVLNVTPKSPYTFKIPEIHFPLESKCVQAYHAHFVSMLSEAMCFLAPDNSLLLARYLYLRGLVYLMQGQLLNALLDFQNLYKTDIRIFPTDLVKRTVESMSAPEWEGAEQAPELMRLISEILDKPHEASKLDDHVKKFKLPKKHMQLGDFMKRVQESGIVKDASIIHRLFEALTVGQEKQIDPETFKDFYNCWKETEAEAQEVSLPWLVMEHLDKNECVCKLSSSVKTNLGVGKIAMTQKRLFLLTEGRPGYLEISTFRNIEEVRRTTTTFLLRRIPTLKIRVASKKEVFEANLKTECDLWHLMVKEMWAGKKLADDHKDPHYVQQALTNVLLMDAVVGTLQSPGAIYAASKLSYFDKMSNEMPMTLPETTLETLKHKINPSAGEAFPQAVDVLLYTPGHLDPAEKVEDAHPKLWCALSEGKVTVFNASSWTIHQHSFKVGTAKVNCMVMADQNQVWVGSEDSVIYIINVHSMSCNKQLTAHCSSVTDLIVQDGQEAPSNVYSCSMDGMVLVWNVSTLQVTSRFQLPRGGLTSIRLHGGRLWCCTGNSIMVMKMNGSLHQELKIEENFKDTSTSFLAFQLLPEEEQLWAACAGRSEVYIWSLKDLAQPPQRVPLEDCSEINCMIRVKKQVWVGSRGLGQGTPKGKIYVIDAERKTVEKELVAHMDTVRTLCSAEDRYVLSGSGREEGKVAIWKGE

SEQ ID NO: 23802 - protein, 102 aa, Homo sapiens
  Payload ID: 4758
  Gene Symbol: DENND3
  Gene Name: DENN/MADD domain containing 3
  ENSP ID: ENSP00000428155
DEYCFYNGKTHRECPGCFVPFAVCVVSRFPYYNSLKDCLSWPRRKQLTTVPFCVIMLENEPRQIAELVLFLLLAKHSHLRPSALTRGTSPMESEQEPYCSNQ

SEQ ID NO: 23803 - protein, 1203 aa, Homo sapiens
  Payload ID: 4758
  Gene Symbol: DENND3
  Gene Name: DENN/MADD domain containing 3
  ENSP ID: ENSP00000428276
  MOD_RES (1)..(1): Any amino acid
XPRDSLRSLEQVAYKKGVKHLSALLDPEVLSIFVPPFISKEDSQMAGANCGTLGKTRMRSLRKKREKPRPEQWKGLPGPPRAPEPEDVAVPGGVDLLTLPQLCFPGGVCVATEPKEDCVHFLVLTDVCGNRTYGVVAQYYRPLHDEYCFYNGKTHRECPGCFVPFAVCVVSRFPYYNSLKDCLSCLLALLKPCKDFEVDSHIKDFAAKLSLIPSPPPGPLHLVFNMKSLQIVLPARADPESPILDLDLHLPLLCFRPEKVLQILTCILTEQRIVFFSSDWALLTLVTECFMAYLYPLQWQHPFVPILSDQMLDFVMAPTSFLMGCHLDHFEEVSKEADGLVLINIDHGSITYSKSTDDNVDIPDVPLLAAQTFIQRDVKNHLNYEHRVFNSEEFLKTRAPGDHQFYKQVLDTYMFHSFLKARLNRRMDAFAQMDLDTQSEEDRINGMLLSPRRPTVEKRASRKSSHLHVTHRRMVVSMPNLQDIAMPELAPRNSSLRLTDTAGCRGSSAVLNVTPKSPYTFKIPEIHFPLESKCVQAYHAHFVSMLSEAMCFLAPDNSLLLARYLYLRGLVYLMQGQLLNALLDFQNLYKTDIRIFPTDLVKRTVESMSAPEWEGAEQAPELMRLISEILDKPHEASKLDDHVKKFKLPKKHMQLGDFMKRVQESGIVKDASIIHRLFEALTVGQEKQIDPETFKDFYNCWKETEAEAQEVSLPWLVMEHLDKNECVCKLSSSVKTNLGVGKIAMTQKRLFLLTEGRPGYLEISTFRNIEEVRRTTTTFLLRRIPTLKIRVASKKEVFEANLKTECDLWHLMVKEMWAGKKLADDHKDPHYVQQALTNVLLMDAVVGTLQSPGAIYAASKLSYFDKMSNEMPMTLPETTLETLKHKINPSAGEAFPQAVDVLLYTPGHLDPAEKVEDAHPKLWCALSEGKVTVFNASSWTIHQHSFKVGTAKVNCMVMADQNQVWVGSEDSVIYIINVHSMSCNKQLTAHCSSVTDLIVQDGQEAPSNVYSCSMDGMVLVWNVSTLQVTSRFQLPRGGLTSIRLHGGRLWCCTGNSIMVMKMNGSLHQELKIEENFKDTSTSFLAFQLLPEEEQLWAACAGRSEVYIWSLKDLAQPPQRVPLEDCSEINCMIRVKKQVWVGSRGLGQGTPKGKIYVIDAERKTVEKELVAHMDTVRTLCSAEDRYVLSGSGREEGKVAIWKGE

SEQ ID NO: 23804 - protein, 67 aa, Homo sapiens
  Payload ID: 4758
  Gene Symbol: DENND3
  Gene Name: DENN/MADD domain containing 3
  ENSP ID: ENSP00000428641
MAEAASPHLSLPSGLLELCALLGAPRDSLRSLEQRSCPFSCLLLSVKRTVKWPVPTAALSVKPGCAP

SEQ ID NO: 23805 - protein, 1278 aa, Homo sapiens
  Payload ID: 4758
  Gene Symbol: DENND3
  Gene Name: DENN/MADD domain containing 3
  ENSP ID: ENSP00000428714
MAEAASPHLSLPSGLLELCALLGAPRDSLRSLEQVAYKKGVKHLSALLDPEVLSIFVPPFISKEDSQMAGANCGTLGKTRMRSLRKKREKPRPEQWKGLPGPPRAPEPEDVAVPGGVDLLTLPQLCFPGGVCVATEPKEDCVHFLVLTDVCGNRTYGVVAQYYRPLHDEYCFYNGKTHRECPGCFVPFAVCVVSRFPYYNSLKDCLSCLLALLKPCKDFEVDSHIKDFAAKLSLIPSPPPGPLHLVFNMKSLQIVLPARADPESPILDLDLHLPLLCFRPEKVLQILTCILTEQRIVFFSSDWALLTLVTECFMAYLYPLQWQHPFVPILSDQMLDFVMAPTSFLMGCHLDHFEEVSKEADGLVLINIDHGSITYSKSTDDNVDIPDVPLLAAQTFIQRVQSLQLHHELHAAHLLSSTDLKEGRAHRRSWQQKLNCQIQQTTLQLLVSIFRDVKNHLNYEHRVFNSEEFLKTRAPGDHQFYKQVLDTYMFHSFLKARLNRRMDAFAQMDLDTQSEEDRINGMLLSPRRPTVEKRASRKSSHLHVTHRRMVVSMPNLQDIAMPELAPRNSSLRLTDTAGCRGSSAVLNVTPKSPYTFKIPEIHFPLESKCVQAYHAHFVSMLSEAMCFLAPDNSLLLARYLYLRGLVYLMQGQLLNALLDFQNLYKTDIRIFPTDLVKRTVESMSAPEWEGAEQAPELMRLISEILDKPHEASKLDDHVKKFKLPKKHMQLGDFMKRVQESGIVKDASIIHRLFEALTVGQEKQIDPETFKDFYNCWKETEAEAQEVSLPWLVMEHLDKNECVCKLSSSVKTNLGVGKIAMTQKRLFLLTEGRPGYLEISTFRNIEEVRRTTTTFLLRRIPTLKIRVASKKEVFEANLKTECDLWHLMVKEMWAGKKLADDHKDPHYVQQALTNVLLMDAVVGTLQSPGAIYAASKLSYFDKMSNEMPMTLPETTLETLKHKINPSAGEAFPQAVDVLLYTPGHLDPAEKVEDAHPKLWCALSEGKVTVFNASSWTIHQHSFKVGTAKVNCMVMADQNQVWVGSEDSVIYIINVHSMSCNKQLTAHCSSVTDLIVQDGQEAPSNVYSCSMDGMVLVWNVSTLQVTSRFQLPRGGLTSIRLHGGRLWCCTGNSIMVMKMNGSLHQELKIEENFKDTSTSFLAFQLLPEEEQLWAACAGRSEVYIWSLKDLAQPPQRVPLEDCSEINCMIRVKKQVWVGSRGLGQGTPKGKIYVIDAERKTVEKELVAHMDTVRTLCSAEDRYVLSGSGREEGKVAIWKGE

SEQ ID NO: 23806 - protein, 122 aa, Homo sapiens
  Payload ID: 4758
  Gene Symbol: DENND3
  Gene Name: DENN/MADD domain containing 3
  ENSP ID: ENSP00000429533
VGTLQSPGAIYAASKLSYFDKMSNEMPMTLPETTLETLKHKINPSAGEAFPQAVDVLLYTPGHLDPAEKVEDAHPKLWCALSEGKVTVFNASSWTIHQHSFKVGTAKVVSTRSVRKEASEFT

SEQ ID NO: 23807 - protein, 170 aa, Homo sapiens
  Payload ID: 4758
  Gene Symbol: DENND3
  Gene Name: DENN/MADD domain containing 3
  ENSP ID: ENSP00000429725
  MOD_RES (1)..(1): Any amino acid
XTGNSIMVMKMNGSLHQELKIEENFKDTSTSFLAFQLLPEEEQLWAACAGRSEVYIWSLKDLAQPPQRVPLEDCSEINCMIRVKKQVGWRARHPQHPRQVSLALAASPCSREPAARPRALLPSPLRVPLLTGTCRVGANGPTGHHVLVSWCGPSTPQRIPPNWMASNDRT

SEQ ID NO: 23808 - protein, 280 aa, Homo sapiens
  Payload ID: 4758
  Gene Symbol: DENND3
  Gene Name: DENN/MADD domain containing 3
  ENSP ID: ENSP00000429780
MAEAASPHLSLPSGLLELCALLGAPRDSLRSLEQVAYKKGVKHLSALLDPEVLSIFVPPFISKEDSQMAGANCGTLGKTRMRSLRKKREKPRPEQWKGLPGPPRAPEPEDVAVPGGVDLLTLPQLCFPGGVCVATEPKEDCVHFLVLTDVCGNRTYGVVAQYYRPLHVFNMKSLQIVLPARADPESPILDLDLHLPLLCFRPEKVLQILTCILTEQRIVFFSSDWALLTLVTECFMAYLYPLQWQHPFVPILSDQMLDFVMAPTSFLMGCHLDHFEEVSK

SEQ ID NO: 23809 - protein, 124 aa, Homo sapiens
  Payload ID: 4758
  Gene Symbol: DENND3
  Gene Name: DENN/MADD domain containing 3
  ENSP ID: ENSP00000430625
MAGANCGTLGKTRMRSLRKKREKPRPEQWKGLPGPPRAPEPEDVAVPGGVDLLTLPQLCFPGGVCVATEPKEDCVHFLVLTDVCGNRTYGVVAQYYRPLHDEYCFYNGKTHRECPGCFVPFAVC

SEQ ID NO: 23810 - protein, 208 aa, Homo sapiens
  Payload ID: 4758
  Gene Symbol: DENND3
  Gene Name: DENN/MADD domain containing 3
  ENSP ID: ENSP00000430695
MAEAASPHLSLPSGLLELCALLGAPRDSLRSLEQVAYKKGVKHLSALLDPEVLSIFVPPFISKEDSQMAGANCGTLGKTRMRSLRKKREKPRPEQWKGLPGPPRAPEPEDVAVPGGVDLLTLPQLCFPGGVCVATEPKEDCVHFLVLTDVCGNRTYGVVAQYYRPLHDEYCFYNGKTHRECPGCFVPFAVCVVSRFPYYNSLKDCLSW

SEQ ID NO: 23811 - protein, 291 aa, Homo sapiens
  Payload ID: 4758
  Gene Symbol: DENND3
  Gene Name: DENN/MADD domain containing 3
  ENSP ID: ENSP00000430786
MAEAASPHLSLPSGLLELCALLGAPRDSLRSLEQVAYKKGVKHLSALLDPEVLSIFVPPFISKEDSQMAGANCGTLGKTRMRSLRKKREKPRPEQWKGLPGPPRAPEPEDVAVPGGVDLLTLPQLCFPGGVCVATEPKEDCVHFLVLTDVCGNRTYGVVAQYYRPLHDEYCFYNGKTHRECPGCFVPFAVCVVSRFPYYNSLKDCLSCLLALLKPCKDFEVDSHIKDFAAKLSLIPSPPPGPLHLVQPCLSSHSVNTEFELKCDFKVFNMKSLQIVLPARADPESPILDLD

SEQ ID NO: 23812 - protein, 248 aa, Homo sapiens
  Payload ID: 4758
  Gene Symbol: DENND3
  Gene Name: DENN/MADD domain containing 3
  ENSP ID: ENSP00000430912
MVMADQNQVWVGSEDSVIYIINVHSMSCNKQLTAHCSSVTDLIVQDGQEAPSNVYSCSMDGMVLVWNVSTLQVTSRFQLPRGGLTSIRLHGGRLWCCTGNSIMVMKMNGSLHQELKIEENFKDTSTSFLAFQLLPEEEQLWAACAGRSEVYIWSLKDLAQPPQRVPLEDCSEINCMIRVKKQVWVGSRGLGQGTPKGKIYVIDAERKTVEKELVAHMDTVRTLCSAEDRYVLSGSGREEGKVAIWKGE

SEQ ID NO: 23813 - protein, 1906 aa, Homo sapiens
  Payload ID: 4759
  Gene Symbol: DENND4A
  Gene Name: DENN/MADD domain containing 4A
  Uniprot ID: Q7Z401
  ENSP ID: ENSP00000391167
MIEDKGPRVADYFVVAGLTDVSKPLEEEIHFNDACHKVAKPKEPITDVSVIIKSLGEEVPQDYICIDVTPTGLSADLNNGSLVGPQIYLCYRRGRDKPPLTDLGVLYDWKERLKQGCEIIQSTPYGRPANISGSTSSQRIYITYRRASENMTQNTLAVTDICIIIPSKGESPPHTFCKVDKNLNNSMWGSAVYLCYKKSVAKTNTVSYKAGLICRYPQEDYESFSLPESVPLFCLPMGATIECWPSNSKYPLPVFSTFVLTGASAEKVYGAAIQFYEPYSEENLTEKQRLLLGLTSADGKSDSSKTIHTNKCICLLSHWPFFDAFRKFLTFLYRYSISGPHVLPIEKHISHFMHKVPFPSPQRPRILVQLSPHDNLILSQPVSSPLPLSGGKFSTLLQNLGPENAVTLLVFAVTEHKILIHSLRPSVLTSVTEALVSMIFPFHWPCPYVPLCPLALADVLSAPCPFIVGIDSRYFDLYDPPPDVSCVDVDTNTISQIGDKKNVAWKILPKKPCKNLMNTLNNLHQQLAKLQQRPRDDGLMDLAINDYDFNSGKRLHMIDLEIQEAFLFFMASILKGYRSYLRPITQAPSETATDAASLFALQAFLRSRDRSHQKFYNMMTKTQMFIRFIEECSFVSDKDASLAFFDDCVDKVDMDKSGEVRLIELDESFKSEHTVFVTPPEIPHLPNGEEPPLQYSYNGFPVLRNNLFERPEGFLQAKKNKLPSKSSSPNSPLPMFRRTKQEIKSAHKIAKRYSSIPQMWSRCLLRHCYGLWFICLPAYVKVCHSKVRALKTAYDVLKKMQSKKMDPPDEVCYRILMQLCGQYDQPVLAVRVLFEMQKAGIDPNAITYGYYNKAVLESTWPSRSRSGYFLWTKVRNVVLGVTQFKRALKKHAHLSQTTLSDGSDLDAVSHGSMDSGHGTHTVEQAPFNTGLIKVYATDDRSSTGGQSDLGYNSLSKDEVRRGDTSTEDIQEEKDKKGSDCSSLSESESTKGSADCLPKLSYQNSSSIVRLTGTSNNSAGKISGESMESTPELLLISSLEDTNETRNIQSRCFRKRHKSDNETNLQQQVVWGNRNRNLSGGVLMGFMLNRINQEATPGDIVEKLGADAKILSNVISKSTRPNTLDIGKPPLRSKRDSLEKESSDDDTPFDGSNYLADKVDSPVIFDLEDLDSETDVSKAGCVATQNPKRIQRMNSSFSVKPFEKTDVATGFDPLSLLVAETEQQQKEEEEEDEDDSKSISTPSARRDLAEEIVMYMNNMSSPLTSRTPSIDLQRACDDKLNKKSPPLVKACRRSSLPPNSPKPVRLTKSKSYTKSEEKPRDRLWSSPAFSPTCPFREESQDTLTHSSPSFNLDTLLVPKLDVLRNSMFTAGKGVAEKASKWYSRFTMYTTSSKDQSSDRTSLSSVGAQDSESTSLTDEDVCHELEGPISSQETSATSGTKRIDLSRISLESSASLEGSLSKFALPGKSEVTSSFNASNTNIFQNYAMEVLISSCSRCRTCDCLVHDEEIMAGWTADDSNLNTTCPFCGNIFLPFLNIEIRDLRRPGRYFLKSSPSTENMHFPSSISSQTRQSCISTSASGLDTSALSVQGNFDLNSKSKLQENFCTRSIQIPANRSKTAMSKCPIFPMARSISTSGPLDKEDTGRQKLISTGSLPATLQGATDSLGLEWHLPSPDPVTVPYLSPLVVWKELESLLENEGDHAITVADFVDHHPIVFWNLVWYFRRLDLPSNLPGLILSSEHCNKYSKIPRHCMSEDSKYVLIQMLWDNMKLHQDPGQPLYILWNAHTQKYPMVHLLQKSDNSFNQELLKSMVKSIKMNDVYGPMSQILETLNKCPHFKRQRSLYREILFLSLVALGRENIDIDAFDKEYKMAYDRLTPSQVKSTHNCDRPPSTGVMECRKTFGEPYL

SEQ ID NO: 23814 - protein, 1863 aa, Homo sapiens
  Payload ID: 4759
  Gene Symbol: DENND4A
  Gene Name: DENN/MADD domain containing 4A
  Uniprot ID: Q7Z401
  ENSP ID: ENSP00000396830
MIEDKGPRVADYFVVAGLTDVSKPLEEEIHFNDACHKVAKPKEPITDVSVIIKSLGEEVPQDYICIDVTPTGLSADLNNGSLVGPQIYLCYRRGRDKPPLTDLGVLYDWKERLKQGCEIIQSTPYGRPANISGSTSSQRIYITYRRASENMTQNTLAVTDICIIIPSKGESPPHTFCKVDKNLNNSMWGSAVYLCYKKSVAKTNTVSYKAGLICRYPQEDYESFSLPESVPLFCLPMGATIECWPSNSKYPLPVFSTFVLTGASAEKVYGAAIQFYEPYSEENLTEKQRLLLGLTSADGKSDSSKTIHTNKCICLLSHWPFFDAFRKFLTFLYRYSISGPHVLPIEKHISHFMHKVPFPSPQRPRILVQLSPHDNLILSQPVSSPLPLSGGKFSTLLQNLGPENAVTLLVFAVTEHKILIHSLRPSVLTSVTEALVSMIFPFHWPCPYVPLCPLALADVLSAPCPFIVGIDSRYFDLYDPPPDVSCVDVDTNTISQIGDKKNVAWKILPKKPCKNLMNTLNNLHQQLAKLQQRPRDDGLMDLAINDYDFNSGKRLHMIDLEIQEAFLFFMASILKGYRSYLRPITQAPSETATDAASLFALQAFLRSRDRSHQKFYNMMTKTQMFIRFIEECSFVSDKDASLAFFDDCVDKVDMDKSGEVRLIELDESFKSEHTVFVTPPEIPHLPNGEEPPLQYSYNGFPVLRNNLFERPEGFLQAKKNKLPSKSSSPNSPLPMFRRTKQEIKSAHKIAKRYSSIPQMWSRCLLRHCYGLWFICLPAYVKVCHSKVRALKTAYDVLKKMQSKKMDPPDEVCYRILMQLCGQYDQPVLAVRVLFEMQKAGIDPNAITYGYYNKAVLESTWPSRSRSGYFLWTKVRNVVLGVTQFKRALKKHAHLSQTTLSGGQSDLGYNSLSKDEVRRGDTSTEDIQEEKDKKGSDCSSLSESESTKGSADCLPKLSYQNSSSIVRLTGTSNNSAGKISGESMESTPELLLISSLEDTNETRNIQSRCFRKRHKSDNETNLQQQVVWGNRNRNLSGGVLMGFMLNRINQEATPGDIVEKLGADAKILSNVISKSTRPNTLDIGKPPLRSKRDSLEKESSDDDTPFDGSNYLADKVDSPVIFDLEDLDSETDVSKAGCVATQNPKRIQRMNSSFSVKPFEKTDVATGFDPLSLLVAETEQQQKEEEEEDEDDSKSISTPSARRDLAEEIVMYMNNMSSPLTSRTPSIDLQRACDDKLNKKSPPLVKACRRSSLPPNSPKPVRLTKSKSYTKSEEKPRDRLWSSPAFSPTCPFREESQDTLTHSSPSFNLDTLLVPKLDVLRNSMFTAGKGVAEKASKWYSRFTMYTTSSKDQSSDRTSLSSVGAQDSESTSLTDEDVCHELEGPISSQETSATSGTKRIDLSRISLESSASLEGSLSKFALPGKSEVTSSFNASNTNIFQNYAMEVLISSCSRCRTCDCLVHDEEIMAGWTADDSNLNTTCPFCGNIFLPFLNIEIRDLRRPGRYFLKSSPSTENMHFPSSISSQTRQSCISTSASGLDTSALSVQGNFDLNSKSKLQENFCTRSIQIPANRSKTAMSKCPIFPMARSISTSGPLDKEDTGRQKLISTGSLPATLQGATDSLGLEWHLPSPDPVTVPYLSPLVVWKELESLLENEGDHAITVADFVDHHPIVFWNLVWYFRRLDLPSNLPGLILSSEHCNKYSKIPRHCMSEDSKYVLIQMLWDNMKLHQDPGQPLYILWNAHTQKYPMVHLLQKSDNSFNQELLKSMVKSIKMNDVYGPMSQILETLNKCPHFKRQRSLYREILFLSLVALGRENIDIDAFDKEYKMAYDRLTPSQVKSTHNCDRPPSTGVMECRKTFGEPYL

SEQ ID NO: 23815 - protein, 26 aa, Homo sapiens
  Payload ID: 4759
  Gene Symbol: DENND4A
  Gene Name: DENN/MADD domain containing 4A
  ENSP ID: ENSP00000456605
  MOD_RES (1)..(1): Any amino acid
XSTHNCDRPPSTGVMECRKTFGEPYL

SEQ ID NO: 23816 - protein, 1001 aa, Homo sapiens
  Payload ID: 4759
  Gene Symbol: DENND4A
  Gene Name: DENN/MADD domain containing 4A
  ENSP ID: ENSP00000457358
MIEDKGPRVADYFVVAGLTDVSKPLEEEIHFNDACHKVAKPKEPITDVSVIIKSLGEEVPQDYICIDVTPTGLSADLNNGSLVGPQIYLCYRRGRDKPPLTDLGVLYDWKERLKQGCEIIQSTPYGRPANISGSTSSQRIYITYRRASENMTQNTLAVTDICIIIPSKGESPPHTFCKVDKNLNNSMWGSAVYLCYKKSVAKTNTVSYKAGLICRYPQEDYESFSLPESVPLFCLPMGATIECWPSNSKYPLPVFSTFVLTGASAEKVYGAAIQFYEPYSEENLTEKQRLLLGLTSADGKSDSSKTIHTNKCICLLSHWPFFDAFRKFLTFLYRYSISGPHVLPIEKHISHFMHKVPFPSPQRPRILVQLSPHDNLILSQPVSSPLPLSGGKFSTLLQNLGPENAVTLLVFAVTEHKILIHSLRPSVLTSVTEALVSMIFPFHWPCPYVPLCPLALADVLSAPCPFIVGIDSRYFDLYDPPPDVSCVDVDTNTISQIGDKKNVAWKILPKKPCKNLMNTLNNLHQQLAKLQQRPRDDGLMDLAINDYDFNSGKRLHMIDLEIQEAFLFFMASILKGYRSYLRPITQAPSETATDAASLFALQAFLRSRDRSHQKFYNMMTKTQMFIRFIEECSFVSDKDASLAFFDDCVDKVDMDKSGEVRLIELDESFKSEHTVFVTPPEIPHLPNGEEPPLQYSYNGFPVLRNNLFERPEGFLQAKKNKLPSKSSSPNSPLPMFRRTKQEIKSAHKIAKRYSSIPQMWSRCLLRHCYGLWFICLPAYVKVCHSKVRALKTAYDVLKKMQSKKMDPPDEVCYRILMQLCGQYDQPVLAVRVLFEMQKAGIDPNAITYGYYNKAVLESTWPSRSRSGYFLWTKVRNVVLGVTQFKRALKKHAHLSQTTLSGGQSDLGYNSLSKDEVRRGDTSTEDIQEEKDKKGSDCSSLSESESTKGSADCLPKLSYQNSSSIVRLTGTSNNSAGKISGESMESTPELLLISSLEDTNET

SEQ ID NO: 23817 - protein, 1916 aa, Homo sapiens
  Payload ID: 4759
  Gene Symbol: DENND4A
  Gene Name: DENN/MADD domain containing 4A
  ENSP ID: ENSP00000489304
MIEDKGPRVADYFVVAGLTDVSKPLEEEIHFNDACHKVAKPKEPITDVSVIIKSLGEEVPQDYICIDVTPTGLSADLNNGSLVGPQIYLCYRRGRDKPPLTDLGVLYDWKERLKQGCEIIQSTPYGRPANISGSTSSQRIYITYRRASENMTQNTLAVTDICIIIPSKGESPPHTFCKVDKNLNNSMWGSAVYLCYKKSVAKTNTVSYKAGLICRYPQEDYESFSLPESVPLFCLPMGATIECWPSNSKYPLPVFSTFVLTGASAEKVYGAAIQFYEPYSEENLTEKQRLLLGLTSADGKSDSSKTIHTNKCICLLSHWPFFDAFRKFLTFLYRYSISGPHVLPIEKHISHFMHKVPFPSPQRPRILVQLSPHDNLILSQPVSSPLPLSGGKFSTLLQNLGPENAVTLLVFAVTEHKILIHSLRPSVLTSVTEALVSMIFPFHWPCPYVPLCPLALADVLSAPCPFIVGIDSRYFDLYDPPPDVSCVDVDTNTISQIGDKKNVAWKILPKKPCKNLMNTLNNLHQQLAKLQQRPRDDGLMDLAINDYDFNSGKRLHMIDLEIQEAFLFFMASILKGYRSYLRPITQAPSETATDAASLFALQAFLRSRDRSHQKFYNMMTKTQMFIRFIEECSFVSDKDASLAFFDDCVDKVDMDKSGEVRLIELDESFKSEHTVFVTPPEIPHLPNGEEPPLQYSYNGFPVLRNNLFERPEGFLQAKKNKLPSKSSSPNSPLPMFRRTKQEIKSAHKIAKRYSSIPQMWSRCLLRHCYGLWFICLPAYVKVCHSKVRALKTAYDVLKKMQSKKMDPPDEVCYRILMQLCGQYDQPVLAVRVLFEMQKAGIDPNAITYGYYNKAVLESTWPSRSRSGYFLWTKVRNVVLGVTQFKRALKKHAHLSQTTLSADGSDLDAVSHGSMDSGHGTHTVEQAPFNTGLIKVYATDDRSSTGGQSDLGYNSLSKDEVRRGDTSTEDIQEEKDKKGSDCSSLSESESTKGSADCLPKLSYQNSSSIVRLTGTSNNSAGKISGESMESTPELLLISSLEDTNETRNIQSRCFRKRHKSDNETNLQQQVVWGNRNRNLSGGVLMGFMLNRINQEATPGDIVEKLGADAKILSNVISKSTRPNTLDIGKPPLRSKRDSLEKESSDDDTPFDGSNYLADKVDSPVIFDLEDLDSETDVSKAGCVATQNPKRIQRMNSSFSVKPFEKTDVATGFDPLSLLVAETEQQQKEEEEEDEDDSKSISTPSARRDLAEEIVMYMNNMSSPLTSRTPSIDLQRACDDKLNKKSPPLVKACRRSSLPPNSPKPVRLTKSKSYTKSEEKPRDRLWSSPAFSPTCPFREESQDTLTHSSPSFNLDTLLVPKLDVLRNSMFTAGKGVAEKASKWYSRFTMYTTSSKDQSSDRTSLSSVGAQDSESTSLTDEDVCHELEGPISSQETSATSGTKRIDLSRISLESSASLEGSLSKFALPGKSEVTSSFNASNTNIFQNYAMEVLISSCSRCRTCDCLVHDEEIMAGWTADDSNLNTTCPFCGNIFLPFLNIEIRDLRRPGRYFLKSSPSTENMHFPSSISSQTRQSCISTSASGLDTSALSVQGNFDLNSKSKLQENFCTRSIQIPANRSKTAMSKCPIFPMARSISTSGPLDKEDTGRQKLISTGSLPATLQGATDSLGLEWHLPSPDPVTVPYLSPLVVWKELESLLENEGDHAITVADFVDHHPIVFWNLVWYFRRLDLPSNLPGLILSSEHCNKYSKIPRHCMSEDSKYVLIQMLWDNMKLHQDPGQPLYILWNAHSQSRTLLFETQKYPMVHLLQKSDNSFNQELLKSMVKSIKMNDVYGPMSQILETLNKCPHFKRQRSLYREILFLSLVALGRENIDIDAFDKEYKMAYDRLTPSQVKSTHNCDRPPSTGVMECRKTFGEPYL

SEQ ID NO: 23818 - protein, 1496 aa, Homo sapiens
  Payload ID: 4760
  Gene Symbol: DENND4B
  Gene Name: DENN/MADD domain containing 4B
  Uniprot ID: O75064
  ENSP ID: ENSP00000354597
MAEERPPRLVDYFVVAGLAGNGAPIPEETWVPEPSGPLRPPRPAEPITDVAVIARALGEEVPQGYTCIQASAGGHPLELSAGLLGGTQPVICYRRGRDKPPLVELGVLYEGKERPKPGFQVLDTTPYSHSANLAPPGPGHPRTYLTYRRAAEGAGLHALGITDLCLVLPSKGEGTPHTYCRLPRNLNPGMWGPAVYLCYKVGLAKANTLVYEAELLGRYPEEDNEAFPLPESVPVFCLPMGATIECWPAQTKYPVPVFSTFVLTGAAGDKVYGAALQFYEAFPRARLSERQARALGLLSAVERGRALGGRAVRSRRAIAVLSRWPAFPAFRAFLTFLYRYSVSGPHRLPLEAHISHFIHNVPFPSPQRPRILVQMSPYDNLLLCQPVSSPLPLSGASFLQLLQSLGPELAITLLLAVLTEHKLLVHSLRPDLLTSVCEALVSMIFPLHWQCPYIPLCPLVLADVLSAPVPFIVGIHSSYFDLHDPPADVICVDLDTNTLFQTEEKKLLSPRTLPRRPYKVLLATLTNLYQQLDQTYTGPEEEASLEFLLTDYEAVCGRRARLEREVQGAFLRFMACLLKGYRVFLRPLTQAPSEGARDVDNLFFLQGFLKSRERSSHKLYSQLLHTQMFSQFIEECSFGSARHAALEFFDSCVEKVHPEQEKPEPTPLVELEELSGSELTVFITPPEEPALPEGSESTPQYCYDGFPELRAELFESLQEQPGALPVPGPSRSAPSSPAPRRTKQEMKVAQRMAQKSAAVPELWARCLLGHCYGLWFLCLPAYVRSAPSRVQALHTAYHVLRQMESGKVVLPDEVCYRVLMQLCSHYGQPVLSVRVMLEMRQAGIVPNTITYGYYNKAVLESKWPSGTPGGRLRWAKLRNVVLGAAQFRQPLRERQQQQQQQQQQQQQQQQEQVSAHQEAGSSQAEPYLERPSPTRPLQRQTTWAGRSLRDPASPPGRLVKSGSLGSARGAQPTVEAGVAHMIEALGVLEPRGSPVPWHDGSLSDLSLTGEEPLPGGSPGGSGSALSAQSTEALEGLSGRGPKAGGRQDEAGTPRRGLGARLQQLLTPSRHSPASRIPPPELPPDLPPPARRSPMDSLLHPRERPGSTASESSASLGSEWDLSESSLSNLSLRRSSERLSDTPGSFQSPSLEILLSSCSLCRACDSLVYDEEIMAGWAPDDSNLNTTCPFCACPFVPLLSVQTLDSRPSVPSPKSAGASGSKDAPVPGGPGPVLSDRRLCLALDEPQLCNGHMGGASRRVESGAWAYLSPLVLRKELESLVENEGSEVLALPELPSAHPIIFWNLLWYFQRLRLPSILPGLVLASCDGPSHSQAPSPWLTPDPASVQVRLLWDVLTPDPNSCPPLYVLWRVHSQIPQRVVWPGPVPASLSLALLESVLRHVGLNEVHKAVGLLLETLGPPPTGLHLQRGIYREILFLTMAALGKDHVDIVAFDKKYKSAFNKLASSMGKEELRHRRAQMPTPKAIDCRKCFGAPPEC

SEQ ID NO: 23819 - protein, 1218 aa, Homo sapiens
  Payload ID: 4760
  Gene Symbol: DENND4B
  Gene Name: DENN/MADD domain containing 4B
  ENSP ID: ENSP00000357635
MEADAVSEGGAMAEERPPRLVDYFVVAGLAGNGAPIPEETWVPEPSGPLRPPRPAEPITDVAVIARALGEEVPQGYTCIQASAGGHPLELSAGLLGGTQPVICYRRGRDKPPLVELGVLYEGKERPKPGFQVLDTTPYSHSANLAPPGPGHPRTYLTYRRAAEGAGLHALGITDLCLVLPSKGEGTPHTYCRLPRNLNPGMWGPAVYLCYKVGLAKANTLVYEAELLGRYPEEDNEAFPLPESVPVFCLPMGATIECWPAQTKYPVPVFSTFVLTGAAGDKVYGAALQFYEAFPRARLSERQARALGLLSAVERGRALGGRAVRSRRAIAVLSRWPAFPAFRAFLTFLYRYSVSGPHRLPLEAHISHFIHNVPFPSPQRPRILVQMSPYDNLLLCQPVSSPLPLSGASFLQLLQSLGPELAITLLLAVLTEHKLLVHSLRPDLLTSVCEALVSMIFPLHWQCPYIPLCPLVLADVLSAPVPFIVGIHSSYFDLHDPPADVICVDLDTNTLFQTEEKKLLSPRTLPRRPYKVLLATLTNLYQQLDQTYTGPEEEASLEFLLTDYEAVCGRRARLEREVQGAFLRFMACLLKGYRVFLRPLTQAPSEGARDVDNLFFLQGFLKSRERSSHKLYSQLLHTQMFSQFIEECSFGSARHAALEFFDSCVEKVHPEQEKPEPTPLVELEELSGSELTVFITPPEEPALPEGSESTPQYCYDGFPELRAELFESLQEQPGALPVPGPSRSAPSSPAPRRTKQEMKVAQRMAQKSAAVPELWARCLLGHCYGLWFLCLPAYVRSAPSRVQALHTAYHVLRQMESGKVVLPDEVCYRVLMQLCSHYGQPVLSVRVMLEMRQAGIVPNTITYGYYNKAVLESKWPSGTPGGRLRWAKLRNVVLGAAQFRQPLRERQQQQQQQQQQQQQQQQEQVSAHQEAGSSQAEPYLERPSPTRPLQRQTTWAGRSLRDPASPPGRLVKSGSLGSARGAQPTVEAGVAHMIEALGVLEPRGSPVPWHDGSLSDLSLTGEEPLPGGSPGGSGSALSAQSTEALEGLSGRGPKAGGRQDEAGTPRRGLGARLQQLLTPSRHSPASRIPPPELPPDLPPPARRSPMDSLLHPRERPGSTASESSASLGSEWDLSESSLSNLSLRRSSERLSDTPGSFQSPSLEILLSSCSLCRACDSLVYDEEIMAGWAPDDSNLNTTCPFCACPFVPLLSVQTLDSRP

SEQ ID NO: 23820 - protein, 181 aa, Homo sapiens
  Payload ID: 4760
  Gene Symbol: DENND4B
  Gene Name: DENN/MADD domain containing 4B
  ENSP ID: ENSP00000435709
  MOD_RES (1)..(1): Any amino acid
XGRDKPPLVELGVLYEGKERPKPGFQVLDTTPYSHSANLAPPGPGHPRTYLTYRRAAEGAGLHALGITDLCLVLPSKGEGTPHTYCRLPRNLNPGMWGPAVYLCYKVGLAKANTLVYEAGVWCRPAVLRGVPKGQAIRATGTGTGPAERRGAGSGTGGQSCAQPACHRCAVPLACLPCLPR

SEQ ID NO: 23821 - protein, 696 aa, Homo sapiens
  Payload ID: 4761
  Gene Symbol: DENND4C
  Gene Name: DENN/MADD domain containing 4C
  ENSP ID: ENSP00000354301
GKTPDSEDKLFSPVIARNLADEIESYMNLKSPLGSKSSSMELHREENRESGMTTAFIHALERRSSLPLDHGSPAQENPESEKSSPAVSRSKTFTGRFKQQTPSRTHKERSTSLSALVRSSPHGSLGSVVNSLSGLKLDNILSGPKIDVLKSGMKQAATVASKMWVAVASAYSYSDDEEETNRDYSFPAGLEDHILGENISPNTSISGLVPSELTQSNTSLGSSSSSGDVGKLHYPTGEVPFPRGMKGQDFEKSDHGSSQNTSMSSIYQNCAMEVLMSSCSQCRACGALVYDEEIMAGWTADDSNLNTACPFCKSNFLPLLNIEFKDLRGSASFFLKPSTSGDSLQSGSIPLANESLEHKPVSSLAEPDLINFMDFPKHNQIITEETGSAVEPSDEIKRASGDVQTMKISSVPNSLSKRNVSLTRSHSVGGPLQNIDFTQRPFHGISTVSLPNSLQEVVDPLGKRPNPPPVSVPYLSPLVLRKELESLLENEGDQVIHTSSFINQHPIIFWNLVWYFRRLDLPSNLPGLILTSEHCNEGVQLPLSSLSQDSKLVYIQLLWDNINLHQEPREPLYVSWRNFNSEKKSSLLSEEQQETSTLVETIRQSIQHNNVLKPINLLSQQMKPGMKRQRSLYREILFLSLVSLGRENIDIEAFDNEYGIAYNSLSSEILERLQKIDAPPSASVEWCRKCFGAPLI

SEQ ID NO: 23822 - protein, 353 aa, Homo sapiens
  Payload ID: 4761
  Gene Symbol: DENND4C
  Gene Name: DENN/MADD domain containing 4C
  ENSP ID: ENSP00000369789
  MOD_RES (1)..(1): Any amino acid
XALERRSSLPLDHGSPAQENPESEKSSPAVSRSKTFTGRFKQQTPSRTHKERSTSLSALVRSSPHGSLGSVVNSLSGLKLDNILSGPKIDVLKSGMKQAATVASKMWVAVASAYSYSDDEEETNRDYSFPAGLEDHILGENISPNTSISGLVPSELTQSNTSLGSSSSSGDVGKLHYPTGEVPFPRGMKGQDFEKSDHGSSQNTSMSSIYQNCAMEVLMSSCSQCRACGALVYDEEIMAGWTADDSNLNTACPFCKSNFLPLLNIEFKDLRGSASFFLKPSTSGDSLQSGSIPLANESLEHKPVSSLAEPDLINFMDFPKHNQIITEETGSAVEPRYQRVQRPLYVVINGVPL

SEQ ID NO: 23823 - protein, 881 aa, Homo sapiens
  Payload ID: 4761
  Gene Symbol: DENND4C
  Gene Name: DENN/MADD domain containing 4C
  ENSP ID: ENSP00000369792
  MOD_RES (1)..(1): Any amino acid
XQPSPEPHSPTEPPAWGSSIVKVPSGIFDVNSRKSSTGSISNVLFSTQDPVEDAVFGEATNLKKNGDRGEKRQKHFPERSCSFSSESRAGMLLKKSSLDSNSSEMAIMMGADAKILTAALTCPKTSLLHIARTHSFENVSCHLPDSRTCMSESTWNPEHRSSPVPEMLEESQELLEPVVDDVPKTTATVDTYESLLSDSNSNQSRDLKTVSKDLRNKRSSLYGIAKVVQREDVETGLDPLSLLATECTGGKTPDSEDKLFSPVIARNLADEIESYMNLKSPLGSKSSSMELHREENRESGMTTAFIHALERRSSLPLDHGSPAQENPESEKSSPAVSRSKTFTGRFKQQTPSRTHKERSTSLSALVRSSPHGSLGSVVNSLSGLKLDNILSGPKIDVLKSGMKQAATVASKMWVAVASAYSYSDDEEETNRDYSFPAGLEDHILGENISPNTSISGLVPSELTQSNTSLGSSSSSGDVGKLHYPTGEVPFPRGMKGQDFEKSDHGSSQNTSMSSIYQNCAMEVLMSSCSQCRACGALVYDEEIMAGWTADDSNLNTACPFCKSNFLPLLNIEFKDLRGSASFFLKPSTSGDSLQSGSIPLANESLEHKPVSSLAEPDLINFMDFPKHNQIITEETGSAVEPSDEIKRASGDVQTMKISSVPNSLSKRNVSLTRSHSVGGPLQNIDFTQRPFHGISTVSLPNSLQEVVDPLGKRPNPPPVSVPYLSPLVLRKELESLLENEGDQVIHTSSFINQHPIIFWNLVWYFRRLDLPSNLPGLILTSEHCNEGVQLPLSSLSQDSKLVYIQLLWDNINLHQEPREPLYVSWRNFNSEKKSSLLSEEQQETSTLVETIRQSIQHNNVLKPINLLSQQMKPGMKRQRGI

SEQ ID NO: 23824 - protein, 378 aa, Homo sapiens
  Payload ID: 4761
  Gene Symbol: DENND4C
  Gene Name: DENN/MADD domain containing 4C
  ENSP ID: ENSP00000473273
  MOD_RES (1)..(1): Any amino acid
XDVPLFCLPMGATIECWDPETKYPLPVFSTFVLTGSSAKKVYGAAIQFYEPYSRELLSEKQLMHLGLLTPVERKMVSKSINTNKCICLLSHWPFFEAFRKFLMFIYKLSVSGPHPLPIEKHISHFMQNIPFPSPQRPRILVQLSVHDALILSQPVSTPLPLSGANFSTLLMNLGPENCATLLLFVLLESKILLHSLRPAVLTGVAEAVVAMIFPFQWQCPYIPLCPLSLAAVLSAPLPFIVGVDSRYFDLHDPPQDVVCIDLDTNMLYVSDEKKNMNWKQLPKKPCKNLLSTLKKLYPQLSSVHQKTQEGSAIDMTPIEADFSWQKKMTQLEMEIQEAFLRFMASILKGYRTYLRPITEAPSNKATAADSLFDRQVVS

SEQ ID NO: 23825 - protein, 1958 aa, Homo sapiens
  Payload ID: 4761
  Gene Symbol: DENND4C
  Gene Name: DENN/MADD domain containing 4C
  ENSP ID: ENSP00000473469
MIEDKGPRVTDYFVVAGLTDTSTLLDQEINRLDTKSTGPKAPITDIAIIIKSAGETVPEGYTCVEATPSALQANLNYGSLKSPELFLCYKRGRDKPPLTDIGVLYEGKERLIPGCEVILATPYGRCANVNNSSTTSQRIFITYRRAPPVRPQNSLAVTDICVIVTSKGETPPHTFCKVDKNLNCGMWGSSVFLCYKKSVPASNAIAYKAGLIFRYPEEDYESFPLSESDVPLFCLPMGATIECWDPETKYPLPVFSTFVLTGSSAKKVYGAAIQFYEPYSRELLSEKQLMHLGLLTPVERKMVSKSINTNKCICLLSHWPFFEAFRKFLMFIYKLSVSGPHPLPIEKHISHFMQNIPFPSPQRPRILVQLSVHDALILSQPVSTPLPLSGANFSTLLMNLGPENCATLLLFVLLESKILLHSLRPAVLTGVAEAVVAMIFPFQWQCPYIPLCPLSLAAVLSAPLPFIVGVDSRYFDLHDPPQDVVCIDLDTNMLYVSDEKKNMNWKQLPKKPCKNLLSTLKKLYPQLSSVHQKTQEGSAIDMTPIEADFSWQKKMTQLEMEIQEAFLRFMASILKGYRTYLRPITEAPSNKATAADSLFDRQGFLKSRDRAYAKFYTLLSKTQIFIRFIEECSFVSDKDTGLAFFDDCIEKLFPDKGTEKTDKVDFDSAEDTRLIELDDSQKSEHTVFIMPPEPPPDDGKDLSPKYSYKYFPRLDLKLFDRPQELKLCFSRHPTGNSITKSPPLMAKRTKQEIKTAHKLAKRCYTNPPQWAKCLFSHCYSLWFICLPAYVRVSHPKVRALQQAYDVLIKMRKTDVDPLDEVCYRVVMQLCGLWGHPVLAVRVLFEMKTARIKPNAITYGYYNKVVLESPWPSSTRSGIFLWTKVRNVVRGLAQFRQPLKKTVQRSQVSSISALQNVTGGSDGDTVSHGSVDSSNDANNGEHTVFVRDLIRLESIDNHSSTGGQSDQGYGSKDELIKDDAEIHVPEEQAARELITKTKMQTEEVCDASAIVAKHSQPSPEPHSPTEPPAWGSSIVKVPSGIFDVNSRKSSTGSISNVLFSTQDPVEDAVFGEATNLKKNGDRGEKRQKHFPERSCSFSSESRAGMLLKKSSLDSNSSEMAIMMGADAKILTAALTCPKTSLLHIARTHSFENVSCHLPDSRTCMSESTWNPEHRSSPVPEMLEESQELLEPVVDDVPKTTATVDTYESLLSDSNSNQSRDLKTVSKDLRNKRSSLYGIAKVVQREDVETGLDPLSLLATECTGGKTPDSEDKLFSPVIARNLADEIESYMNLKSPLGSKSSSMELHREENRESGMTTAFIHALERRSSLPLDHGSPAQENPESEKSSPAVSRSKTFTGRFKQQTPSRTHKERSTSLSALVRSSPHGSLGSVVNSLSGLKLDNILSGPKIDVLKSGMKQAATVASKMWVAVASAYSYSDDEEETNRDYSFPAGLEDHILGENISPNTSISGLVPSELTQSNTSLGSSSSSGDVGKLHYPTGEVPFPRGMKGQDFEKSDHGSSQNTSMSSIYQNCAMEVLMSSCSQCRACGALVYDEEIMAGWTADDSNLNTACPFCKSNFLPLLNIEFKDLRGSASFFLKPSTSGDSLQSGSIPLANESLEHKPVSSLAEPDLINFMDFPKHNQIITEETGSAVEPSDEIKRASGDVQTMKISSVPNSLSKRNVSLTRSHSVGGPLQNIDFTQRPFHGISTVSLPNSLQEVVDPLGKRPNPPPVSVPYLSPLVLRKELESLLENEGDQVIHTSSFINQHPIIFWNLVWYFRRLDLPSNLPGLILTSEHCNEGVQLPLSSLSQDSKLVYIQLLWDNINLHQEPREPLYVSWRNFNSEKKSSLLSEEQQETSTLVETIRQSIQHNNVLKPINLLSQQMKPGMKRQRSLYREILFLSLVSLGRENIDIEAFDNEYGIAYNSLSSEILERLQKIDAPPSASVEWCRKCFGAPLI

SEQ ID NO: 23826 - protein, 1909 aa, Homo sapiens
  Payload ID: 4761
  Gene Symbol: DENND4C
  Gene Name: DENN/MADD domain containing 4C
  ENSP ID: ENSP00000473565
MIEDKGPRVTDYFVVAGLTDTSTLLDQEINRLDTKSTGPKAPITDIAIIIKSAGETVPEGYTCVEATPSALQANLNYGSLKSPELFLCYKRGRDKPPLTDIGVLYEGKERLIPGCEVILATPYGRCANVNNSSTTSQRIFITYRRAPPVRPQNSLAVTDICVIVTSKGETPPHTFCKVDKNLNCGMWGSSVFLCYKKSVPASNAIAYKAGLIFRYPEEDYESFPLSESDVPLFCLPMGATIECWDPETKYPLPVFSTFVLTGSSAKKVYGAAIQFYEPYSRELLSEKQLMHLGLLTPVERKMVSKSINTNKCICLLSHWPFFEAFRKFLMFIYKLSVSGPHPLPIEKHISHFMQNIPFPSPQRPRILVQLSVHDALILSQPVSTPLPLSGANFSTLLMNLGPENCATLLLFVLLESKILLHSLRPAVLTGVAEAVVAMIFPFQWQCPYIPLCPLSLAAVLSAPLPFIVGVDSRYFDLHDPPQDVVCIDLDTNMLYVSDEKKNMNWKQLPKKPCKNLLSTLKKLYPQLSSVHQKTQEGSAIDMTPIEADFSWQKKMTQLEMEIQEAFLRFMASILKGYRTYLRPITEAPSNKATAADSLFDRQGFLKSRDRAYAKFYTLLSKTQIFIRFIEECSFVSDKDTGLAFFDDCIEKLFPDKGTEKTDKVDFDSAEDTRLIELDDSQKSEHTVFIMPPEPPPDDGKDLSPKYSYKYFPRLDLKLFDRPQELKLCFSRHPTGNSITKSPPLMAKRTKQEIKTAHKLAKRCYTNPPQWAKCLFSHCYSLWFICLPAYVRVSHPKVRALQQAYDVLIKMRKTDVDPLDEVCYRVVMQLCGLWGHPVLAVRVLFEMKTARIKPNAITYGYYNKVVLESPWPSSTRSGIFLWTKVRNVVRGLAQFRQPLKKTVQRSQVSSISGGQSDQGYGSKDELIKDDAEIHVPEEQAARELITKTKMQTEEVCDASAIVAKHSQPSPEPHSPTEPPAWGSSIVKVPSGIFDVNSRKSSTGSISNVLFSTQDPVEDAVFGEATNLKKNGDRGEKRQKHFPERSCSFSSESRAGMLLKKSSLDSNSSEMAIMMGADAKILTAALTCPKTSLLHIARTHSFENVSCHLPDSRTCMSESTWNPEHRSSPVPEMLEESQELLEPVVDDVPKTTATVDTYESLLSDSNSNQSRDLKTVSKDLRNKRSSLYGIAKVVQREDVETGLDPLSLLATECTGGKTPDSEDKLFSPVIARNLADEIESYMNLKSPLGSKSSSMELHREENRESGMTTAFIHALERRSSLPLDHGSPAQENPESEKSSPAVSRSKTFTGRFKQQTPSRTHKERSTSLSALVRSSPHGSLGSVVNSLSGLKLDNILSGPKIDVLKSGMKQAATVASKMWVAVASAYSYSDDEEETNRDYSFPAGLEDHILGENISPNTSISGLVPSELTQSNTSLGSSSSSGDVGKLHYPTGEVPFPRGMKGQDFEKSDHGSSQNTSMSSIYQNCAMEVLMSSCSQCRACGALVYDEEIMAGWTADDSNLNTACPFCKSNFLPLLNIEFKDLRGSASFFLKPSTSGDSLQSGSIPLANESLEHKPVSSLAEPDLINFMDFPKHNQIITEETGSAVEPSDEIKRASGDVQTMKISSVPNSLSKRNVSLTRSHSVGGPLQNIDFTQRPFHGISTVSLPNSLQEVVDPLGKRPNPPPVSVPYLSPLVLRKELESLLENEGDQVIHTSSFINQHPIIFWNLVWYFRRLDLPSNLPGLILTSEHCNEGVQLPLSSLSQDSKLVYIQLLWDNINLHQEPREPLYVSWRNFNSEKKSSLLSEEQQETSTLVETIRQSIQHNNVLKPINLLSQQMKPGMKRQRSLYREILFLSLVSLGRENIDIEAFDNEYGIAYNSLSSEILERLQKIDAPPSASVEWCRKCFGAPLI

SEQ ID NO: 23827 - protein, 1287 aa, Homo sapiens
  Payload ID: 4762
  Gene Symbol: DENND5A
  Gene Name: DENN/MADD domain containing 5A
  Uniprot ID: Q6IQ26
  ENSP ID: ENSP00000328524
MSGGGGGGGSAPSRFADYFVICGLDTETGLEPDELSALCQYIQASKARDGASPFISSTTEGENFEQTPLRRTFKSKVLARYPENVEWNPFDQDAVGMLCMPKGLAFKTQADPREPQFHAFIITREDGSRTFGFALTFYEEVTSKQICSAMQTLYHMHNAEYDVLHAPPADDRDQSSMEDGEDTPVTKLQRFNSYDISRDTLYVSKCICLITPMSFMKACRSVLEQLHQAVTSPQPPPLPLESYIYNVLYEVPLPPPGRSLKFSGVYGPIICQRPSTNELPLFDFPVKEVFELLGVENVFQLFTCALLEFQILLYSQHYQRLMTVAETITALMFPFQWQHVYVPILPASLLHFLDAPVPYLMGLHSNGLDDRSKLELPQEANLCFVDIDNHFIELPEDLPQFPNKLEFVQEVSEILMAFGIPPEGNLHCSESASKLKRLRASELVSDKRNGNIAGSPLHSYELLKENETIARLQALVKRTGVSLEKLEVREDPSSNKDLKVQCDEEELRIYQLNIQIREVFANRFTQMFADYEVFVIQPSQDKESWFTNREQMQNFDKASFLSDQPEPYLPFLSRFLETQMFASFIDNKIMCHDDDDKDPVLRVFDSRVDKIRLLNVRTPTLRTSMYQKCTTVDEAEKAIELRLAKIDHTAIHPHLLDMKIGQGKYEPGFFPKLQSDVLSTGPASNKWTKRNAPAQWRRKDRQKQHTEHLRLDNDQREKYIQEARTMGSTIRQPKLSNLSPSVIAQTNWKFVEGLLKECRNKTKRMLVEKMGREAVELGHGEVNITGVEENTLIASLCDLLERIWSHGLQVKQGKSALWSHLLHYQDNRQRKLTSGSLSTSGILLDSERRKSDASSLMPPLRISLIQDMRHIQNIGEIKTDVGKARAWVRLSMEKKLLSRHLKQLLSDHELTKKLYKRYAFLRCDDEKEQFLYHLLSFNAVDYFCFTNVFTTILIPYHILIVPSKKLGGSMFTANPWICISGELGETQIMQIPRNVLEMTFECQNLGKLTTVQIGHDNSGLYAKWLVEYVMVRNEITGHTYKFPCGRWLGKGMDDGSLERILVGELLTSQPEVDERPCRTPPLQQSPSVIRRLVTISPNNKPKLNTGQIQESIGEAVNGIVKHFHKPEKERGSLTLLLCGECGLVSALEQAFQHGFKSPRLFKNVFIWDFLEKAQTYYETLEKNEVVPEENWHTRARNFCRFVTAINNTPRNIGKDGKFQMLVCLGARDHLLHHWIALLADCPITAHMYEDVALIKDHTLVNSLIRVLQTLQEFNITLETSLVKGIDI

SEQ ID NO: 23828 - protein, 189 aa, Homo sapiens
  Payload ID: 4762
  Gene Symbol: DENND5A
  Gene Name: DENN/MADD domain containing 5A
  ENSP ID: ENSP00000432428
  MOD_RES (1)..(1): Any amino acid
XQDNRQRKLTSGSLSTSERRKSDASSLMPPLRISLIQDMRHIQNIGEIKTDVGKARAWVRLSMEKKLLSRHLKQLLSDHELTKKLYKRYAFLRCDDEKEQFLYHLLSFNAVDYFCFTNVFTTILIPYHILIVPSKKLGGSMFTANPWICISGELGETQIMQIPRNVLEMTFECQNLGKLTTVQIGHDNS

SEQ ID NO: 23829 - protein, 261 aa, Homo sapiens
  Payload ID: 4762
  Gene Symbol: DENND5A
  Gene Name: DENN/MADD domain containing 5A
  ENSP ID: ENSP00000433483
  MOD_RES (1)..(1): Any amino acid
XIPYHILIVPSKKLGGSMFTANPWICISGELGETQIMQIPRNVLEMTFECQNLGKLTTVQIGHDNSGLYAKWLVEYVMVRNEITGHTYKFPCGRWLGKGMDDGSLERILVGELLTSQPEVDERPCRTPPLQQSPSVIRRLVTISPNNKPKKAQTYYETLEKNEVVPEENWHTRARNFCRFVTAINNTPRNIGKDGKFQMLVCLGARDHLLHHWIALLADCPITAHMYEDVALIKDHTLVNSLIRVLQTLQEFNITLETSLV
